United States Patent Application Publication US 2014/0004565 A1 - sequence listing, part 115

SEQ ID NO: 2879356 - RNA, 19 nt, Artificial Sequence
  Description of Artificial Sequence: Synthetic oligonucleotide
guuagaguccuggauccaa

SEQ ID NO: 2879357 - RNA, 19 nt, Artificial Sequence
  Description of Artificial Sequence: Synthetic oligonucleotide
cucccggagauugcuguag

SEQ ID NO: 2879358 - RNA, 19 nt, Artificial Sequence
  Description of Artificial Sequence: Synthetic oligonucleotide
gagauugcuguagucggcu

SEQ ID NO: 2879359 - RNA, 19 nt, Artificial Sequence
  Description of Artificial Sequence: Synthetic oligonucleotide
agucggggcgcgugaucgg

SEQ ID NO: 2879360 - RNA, 19 nt, Artificial Sequence
  Description of Artificial Sequence: Synthetic oligonucleotide
caucccuggccccagcaca

SEQ ID NO: 2879361 - RNA, 19 nt, Artificial Sequence
  Description of Artificial Sequence: Synthetic oligonucleotide
aggcgggcuuucgacggcc

SEQ ID NO: 2879362 - RNA, 19 nt, Artificial Sequence
  Description of Artificial Sequence: Synthetic oligonucleotide
gcagcaucccaaaaugcac

SEQ ID NO: 2879363 - RNA, 19 nt, Artificial Sequence
  Description of Artificial Sequence: Synthetic oligonucleotide
ucggacgugccugcagagc

SEQ ID NO: 2879364 - RNA, 19 nt, Artificial Sequence
  Description of Artificial Sequence: Synthetic oligonucleotide
acuucuuggggaacgcuua

SEQ ID NO: 2879365 - RNA, 19 nt, Artificial Sequence
  Description of Artificial Sequence: Synthetic oligonucleotide
gacgugccugcagagccug

SEQ ID NO: 2879366 - RNA, 19 nt, Artificial Sequence
  Description of Artificial Sequence: Synthetic oligonucleotide
cagcuuccacucccggagg

SEQ ID NO: 2879367 - RNA, 19 nt, Artificial Sequence
  Description of Artificial Sequence: Synthetic oligonucleotide
gagaccguugccugugccu

SEQ ID NO: 2879368 - RNA, 19 nt, Artificial Sequence
  Description of Artificial Sequence: Synthetic oligonucleotide
gcuuagagacaccgccucc

SEQ ID NO: 2879369 - RNA, 19 nt, Artificial Sequence
  Description of Artificial Sequence: Synthetic oligonucleotide
gugugcagugagggcaagg

SEQ ID NO: 2879370 - RNA, 19 nt, Artificial Sequence
  Description of Artificial Sequence: Synthetic oligonucleotide
accuccgagcgcagggcgc

SEQ ID NO: 2879371 - RNA, 19 nt, Artificial Sequence
  Description of Artificial Sequence: Synthetic oligonucleotide
ggggcucggucucuaaaug

SEQ ID NO: 2879372 - RNA, 19 nt, Artificial Sequence
  Description of Artificial Sequence: Synthetic oligonucleotide
cagccucugccacuucuug

SEQ ID NO: 2879373 - RNA, 19 nt, Artificial Sequence
  Description of Artificial Sequence: Synthetic oligonucleotide
ggguugugggucucugcag

SEQ ID NO: 2879374 - RNA, 19 nt, Artificial Sequence
  Description of Artificial Sequence: Synthetic oligonucleotide
accguugccugugccucgg

SEQ ID NO: 2879375 - RNA, 19 nt, Artificial Sequence
  Description of Artificial Sequence: Synthetic oligonucleotide
augacagccucugccacuu

SEQ ID NO: 2879376 - RNA, 19 nt, Artificial Sequence
  Description of Artificial Sequence: Synthetic oligonucleotide
ucggggcgcgugaucggcc

SEQ ID NO: 2879377 - RNA, 19 nt, Artificial Sequence
  Description of Artificial Sequence: Synthetic oligonucleotide
ggagauugcuguagucggc

SEQ ID NO: 2879378 - RNA, 19 nt, Artificial Sequence
  Description of Artificial Sequence: Synthetic oligonucleotide
gaucggccggucgaggcuc

SEQ ID NO: 2879379 - RNA, 19 nt, Artificial Sequence
  Description of Artificial Sequence: Synthetic oligonucleotide
agcggcccgagcagcuucc

SEQ ID NO: 2879380 - RNA, 19 nt, Artificial Sequence
  Description of Artificial Sequence: Synthetic oligonucleotide
ucucccggagauugcugua

SEQ ID NO: 2879381 - RNA, 19 nt, Artificial Sequence
  Description of Artificial Sequence: Synthetic oligonucleotide
ggcgcgacgagcgggcugg

SEQ ID NO: 2879382 - RNA, 19 nt, Artificial Sequence
  Description of Artificial Sequence: Synthetic oligonucleotide
ugcagagccugggcccggg

SEQ ID NO: 2879383 - RNA, 19 nt, Artificial Sequence
  Description of Artificial Sequence: Synthetic oligonucleotide
acgcuuagagacaccgccu

SEQ ID NO: 2879384 - RNA, 19 nt, Artificial Sequence
  Description of Artificial Sequence: Synthetic oligonucleotide
gaggcgggcuuucgacggc

SEQ ID NO: 2879385 - RNA, 19 nt, Artificial Sequence
  Description of Artificial Sequence: Synthetic oligonucleotide
cagagccugggcccgggug

SEQ ID NO: 2879386 - RNA, 19 nt, Artificial Sequence
  Description of Artificial Sequence: Synthetic oligonucleotide
acaccuucgcucgcagcug

SEQ ID NO: 2879387 - RNA, 19 nt, Artificial Sequence
  Description of Artificial Sequence: Synthetic oligonucleotide
ccgagcagcuuccacuccc

SEQ ID NO: 2879388 - RNA, 19 nt, Artificial Sequence
  Description of Artificial Sequence: Synthetic oligonucleotide
ggucucuaaaugucagucu

SEQ ID NO: 2879389 - RNA, 19 nt, Artificial Sequence
  Description of Artificial Sequence: Synthetic oligonucleotide
uccgagcgcagggcgcagg

SEQ ID NO: 2879390 - RNA, 19 nt, Artificial Sequence
  Description of Artificial Sequence: Synthetic oligonucleotide
ucgcagcuggguugugggu

SEQ ID NO: 2879391 - RNA, 19 nt, Artificial Sequence
  Description of Artificial Sequence: Synthetic oligonucleotide
ggagaccguugccugugcc

SEQ ID NO: 2879392 - RNA, 19 nt, Artificial Sequence
  Description of Artificial Sequence: Synthetic oligonucleotide
gagacaccgccuccaccuc

SEQ ID NO: 2879393 - RNA, 19 nt, Artificial Sequence
  Description of Artificial Sequence: Synthetic oligonucleotide
ggcuggcucauaggcaggg

SEQ ID NO: 2879394 - RNA, 19 nt, Artificial Sequence
  Description of Artificial Sequence: Synthetic oligonucleotide
cggacgugccugcagagcc

SEQ ID NO: 2879395 - RNA, 19 nt, Artificial Sequence
  Description of Artificial Sequence: Synthetic oligonucleotide
ggacaggcuggacaccuuc

SEQ ID NO: 2879396 - RNA, 19 nt, Artificial Sequence
  Description of Artificial Sequence: Synthetic oligonucleotide
ggggaacgcuuagagacac

SEQ ID NO: 2879397 - RNA, 19 nt, Artificial Sequence
  Description of Artificial Sequence: Synthetic oligonucleotide
ggcucggucucuaaauguc

SEQ ID NO: 2879398 - RNA, 19 nt, Artificial Sequence
  Description of Artificial Sequence: Synthetic oligonucleotide
uccacucccggagggcgga

SEQ ID NO: 2879399 - RNA, 19 nt, Artificial Sequence
  Description of Artificial Sequence: Synthetic oligonucleotide
caggcagccuccgcgcgcc

SEQ ID NO: 2879400 - RNA, 19 nt, Artificial Sequence
  Description of Artificial Sequence: Synthetic oligonucleotide
caaaggcagcaucccaaaa

SEQ ID NO: 2879401 - RNA, 19 nt, Artificial Sequence
  Description of Artificial Sequence: Synthetic oligonucleotide
ugggcccgggugugcagug

SEQ ID NO: 2879402 - RNA, 19 nt, Artificial Sequence
  Description of Artificial Sequence: Synthetic oligonucleotide
ucgacggccggagaccguu

SEQ ID NO: 2879403 - RNA, 19 nt, Artificial Sequence
  Description of Artificial Sequence: Synthetic oligonucleotide
cccgggugugcagugaggg

SEQ ID NO: 2879404 - RNA, 19 nt, Artificial Sequence
  Description of Artificial Sequence: Synthetic oligonucleotide
ucucugcagcggcccgagc

SEQ ID NO: 2879405 - RNA, 19 nt, Artificial Sequence
  Description of Artificial Sequence: Synthetic oligonucleotide
agucucccggagauugcug

SEQ ID NO: 2879406 - RNA, 19 nt, Artificial Sequence
  Description of Artificial Sequence: Synthetic oligonucleotide
ucgcucgcagcuggguugu

SEQ ID NO: 2879407 - RNA, 19 nt, Artificial Sequence
  Description of Artificial Sequence: Synthetic oligonucleotide
gugccucggacgugccugc

SEQ ID NO: 2879408 - RNA, 19 nt, Artificial Sequence
  Description of Artificial Sequence: Synthetic oligonucleotide
gggcagaugacagccucug

SEQ ID NO: 2879409 - RNA, 19 nt, Artificial Sequence
  Description of Artificial Sequence: Synthetic oligonucleotide
cagagcggaucuuguggga

SEQ ID NO: 2879410 - RNA, 19 nt, Artificial Sequence
  Description of Artificial Sequence: Synthetic oligonucleotide
agccuccgcgcgccgugcg

SEQ ID NO: 2879411 - RNA, 19 nt, Artificial Sequence
  Description of Artificial Sequence: Synthetic oligonucleotide
agggcagaugacagccucu

SEQ ID NO: 2879412 - RNA, 19 nt, Artificial Sequence
  Description of Artificial Sequence: Synthetic oligonucleotide
uucgacggccggagaccgu

SEQ ID NO: 2879413 - RNA, 19 nt, Artificial Sequence
  Description of Artificial Sequence: Synthetic oligonucleotide
gucggcuggcucauaggca

SEQ ID NO: 2879414 - RNA, 19 nt, Artificial Sequence
  Description of Artificial Sequence: Synthetic oligonucleotide
gucggggcgcgugaucggc

SEQ ID NO: 2879415 - RNA, 19 nt, Artificial Sequence
  Description of Artificial Sequence: Synthetic oligonucleotide
uugcuguagucggcuggcu

SEQ ID NO: 2879416 - RNA, 19 nt, Artificial Sequence
  Description of Artificial Sequence: Synthetic oligonucleotide
cuugugggacaggcuggac

SEQ ID NO: 2879417 - RNA, 19 nt, Artificial Sequence
  Description of Artificial Sequence: Synthetic oligonucleotide
cggaucuugugggacaggc

SEQ ID NO: 2879418 - RNA, 19 nt, Artificial Sequence
  Description of Artificial Sequence: Synthetic oligonucleotide
cggucucuaaaugucaguc

SEQ ID NO: 2879419 - RNA, 19 nt, Artificial Sequence
  Description of Artificial Sequence: Synthetic oligonucleotide
aucccaaaaugcaccccau

SEQ ID NO: 2879420 - RNA, 19 nt, Artificial Sequence
  Description of Artificial Sequence: Synthetic oligonucleotide
caccgccuccaccuccgag

SEQ ID NO: 2879421 - RNA, 19 nt, Artificial Sequence
  Description of Artificial Sequence: Synthetic oligonucleotide
gugggucucugcagcggcc

SEQ ID NO: 2879422 - RNA, 19 nt, Artificial Sequence
  Description of Artificial Sequence: Synthetic oligonucleotide
ggacaccuucgcucgcagc

SEQ ID NO: 2879423 - RNA, 19 nt, Artificial Sequence
  Description of Artificial Sequence: Synthetic oligonucleotide
ccucugccacuucuugggg

SEQ ID NO: 2879424 - RNA, 19 nt, Artificial Sequence
  Description of Artificial Sequence: Synthetic oligonucleotide
gcucgcagcuggguugugg

SEQ ID NO: 2879425 - RNA, 19 nt, Artificial Sequence
  Description of Artificial Sequence: Synthetic oligonucleotide
ggccggagaccguugccug

SEQ ID NO: 2879426 - RNA, 19 nt, Artificial Sequence
  Description of Artificial Sequence: Synthetic oligonucleotide
ccuggauccaaaggcagca

SEQ ID NO: 2879427 - RNA, 19 nt, Artificial Sequence
  Description of Artificial Sequence: Synthetic oligonucleotide
cacuucuuggggaacgcuu

SEQ ID NO: 2879428 - RNA, 19 nt, Artificial Sequence
  Description of Artificial Sequence: Synthetic oligonucleotide
ggcccgggugugcagugag

SEQ ID NO: 2879429 - RNA, 19 nt, Artificial Sequence
  Description of Artificial Sequence: Synthetic oligonucleotide
gcggaggcgggcuuucgac

SEQ ID NO: 2879430 - RNA, 19 nt, Artificial Sequence
  Description of Artificial Sequence: Synthetic oligonucleotide
gggucucugcagcggcccg

SEQ ID NO: 2879431 - RNA, 19 nt, Artificial Sequence
  Description of Artificial Sequence: Synthetic oligonucleotide
gggcuuucgacggccggag

SEQ ID NO: 2879432 - RNA, 19 nt, Artificial Sequence
  Description of Artificial Sequence: Synthetic oligonucleotide
aaccuggggcucggucucu

SEQ ID NO: 2879433 - RNA, 19 nt, Artificial Sequence
  Description of Artificial Sequence: Synthetic oligonucleotide
cgagcagcuuccacucccg

SEQ ID NO: 2879434 - RNA, 19 nt, Artificial Sequence
  Description of Artificial Sequence: Synthetic oligonucleotide
gcccgagcagcuuccacuc

SEQ ID NO: 2879435 - RNA, 19 nt, Artificial Sequence
  Description of Artificial Sequence: Synthetic oligonucleotide
cugcagcggcccgagcagc

SEQ ID NO: 2879436 - RNA, 19 nt, Artificial Sequence
  Description of Artificial Sequence: Synthetic oligonucleotide
agggcggaggcgggcuuuc

SEQ ID NO: 2879437 - RNA, 19 nt, Artificial Sequence
  Description of Artificial Sequence: Synthetic oligonucleotide
accuucgcucgcagcuggg

SEQ ID NO: 2879438 - RNA, 19 nt, Artificial Sequence
  Description of Artificial Sequence: Synthetic oligonucleotide
gcucggucucuaaauguca

SEQ ID NO: 2879439 - RNA, 19 nt, Artificial Sequence
  Description of Artificial Sequence: Synthetic oligonucleotide
gagccugggcccgggugug

SEQ ID NO: 2879440 - RNA, 19 nt, Artificial Sequence
  Description of Artificial Sequence: Synthetic oligonucleotide
ccuggccccagcacauccc

SEQ ID NO: 2879441 - RNA, 19 nt, Artificial Sequence
  Description of Artificial Sequence: Synthetic oligonucleotide
gccugugccucggacgugc

SEQ ID NO: 2879442 - RNA, 19 nt, Artificial Sequence
  Description of Artificial Sequence: Synthetic oligonucleotide
cuggacaccuucgcucgca

SEQ ID NO: 2879443 - RNA, 19 nt, Artificial Sequence
  Description of Artificial Sequence: Synthetic oligonucleotide
cagcggcccgagcagcuuc

SEQ ID NO: 2879444 - RNA, 19 nt, Artificial Sequence
  Description of Artificial Sequence: Synthetic oligonucleotide
ccugcagagccugggcccg

SEQ ID NO: 2879445 - RNA, 19 nt, Artificial Sequence
  Description of Artificial Sequence: Synthetic oligonucleotide
ugucagucucccggagauu

SEQ ID NO: 2879446 - RNA, 19 nt, Artificial Sequence
  Description of Artificial Sequence: Synthetic oligonucleotide
agccugggcccgggugugc

SEQ ID NO: 2879447 - RNA, 19 nt, Artificial Sequence
  Description of Artificial Sequence: Synthetic oligonucleotide
cuggggcucggucucuaaa

SEQ ID NO: 2879448 - RNA, 19 nt, Artificial Sequence
  Description of Artificial Sequence: Synthetic oligonucleotide
cacgagucggggcgcguga

SEQ ID NO: 2879449 - RNA, 19 nt, Artificial Sequence
  Description of Artificial Sequence: Synthetic oligonucleotide
cccuggccccagcacaucc

SEQ ID NO: 2879450 - RNA, 19 nt, Artificial Sequence
  Description of Artificial Sequence: Synthetic oligonucleotide
ccaaaggcagcaucccaaa

SEQ ID NO: 2879451 - RNA, 19 nt, Artificial Sequence
  Description of Artificial Sequence: Synthetic oligonucleotide
cgcuuagagacaccgccuc

SEQ ID NO: 2879452 - RNA, 19 nt, Artificial Sequence
  Description of Artificial Sequence: Synthetic oligonucleotide
gcgggcuuucgacggccgg

SEQ ID NO: 2879453 - RNA, 19 nt, Artificial Sequence
  Description of Artificial Sequence: Synthetic oligonucleotide
gcaggcagccuccgcgcgc

SEQ ID NO: 2879454 - RNA, 19 nt, Artificial Sequence
  Description of Artificial Sequence: Synthetic oligonucleotide
gccacuucuuggggaacgc

SEQ ID NO: 2879455 - RNA, 19 nt, Artificial Sequence
  Description of Artificial Sequence: Synthetic oligonucleotide
gggcucggucucuaaaugu

SEQ ID NO: 2879456 - RNA, 19 nt, Artificial Sequence
  Description of Artificial Sequence: Synthetic oligonucleotide
gcuuccacucccggagggc

SEQ ID NO: 2879457 - RNA, 19 nt, Artificial Sequence
  Description of Artificial Sequence: Synthetic oligonucleotide
cugccacuucuuggggaac

SEQ ID NO: 2879458 - RNA, 19 nt, Artificial Sequence
  Description of Artificial Sequence: Synthetic oligonucleotide
gcgcgugaucggccggucg

SEQ ID NO: 2879459 - RNA, 19 nt, Artificial Sequence
  Description of Artificial Sequence: Synthetic oligonucleotide
gcuggguugugggucucug

SEQ ID NO: 2879460 - RNA, 19 nt, Artificial Sequence
  Description of Artificial Sequence: Synthetic oligonucleotide
cuccgcgcgccgugcgccc

SEQ ID NO: 2879461 - RNA, 19 nt, Artificial Sequence
  Description of Artificial Sequence: Synthetic oligonucleotide
gguuagaguccuggaucca

SEQ ID NO: 2879462 - RNA, 19 nt, Artificial Sequence
  Description of Artificial Sequence: Synthetic oligonucleotide
gccucggacgugccugcag

SEQ ID NO: 2879463 - RNA, 19 nt, Artificial Sequence
  Description of Artificial Sequence: Synthetic oligonucleotide
caggcuggacaccuucgcu

SEQ ID NO: 2879464 - RNA, 19 nt, Artificial Sequence
  Description of Artificial Sequence: Synthetic oligonucleotide
ugccugugccucggacgug

SEQ ID NO: 2879465 - RNA, 19 nt, Artificial Sequence
  Description of Artificial Sequence: Synthetic oligonucleotide
ccgggugugcagugagggc

SEQ ID NO: 2879466 - RNA, 19 nt, Artificial Sequence
  Description of Artificial Sequence: Synthetic oligonucleotide
cccggagauugcuguaguc

SEQ ID NO: 2879467 - RNA, 19 nt, Artificial Sequence
  Description of Artificial Sequence: Synthetic oligonucleotide
uguagucggcuggcucaua

SEQ ID NO: 2879468 - RNA, 19 nt, Artificial Sequence
  Description of Artificial Sequence: Synthetic oligonucleotide
gcuggacaccuucgcucgc

SEQ ID NO: 2879469 - RNA, 19 nt, Artificial Sequence
  Description of Artificial Sequence: Synthetic oligonucleotide
ccccagagcggaucuugug

SEQ ID NO: 2879470 - RNA, 19 nt, Artificial Sequence
  Description of Artificial Sequence: Synthetic oligonucleotide
cugcagagccugggcccgg

SEQ ID NO: 2879471 - RNA, 19 nt, Artificial Sequence
  Description of Artificial Sequence: Synthetic oligonucleotide
gcagccuccgcgcgccgug

SEQ ID NO: 2879472 - RNA, 19 nt, Artificial Sequence
  Description of Artificial Sequence: Synthetic oligonucleotide
aggcagccuccgcgcgccg

SEQ ID NO: 2879473 - RNA, 19 nt, Artificial Sequence
  Description of Artificial Sequence: Synthetic oligonucleotide
ugccucggacgugccugca

SEQ ID NO: 2879474 - RNA, 19 nt, Artificial Sequence
  Description of Artificial Sequence: Synthetic oligonucleotide
ggugugcagugagggcaag

SEQ ID NO: 2879475 - RNA, 19 nt, Artificial Sequence
  Description of Artificial Sequence: Synthetic oligonucleotide
accccaucccuggccccag

SEQ ID NO: 2879476 - RNA, 19 nt, Artificial Sequence
  Description of Artificial Sequence: Synthetic oligonucleotide
ccucggacgugccugcaga

SEQ ID NO: 2879477 - RNA, 19 nt, Artificial Sequence
  Description of Artificial Sequence: Synthetic oligonucleotide
gggaacgcuuagagacacc

SEQ ID NO: 2879478 - RNA, 19 nt, Artificial Sequence
  Description of Artificial Sequence: Synthetic oligonucleotide
acaccgccuccaccuccga

SEQ ID NO: 2879479 - RNA, 19 nt, Artificial Sequence
  Description of Artificial Sequence: Synthetic oligonucleotide
ggggcgcgugaucggccgg

SEQ ID NO: 2879480 - RNA, 19 nt, Artificial Sequence
  Description of Artificial Sequence: Synthetic oligonucleotide
gcagcuggguugugggucu

SEQ ID NO: 2879481 - RNA, 19 nt, Artificial Sequence
  Description of Artificial Sequence: Synthetic oligonucleotide
gcuggcucauaggcagggc

SEQ ID NO: 2879482 - RNA, 19 nt, Artificial Sequence
  Description of Artificial Sequence: Synthetic oligonucleotide
acgagucggggcgcgugau

SEQ ID NO: 2879483 - RNA, 19 nt, Artificial Sequence
  Description of Artificial Sequence: Synthetic oligonucleotide
ccgagcgcagggcgcaggc

SEQ ID NO: 2879484 - RNA, 19 nt, Artificial Sequence
  Description of Artificial Sequence: Synthetic oligonucleotide
gcgugaucggccggucgag

SEQ ID NO: 2879485 - RNA, 19 nt, Artificial Sequence
  Description of Artificial Sequence: Synthetic oligonucleotide
ggcggaggcgggcuuucga

SEQ ID NO: 2879486 - RNA, 19 nt, Artificial Sequence
  Description of Artificial Sequence: Synthetic oligonucleotide
ggcgggcuuucgacggccg

SEQ ID NO: 2879487 - RNA, 19 nt, Artificial Sequence
  Description of Artificial Sequence: Synthetic oligonucleotide
cuucgcucgcagcuggguu

SEQ ID NO: 2879488 - RNA, 19 nt, Artificial Sequence
  Description of Artificial Sequence: Synthetic oligonucleotide
uccgcgcgccgugcgcccc

SEQ ID NO: 2879489 - RNA, 19 nt, Artificial Sequence
  Description of Artificial Sequence: Synthetic oligonucleotide
cagucucccggagauugcu

SEQ ID NO: 2879490 - RNA, 19 nt, Artificial Sequence
  Description of Artificial Sequence: Synthetic oligonucleotide
cguugccugugccucggac

SEQ ID NO: 2879491 - RNA, 19 nt, Artificial Sequence
  Description of Artificial Sequence: Synthetic oligonucleotide
ccggagaccguugccugug

SEQ ID NO: 2879492 - RNA, 19 nt, Artificial Sequence
  Description of Artificial Sequence: Synthetic oligonucleotide
gcacgagucggggcgcgug

SEQ ID NO: 2879493 - RNA, 19 nt, Artificial Sequence
  Description of Artificial Sequence: Synthetic oligonucleotide
gcggaucuugugggacagg

SEQ ID NO: 2879494 - RNA, 19 nt, Artificial Sequence
  Description of Artificial Sequence: Synthetic oligonucleotide
ucccuggccccagcacauc

SEQ ID NO: 2879495 - RNA, 19 nt, Artificial Sequence
  Description of Artificial Sequence: Synthetic oligonucleotide
caccccaucccuggcccca

SEQ ID NO: 2879496 - RNA, 19 nt, Artificial Sequence
  Description of Artificial Sequence: Synthetic oligonucleotide
ccugugccucggacgugcc

SEQ ID NO: 2879497 - RNA, 19 nt, Artificial Sequence
  Description of Artificial Sequence: Synthetic oligonucleotide
ccaccuccgagcgcagggc

SEQ ID NO: 2879498 - RNA, 19 nt, Artificial Sequence
  Description of Artificial Sequence: Synthetic oligonucleotide
cagccuccgcgcgccgugc

SEQ ID NO: 2879499 - RNA, 19 nt, Artificial Sequence
  Description of Artificial Sequence: Synthetic oligonucleotide
ggaucuugugggacaggcu

SEQ ID NO: 2879500 - RNA, 19 nt, Artificial Sequence
  Description of Artificial Sequence: Synthetic oligonucleotide
gcaccccaucccuggcccc

SEQ ID NO: 2879501 - RNA, 19 nt, Artificial Sequence
  Description of Artificial Sequence: Synthetic oligonucleotide
cccgagcagcuuccacucc

SEQ ID NO: 2879502 - RNA, 19 nt, Artificial Sequence
  Description of Artificial Sequence: Synthetic oligonucleotide
cggggcgcgugaucggccg

SEQ ID NO: 2879503 - RNA, 19 nt, Artificial Sequence
  Description of Artificial Sequence: Synthetic oligonucleotide
gggcgcgacgagcgggcug

SEQ ID NO: 2879504 - RNA, 19 nt, Artificial Sequence
  Description of Artificial Sequence: Synthetic oligonucleotide
cuccgagcgcagggcgcag

SEQ ID NO: 2879505 - RNA, 19 nt, Artificial Sequence
  Description of Artificial Sequence: Synthetic oligonucleotide
cgugaucggccggucgagg

SEQ ID NO: 2879506 - RNA, 19 nt, Artificial Sequence
  Description of Artificial Sequence: Synthetic oligonucleotide
gcccgggugugcagugagg

SEQ ID NO: 2879507 - RNA, 19 nt, Artificial Sequence
  Description of Artificial Sequence: Synthetic oligonucleotide
ggucucugcagcggcccga

SEQ ID NO: 2879508 - RNA, 19 nt, Artificial Sequence
  Description of Artificial Sequence: Synthetic oligonucleotide
gggcacgagucggggcgcg

SEQ ID NO: 2879509 - RNA, 19 nt, Artificial Sequence
  Description of Artificial Sequence: Synthetic oligonucleotide
gggugugcagugagggcaa

SEQ ID NO: 2879510 - RNA, 19 nt, Artificial Sequence
  Description of Artificial Sequence: Synthetic oligonucleotide
ggcuuucgacggccggaga

SEQ ID NO: 2879511 - RNA, 19 nt, Artificial Sequence
  Description of Artificial Sequence: Synthetic oligonucleotide
ccuccgcgcgccgugcgcc

SEQ ID NO: 2879512 - RNA, 19 nt, Artificial Sequence
  Description of Artificial Sequence: Synthetic oligonucleotide
gcgcagggcgcaggcagcc

SEQ ID NO: 2879513 - RNA, 19 nt, Artificial Sequence
  Description of Artificial Sequence: Synthetic oligonucleotide
cccggagggcggaggcggg

SEQ ID NO: 2879514 - RNA, 19 nt, Artificial Sequence
  Description of Artificial Sequence: Synthetic oligonucleotide
cgcaggcagccuccgcgcg

SEQ ID NO: 2879515 - RNA, 19 nt, Artificial Sequence
  Description of Artificial Sequence: Synthetic oligonucleotide
cggcuggcucauaggcagg

SEQ ID NO: 2879516 - RNA, 19 nt, Artificial Sequence
  Description of Artificial Sequence: Synthetic oligonucleotide
gccuccgcgcgccgugcgc

SEQ ID NO: 2879517 - RNA, 19 nt, Artificial Sequence
  Description of Artificial Sequence: Synthetic oligonucleotide
cgcgugaucggccggucga

SEQ ID NO: 2879518 - RNA, 19 nt, Artificial Sequence
  Description of Artificial Sequence: Synthetic oligonucleotide
gggcggaggcgggcuuucg

SEQ ID NO: 2879519 - RNA, 19 nt, Artificial Sequence
  Description of Artificial Sequence: Synthetic oligonucleotide
cuggauccaaaggcagcau

SEQ ID NO: 2879520 - RNA, 19 nt, Artificial Sequence
  Description of Artificial Sequence: Synthetic oligonucleotide
cugugccucggacgugccu

SEQ ID NO: 2879521 - RNA, 19 nt, Artificial Sequence
  Description of Artificial Sequence: Synthetic oligonucleotide
cccaucccuggccccagca

SEQ ID NO: 2879522 - RNA, 19 nt, Artificial Sequence
  Description of Artificial Sequence: Synthetic oligonucleotide
cuguagucggcuggcucau

SEQ ID NO: 2879523 - RNA, 19 nt, Artificial Sequence
  Description of Artificial Sequence: Synthetic oligonucleotide
ccuccaccuccgagcgcag

SEQ ID NO: 2879524 - RNA, 19 nt, Artificial Sequence
  Description of Artificial Sequence: Synthetic oligonucleotide
cggagaccguugccugugc

SEQ ID NO: 2879525 - RNA, 19 nt, Artificial Sequence
  Description of Artificial Sequence: Synthetic oligonucleotide
gccggagaccguugccugu

SEQ ID NO: 2879526 - RNA, 19 nt, Artificial Sequence
  Description of Artificial Sequence: Synthetic oligonucleotide
ccuccgagcgcagggcgca

SEQ ID NO: 2879527 - RNA, 19 nt, Artificial Sequence
  Description of Artificial Sequence: Synthetic oligonucleotide
cugggcccgggugugcagu

SEQ ID NO: 2879528 - RNA, 19 nt, Artificial Sequence
  Description of Artificial Sequence: Synthetic oligonucleotide
ggacgugccugcagagccu

SEQ ID NO: 2879529 - RNA, 19 nt, Artificial Sequence
  Description of Artificial Sequence: Synthetic oligonucleotide
gagggcggaggcgggcuuu

SEQ ID NO: 2879530 - RNA, 19 nt, Artificial Sequence
  Description of Artificial Sequence: Synthetic oligonucleotide
cgagucggggcgcgugauc

SEQ ID NO: 2879531 - RNA, 19 nt, Artificial Sequence
  Description of Artificial Sequence: Synthetic oligonucleotide
gccugggcccgggugugca

SEQ ID NO: 2879532 - RNA, 19 nt, Artificial Sequence
  Description of Artificial Sequence: Synthetic oligonucleotide
ccggagggcggaggcgggc

SEQ ID NO: 2879533 - RNA, 19 nt, Artificial Sequence
  Description of Artificial Sequence: Synthetic oligonucleotide
ggcgcgugaucggccgguc

SEQ ID NO: 2879534 - RNA, 19 nt, Artificial Sequence
  Description of Artificial Sequence: Synthetic oligonucleotide
gcagggcagaugacagccu

SEQ ID NO: 2879535 - RNA, 19 nt, Artificial Sequence
  Description of Artificial Sequence: Synthetic oligonucleotide
cgacggccggagaccguug

SEQ ID NO: 2879536 - RNA, 19 nt, Artificial Sequence
  Description of Artificial Sequence: Synthetic oligonucleotide
ccuggggcucggucucuaa

SEQ ID NO: 2879537 - RNA, 19 nt, Artificial Sequence
  Description of Artificial Sequence: Synthetic oligonucleotide
cgggcuuucgacggccgga

SEQ ID NO: 2879538 - RNA, 19 nt, Artificial Sequence
  Description of Artificial Sequence: Synthetic oligonucleotide
gggcccgggugugcaguga

SEQ ID NO: 2879539 - RNA, 19 nt, Artificial Sequence
  Description of Artificial Sequence: Synthetic oligonucleotide
cgcgacgagcgggcugggg

SEQ ID NO: 2879540 - RNA, 19 nt, Artificial Sequence
  Description of Artificial Sequence: Synthetic oligonucleotide
cggcccgagcagcuuccac

SEQ ID NO: 2879541 - RNA, 19 nt, Artificial Sequence
  Description of Artificial Sequence: Synthetic oligonucleotide
ccacuucuuggggaacgcu

SEQ ID NO: 2879542 - RNA, 19 nt, Artificial Sequence
  Description of Artificial Sequence: Synthetic oligonucleotide
ccacucccggagggcggag

SEQ ID NO: 2879543 - RNA, 19 nt, Artificial Sequence
  Description of Artificial Sequence: Synthetic oligonucleotide
gcagagccugggcccgggu

SEQ ID NO: 2879544 - RNA, 19 nt, Artificial Sequence
  Description of Artificial Sequence: Synthetic oligonucleotide
gcgcgacgagcgggcuggg

SEQ ID NO: 2879545 - RNA, 19 nt, Artificial Sequence
  Description of Artificial Sequence: Synthetic oligonucleotide
gggcgcgugaucggccggu

SEQ ID NO: 2879546 - RNA, 19 nt, Artificial Sequence
  Description of Artificial Sequence: Synthetic oligonucleotide
ccuucgcucgcagcugggu

SEQ ID NO: 2879547 - RNA, 19 nt, Artificial Sequence
  Description of Artificial Sequence: Synthetic oligonucleotide
ggagggcggaggcgggcuu

SEQ ID NO: 2879548 - RNA, 19 nt, Artificial Sequence
  Description of Artificial Sequence: Synthetic oligonucleotide
cgccuccaccuccgagcgc

SEQ ID NO: 2879549 - RNA, 19 nt, Artificial Sequence
  Description of Artificial Sequence: Synthetic oligonucleotide
gcggcccgagcagcuucca

SEQ ID NO: 2879550 - RNA, 19 nt, Artificial Sequence
  Description of Artificial Sequence: Synthetic oligonucleotide
ggcagccuccgcgcgccgu

SEQ ID NO: 2879551 - RNA, 19 nt, Artificial Sequence
  Description of Artificial Sequence: Synthetic oligonucleotide
ggcacgagucggggcgcgu

SEQ ID NO: 2879552 - RNA, 19 nt, Artificial Sequence
  Description of Artificial Sequence: Synthetic oligonucleotide
gggacaggcuggacaccuu

SEQ ID NO: 2879553 - RNA, 19 nt, Artificial Sequence
  Description of Artificial Sequence: Synthetic oligonucleotide
ccguugccugugccucgga

SEQ ID NO: 2879554 - RNA, 19 nt, Artificial Sequence
  Description of Artificial Sequence: Synthetic oligonucleotide
cggccggagaccguugccu

SEQ ID NO: 2879555 - RNA, 19 nt, Artificial Sequence
  Description of Artificial Sequence: Synthetic oligonucleotide
gcagcggcccgagcagcuu

SEQ ID NO: 2879556 - RNA, 19 nt, Artificial Sequence
  Description of Artificial Sequence: Synthetic oligonucleotide
ggggcgcgacgagcgggcu

SEQ ID NO: 2879557 - RNA, 19 nt, Artificial Sequence
  Description of Artificial Sequence: Synthetic oligonucleotide
cgcucgcagcuggguugug

SEQ ID NO: 2879558 - RNA, 19 nt, Artificial Sequence
  Description of Artificial Sequence: Synthetic oligonucleotide
cgcagggcgcaggcagccu

SEQ ID NO: 2879559 - RNA, 19 nt, Artificial Sequence
  Description of Artificial Sequence: Synthetic oligonucleotide
ccccaaccuggggcucggu

SEQ ID NO: 2879560 - RNA, 19 nt, Artificial Sequence
  Description of Artificial Sequence: Synthetic oligonucleotide
aauuucauaccauugacgg

SEQ ID NO: 2879561 - RNA, 19 nt, Artificial Sequence
  Description of Artificial Sequence: Synthetic oligonucleotide
aauacaccugccuagagcc

SEQ ID NO: 2879562 - RNA, 19 nt, Artificial Sequence
  Description of Artificial Sequence: Synthetic oligonucleotide
ucuccuuugaacuugaugg

SEQ ID NO: 2879563 - RNA, 19 nt, Artificial Sequence
  Description of Artificial Sequence: Synthetic oligonucleotide
aaaguccugauauauagcg

SEQ ID NO: 2879564 - RNA, 19 nt, Artificial Sequence
  Description of Artificial Sequence: Synthetic oligonucleotide
auuaucaucugagaaaucc

SEQ ID NO: 2879565 - RNA, 19 nt, Artificial Sequence
  Description of Artificial Sequence: Synthetic oligonucleotide
aaggaauuccuacuguuac

SEQ ID NO: 2879566 - RNA, 19 nt, Artificial Sequence
  Description of Artificial Sequence: Synthetic oligonucleotide
aauucaucaaaucaguuuu

SEQ ID NO: 2879567 - RNA, 19 nt, Artificial Sequence
  Description of Artificial Sequence: Synthetic oligonucleotide
uuuugugucgaauacaccu

SEQ ID NO: 2879568 - RNA, 19 nt, Artificial Sequence
  Description of Artificial Sequence: Synthetic oligonucleotide
agaaaguccugauauauag

SEQ ID NO: 2879569 - RNA, 19 nt, Artificial Sequence
  Description of Artificial Sequence: Synthetic oligonucleotide
aucauaguacaccuggagc

SEQ ID NO: 2879570 - RNA, 19 nt, Artificial Sequence
  Description of Artificial Sequence: Synthetic oligonucleotide
uauauagcgguuuggauug

SEQ ID NO: 2879571 - RNA, 19 nt, Artificial Sequence
  Description of Artificial Sequence: Synthetic oligonucleotide
auuuagaaaguccugauau

SEQ ID NO: 2879572 - RNA, 19 nt, Artificial Sequence
  Description of Artificial Sequence: Synthetic oligonucleotide
aauaagagcuccccaauca

SEQ ID NO: 2879573 - RNA, 19 nt, Artificial Sequence
  Description of Artificial Sequence: Synthetic oligonucleotide
uuucauaccauugacggcc

SEQ ID NO: 2879574 - RNA, 19 nt, Artificial Sequence
  Description of Artificial Sequence: Synthetic oligonucleotide
guaugcuugaauuucauac

SEQ ID NO: 2879575 - RNA, 19 nt, Artificial Sequence
  Description of Artificial Sequence: Synthetic oligonucleotide
ugauuuagggcucuguaug

SEQ ID NO: 2879576 - RNA, 19 nt, Artificial Sequence
  Description of Artificial Sequence: Synthetic oligonucleotide
uguauugucguuucaauuc

SEQ ID NO: 2879577 - RNA, 19 nt, Artificial Sequence
  Description of Artificial Sequence: Synthetic oligonucleotide
ucauaguacaccuggagca

SEQ ID NO: 2879578 - RNA, 19 nt, Artificial Sequence
  Description of Artificial Sequence: Synthetic oligonucleotide
uugaauuucauaccauuga

SEQ ID NO: 2879579 - RNA, 19 nt, Artificial Sequence
  Description of Artificial Sequence: Synthetic oligonucleotide
uugacggccaggcaaaagg

SEQ ID NO: 2879580 - RNA, 19 nt, Artificial Sequence
  Description of Artificial Sequence: Synthetic oligonucleotide
aauuccuacuguuacgaca

SEQ ID NO: 2879581 - RNA, 19 nt, Artificial Sequence
  Description of Artificial Sequence: Synthetic oligonucleotide
ucguccaccagaauaagag

SEQ ID NO: 2879582 - RNA, 19 nt, Artificial Sequence
  Description of Artificial Sequence: Synthetic oligonucleotide
uuugccacgacaaaccgcu

SEQ ID NO: 2879583 - RNA, 19 nt, Artificial Sequence
  Description of Artificial Sequence: Synthetic oligonucleotide
uuuggauugcuguugaaac

SEQ ID NO: 2879584 - RNA, 19 nt, Artificial Sequence
  Description of Artificial Sequence: Synthetic oligonucleotide
ucuuaauuuugaguggugg

SEQ ID NO: 2879585 - RNA, 19 nt, Artificial Sequence
  Description of Artificial Sequence: Synthetic oligonucleotide
ugaauuucauaccauugac

SEQ ID NO: 2879586 - RNA, 19 nt, Artificial Sequence
  Description of Artificial Sequence: Synthetic oligonucleotide
agaucuuucacauuuggaa

SEQ ID NO: 2879587 - RNA, 19 nt, Artificial Sequence
  Description of Artificial Sequence: Synthetic oligonucleotide
ugucguuucaauucaaccu

SEQ ID NO: 2879588 - RNA, 19 nt, Artificial Sequence
  Description of Artificial Sequence: Synthetic oligonucleotide
cuugauggcaucauaguac

SEQ ID NO: 2879589 - RNA, 19 nt, Artificial Sequence
  Description of Artificial Sequence: Synthetic oligonucleotide
uaugcuugaauuucauacc

SEQ ID NO: 2879590 - RNA, 19 nt, Artificial Sequence
  Description of Artificial Sequence: Synthetic oligonucleotide
auugcuguugaaacgaucg

SEQ ID NO: 2879591 - RNA, 19 nt, Artificial Sequence
  Description of Artificial Sequence: Synthetic oligonucleotide
uuucacauuuggaaaagga

SEQ ID NO: 2879592 - RNA, 19 nt, Artificial Sequence
  Description of Artificial Sequence: Synthetic oligonucleotide
gaagaucuuucacauuugg

SEQ ID NO: 2879593 - RNA, 19 nt, Artificial Sequence
  Description of Artificial Sequence: Synthetic oligonucleotide
uucaauucaaccugaagau

SEQ ID NO: 2879594 - RNA, 19 nt, Artificial Sequence
  Description of Artificial Sequence: Synthetic oligonucleotide
ugagaaauccagacccucg

SEQ ID NO: 2879595 - RNA, 19 nt, Artificial Sequence
  Description of Artificial Sequence: Synthetic oligonucleotide
gaauuucauaccauugacg

SEQ ID NO: 2879596 - RNA, 19 nt, Artificial Sequence
  Description of Artificial Sequence: Synthetic oligonucleotide
auuucauaccauugacggc

SEQ ID NO: 2879597 - RNA, 19 nt, Artificial Sequence
  Description of Artificial Sequence: Synthetic oligonucleotide
uaugagaagggcuccaucu

SEQ ID NO: 2879598 - RNA, 19 nt, Artificial Sequence
  Description of Artificial Sequence: Synthetic oligonucleotide
uacuguuacgacagcacgg

SEQ ID NO: 2879599 - RNA, 19 nt, Artificial Sequence
  Description of Artificial Sequence: Synthetic oligonucleotide
aaccugaagaucuuucaca

SEQ ID NO: 2879600 - RNA, 19 nt, Artificial Sequence
  Description of Artificial Sequence: Synthetic oligonucleotide
auauauagcgguuuggauu

SEQ ID NO: 2879601 - RNA, 19 nt, Artificial Sequence
  Description of Artificial Sequence: Synthetic oligonucleotide
cuugaauuucauaccauug

SEQ ID NO: 2879602 - RNA, 19 nt, Artificial Sequence
  Description of Artificial Sequence: Synthetic oligonucleotide
uucacauuuggaaaaggaa

SEQ ID NO: 2879603 - RNA, 19 nt, Artificial Sequence
  Description of Artificial Sequence: Synthetic oligonucleotide
uuggaaaaggaauuccuac

SEQ ID NO: 2879604 - RNA, 19 nt, Artificial Sequence
  Description of Artificial Sequence: Synthetic oligonucleotide
uuggauugcuguugaaacg

SEQ ID NO: 2879605 - RNA, 19 nt, Artificial Sequence
  Description of Artificial Sequence: Synthetic oligonucleotide
gaaacgaucguccaccaga

SEQ ID NO: 2879606 - RNA, 19 nt, Artificial Sequence
  Description of Artificial Sequence: Synthetic oligonucleotide
aaaaggaauuccuacuguu

SEQ ID NO: 2879607 - RNA, 19 nt, Artificial Sequence
  Description of Artificial Sequence: Synthetic oligonucleotide
uuuggguucugcaaugacu

SEQ ID NO: 2879608 - RNA, 19 nt, Artificial Sequence
  Description of Artificial Sequence: Synthetic oligonucleotide
gagcaauucaucaaaucag

SEQ ID NO: 2879609 - RNA, 19 nt, Artificial Sequence
  Description of Artificial Sequence: Synthetic oligonucleotide
uuaucaucugagaaaucca

SEQ ID NO: 2879610 - RNA, 19 nt, Artificial Sequence
  Description of Artificial Sequence: Synthetic oligonucleotide
aagggcuccaucuuucucu

SEQ ID NO: 2879611 - RNA, 19 nt, Artificial Sequence
  Description of Artificial Sequence: Synthetic oligonucleotide
uugucguuucaauucaacc

SEQ ID NO: 2879612 - RNA, 19 nt, Artificial Sequence
  Description of Artificial Sequence: Synthetic oligonucleotide
ugaaucuguugccucaccc

SEQ ID NO: 2879613 - RNA, 19 nt, Artificial Sequence
  Description of Artificial Sequence: Synthetic oligonucleotide
uguuacgacagcacgggca

SEQ ID NO: 2879614 - RNA, 19 nt, Artificial Sequence
  Description of Artificial Sequence: Synthetic oligonucleotide
gauggcaucauaguacacc

SEQ ID NO: 2879615 - RNA, 19 nt, Artificial Sequence
  Description of Artificial Sequence: Synthetic oligonucleotide
uuugugucgaauacaccug

SEQ ID NO: 2879616 - RNA, 19 nt, Artificial Sequence
  Description of Artificial Sequence: Synthetic oligonucleotide
uagagccugauuuagggcu

SEQ ID NO: 2879617 - RNA, 19 nt, Artificial Sequence
  Description of Artificial Sequence: Synthetic oligonucleotide
aguccugauauauagcggu

SEQ ID NO: 2879618 - RNA, 19 nt, Artificial Sequence
  Description of Artificial Sequence: Synthetic oligonucleotide
gaauacaccugccuagagc

SEQ ID NO: 2879619 - RNA, 19 nt, Artificial Sequence
  Description of Artificial Sequence: Synthetic oligonucleotide
aaauccagacccucgcuca

SEQ ID NO: 2879620 - RNA, 19 nt, Artificial Sequence
  Description of Artificial Sequence: Synthetic oligonucleotide
auaccauugacggccaggc

SEQ ID NO: 2879621 - RNA, 19 nt, Artificial Sequence
  Description of Artificial Sequence: Synthetic oligonucleotide
aaugacugucuugacugac

SEQ ID NO: 2879622 - RNA, 19 nt, Artificial Sequence
  Description of Artificial Sequence: Synthetic oligonucleotide
ucacccauuuagaaagucc

SEQ ID NO: 2879623 - RNA, 19 nt, Artificial Sequence
  Description of Artificial Sequence: Synthetic oligonucleotide
uuagaaaguccugauauau

SEQ ID NO: 2879624 - RNA, 19 nt, Artificial Sequence
  Description of Artificial Sequence: Synthetic oligonucleotide
gucguuucaauucaaccug

SEQ ID NO: 2879625 - RNA, 19 nt, Artificial Sequence
  Description of Artificial Sequence: Synthetic oligonucleotide
ugauauauagcgguuugga

SEQ ID NO: 2879626 - RNA, 19 nt, Artificial Sequence
  Description of Artificial Sequence: Synthetic oligonucleotide
ucuguaugcuugaauuuca

SEQ ID NO: 2879627 - RNA, 19 nt, Artificial Sequence
  Description of Artificial Sequence: Synthetic oligonucleotide
gauuuagggcucuguaugc

SEQ ID NO: 2879628 - RNA, 19 nt, Artificial Sequence
  Description of Artificial Sequence: Synthetic oligonucleotide
guugaaacgaucguccacc

SEQ ID NO: 2879629 - RNA, 19 nt, Artificial Sequence
  Description of Artificial Sequence: Synthetic oligonucleotide
uuuggaaaaggaauuccua

SEQ ID NO: 2879630 - RNA, 19 nt, Artificial Sequence
  Description of Artificial Sequence: Synthetic oligonucleotide
uaauuuugaguggugguca

SEQ ID NO: 2879631 - RNA, 19 nt, Artificial Sequence
  Description of Artificial Sequence: Synthetic oligonucleotide
uuaauuuugaguggugguc

SEQ ID NO: 2879632 - RNA, 19 nt, Artificial Sequence
  Description of Artificial Sequence: Synthetic oligonucleotide
cuacuguuacgacagcacg

SEQ ID NO: 2879633 - RNA, 19 nt, Artificial Sequence
  Description of Artificial Sequence: Synthetic oligonucleotide
ggccucuuaauuuugagug

SEQ ID NO: 2879634 - RNA, 19 nt, Artificial Sequence
  Description of Artificial Sequence: Synthetic oligonucleotide
accagaauaagagcucccc

SEQ ID NO: 2879635 - RNA, 19 nt, Artificial Sequence
  Description of Artificial Sequence: Synthetic oligonucleotide
ucaaccugaagaucuuuca

SEQ ID NO: 2879636 - RNA, 19 nt, Artificial Sequence
  Description of Artificial Sequence: Synthetic oligonucleotide
auuccuacuguuacgacag

SEQ ID NO: 2879637 - RNA, 19 nt, Artificial Sequence
  Description of Artificial Sequence: Synthetic oligonucleotide
uugacugacuccaaacuau

SEQ ID NO: 2879638 - RNA, 19 nt, Artificial Sequence
  Description of Artificial Sequence: Synthetic oligonucleotide
aggaauuccuacuguuacg

SEQ ID NO: 2879639 - RNA, 19 nt, Artificial Sequence
  Description of Artificial Sequence: Synthetic oligonucleotide
aaggccucuuaauuuugag

SEQ ID NO: 2879640 - RNA, 19 nt, Artificial Sequence
  Description of Artificial Sequence: Synthetic oligonucleotide
caaaccgcuaugagaaggg

SEQ ID NO: 2879641 - RNA, 19 nt, Artificial Sequence
  Description of Artificial Sequence: Synthetic oligonucleotide
cacuuugccacgacaaacc

SEQ ID NO: 2879642 - RNA, 19 nt, Artificial Sequence
  Description of Artificial Sequence: Synthetic oligonucleotide
acaaaccgcuaugagaagg

SEQ ID NO: 2879643 - RNA, 19 nt, Artificial Sequence
  Description of Artificial Sequence: Synthetic oligonucleotide
aauccagacccucgcucac

SEQ ID NO: 2879644 - RNA, 19 nt, Artificial Sequence
  Description of Artificial Sequence: Synthetic oligonucleotide
uugugucgaauacaccugc

SEQ ID NO: 2879645 - RNA, 19 nt, Artificial Sequence
  Description of Artificial Sequence: Synthetic oligonucleotide
acuuugccacgacaaaccg

SEQ ID NO: 2879646 - RNA, 19 nt, Artificial Sequence
  Description of Artificial Sequence: Synthetic oligonucleotide
ggagcaauucaucaaauca

SEQ ID NO: 2879647 - RNA, 19 nt, Artificial Sequence
  Description of Artificial Sequence: Synthetic oligonucleotide
aaucuguugccucacccau

SEQ ID NO: 2879648 - RNA, 19 nt, Artificial Sequence
  Description of Artificial Sequence: Synthetic oligonucleotide
gagaaauccagacccucgc

SEQ ID NO: 2879649 - RNA, 19 nt, Artificial Sequence
  Description of Artificial Sequence: Synthetic oligonucleotide
ugagugguggucauuguau

SEQ ID NO: 2879650 - RNA, 19 nt, Artificial Sequence
  Description of Artificial Sequence: Synthetic oligonucleotide
acuguuacgacagcacggg

SEQ ID NO: 2879651 - RNA, 19 nt, Artificial Sequence
  Description of Artificial Sequence: Synthetic oligonucleotide
ugaagaucuuucacauuug

SEQ ID NO: 2879652 - RNA, 19 nt, Artificial Sequence
  Description of Artificial Sequence: Synthetic oligonucleotide
acgacaaaccgcuaugaga

SEQ ID NO: 2879653 - RNA, 19 nt, Artificial Sequence
  Description of Artificial Sequence: Synthetic oligonucleotide
uggauugcuguugaaacga

SEQ ID NO: 2879654 - RNA, 19 nt, Artificial Sequence
  Description of Artificial Sequence: Synthetic oligonucleotide
gucgaauacaccugccuag

SEQ ID NO: 2879655 - RNA, 19 nt, Artificial Sequence
  Description of Artificial Sequence: Synthetic oligonucleotide
auggcaucauaguacaccu

SEQ ID NO: 2879656 - RNA, 19 nt, Artificial Sequence
  Description of Artificial Sequence: Synthetic oligonucleotide
uuagggcucuguaugcuug

SEQ ID NO: 2879657 - RNA, 19 nt, Artificial Sequence
  Description of Artificial Sequence: Synthetic oligonucleotide
aaaccgcuaugagaagggc

SEQ ID NO: 2879658 - RNA, 19 nt, Artificial Sequence
  Description of Artificial Sequence: Synthetic oligonucleotide
ggaaaaggaauuccuacug

SEQ ID NO: 2879659 - RNA, 19 nt, Artificial Sequence
  Description of Artificial Sequence: Synthetic oligonucleotide
caucauaguacaccuggag

SEQ ID NO: 2879660 - RNA, 19 nt, Artificial Sequence
  Description of Artificial Sequence: Synthetic oligonucleotide
ucuuucacauuuggaaaag

SEQ ID NO: 2879661 - RNA, 19 nt, Artificial Sequence
  Description of Artificial Sequence: Synthetic oligonucleotide
uguugaaacgaucguccac

SEQ ID NO: 2879662 - RNA, 19 nt, Artificial Sequence
  Description of Artificial Sequence: Synthetic oligonucleotide
aaguccugauauauagcgg

SEQ ID NO: 2879663 - RNA, 19 nt, Artificial Sequence
  Description of Artificial Sequence: Synthetic oligonucleotide
auuguauugucguuucaau

SEQ ID NO: 2879664 - RNA, 19 nt, Artificial Sequence
  Description of Artificial Sequence: Synthetic oligonucleotide
uacaccuggagcaauucau

SEQ ID NO: 2879665 - RNA, 19 nt, Artificial Sequence
  Description of Artificial Sequence: Synthetic oligonucleotide
aaagguugaguggugcuga

SEQ ID NO: 2879666 - RNA, 19 nt, Artificial Sequence
  Description of Artificial Sequence: Synthetic oligonucleotide
uucaaccugaagaucuuuc

SEQ ID NO: 2879667 - RNA, 19 nt, Artificial Sequence
  Description of Artificial Sequence: Synthetic oligonucleotide
acugucuugacugacucca

SEQ ID NO: 2879668 - RNA, 19 nt, Artificial Sequence
  Description of Artificial Sequence: Synthetic oligonucleotide
uuuagaaaguccugauaua

SEQ ID NO: 2879669 - RNA, 19 nt, Artificial Sequence
  Description of Artificial Sequence: Synthetic oligonucleotide
ugucgaauacaccugccua

SEQ ID NO: 2879670 - RNA, 19 nt, Artificial Sequence
  Description of Artificial Sequence: Synthetic oligonucleotide
gccucacccauuuagaaag

SEQ ID NO: 2879671 - RNA, 19 nt, Artificial Sequence
  Description of Artificial Sequence: Synthetic oligonucleotide
gaaauccagacccucgcuc

SEQ ID NO: 2879672 - RNA, 19 nt, Artificial Sequence
  Description of Artificial Sequence: Synthetic oligonucleotide
auugucguuucaauucaac

SEQ ID NO: 2879673 - RNA, 19 nt, Artificial Sequence
  Description of Artificial Sequence: Synthetic oligonucleotide
gaauaagagcuccccaauc

SEQ ID NO: 2879674 - RNA, 19 nt, Artificial Sequence
  Description of Artificial Sequence: Synthetic oligonucleotide
accauugacggccaggcaa

SEQ ID NO: 2879675 - RNA, 19 nt, Artificial Sequence
  Description of Artificial Sequence: Synthetic oligonucleotide
uuugaacuugauggcauca

SEQ ID NO: 2879676 - RNA, 19 nt, Artificial Sequence
  Description of Artificial Sequence: Synthetic oligonucleotide
aauuuugagugguggucau

SEQ ID NO: 2879677 - RNA, 19 nt, Artificial Sequence
  Description of Artificial Sequence: Synthetic oligonucleotide
gaaaguccugauauauagc

SEQ ID NO: 2879678 - RNA, 19 nt, Artificial Sequence
  Description of Artificial Sequence: Synthetic oligonucleotide
accugaagaucuuucacau

SEQ ID NO: 2879679 - RNA, 19 nt, Artificial Sequence
  Description of Artificial Sequence: Synthetic oligonucleotide
acuugauggcaucauagua

SEQ ID NO: 2879680 - RNA, 19 nt, Artificial Sequence
  Description of Artificial Sequence: Synthetic oligonucleotide
caauucaaccugaagaucu

SEQ ID NO: 2879681 - RNA, 19 nt, Artificial Sequence
  Description of Artificial Sequence: Synthetic oligonucleotide
ucugagaaauccagacccu

SEQ ID NO: 2879682 - RNA, 19 nt, Artificial Sequence
  Description of Artificial Sequence: Synthetic oligonucleotide
cacuugcaaagguugagug

SEQ ID NO: 2879683 - RNA, 19 nt, Artificial Sequence
  Description of Artificial Sequence: Synthetic oligonucleotide
accgcuaugagaagggcuc

SEQ ID NO: 2879684 - RNA, 19 nt, Artificial Sequence
  Description of Artificial Sequence: Synthetic oligonucleotide
uuguauugucguuucaauu

SEQ ID NO: 2879685 - RNA, 19 nt, Artificial Sequence
  Description of Artificial Sequence: Synthetic oligonucleotide
cuagagccugauuuagggc

SEQ ID NO: 2879686 - RNA, 19 nt, Artificial Sequence
  Description of Artificial Sequence: Synthetic oligonucleotide
gaaucuguugccucaccca

SEQ ID NO: 2879687 - RNA, 19 nt, Artificial Sequence
  Description of Artificial Sequence: Synthetic oligonucleotide
acgaucguccaccagaaua

SEQ ID NO: 2879688 - RNA, 19 nt, Artificial Sequence
  Description of Artificial Sequence: Synthetic oligonucleotide
aguggugcugaaucuguug

SEQ ID NO: 2879689 - RNA, 19 nt, Artificial Sequence
  Description of Artificial Sequence: Synthetic oligonucleotide
agaauaagagcuccccaau

SEQ ID NO: 2879690 - RNA, 19 nt, Artificial Sequence
  Description of Artificial Sequence: Synthetic oligonucleotide
ugacugucuugacugacuc

SEQ ID NO: 2879691 - RNA, 19 nt, Artificial Sequence
  Description of Artificial Sequence: Synthetic oligonucleotide
agugguggucauuguauug

SEQ ID NO: 2879692 - RNA, 19 nt, Artificial Sequence
  Description of Artificial Sequence: Synthetic oligonucleotide
ugacggccaggcaaaaggc

SEQ ID NO: 2879693 - RNA, 19 nt, Artificial Sequence
  Description of Artificial Sequence: Synthetic oligonucleotide
guauugucguuucaauuca

SEQ ID NO: 2879694 - RNA, 19 nt, Artificial Sequence
  Description of Artificial Sequence: Synthetic oligonucleotide
uuucucuccuuugaacuug

SEQ ID NO: 2879695 - RNA, 19 nt, Artificial Sequence
  Description of Artificial Sequence: Synthetic oligonucleotide
ucguuucaauucaaccuga

SEQ ID NO: 2879696 - RNA, 19 nt, Artificial Sequence
  Description of Artificial Sequence: Synthetic oligonucleotide
ugugucgaauacaccugcc

SEQ ID NO: 2879697 - RNA, 19 nt, Artificial Sequence
  Description of Artificial Sequence: Synthetic oligonucleotide
cuccuuugaacuugauggc

SEQ ID NO: 2879698 - RNA, 19 nt, Artificial Sequence
  Description of Artificial Sequence: Synthetic oligonucleotide
ccuagagccugauuuaggg

SEQ ID NO: 2879699 - RNA, 19 nt, Artificial Sequence
  Description of Artificial Sequence: Synthetic oligonucleotide
aagaucuuucacauuugga

SEQ ID NO: 2879700 - RNA, 19 nt, Artificial Sequence
  Description of Artificial Sequence: Synthetic oligonucleotide
ucacuuugccacgacaaac

SEQ ID NO: 2879701 - RNA, 19 nt, Artificial Sequence
  Description of Artificial Sequence: Synthetic oligonucleotide
agcacgggcauuaucaucu

SEQ ID NO: 2879702 - RNA, 19 nt, Artificial Sequence
  Description of Artificial Sequence: Synthetic oligonucleotide
ucuguugccucacccauuu

SEQ ID NO: 2879703 - RNA, 19 nt, Artificial Sequence
  Description of Artificial Sequence: Synthetic oligonucleotide
cuuugccacgacaaaccgc

SEQ ID NO: 2879704 - RNA, 19 nt, Artificial Sequence
  Description of Artificial Sequence: Synthetic oligonucleotide
ugaaacgaucguccaccag

SEQ ID NO: 2879705 - RNA, 19 nt, Artificial Sequence
  Description of Artificial Sequence: Synthetic oligonucleotide
ugcugaaucuguugccuca

SEQ ID NO: 2879706 - RNA, 19 nt, Artificial Sequence
  Description of Artificial Sequence: Synthetic oligonucleotide
uagaaaguccugauauaua

SEQ ID NO: 2879707 - RNA, 19 nt, Artificial Sequence
  Description of Artificial Sequence: Synthetic oligonucleotide
aaaaggccucuuaauuuug

SEQ ID NO: 2879708 - RNA, 19 nt, Artificial Sequence
  Description of Artificial Sequence: Synthetic oligonucleotide
cuuucacauuuggaaaagg

SEQ ID NO: 2879709 - RNA, 19 nt, Artificial Sequence
  Description of Artificial Sequence: Synthetic oligonucleotide
uccaccagaauaagagcuc

SEQ ID NO: 2879710 - RNA, 19 nt, Artificial Sequence
  Description of Artificial Sequence: Synthetic oligonucleotide
cugauauauagcgguuugg

SEQ ID NO: 2879711 - RNA, 19 nt, Artificial Sequence
  Description of Artificial Sequence: Synthetic oligonucleotide
caaccugaagaucuuucac

SEQ ID NO: 2879712 - RNA, 19 nt, Artificial Sequence
  Description of Artificial Sequence: Synthetic oligonucleotide
aaaggaauuccuacuguua

SEQ ID NO: 2879713 - RNA, 19 nt, Artificial Sequence
  Description of Artificial Sequence: Synthetic oligonucleotide
uccuuugaacuugauggca

SEQ ID NO: 2879714 - RNA, 19 nt, Artificial Sequence
  Description of Artificial Sequence: Synthetic oligonucleotide
agcaauucaucaaaucagu

SEQ ID NO: 2879715 - RNA, 19 nt, Artificial Sequence
  Description of Artificial Sequence: Synthetic oligonucleotide
uggagcaauucaucaaauc

SEQ ID NO: 2879716 - RNA, 19 nt, Artificial Sequence
  Description of Artificial Sequence: Synthetic oligonucleotide
gucuugacugacuccaaac

SEQ ID NO: 2879717 - RNA, 19 nt, Artificial Sequence
  Description of Artificial Sequence: Synthetic oligonucleotide
auaagagcuccccaaucau

SEQ ID NO: 2879718 - RNA, 19 nt, Artificial Sequence
  Description of Artificial Sequence: Synthetic oligonucleotide
ugcaaagguugaguggugc

SEQ ID NO: 2879719 - RNA, 19 nt, Artificial Sequence
  Description of Artificial Sequence: Synthetic oligonucleotide
ucaauucaaccugaagauc

SEQ ID NO: 2879720 - RNA, 19 nt, Artificial Sequence
  Description of Artificial Sequence: Synthetic oligonucleotide
cucuguaugcuugaauuuc

SEQ ID NO: 2879721 - RNA, 19 nt, Artificial Sequence
  Description of Artificial Sequence: Synthetic oligonucleotide
cucuccuuugaacuugaug

SEQ ID NO: 2879722 - RNA, 19 nt, Artificial Sequence
  Description of Artificial Sequence: Synthetic oligonucleotide
uguaugcuugaauuucaua

SEQ ID NO: 2879723 - RNA, 19 nt, Artificial Sequence
  Description of Artificial Sequence: Synthetic oligonucleotide
ucauuguauugucguuuca

SEQ ID NO: 2879724 - RNA, 19 nt, Artificial Sequence
  Description of Artificial Sequence: Synthetic oligonucleotide
uugagugguggucauugua

SEQ ID NO: 2879725 - RNA, 19 nt, Artificial Sequence
  Description of Artificial Sequence: Synthetic oligonucleotide
cauaccauugacggccagg

SEQ ID NO: 2879726 - RNA, 19 nt, Artificial Sequence
  Description of Artificial Sequence: Synthetic oligonucleotide
gguugaguggugcugaauc

SEQ ID NO: 2879727 - RNA, 19 nt, Artificial Sequence
  Description of Artificial Sequence: Synthetic oligonucleotide
uagcgguuuggauugcugu

SEQ ID NO: 2879728 - RNA, 19 nt, Artificial Sequence
  Description of Artificial Sequence: Synthetic oligonucleotide
aggccucuuaauuuugagu

SEQ ID NO: 2879729 - RNA, 19 nt, Artificial Sequence
  Description of Artificial Sequence: Synthetic oligonucleotide
gucauuguauugucguuuc

SEQ ID NO: 2879730 - RNA, 19 nt, Artificial Sequence
  Description of Artificial Sequence: Synthetic oligonucleotide
gaaaaggaauuccuacugu

SEQ ID NO: 2879731 - RNA, 19 nt, Artificial Sequence
  Description of Artificial Sequence: Synthetic oligonucleotide
aagagcuccccaaucauuu

SEQ ID NO: 2879732 - RNA, 19 nt, Artificial Sequence
  Description of Artificial Sequence: Synthetic oligonucleotide
ugucuugacugacuccaaa

SEQ ID NO: 2879733 - RNA, 19 nt, Artificial Sequence
  Description of Artificial Sequence: Synthetic oligonucleotide
uauugucguuucaauucaa

SEQ ID NO: 2879734 - RNA, 19 nt, Artificial Sequence
  Description of Artificial Sequence: Synthetic oligonucleotide
acgggcauuaucaucugag

SEQ ID NO: 2879735 - RNA, 19 nt, Artificial Sequence
  Description of Artificial Sequence: Synthetic oligonucleotide
agaaauccagacccucgcu

SEQ ID NO: 2879736 - RNA, 19 nt, Artificial Sequence
  Description of Artificial Sequence: Synthetic oligonucleotide
gcuguugaaacgaucgucc

SEQ ID NO: 2879737 - RNA, 19 nt, Artificial Sequence
  Description of Artificial Sequence: Synthetic oligonucleotide
ugcuguugaaacgaucguc

SEQ ID NO: 2879738 - RNA, 19 nt, Artificial Sequence
  Description of Artificial Sequence: Synthetic oligonucleotide
cuuugaacuugauggcauc

SEQ ID NO: 2879739 - RNA, 19 nt, Artificial Sequence
  Description of Artificial Sequence: Synthetic oligonucleotide
ggcauuaucaucugagaaa

SEQ ID NO: 2879740 - RNA, 19 nt, Artificial Sequence
  Description of Artificial Sequence: Synthetic oligonucleotide
uccuacuguuacgacagca

SEQ ID NO: 2879741 - RNA, 19 nt, Artificial Sequence
  Description of Artificial Sequence: Synthetic oligonucleotide
aguacaccuggagcaauuc

SEQ ID NO: 2879742 - RNA, 19 nt, Artificial Sequence
  Description of Artificial Sequence: Synthetic oligonucleotide
uggugcugaaucuguugcc

SEQ ID NO: 2879743 - RNA, 19 nt, Artificial Sequence
  Description of Artificial Sequence: Synthetic oligonucleotide
uaagagcuccccaaucauu

SEQ ID NO: 2879744 - RNA, 19 nt, Artificial Sequence
  Description of Artificial Sequence: Synthetic oligonucleotide
uucauaccauugacggcca

SEQ ID NO: 2879745 - RNA, 19 nt, Artificial Sequence
  Description of Artificial Sequence: Synthetic oligonucleotide
gaauuccuacuguuacgac

SEQ ID NO: 2879746 - RNA, 19 nt, Artificial Sequence
  Description of Artificial Sequence: Synthetic oligonucleotide
cagaauaagagcuccccaa

SEQ ID NO: 2879747 - RNA, 19 nt, Artificial Sequence
  Description of Artificial Sequence: Synthetic oligonucleotide
gacaaaccgcuaugagaag

SEQ ID NO: 2879748 - RNA, 19 nt, Artificial Sequence
  Description of Artificial Sequence: Synthetic oligonucleotide
uugcuguugaaacgaucgu

SEQ ID NO: 2879749 - RNA, 19 nt, Artificial Sequence
  Description of Artificial Sequence: Synthetic oligonucleotide
uugaaacgaucguccacca

SEQ ID NO: 2879750 - RNA, 19 nt, Artificial Sequence
  Description of Artificial Sequence: Synthetic oligonucleotide
gauauauagcgguuuggau

SEQ ID NO: 2879751 - RNA, 19 nt, Artificial Sequence
  Description of Artificial Sequence: Synthetic oligonucleotide
cucuuaauuuugaguggug

SEQ ID NO: 2879752 - RNA, 19 nt, Artificial Sequence
  Description of Artificial Sequence: Synthetic oligonucleotide
gacugucuugacugacucc

SEQ ID NO: 2879753 - RNA, 19 nt, Artificial Sequence
  Description of Artificial Sequence: Synthetic oligonucleotide
ugccuagagccugauuuag

SEQ ID NO: 2879754 - RNA, 19 nt, Artificial Sequence
  Description of Artificial Sequence: Synthetic oligonucleotide
aaaggccucuuaauuuuga

SEQ ID NO: 2879755 - RNA, 19 nt, Artificial Sequence
  Description of Artificial Sequence: Synthetic oligonucleotide
uacaccugccuagagccug

SEQ ID NO: 2879756 - RNA, 19 nt, Artificial Sequence
  Description of Artificial Sequence: Synthetic oligonucleotide
ucgaauacaccugccuaga

SEQ ID NO: 2879757 - RNA, 19 nt, Artificial Sequence
  Description of Artificial Sequence: Synthetic oligonucleotide
cugaagaucuuucacauuu

SEQ ID NO: 2879758 - RNA, 19 nt, Artificial Sequence
  Description of Artificial Sequence: Synthetic oligonucleotide
cuuaauuuugagugguggu

SEQ ID NO: 2879759 - RNA, 19 nt, Artificial Sequence
  Description of Artificial Sequence: Synthetic oligonucleotide
cagacccucgcucacuuug

SEQ ID NO: 2879760 - RNA, 19 nt, Artificial Sequence
  Description of Artificial Sequence: Synthetic oligonucleotide
uugccucacccauuuagaa

SEQ ID NO: 2879761 - RNA, 19 nt, Artificial Sequence
  Description of Artificial Sequence: Synthetic oligonucleotide
ugccucacccauuuagaaa

SEQ ID NO: 2879762 - RNA, 19 nt, Artificial Sequence
  Description of Artificial Sequence: Synthetic oligonucleotide
cacgacaaaccgcuaugag

SEQ ID NO: 2879763 - RNA, 19 nt, Artificial Sequence
  Description of Artificial Sequence: Synthetic oligonucleotide
caaagguugaguggugcug

SEQ ID NO: 2879764 - RNA, 19 nt, Artificial Sequence
  Description of Artificial Sequence: Synthetic oligonucleotide
uuuagggcucuguaugcuu

SEQ ID NO: 2879765 - RNA, 19 nt, Artificial Sequence
  Description of Artificial Sequence: Synthetic oligonucleotide
uuugagugguggucauugu

SEQ ID NO: 2879766 - RNA, 19 nt, Artificial Sequence
  Description of Artificial Sequence: Synthetic oligonucleotide
aaacgaucguccaccagaa

SEQ ID NO: 2879767 - RNA, 19 nt, Artificial Sequence
  Description of Artificial Sequence: Synthetic oligonucleotide
aaccgcuaugagaagggcu

SEQ ID NO: 2879768 - RNA, 19 nt, Artificial Sequence
  Description of Artificial Sequence: Synthetic oligonucleotide
gccucuuaauuuugagugg

SEQ ID NO: 2879769 - RNA, 19 nt, Artificial Sequence
  Description of Artificial Sequence: Synthetic oligonucleotide
cuuuggguucugcaaugac

SEQ ID NO: 2879770 - RNA, 19 nt, Artificial Sequence
  Description of Artificial Sequence: Synthetic oligonucleotide
agggcacuugcaaagguug

SEQ ID NO: 2879771 - RNA, 19 nt, Artificial Sequence
  Description of Artificial Sequence: Synthetic oligonucleotide
acaccuggagcaauucauc

SEQ ID NO: 2879772 - RNA, 19 nt, Artificial Sequence
  Description of Artificial Sequence: Synthetic oligonucleotide
uugcaaagguugaguggug

SEQ ID NO: 2879773 - RNA, 19 nt, Artificial Sequence
  Description of Artificial Sequence: Synthetic oligonucleotide
ugccacgacaaaccgcuau

SEQ ID NO: 2879774 - RNA, 19 nt, Artificial Sequence
  Description of Artificial Sequence: Synthetic oligonucleotide
guuuggauugcuguugaaa

SEQ ID NO: 2879775 - RNA, 19 nt, Artificial Sequence
  Description of Artificial Sequence: Synthetic oligonucleotide
caauucaucaaaucaguuu

SEQ ID NO: 2879776 - RNA, 19 nt, Artificial Sequence
  Description of Artificial Sequence: Synthetic oligonucleotide
ggaauuccuacuguuacga

SEQ ID NO: 2879777 - RNA, 19 nt, Artificial Sequence
  Description of Artificial Sequence: Synthetic oligonucleotide
caccagaauaagagcuccc

SEQ ID NO: 2879778 - RNA, 19 nt, Artificial Sequence
  Description of Artificial Sequence: Synthetic oligonucleotide
agaagggcuccaucuuucu

SEQ ID NO: 2879779 - RNA, 19 nt, Artificial Sequence
  Description of Artificial Sequence: Synthetic oligonucleotide
gauugcuguugaaacgauc

SEQ ID NO: 2879780 - RNA, 19 nt, Artificial Sequence
  Description of Artificial Sequence: Synthetic oligonucleotide
aauucaaccugaagaucuu

SEQ ID NO: 2879781 - RNA, 19 nt, Artificial Sequence
  Description of Artificial Sequence: Synthetic oligonucleotide
guggucauuguauugucgu

SEQ ID NO: 2879782 - RNA, 19 nt, Artificial Sequence
  Description of Artificial Sequence: Synthetic oligonucleotide
aggcaaaaggccucuuaau

SEQ ID NO: 2879783 - RNA, 19 nt, Artificial Sequence
  Description of Artificial Sequence: Synthetic oligonucleotide
ucauaccauugacggccag

SEQ ID NO: 2879784 - RNA, 19 nt, Artificial Sequence
  Description of Artificial Sequence: Synthetic oligonucleotide
gaucguccaccagaauaag

SEQ ID NO: 2879785 - RNA, 19 nt, Artificial Sequence
  Description of Artificial Sequence: Synthetic oligonucleotide
ccuacuguuacgacagcac

SEQ ID NO: 2879786 - RNA, 19 nt, Artificial Sequence
  Description of Artificial Sequence: Synthetic oligonucleotide
aucaucugagaaauccaga

SEQ ID NO: 2879787 - RNA, 19 nt, Artificial Sequence
  Description of Artificial Sequence: Synthetic oligonucleotide
cauuguauugucguuucaa

SEQ ID NO: 2879788 - RNA, 19 nt, Artificial Sequence
  Description of Artificial Sequence: Synthetic oligonucleotide
uugaacuugauggcaucau

SEQ ID NO: 2879789 - RNA, 19 nt, Artificial Sequence
  Description of Artificial Sequence: Synthetic oligonucleotide
ugauggcaucauaguacac

SEQ ID NO: 2879790 - RNA, 19 nt, Artificial Sequence
  Description of Artificial Sequence: Synthetic oligonucleotide
cauuuagaaaguccugaua

SEQ ID NO: 2879791 - RNA, 19 nt, Artificial Sequence
  Description of Artificial Sequence: Synthetic oligonucleotide
cacccauuuagaaaguccu

SEQ ID NO: 2879792 - RNA, 19 nt, Artificial Sequence
  Description of Artificial Sequence: Synthetic oligonucleotide
cauuaucaucugagaaauc

SEQ ID NO: 2879793 - RNA, 19 nt, Artificial Sequence
  Description of Artificial Sequence: Synthetic oligonucleotide
agagccugauuuagggcuc

SEQ ID NO: 2879794 - RNA, 19 nt, Artificial Sequence
  Description of Artificial Sequence: Synthetic oligonucleotide
auauagcgguuuggauugc

SEQ ID NO: 2879795 - RNA, 19 nt, Artificial Sequence
  Description of Artificial Sequence: Synthetic oligonucleotide
agacccucgcucacuuugc

SEQ ID NO: 2879796 - RNA, 19 nt, Artificial Sequence
  Description of Artificial Sequence: Synthetic oligonucleotide
gguggucauuguauugucg

SEQ ID NO: 2879797 - RNA, 19 nt, Artificial Sequence
  Description of Artificial Sequence: Synthetic oligonucleotide
gacggccaggcaaaaggcc

SEQ ID NO: 2879798 - RNA, 19 nt, Artificial Sequence
  Description of Artificial Sequence: Synthetic oligonucleotide
uaguacaccuggagcaauu

SEQ ID NO: 2879799 - RNA, 19 nt, Artificial Sequence
  Description of Artificial Sequence: Synthetic oligonucleotide
ccugauauauagcgguuug

SEQ ID NO: 2879800 - RNA, 19 nt, Artificial Sequence
  Description of Artificial Sequence: Synthetic oligonucleotide
uccugauauauagcgguuu

SEQ ID NO: 2879801 - RNA, 19 nt, Artificial Sequence
  Description of Artificial Sequence: Synthetic oligonucleotide
augagaagggcuccaucuu

SEQ ID NO: 2879802 - RNA, 19 nt, Artificial Sequence
  Description of Artificial Sequence: Synthetic oligonucleotide
uacgacagcacgggcauua

SEQ ID NO: 2879803 - RNA, 19 nt, Artificial Sequence
  Description of Artificial Sequence: Synthetic oligonucleotide
gagaagggcuccaucuuuc

SEQ ID NO: 2879804 - RNA, 19 nt, Artificial Sequence
  Description of Artificial Sequence: Synthetic oligonucleotide
cacauuuggaaaaggaauu

SEQ ID NO: 2879805 - RNA, 19 nt, Artificial Sequence
  Description of Artificial Sequence: Synthetic oligonucleotide
cugaaucuguugccucacc

SEQ ID NO: 2879806 - RNA, 19 nt, Artificial Sequence
  Description of Artificial Sequence: Synthetic oligonucleotide
uauagcgguuuggauugcu

SEQ ID NO: 2879807 - RNA, 19 nt, Artificial Sequence
  Description of Artificial Sequence: Synthetic oligonucleotide
cugagaaauccagacccuc

SEQ ID NO: 2879808 - RNA, 19 nt, Artificial Sequence
  Description of Artificial Sequence: Synthetic oligonucleotide
aagguugaguggugcugaa

SEQ ID NO: 2879809 - RNA, 19 nt, Artificial Sequence
  Description of Artificial Sequence: Synthetic oligonucleotide
caccuggagcaauucauca

SEQ ID NO: 2879810 - RNA, 19 nt, Artificial Sequence
  Description of Artificial Sequence: Synthetic oligonucleotide
auugacggccaggcaaaag

SEQ ID NO: 2879811 - RNA, 19 nt, Artificial Sequence
  Description of Artificial Sequence: Synthetic oligonucleotide
uagggcucuguaugcuuga

SEQ ID NO: 2879812 - RNA, 19 nt, Artificial Sequence
  Description of Artificial Sequence: Synthetic oligonucleotide
uggucauuguauugucguu

SEQ ID NO: 2879813 - RNA, 19 nt, Artificial Sequence
  Description of Artificial Sequence: Synthetic oligonucleotide
agcgguuuggauugcuguu

SEQ ID NO: 2879814 - RNA, 19 nt, Artificial Sequence
  Description of Artificial Sequence: Synthetic oligonucleotide
guacaccuggagcaauuca

SEQ ID NO: 2879815 - RNA, 19 nt, Artificial Sequence
  Description of Artificial Sequence: Synthetic oligonucleotide
caggcaaaaggccucuuaa

SEQ ID NO: 2879816 - RNA, 19 nt, Artificial Sequence
  Description of Artificial Sequence: Synthetic oligonucleotide
uaccauugacggccaggca

SEQ ID NO: 2879817 - RNA, 19 nt, Artificial Sequence
  Description of Artificial Sequence: Synthetic oligonucleotide
cuguugaaacgaucgucca

SEQ ID NO: 2879818 - RNA, 19 nt, Artificial Sequence
  Description of Artificial Sequence: Synthetic oligonucleotide
guugaguggugcugaaucu

SEQ ID NO: 2879819 - RNA, 19 nt, Artificial Sequence
  Description of Artificial Sequence: Synthetic oligonucleotide
guugccucacccauuuaga

SEQ ID NO: 2879820 - RNA, 19 nt, Artificial Sequence
  Description of Artificial Sequence: Synthetic oligonucleotide
caaaaggccucuuaauuuu

SEQ ID NO: 2879821 - RNA, 19 nt, Artificial Sequence
  Description of Artificial Sequence: Synthetic oligonucleotide
uuccuacuguuacgacagc

SEQ ID NO: 2879822 - RNA, 19 nt, Artificial Sequence
  Description of Artificial Sequence: Synthetic oligonucleotide
guccaccagaauaagagcu

SEQ ID NO: 2879823 - RNA, 19 nt, Artificial Sequence
  Description of Artificial Sequence: Synthetic oligonucleotide
cgacaaaccgcuaugagaa

SEQ ID NO: 2879824 - RNA, 19 nt, Artificial Sequence
  Description of Artificial Sequence: Synthetic oligonucleotide
gacccucgcucacuuugcc

SEQ ID NO: 2879825 - RNA, 19 nt, Artificial Sequence
  Description of Artificial Sequence: Synthetic oligonucleotide
gggcauuaucaucugagaa

SEQ ID NO: 2879826 - RNA, 19 nt, Artificial Sequence
  Description of Artificial Sequence: Synthetic oligonucleotide
auagcgguuuggauugcug

SEQ ID NO: 2879827 - RNA, 19 nt, Artificial Sequence
  Description of Artificial Sequence: Synthetic oligonucleotide
augacugucuugacugacu

SEQ ID NO: 2879828 - RNA, 19 nt, Artificial Sequence
  Description of Artificial Sequence: Synthetic oligonucleotide
guuacgacagcacgggcau

SEQ ID NO: 2879829 - RNA, 19 nt, Artificial Sequence
  Description of Artificial Sequence: Synthetic oligonucleotide
cuguuacgacagcacgggc

SEQ ID NO: 2879830 - RNA, 19 nt, Artificial Sequence
  Description of Artificial Sequence: Synthetic oligonucleotide
uggguucugcaaugacugu

SEQ ID NO: 2879831 - RNA, 19 nt, Artificial Sequence
  Description of Artificial Sequence: Synthetic oligonucleotide
aacgaucguccaccagaau

SEQ ID NO: 2879832 - RNA, 19 nt, Artificial Sequence
  Description of Artificial Sequence: Synthetic oligonucleotide
uccagacccucgcucacuu

SEQ ID NO: 2879833 - RNA, 19 nt, Artificial Sequence
  Description of Artificial Sequence: Synthetic oligonucleotide
acggccaggcaaaaggccu

SEQ ID NO: 2879834 - RNA, 19 nt, Artificial Sequence
  Description of Artificial Sequence: Synthetic oligonucleotide
acccauuuagaaaguccug

SEQ ID NO: 2879835 - RNA, 19 nt, Artificial Sequence
  Description of Artificial Sequence: Synthetic oligonucleotide
cucacccauuuagaaaguc

SEQ ID NO: 2879836 - RNA, 19 nt, Artificial Sequence
  Description of Artificial Sequence: Synthetic oligonucleotide
cugauuuagggcucuguau

SEQ ID NO: 2879837 - RNA, 19 nt, Artificial Sequence
  Description of Artificial Sequence: Synthetic oligonucleotide
ggcacuugcaaagguugag

SEQ ID NO: 2879838 - RNA, 19 nt, Artificial Sequence
  Description of Artificial Sequence: Synthetic oligonucleotide
gccacgacaaaccgcuaug

SEQ ID NO: 2879839 - RNA, 19 nt, Artificial Sequence
  Description of Artificial Sequence: Synthetic oligonucleotide
caucuuucucuccuuugaa

SEQ ID NO: 2879840 - RNA, 19 nt, Artificial Sequence
  Description of Artificial Sequence: Synthetic oligonucleotide
cagcacgggcauuaucauc

SEQ ID NO: 2879841 - RNA, 19 nt, Artificial Sequence
  Description of Artificial Sequence: Synthetic oligonucleotide
gugcugaaucuguugccuc

SEQ ID NO: 2879842 - RNA, 19 nt, Artificial Sequence
  Description of Artificial Sequence: Synthetic oligonucleotide
auaguacaccuggagcaau

SEQ ID NO: 2879843 - RNA, 19 nt, Artificial Sequence
  Description of Artificial Sequence: Synthetic oligonucleotide
aucguccaccagaauaaga

SEQ ID NO: 2879844 - RNA, 19 nt, Artificial Sequence
  Description of Artificial Sequence: Synthetic oligonucleotide
cccucgcucacuuugccac

SEQ ID NO: 2879845 - RNA, 19 nt, Artificial Sequence
  Description of Artificial Sequence: Synthetic oligonucleotide
ccaccagaauaagagcucc

SEQ ID NO: 2879846 - RNA, 19 nt, Artificial Sequence
  Description of Artificial Sequence: Synthetic oligonucleotide
cauaguacaccuggagcaa

SEQ ID NO: 2879847 - RNA, 19 nt, Artificial Sequence
  Description of Artificial Sequence: Synthetic oligonucleotide
gugucgaauacaccugccu

SEQ ID NO: 2879848 - RNA, 19 nt, Artificial Sequence
  Description of Artificial Sequence: Synthetic oligonucleotide
cugcaaugacugucuugac

SEQ ID NO: 2879849 - RNA, 19 nt, Artificial Sequence
  Description of Artificial Sequence: Synthetic oligonucleotide
gcauuaucaucugagaaau

SEQ ID NO: 2879850 - RNA, 19 nt, Artificial Sequence
  Description of Artificial Sequence: Synthetic oligonucleotide
ggcucuguaugcuugaauu

SEQ ID NO: 2879851 - RNA, 19 nt, Artificial Sequence
  Description of Artificial Sequence: Synthetic oligonucleotide
auucaaccugaagaucuuu

SEQ ID NO: 2879852 - RNA, 19 nt, Artificial Sequence
  Description of Artificial Sequence: Synthetic oligonucleotide
agagcuccccaaucauuuu

SEQ ID NO: 2879853 - RNA, 19 nt, Artificial Sequence
  Description of Artificial Sequence: Synthetic oligonucleotide
gcaaaaggccucuuaauuu

SEQ ID NO: 2879854 - RNA, 19 nt, Artificial Sequence
  Description of Artificial Sequence: Synthetic oligonucleotide
gugguggucauuguauugu

SEQ ID NO: 2879855 - RNA, 19 nt, Artificial Sequence
  Description of Artificial Sequence: Synthetic oligonucleotide
cucacuuugccacgacaaa

SEQ ID NO: 2879856 - RNA, 19 nt, Artificial Sequence
  Description of Artificial Sequence: Synthetic oligonucleotide
ggcaaaaggccucuuaauu

SEQ ID NO: 2879857 - RNA, 19 nt, Artificial Sequence
  Description of Artificial Sequence: Synthetic oligonucleotide
ccuggagcaauucaucaaa

SEQ ID NO: 2879858 - RNA, 19 nt, Artificial Sequence
  Description of Artificial Sequence: Synthetic oligonucleotide
cguccaccagaauaagagc

SEQ ID NO: 2879859 - RNA, 19 nt, Artificial Sequence
  Description of Artificial Sequence: Synthetic oligonucleotide
cccauuuagaaaguccuga

SEQ ID NO: 2879860 - RNA, 19 nt, Artificial Sequence
  Description of Artificial Sequence: Synthetic oligonucleotide
ggguucugcaaugacuguc

SEQ ID NO: 2879861 - RNA, 19 nt, Artificial Sequence
  Description of Artificial Sequence: Synthetic oligonucleotide
ucucuccuuugaacuugau

SEQ ID NO: 2879862 - RNA, 19 nt, Artificial Sequence
  Description of Artificial Sequence: Synthetic oligonucleotide
gcgguuuggauugcuguug

SEQ ID NO: 2879863 - RNA, 19 nt, Artificial Sequence
  Description of Artificial Sequence: Synthetic oligonucleotide
gccuagagccugauuuagg

SEQ ID NO: 2879864 - RNA, 19 nt, Artificial Sequence
  Description of Artificial Sequence: Synthetic oligonucleotide
gcuugaauuucauaccauu

SEQ ID NO: 2879865 - RNA, 19 nt, Artificial Sequence
  Description of Artificial Sequence: Synthetic oligonucleotide
ucgcucacuuugccacgac

SEQ ID NO: 2879866 - RNA, 19 nt, Artificial Sequence
  Description of Artificial Sequence: Synthetic oligonucleotide
cuuucucuccuuugaacuu

SEQ ID NO: 2879867 - RNA, 19 nt, Artificial Sequence
  Description of Artificial Sequence: Synthetic oligonucleotide
gagugguggucauuguauu

SEQ ID NO: 2879868 - RNA, 19 nt, Artificial Sequence
  Description of Artificial Sequence: Synthetic oligonucleotide
auuuugagugguggucauu

SEQ ID NO: 2879869 - RNA, 19 nt, Artificial Sequence
  Description of Artificial Sequence: Synthetic oligonucleotide
cugccuagagccugauuua

SEQ ID NO: 2879870 - RNA, 19 nt, Artificial Sequence
  Description of Artificial Sequence: Synthetic oligonucleotide
gcucacuuugccacgacaa

SEQ ID NO: 2879871 - RNA, 19 nt, Artificial Sequence
  Description of Artificial Sequence: Synthetic oligonucleotide
ccagaauaagagcucccca

SEQ ID NO: 2879872 - RNA, 19 nt, Artificial Sequence
  Description of Artificial Sequence: Synthetic oligonucleotide
ggcuccaucuuucucuccu

SEQ ID NO: 2879873 - RNA, 19 nt, Artificial Sequence
  Description of Artificial Sequence: Synthetic oligonucleotide
auacaccugccuagagccu

SEQ ID NO: 2879874 - RNA, 19 nt, Artificial Sequence
  Description of Artificial Sequence: Synthetic oligonucleotide
ccugccuagagccugauuu

SEQ ID NO: 2879875 - RNA, 19 nt, Artificial Sequence
  Description of Artificial Sequence: Synthetic oligonucleotide
cgaucguccaccagaauaa

SEQ ID NO: 2879876 - RNA, 19 nt, Artificial Sequence
  Description of Artificial Sequence: Synthetic oligonucleotide
uucuccucuuuggguucug

SEQ ID NO: 2879877 - RNA, 19 nt, Artificial Sequence
  Description of Artificial Sequence: Synthetic oligonucleotide
gcugaaucuguugccucac

SEQ ID NO: 2879878 - RNA, 19 nt, Artificial Sequence
  Description of Artificial Sequence: Synthetic oligonucleotide
cuggagcaauucaucaaau

SEQ ID NO: 2879879 - RNA, 19 nt, Artificial Sequence
  Description of Artificial Sequence: Synthetic oligonucleotide
cuguaugcuugaauuucau

SEQ ID NO: 2879880 - RNA, 19 nt, Artificial Sequence
  Description of Artificial Sequence: Synthetic oligonucleotide
ggugcugaaucuguugccu

SEQ ID NO: 2879881 - RNA, 19 nt, Artificial Sequence
  Description of Artificial Sequence: Synthetic oligonucleotide
cacgggcauuaucaucuga

SEQ ID NO: 2879882 - RNA, 19 nt, Artificial Sequence
  Description of Artificial Sequence: Synthetic oligonucleotide
ccugauuuagggcucugua

SEQ ID NO: 2879883 - RNA, 19 nt, Artificial Sequence
  Description of Artificial Sequence: Synthetic oligonucleotide
agguugaguggugcugaau

SEQ ID NO: 2879884 - RNA, 19 nt, Artificial Sequence
  Description of Artificial Sequence: Synthetic oligonucleotide
gcaaagguugaguggugcu

SEQ ID NO: 2879885 - RNA, 19 nt, Artificial Sequence
  Description of Artificial Sequence: Synthetic oligonucleotide
cgaauacaccugccuagag

SEQ ID NO: 2879886 - RNA, 19 nt, Artificial Sequence
  Description of Artificial Sequence: Synthetic oligonucleotide
ggucauuguauugucguuu

SEQ ID NO: 2879887 - RNA, 19 nt, Artificial Sequence
  Description of Artificial Sequence: Synthetic oligonucleotide
gcaucauaguacaccugga

SEQ ID NO: 2879888 - RNA, 19 nt, Artificial Sequence
  Description of Artificial Sequence: Synthetic oligonucleotide
cugucuugacugacuccaa

SEQ ID NO: 2879889 - RNA, 19 nt, Artificial Sequence
  Description of Artificial Sequence: Synthetic oligonucleotide
uugccacgacaaaccgcua

SEQ ID NO: 2879890 - RNA, 19 nt, Artificial Sequence
  Description of Artificial Sequence: Synthetic oligonucleotide
cucgcucacuuugccacga

SEQ ID NO: 2879891 - RNA, 19 nt, Artificial Sequence
  Description of Artificial Sequence: Synthetic oligonucleotide
ccauugacggccaggcaaa

SEQ ID NO: 2879892 - RNA, 19 nt, Artificial Sequence
  Description of Artificial Sequence: Synthetic oligonucleotide
acaccugccuagagccuga

SEQ ID NO: 2879893 - RNA, 19 nt, Artificial Sequence
  Description of Artificial Sequence: Synthetic oligonucleotide
gguuuggauugcuguugaa

SEQ ID NO: 2879894 - RNA, 19 nt, Artificial Sequence
  Description of Artificial Sequence: Synthetic oligonucleotide
aucuguugccucacccauu

SEQ ID NO: 2879895 - RNA, 19 nt, Artificial Sequence
  Description of Artificial Sequence: Synthetic oligonucleotide
agccugauuuagggcucug

SEQ ID NO: 2879896 - RNA, 19 nt, Artificial Sequence
  Description of Artificial Sequence: Synthetic oligonucleotide
ccuuugaacuugauggcau

SEQ ID NO: 2879897 - RNA, 19 nt, Artificial Sequence
  Description of Artificial Sequence: Synthetic oligonucleotide
gcacgggcauuaucaucug

SEQ ID NO: 2879898 - RNA, 19 nt, Artificial Sequence
  Description of Artificial Sequence: Synthetic oligonucleotide
agggcucuguaugcuugaa

SEQ ID NO: 2879899 - RNA, 19 nt, Artificial Sequence
  Description of Artificial Sequence: Synthetic oligonucleotide
ccauuuagaaaguccugau

SEQ ID NO: 2879900 - RNA, 19 nt, Artificial Sequence
  Description of Artificial Sequence: Synthetic oligonucleotide
gcucuguaugcuugaauuu

SEQ ID NO: 2879901 - RNA, 19 nt, Artificial Sequence
  Description of Artificial Sequence: Synthetic oligonucleotide
ccucuuaauuuugaguggu

SEQ ID NO: 2879902 - RNA, 19 nt, Artificial Sequence
  Description of Artificial Sequence: Synthetic oligonucleotide
accugccuagagccugauu

SEQ ID NO: 2879903 - RNA, 19 nt, Artificial Sequence
  Description of Artificial Sequence: Synthetic oligonucleotide
uuacgacagcacgggcauu

SEQ ID NO: 2879904 - RNA, 19 nt, Artificial Sequence
  Description of Artificial Sequence: Synthetic oligonucleotide
acgacagcacgggcauuau

SEQ ID NO: 2879905 - RNA, 19 nt, Artificial Sequence
  Description of Artificial Sequence: Synthetic oligonucleotide
gggcacuugcaaagguuga

SEQ ID NO: 2879906 - RNA, 19 nt, Artificial Sequence
  Description of Artificial Sequence: Synthetic oligonucleotide
gcacuugcaaagguugagu

SEQ ID NO: 2879907 - RNA, 19 nt, Artificial Sequence
  Description of Artificial Sequence: Synthetic oligonucleotide
gcaauucaucaaaucaguu

SEQ ID NO: 2879908 - RNA, 19 nt, Artificial Sequence
  Description of Artificial Sequence: Synthetic oligonucleotide
gagccugauuuagggcucu

SEQ ID NO: 2879909 - RNA, 19 nt, Artificial Sequence
  Description of Artificial Sequence: Synthetic oligonucleotide
ccgcuaugagaagggcucc

SEQ ID NO: 2879910 - RNA, 19 nt, Artificial Sequence
  Description of Artificial Sequence: Synthetic oligonucleotide
cgggcauuaucaucugaga

SEQ ID NO: 2879911 - RNA, 19 nt, Artificial Sequence
  Description of Artificial Sequence: Synthetic oligonucleotide
ccacgacaaaccgcuauga

SEQ ID NO: 2879912 - RNA, 19 nt, Artificial Sequence
  Description of Artificial Sequence: Synthetic oligonucleotide
cauugacggccaggcaaaa

SEQ ID NO: 2879913 - RNA, 19 nt, Artificial Sequence
  Description of Artificial Sequence: Synthetic oligonucleotide
gaguggugcugaaucuguu

SEQ ID NO: 2879914 - RNA, 19 nt, Artificial Sequence
  Description of Artificial Sequence: Synthetic oligonucleotide
guccugauauauagcgguu

SEQ ID NO: 2879915 - RNA, 19 nt, Artificial Sequence
  Description of Artificial Sequence: Synthetic oligonucleotide
ccaggcaaaaggccucuua

SEQ ID NO: 2879916 - RNA, 19 nt, Artificial Sequence
  Description of Artificial Sequence: Synthetic oligonucleotide
cgguuuggauugcuguuga

SEQ ID NO: 2879917 - RNA, 19 nt, Artificial Sequence
  Description of Artificial Sequence: Synthetic oligonucleotide
gggcucuguaugcuugaau

SEQ ID NO: 2879918 - RNA, 19 nt, Artificial Sequence
  Description of Artificial Sequence: Synthetic oligonucleotide
ggauugcuguugaaacgau

SEQ ID NO: 2879919 - RNA, 19 nt, Artificial Sequence
  Description of Artificial Sequence: Synthetic oligonucleotide
gcuaugagaagggcuccau

SEQ ID NO: 2879920 - RNA, 19 nt, Artificial Sequence
  Description of Artificial Sequence: Synthetic oligonucleotide
cggccaggcaaaaggccuc

SEQ ID NO: 2879921 - RNA, 19 nt, Artificial Sequence
  Description of Artificial Sequence: Synthetic oligonucleotide
cuguugccucacccauuua

SEQ ID NO: 2879922 - RNA, 19 nt, Artificial Sequence
  Description of Artificial Sequence: Synthetic oligonucleotide
cgcucacuuugccacgaca

SEQ ID NO: 2879923 - RNA, 19 nt, Artificial Sequence
  Description of Artificial Sequence: Synthetic oligonucleotide
cgacagcacgggcauuauc

SEQ ID NO: 2879924 - RNA, 19 nt, Artificial Sequence
  Description of Artificial Sequence: Synthetic oligonucleotide
gccugauuuagggcucugu

SEQ ID NO: 2879925 - RNA, 19 nt, Artificial Sequence
  Description of Artificial Sequence: Synthetic oligonucleotide
ccugaagaucuuucacauu

SEQ ID NO: 2879926 - RNA, 19 nt, Artificial Sequence
  Description of Artificial Sequence: Synthetic oligonucleotide
ccucacccauuuagaaagu

SEQ ID NO: 2879927 - RNA, 19 nt, Artificial Sequence
  Description of Artificial Sequence: Synthetic oligonucleotide
gcuccaucuuucucuccuu

SEQ ID NO: 2879928 - RNA, 19 nt, Artificial Sequence
  Description of Artificial Sequence: Synthetic oligonucleotide
cgcuaugagaagggcucca

SEQ ID NO: 2879929 - RNA, 19 nt, Artificial Sequence
  Description of Artificial Sequence: Synthetic oligonucleotide
caccugccuagagccugau

SEQ ID NO: 2879930 - RNA, 19 nt, Artificial Sequence
  Description of Artificial Sequence: Synthetic oligonucleotide
ccagacccucgcucacuuu

SEQ ID NO: 2879931 - RNA, 19 nt, Artificial Sequence
  Description of Artificial Sequence: Synthetic oligonucleotide
gccaggcaaaaggccucuu

SEQ ID NO: 2879932 - RNA, 19 nt, Artificial Sequence
  Description of Artificial Sequence: Synthetic oligonucleotide
gauaaagucacuauacucc

SEQ ID NO: 2879933 - RNA, 19 nt, Artificial Sequence
  Description of Artificial Sequence: Synthetic oligonucleotide
uuugcugugggccaagagg

SEQ ID NO: 2879934 - RNA, 19 nt, Artificial Sequence
  Description of Artificial Sequence: Synthetic oligonucleotide
uaugcacagauccaggagg

SEQ ID NO: 2879935 - RNA, 19 nt, Artificial Sequence
  Description of Artificial Sequence: Synthetic oligonucleotide
acaaacuuucuuuaacagc

SEQ ID NO: 2879936 - RNA, 19 nt, Artificial Sequence
  Description of Artificial Sequence: Synthetic oligonucleotide
aaagucacuauacuccauc

SEQ ID NO: 2879937 - RNA, 19 nt, Artificial Sequence
  Description of Artificial Sequence: Synthetic oligonucleotide
aaaagggcaaacuccagug

SEQ ID NO: 2879938 - RNA, 19 nt, Artificial Sequence
  Description of Artificial Sequence: Synthetic oligonucleotide
aagucacuauacuccaucc

SEQ ID NO: 2879939 - RNA, 19 nt, Artificial Sequence
  Description of Artificial Sequence: Synthetic oligonucleotide
ugucuacugaauccgagcg

SEQ ID NO: 2879940 - RNA, 19 nt, Artificial Sequence
  Description of Artificial Sequence: Synthetic oligonucleotide
ugggaaacaucccugaacc

SEQ ID NO: 2879941 - RNA, 19 nt, Artificial Sequence
  Description of Artificial Sequence: Synthetic oligonucleotide
agugccaaaaguuggcccc

SEQ ID NO: 2879942 - RNA, 19 nt, Artificial Sequence
  Description of Artificial Sequence: Synthetic oligonucleotide
aacuuucuuuaacagcacg

SEQ ID NO: 2879943 - RNA, 19 nt, Artificial Sequence
  Description of Artificial Sequence: Synthetic oligonucleotide
uuuaacagcacguuuugcu

SEQ ID NO: 2879944 - RNA, 19 nt, Artificial Sequence
  Description of Artificial Sequence: Synthetic oligonucleotide
caaacuuucuuuaacagca

SEQ ID NO: 2879945 - RNA, 19 nt, Artificial Sequence
  Description of Artificial Sequence: Synthetic oligonucleotide
aaaacacccucgcugcuac

SEQ ID NO: 2879946 - RNA, 19 nt, Artificial Sequence
  Description of Artificial Sequence: Synthetic oligonucleotide
aaaaguuggccccggaaca

SEQ ID NO: 2879947 - RNA, 19 nt, Artificial Sequence
  Description of Artificial Sequence: Synthetic oligonucleotide
ugauaaagucacuauacuc

SEQ ID NO: 2879948 - RNA, 19 nt, Artificial Sequence
  Description of Artificial Sequence: Synthetic oligonucleotide
aacaccaguaugcacagau

SEQ ID NO: 2879949 - RNA, 19 nt, Artificial Sequence
  Description of Artificial Sequence: Synthetic oligonucleotide
aaguaccugauaaagucac

SEQ ID NO: 2879950 - RNA, 19 nt, Artificial Sequence
  Description of Artificial Sequence: Synthetic oligonucleotide
ucacaaacuuucuuuaaca

SEQ ID NO: 2879951 - RNA, 19 nt, Artificial Sequence
  Description of Artificial Sequence: Synthetic oligonucleotide
aagggcaaacuccagugag

SEQ ID NO: 2879952 - RNA, 19 nt, Artificial Sequence
  Description of Artificial Sequence: Synthetic oligonucleotide
ucacaguucacaaacuuuc

SEQ ID NO: 2879953 - RNA, 19 nt, Artificial Sequence
  Description of Artificial Sequence: Synthetic oligonucleotide
gugguuugaaggcacagcg

SEQ ID NO: 2879954 - RNA, 19 nt, Artificial Sequence
  Description of Artificial Sequence: Synthetic oligonucleotide
aauccgagcgccugcugcc

SEQ ID NO: 2879955 - RNA, 19 nt, Artificial Sequence
  Description of Artificial Sequence: Synthetic oligonucleotide
uucacaaacuuucuuuaac

SEQ ID NO: 2879956 - RNA, 19 nt, Artificial Sequence
  Description of Artificial Sequence: Synthetic oligonucleotide
ugugagugccgucacaccc

SEQ ID NO: 2879957 - RNA, 19 nt, Artificial Sequence
  Description of Artificial Sequence: Synthetic oligonucleotide
ucaaaguaccugauaaagu

SEQ ID NO: 2879958 - RNA, 19 nt, Artificial Sequence
  Description of Artificial Sequence: Synthetic oligonucleotide
gacaccacagcauacucgc

SEQ ID NO: 2879959 - RNA, 19 nt, Artificial Sequence
  Description of Artificial Sequence: Synthetic oligonucleotide
uuaacagcacguuuugcug

SEQ ID NO: 2879960 - RNA, 19 nt, Artificial Sequence
  Description of Artificial Sequence: Synthetic oligonucleotide
gucacuauacuccauccag

SEQ ID NO: 2879961 - RNA, 19 nt, Artificial Sequence
  Description of Artificial Sequence: Synthetic oligonucleotide
gguuccagugguuugaagg

SEQ ID NO: 2879962 - RNA, 19 nt, Artificial Sequence
  Description of Artificial Sequence: Synthetic oligonucleotide
cagugcuugggaaacaucc

SEQ ID NO: 2879963 - RNA, 19 nt, Artificial Sequence
  Description of Artificial Sequence: Synthetic oligonucleotide
uugcugugggccaagaggc

SEQ ID NO: 2879964 - RNA, 19 nt, Artificial Sequence
  Description of Artificial Sequence: Synthetic oligonucleotide
ucuuuaacagcacguuuug

SEQ ID NO: 2879965 - RNA, 19 nt, Artificial Sequence
  Description of Artificial Sequence: Synthetic oligonucleotide
cuauacuccauccagaaaa

SEQ ID NO: 2879966 - RNA, 19 nt, Artificial Sequence
  Description of Artificial Sequence: Synthetic oligonucleotide
ucuacugaauccgagcgcc

SEQ ID NO: 2879967 - RNA, 19 nt, Artificial Sequence
  Description of Artificial Sequence: Synthetic oligonucleotide
auaaagucacuauacucca

SEQ ID NO: 2879968 - RNA, 19 nt, Artificial Sequence
  Description of Artificial Sequence: Synthetic oligonucleotide
gucaaaguaccugauaaag

SEQ ID NO: 2879969 - RNA, 19 nt, Artificial Sequence
  Description of Artificial Sequence: Synthetic oligonucleotide
guggcaugagcucagcucg

SEQ ID NO: 2879970 - RNA, 19 nt, Artificial Sequence
  Description of Artificial Sequence: Synthetic oligonucleotide
acuccauccagaaaacacc

SEQ ID NO: 2879971 - RNA, 19 nt, Artificial Sequence
  Description of Artificial Sequence: Synthetic oligonucleotide
uguaccuugcagaugucca

SEQ ID NO: 2879972 - RNA, 19 nt, Artificial Sequence
  Description of Artificial Sequence: Synthetic oligonucleotide
uucuuuaacagcacguuuu

SEQ ID NO: 2879973 - RNA, 19 nt, Artificial Sequence
  Description of Artificial Sequence: Synthetic oligonucleotide
auccagaaaacacccucgc

SEQ ID NO: 2879974 - RNA, 19 nt, Artificial Sequence
  Description of Artificial Sequence: Synthetic oligonucleotide
caccaguaugcacagaucc

SEQ ID NO: 2879975 - RNA, 19 nt, Artificial Sequence
  Description of Artificial Sequence: Synthetic oligonucleotide
cacaaacuuucuuuaacag

SEQ ID NO: 2879976 - RNA, 19 nt, Artificial Sequence
  Description of Artificial Sequence: Synthetic oligonucleotide
gagucaaaguaccugauaa

SEQ ID NO: 2879977 - RNA, 19 nt, Artificial Sequence
  Description of Artificial Sequence: Synthetic oligonucleotide
gaaacaucccugaaccccg

SEQ ID NO: 2879978 - RNA, 19 nt, Artificial Sequence
  Description of Artificial Sequence: Synthetic oligonucleotide
uuugaaggcacagcgacac

SEQ ID NO: 2879979 - RNA, 19 nt, Artificial Sequence
  Description of Artificial Sequence: Synthetic oligonucleotide
uccacggagucaaaguacc

SEQ ID NO: 2879980 - RNA, 19 nt, Artificial Sequence
  Description of Artificial Sequence: Synthetic oligonucleotide
cauccagaaaacacccucg

SEQ ID NO: 2879981 - RNA, 19 nt, Artificial Sequence
  Description of Artificial Sequence: Synthetic oligonucleotide
uugggaaacaucccugaac

SEQ ID NO: 2879982 - RNA, 19 nt, Artificial Sequence
  Description of Artificial Sequence: Synthetic oligonucleotide
acuccagugaggcacgcuc

SEQ ID NO: 2879983 - RNA, 19 nt, Artificial Sequence
  Description of Artificial Sequence: Synthetic oligonucleotide
agugccgucacacccacug

SEQ ID NO: 2879984 - RNA, 19 nt, Artificial Sequence
  Description of Artificial Sequence: Synthetic oligonucleotide
aaaguuggccccggaacac

SEQ ID NO: 2879985 - RNA, 19 nt, Artificial Sequence
  Description of Artificial Sequence: Synthetic oligonucleotide
uauacuccauccagaaaac

SEQ ID NO: 2879986 - RNA, 19 nt, Artificial Sequence
  Description of Artificial Sequence: Synthetic oligonucleotide
caaaaguuggccccggaac

SEQ ID NO: 2879987 - RNA, 19 nt, Artificial Sequence
  Description of Artificial Sequence: Synthetic oligonucleotide
acugaauccgagcgccugc

SEQ ID NO: 2879988 - RNA, 19 nt, Artificial Sequence
  Description of Artificial Sequence: Synthetic oligonucleotide
cuugcagauguccacggag

SEQ ID NO: 2879989 - RNA, 19 nt, Artificial Sequence
  Description of Artificial Sequence: Synthetic oligonucleotide
uggagcaggguuccagugg

SEQ ID NO: 2879990 - RNA, 19 nt, Artificial Sequence
  Description of Artificial Sequence: Synthetic oligonucleotide
aaaguaccugauaaaguca

SEQ ID NO: 2879991 - RNA, 19 nt, Artificial Sequence
  Description of Artificial Sequence: Synthetic oligonucleotide
agugguuugaaggcacagc

SEQ ID NO: 2879992 - RNA, 19 nt, Artificial Sequence
  Description of Artificial Sequence: Synthetic oligonucleotide
guuccagugguuugaaggc

SEQ ID NO: 2879993 - RNA, 19 nt, Artificial Sequence
  Description of Artificial Sequence: Synthetic oligonucleotide
acugugagugccgucacac

SEQ ID NO: 2879994 - RNA, 19 nt, Artificial Sequence
  Description of Artificial Sequence: Synthetic oligonucleotide
cuccauccagaaaacaccc

SEQ ID NO: 2879995 - RNA, 19 nt, Artificial Sequence
  Description of Artificial Sequence: Synthetic oligonucleotide
caucccugaaccccgagcc

SEQ ID NO: 2879996 - RNA, 19 nt, Artificial Sequence
  Description of Artificial Sequence: Synthetic oligonucleotide
acaucccugaaccccgagc

SEQ ID NO: 2879997 - RNA, 19 nt, Artificial Sequence
  Description of Artificial Sequence: Synthetic oligonucleotide
aaagggcaaacuccaguga

SEQ ID NO: 2879998 - RNA, 19 nt, Artificial Sequence
  Description of Artificial Sequence: Synthetic oligonucleotide
caugagcucagcucgcagg

SEQ ID NO: 2879999 - RNA, 19 nt, Artificial Sequence
  Description of Artificial Sequence: Synthetic oligonucleotide
aaacuuucuuuaacagcac

SEQ ID NO: 2880000 - RNA, 19 nt, Artificial Sequence
  Description of Artificial Sequence: Synthetic oligonucleotide
aacacccucgcugcuaccg

SEQ ID NO: 2880001 - RNA, 19 nt, Artificial Sequence
  Description of Artificial Sequence: Synthetic oligonucleotide
ucacuauacuccauccaga

SEQ ID NO: 2880002 - RNA, 19 nt, Artificial Sequence
  Description of Artificial Sequence: Synthetic oligonucleotide
uccagcaugacaucacagu

SEQ ID NO: 2880003 - RNA, 19 nt, Artificial Sequence
  Description of Artificial Sequence: Synthetic oligonucleotide
uccgaguguaccuugcaga

SEQ ID NO: 2880004 - RNA, 19 nt, Artificial Sequence
  Description of Artificial Sequence: Synthetic oligonucleotide
ugaggcacgcuccagcacu

SEQ ID NO: 2880005 - RNA, 19 nt, Artificial Sequence
  Description of Artificial Sequence: Synthetic oligonucleotide
aacagcacguuuugcugug

SEQ ID NO: 2880006 - RNA, 19 nt, Artificial Sequence
  Description of Artificial Sequence: Synthetic oligonucleotide
uguggcaugagcucagcuc

SEQ ID NO: 2880007 - RNA, 19 nt, Artificial Sequence
  Description of Artificial Sequence: Synthetic oligonucleotide
ugaaccccgagccuccugc

SEQ ID NO: 2880008 - RNA, 19 nt, Artificial Sequence
  Description of Artificial Sequence: Synthetic oligonucleotide
ccugauaaagucacuauac

SEQ ID NO: 2880009 - RNA, 19 nt, Artificial Sequence
  Description of Artificial Sequence: Synthetic oligonucleotide
agcacguuuugcugugggc

SEQ ID NO: 2880010 - RNA, 19 nt, Artificial Sequence
  Description of Artificial Sequence: Synthetic oligonucleotide
uuucuuuaacagcacguuu

SEQ ID NO: 2880011 - RNA, 19 nt, Artificial Sequence
  Description of Artificial Sequence: Synthetic oligonucleotide
guggcugucuacugaaucc

SEQ ID NO: 2880012 - RNA, 19 nt, Artificial Sequence
  Description of Artificial Sequence: Synthetic oligonucleotide
aguucacaaacuuucuuua

SEQ ID NO: 2880013 - RNA, 19 nt, Artificial Sequence
  Description of Artificial Sequence: Synthetic oligonucleotide
uuuugcugugggccaagag

SEQ ID NO: 2880014 - RNA, 19 nt, Artificial Sequence
  Description of Artificial Sequence: Synthetic oligonucleotide
gaauccgagcgccugcugc

SEQ ID NO: 2880015 - RNA, 19 nt, Artificial Sequence
  Description of Artificial Sequence: Synthetic oligonucleotide
ugaaggcacagcgacacca

SEQ ID NO: 2880016 - RNA, 19 nt, Artificial Sequence
  Description of Artificial Sequence: Synthetic oligonucleotide
uaacagcacguuuugcugu

SEQ ID NO: 2880017 - RNA, 19 nt, Artificial Sequence
  Description of Artificial Sequence: Synthetic oligonucleotide
ugcuugggaaacaucccug

SEQ ID NO: 2880018 - RNA, 19 nt, Artificial Sequence
  Description of Artificial Sequence: Synthetic oligonucleotide
cugucuacugaauccgagc

SEQ ID NO: 2880019 - RNA, 19 nt, Artificial Sequence
  Description of Artificial Sequence: Synthetic oligonucleotide
gaguguaccuugcagaugu

SEQ ID NO: 2880020 - RNA, 19 nt, Artificial Sequence
  Description of Artificial Sequence: Synthetic oligonucleotide
caccagugccaaaaguugg

SEQ ID NO: 2880021 - RNA, 19 nt, Artificial Sequence
  Description of Artificial Sequence: Synthetic oligonucleotide
augacaucacaguucacaa

SEQ ID NO: 2880022 - RNA, 19 nt, Artificial Sequence
  Description of Artificial Sequence: Synthetic oligonucleotide
agugcuugggaaacauccc

SEQ ID NO: 2880023 - RNA, 19 nt, Artificial Sequence
  Description of Artificial Sequence: Synthetic oligonucleotide
acggagucaaaguaccuga

SEQ ID NO: 2880024 - RNA, 19 nt, Artificial Sequence
  Description of Artificial Sequence: Synthetic oligonucleotide
gguuugaaggcacagcgac

SEQ ID NO: 2880025 - RNA, 19 nt, Artificial Sequence
  Description of Artificial Sequence: Synthetic oligonucleotide
uguccacggagucaaagua

SEQ ID NO: 2880026 - RNA, 19 nt, Artificial Sequence
  Description of Artificial Sequence: Synthetic oligonucleotide
aaguuggccccggaacacc

SEQ ID NO: 2880027 - RNA, 19 nt, Artificial Sequence
  Description of Artificial Sequence: Synthetic oligonucleotide
uugcagauguccacggagu

SEQ ID NO: 2880028 - RNA, 19 nt, Artificial Sequence
  Description of Artificial Sequence: Synthetic oligonucleotide
ucaggcggccaccagugcc

SEQ ID NO: 2880029 - RNA, 19 nt, Artificial Sequence
  Description of Artificial Sequence: Synthetic oligonucleotide
caugacaucacaguucaca

SEQ ID NO: 2880030 - RNA, 19 nt, Artificial Sequence
  Description of Artificial Sequence: Synthetic oligonucleotide
uccagugguuugaaggcac

SEQ ID NO: 2880031 - RNA, 19 nt, Artificial Sequence
  Description of Artificial Sequence: Synthetic oligonucleotide
accagugccaaaaguuggc

SEQ ID NO: 2880032 - RNA, 19 nt, Artificial Sequence
  Description of Artificial Sequence: Synthetic oligonucleotide
gauguccacggagucaaag

SEQ ID NO: 2880033 - RNA, 19 nt, Artificial Sequence
  Description of Artificial Sequence: Synthetic oligonucleotide
aauccgaguguaccuugca

SEQ ID NO: 2880034 - RNA, 19 nt, Artificial Sequence
  Description of Artificial Sequence: Synthetic oligonucleotide
uccagcacugugagugccg

SEQ ID NO: 2880035 - RNA, 19 nt, Artificial Sequence
  Description of Artificial Sequence: Synthetic oligonucleotide
gagcucagcucgcaggugc

SEQ ID NO: 2880036 - RNA, 19 nt, Artificial Sequence
  Description of Artificial Sequence: Synthetic oligonucleotide
caaacuccagugaggcacg

SEQ ID NO: 2880037 - RNA, 19 nt, Artificial Sequence
  Description of Artificial Sequence: Synthetic oligonucleotide
cacagauccaggagguggc

SEQ ID NO: 2880038 - RNA, 19 nt, Artificial Sequence
  Description of Artificial Sequence: Synthetic oligonucleotide
acuuucuuuaacagcacgu

SEQ ID NO: 2880039 - RNA, 19 nt, Artificial Sequence
  Description of Artificial Sequence: Synthetic oligonucleotide
ggaaacaucccugaacccc

SEQ ID NO: 2880040 - RNA, 19 nt, Artificial Sequence
  Description of Artificial Sequence: Synthetic oligonucleotide
aaacacccucgcugcuacc

SEQ ID NO: 2880041 - RNA, 19 nt, Artificial Sequence
  Description of Artificial Sequence: Synthetic oligonucleotide
uccagaaaacacccucgcu

SEQ ID NO: 2880042 - RNA, 19 nt, Artificial Sequence
  Description of Artificial Sequence: Synthetic oligonucleotide
agucacuauacuccaucca

SEQ ID NO: 2880043 - RNA, 19 nt, Artificial Sequence
  Description of Artificial Sequence: Synthetic oligonucleotide
caguaugcacagauccagg

SEQ ID NO: 2880044 - RNA, 19 nt, Artificial Sequence
  Description of Artificial Sequence: Synthetic oligonucleotide
caagaggcggcccaggcuc

SEQ ID NO: 2880045 - RNA, 19 nt, Artificial Sequence
  Description of Artificial Sequence: Synthetic oligonucleotide
accacagcauacucgccag

SEQ ID NO: 2880046 - RNA, 19 nt, Artificial Sequence
  Description of Artificial Sequence: Synthetic oligonucleotide
agucaaaguaccugauaaa

SEQ ID NO: 2880047 - RNA, 19 nt, Artificial Sequence
  Description of Artificial Sequence: Synthetic oligonucleotide
ugguuugaaggcacagcga

SEQ ID NO: 2880048 - RNA, 19 nt, Artificial Sequence
  Description of Artificial Sequence: Synthetic oligonucleotide
auccgaguguaccuugcag

SEQ ID NO: 2880049 - RNA, 19 nt, Artificial Sequence
  Description of Artificial Sequence: Synthetic oligonucleotide
auguccacggagucaaagu

SEQ ID NO: 2880050 - RNA, 19 nt, Artificial Sequence
  Description of Artificial Sequence: Synthetic oligonucleotide
accuugcagauguccacgg

SEQ ID NO: 2880051 - RNA, 19 nt, Artificial Sequence
  Description of Artificial Sequence: Synthetic oligonucleotide
augagcucagcucgcaggu

SEQ ID NO: 2880052 - RNA, 19 nt, Artificial Sequence
  Description of Artificial Sequence: Synthetic oligonucleotide
cucgcugcuaccguguggc

SEQ ID NO: 2880053 - RNA, 19 nt, Artificial Sequence
  Description of Artificial Sequence: Synthetic oligonucleotide
cagugccaaaaguuggccc

SEQ ID NO: 2880054 - RNA, 19 nt, Artificial Sequence
  Description of Artificial Sequence: Synthetic oligonucleotide
agugaggcacgcuccagca

SEQ ID NO: 2880055 - RNA, 19 nt, Artificial Sequence
  Description of Artificial Sequence: Synthetic oligonucleotide
acacccacugguccacugg

SEQ ID NO: 2880056 - RNA, 19 nt, Artificial Sequence
  Description of Artificial Sequence: Synthetic oligonucleotide
cagcaugacaucacaguuc

SEQ ID NO: 2880057 - RNA, 19 nt, Artificial Sequence
  Description of Artificial Sequence: Synthetic oligonucleotide
acagcgacaccacagcaua

SEQ ID NO: 2880058 - RNA, 19 nt, Artificial Sequence
  Description of Artificial Sequence: Synthetic oligonucleotide
gcaaacuccagugaggcac

SEQ ID NO: 2880059 - RNA, 19 nt, Artificial Sequence
  Description of Artificial Sequence: Synthetic oligonucleotide
aaacuccagugaggcacgc

SEQ ID NO: 2880060 - RNA, 19 nt, Artificial Sequence
  Description of Artificial Sequence: Synthetic oligonucleotide
ugcugugggccaagaggcg

SEQ ID NO: 2880061 - RNA, 19 nt, Artificial Sequence
  Description of Artificial Sequence: Synthetic oligonucleotide
cuuuaacagcacguuuugc

SEQ ID NO: 2880062 - RNA, 19 nt, Artificial Sequence
  Description of Artificial Sequence: Synthetic oligonucleotide
aacaucccugaaccccgag

SEQ ID NO: 2880063 - RNA, 19 nt, Artificial Sequence
  Description of Artificial Sequence: Synthetic oligonucleotide
acaguucacaaacuuucuu

SEQ ID NO: 2880064 - RNA, 19 nt, Artificial Sequence
  Description of Artificial Sequence: Synthetic oligonucleotide
agcacugugagugccguca

SEQ ID NO: 2880065 - RNA, 19 nt, Artificial Sequence
  Description of Artificial Sequence: Synthetic oligonucleotide
ugacaucacaguucacaaa

SEQ ID NO: 2880066 - RNA, 19 nt, Artificial Sequence
  Description of Artificial Sequence: Synthetic oligonucleotide
caauccgaguguaccuugc

SEQ ID NO: 2880067 - RNA, 19 nt, Artificial Sequence
  Description of Artificial Sequence: Synthetic oligonucleotide
uaaagucacuauacuccau

SEQ ID NO: 2880068 - RNA, 19 nt, Artificial Sequence
  Description of Artificial Sequence: Synthetic oligonucleotide
ugccgucacacccacuggu

SEQ ID NO: 2880069 - RNA, 19 nt, Artificial Sequence
  Description of Artificial Sequence: Synthetic oligonucleotide
ugccaauccgaguguaccu

SEQ ID NO: 2880070 - RNA, 19 nt, Artificial Sequence
  Description of Artificial Sequence: Synthetic oligonucleotide
cacagcauacucgccaggc

SEQ ID NO: 2880071 - RNA, 19 nt, Artificial Sequence
  Description of Artificial Sequence: Synthetic oligonucleotide
gucuacugaauccgagcgc

SEQ ID NO: 2880072 - RNA, 19 nt, Artificial Sequence
  Description of Artificial Sequence: Synthetic oligonucleotide
aaggcacagcgacaccaca

SEQ ID NO: 2880073 - RNA, 19 nt, Artificial Sequence
  Description of Artificial Sequence: Synthetic oligonucleotide
uccagugaggcacgcucca

SEQ ID NO: 2880074 - RNA, 19 nt, Artificial Sequence
  Description of Artificial Sequence: Synthetic oligonucleotide
cugccaauccgaguguacc

SEQ ID NO: 2880075 - RNA, 19 nt, Artificial Sequence
  Description of Artificial Sequence: Synthetic oligonucleotide
uccauccagaaaacacccu

SEQ ID NO: 2880076 - RNA, 19 nt, Artificial Sequence
  Description of Artificial Sequence: Synthetic oligonucleotide
acuauacuccauccagaaa

SEQ ID NO: 2880077 - RNA, 19 nt, Artificial Sequence
  Description of Artificial Sequence: Synthetic oligonucleotide
cacgcuccagcacugugag

SEQ ID NO: 2880078 - RNA, 19 nt, Artificial Sequence
  Description of Artificial Sequence: Synthetic oligonucleotide
cagcauacucgccaggcuc

SEQ ID NO: 2880079 - RNA, 19 nt, Artificial Sequence
  Description of Artificial Sequence: Synthetic oligonucleotide
ggugcccuggccaaugugg

SEQ ID NO: 2880080 - RNA, 19 nt, Artificial Sequence
  Description of Artificial Sequence: Synthetic oligonucleotide
aggcggcccaggcucaggc

SEQ ID NO: 2880081 - RNA, 19 nt, Artificial Sequence
  Description of Artificial Sequence: Synthetic oligonucleotide
guaccuugcagauguccac

SEQ ID NO: 2880082 - RNA, 19 nt, Artificial Sequence
  Description of Artificial Sequence: Synthetic oligonucleotide
uacugaauccgagcgccug

SEQ ID NO: 2880083 - RNA, 19 nt, Artificial Sequence
  Description of Artificial Sequence: Synthetic oligonucleotide
acuggcagugcuugggaaa

SEQ ID NO: 2880084 - RNA, 19 nt, Artificial Sequence
  Description of Artificial Sequence: Synthetic oligonucleotide
cuccagugaggcacgcucc

SEQ ID NO: 2880085 - RNA, 19 nt, Artificial Sequence
  Description of Artificial Sequence: Synthetic oligonucleotide
cucgccaggcuccagcaug

SEQ ID NO: 2880086 - RNA, 19 nt, Artificial Sequence
  Description of Artificial Sequence: Synthetic oligonucleotide
cacuauacuccauccagaa

SEQ ID NO: 2880087 - RNA, 19 nt, Artificial Sequence
  Description of Artificial Sequence: Synthetic oligonucleotide
ugggccaagaggcggccca

SEQ ID NO: 2880088 - RNA, 19 nt, Artificial Sequence
  Description of Artificial Sequence: Synthetic oligonucleotide
agggcaaacuccagugagg

SEQ ID NO: 2880089 - RNA, 19 nt, Artificial Sequence
  Description of Artificial Sequence: Synthetic oligonucleotide
cacggagucaaaguaccug

SEQ ID NO: 2880090 - RNA, 19 nt, Artificial Sequence
  Description of Artificial Sequence: Synthetic oligonucleotide
agaaaacacccucgcugcu

SEQ ID NO: 2880091 - RNA, 19 nt, Artificial Sequence
  Description of Artificial Sequence: Synthetic oligonucleotide
acagcauacucgccaggcu

SEQ ID NO: 2880092 - RNA, 19 nt, Artificial Sequence
  Description of Artificial Sequence: Synthetic oligonucleotide
guucacaaacuuucuuuaa

SEQ ID NO: 2880093 - RNA, 19 nt, Artificial Sequence
  Description of Artificial Sequence: Synthetic oligonucleotide
ugagugccgucacacccac

SEQ ID NO: 2880094 - RNA, 19 nt, Artificial Sequence
  Description of Artificial Sequence: Synthetic oligonucleotide
uugaaggcacagcgacacc

SEQ ID NO: 2880095 - RNA, 19 nt, Artificial Sequence
  Description of Artificial Sequence: Synthetic oligonucleotide
cagugaggcacgcuccagc

SEQ ID NO: 2880096 - RNA, 19 nt, Artificial Sequence
  Description of Artificial Sequence: Synthetic oligonucleotide
uacucgccaggcuccagca

SEQ ID NO: 2880097 - RNA, 19 nt, Artificial Sequence
  Description of Artificial Sequence: Synthetic oligonucleotide
guguaccuugcagaugucc

SEQ ID NO: 2880098 - RNA, 19 nt, Artificial Sequence
  Description of Artificial Sequence: Synthetic oligonucleotide
ccuccugccaauccgagug

SEQ ID NO: 2880099 - RNA, 19 nt, Artificial Sequence
  Description of Artificial Sequence: Synthetic oligonucleotide
cagcacguuuugcuguggg

SEQ ID NO: 2880100 - RNA, 19 nt, Artificial Sequence
  Description of Artificial Sequence: Synthetic oligonucleotide
ugaauccgagcgccugcug

SEQ ID NO: 2880101 - RNA, 19 nt, Artificial Sequence
  Description of Artificial Sequence: Synthetic oligonucleotide
gagguggcugucuacugaa

SEQ ID NO: 2880102 - RNA, 19 nt, Artificial Sequence
  Description of Artificial Sequence: Synthetic oligonucleotide
aucacaguucacaaacuuu

SEQ ID NO: 2880103 - RNA, 19 nt, Artificial Sequence
  Description of Artificial Sequence: Synthetic oligonucleotide
ucgccaggcuccagcauga

SEQ ID NO: 2880104 - RNA, 19 nt, Artificial Sequence
  Description of Artificial Sequence: Synthetic oligonucleotide
guaccugauaaagucacua

SEQ ID NO: 2880105 - RNA, 19 nt, Artificial Sequence
  Description of Artificial Sequence: Synthetic oligonucleotide
cugauaaagucacuauacu

SEQ ID NO: 2880106 - RNA, 19 nt, Artificial Sequence
  Description of Artificial Sequence: Synthetic oligonucleotide
gcacguuuugcugugggcc

SEQ ID NO: 2880107 - RNA, 19 nt, Artificial Sequence
  Description of Artificial Sequence: Synthetic oligonucleotide
cacccacugguccacuggc

SEQ ID NO: 2880108 - RNA, 19 nt, Artificial Sequence
  Description of Artificial Sequence: Synthetic oligonucleotide
cugugagugccgucacacc

SEQ ID NO: 2880109 - RNA, 19 nt, Artificial Sequence
  Description of Artificial Sequence: Synthetic oligonucleotide
gcuaccguguggcaugagc

SEQ ID NO: 2880110 - RNA, 19 nt, Artificial Sequence
  Description of Artificial Sequence: Synthetic oligonucleotide
uaccguguggcaugagcuc

SEQ ID NO: 2880111 - RNA, 19 nt, Artificial Sequence
  Description of Artificial Sequence: Synthetic oligonucleotide
acaccaguaugcacagauc

SEQ ID NO: 2880112 - RNA, 19 nt, Artificial Sequence
  Description of Artificial Sequence: Synthetic oligonucleotide
cuggcagugcuugggaaac

SEQ ID NO: 2880113 - RNA, 19 nt, Artificial Sequence
  Description of Artificial Sequence: Synthetic oligonucleotide
cugugggccaagaggcggc

SEQ ID NO: 2880114 - RNA, 19 nt, Artificial Sequence
  Description of Artificial Sequence: Synthetic oligonucleotide
caccacagcauacucgcca

SEQ ID NO: 2880115 - RNA, 19 nt, Artificial Sequence
  Description of Artificial Sequence: Synthetic oligonucleotide
aggagguggcugucuacug

SEQ ID NO: 2880116 - RNA, 19 nt, Artificial Sequence
  Description of Artificial Sequence: Synthetic oligonucleotide
agcgacaccacagcauacu

SEQ ID NO: 2880117 - RNA, 19 nt, Artificial Sequence
  Description of Artificial Sequence: Synthetic oligonucleotide
uuggccccggaacaccagu

SEQ ID NO: 2880118 - RNA, 19 nt, Artificial Sequence
  Description of Artificial Sequence: Synthetic oligonucleotide
guggagcaggguuccagug

SEQ ID NO: 2880119 - RNA, 19 nt, Artificial Sequence
  Description of Artificial Sequence: Synthetic oligonucleotide
gcugcuaccguguggcaug

SEQ ID NO: 2880120 - RNA, 19 nt, Artificial Sequence
  Description of Artificial Sequence: Synthetic oligonucleotide
uggcaugagcucagcucgc

SEQ ID NO: 2880121 - RNA, 19 nt, Artificial Sequence
  Description of Artificial Sequence: Synthetic oligonucleotide
aaccccgagccuccugcca

SEQ ID NO: 2880122 - RNA, 19 nt, Artificial Sequence
  Description of Artificial Sequence: Synthetic oligonucleotide
ccaccagugccaaaaguug

SEQ ID NO: 2880123 - RNA, 19 nt, Artificial Sequence
  Description of Artificial Sequence: Synthetic oligonucleotide
ccaguaugcacagauccag

SEQ ID NO: 2880124 - RNA, 19 nt, Artificial Sequence
  Description of Artificial Sequence: Synthetic oligonucleotide
cacugguccacuggcagug

SEQ ID NO: 2880125 - RNA, 19 nt, Artificial Sequence
  Description of Artificial Sequence: Synthetic oligonucleotide
gggcaaacuccagugaggc

SEQ ID NO: 2880126 - RNA, 19 nt, Artificial Sequence
  Description of Artificial Sequence: Synthetic oligonucleotide
ccauccagaaaacacccuc

SEQ ID NO: 2880127 - RNA, 19 nt, Artificial Sequence
  Description of Artificial Sequence: Synthetic oligonucleotide
auacuccauccagaaaaca

SEQ ID NO: 2880128 - RNA, 19 nt, Artificial Sequence
  Description of Artificial Sequence: Synthetic oligonucleotide
ggcacagcgacaccacagc

SEQ ID NO: 2880129 - RNA, 19 nt, Artificial Sequence
  Description of Artificial Sequence: Synthetic oligonucleotide
gguggcugucuacugaauc

SEQ ID NO: 2880130 - RNA, 19 nt, Artificial Sequence
  Description of Artificial Sequence: Synthetic oligonucleotide
aggcacagcgacaccacag

SEQ ID NO: 2880131 - RNA, 19 nt, Artificial Sequence
  Description of Artificial Sequence: Synthetic oligonucleotide
ccccggaacaccaguaugc

SEQ ID NO: 2880132 - RNA, 19 nt, Artificial Sequence
  Description of Artificial Sequence: Synthetic oligonucleotide
gugccaaaaguuggccccg

SEQ ID NO: 2880133 - RNA, 19 nt, Artificial Sequence
  Description of Artificial Sequence: Synthetic oligonucleotide
guccacggagucaaaguac

SEQ ID NO: 2880134 - RNA, 19 nt, Artificial Sequence
  Description of Artificial Sequence: Synthetic oligonucleotide
accaguaugcacagaucca

SEQ ID NO: 2880135 - RNA, 19 nt, Artificial Sequence
  Description of Artificial Sequence: Synthetic oligonucleotide
ugccaaaaguuggccccgg

SEQ ID NO: 2880136 - RNA, 19 nt, Artificial Sequence
  Description of Artificial Sequence: Synthetic oligonucleotide
cuaccguguggcaugagcu

SEQ ID NO: 2880137 - RNA, 19 nt, Artificial Sequence
  Description of Artificial Sequence: Synthetic oligonucleotide
agcucagcucgcaggugcc

SEQ ID NO: 2880138 - RNA, 19 nt, Artificial Sequence
  Description of Artificial Sequence: Synthetic oligonucleotide
ucagcucgcaggugcccug

SEQ ID NO: 2880139 - RNA, 19 nt, Artificial Sequence
  Description of Artificial Sequence: Synthetic oligonucleotide
cacguuuugcugugggcca

SEQ ID NO: 2880140 - RNA, 19 nt, Artificial Sequence
  Description of Artificial Sequence: Synthetic oligonucleotide
augcacagauccaggaggu

SEQ ID NO: 2880141 - RNA, 19 nt, Artificial Sequence
  Description of Artificial Sequence: Synthetic oligonucleotide
accguguggcaugagcuca

SEQ ID NO: 2880142 - RNA, 19 nt, Artificial Sequence
  Description of Artificial Sequence: Synthetic oligonucleotide
acaucacaguucacaaacu

SEQ ID NO: 2880143 - RNA, 19 nt, Artificial Sequence
  Description of Artificial Sequence: Synthetic oligonucleotide
acugguccacuggcagugc

SEQ ID NO: 2880144 - RNA, 19 nt, Artificial Sequence
  Description of Artificial Sequence: Synthetic oligonucleotide
caguucacaaacuuucuuu

SEQ ID NO: 2880145 - RNA, 19 nt, Artificial Sequence
  Description of Artificial Sequence: Synthetic oligonucleotide
cagugguuugaaggcacag

SEQ ID NO: 2880146 - RNA, 19 nt, Artificial Sequence
  Description of Artificial Sequence: Synthetic oligonucleotide
gaaaacacccucgcugcua

SEQ ID NO: 2880147 - RNA, 19 nt, Artificial Sequence
  Description of Artificial Sequence: Synthetic oligonucleotide
ucccugaaccccgagccuc

SEQ ID NO: 2880148 - RNA, 19 nt, Artificial Sequence
  Description of Artificial Sequence: Synthetic oligonucleotide
gaaccccgagccuccugcc

SEQ ID NO: 2880149 - RNA, 19 nt, Artificial Sequence
  Description of Artificial Sequence: Synthetic oligonucleotide
gggaaacaucccugaaccc

SEQ ID NO: 2880150 - RNA, 19 nt, Artificial Sequence
  Description of Artificial Sequence: Synthetic oligonucleotide
acaccacagcauacucgcc

SEQ ID NO: 2880151 - RNA, 19 nt, Artificial Sequence
  Description of Artificial Sequence: Synthetic oligonucleotide
cagauguccacggagucaa

SEQ ID NO: 2880152 - RNA, 19 nt, Artificial Sequence
  Description of Artificial Sequence: Synthetic oligonucleotide
cucgcaggugcccuggcca

SEQ ID NO: 2880153 - RNA, 19 nt, Artificial Sequence
  Description of Artificial Sequence: Synthetic oligonucleotide
auccgagcgccugcugccc

SEQ ID NO: 2880154 - RNA, 19 nt, Artificial Sequence
  Description of Artificial Sequence: Synthetic oligonucleotide
agcucgcaggugcccuggc

SEQ ID NO: 2880155 - RNA, 19 nt, Artificial Sequence
  Description of Artificial Sequence: Synthetic oligonucleotide
guuugaaggcacagcgaca

SEQ ID NO: 2880156 - RNA, 19 nt, Artificial Sequence
  Description of Artificial Sequence: Synthetic oligonucleotide
aguaccugauaaagucacu

SEQ ID NO: 2880157 - RNA, 19 nt, Artificial Sequence
  Description of Artificial Sequence: Synthetic oligonucleotide
gugccgucacacccacugg

SEQ ID NO: 2880158 - RNA, 19 nt, Artificial Sequence
  Description of Artificial Sequence: Synthetic oligonucleotide
ugcacagauccaggaggug

SEQ ID NO: 2880159 - RNA, 19 nt, Artificial Sequence
  Description of Artificial Sequence: Synthetic oligonucleotide
aucccugaaccccgagccu

SEQ ID NO: 2880160 - RNA, 19 nt, Artificial Sequence
  Description of Artificial Sequence: Synthetic oligonucleotide
gcugugggccaagaggcgg

SEQ ID NO: 2880161 - RNA, 19 nt, Artificial Sequence
  Description of Artificial Sequence: Synthetic oligonucleotide
acagcacguuuugcugugg

SEQ ID NO: 2880162 - RNA, 19 nt, Artificial Sequence
  Description of Artificial Sequence: Synthetic oligonucleotide
gcugucuacugaauccgag

SEQ ID NO: 2880163 - RNA, 19 nt, Artificial Sequence
  Description of Artificial Sequence: Synthetic oligonucleotide
gcuugggaaacaucccuga

SEQ ID NO: 2880164 - RNA, 19 nt, Artificial Sequence
  Description of Artificial Sequence: Synthetic oligonucleotide
gugcuugggaaacaucccu

SEQ ID NO: 2880165 - RNA, 19 nt, Artificial Sequence
  Description of Artificial Sequence: Synthetic oligonucleotide
ugagcucagcucgcaggug

SEQ ID NO: 2880166 - RNA, 19 nt, Artificial Sequence
  Description of Artificial Sequence: Synthetic oligonucleotide
aaacaucccugaaccccga

SEQ ID NO: 2880167 - RNA, 19 nt, Artificial Sequence
  Description of Artificial Sequence: Synthetic oligonucleotide
cuccagcacugugagugcc

SEQ ID NO: 2880168 - RNA, 19 nt, Artificial Sequence
  Description of Artificial Sequence: Synthetic oligonucleotide
cuugggaaacaucccugaa

SEQ ID NO: 2880169 - RNA, 19 nt, Artificial Sequence
  Description of Artificial Sequence: Synthetic oligonucleotide
guccacuggcagugcuugg

SEQ ID NO: 2880170 - RNA, 19 nt, Artificial Sequence
  Description of Artificial Sequence: Synthetic oligonucleotide
ugugggccaagaggcggcc

SEQ ID NO: 2880171 - RNA, 19 nt, Artificial Sequence
  Description of Artificial Sequence: Synthetic oligonucleotide
gcggcccaggcucaggcgg

SEQ ID NO: 2880172 - RNA, 19 nt, Artificial Sequence
  Description of Artificial Sequence: Synthetic oligonucleotide
aggugcccuggccaaugug

SEQ ID NO: 2880173 - RNA, 19 nt, Artificial Sequence
  Description of Artificial Sequence: Synthetic oligonucleotide
ugguccacuggcagugcuu

SEQ ID NO: 2880174 - RNA, 19 nt, Artificial Sequence
  Description of Artificial Sequence: Synthetic oligonucleotide
cgacaccacagcauacucg

SEQ ID NO: 2880175 - RNA, 19 nt, Artificial Sequence
  Description of Artificial Sequence: Synthetic oligonucleotide
agcaggguuccagugguuu

SEQ ID NO: 2880176 - RNA, 19 nt, Artificial Sequence
  Description of Artificial Sequence: Synthetic oligonucleotide
gguccacuggcagugcuug

SEQ ID NO: 2880177 - RNA, 19 nt, Artificial Sequence
  Description of Artificial Sequence: Synthetic oligonucleotide
ggagguggcugucuacuga

SEQ ID NO: 2880178 - RNA, 19 nt, Artificial Sequence
  Description of Artificial Sequence: Synthetic oligonucleotide
acacccucgcugcuaccgu

SEQ ID NO: 2880179 - RNA, 19 nt, Artificial Sequence
  Description of Artificial Sequence: Synthetic oligonucleotide
cacaguucacaaacuuucu

SEQ ID NO: 2880180 - RNA, 19 nt, Artificial Sequence
  Description of Artificial Sequence: Synthetic oligonucleotide
gcaggguuccagugguuug

SEQ ID NO: 2880181 - RNA, 19 nt, Artificial Sequence
  Description of Artificial Sequence: Synthetic oligonucleotide
cagcgacaccacagcauac

SEQ ID NO: 2880182 - RNA, 19 nt, Artificial Sequence
  Description of Artificial Sequence: Synthetic oligonucleotide
caucacaguucacaaacuu

SEQ ID NO: 2880183 - RNA, 19 nt, Artificial Sequence
  Description of Artificial Sequence: Synthetic oligonucleotide
aguuggccccggaacacca

SEQ ID NO: 2880184 - RNA, 19 nt, Artificial Sequence
  Description of Artificial Sequence: Synthetic oligonucleotide
ggagucaaaguaccugaua

SEQ ID NO: 2880185 - RNA, 19 nt, Artificial Sequence
  Description of Artificial Sequence: Synthetic oligonucleotide
ucgcaggugcccuggccaa

SEQ ID NO: 2880186 - RNA, 19 nt, Artificial Sequence
  Description of Artificial Sequence: Synthetic oligonucleotide
aguguaccuugcagauguc

SEQ ID NO: 2880187 - RNA, 19 nt, Artificial Sequence
  Description of Artificial Sequence: Synthetic oligonucleotide
cacccucgcugcuaccgug

SEQ ID NO: 2880188 - RNA, 19 nt, Artificial Sequence
  Description of Artificial Sequence: Synthetic oligonucleotide
ccaauccgaguguaccuug

SEQ ID NO: 2880189 - RNA, 19 nt, Artificial Sequence
  Description of Artificial Sequence: Synthetic oligonucleotide
cccacugguccacuggcag

SEQ ID NO: 2880190 - RNA, 19 nt, Artificial Sequence
  Description of Artificial Sequence: Synthetic oligonucleotide
gugagugccgucacaccca

SEQ ID NO: 2880191 - RNA, 19 nt, Artificial Sequence
  Description of Artificial Sequence: Synthetic oligonucleotide
ccugcugcccuccugaaaa

SEQ ID NO: 2880192 - RNA, 19 nt, Artificial Sequence
  Description of Artificial Sequence: Synthetic oligonucleotide
gaggcacgcuccagcacug

SEQ ID NO: 2880193 - RNA, 19 nt, Artificial Sequence
  Description of Artificial Sequence: Synthetic oligonucleotide
gcaugagcucagcucgcag

SEQ ID NO: 2880194 - RNA, 19 nt, Artificial Sequence
  Description of Artificial Sequence: Synthetic oligonucleotide
uggccccggaacaccagua

SEQ ID NO: 2880195 - RNA, 19 nt, Artificial Sequence
  Description of Artificial Sequence: Synthetic oligonucleotide
gugaggcacgcuccagcac

SEQ ID NO: 2880196 - RNA, 19 nt, Artificial Sequence
  Description of Artificial Sequence: Synthetic oligonucleotide
acagauccaggagguggcu

SEQ ID NO: 2880197 - RNA, 19 nt, Artificial Sequence
  Description of Artificial Sequence: Synthetic oligonucleotide
uccgagcgccugcugcccu

SEQ ID NO: 2880198 - RNA, 19 nt, Artificial Sequence
  Description of Artificial Sequence: Synthetic oligonucleotide
cgagccuccugccaauccg

SEQ ID NO: 2880199 - RNA, 19 nt, Artificial Sequence
  Description of Artificial Sequence: Synthetic oligonucleotide
caggcuccagcaugacauc

SEQ ID NO: 2880200 - RNA, 19 nt, Artificial Sequence
  Description of Artificial Sequence: Synthetic oligonucleotide
ccagugccaaaaguuggcc

SEQ ID NO: 2880201 - RNA, 19 nt, Artificial Sequence
  Description of Artificial Sequence: Synthetic oligonucleotide
ccgucacacccacuggucc

SEQ ID NO: 2880202 - RNA, 19 nt, Artificial Sequence
  Description of Artificial Sequence: Synthetic oligonucleotide
gagccuccugccaauccga

SEQ ID NO: 2880203 - RNA, 19 nt, Artificial Sequence
  Description of Artificial Sequence: Synthetic oligonucleotide
caggguuccagugguuuga

SEQ ID NO: 2880204 - RNA, 19 nt, Artificial Sequence
  Description of Artificial Sequence: Synthetic oligonucleotide
cucaggcggccaccagugc

SEQ ID NO: 2880205 - RNA, 19 nt, Artificial Sequence
  Description of Artificial Sequence: Synthetic oligonucleotide
agcgccugcugcccuccug

SEQ ID NO: 2880206 - RNA, 19 nt, Artificial Sequence
  Description of Artificial Sequence: Synthetic oligonucleotide
uccugccaauccgagugua

SEQ ID NO: 2880207 - RNA, 19 nt, Artificial Sequence
  Description of Artificial Sequence: Synthetic oligonucleotide
aagaggcggcccaggcuca

SEQ ID NO: 2880208 - RNA, 19 nt, Artificial Sequence
  Description of Artificial Sequence: Synthetic oligonucleotide
ggagcaggguuccaguggu

SEQ ID NO: 2880209 - RNA, 19 nt, Artificial Sequence
  Description of Artificial Sequence: Synthetic oligonucleotide
gauccaggagguggcuguc

SEQ ID NO: 2880210 - RNA, 19 nt, Artificial Sequence
  Description of Artificial Sequence: Synthetic oligonucleotide
gccaagaggcggcccaggc

SEQ ID NO: 2880211 - RNA, 19 nt, Artificial Sequence
  Description of Artificial Sequence: Synthetic oligonucleotide
ggguuccagugguuugaag

SEQ ID NO: 2880212 - RNA, 19 nt, Artificial Sequence
  Description of Artificial Sequence: Synthetic oligonucleotide
uggcagugcuugggaaaca

SEQ ID NO: 2880213 - RNA, 19 nt, Artificial Sequence
  Description of Artificial Sequence: Synthetic oligonucleotide
ccaggcuccagcaugacau

SEQ ID NO: 2880214 - RNA, 19 nt, Artificial Sequence
  Description of Artificial Sequence: Synthetic oligonucleotide
guuggccccggaacaccag

SEQ ID NO: 2880215 - RNA, 19 nt, Artificial Sequence
  Description of Artificial Sequence: Synthetic oligonucleotide
gccccggaacaccaguaug

SEQ ID NO: 2880216 - RNA, 19 nt, Artificial Sequence
  Description of Artificial Sequence: Synthetic oligonucleotide
gcucaggcggccaccagug

SEQ ID NO: 2880217 - RNA, 19 nt, Artificial Sequence
  Description of Artificial Sequence: Synthetic oligonucleotide
ggcacgcuccagcacugug

SEQ ID NO: 2880218 - RNA, 19 nt, Artificial Sequence
  Description of Artificial Sequence: Synthetic oligonucleotide
gcgacaccacagcauacuc

SEQ ID NO: 2880219 - RNA, 19 nt, Artificial Sequence
  Description of Artificial Sequence: Synthetic oligonucleotide
cauacucgccaggcuccag

SEQ ID NO: 2880220 - RNA, 19 nt, Artificial Sequence
  Description of Artificial Sequence: Synthetic oligonucleotide
cugaaccccgagccuccug

SEQ ID NO: 2880221 - RNA, 19 nt, Artificial Sequence
  Description of Artificial Sequence: Synthetic oligonucleotide
cagcucgcaggugcccugg

SEQ ID NO: 2880222 - RNA, 19 nt, Artificial Sequence
  Description of Artificial Sequence: Synthetic oligonucleotide
ccugccaauccgaguguac

SEQ ID NO: 2880223 - RNA, 19 nt, Artificial Sequence
  Description of Artificial Sequence: Synthetic oligonucleotide
cacagcgacaccacagcau

SEQ ID NO: 2880224 - RNA, 19 nt, Artificial Sequence
  Description of Artificial Sequence: Synthetic oligonucleotide
cacuggcagugcuugggaa

SEQ ID NO: 2880225 - RNA, 19 nt, Artificial Sequence
  Description of Artificial Sequence: Synthetic oligonucleotide
agccuccugccaauccgag

SEQ ID NO: 2880226 - RNA, 19 nt, Artificial Sequence
  Description of Artificial Sequence: Synthetic oligonucleotide
guuuugcugugggccaaga

SEQ ID NO: 2880227 - RNA, 19 nt, Artificial Sequence
  Description of Artificial Sequence: Synthetic oligonucleotide
ccugguggagcaggguucc

SEQ ID NO: 2880228 - RNA, 19 nt, Artificial Sequence
  Description of Artificial Sequence: Synthetic oligonucleotide
acucgccaggcuccagcau

SEQ ID NO: 2880229 - RNA, 19 nt, Artificial Sequence
  Description of Artificial Sequence: Synthetic oligonucleotide
gcagauguccacggaguca

SEQ ID NO: 2880230 - RNA, 19 nt, Artificial Sequence
  Description of Artificial Sequence: Synthetic oligonucleotide
ucgcugcuaccguguggca

SEQ ID NO: 2880231 - RNA, 19 nt, Artificial Sequence
  Description of Artificial Sequence: Synthetic oligonucleotide
gcacagcgacaccacagca

SEQ ID NO: 2880232 - RNA, 19 nt, Artificial Sequence
  Description of Artificial Sequence: Synthetic oligonucleotide
aggcucaggcggccaccag

SEQ ID NO: 2880233 - RNA, 19 nt, Artificial Sequence
  Description of Artificial Sequence: Synthetic oligonucleotide
ggcaaacuccagugaggca

SEQ ID NO: 2880234 - RNA, 19 nt, Artificial Sequence
  Description of Artificial Sequence: Synthetic oligonucleotide
acguuuugcugugggccaa

SEQ ID NO: 2880235 - RNA, 19 nt, Artificial Sequence
  Description of Artificial Sequence: Synthetic oligonucleotide
ggcggcccaggcucaggcg

SEQ ID NO: 2880236 - RNA, 19 nt, Artificial Sequence
  Description of Artificial Sequence: Synthetic oligonucleotide
ccggaacaccaguaugcac

SEQ ID NO: 2880237 - RNA, 19 nt, Artificial Sequence
  Description of Artificial Sequence: Synthetic oligonucleotide
cacugugagugccgucaca

SEQ ID NO: 2880238 - RNA, 19 nt, Artificial Sequence
  Description of Artificial Sequence: Synthetic oligonucleotide
gaacaccaguaugcacaga

SEQ ID NO: 2880239 - RNA, 19 nt, Artificial Sequence
  Description of Artificial Sequence: Synthetic oligonucleotide
ccaaaaguuggccccggaa

SEQ ID NO: 2880240 - RNA, 19 nt, Artificial Sequence
  Description of Artificial Sequence: Synthetic oligonucleotide
aggguuccagugguuugaa

SEQ ID NO: 2880241 - RNA, 19 nt, Artificial Sequence
  Description of Artificial Sequence: Synthetic oligonucleotide
cccugaaccccgagccucc

SEQ ID NO: 2880242 - RNA, 19 nt, Artificial Sequence
  Description of Artificial Sequence: Synthetic oligonucleotide
gguggagcaggguuccagu

SEQ ID NO: 2880243 - RNA, 19 nt, Artificial Sequence
  Description of Artificial Sequence: Synthetic oligonucleotide
ccacagcauacucgccagg

SEQ ID NO: 2880244 - RNA, 19 nt, Artificial Sequence
  Description of Artificial Sequence: Synthetic oligonucleotide
gcucgcaggugcccuggcc

SEQ ID NO: 2880245 - RNA, 19 nt, Artificial Sequence
  Description of Artificial Sequence: Synthetic oligonucleotide
ugcuaccguguggcaugag

SEQ ID NO: 2880246 - RNA, 19 nt, Artificial Sequence
  Description of Artificial Sequence: Synthetic oligonucleotide
ccucgcugcuaccgugugg

SEQ ID NO: 2880247 - RNA, 19 nt, Artificial Sequence
  Description of Artificial Sequence: Synthetic oligonucleotide
acccucgcugcuaccgugu

SEQ ID NO: 2880248 - RNA, 19 nt, Artificial Sequence
  Description of Artificial Sequence: Synthetic oligonucleotide
guguggcaugagcucagcu

SEQ ID NO: 2880249 - RNA, 19 nt, Artificial Sequence
  Description of Artificial Sequence: Synthetic oligonucleotide
caggagguggcugucuacu

SEQ ID NO: 2880250 - RNA, 19 nt, Artificial Sequence
  Description of Artificial Sequence: Synthetic oligonucleotide
acccacugguccacuggca

SEQ ID NO: 2880251 - RNA, 19 nt, Artificial Sequence
  Description of Artificial Sequence: Synthetic oligonucleotide
ccaggagguggcugucuac

SEQ ID NO: 2880252 - RNA, 19 nt, Artificial Sequence
  Description of Artificial Sequence: Synthetic oligonucleotide
cagcacugugagugccguc

SEQ ID NO: 2880253 - RNA, 19 nt, Artificial Sequence
  Description of Artificial Sequence: Synthetic oligonucleotide
ccguguggcaugagcucag

SEQ ID NO: 2880254 - RNA, 19 nt, Artificial Sequence
  Description of Artificial Sequence: Synthetic oligonucleotide
gcacugugagugccgucac

SEQ ID NO: 2880255 - RNA, 19 nt, Artificial Sequence
  Description of Artificial Sequence: Synthetic oligonucleotide
acgcuccagcacugugagu

SEQ ID NO: 2880256 - RNA, 19 nt, Artificial Sequence
  Description of Artificial Sequence: Synthetic oligonucleotide
gcacgcuccagcacuguga

SEQ ID NO: 2880257 - RNA, 19 nt, Artificial Sequence
  Description of Artificial Sequence: Synthetic oligonucleotide
ccgagccuccugccaaucc

SEQ ID NO: 2880258 - RNA, 19 nt, Artificial Sequence
  Description of Artificial Sequence: Synthetic oligonucleotide
gccaccagugccaaaaguu

SEQ ID NO: 2880259 - RNA, 19 nt, Artificial Sequence
  Description of Artificial Sequence: Synthetic oligonucleotide
gcaggugcccuggccaaug

SEQ ID NO: 2880260 - RNA, 19 nt, Artificial Sequence
  Description of Artificial Sequence: Synthetic oligonucleotide
cuacugaauccgagcgccu

SEQ ID NO: 2880261 - RNA, 19 nt, Artificial Sequence
  Description of Artificial Sequence: Synthetic oligonucleotide
gcggccaccagugccaaaa

SEQ ID NO: 2880262 - RNA, 19 nt, Artificial Sequence
  Description of Artificial Sequence: Synthetic oligonucleotide
gugggccaagaggcggccc

SEQ ID NO: 2880263 - RNA, 19 nt, Artificial Sequence
  Description of Artificial Sequence: Synthetic oligonucleotide
ccagcaugacaucacaguu

SEQ ID NO: 2880264 - RNA, 19 nt, Artificial Sequence
  Description of Artificial Sequence: Synthetic oligonucleotide
ggccaagaggcggcccagg

SEQ ID NO: 2880265 - RNA, 19 nt, Artificial Sequence
  Description of Artificial Sequence: Synthetic oligonucleotide
gcgccugcugcccuccuga

SEQ ID NO: 2880266 - RNA, 19 nt, Artificial Sequence
  Description of Artificial Sequence: Synthetic oligonucleotide
ggcugucuacugaauccga

SEQ ID NO: 2880267 - RNA, 19 nt, Artificial Sequence
  Description of Artificial Sequence: Synthetic oligonucleotide
ccagugguuugaaggcaca

SEQ ID NO: 2880268 - RNA, 19 nt, Artificial Sequence
  Description of Artificial Sequence: Synthetic oligonucleotide
ggcaugagcucagcucgca

SEQ ID NO: 2880269 - RNA, 19 nt, Artificial Sequence
  Description of Artificial Sequence: Synthetic oligonucleotide
gccaaaaguuggccccgga

SEQ ID NO: 2880270 - RNA, 19 nt, Artificial Sequence
  Description of Artificial Sequence: Synthetic oligonucleotide
ggcucaggcggccaccagu

SEQ ID NO: 2880271 - RNA, 19 nt, Artificial Sequence
  Description of Artificial Sequence: Synthetic oligonucleotide
cugaauccgagcgccugcu

SEQ ID NO: 2880272 - RNA, 19 nt, Artificial Sequence
  Description of Artificial Sequence: Synthetic oligonucleotide
agguggcugucuacugaau

SEQ ID NO: 2880273 - RNA, 19 nt, Artificial Sequence
  Description of Artificial Sequence: Synthetic oligonucleotide
gcagugcuugggaaacauc

SEQ ID NO: 2880274 - RNA, 19 nt, Artificial Sequence
  Description of Artificial Sequence: Synthetic oligonucleotide
caggcucaggcggccacca

SEQ ID NO: 2880275 - RNA, 19 nt, Artificial Sequence
  Description of Artificial Sequence: Synthetic oligonucleotide
cugguccacuggcagugcu

SEQ ID NO: 2880276 - RNA, 19 nt, Artificial Sequence
  Description of Artificial Sequence: Synthetic oligonucleotide
gccgucacacccacugguc

SEQ ID NO: 2880277 - RNA, 19 nt, Artificial Sequence
  Description of Artificial Sequence: Synthetic oligonucleotide
ccagugaggcacgcuccag

SEQ ID NO: 2880278 - RNA, 19 nt, Artificial Sequence
  Description of Artificial Sequence: Synthetic oligonucleotide
aggcacgcuccagcacugu

SEQ ID NO: 2880279 - RNA, 19 nt, Artificial Sequence
  Description of Artificial Sequence: Synthetic oligonucleotide
cugcuaccguguggcauga

SEQ ID NO: 2880280 - RNA, 19 nt, Artificial Sequence
  Description of Artificial Sequence: Synthetic oligonucleotide
ccgaguguaccuugcagau

SEQ ID NO: 2880281 - RNA, 19 nt, Artificial Sequence
  Description of Artificial Sequence: Synthetic oligonucleotide
ccuugcagauguccacgga

SEQ ID NO: 2880282 - RNA, 19 nt, Artificial Sequence
  Description of Artificial Sequence: Synthetic oligonucleotide
cucagcucgcaggugcccu

SEQ ID NO: 2880283 - RNA, 19 nt, Artificial Sequence
  Description of Artificial Sequence: Synthetic oligonucleotide
ccacuggcagugcuuggga

SEQ ID NO: 2880284 - RNA, 19 nt, Artificial Sequence
  Description of Artificial Sequence: Synthetic oligonucleotide
gggccaagaggcggcccag

SEQ ID NO: 2880285 - RNA, 19 nt, Artificial Sequence
  Description of Artificial Sequence: Synthetic oligonucleotide
cuccugccaauccgagugu

SEQ ID NO: 2880286 - RNA, 19 nt, Artificial Sequence
  Description of Artificial Sequence: Synthetic oligonucleotide
cccggaacaccaguaugca

SEQ ID NO: 2880287 - RNA, 19 nt, Artificial Sequence
  Description of Artificial Sequence: Synthetic oligonucleotide
cgaguguaccuugcagaug

SEQ ID NO: 2880288 - RNA, 19 nt, Artificial Sequence
  Description of Artificial Sequence: Synthetic oligonucleotide
ggcagugcuugggaaacau

SEQ ID NO: 2880289 - RNA, 19 nt, Artificial Sequence
  Description of Artificial Sequence: Synthetic oligonucleotide
ccaggcucaggcggccacc

SEQ ID NO: 2880290 - RNA, 19 nt, Artificial Sequence
  Description of Artificial Sequence: Synthetic oligonucleotide
gcauacucgccaggcucca

SEQ ID NO: 2880291 - RNA, 19 nt, Artificial Sequence
  Description of Artificial Sequence: Synthetic oligonucleotide
cccaggcucaggcggccac

SEQ ID NO: 2880292 - RNA, 19 nt, Artificial Sequence
  Description of Artificial Sequence: Synthetic oligonucleotide
gcaugacaucacaguucac

SEQ ID NO: 2880293 - RNA, 19 nt, Artificial Sequence
  Description of Artificial Sequence: Synthetic oligonucleotide
cguuuugcugugggccaag

SEQ ID NO: 2880294 - RNA, 19 nt, Artificial Sequence
  Description of Artificial Sequence: Synthetic oligonucleotide
cccucgcugcuaccgugug

SEQ ID NO: 2880295 - RNA, 19 nt, Artificial Sequence
  Description of Artificial Sequence: Synthetic oligonucleotide
gccugcugcccuccugaaa

SEQ ID NO: 2880296 - RNA, 19 nt, Artificial Sequence
  Description of Artificial Sequence: Synthetic oligonucleotide
cguguggcaugagcucagc

SEQ ID NO: 2880297 - RNA, 19 nt, Artificial Sequence
  Description of Artificial Sequence: Synthetic oligonucleotide
ggccccggaacaccaguau

SEQ ID NO: 2880298 - RNA, 19 nt, Artificial Sequence
  Description of Artificial Sequence: Synthetic oligonucleotide
cugguggagcaggguucca

SEQ ID NO: 2880299 - RNA, 19 nt, Artificial Sequence
  Description of Artificial Sequence: Synthetic oligonucleotide
caggugcccuggccaaugu

SEQ ID NO: 2880300 - RNA, 19 nt, Artificial Sequence
  Description of Artificial Sequence: Synthetic oligonucleotide
gccaauccgaguguaccuu

SEQ ID NO: 2880301 - RNA, 19 nt, Artificial Sequence
  Description of Artificial Sequence: Synthetic oligonucleotide
ccaagaggcggcccaggcu

SEQ ID NO: 2880302 - RNA, 19 nt, Artificial Sequence
  Description of Artificial Sequence: Synthetic oligonucleotide
cggccaccagugccaaaag

SEQ ID NO: 2880303 - RNA, 19 nt, Artificial Sequence
  Description of Artificial Sequence: Synthetic oligonucleotide
gccuccugccaauccgagu

SEQ ID NO: 2880304 - RNA, 19 nt, Artificial Sequence
  Description of Artificial Sequence: Synthetic oligonucleotide
ccgagcgccugcugcccuc

SEQ ID NO: 2880305 - RNA, 19 nt, Artificial Sequence
  Description of Artificial Sequence: Synthetic oligonucleotide
ccacggagucaaaguaccu

SEQ ID NO: 2880306 - RNA, 19 nt, Artificial Sequence
  Description of Artificial Sequence: Synthetic oligonucleotide
ccacugguccacuggcagu

SEQ ID NO: 2880307 - RNA, 19 nt, Artificial Sequence
  Description of Artificial Sequence: Synthetic oligonucleotide
gagcaggguuccagugguu

SEQ ID NO: 2880308 - RNA, 19 nt, Artificial Sequence
  Description of Artificial Sequence: Synthetic oligonucleotide
gagcgccugcugcccuccu

SEQ ID NO: 2880309 - RNA, 19 nt, Artificial Sequence
  Description of Artificial Sequence: Synthetic oligonucleotide
cgagcgccugcugcccucc

SEQ ID NO: 2880310 - RNA, 19 nt, Artificial Sequence
  Description of Artificial Sequence: Synthetic oligonucleotide
gagugccgucacacccacu

SEQ ID NO: 2880311 - RNA, 19 nt, Artificial Sequence
  Description of Artificial Sequence: Synthetic oligonucleotide
ccagcacugugagugccgu

SEQ ID NO: 2880312 - RNA, 19 nt, Artificial Sequence
  Description of Artificial Sequence: Synthetic oligonucleotide
cccgagccuccugccaauc

SEQ ID NO: 2880313 - RNA, 19 nt, Artificial Sequence
  Description of Artificial Sequence: Synthetic oligonucleotide
cggagucaaaguaccugau

SEQ ID NO: 2880314 - RNA, 19 nt, Artificial Sequence
  Description of Artificial Sequence: Synthetic oligonucleotide
ggcggccaccagugccaaa

SEQ ID NO: 2880315 - RNA, 19 nt, Artificial Sequence
  Description of Artificial Sequence: Synthetic oligonucleotide
cgcugcuaccguguggcau

SEQ ID NO: 2880316 - RNA, 19 nt, Artificial Sequence
  Description of Artificial Sequence: Synthetic oligonucleotide
ccugaaccccgagccuccu

SEQ ID NO: 2880317 - RNA, 19 nt, Artificial Sequence
  Description of Artificial Sequence: Synthetic oligonucleotide
cgccugcugcccuccugaa

SEQ ID NO: 2880318 - RNA, 19 nt, Artificial Sequence
  Description of Artificial Sequence: Synthetic oligonucleotide
ccccgagccuccugccaau

SEQ ID NO: 2880319 - RNA, 19 nt, Artificial Sequence
  Description of Artificial Sequence: Synthetic oligonucleotide
cgcaggugcccuggccaau

SEQ ID NO: 2880320 - RNA, 19 nt, Artificial Sequence
  Description of Artificial Sequence: Synthetic oligonucleotide
ugcuuuuaguauuugaugg

SEQ ID NO: 2880321 - RNA, 19 nt, Artificial Sequence
  Description of Artificial Sequence: Synthetic oligonucleotide
uaagaagaaaccuauguca

SEQ ID NO: 2880322 - RNA, 19 nt, Artificial Sequence
  Description of Artificial Sequence: Synthetic oligonucleotide
uuucauaacacuuuauuaa

SEQ ID NO: 2880323 - RNA, 19 nt, Artificial Sequence
  Description of Artificial Sequence: Synthetic oligonucleotide
auuaagaagaaaccuaugu

SEQ ID NO: 2880324 - RNA, 19 nt, Artificial Sequence
  Description of Artificial Sequence: Synthetic oligonucleotide
uuuauuaagaagaaaccua

SEQ ID NO: 2880325 - RNA, 19 nt, Artificial Sequence
  Description of Artificial Sequence: Synthetic oligonucleotide
uucauaacacuuuauuaag

SEQ ID NO: 2880326 - RNA, 19 nt, Artificial Sequence
  Description of Artificial Sequence: Synthetic oligonucleotide
acuuuauuaagaagaaacc

SEQ ID NO: 2880327 - RNA, 19 nt, Artificial Sequence
  Description of Artificial Sequence: Synthetic oligonucleotide
ugucuuuucgguauagugc

SEQ ID NO: 2880328 - RNA, 19 nt, Artificial Sequence
  Description of Artificial Sequence: Synthetic oligonucleotide
uuauuaagaagaaaccuau

SEQ ID NO: 2880329 - RNA, 19 nt, Artificial Sequence
  Description of Artificial Sequence: Synthetic oligonucleotide
uuugacaucuucacaagca

SEQ ID NO: 2880330 - RNA, 19 nt, Artificial Sequence
  Description of Artificial Sequence: Synthetic oligonucleotide
uuaagaagaaaccuauguc

SEQ ID NO: 2880331 - RNA, 19 nt, Artificial Sequence
  Description of Artificial Sequence: Synthetic oligonucleotide
aauuugacaucuucacaag

SEQ ID NO: 2880332 - RNA, 19 nt, Artificial Sequence
  Description of Artificial Sequence: Synthetic oligonucleotide
auuugacaucuucacaagc

SEQ ID NO: 2880333 - RNA, 19 nt, Artificial Sequence
  Description of Artificial Sequence: Synthetic oligonucleotide
uucgguauagugcuuuuag

SEQ ID NO: 2880334 - RNA, 19 nt, Artificial Sequence
  Description of Artificial Sequence: Synthetic oligonucleotide
uauuucauaacacuuuauu

SEQ ID NO: 2880335 - RNA, 19 nt, Artificial Sequence
  Description of Artificial Sequence: Synthetic oligonucleotide
gauggguccauuuucaaga

SEQ ID NO: 2880336 - RNA, 19 nt, Artificial Sequence
  Description of Artificial Sequence: Synthetic oligonucleotide
aagaagaaaccuaugucag

SEQ ID NO: 2880337 - RNA, 19 nt, Artificial Sequence
  Description of Artificial Sequence: Synthetic oligonucleotide
gacaucuucacaagcaucc

SEQ ID NO: 2880338 - RNA, 19 nt, Artificial Sequence
  Description of Artificial Sequence: Synthetic oligonucleotide
uuugauggguccauuuuca

SEQ ID NO: 2880339 - RNA, 19 nt, Artificial Sequence
  Description of Artificial Sequence: Synthetic oligonucleotide
ucauaacacuuuauuaaga

SEQ ID NO: 2880340 - RNA, 19 nt, Artificial Sequence
  Description of Artificial Sequence: Synthetic oligonucleotide
uccauuuucaagagccucc

SEQ ID NO: 2880341 - RNA, 19 nt, Artificial Sequence
  Description of Artificial Sequence: Synthetic oligonucleotide
uauuaagaagaaaccuaug

SEQ ID NO: 2880342 - RNA, 19 nt, Artificial Sequence
  Description of Artificial Sequence: Synthetic oligonucleotide
caauuugacaucuucacaa

SEQ ID NO: 2880343 - RNA, 19 nt, Artificial Sequence
  Description of Artificial Sequence: Synthetic oligonucleotide
auuuucaagagccuccaaa

SEQ ID NO: 2880344 - RNA, 19 nt, Artificial Sequence
  Description of Artificial Sequence: Synthetic oligonucleotide
ugauggguccauuuucaag

SEQ ID NO: 2880345 - RNA, 19 nt, Artificial Sequence
  Description of Artificial Sequence: Synthetic oligonucleotide
ucacaagcauccuugcuac

SEQ ID NO: 2880346 - RNA, 19 nt, Artificial Sequence
  Description of Artificial Sequence: Synthetic oligonucleotide
gugucuuuucgguauagug

SEQ ID NO: 2880347 - RNA, 19 nt, Artificial Sequence
  Description of Artificial Sequence: Synthetic oligonucleotide
gugcuuuuaguauuugaug

SEQ ID NO: 2880348 - RNA, 19 nt, Artificial Sequence
  Description of Artificial Sequence: Synthetic oligonucleotide
cauccuugugucuuuucgg

SEQ ID NO: 2880349 - RNA, 19 nt, Artificial Sequence
  Description of Artificial Sequence: Synthetic oligonucleotide
aacacuuuauuaagaagaa

SEQ ID NO: 2880350 - RNA, 19 nt, Artificial Sequence
  Description of Artificial Sequence: Synthetic oligonucleotide
gcuuuuaguauuugauggg

SEQ ID NO: 2880351 - RNA, 19 nt, Artificial Sequence
  Description of Artificial Sequence: Synthetic oligonucleotide
uugacaucuucacaagcau

SEQ ID NO: 2880352 - RNA, 19 nt, Artificial Sequence
  Description of Artificial Sequence: Synthetic oligonucleotide
agugcuuuuaguauuugau

SEQ ID NO: 2880353 - RNA, 19 nt, Artificial Sequence
  Description of Artificial Sequence: Synthetic oligonucleotide
ugacaucuucacaagcauc

SEQ ID NO: 2880354 - RNA, 19 nt, Artificial Sequence
  Description of Artificial Sequence: Synthetic oligonucleotide
agaagaaaccuaugucagu

SEQ ID NO: 2880355 - RNA, 19 nt, Artificial Sequence
  Description of Artificial Sequence: Synthetic oligonucleotide
uagugcuuuuaguauuuga

SEQ ID NO: 2880356 - RNA, 19 nt, Artificial Sequence
  Description of Artificial Sequence: Synthetic oligonucleotide
cuuuauuaagaagaaaccu

SEQ ID NO: 2880357 - RNA, 19 nt, Artificial Sequence
  Description of Artificial Sequence: Synthetic oligonucleotide
auccuugugucuuuucggu

SEQ ID NO: 2880358 - RNA, 19 nt, Artificial Sequence
  Description of Artificial Sequence: Synthetic oligonucleotide
ggguccauuuucaagagcc

SEQ ID NO: 2880359 - RNA, 19 nt, Artificial Sequence
  Description of Artificial Sequence: Synthetic oligonucleotide
ucgguauagugcuuuuagu

SEQ ID NO: 2880360 - RNA, 19 nt, Artificial Sequence
  Description of Artificial Sequence: Synthetic oligonucleotide
auggguccauuuucaagag

SEQ ID NO: 2880361 - RNA, 19 nt, Artificial Sequence
  Description of Artificial Sequence: Synthetic oligonucleotide
gucuuuucgguauagugcu

SEQ ID NO: 2880362 - RNA, 19 nt, Artificial Sequence
  Description of Artificial Sequence: Synthetic oligonucleotide
uggguccauuuucaagagc

SEQ ID NO: 2880363 - RNA, 19 nt, Artificial Sequence
  Description of Artificial Sequence: Synthetic oligonucleotide
ccauccuugugucuuuucg

SEQ ID NO: 2880364 - RNA, 19 nt, Artificial Sequence
  Description of Artificial Sequence: Synthetic oligonucleotide
uugugucuuuucgguauag

SEQ ID NO: 2880365 - RNA, 19 nt, Artificial Sequence
  Description of Artificial Sequence: Synthetic oligonucleotide
uugauggguccauuuucaa

SEQ ID NO: 2880366 - RNA, 19 nt, Artificial Sequence
  Description of Artificial Sequence: Synthetic oligonucleotide
ugugucuuuucgguauagu

SEQ ID NO: 2880367 - RNA, 19 nt, Artificial Sequence
  Description of Artificial Sequence: Synthetic oligonucleotide
gguauagugcuuuuaguau

SEQ ID NO: 2880368 - RNA, 19 nt, Artificial Sequence
  Description of Artificial Sequence: Synthetic oligonucleotide
acacuuuauuaagaagaaa

SEQ ID NO: 2880369 - RNA, 19 nt, Artificial Sequence
  Description of Artificial Sequence: Synthetic oligonucleotide
cuuuuaguauuugaugggu

SEQ ID NO: 2880370 - RNA, 19 nt, Artificial Sequence
  Description of Artificial Sequence: Synthetic oligonucleotide
auagugcuuuuaguauuug

SEQ ID NO: 2880371 - RNA, 19 nt, Artificial Sequence
  Description of Artificial Sequence: Synthetic oligonucleotide
uccuugugucuuuucggua

SEQ ID NO: 2880372 - RNA, 19 nt, Artificial Sequence
  Description of Artificial Sequence: Synthetic oligonucleotide
guccauuuucaagagccuc

SEQ ID NO: 2880373 - RNA, 19 nt, Artificial Sequence
  Description of Artificial Sequence: Synthetic oligonucleotide
acaucuucacaagcauccu

SEQ ID NO: 2880374 - RNA, 19 nt, Artificial Sequence
  Description of Artificial Sequence: Synthetic oligonucleotide
cuugugucuuuucgguaua

SEQ ID NO: 2880375 - RNA, 19 nt, Artificial Sequence
  Description of Artificial Sequence: Synthetic oligonucleotide
cgguauagugcuuuuagua

SEQ ID NO: 2880376 - RNA, 19 nt, Artificial Sequence
  Description of Artificial Sequence: Synthetic oligonucleotide
cuugccauccuugugucuu

SEQ ID NO: 2880377 - RNA, 19 nt, Artificial Sequence
  Description of Artificial Sequence: Synthetic oligonucleotide
cauuuucaagagccuccaa

SEQ ID NO: 2880378 - RNA, 19 nt, Artificial Sequence
  Description of Artificial Sequence: Synthetic oligonucleotide
cacaagcauccuugcuaca

SEQ ID NO: 2880379 - RNA, 19 nt, Artificial Sequence
  Description of Artificial Sequence: Synthetic oligonucleotide
ccuugugucuuuucgguau

SEQ ID NO: 2880380 - RNA, 19 nt, Artificial Sequence
  Description of Artificial Sequence: Synthetic oligonucleotide
ugccauccuugugucuuuu

SEQ ID NO: 2880381 - RNA, 19 nt, Artificial Sequence
  Description of Artificial Sequence: Synthetic oligonucleotide
gccauccuugugucuuuuc

SEQ ID NO: 2880382 - RNA, 19 nt, Artificial Sequence
  Description of Artificial Sequence: Synthetic oligonucleotide
ccuugccauccuugugucu

SEQ ID NO: 2880383 - RNA, 19 nt, Artificial Sequence
  Description of Artificial Sequence: Synthetic oligonucleotide
ucuaagaaccccaacaugg

SEQ ID NO: 2880384 - RNA, 19 nt, Artificial Sequence
  Description of Artificial Sequence: Synthetic oligonucleotide
aaaaggaagccucucauag

SEQ ID NO: 2880385 - RNA, 19 nt, Artificial Sequence
  Description of Artificial Sequence: Synthetic oligonucleotide
aauggagucuagcuggugc

SEQ ID NO: 2880386 - RNA, 19 nt, Artificial Sequence
  Description of Artificial Sequence: Synthetic oligonucleotide
acuaaauaagugcagcccc

SEQ ID NO: 2880387 - RNA, 19 nt, Artificial Sequence
  Description of Artificial Sequence: Synthetic oligonucleotide
aacuaaauaagugcagccc

SEQ ID NO: 2880388 - RNA, 19 nt, Artificial Sequence
  Description of Artificial Sequence: Synthetic oligonucleotide
agagcuugagcccuuagcc

SEQ ID NO: 2880389 - RNA, 19 nt, Artificial Sequence
  Description of Artificial Sequence: Synthetic oligonucleotide
caaaauggagucuagcugg

SEQ ID NO: 2880390 - RNA, 19 nt, Artificial Sequence
  Description of Artificial Sequence: Synthetic oligonucleotide
aaggaagccucucauaguc

SEQ ID NO: 2880391 - RNA, 19 nt, Artificial Sequence
  Description of Artificial Sequence: Synthetic oligonucleotide
auaagugcagccccaaccc

SEQ ID NO: 2880392 - RNA, 19 nt, Artificial Sequence
  Description of Artificial Sequence: Synthetic oligonucleotide
aauccuccaaacugggugg

SEQ ID NO: 2880393 - RNA, 19 nt, Artificial Sequence
  Description of Artificial Sequence: Synthetic oligonucleotide
uguucuucuuccuccaugg

SEQ ID NO: 2880394 - RNA, 19 nt, Artificial Sequence
  Description of Artificial Sequence: Synthetic oligonucleotide
aguucuaagaaccccaaca

SEQ ID NO: 2880395 - RNA, 19 nt, Artificial Sequence
  Description of Artificial Sequence: Synthetic oligonucleotide
aucuugaguucuaagaacc

SEQ ID NO: 2880396 - RNA, 19 nt, Artificial Sequence
  Description of Artificial Sequence: Synthetic oligonucleotide
cuuccgaagguaaagcugg

SEQ ID NO: 2880397 - RNA, 19 nt, Artificial Sequence
  Description of Artificial Sequence: Synthetic oligonucleotide
aacaugguugaaaaggaag

SEQ ID NO: 2880398 - RNA, 19 nt, Artificial Sequence
  Description of Artificial Sequence: Synthetic oligonucleotide
agcuugagcccuuagcccc

SEQ ID NO: 2880399 - RNA, 19 nt, Artificial Sequence
  Description of Artificial Sequence: Synthetic oligonucleotide
acaugguugaaaaggaagc

SEQ ID NO: 2880400 - RNA, 19 nt, Artificial Sequence
  Description of Artificial Sequence: Synthetic oligonucleotide
agaggcgagaggcagcucc

SEQ ID NO: 2880401 - RNA, 19 nt, Artificial Sequence
  Description of Artificial Sequence: Synthetic oligonucleotide
aggaauggucuccucaggc

SEQ ID NO: 2880402 - RNA, 19 nt, Artificial Sequence
  Description of Artificial Sequence: Synthetic oligonucleotide
aaauaagugcagccccaac

SEQ ID NO: 2880403 - RNA, 19 nt, Artificial Sequence
  Description of Artificial Sequence: Synthetic oligonucleotide
aacugggugggaaacuucc

SEQ ID NO: 2880404 - RNA, 19 nt, Artificial Sequence
  Description of Artificial Sequence: Synthetic oligonucleotide
auaucuugaguucuaagaa

SEQ ID NO: 2880405 - RNA, 19 nt, Artificial Sequence
  Description of Artificial Sequence: Synthetic oligonucleotide
ugcaaguggccucaaaaug

SEQ ID NO: 2880406 - RNA, 19 nt, Artificial Sequence
  Description of Artificial Sequence: Synthetic oligonucleotide
uugaguucuaagaacccca

SEQ ID NO: 2880407 - RNA, 19 nt, Artificial Sequence
  Description of Artificial Sequence: Synthetic oligonucleotide
gagauuuggagagaccacg

SEQ ID NO: 2880408 - RNA, 19 nt, Artificial Sequence
  Description of Artificial Sequence: Synthetic oligonucleotide
cauggcagaguccugagag

SEQ ID NO: 2880409 - RNA, 19 nt, Artificial Sequence
  Description of Artificial Sequence: Synthetic oligonucleotide
ucagcagcuugucagccgg

SEQ ID NO: 2880410 - RNA, 19 nt, Artificial Sequence
  Description of Artificial Sequence: Synthetic oligonucleotide
cauaucuugaguucuaaga

SEQ ID NO: 2880411 - RNA, 19 nt, Artificial Sequence
  Description of Artificial Sequence: Synthetic oligonucleotide
ucuuccgaagguaaagcug

SEQ ID NO: 2880412 - RNA, 19 nt, Artificial Sequence
  Description of Artificial Sequence: Synthetic oligonucleotide
caacuaaauaagugcagcc

SEQ ID NO: 2880413 - RNA, 19 nt, Artificial Sequence
  Description of Artificial Sequence: Synthetic oligonucleotide
guaaagcuggacuggaugc

SEQ ID NO: 2880414 - RNA, 19 nt, Artificial Sequence
  Description of Artificial Sequence: Synthetic oligonucleotide
auggagucuagcuggugcc

SEQ ID NO: 2880415 - RNA, 19 nt, Artificial Sequence
  Description of Artificial Sequence: Synthetic oligonucleotide
uuuccuauugguuggucca

SEQ ID NO: 2880416 - RNA, 19 nt, Artificial Sequence
  Description of Artificial Sequence: Synthetic oligonucleotide
uauugguugguccagccau

SEQ ID NO: 2880417 - RNA, 19 nt, Artificial Sequence
  Description of Artificial Sequence: Synthetic oligonucleotide
uaucuugaguucuaagaac

SEQ ID NO: 2880418 - RNA, 19 nt, Artificial Sequence
  Description of Artificial Sequence: Synthetic oligonucleotide
uuuucuuccgaagguaaag

SEQ ID NO: 2880419 - RNA, 19 nt, Artificial Sequence
  Description of Artificial Sequence: Synthetic oligonucleotide
uugaaaaggaagccucuca

SEQ ID NO: 2880420 - RNA, 19 nt, Artificial Sequence
  Description of Artificial Sequence: Synthetic oligonucleotide
gaauggucuccucaggcag

SEQ ID NO: 2880421 - RNA, 19 nt, Artificial Sequence
  Description of Artificial Sequence: Synthetic oligonucleotide
ugccguuuucuuccgaagg

SEQ ID NO: 2880422 - RNA, 19 nt, Artificial Sequence
  Description of Artificial Sequence: Synthetic oligonucleotide
uucuaagaaccccaacaug

SEQ ID NO: 2880423 - RNA, 19 nt, Artificial Sequence
  Description of Artificial Sequence: Synthetic oligonucleotide
gaaacuuccacucucugcu

SEQ ID NO: 2880424 - RNA, 19 nt, Artificial Sequence
  Description of Artificial Sequence: Synthetic oligonucleotide
caauccuccaaacugggug

SEQ ID NO: 2880425 - RNA, 19 nt, Artificial Sequence
  Description of Artificial Sequence: Synthetic oligonucleotide
aagaaccccaacaugguug

SEQ ID NO: 2880426 - RNA, 19 nt, Artificial Sequence
  Description of Artificial Sequence: Synthetic oligonucleotide
ugaaaaggaagccucucau

SEQ ID NO: 2880427 - RNA, 19 nt, Artificial Sequence
  Description of Artificial Sequence: Synthetic oligonucleotide
auagucugcugcaaguggc

SEQ ID NO: 2880428 - RNA, 19 nt, Artificial Sequence
  Description of Artificial Sequence: Synthetic oligonucleotide
gaagguaaagcuggacugg

SEQ ID NO: 2880429 - RNA, 19 nt, Artificial Sequence
  Description of Artificial Sequence: Synthetic oligonucleotide
ucuugaguucuaagaaccc

SEQ ID NO: 2880430 - RNA, 19 nt, Artificial Sequence
  Description of Artificial Sequence: Synthetic oligonucleotide
ucucauagucugcugcaag

SEQ ID NO: 2880431 - RNA, 19 nt, Artificial Sequence
  Description of Artificial Sequence: Synthetic oligonucleotide
ugguugaaaaggaagccuc

SEQ ID NO: 2880432 - RNA, 19 nt, Artificial Sequence
  Description of Artificial Sequence: Synthetic oligonucleotide
cuuagccccaauuuggguc

SEQ ID NO: 2880433 - RNA, 19 nt, Artificial Sequence
  Description of Artificial Sequence: Synthetic oligonucleotide
cacgucagcagcuugucag

SEQ ID NO: 2880434 - RNA, 19 nt, Artificial Sequence
  Description of Artificial Sequence: Synthetic oligonucleotide
ugcguucccaccuuguucu

SEQ ID NO: 2880435 - RNA, 19 nt, Artificial Sequence
  Description of Artificial Sequence: Synthetic oligonucleotide
cauagucugcugcaagugg

SEQ ID NO: 2880436 - RNA, 19 nt, Artificial Sequence
  Description of Artificial Sequence: Synthetic oligonucleotide
aaaggaagccucucauagu

SEQ ID NO: 2880437 - RNA, 19 nt, Artificial Sequence
  Description of Artificial Sequence: Synthetic oligonucleotide
guuuccuauugguuggucc

SEQ ID NO: 2880438 - RNA, 19 nt, Artificial Sequence
  Description of Artificial Sequence: Synthetic oligonucleotide
aacgggcaauccuccaaac

SEQ ID NO: 2880439 - RNA, 19 nt, Artificial Sequence
  Description of Artificial Sequence: Synthetic oligonucleotide
uaaagcuggacuggaugcg

SEQ ID NO: 2880440 - RNA, 19 nt, Artificial Sequence
  Description of Artificial Sequence: Synthetic oligonucleotide
ggcaguuuccuauugguug

SEQ ID NO: 2880441 - RNA, 19 nt, Artificial Sequence
  Description of Artificial Sequence: Synthetic oligonucleotide
uuucuuccgaagguaaagc

SEQ ID NO: 2880442 - RNA, 19 nt, Artificial Sequence
  Description of Artificial Sequence: Synthetic oligonucleotide
cuugaguucuaagaacccc

SEQ ID NO: 2880443 - RNA, 19 nt, Artificial Sequence
  Description of Artificial Sequence: Synthetic oligonucleotide
caugguugaaaaggaagcc

SEQ ID NO: 2880444 - RNA, 19 nt, Artificial Sequence
  Description of Artificial Sequence: Synthetic oligonucleotide
uuagccccaauuugggucu

SEQ ID NO: 2880445 - RNA, 19 nt, Artificial Sequence
  Description of Artificial Sequence: Synthetic oligonucleotide
ugagauuuggagagaccac

SEQ ID NO: 2880446 - RNA, 19 nt, Artificial Sequence
  Description of Artificial Sequence: Synthetic oligonucleotide
cugcuaagaggcgagaggc

SEQ ID NO: 2880447 - RNA, 19 nt, Artificial Sequence
  Description of Artificial Sequence: Synthetic oligonucleotide
uucuuccgaagguaaagcu

SEQ ID NO: 2880448 - RNA, 19 nt, Artificial Sequence
  Description of Artificial Sequence: Synthetic oligonucleotide
agagugagcucgucucccc

SEQ ID NO: 2880449 - RNA, 19 nt, Artificial Sequence
  Description of Artificial Sequence: Synthetic oligonucleotide
ucaggcucagcugagauuu

SEQ ID NO: 2880450 - RNA, 19 nt, Artificial Sequence
  Description of Artificial Sequence: Synthetic oligonucleotide
gagagcuugagcccuuagc

SEQ ID NO: 2880451 - RNA, 19 nt, Artificial Sequence
  Description of Artificial Sequence: Synthetic oligonucleotide
uggggcaguuuccuauugg

SEQ ID NO: 2880452 - RNA, 19 nt, Artificial Sequence
  Description of Artificial Sequence: Synthetic oligonucleotide
acgucagcagcuugucagc

SEQ ID NO: 2880453 - RNA, 19 nt, Artificial Sequence
  Description of Artificial Sequence: Synthetic oligonucleotide
agggacgucaggcucagcu

SEQ ID NO: 2880454 - RNA, 19 nt, Artificial Sequence
  Description of Artificial Sequence: Synthetic oligonucleotide
gguaaagcuggacuggaug

SEQ ID NO: 2880455 - RNA, 19 nt, Artificial Sequence
  Description of Artificial Sequence: Synthetic oligonucleotide
cccaacaugguugaaaagg

SEQ ID NO: 2880456 - RNA, 19 nt, Artificial Sequence
  Description of Artificial Sequence: Synthetic oligonucleotide
gcaaguggccucaaaaugg

SEQ ID NO: 2880457 - RNA, 19 nt, Artificial Sequence
  Description of Artificial Sequence: Synthetic oligonucleotide
agcugagauuuggagagac

SEQ ID NO: 2880458 - RNA, 19 nt, Artificial Sequence
  Description of Artificial Sequence: Synthetic oligonucleotide
augcguucccaccuuguuc

SEQ ID NO: 2880459 - RNA, 19 nt, Artificial Sequence
  Description of Artificial Sequence: Synthetic oligonucleotide
ucauagucugcugcaagug

SEQ ID NO: 2880460 - RNA, 19 nt, Artificial Sequence
  Description of Artificial Sequence: Synthetic oligonucleotide
aauggucuccucaggcagg

SEQ ID NO: 2880461 - RNA, 19 nt, Artificial Sequence
  Description of Artificial Sequence: Synthetic oligonucleotide
cccaauuugggucugggcc

SEQ ID NO: 2880462 - RNA, 19 nt, Artificial Sequence
  Description of Artificial Sequence: Synthetic oligonucleotide
gagcuugagcccuuagccc

SEQ ID NO: 2880463 - RNA, 19 nt, Artificial Sequence
  Description of Artificial Sequence: Synthetic oligonucleotide
gaggaauggucuccucagg

SEQ ID NO: 2880464 - RNA, 19 nt, Artificial Sequence
  Description of Artificial Sequence: Synthetic oligonucleotide
acuggaugcguucccaccu

SEQ ID NO: 2880465 - RNA, 19 nt, Artificial Sequence
  Description of Artificial Sequence: Synthetic oligonucleotide
uccagccauaucuugaguu

SEQ ID NO: 2880466 - RNA, 19 nt, Artificial Sequence
  Description of Artificial Sequence: Synthetic oligonucleotide
agaaccccaacaugguuga

SEQ ID NO: 2880467 - RNA, 19 nt, Artificial Sequence
  Description of Artificial Sequence: Synthetic oligonucleotide
cugagauuuggagagacca

SEQ ID NO: 2880468 - RNA, 19 nt, Artificial Sequence
  Description of Artificial Sequence: Synthetic oligonucleotide
ugaguucuaagaaccccaa

SEQ ID NO: 2880469 - RNA, 19 nt, Artificial Sequence
  Description of Artificial Sequence: Synthetic oligonucleotide
aacuuccacucucugcuaa

SEQ ID NO: 2880470 - RNA, 19 nt, Artificial Sequence
  Description of Artificial Sequence: Synthetic oligonucleotide
ccacucucugcuaagaggc

SEQ ID NO: 2880471 - RNA, 19 nt, Artificial Sequence
  Description of Artificial Sequence: Synthetic oligonucleotide
uagucugcugcaaguggcc

SEQ ID NO: 2880472 - RNA, 19 nt, Artificial Sequence
  Description of Artificial Sequence: Synthetic oligonucleotide
aagugcagccccaacccuc

SEQ ID NO: 2880473 - RNA, 19 nt, Artificial Sequence
  Description of Artificial Sequence: Synthetic oligonucleotide
caacccuccgacagggacg

SEQ ID NO: 2880474 - RNA, 19 nt, Artificial Sequence
  Description of Artificial Sequence: Synthetic oligonucleotide
guggccucaaaauggaguc

SEQ ID NO: 2880475 - RNA, 19 nt, Artificial Sequence
  Description of Artificial Sequence: Synthetic oligonucleotide
ugggaaacuuccacucucu

SEQ ID NO: 2880476 - RNA, 19 nt, Artificial Sequence
  Description of Artificial Sequence: Synthetic oligonucleotide
cuaaauaagugcagcccca

SEQ ID NO: 2880477 - RNA, 19 nt, Artificial Sequence
  Description of Artificial Sequence: Synthetic oligonucleotide
agcccuuagccccaauuug

SEQ ID NO: 2880478 - RNA, 19 nt, Artificial Sequence
  Description of Artificial Sequence: Synthetic oligonucleotide
gagagaccacgucagcagc

SEQ ID NO: 2880479 - RNA, 19 nt, Artificial Sequence
  Description of Artificial Sequence: Synthetic oligonucleotide
ggaaacuuccacucucugc

SEQ ID NO: 2880480 - RNA, 19 nt, Artificial Sequence
  Description of Artificial Sequence: Synthetic oligonucleotide
agccccaacccuccgacag

SEQ ID NO: 2880481 - RNA, 19 nt, Artificial Sequence
  Description of Artificial Sequence: Synthetic oligonucleotide
cucagcugagauuuggaga

SEQ ID NO: 2880482 - RNA, 19 nt, Artificial Sequence
  Description of Artificial Sequence: Synthetic oligonucleotide
ucaggcaggguggaacggg

SEQ ID NO: 2880483 - RNA, 19 nt, Artificial Sequence
  Description of Artificial Sequence: Synthetic oligonucleotide
aagguaaagcuggacugga

SEQ ID NO: 2880484 - RNA, 19 nt, Artificial Sequence
  Description of Artificial Sequence: Synthetic oligonucleotide
cucaaaauggagucuagcu

SEQ ID NO: 2880485 - RNA, 19 nt, Artificial Sequence
  Description of Artificial Sequence: Synthetic oligonucleotide
augguugaaaaggaagccu

SEQ ID NO: 2880486 - RNA, 19 nt, Artificial Sequence
  Description of Artificial Sequence: Synthetic oligonucleotide
cuaagaggcgagaggcagc

SEQ ID NO: 2880487 - RNA, 19 nt, Artificial Sequence
  Description of Artificial Sequence: Synthetic oligonucleotide
ugggugggaaacuuccacu

SEQ ID NO: 2880488 - RNA, 19 nt, Artificial Sequence
  Description of Artificial Sequence: Synthetic oligonucleotide
aaacugggugggaaacuuc

SEQ ID NO: 2880489 - RNA, 19 nt, Artificial Sequence
  Description of Artificial Sequence: Synthetic oligonucleotide
gacuggaugcguucccacc

SEQ ID NO: 2880490 - RNA, 19 nt, Artificial Sequence
  Description of Artificial Sequence: Synthetic oligonucleotide
uggagagaccacgucagca

SEQ ID NO: 2880491 - RNA, 19 nt, Artificial Sequence
  Description of Artificial Sequence: Synthetic oligonucleotide
ggagagaccacgucagcag

SEQ ID NO: 2880492 - RNA, 19 nt, Artificial Sequence
  Description of Artificial Sequence: Synthetic oligonucleotide
agaagcuggggcaguuucc

SEQ ID NO: 2880493 - RNA, 19 nt, Artificial Sequence
  Description of Artificial Sequence: Synthetic oligonucleotide
uaagaaccccaacaugguu

SEQ ID NO: 2880494 - RNA, 19 nt, Artificial Sequence
  Description of Artificial Sequence: Synthetic oligonucleotide
accccaacaugguugaaaa

SEQ ID NO: 2880495 - RNA, 19 nt, Artificial Sequence
  Description of Artificial Sequence: Synthetic oligonucleotide
agcuggugccguuuucuuc

SEQ ID NO: 2880496 - RNA, 19 nt, Artificial Sequence
  Description of Artificial Sequence: Synthetic oligonucleotide
uaagaggcgagaggcagcu

SEQ ID NO: 2880497 - RNA, 19 nt, Artificial Sequence
  Description of Artificial Sequence: Synthetic oligonucleotide
gcuggugccguuuucuucc

SEQ ID NO: 2880498 - RNA, 19 nt, Artificial Sequence
  Description of Artificial Sequence: Synthetic oligonucleotide
gagaagcuggggcaguuuc

SEQ ID NO: 2880499 - RNA, 19 nt, Artificial Sequence
  Description of Artificial Sequence: Synthetic oligonucleotide
uugguccagccauaucuug

SEQ ID NO: 2880500 - RNA, 19 nt, Artificial Sequence
  Description of Artificial Sequence: Synthetic oligonucleotide
aaaauggagucuagcuggu

SEQ ID NO: 2880501 - RNA, 19 nt, Artificial Sequence
  Description of Artificial Sequence: Synthetic oligonucleotide
agugcagccccaacccucc

SEQ ID NO: 2880502 - RNA, 19 nt, Artificial Sequence
  Description of Artificial Sequence: Synthetic oligonucleotide
acuuccacucucugcuaag

SEQ ID NO: 2880503 - RNA, 19 nt, Artificial Sequence
  Description of Artificial Sequence: Synthetic oligonucleotide
cucucugcuaagaggcgag

SEQ ID NO: 2880504 - RNA, 19 nt, Artificial Sequence
  Description of Artificial Sequence: Synthetic oligonucleotide
uaagugcagccccaacccu

SEQ ID NO: 2880505 - RNA, 19 nt, Artificial Sequence
  Description of Artificial Sequence: Synthetic oligonucleotide
aguggccucaaaauggagu

SEQ ID NO: 2880506 - RNA, 19 nt, Artificial Sequence
  Description of Artificial Sequence: Synthetic oligonucleotide
uccaaacugggugggaaac

SEQ ID NO: 2880507 - RNA, 19 nt, Artificial Sequence
  Description of Artificial Sequence: Synthetic oligonucleotide
aagccucucauagucugcu

SEQ ID NO: 2880508 - RNA, 19 nt, Artificial Sequence
  Description of Artificial Sequence: Synthetic oligonucleotide
aauuugggucugggccucc

SEQ ID NO: 2880509 - RNA, 19 nt, Artificial Sequence
  Description of Artificial Sequence: Synthetic oligonucleotide
ugcuaagaggcgagaggca

SEQ ID NO: 2880510 - RNA, 19 nt, Artificial Sequence
  Description of Artificial Sequence: Synthetic oligonucleotide
agcuggacuggaugcguuc

SEQ ID NO: 2880511 - RNA, 19 nt, Artificial Sequence
  Description of Artificial Sequence: Synthetic oligonucleotide
ccaacuaaauaagugcagc

SEQ ID NO: 2880512 - RNA, 19 nt, Artificial Sequence
  Description of Artificial Sequence: Synthetic oligonucleotide
uaaauaagugcagccccaa

SEQ ID NO: 2880513 - RNA, 19 nt, Artificial Sequence
  Description of Artificial Sequence: Synthetic oligonucleotide
ugagagcuugagcccuuag

SEQ ID NO: 2880514 - RNA, 19 nt, Artificial Sequence
  Description of Artificial Sequence: Synthetic oligonucleotide
ggaagccucucauagucug

SEQ ID NO: 2880515 - RNA, 19 nt, Artificial Sequence
  Description of Artificial Sequence: Synthetic oligonucleotide
gguugguccagccauaucu

SEQ ID NO: 2880516 - RNA, 19 nt, Artificial Sequence
  Description of Artificial Sequence: Synthetic oligonucleotide
uccauggcagaguccugag

SEQ ID NO: 2880517 - RNA, 19 nt, Artificial Sequence
  Description of Artificial Sequence: Synthetic oligonucleotide
aaccccaacaugguugaaa

SEQ ID NO: 2880518 - RNA, 19 nt, Artificial Sequence
  Description of Artificial Sequence: Synthetic oligonucleotide
uggagucuagcuggugccg

SEQ ID NO: 2880519 - RNA, 19 nt, Artificial Sequence
  Description of Artificial Sequence: Synthetic oligonucleotide
cuuccuccauggcagaguc

SEQ ID NO: 2880520 - RNA, 19 nt, Artificial Sequence
  Description of Artificial Sequence: Synthetic oligonucleotide
uuggagagaccacgucagc

SEQ ID NO: 2880521 - RNA, 19 nt, Artificial Sequence
  Description of Artificial Sequence: Synthetic oligonucleotide
cugggugggaaacuuccac

SEQ ID NO: 2880522 - RNA, 19 nt, Artificial Sequence
  Description of Artificial Sequence: Synthetic oligonucleotide
gugggaaacuuccacucuc

SEQ ID NO: 2880523 - RNA, 19 nt, Artificial Sequence
  Description of Artificial Sequence: Synthetic oligonucleotide
aaauggagucuagcuggug

SEQ ID NO: 2880524 - RNA, 19 nt, Artificial Sequence
  Description of Artificial Sequence: Synthetic oligonucleotide
gaguucuaagaaccccaac

SEQ ID NO: 2880525 - RNA, 19 nt, Artificial Sequence
  Description of Artificial Sequence: Synthetic oligonucleotide
gagagugagcucgucuccc

SEQ ID NO: 2880526 - RNA, 19 nt, Artificial Sequence
  Description of Artificial Sequence: Synthetic oligonucleotide
uuccuauugguugguccag

SEQ ID NO: 2880527 - RNA, 19 nt, Artificial Sequence
  Description of Artificial Sequence: Synthetic oligonucleotide
gguccagccauaucuugag

SEQ ID NO: 2880528 - RNA, 19 nt, Artificial Sequence
  Description of Artificial Sequence: Synthetic oligonucleotide
guucuaagaaccccaacau

SEQ ID NO: 2880529 - RNA, 19 nt, Artificial Sequence
  Description of Artificial Sequence: Synthetic oligonucleotide
caaguggccucaaaaugga

SEQ ID NO: 2880530 - RNA, 19 nt, Artificial Sequence
  Description of Artificial Sequence: Synthetic oligonucleotide
ucagccgggugaggaaugg

SEQ ID NO: 2880531 - RNA, 19 nt, Artificial Sequence
  Description of Artificial Sequence: Synthetic oligonucleotide
ugagcccuuagccccaauu

SEQ ID NO: 2880532 - RNA, 19 nt, Artificial Sequence
  Description of Artificial Sequence: Synthetic oligonucleotide
cacucucugcuaagaggcg

SEQ ID NO: 2880533 - RNA, 19 nt, Artificial Sequence
  Description of Artificial Sequence: Synthetic oligonucleotide
uggaugcguucccaccuug

SEQ ID NO: 2880534 - RNA, 19 nt, Artificial Sequence
  Description of Artificial Sequence: Synthetic oligonucleotide
aacccuccgacagggacgu

SEQ ID NO: 2880535 - RNA, 19 nt, Artificial Sequence
  Description of Artificial Sequence: Synthetic oligonucleotide
gcucagcugagauuuggag

SEQ ID NO: 2880536 - RNA, 19 nt, Artificial Sequence
  Description of Artificial Sequence: Synthetic oligonucleotide
gcuaagaggcgagaggcag

SEQ ID NO: 2880537 - RNA, 19 nt, Artificial Sequence
  Description of Artificial Sequence: Synthetic oligonucleotide
guugaaaaggaagccucuc

SEQ ID NO: 2880538 - RNA, 19 nt, Artificial Sequence
  Description of Artificial Sequence: Synthetic oligonucleotide
agcuggggcaguuuccuau

SEQ ID NO: 2880539 - RNA, 19 nt, Artificial Sequence
  Description of Artificial Sequence: Synthetic oligonucleotide
aguuuccuauugguugguc

SEQ ID NO: 2880540 - RNA, 19 nt, Artificial Sequence
  Description of Artificial Sequence: Synthetic oligonucleotide
uccugagagcuugagcccu

SEQ ID NO: 2880541 - RNA, 19 nt, Artificial Sequence
  Description of Artificial Sequence: Synthetic oligonucleotide
acgggcaauccuccaaacu

SEQ ID NO: 2880542 - RNA, 19 nt, Artificial Sequence
  Description of Artificial Sequence: Synthetic oligonucleotide
gaacgggcaauccuccaaa

SEQ ID NO: 2880543 - RNA, 19 nt, Artificial Sequence
  Description of Artificial Sequence: Synthetic oligonucleotide
cgaagguaaagcuggacug

SEQ ID NO: 2880544 - RNA, 19 nt, Artificial Sequence
  Description of Artificial Sequence: Synthetic oligonucleotide
aaacuuccacucucugcua

SEQ ID NO: 2880545 - RNA, 19 nt, Artificial Sequence
  Description of Artificial Sequence: Synthetic oligonucleotide
ucuuccuccauggcagagu

SEQ ID NO: 2880546 - RNA, 19 nt, Artificial Sequence
  Description of Artificial Sequence: Synthetic oligonucleotide
guccugagagcuugagccc

SEQ ID NO: 2880547 - RNA, 19 nt, Artificial Sequence
  Description of Artificial Sequence: Synthetic oligonucleotide
gaagccucucauagucugc

SEQ ID NO: 2880548 - RNA, 19 nt, Artificial Sequence
  Description of Artificial Sequence: Synthetic oligonucleotide
gggcaauccuccaaacugg

SEQ ID NO: 2880549 - RNA, 19 nt, Artificial Sequence
  Description of Artificial Sequence: Synthetic oligonucleotide
aggcucagcugagauuugg

SEQ ID NO: 2880550 - RNA, 19 nt, Artificial Sequence
  Description of Artificial Sequence: Synthetic oligonucleotide
agauuuggagagaccacgu

SEQ ID NO: 2880551 - RNA, 19 nt, Artificial Sequence
  Description of Artificial Sequence: Synthetic oligonucleotide
ucuagcuggugccguuuuc

SEQ ID NO: 2880552 - RNA, 19 nt, Artificial Sequence
  Description of Artificial Sequence: Synthetic oligonucleotide
aaguggccucaaaauggag

SEQ ID NO: 2880553 - RNA, 19 nt, Artificial Sequence
  Description of Artificial Sequence: Synthetic oligonucleotide
cccaacuaaauaagugcag

SEQ ID NO: 2880554 - RNA, 19 nt, Artificial Sequence
  Description of Artificial Sequence: Synthetic oligonucleotide
aggguggaacgggcaaucc

SEQ ID NO: 2880555 - RNA, 19 nt, Artificial Sequence
  Description of Artificial Sequence: Synthetic oligonucleotide
uuccgaagguaaagcugga

SEQ ID NO: 2880556 - RNA, 19 nt, Artificial Sequence
  Description of Artificial Sequence: Synthetic oligonucleotide
uccuauugguugguccagc

SEQ ID NO: 2880557 - RNA, 19 nt, Artificial Sequence
  Description of Artificial Sequence: Synthetic oligonucleotide
gugccguuuucuuccgaag

SEQ ID NO: 2880558 - RNA, 19 nt, Artificial Sequence
  Description of Artificial Sequence: Synthetic oligonucleotide
agccgggugaggaaugguc

SEQ ID NO: 2880559 - RNA, 19 nt, Artificial Sequence
  Description of Artificial Sequence: Synthetic oligonucleotide
caggcaggguggaacgggc

SEQ ID NO: 2880560 - RNA, 19 nt, Artificial Sequence
  Description of Artificial Sequence: Synthetic oligonucleotide
acucucugcuaagaggcga

SEQ ID NO: 2880561 - RNA, 19 nt, Artificial Sequence
  Description of Artificial Sequence: Synthetic oligonucleotide
gccucucauagucugcugc

SEQ ID NO: 2880562 - RNA, 19 nt, Artificial Sequence
  Description of Artificial Sequence: Synthetic oligonucleotide
ggaauggucuccucaggca

SEQ ID NO: 2880563 - RNA, 19 nt, Artificial Sequence
  Description of Artificial Sequence: Synthetic oligonucleotide
cuugucagccgggugagga

SEQ ID NO: 2880564 - RNA, 19 nt, Artificial Sequence
  Description of Artificial Sequence: Synthetic oligonucleotide
ccaacaugguugaaaagga

SEQ ID NO: 2880565 - RNA, 19 nt, Artificial Sequence
  Description of Artificial Sequence: Synthetic oligonucleotide
ggagagugagcucgucucc

SEQ ID NO: 2880566 - RNA, 19 nt, Artificial Sequence
  Description of Artificial Sequence: Synthetic oligonucleotide
uggacuggaugcguuccca

SEQ ID NO: 2880567 - RNA, 19 nt, Artificial Sequence
  Description of Artificial Sequence: Synthetic oligonucleotide
cagcuugucagccggguga

SEQ ID NO: 2880568 - RNA, 19 nt, Artificial Sequence
  Description of Artificial Sequence: Synthetic oligonucleotide
gcccuuagccccaauuugg

SEQ ID NO: 2880569 - RNA, 19 nt, Artificial Sequence
  Description of Artificial Sequence: Synthetic oligonucleotide
uggaacgggcaauccucca

SEQ ID NO: 2880570 - RNA, 19 nt, Artificial Sequence
  Description of Artificial Sequence: Synthetic oligonucleotide
uccgaagguaaagcuggac

SEQ ID NO: 2880571 - RNA, 19 nt, Artificial Sequence
  Description of Artificial Sequence: Synthetic oligonucleotide
cuauugguugguccagcca

SEQ ID NO: 2880572 - RNA, 19 nt, Artificial Sequence
  Description of Artificial Sequence: Synthetic oligonucleotide
caacaugguugaaaaggaa

SEQ ID NO: 2880573 - RNA, 19 nt, Artificial Sequence
  Description of Artificial Sequence: Synthetic oligonucleotide
accacgucagcagcuuguc

SEQ ID NO: 2880574 - RNA, 19 nt, Artificial Sequence
  Description of Artificial Sequence: Synthetic oligonucleotide
ccauaucuugaguucuaag

SEQ ID NO: 2880575 - RNA, 19 nt, Artificial Sequence
  Description of Artificial Sequence: Synthetic oligonucleotide
ccuauugguugguccagcc

SEQ ID NO: 2880576 - RNA, 19 nt, Artificial Sequence
  Description of Artificial Sequence: Synthetic oligonucleotide
ugcagccccaacccuccga

SEQ ID NO: 2880577 - RNA, 19 nt, Artificial Sequence
  Description of Artificial Sequence: Synthetic oligonucleotide
ccuguugggagaagcuggg

SEQ ID NO: 2880578 - RNA, 19 nt, Artificial Sequence
  Description of Artificial Sequence: Synthetic oligonucleotide
agaccacgucagcagcuug

SEQ ID NO: 2880579 - RNA, 19 nt, Artificial Sequence
  Description of Artificial Sequence: Synthetic oligonucleotide
ggcaauccuccaaacuggg

SEQ ID NO: 2880580 - RNA, 19 nt, Artificial Sequence
  Description of Artificial Sequence: Synthetic oligonucleotide
gacagggacgucaggcuca

SEQ ID NO: 2880581 - RNA, 19 nt, Artificial Sequence
  Description of Artificial Sequence: Synthetic oligonucleotide
auccuccaaacuggguggg

SEQ ID NO: 2880582 - RNA, 19 nt, Artificial Sequence
  Description of Artificial Sequence: Synthetic oligonucleotide
caccuuguucuucuuccuc

SEQ ID NO: 2880583 - RNA, 19 nt, Artificial Sequence
  Description of Artificial Sequence: Synthetic oligonucleotide
gggugggaaacuuccacuc

SEQ ID NO: 2880584 - RNA, 19 nt, Artificial Sequence
  Description of Artificial Sequence: Synthetic oligonucleotide
cucauagucugcugcaagu

SEQ ID NO: 2880585 - RNA, 19 nt, Artificial Sequence
  Description of Artificial Sequence: Synthetic oligonucleotide
agcuugucagccgggugag

SEQ ID NO: 2880586 - RNA, 19 nt, Artificial Sequence
  Description of Artificial Sequence: Synthetic oligonucleotide
gguggaacgggcaauccuc

SEQ ID NO: 2880587 - RNA, 19 nt, Artificial Sequence
  Description of Artificial Sequence: Synthetic oligonucleotide
uugucagccgggugaggaa

SEQ ID NO: 2880588 - RNA, 19 nt, Artificial Sequence
  Description of Artificial Sequence: Synthetic oligonucleotide
guggaacgggcaauccucc

SEQ ID NO: 2880589 - RNA, 19 nt, Artificial Sequence
  Description of Artificial Sequence: Synthetic oligonucleotide
cgggcaauccuccaaacug

SEQ ID NO: 2880590 - RNA, 19 nt, Artificial Sequence
  Description of Artificial Sequence: Synthetic oligonucleotide
gcgagaggcagcuccuggg

SEQ ID NO: 2880591 - RNA, 19 nt, Artificial Sequence
  Description of Artificial Sequence: Synthetic oligonucleotide
ugucagccgggugaggaau

SEQ ID NO: 2880592 - RNA, 19 nt, Artificial Sequence
  Description of Artificial Sequence: Synthetic oligonucleotide
cuggugccguuuucuuccg

SEQ ID NO: 2880593 - RNA, 19 nt, Artificial Sequence
  Description of Artificial Sequence: Synthetic oligonucleotide
ccagccauaucuugaguuc

SEQ ID NO: 2880594 - RNA, 19 nt, Artificial Sequence
  Description of Artificial Sequence: Synthetic oligonucleotide
cccuuagccccaauuuggg

SEQ ID NO: 2880595 - RNA, 19 nt, Artificial Sequence
  Description of Artificial Sequence: Synthetic oligonucleotide
gacgucaggcucagcugag

SEQ ID NO: 2880596 - RNA, 19 nt, Artificial Sequence
  Description of Artificial Sequence: Synthetic oligonucleotide
ccucaggcaggguggaacg

SEQ ID NO: 2880597 - RNA, 19 nt, Artificial Sequence
  Description of Artificial Sequence: Synthetic oligonucleotide
ggcgagaggcagcuccugg

SEQ ID NO: 2880598 - RNA, 19 nt, Artificial Sequence
  Description of Artificial Sequence: Synthetic oligonucleotide
ggacgucaggcucagcuga

SEQ ID NO: 2880599 - RNA, 19 nt, Artificial Sequence
  Description of Artificial Sequence: Synthetic oligonucleotide
ccccaacuaaauaagugca

SEQ ID NO: 2880600 - RNA, 19 nt, Artificial Sequence
  Description of Artificial Sequence: Synthetic oligonucleotide
agagaccacgucagcagcu

SEQ ID NO: 2880601 - RNA, 19 nt, Artificial Sequence
  Description of Artificial Sequence: Synthetic oligonucleotide
uugguugguccagccauau

SEQ ID NO: 2880602 - RNA, 19 nt, Artificial Sequence
  Description of Artificial Sequence: Synthetic oligonucleotide
guucccaccuuguucuucu

SEQ ID NO: 2880603 - RNA, 19 nt, Artificial Sequence
  Description of Artificial Sequence: Synthetic oligonucleotide
guuuucuuccgaagguaaa

SEQ ID NO: 2880604 - RNA, 19 nt, Artificial Sequence
  Description of Artificial Sequence: Synthetic oligonucleotide
cuguugggagaagcugggg

SEQ ID NO: 2880605 - RNA, 19 nt, Artificial Sequence
  Description of Artificial Sequence: Synthetic oligonucleotide
ucucugcuaagaggcgaga

SEQ ID NO: 2880606 - RNA, 19 nt, Artificial Sequence
  Description of Artificial Sequence: Synthetic oligonucleotide
uggccucaaaauggagucu

SEQ ID NO: 2880607 - RNA, 19 nt, Artificial Sequence
  Description of Artificial Sequence: Synthetic oligonucleotide
cucaggcaggguggaacgg

SEQ ID NO: 2880608 - RNA, 19 nt, Artificial Sequence
  Description of Artificial Sequence: Synthetic oligonucleotide
agccucucauagucugcug

SEQ ID NO: 2880609 - RNA, 19 nt, Artificial Sequence
  Description of Artificial Sequence: Synthetic oligonucleotide
gggaaacuuccacucucug

SEQ ID NO: 2880610 - RNA, 19 nt, Artificial Sequence
  Description of Artificial Sequence: Synthetic oligonucleotide
cuggggcaguuuccuauug

SEQ ID NO: 2880611 - RNA, 19 nt, Artificial Sequence
  Description of Artificial Sequence: Synthetic oligonucleotide
gaagcuggggcaguuuccu

SEQ ID NO: 2880612 - RNA, 19 nt, Artificial Sequence
  Description of Artificial Sequence: Synthetic oligonucleotide
ccucaaaauggagucuagc

SEQ ID NO: 2880613 - RNA, 19 nt, Artificial Sequence
  Description of Artificial Sequence: Synthetic oligonucleotide
gggacgucaggcucagcug

SEQ ID NO: 2880614 - RNA, 19 nt, Artificial Sequence
  Description of Artificial Sequence: Synthetic oligonucleotide
agucugcugcaaguggccu

SEQ ID NO: 2880615 - RNA, 19 nt, Artificial Sequence
  Description of Artificial Sequence: Synthetic oligonucleotide
aagaggcgagaggcagcuc

SEQ ID NO: 2880616 - RNA, 19 nt, Artificial Sequence
  Description of Artificial Sequence: Synthetic oligonucleotide
ccaacccuccgacagggac

SEQ ID NO: 2880617 - RNA, 19 nt, Artificial Sequence
  Description of Artificial Sequence: Synthetic oligonucleotide
acagggacgucaggcucag

SEQ ID NO: 2880618 - RNA, 19 nt, Artificial Sequence
  Description of Artificial Sequence: Synthetic oligonucleotide
gagcccuuagccccaauuu

SEQ ID NO: 2880619 - RNA, 19 nt, Artificial Sequence
  Description of Artificial Sequence: Synthetic oligonucleotide
cuccauggcagaguccuga

SEQ ID NO: 2880620 - RNA, 19 nt, Artificial Sequence
  Description of Artificial Sequence: Synthetic oligonucleotide
cugcaaguggccucaaaau

SEQ ID NO: 2880621 - RNA, 19 nt, Artificial Sequence
  Description of Artificial Sequence: Synthetic oligonucleotide
uagcuggugccguuuucuu

SEQ ID NO: 2880622 - RNA, 19 nt, Artificial Sequence
  Description of Artificial Sequence: Synthetic oligonucleotide
aagcuggggcaguuuccua

SEQ ID NO: 2880623 - RNA, 19 nt, Artificial Sequence
  Description of Artificial Sequence: Synthetic oligonucleotide
agcagcuugucagccgggu

SEQ ID NO: 2880624 - RNA, 19 nt, Artificial Sequence
  Description of Artificial Sequence: Synthetic oligonucleotide
aggaagccucucauagucu

SEQ ID NO: 2880625 - RNA, 19 nt, Artificial Sequence
  Description of Artificial Sequence: Synthetic oligonucleotide
cuuccacucucugcuaaga

SEQ ID NO: 2880626 - RNA, 19 nt, Artificial Sequence
  Description of Artificial Sequence: Synthetic oligonucleotide
uggugccguuuucuuccga

SEQ ID NO: 2880627 - RNA, 19 nt, Artificial Sequence
  Description of Artificial Sequence: Synthetic oligonucleotide
cagcagcuugucagccggg

SEQ ID NO: 2880628 - RNA, 19 nt, Artificial Sequence
  Description of Artificial Sequence: Synthetic oligonucleotide
ggugccguuuucuuccgaa

SEQ ID NO: 2880629 - RNA, 19 nt, Artificial Sequence
  Description of Artificial Sequence: Synthetic oligonucleotide
cuccaaacugggugggaaa

SEQ ID NO: 2880630 - RNA, 19 nt, Artificial Sequence
  Description of Artificial Sequence: Synthetic oligonucleotide
uccuccaaacuggguggga

SEQ ID NO: 2880631 - RNA, 19 nt, Artificial Sequence
  Description of Artificial Sequence: Synthetic oligonucleotide
gaugcguucccaccuuguu

SEQ ID NO: 2880632 - RNA, 19 nt, Artificial Sequence
  Description of Artificial Sequence: Synthetic oligonucleotide
caggguggaacgggcaauc

SEQ ID NO: 2880633 - RNA, 19 nt, Artificial Sequence
  Description of Artificial Sequence: Synthetic oligonucleotide
ggaacgggcaauccuccaa

SEQ ID NO: 2880634 - RNA, 19 nt, Artificial Sequence
  Description of Artificial Sequence: Synthetic oligonucleotide
gcuggacuggaugcguucc

SEQ ID NO: 2880635 - RNA, 19 nt, Artificial Sequence
  Description of Artificial Sequence: Synthetic oligonucleotide
gcugagauuuggagagacc

SEQ ID NO: 2880636 - RNA, 19 nt, Artificial Sequence
  Description of Artificial Sequence: Synthetic oligonucleotide
aagcuggacuggaugcguu

SEQ ID NO: 2880637 - RNA, 19 nt, Artificial Sequence
  Description of Artificial Sequence: Synthetic oligonucleotide
gcagccccaacccuccgac

SEQ ID NO: 2880638 - RNA, 19 nt, Artificial Sequence
  Description of Artificial Sequence: Synthetic oligonucleotide
gucagccgggugaggaaug

SEQ ID NO: 2880639 - RNA, 19 nt, Artificial Sequence
  Description of Artificial Sequence: Synthetic oligonucleotide
cuagcuggugccguuuucu

SEQ ID NO: 2880640 - RNA, 19 nt, Artificial Sequence
  Description of Artificial Sequence: Synthetic oligonucleotide
auugguugguccagccaua

SEQ ID NO: 2880641 - RNA, 19 nt, Artificial Sequence
  Description of Artificial Sequence: Synthetic oligonucleotide
ggggcaguuuccuauuggu

SEQ ID NO: 2880642 - RNA, 19 nt, Artificial Sequence
  Description of Artificial Sequence: Synthetic oligonucleotide
ccuccgacagggacgucag

SEQ ID NO: 2880643 - RNA, 19 nt, Artificial Sequence
  Description of Artificial Sequence: Synthetic oligonucleotide
ccccaauuugggucugggc

SEQ ID NO: 2880644 - RNA, 19 nt, Artificial Sequence
  Description of Artificial Sequence: Synthetic oligonucleotide
cuccgacagggacgucagg

SEQ ID NO: 2880645 - RNA, 19 nt, Artificial Sequence
  Description of Artificial Sequence: Synthetic oligonucleotide
agccccaauuugggucugg

SEQ ID NO: 2880646 - RNA, 19 nt, Artificial Sequence
  Description of Artificial Sequence: Synthetic oligonucleotide
gaccacgucagcagcuugu

SEQ ID NO: 2880647 - RNA, 19 nt, Artificial Sequence
  Description of Artificial Sequence: Synthetic oligonucleotide
caggcucagcugagauuug

SEQ ID NO: 2880648 - RNA, 19 nt, Artificial Sequence
  Description of Artificial Sequence: Synthetic oligonucleotide
agguaaagcuggacuggau

SEQ ID NO: 2880649 - RNA, 19 nt, Artificial Sequence
  Description of Artificial Sequence: Synthetic oligonucleotide
ccucucauagucugcugca

SEQ ID NO: 2880650 - RNA, 19 nt, Artificial Sequence
  Description of Artificial Sequence: Synthetic oligonucleotide
gccucaaaauggagucuag

SEQ ID NO: 2880651 - RNA, 19 nt, Artificial Sequence
  Description of Artificial Sequence: Synthetic oligonucleotide
gugcagccccaacccuccg

SEQ ID NO: 2880652 - RNA, 19 nt, Artificial Sequence
  Description of Artificial Sequence: Synthetic oligonucleotide
ccaauuugggucugggccu

SEQ ID NO: 2880653 - RNA, 19 nt, Artificial Sequence
  Description of Artificial Sequence: Synthetic oligonucleotide
gguugaaaaggaagccucu

SEQ ID NO: 2880654 - RNA, 19 nt, Artificial Sequence
  Description of Artificial Sequence: Synthetic oligonucleotide
ccgaagguaaagcuggacu

SEQ ID NO: 2880655 - RNA, 19 nt, Artificial Sequence
  Description of Artificial Sequence: Synthetic oligonucleotide
gccccaacccuccgacagg

SEQ ID NO: 2880656 - RNA, 19 nt, Artificial Sequence
  Description of Artificial Sequence: Synthetic oligonucleotide
ggugggaaacuuccacucu

SEQ ID NO: 2880657 - RNA, 19 nt, Artificial Sequence
  Description of Artificial Sequence: Synthetic oligonucleotide
gccguuuucuuccgaaggu

SEQ ID NO: 2880658 - RNA, 19 nt, Artificial Sequence
  Description of Artificial Sequence: Synthetic oligonucleotide
cucucauagucugcugcaa

SEQ ID NO: 2880659 - RNA, 19 nt, Artificial Sequence
  Description of Artificial Sequence: Synthetic oligonucleotide
gccccaauuugggucuggg

SEQ ID NO: 2880660 - RNA, 19 nt, Artificial Sequence
  Description of Artificial Sequence: Synthetic oligonucleotide
ccccaacaugguugaaaag

SEQ ID NO: 2880661 - RNA, 19 nt, Artificial Sequence
  Description of Artificial Sequence: Synthetic oligonucleotide
cgagaggcagcuccugggc

SEQ ID NO: 2880662 - RNA, 19 nt, Artificial Sequence
  Description of Artificial Sequence: Synthetic oligonucleotide
ggugaggaauggucuccuc

SEQ ID NO: 2880663 - RNA, 19 nt, Artificial Sequence
  Description of Artificial Sequence: Synthetic oligonucleotide
agccauaucuugaguucua

SEQ ID NO: 2880664 - RNA, 19 nt, Artificial Sequence
  Description of Artificial Sequence: Synthetic oligonucleotide
ggccucaaaauggagucua

SEQ ID NO: 2880665 - RNA, 19 nt, Artificial Sequence
  Description of Artificial Sequence: Synthetic oligonucleotide
cagccauaucuugaguucu

SEQ ID NO: 2880666 - RNA, 19 nt, Artificial Sequence
  Description of Artificial Sequence: Synthetic oligonucleotide
cguuuucuuccgaagguaa

SEQ ID NO: 2880667 - RNA, 19 nt, Artificial Sequence
  Description of Artificial Sequence: Synthetic oligonucleotide
acgucaggcucagcugaga

SEQ ID NO: 2880668 - RNA, 19 nt, Artificial Sequence
  Description of Artificial Sequence: Synthetic oligonucleotide
caaacugggugggaaacuu

SEQ ID NO: 2880669 - RNA, 19 nt, Artificial Sequence
  Description of Artificial Sequence: Synthetic oligonucleotide
ggcaggguggaacgggcaa

SEQ ID NO: 2880670 - RNA, 19 nt, Artificial Sequence
  Description of Artificial Sequence: Synthetic oligonucleotide
uagccccaauuugggucug

SEQ ID NO: 2880671 - RNA, 19 nt, Artificial Sequence
  Description of Artificial Sequence: Synthetic oligonucleotide
cagaguccugagagcuuga

SEQ ID NO: 2880672 - RNA, 19 nt, Artificial Sequence
  Description of Artificial Sequence: Synthetic oligonucleotide
aggcgagaggcagcuccug

SEQ ID NO: 2880673 - RNA, 19 nt, Artificial Sequence
  Description of Artificial Sequence: Synthetic oligonucleotide
ggcccugggcugguagugg

SEQ ID NO: 2880674 - RNA, 19 nt, Artificial Sequence
  Description of Artificial Sequence: Synthetic oligonucleotide
uugagcccuuagccccaau

SEQ ID NO: 2880675 - RNA, 19 nt, Artificial Sequence
  Description of Artificial Sequence: Synthetic oligonucleotide
ccgggugaggaauggucuc

SEQ ID NO: 2880676 - RNA, 19 nt, Artificial Sequence
  Description of Artificial Sequence: Synthetic oligonucleotide
aggcaggguggaacgggca

SEQ ID NO: 2880677 - RNA, 19 nt, Artificial Sequence
  Description of Artificial Sequence: Synthetic oligonucleotide
gucaggcucagcugagauu

SEQ ID NO: 2880678 - RNA, 19 nt, Artificial Sequence
  Description of Artificial Sequence: Synthetic oligonucleotide
ggguggaacgggcaauccu

SEQ ID NO: 2880679 - RNA, 19 nt, Artificial Sequence
  Description of Artificial Sequence: Synthetic oligonucleotide
guccagccauaucuugagu

SEQ ID NO: 2880680 - RNA, 19 nt, Artificial Sequence
  Description of Artificial Sequence: Synthetic oligonucleotide
gccauaucuugaguucuaa

SEQ ID NO: 2880681 - RNA, 19 nt, Artificial Sequence
  Description of Artificial Sequence: Synthetic oligonucleotide
gagucuagcuggugccguu

SEQ ID NO: 2880682 - RNA, 19 nt, Artificial Sequence
  Description of Artificial Sequence: Synthetic oligonucleotide
gaggcgagaggcagcuccu

SEQ ID NO: 2880683 - RNA, 19 nt, Artificial Sequence
  Description of Artificial Sequence: Synthetic oligonucleotide
gagaccacgucagcagcuu

SEQ ID NO: 2880684 - RNA, 19 nt, Artificial Sequence
  Description of Artificial Sequence: Synthetic oligonucleotide
cgucagcagcuugucagcc

SEQ ID NO: 2880685 - RNA, 19 nt, Artificial Sequence
  Description of Artificial Sequence: Synthetic oligonucleotide
cgacagggacgucaggcuc

SEQ ID NO: 2880686 - RNA, 19 nt, Artificial Sequence
  Description of Artificial Sequence: Synthetic oligonucleotide
cgggugaggaauggucucc

SEQ ID NO: 2880687 - RNA, 19 nt, Artificial Sequence
  Description of Artificial Sequence: Synthetic oligonucleotide
cagcugagauuuggagaga

SEQ ID NO: 2880688 - RNA, 19 nt, Artificial Sequence
  Description of Artificial Sequence: Synthetic oligonucleotide
gaaccccaacaugguugaa

SEQ ID NO: 2880689 - RNA, 19 nt, Artificial Sequence
  Description of Artificial Sequence: Synthetic oligonucleotide
gucuagcuggugccguuuu

SEQ ID NO: 2880690 - RNA, 19 nt, Artificial Sequence
  Description of Artificial Sequence: Synthetic oligonucleotide
gcuugagcccuuagcccca

SEQ ID NO: 2880691 - RNA, 19 nt, Artificial Sequence
  Description of Artificial Sequence: Synthetic oligonucleotide
cagccccaacccuccgaca

SEQ ID NO: 2880692 - RNA, 19 nt, Artificial Sequence
  Description of Artificial Sequence: Synthetic oligonucleotide
cccuccgacagggacguca

SEQ ID NO: 2880693 - RNA, 19 nt, Artificial Sequence
  Description of Artificial Sequence: Synthetic oligonucleotide
gccgggugaggaauggucu

SEQ ID NO: 2880694 - RNA, 19 nt, Artificial Sequence
  Description of Artificial Sequence: Synthetic oligonucleotide
ccauggcagaguccugaga

SEQ ID NO: 2880695 - RNA, 19 nt, Artificial Sequence
  Description of Artificial Sequence: Synthetic oligonucleotide
ggagucuagcuggugccgu

SEQ ID NO: 2880696 - RNA, 19 nt, Artificial Sequence
  Description of Artificial Sequence: Synthetic oligonucleotide
uccugggcccugggcuggu

SEQ ID NO: 2880697 - RNA, 19 nt, Artificial Sequence
  Description of Artificial Sequence: Synthetic oligonucleotide
ccuuagccccaauuugggu

SEQ ID NO: 2880698 - RNA, 19 nt, Artificial Sequence
  Description of Artificial Sequence: Synthetic oligonucleotide
cuugagcccuuagccccaa

SEQ ID NO: 2880699 - RNA, 19 nt, Artificial Sequence
  Description of Artificial Sequence: Synthetic oligonucleotide
caguuuccuauugguuggu

SEQ ID NO: 2880700 - RNA, 19 nt, Artificial Sequence
  Description of Artificial Sequence: Synthetic oligonucleotide
cugagagcuugagcccuua

SEQ ID NO: 2880701 - RNA, 19 nt, Artificial Sequence
  Description of Artificial Sequence: Synthetic oligonucleotide
ccguuuucuuccgaaggua

SEQ ID NO: 2880702 - RNA, 19 nt, Artificial Sequence
  Description of Artificial Sequence: Synthetic oligonucleotide
cuggaugcguucccaccuu

SEQ ID NO: 2880703 - RNA, 19 nt, Artificial Sequence
  Description of Artificial Sequence: Synthetic oligonucleotide
ggaugcguucccaccuugu

SEQ ID NO: 2880704 - RNA, 19 nt, Artificial Sequence
  Description of Artificial Sequence: Synthetic oligonucleotide
gggugaggaauggucuccu

SEQ ID NO: 2880705 - RNA, 19 nt, Artificial Sequence
  Description of Artificial Sequence: Synthetic oligonucleotide
ccacgucagcagcuuguca

SEQ ID NO: 2880706 - RNA, 19 nt, Artificial Sequence
  Description of Artificial Sequence: Synthetic oligonucleotide
ccgacagggacgucaggcu

SEQ ID NO: 2880707 - RNA, 19 nt, Artificial Sequence
  Description of Artificial Sequence: Synthetic oligonucleotide
gcaauccuccaaacugggu

SEQ ID NO: 2880708 - RNA, 19 nt, Artificial Sequence
  Description of Artificial Sequence: Synthetic oligonucleotide
gcuggggcaguuuccuauu

SEQ ID NO: 2880709 - RNA, 19 nt, Artificial Sequence
  Description of Artificial Sequence: Synthetic oligonucleotide
cagggacgucaggcucagc

SEQ ID NO: 2880710 - RNA, 19 nt, Artificial Sequence
  Description of Artificial Sequence: Synthetic oligonucleotide
gggcaguuuccuauugguu

SEQ ID NO: 2880711 - RNA, 19 nt, Artificial Sequence
  Description of Artificial Sequence: Synthetic oligonucleotide
cguucccaccuuguucuuc

SEQ ID NO: 2880712 - RNA, 19 nt, Artificial Sequence
  Description of Artificial Sequence: Synthetic oligonucleotide
ccaccuuguucuucuuccu

SEQ ID NO: 2880713 - RNA, 19 nt, Artificial Sequence
  Description of Artificial Sequence: Synthetic oligonucleotide
ccaaacugggugggaaacu

SEQ ID NO: 2880714 - RNA, 19 nt, Artificial Sequence
  Description of Artificial Sequence: Synthetic oligonucleotide
acccuccgacagggacguc

SEQ ID NO: 2880715 - RNA, 19 nt, Artificial Sequence
  Description of Artificial Sequence: Synthetic oligonucleotide
gcaggguggaacgggcaau

SEQ ID NO: 2880716 - RNA, 19 nt, Artificial Sequence
  Description of Artificial Sequence: Synthetic oligonucleotide
ggagaagcuggggcaguuu

SEQ ID NO: 2880717 - RNA, 19 nt, Artificial Sequence
  Description of Artificial Sequence: Synthetic oligonucleotide
cccaacccuccgacaggga

SEQ ID NO: 2880718 - RNA, 19 nt, Artificial Sequence
  Description of Artificial Sequence: Synthetic oligonucleotide
cagccgggugaggaauggu

SEQ ID NO: 2880719 - RNA, 19 nt, Artificial Sequence
  Description of Artificial Sequence: Synthetic oligonucleotide
gggagaagcuggggcaguu

SEQ ID NO: 2880720 - RNA, 19 nt, Artificial Sequence
  Description of Artificial Sequence: Synthetic oligonucleotide
cgucaggcucagcugagau

SEQ ID NO: 2880721 - RNA, 19 nt, Artificial Sequence
  Description of Artificial Sequence: Synthetic oligonucleotide
cugcugcaaguggccucaa

SEQ ID NO: 2880722 - RNA, 19 nt, Artificial Sequence
  Description of Artificial Sequence: Synthetic oligonucleotide
ccugagagcuugagcccuu

SEQ ID NO: 2880723 - RNA, 19 nt, Artificial Sequence
  Description of Artificial Sequence: Synthetic oligonucleotide
gcguucccaccuuguucuu

SEQ ID NO: 2880724 - RNA, 19 nt, Artificial Sequence
  Description of Artificial Sequence: Synthetic oligonucleotide
aagauagggaagcucagcc

SEQ ID NO: 2880725 - RNA, 19 nt, Artificial Sequence
  Description of Artificial Sequence: Synthetic oligonucleotide
cuuaggagcagcuagacag

SEQ ID NO: 2880726 - RNA, 19 nt, Artificial Sequence
  Description of Artificial Sequence: Synthetic oligonucleotide
agugggaucauugacaagc

SEQ ID NO: 2880727 - RNA, 19 nt, Artificial Sequence
  Description of Artificial Sequence: Synthetic oligonucleotide
aacacccauaaccagcucc

SEQ ID NO: 2880728 - RNA, 19 nt, Artificial Sequence
  Description of Artificial Sequence: Synthetic oligonucleotide
aucauugacaagcaggacg

SEQ ID NO: 2880729 - RNA, 19 nt, Artificial Sequence
  Description of Artificial Sequence: Synthetic oligonucleotide
gacacugacuuacagaggg

SEQ ID NO: 2880730 - RNA, 19 nt, Artificial Sequence
  Description of Artificial Sequence: Synthetic oligonucleotide
aggcugaacacccauaacc

SEQ ID NO: 2880731 - RNA, 19 nt, Artificial Sequence
  Description of Artificial Sequence: Synthetic oligonucleotide
aaggccaggaggaagaccc

SEQ ID NO: 2880732 - RNA, 19 nt, Artificial Sequence
  Description of Artificial Sequence: Synthetic oligonucleotide
uuacagaggggucaggagg

SEQ ID NO: 2880733 - RNA, 19 nt, Artificial Sequence
  Description of Artificial Sequence: Synthetic oligonucleotide
aggacacugacuuacagag

SEQ ID NO: 2880734 - RNA, 19 nt, Artificial Sequence
  Description of Artificial Sequence: Synthetic oligonucleotide
ucauugacaagcaggacgc

SEQ ID NO: 2880735 - RNA, 19 nt, Artificial Sequence
  Description of Artificial Sequence: Synthetic oligonucleotide
aaagucucagaguugggug

SEQ ID NO: 2880736 - RNA, 19 nt, Artificial Sequence
  Description of Artificial Sequence: Synthetic oligonucleotide
uagucauuagcccagcagc

SEQ ID NO: 2880737 - RNA, 19 nt, Artificial Sequence
  Description of Artificial Sequence: Synthetic oligonucleotide
aagucucagaguugggugg

SEQ ID NO: 2880738 - RNA, 19 nt, Artificial Sequence
  Description of Artificial Sequence: Synthetic oligonucleotide
cuuggcaaggcugagaggg

SEQ ID NO: 2880739 - RNA, 19 nt, Artificial Sequence
  Description of Artificial Sequence: Synthetic oligonucleotide
aaagauagggaagcucagc

SEQ ID NO: 2880740 - RNA, 19 nt, Artificial Sequence
  Description of Artificial Sequence: Synthetic oligonucleotide
aacauuggcucuguucucc

SEQ ID NO: 2880741 - RNA, 19 nt, Artificial Sequence
  Description of Artificial Sequence: Synthetic oligonucleotide
aaggcugagaggguguucc

SEQ ID NO: 2880742 - RNA, 19 nt, Artificial Sequence
  Description of Artificial Sequence: Synthetic oligonucleotide
uucuuggcaaggcugagag

SEQ ID NO: 2880743 - RNA, 19 nt, Artificial Sequence
  Description of Artificial Sequence: Synthetic oligonucleotide
ugcaaagucucagaguugg

SEQ ID NO: 2880744 - RNA, 19 nt, Artificial Sequence
  Description of Artificial Sequence: Synthetic oligonucleotide
ugagugaaagauagggaag

SEQ ID NO: 2880745 - RNA, 19 nt, Artificial Sequence
  Description of Artificial Sequence: Synthetic oligonucleotide
ugcacaacagauccagagg

SEQ ID NO: 2880746 - RNA, 19 nt, Artificial Sequence
  Description of Artificial Sequence: Synthetic oligonucleotide
acaugguagucauuagccc

SEQ ID NO: 2880747 - RNA, 19 nt, Artificial Sequence
  Description of Artificial Sequence: Synthetic oligonucleotide
gagagaacacaagagaccc

SEQ ID NO: 2880748 - RNA, 19 nt, Artificial Sequence
  Description of Artificial Sequence: Synthetic oligonucleotide
ucgaaugugcacaacagau

SEQ ID NO: 2880749 - RNA, 19 nt, Artificial Sequence
  Description of Artificial Sequence: Synthetic oligonucleotide
acacaagagacccaggcug

SEQ ID NO: 2880750 - RNA, 19 nt, Artificial Sequence
  Description of Artificial Sequence: Synthetic oligonucleotide
cucugagugaaagauaggg

SEQ ID NO: 2880751 - RNA, 19 nt, Artificial Sequence
  Description of Artificial Sequence: Synthetic oligonucleotide
gacaugguagucauuagcc

SEQ ID NO: 2880752 - RNA, 19 nt, Artificial Sequence
  Description of Artificial Sequence: Synthetic oligonucleotide
gaacacaagagacccaggc

SEQ ID NO: 2880753 - RNA, 19 nt, Artificial Sequence
  Description of Artificial Sequence: Synthetic oligonucleotide
aagagacccaggcugaaca

SEQ ID NO: 2880754 - RNA, 19 nt, Artificial Sequence
  Description of Artificial Sequence: Synthetic oligonucleotide
aggaggaagacccaggcca

SEQ ID NO: 2880755 - RNA, 19 nt, Artificial Sequence
  Description of Artificial Sequence: Synthetic oligonucleotide
agaccacccaaacauuggc

SEQ ID NO: 2880756 - RNA, 19 nt, Artificial Sequence
  Description of Artificial Sequence: Synthetic oligonucleotide
auaaccagcuccugguggg

SEQ ID NO: 2880757 - RNA, 19 nt, Artificial Sequence
  Description of Artificial Sequence: Synthetic oligonucleotide
ucugagugaaagauaggga

SEQ ID NO: 2880758 - RNA, 19 nt, Artificial Sequence
  Description of Artificial Sequence: Synthetic oligonucleotide
aacacaagagacccaggcu

SEQ ID NO: 2880759 - RNA, 19 nt, Artificial Sequence
  Description of Artificial Sequence: Synthetic oligonucleotide
ugaacacccauaaccagcu

SEQ ID NO: 2880760 - RNA, 19 nt, Artificial Sequence
  Description of Artificial Sequence: Synthetic oligonucleotide
uuaggacacugacuuacag

SEQ ID NO: 2880761 - RNA, 19 nt, Artificial Sequence
  Description of Artificial Sequence: Synthetic oligonucleotide
auugacaagcaggacgccc

SEQ ID NO: 2880762 - RNA, 19 nt, Artificial Sequence
  Description of Artificial Sequence: Synthetic oligonucleotide
acaacagauccagaggugg

SEQ ID NO: 2880763 - RNA, 19 nt, Artificial Sequence
  Description of Artificial Sequence: Synthetic oligonucleotide
uugacaagcaggacgcccc

SEQ ID NO: 2880764 - RNA, 19 nt, Artificial Sequence
  Description of Artificial Sequence: Synthetic oligonucleotide
cugaacacccauaaccagc

SEQ ID NO: 2880765 - RNA, 19 nt, Artificial Sequence
  Description of Artificial Sequence: Synthetic oligonucleotide
gagaacacaagagacccag

SEQ ID NO: 2880766 - RNA, 19 nt, Artificial Sequence
  Description of Artificial Sequence: Synthetic oligonucleotide
ucauuagcccagcagccag

SEQ ID NO: 2880767 - RNA, 19 nt, Artificial Sequence
  Description of Artificial Sequence: Synthetic oligonucleotide
aaacauuggcucuguucuc

SEQ ID NO: 2880768 - RNA, 19 nt, Artificial Sequence
  Description of Artificial Sequence: Synthetic oligonucleotide
accacccaaacauuggcuc

SEQ ID NO: 2880769 - RNA, 19 nt, Artificial Sequence
  Description of Artificial Sequence: Synthetic oligonucleotide
aaagaccacccaaacauug

SEQ ID NO: 2880770 - RNA, 19 nt, Artificial Sequence
  Description of Artificial Sequence: Synthetic oligonucleotide
gagugaaagauagggaagc

SEQ ID NO: 2880771 - RNA, 19 nt, Artificial Sequence
  Description of Artificial Sequence: Synthetic oligonucleotide
gaagacccaggccacagcc

SEQ ID NO: 2880772 - RNA, 19 nt, Artificial Sequence
  Description of Artificial Sequence: Synthetic oligonucleotide
ucaggagggucucaccggg

SEQ ID NO: 2880773 - RNA, 19 nt, Artificial Sequence
  Description of Artificial Sequence: Synthetic oligonucleotide
aucuccaagaggaaguggg

SEQ ID NO: 2880774 - RNA, 19 nt, Artificial Sequence
  Description of Artificial Sequence: Synthetic oligonucleotide
cuuuaggacacugacuuac

SEQ ID NO: 2880775 - RNA, 19 nt, Artificial Sequence
  Description of Artificial Sequence: Synthetic oligonucleotide
guagucauuagcccagcag

SEQ ID NO: 2880776 - RNA, 19 nt, Artificial Sequence
  Description of Artificial Sequence: Synthetic oligonucleotide
uucgaaugugcacaacaga

SEQ ID NO: 2880777 - RNA, 19 nt, Artificial Sequence
  Description of Artificial Sequence: Synthetic oligonucleotide
agucauuagcccagcagcc

SEQ ID NO: 2880778 - RNA, 19 nt, Artificial Sequence
  Description of Artificial Sequence: Synthetic oligonucleotide
uaccagggcacccaucucc

SEQ ID NO: 2880779 - RNA, 19 nt, Artificial Sequence
  Description of Artificial Sequence: Synthetic oligonucleotide
cagcuagacagcuaccagg

SEQ ID NO: 2880780 - RNA, 19 nt, Artificial Sequence
  Description of Artificial Sequence: Synthetic oligonucleotide
gugcacaacagauccagag

SEQ ID NO: 2880781 - RNA, 19 nt, Artificial Sequence
  Description of Artificial Sequence: Synthetic oligonucleotide
cugagugaaagauagggaa

SEQ ID NO: 2880782 - RNA, 19 nt, Artificial Sequence
  Description of Artificial Sequence: Synthetic oligonucleotide
aggggcaccaaagaccacc

SEQ ID NO: 2880783 - RNA, 19 nt, Artificial Sequence
  Description of Artificial Sequence: Synthetic oligonucleotide
uagacagcuaccagggcac

SEQ ID NO: 2880784 - RNA, 19 nt, Artificial Sequence
  Description of Artificial Sequence: Synthetic oligonucleotide
auuggcucuguucuccaag

SEQ ID NO: 2880785 - RNA, 19 nt, Artificial Sequence
  Description of Artificial Sequence: Synthetic oligonucleotide
uccuccauucgaaugugca

SEQ ID NO: 2880786 - RNA, 19 nt, Artificial Sequence
  Description of Artificial Sequence: Synthetic oligonucleotide
uuaggagcagcuagacagc

SEQ ID NO: 2880787 - RNA, 19 nt, Artificial Sequence
  Description of Artificial Sequence: Synthetic oligonucleotide
aagaccacccaaacauugg

SEQ ID NO: 2880788 - RNA, 19 nt, Artificial Sequence
  Description of Artificial Sequence: Synthetic oligonucleotide
gaagugggaucauugacaa

SEQ ID NO: 2880789 - RNA, 19 nt, Artificial Sequence
  Description of Artificial Sequence: Synthetic oligonucleotide
uaggacacugacuuacaga

SEQ ID NO: 2880790 - RNA, 19 nt, Artificial Sequence
  Description of Artificial Sequence: Synthetic oligonucleotide
aguugggugguucuuggca

SEQ ID NO: 2880791 - RNA, 19 nt, Artificial Sequence
  Description of Artificial Sequence: Synthetic oligonucleotide
gggaucauugacaagcagg

SEQ ID NO: 2880792 - RNA, 19 nt, Artificial Sequence
  Description of Artificial Sequence: Synthetic oligonucleotide
uuuaggacacugacuuaca

SEQ ID NO: 2880793 - RNA, 19 nt, Artificial Sequence
  Description of Artificial Sequence: Synthetic oligonucleotide
agcuagacagcuaccaggg

SEQ ID NO: 2880794 - RNA, 19 nt, Artificial Sequence
  Description of Artificial Sequence: Synthetic oligonucleotide
acaagcaggacgccccacg

SEQ ID NO: 2880795 - RNA, 19 nt, Artificial Sequence
  Description of Artificial Sequence: Synthetic oligonucleotide
gagaggggcaccaaagacc

SEQ ID NO: 2880796 - RNA, 19 nt, Artificial Sequence
  Description of Artificial Sequence: Synthetic oligonucleotide
uucuccaaggaccccggcc

SEQ ID NO: 2880797 - RNA, 19 nt, Artificial Sequence
  Description of Artificial Sequence: Synthetic oligonucleotide
agccagagagaacacaaga

SEQ ID NO: 2880798 - RNA, 19 nt, Artificial Sequence
  Description of Artificial Sequence: Synthetic oligonucleotide
uguucuccaaggaccccgg

SEQ ID NO: 2880799 - RNA, 19 nt, Artificial Sequence
  Description of Artificial Sequence: Synthetic oligonucleotide
cuuacagaggggucaggag

SEQ ID NO: 2880800 - RNA, 19 nt, Artificial Sequence
  Description of Artificial Sequence: Synthetic oligonucleotide
caaacauuggcucuguucu

SEQ ID NO: 2880801 - RNA, 19 nt, Artificial Sequence
  Description of Artificial Sequence: Synthetic oligonucleotide
caugguagucauuagccca

SEQ ID NO: 2880802 - RNA, 19 nt, Artificial Sequence
  Description of Artificial Sequence: Synthetic oligonucleotide
ggaagcucagccuuaggag

SEQ ID NO: 2880803 - RNA, 19 nt, Artificial Sequence
  Description of Artificial Sequence: Synthetic oligonucleotide
acccauaaccagcuccugg

SEQ ID NO: 2880804 - RNA, 19 nt, Artificial Sequence
  Description of Artificial Sequence: Synthetic oligonucleotide
cucuguucuccaaggaccc

SEQ ID NO: 2880805 - RNA, 19 nt, Artificial Sequence
  Description of Artificial Sequence: Synthetic oligonucleotide
uccccagaucuccaagagg

SEQ ID NO: 2880806 - RNA, 19 nt, Artificial Sequence
  Description of Artificial Sequence: Synthetic oligonucleotide
augugcacaacagauccag

SEQ ID NO: 2880807 - RNA, 19 nt, Artificial Sequence
  Description of Artificial Sequence: Synthetic oligonucleotide
cauucgaaugugcacaaca

SEQ ID NO: 2880808 - RNA, 19 nt, Artificial Sequence
  Description of Artificial Sequence: Synthetic oligonucleotide
auucgaaugugcacaacag

SEQ ID NO: 2880809 - RNA, 19 nt, Artificial Sequence
  Description of Artificial Sequence: Synthetic oligonucleotide
cuagacagcuaccagggca

SEQ ID NO: 2880810 - RNA, 19 nt, Artificial Sequence
  Description of Artificial Sequence: Synthetic oligonucleotide
accaucgugggaccgaaca

SEQ ID NO: 2880811 - RNA, 19 nt, Artificial Sequence
  Description of Artificial Sequence: Synthetic oligonucleotide
ggguguuccgcucugagug

SEQ ID NO: 2880812 - RNA, 19 nt, Artificial Sequence
  Description of Artificial Sequence: Synthetic oligonucleotide
gaaagauagggaagcucag

SEQ ID NO: 2880813 - RNA, 19 nt, Artificial Sequence
  Description of Artificial Sequence: Synthetic oligonucleotide
aacagggcaggacauggua

SEQ ID NO: 2880814 - RNA, 19 nt, Artificial Sequence
  Description of Artificial Sequence: Synthetic oligonucleotide
ugcugcagaccaucguggg

SEQ ID NO: 2880815 - RNA, 19 nt, Artificial Sequence
  Description of Artificial Sequence: Synthetic oligonucleotide
caacagauccagagguggg

SEQ ID NO: 2880816 - RNA, 19 nt, Artificial Sequence
  Description of Artificial Sequence: Synthetic oligonucleotide
uccaagaggaagugggauc

SEQ ID NO: 2880817 - RNA, 19 nt, Artificial Sequence
  Description of Artificial Sequence: Synthetic oligonucleotide
ugggaucauugacaagcag

SEQ ID NO: 2880818 - RNA, 19 nt, Artificial Sequence
  Description of Artificial Sequence: Synthetic oligonucleotide
ggucaggagggucucaccg

SEQ ID NO: 2880819 - RNA, 19 nt, Artificial Sequence
  Description of Artificial Sequence: Synthetic oligonucleotide
agauagggaagcucagccu

SEQ ID NO: 2880820 - RNA, 19 nt, Artificial Sequence
  Description of Artificial Sequence: Synthetic oligonucleotide
ucuccaagaggaaguggga

SEQ ID NO: 2880821 - RNA, 19 nt, Artificial Sequence
  Description of Artificial Sequence: Synthetic oligonucleotide
aagacccaggccacagccc

SEQ ID NO: 2880822 - RNA, 19 nt, Artificial Sequence
  Description of Artificial Sequence: Synthetic oligonucleotide
caucgugggaccgaacagg

SEQ ID NO: 2880823 - RNA, 19 nt, Artificial Sequence
  Description of Artificial Sequence: Synthetic oligonucleotide
agcaggacgccccacggug

SEQ ID NO: 2880824 - RNA, 19 nt, Artificial Sequence
  Description of Artificial Sequence: Synthetic oligonucleotide
agaggaagugggaucauug

SEQ ID NO: 2880825 - RNA, 19 nt, Artificial Sequence
  Description of Artificial Sequence: Synthetic oligonucleotide
cagccuuaggagcagcuag

SEQ ID NO: 2880826 - RNA, 19 nt, Artificial Sequence
  Description of Artificial Sequence: Synthetic oligonucleotide
aacagauccagagguggga

SEQ ID NO: 2880827 - RNA, 19 nt, Artificial Sequence
  Description of Artificial Sequence: Synthetic oligonucleotide
uccgcucugagugaaagau

SEQ ID NO: 2880828 - RNA, 19 nt, Artificial Sequence
  Description of Artificial Sequence: Synthetic oligonucleotide
ggagcagcuagacagcuac

SEQ ID NO: 2880829 - RNA, 19 nt, Artificial Sequence
  Description of Artificial Sequence: Synthetic oligonucleotide
ugagaggguguuccgcucu

SEQ ID NO: 2880830 - RNA, 19 nt, Artificial Sequence
  Description of Artificial Sequence: Synthetic oligonucleotide
ucuccccagaucuccaaga

SEQ ID NO: 2880831 - RNA, 19 nt, Artificial Sequence
  Description of Artificial Sequence: Synthetic oligonucleotide
gaucuccaagaggaagugg

SEQ ID NO: 2880832 - RNA, 19 nt, Artificial Sequence
  Description of Artificial Sequence: Synthetic oligonucleotide
gaccgaacagggcaggaca

SEQ ID NO: 2880833 - RNA, 19 nt, Artificial Sequence
  Description of Artificial Sequence: Synthetic oligonucleotide
ggacaugguagucauuagc

SEQ ID NO: 2880834 - RNA, 19 nt, Artificial Sequence
  Description of Artificial Sequence: Synthetic oligonucleotide
gucaggagggucucaccgg

SEQ ID NO: 2880835 - RNA, 19 nt, Artificial Sequence
  Description of Artificial Sequence: Synthetic oligonucleotide
aagugggaucauugacaag

SEQ ID NO: 2880836 - RNA, 19 nt, Artificial Sequence
  Description of Artificial Sequence: Synthetic oligonucleotide
agaggggcaccaaagacca

SEQ ID NO: 2880837 - RNA, 19 nt, Artificial Sequence
  Description of Artificial Sequence: Synthetic oligonucleotide
cuguucuccaaggaccccg

SEQ ID NO: 2880838 - RNA, 19 nt, Artificial Sequence
  Description of Artificial Sequence: Synthetic oligonucleotide
ugacuuacagaggggucag

SEQ ID NO: 2880839 - RNA, 19 nt, Artificial Sequence
  Description of Artificial Sequence: Synthetic oligonucleotide
cugcagaccaucgugggac

SEQ ID NO: 2880840 - RNA, 19 nt, Artificial Sequence
  Description of Artificial Sequence: Synthetic oligonucleotide
ggugcugcagaccaucgug

SEQ ID NO: 2880841 - RNA, 19 nt, Artificial Sequence
  Description of Artificial Sequence: Synthetic oligonucleotide
acuuacagaggggucagga

SEQ ID NO: 2880842 - RNA, 19 nt, Artificial Sequence
  Description of Artificial Sequence: Synthetic oligonucleotide
aggagggucucaccgggag

SEQ ID NO: 2880843 - RNA, 19 nt, Artificial Sequence
  Description of Artificial Sequence: Synthetic oligonucleotide
agaggugggaggaaggcca

SEQ ID NO: 2880844 - RNA, 19 nt, Artificial Sequence
  Description of Artificial Sequence: Synthetic oligonucleotide
accgggaggugcugcagac

SEQ ID NO: 2880845 - RNA, 19 nt, Artificial Sequence
  Description of Artificial Sequence: Synthetic oligonucleotide
uugggugguucuuggcaag

SEQ ID NO: 2880846 - RNA, 19 nt, Artificial Sequence
  Description of Artificial Sequence: Synthetic oligonucleotide
augguagucauuagcccag

SEQ ID NO: 2880847 - RNA, 19 nt, Artificial Sequence
  Description of Artificial Sequence: Synthetic oligonucleotide
caagcaggacgccccacgg

SEQ ID NO: 2880848 - RNA, 19 nt, Artificial Sequence
  Description of Artificial Sequence: Synthetic oligonucleotide
uccauucgaaugugcacaa

SEQ ID NO: 2880849 - RNA, 19 nt, Artificial Sequence
  Description of Artificial Sequence: Synthetic oligonucleotide
ugugcacaacagauccaga

SEQ ID NO: 2880850 - RNA, 19 nt, Artificial Sequence
  Description of Artificial Sequence: Synthetic oligonucleotide
acagauccagaggugggag

SEQ ID NO: 2880851 - RNA, 19 nt, Artificial Sequence
  Description of Artificial Sequence: Synthetic oligonucleotide
ggaucauugacaagcagga

SEQ ID NO: 2880852 - RNA, 19 nt, Artificial Sequence
  Description of Artificial Sequence: Synthetic oligonucleotide
aucgugggaccgaacaggg

SEQ ID NO: 2880853 - RNA, 19 nt, Artificial Sequence
  Description of Artificial Sequence: Synthetic oligonucleotide
gauagggaagcucagccuu

SEQ ID NO: 2880854 - RNA, 19 nt, Artificial Sequence
  Description of Artificial Sequence: Synthetic oligonucleotide
aaugugcacaacagaucca

SEQ ID NO: 2880855 - RNA, 19 nt, Artificial Sequence
  Description of Artificial Sequence: Synthetic oligonucleotide
acugacuuacagagggguc

SEQ ID NO: 2880856 - RNA, 19 nt, Artificial Sequence
  Description of Artificial Sequence: Synthetic oligonucleotide
agcagcuagacagcuacca

SEQ ID NO: 2880857 - RNA, 19 nt, Artificial Sequence
  Description of Artificial Sequence: Synthetic oligonucleotide
aagcucagccuuaggagca

SEQ ID NO: 2880858 - RNA, 19 nt, Artificial Sequence
  Description of Artificial Sequence: Synthetic oligonucleotide
agauccagaggugggagga

SEQ ID NO: 2880859 - RNA, 19 nt, Artificial Sequence
  Description of Artificial Sequence: Synthetic oligonucleotide
cagauccagaggugggagg

SEQ ID NO: 2880860 - RNA, 19 nt, Artificial Sequence
  Description of Artificial Sequence: Synthetic oligonucleotide
uuuccuccauucgaaugug

SEQ ID NO: 2880861 - RNA, 19 nt, Artificial Sequence
  Description of Artificial Sequence: Synthetic oligonucleotide
aaggaccccggccuuuccu

SEQ ID NO: 2880862 - RNA, 19 nt, Artificial Sequence
  Description of Artificial Sequence: Synthetic oligonucleotide
acagcccggcuuuaggaca

SEQ ID NO: 2880863 - RNA, 19 nt, Artificial Sequence
  Description of Artificial Sequence: Synthetic oligonucleotide
aggaccccggccuuuccuc

SEQ ID NO: 2880864 - RNA, 19 nt, Artificial Sequence
  Description of Artificial Sequence: Synthetic oligonucleotide
agugaaagauagggaagcu

SEQ ID NO: 2880865 - RNA, 19 nt, Artificial Sequence
  Description of Artificial Sequence: Synthetic oligonucleotide
agaucuccaagaggaagug

SEQ ID NO: 2880866 - RNA, 19 nt, Artificial Sequence
  Description of Artificial Sequence: Synthetic oligonucleotide
aucuccccagaucuccaag

SEQ ID NO: 2880867 - RNA, 19 nt, Artificial Sequence
  Description of Artificial Sequence: Synthetic oligonucleotide
gugguucuuggcaaggcug

SEQ ID NO: 2880868 - RNA, 19 nt, Artificial Sequence
  Description of Artificial Sequence: Synthetic oligonucleotide
auuagcccagcagccagag

SEQ ID NO: 2880869 - RNA, 19 nt, Artificial Sequence
  Description of Artificial Sequence: Synthetic oligonucleotide
uggggugcaaagucucaga

SEQ ID NO: 2880870 - RNA, 19 nt, Artificial Sequence
  Description of Artificial Sequence: Synthetic oligonucleotide
uuccuccauucgaaugugc

SEQ ID NO: 2880871 - RNA, 19 nt, Artificial Sequence
  Description of Artificial Sequence: Synthetic oligonucleotide
cuuuccuccauucgaaugu

SEQ ID NO: 2880872 - RNA, 19 nt, Artificial Sequence
  Description of Artificial Sequence: Synthetic oligonucleotide
cuccauucgaaugugcaca

SEQ ID NO: 2880873 - RNA, 19 nt, Artificial Sequence
  Description of Artificial Sequence: Synthetic oligonucleotide
cgcucugagugaaagauag

SEQ ID NO: 2880874 - RNA, 19 nt, Artificial Sequence
  Description of Artificial Sequence: Synthetic oligonucleotide
gcucuguucuccaaggacc

SEQ ID NO: 2880875 - RNA, 19 nt, Artificial Sequence
  Description of Artificial Sequence: Synthetic oligonucleotide
guuccgcucugagugaaag

SEQ ID NO: 2880876 - RNA, 19 nt, Artificial Sequence
  Description of Artificial Sequence: Synthetic oligonucleotide
caccaaagaccacccaaac

SEQ ID NO: 2880877 - RNA, 19 nt, Artificial Sequence
  Description of Artificial Sequence: Synthetic oligonucleotide
cugacuuacagagggguca

SEQ ID NO: 2880878 - RNA, 19 nt, Artificial Sequence
  Description of Artificial Sequence: Synthetic oligonucleotide
ggggugcaaagucucagag

SEQ ID NO: 2880879 - RNA, 19 nt, Artificial Sequence
  Description of Artificial Sequence: Synthetic oligonucleotide
ugguggggugcaaagucuc

SEQ ID NO: 2880880 - RNA, 19 nt, Artificial Sequence
  Description of Artificial Sequence: Synthetic oligonucleotide
cuccccagaucuccaagag

SEQ ID NO: 2880881 - RNA, 19 nt, Artificial Sequence
  Description of Artificial Sequence: Synthetic oligonucleotide
accagggcacccaucuccc

SEQ ID NO: 2880882 - RNA, 19 nt, Artificial Sequence
  Description of Artificial Sequence: Synthetic oligonucleotide
ggaagugggaucauugaca

SEQ ID NO: 2880883 - RNA, 19 nt, Artificial Sequence
  Description of Artificial Sequence: Synthetic oligonucleotide
acagggcaggacaugguag

SEQ ID NO: 2880884 - RNA, 19 nt, Artificial Sequence
  Description of Artificial Sequence: Synthetic oligonucleotide
ugacaagcaggacgcccca

SEQ ID NO: 2880885 - RNA, 19 nt, Artificial Sequence
  Description of Artificial Sequence: Synthetic oligonucleotide
cccacgguggccuugggcc

SEQ ID NO: 2880886 - RNA, 19 nt, Artificial Sequence
  Description of Artificial Sequence: Synthetic oligonucleotide
guugggugguucuuggcaa

SEQ ID NO: 2880887 - RNA, 19 nt, Artificial Sequence
  Description of Artificial Sequence: Synthetic oligonucleotide
uggggacugggagaggggc

SEQ ID NO: 2880888 - RNA, 19 nt, Artificial Sequence
  Description of Artificial Sequence: Synthetic oligonucleotide
gugcugcagaccaucgugg

SEQ ID NO: 2880889 - RNA, 19 nt, Artificial Sequence
  Description of Artificial Sequence: Synthetic oligonucleotide
gccagagagaacacaagag

SEQ ID NO: 2880890 - RNA, 19 nt, Artificial Sequence
  Description of Artificial Sequence: Synthetic oligonucleotide
ggagaggggcaccaaagac

SEQ ID NO: 2880891 - RNA, 19 nt, Artificial Sequence
  Description of Artificial Sequence: Synthetic oligonucleotide
gggaagcucagccuuagga

SEQ ID NO: 2880892 - RNA, 19 nt, Artificial Sequence
  Description of Artificial Sequence: Synthetic oligonucleotide
cacagcccggcuuuaggac

SEQ ID NO: 2880893 - RNA, 19 nt, Artificial Sequence
  Description of Artificial Sequence: Synthetic oligonucleotide
aagcaggacgccccacggu

SEQ ID NO: 2880894 - RNA, 19 nt, Artificial Sequence
  Description of Artificial Sequence: Synthetic oligonucleotide
gcugaacacccauaaccag

SEQ ID NO: 2880895 - RNA, 19 nt, Artificial Sequence
  Description of Artificial Sequence: Synthetic oligonucleotide
cagccagagagaacacaag

SEQ ID NO: 2880896 - RNA, 19 nt, Artificial Sequence
  Description of Artificial Sequence: Synthetic oligonucleotide
caggaggaagacccaggcc

SEQ ID NO: 2880897 - RNA, 19 nt, Artificial Sequence
  Description of Artificial Sequence: Synthetic oligonucleotide
gaguugggugguucuuggc

SEQ ID NO: 2880898 - RNA, 19 nt, Artificial Sequence
  Description of Artificial Sequence: Synthetic oligonucleotide
gaucauugacaagcaggac

SEQ ID NO: 2880899 - RNA, 19 nt, Artificial Sequence
  Description of Artificial Sequence: Synthetic oligonucleotide
gaggugcugcagaccaucg

SEQ ID NO: 2880900 - RNA, 19 nt, Artificial Sequence
  Description of Artificial Sequence: Synthetic oligonucleotide
uaaccagcuccuggugggg

SEQ ID NO: 2880901 - RNA, 19 nt, Artificial Sequence
  Description of Artificial Sequence: Synthetic oligonucleotide
agaacacaagagacccagg

SEQ ID NO: 2880902 - RNA, 19 nt, Artificial Sequence
  Description of Artificial Sequence: Synthetic oligonucleotide
ugcagaccaucgugggacc

SEQ ID NO: 2880903 - RNA, 19 nt, Artificial Sequence
  Description of Artificial Sequence: Synthetic oligonucleotide
agggcacccaucuccccag

SEQ ID NO: 2880904 - RNA, 19 nt, Artificial Sequence
  Description of Artificial Sequence: Synthetic oligonucleotide
acacccauaaccagcuccu

SEQ ID NO: 2880905 - RNA, 19 nt, Artificial Sequence
  Description of Artificial Sequence: Synthetic oligonucleotide
aggaagacccaggccacag

SEQ ID NO: 2880906 - RNA, 19 nt, Artificial Sequence
  Description of Artificial Sequence: Synthetic oligonucleotide
uggcaaggcugagagggug

SEQ ID NO: 2880907 - RNA, 19 nt, Artificial Sequence
  Description of Artificial Sequence: Synthetic oligonucleotide
gaaggccaggaggaagacc

SEQ ID NO: 2880908 - RNA, 19 nt, Artificial Sequence
  Description of Artificial Sequence: Synthetic oligonucleotide
ggcuuuaggacacugacuu

SEQ ID NO: 2880909 - RNA, 19 nt, Artificial Sequence
  Description of Artificial Sequence: Synthetic oligonucleotide
uuggcaaggcugagagggu

SEQ ID NO: 2880910 - RNA, 19 nt, Artificial Sequence
  Description of Artificial Sequence: Synthetic oligonucleotide
ccagagagaacacaagaga

SEQ ID NO: 2880911 - RNA, 19 nt, Artificial Sequence
  Description of Artificial Sequence: Synthetic oligonucleotide
cacaagagacccaggcuga

SEQ ID NO: 2880912 - RNA, 19 nt, Artificial Sequence
  Description of Artificial Sequence: Synthetic oligonucleotide
uuccgcucugagugaaaga

SEQ ID NO: 2880913 - RNA, 19 nt, Artificial Sequence
  Description of Artificial Sequence: Synthetic oligonucleotide
cuccugguggggugcaaag

SEQ ID NO: 2880914 - RNA, 19 nt, Artificial Sequence
  Description of Artificial Sequence: Synthetic oligonucleotide
aggguguuccgcucugagu

SEQ ID NO: 2880915 - RNA, 19 nt, Artificial Sequence
  Description of Artificial Sequence: Synthetic oligonucleotide
caggacaugguagucauua

SEQ ID NO: 2880916 - RNA, 19 nt, Artificial Sequence
  Description of Artificial Sequence: Synthetic oligonucleotide
ccccagaucuccaagagga

SEQ ID NO: 2880917 - RNA, 19 nt, Artificial Sequence
  Description of Artificial Sequence: Synthetic oligonucleotide
ggcucuguucuccaaggac

SEQ ID NO: 2880918 - RNA, 19 nt, Artificial Sequence
  Description of Artificial Sequence: Synthetic oligonucleotide
acagcuaccagggcaccca

SEQ ID NO: 2880919 - RNA, 19 nt, Artificial Sequence
  Description of Artificial Sequence: Synthetic oligonucleotide
cagaucuccaagaggaagu

SEQ ID NO: 2880920 - RNA, 19 nt, Artificial Sequence
  Description of Artificial Sequence: Synthetic oligonucleotide
agggaagcucagccuuagg

SEQ ID NO: 2880921 - RNA, 19 nt, Artificial Sequence
  Description of Artificial Sequence: Synthetic oligonucleotide
ccaaagaccacccaaacau

SEQ ID NO: 2880922 - RNA, 19 nt, Artificial Sequence
  Description of Artificial Sequence: Synthetic oligonucleotide
acacugacuuacagagggg

SEQ ID NO: 2880923 - RNA, 19 nt, Artificial Sequence
  Description of Artificial Sequence: Synthetic oligonucleotide
agacagcuaccagggcacc

SEQ ID NO: 2880924 - RNA, 19 nt, Artificial Sequence
  Description of Artificial Sequence: Synthetic oligonucleotide
gagaggguguuccgcucug

SEQ ID NO: 2880925 - RNA, 19 nt, Artificial Sequence
  Description of Artificial Sequence: Synthetic oligonucleotide
cagaggugggaggaaggcc

SEQ ID NO: 2880926 - RNA, 19 nt, Artificial Sequence
  Description of Artificial Sequence: Synthetic oligonucleotide
ucucagaguugggugguuc

SEQ ID NO: 2880927 - RNA, 19 nt, Artificial Sequence
  Description of Artificial Sequence: Synthetic oligonucleotide
guggggugcaaagucucag

SEQ ID NO: 2880928 - RNA, 19 nt, Artificial Sequence
  Description of Artificial Sequence: Synthetic oligonucleotide
gcagcuagacagcuaccag

SEQ ID NO: 2880929 - RNA, 19 nt, Artificial Sequence
  Description of Artificial Sequence: Synthetic oligonucleotide
aggcugagaggguguuccg

SEQ ID NO: 2880930 - RNA, 19 nt, Artificial Sequence
  Description of Artificial Sequence: Synthetic oligonucleotide
ucuguucuccaaggacccc

SEQ ID NO: 2880931 - RNA, 19 nt, Artificial Sequence
  Description of Artificial Sequence: Synthetic oligonucleotide
ucgugggaccgaacagggc

SEQ ID NO: 2880932 - RNA, 19 nt, Artificial Sequence
  Description of Artificial Sequence: Synthetic oligonucleotide
ggcugaacacccauaacca

SEQ ID NO: 2880933 - RNA, 19 nt, Artificial Sequence
  Description of Artificial Sequence: Synthetic oligonucleotide
gcacaacagauccagaggu

SEQ ID NO: 2880934 - RNA, 19 nt, Artificial Sequence
  Description of Artificial Sequence: Synthetic oligonucleotide
ccuuuccuccauucgaaug

SEQ ID NO: 2880935 - RNA, 19 nt, Artificial Sequence
  Description of Artificial Sequence: Synthetic oligonucleotide
gacagcuaccagggcaccc

SEQ ID NO: 2880936 - RNA, 19 nt, Artificial Sequence
  Description of Artificial Sequence: Synthetic oligonucleotide
accagcuccugguggggug

SEQ ID NO: 2880937 - RNA, 19 nt, Artificial Sequence
  Description of Artificial Sequence: Synthetic oligonucleotide
ugggaccgaacagggcagg

SEQ ID NO: 2880938 - RNA, 19 nt, Artificial Sequence
  Description of Artificial Sequence: Synthetic oligonucleotide
gacuuacagaggggucagg

SEQ ID NO: 2880939 - RNA, 19 nt, Artificial Sequence
  Description of Artificial Sequence: Synthetic oligonucleotide
ccagcagccagagagaaca

SEQ ID NO: 2880940 - RNA, 19 nt, Artificial Sequence
  Description of Artificial Sequence: Synthetic oligonucleotide
ggcaccaaagaccacccaa

SEQ ID NO: 2880941 - RNA, 19 nt, Artificial Sequence
  Description of Artificial Sequence: Synthetic oligonucleotide
ccaggaggaagacccaggc

SEQ ID NO: 2880942 - RNA, 19 nt, Artificial Sequence
  Description of Artificial Sequence: Synthetic oligonucleotide
agggcaggacaugguaguc

SEQ ID NO: 2880943 - RNA, 19 nt, Artificial Sequence
  Description of Artificial Sequence: Synthetic oligonucleotide
cacccaaacauuggcucug

SEQ ID NO: 2880944 - RNA, 19 nt, Artificial Sequence
  Description of Artificial Sequence: Synthetic oligonucleotide
cacccaucuccccagaucu

SEQ ID NO: 2880945 - RNA, 19 nt, Artificial Sequence
  Description of Artificial Sequence: Synthetic oligonucleotide
agucucagaguuggguggu

SEQ ID NO: 2880946 - RNA, 19 nt, Artificial Sequence
  Description of Artificial Sequence: Synthetic oligonucleotide
ccagaucuccaagaggaag

SEQ ID NO: 2880947 - RNA, 19 nt, Artificial Sequence
  Description of Artificial Sequence: Synthetic oligonucleotide
ccggcuuuaggacacugac

SEQ ID NO: 2880948 - RNA, 19 nt, Artificial Sequence
  Description of Artificial Sequence: Synthetic oligonucleotide
ucagccuuaggagcagcua

SEQ ID NO: 2880949 - RNA, 19 nt, Artificial Sequence
  Description of Artificial Sequence: Synthetic oligonucleotide
aggugcugcagaccaucgu

SEQ ID NO: 2880950 - RNA, 19 nt, Artificial Sequence
  Description of Artificial Sequence: Synthetic oligonucleotide
caggcugaacacccauaac

SEQ ID NO: 2880951 - RNA, 19 nt, Artificial Sequence
  Description of Artificial Sequence: Synthetic oligonucleotide
cugagaggguguuccgcuc

SEQ ID NO: 2880952 - RNA, 19 nt, Artificial Sequence
  Description of Artificial Sequence: Synthetic oligonucleotide
ugguagucauuagcccagc

SEQ ID NO: 2880953 - RNA, 19 nt, Artificial Sequence
  Description of Artificial Sequence: Synthetic oligonucleotide
ggagggucucaccgggagg

SEQ ID NO: 2880954 - RNA, 19 nt, Artificial Sequence
  Description of Artificial Sequence: Synthetic oligonucleotide
gucauuagcccagcagcca

SEQ ID NO: 2880955 - RNA, 19 nt, Artificial Sequence
  Description of Artificial Sequence: Synthetic oligonucleotide
uguuccgcucugagugaaa

SEQ ID NO: 2880956 - RNA, 19 nt, Artificial Sequence
  Description of Artificial Sequence: Synthetic oligonucleotide
ucucaccgggaggugcugc

SEQ ID NO: 2880957 - RNA, 19 nt, Artificial Sequence
  Description of Artificial Sequence: Synthetic oligonucleotide
cauugacaagcaggacgcc

SEQ ID NO: 2880958 - RNA, 19 nt, Artificial Sequence
  Description of Artificial Sequence: Synthetic oligonucleotide
cagcccggcuuuaggacac

SEQ ID NO: 2880959 - RNA, 19 nt, Artificial Sequence
  Description of Artificial Sequence: Synthetic oligonucleotide
gugggaccgaacagggcag

SEQ ID NO: 2880960 - RNA, 19 nt, Artificial Sequence
  Description of Artificial Sequence: Synthetic oligonucleotide
aaccagcuccugguggggu

SEQ ID NO: 2880961 - RNA, 19 nt, Artificial Sequence
  Description of Artificial Sequence: Synthetic oligonucleotide
ccuccauucgaaugugcac

SEQ ID NO: 2880962 - RNA, 19 nt, Artificial Sequence
  Description of Artificial Sequence: Synthetic oligonucleotide
gaggugggaggaaggccag

SEQ ID NO: 2880963 - RNA, 19 nt, Artificial Sequence
  Description of Artificial Sequence: Synthetic oligonucleotide
caaagucucagaguugggu

SEQ ID NO: 2880964 - RNA, 19 nt, Artificial Sequence
  Description of Artificial Sequence: Synthetic oligonucleotide
uccugguggggugcaaagu

SEQ ID NO: 2880965 - RNA, 19 nt, Artificial Sequence
  Description of Artificial Sequence: Synthetic oligonucleotide
caagagacccaggcugaac

SEQ ID NO: 2880966 - RNA, 19 nt, Artificial Sequence
  Description of Artificial Sequence: Synthetic oligonucleotide
ccugguggggugcaaaguc

SEQ ID NO: 2880967 - RNA, 19 nt, Artificial Sequence
  Description of Artificial Sequence: Synthetic oligonucleotide
agagaacacaagagaccca

SEQ ID NO: 2880968 - RNA, 19 nt, Artificial Sequence
  Description of Artificial Sequence: Synthetic oligonucleotide
ggacacugacuuacagagg

SEQ ID NO: 2880969 - RNA, 19 nt, Artificial Sequence
  Description of Artificial Sequence: Synthetic oligonucleotide
cauuagcccagcagccaga

SEQ ID NO: 2880970 - RNA, 19 nt, Artificial Sequence
  Description of Artificial Sequence: Synthetic oligonucleotide
gagggucucaccgggaggu

SEQ ID NO: 2880971 - RNA, 19 nt, Artificial Sequence
  Description of Artificial Sequence: Synthetic oligonucleotide
agccuuaggagcagcuaga

SEQ ID NO: 2880972 - RNA, 19 nt, Artificial Sequence
  Description of Artificial Sequence: Synthetic oligonucleotide
caggacgccccacgguggc

SEQ ID NO: 2880973 - RNA, 19 nt, Artificial Sequence
  Description of Artificial Sequence: Synthetic oligonucleotide
gugcaaagucucagaguug

SEQ ID NO: 2880974 - RNA, 19 nt, Artificial Sequence
  Description of Artificial Sequence: Synthetic oligonucleotide
cgaaugugcacaacagauc

SEQ ID NO: 2880975 - RNA, 19 nt, Artificial Sequence
  Description of Artificial Sequence: Synthetic oligonucleotide
gcuaccagggcacccaucu

SEQ ID NO: 2880976 - RNA, 19 nt, Artificial Sequence
  Description of Artificial Sequence: Synthetic oligonucleotide
gccacagcccggcuuuagg

SEQ ID NO: 2880977 - RNA, 19 nt, Artificial Sequence
  Description of Artificial Sequence: Synthetic oligonucleotide
gugggaucauugacaagca

SEQ ID NO: 2880978 - RNA, 19 nt, Artificial Sequence
  Description of Artificial Sequence: Synthetic oligonucleotide
gaacacccauaaccagcuc

SEQ ID NO: 2880979 - RNA, 19 nt, Artificial Sequence
  Description of Artificial Sequence: Synthetic oligonucleotide
acccaggcugaacacccau

SEQ ID NO: 2880980 - RNA, 19 nt, Artificial Sequence
  Description of Artificial Sequence: Synthetic oligonucleotide
ggaagacccaggccacagc

SEQ ID NO: 2880981 - RNA, 19 nt, Artificial Sequence
  Description of Artificial Sequence: Synthetic oligonucleotide
gagcagcuagacagcuacc

SEQ ID NO: 2880982 - RNA, 19 nt, Artificial Sequence
  Description of Artificial Sequence: Synthetic oligonucleotide
ccaagaggaagugggauca

SEQ ID NO: 2880983 - RNA, 19 nt, Artificial Sequence
  Description of Artificial Sequence: Synthetic oligonucleotide
agcucagccuuaggagcag

SEQ ID NO: 2880984 - RNA, 19 nt, Artificial Sequence
  Description of Artificial Sequence: Synthetic oligonucleotide
ccaucgugggaccgaacag

SEQ ID NO: 2880985 - RNA, 19 nt, Artificial Sequence
  Description of Artificial Sequence: Synthetic oligonucleotide
cagggcacccaucucccca

SEQ ID NO: 2880986 - RNA, 19 nt, Artificial Sequence
  Description of Artificial Sequence: Synthetic oligonucleotide
caaggaccccggccuuucc

SEQ ID NO: 2880987 - RNA, 19 nt, Artificial Sequence
  Description of Artificial Sequence: Synthetic oligonucleotide
gacugggagaggggcacca

SEQ ID NO: 2880988 - RNA, 19 nt, Artificial Sequence
  Description of Artificial Sequence: Synthetic oligonucleotide
cccaucuccccagaucucc

SEQ ID NO: 2880989 - RNA, 19 nt, Artificial Sequence
  Description of Artificial Sequence: Synthetic oligonucleotide
cucagaguugggugguucu

SEQ ID NO: 2880990 - RNA, 19 nt, Artificial Sequence
  Description of Artificial Sequence: Synthetic oligonucleotide
gaccacccaaacauuggcu

SEQ ID NO: 2880991 - RNA, 19 nt, Artificial Sequence
  Description of Artificial Sequence: Synthetic oligonucleotide
aggacgccccacgguggcc

SEQ ID NO: 2880992 - RNA, 19 nt, Artificial Sequence
  Description of Artificial Sequence: Synthetic oligonucleotide
gcuagacagcuaccagggc

SEQ ID NO: 2880993 - RNA, 19 nt, Artificial Sequence
  Description of Artificial Sequence: Synthetic oligonucleotide
gacccaggccacagcccgg

SEQ ID NO: 2880994 - RNA, 19 nt, Artificial Sequence
  Description of Artificial Sequence: Synthetic oligonucleotide
gccaggaggaagacccagg

SEQ ID NO: 2880995 - RNA, 19 nt, Artificial Sequence
  Description of Artificial Sequence: Synthetic oligonucleotide
cgugggaccgaacagggca

SEQ ID NO: 2880996 - RNA, 19 nt, Artificial Sequence
  Description of Artificial Sequence: Synthetic oligonucleotide
cacugacuuacagaggggu

SEQ ID NO: 2880997 - RNA, 19 nt, Artificial Sequence
  Description of Artificial Sequence: Synthetic oligonucleotide
gcucugagugaaagauagg

SEQ ID NO: 2880998 - RNA, 19 nt, Artificial Sequence
  Description of Artificial Sequence: Synthetic oligonucleotide
aggugggaggaaggccagg

SEQ ID NO: 2880999 - RNA, 19 nt, Artificial Sequence
  Description of Artificial Sequence: Synthetic oligonucleotide
gacaagcaggacgccccac

SEQ ID NO: 2881000 - RNA, 19 nt, Artificial Sequence
  Description of Artificial Sequence: Synthetic oligonucleotide
cuaccagggcacccaucuc

SEQ ID NO: 2881001 - RNA, 19 nt, Artificial Sequence
  Description of Artificial Sequence: Synthetic oligonucleotide
cagcagccagagagaacac

SEQ ID NO: 2881002 - RNA, 19 nt, Artificial Sequence
  Description of Artificial Sequence: Synthetic oligonucleotide
accgaacagggcaggacau

SEQ ID NO: 2881003 - RNA, 19 nt, Artificial Sequence
  Description of Artificial Sequence: Synthetic oligonucleotide
auagggaagcucagccuua

SEQ ID NO: 2881004 - RNA, 19 nt, Artificial Sequence
  Description of Artificial Sequence: Synthetic oligonucleotide
acaagagacccaggcugaa

SEQ ID NO: 2881005 - RNA, 19 nt, Artificial Sequence
  Description of Artificial Sequence: Synthetic oligonucleotide
ccagaggugggaggaaggc

SEQ ID NO: 2881006 - RNA, 19 nt, Artificial Sequence
  Description of Artificial Sequence: Synthetic oligonucleotide
ggaggugcugcagaccauc

SEQ ID NO: 2881007 - RNA, 19 nt, Artificial Sequence
  Description of Artificial Sequence: Synthetic oligonucleotide
agaccaucgugggaccgaa

SEQ ID NO: 2881008 - RNA, 19 nt, Artificial Sequence
  Description of Artificial Sequence: Synthetic oligonucleotide
ccauaaccagcuccuggug

SEQ ID NO: 2881009 - RNA, 19 nt, Artificial Sequence
  Description of Artificial Sequence: Synthetic oligonucleotide
ggaggaagacccaggccac

SEQ ID NO: 2881010 - RNA, 19 nt, Artificial Sequence
  Description of Artificial Sequence: Synthetic oligonucleotide
cugguggggugcaaagucu

SEQ ID NO: 2881011 - RNA, 19 nt, Artificial Sequence
  Description of Artificial Sequence: Synthetic oligonucleotide
cagggcaggacaugguagu

SEQ ID NO: 2881012 - RNA, 19 nt, Artificial Sequence
  Description of Artificial Sequence: Synthetic oligonucleotide
ggugggaggaaggccagga

SEQ ID NO: 2881013 - RNA, 19 nt, Artificial Sequence
  Description of Artificial Sequence: Synthetic oligonucleotide
gguguuccgcucugaguga

SEQ ID NO: 2881014 - RNA, 19 nt, Artificial Sequence
  Description of Artificial Sequence: Synthetic oligonucleotide
acccaaacauuggcucugu

SEQ ID NO: 2881015 - RNA, 19 nt, Artificial Sequence
  Description of Artificial Sequence: Synthetic oligonucleotide
ggcugagaggguguuccgc

SEQ ID NO: 2881016 - RNA, 19 nt, Artificial Sequence
  Description of Artificial Sequence: Synthetic oligonucleotide
ggggcaccaaagaccaccc

SEQ ID NO: 2881017 - RNA, 19 nt, Artificial Sequence
  Description of Artificial Sequence: Synthetic oligonucleotide
gaggaagacccaggccaca

SEQ ID NO: 2881018 - RNA, 19 nt, Artificial Sequence
  Description of Artificial Sequence: Synthetic oligonucleotide
agcuaccagggcacccauc

SEQ ID NO: 2881019 - RNA, 19 nt, Artificial Sequence
  Description of Artificial Sequence: Synthetic oligonucleotide
ggugguucuuggcaaggcu

SEQ ID NO: 2881020 - RNA, 19 nt, Artificial Sequence
  Description of Artificial Sequence: Synthetic oligonucleotide
acccaucuccccagaucuc

SEQ ID NO: 2881021 - RNA, 19 nt, Artificial Sequence
  Description of Artificial Sequence: Synthetic oligonucleotide
ccggccuuuccuccauucg

SEQ ID NO: 2881022 - RNA, 19 nt, Artificial Sequence
  Description of Artificial Sequence: Synthetic oligonucleotide
caaagaccacccaaacauu

SEQ ID NO: 2881023 - RNA, 19 nt, Artificial Sequence
  Description of Artificial Sequence: Synthetic oligonucleotide
ggaccccggccuuuccucc

SEQ ID NO: 2881024 - RNA, 19 nt, Artificial Sequence
  Description of Artificial Sequence: Synthetic oligonucleotide
agaggguguuccgcucuga

SEQ ID NO: 2881025 - RNA, 19 nt, Artificial Sequence
  Description of Artificial Sequence: Synthetic oligonucleotide
ggccaggaggaagacccag

SEQ ID NO: 2881026 - RNA, 19 nt, Artificial Sequence
  Description of Artificial Sequence: Synthetic oligonucleotide
gggacugggagaggggcac

SEQ ID NO: 2881027 - RNA, 19 nt, Artificial Sequence
  Description of Artificial Sequence: Synthetic oligonucleotide
cauuggcucuguucuccaa

SEQ ID NO: 2881028 - RNA, 19 nt, Artificial Sequence
  Description of Artificial Sequence: Synthetic oligonucleotide
gaccccggccuuuccucca

SEQ ID NO: 2881029 - RNA, 19 nt, Artificial Sequence
  Description of Artificial Sequence: Synthetic oligonucleotide
cagaggggucaggaggguc

SEQ ID NO: 2881030 - RNA, 19 nt, Artificial Sequence
  Description of Artificial Sequence: Synthetic oligonucleotide
gcaccaaagaccacccaaa

SEQ ID NO: 2881031 - RNA, 19 nt, Artificial Sequence
  Description of Artificial Sequence: Synthetic oligonucleotide
gcugagaggguguuccgcu

SEQ ID NO: 2881032 - RNA, 19 nt, Artificial Sequence
  Description of Artificial Sequence: Synthetic oligonucleotide
acagaggggucaggagggu

SEQ ID NO: 2881033 - RNA, 19 nt, Artificial Sequence
  Description of Artificial Sequence: Synthetic oligonucleotide
gcugcagaccaucguggga

SEQ ID NO: 2881034 - RNA, 19 nt, Artificial Sequence
  Description of Artificial Sequence: Synthetic oligonucleotide
caucuccccagaucuccaa

SEQ ID NO: 2881035 - RNA, 19 nt, Artificial Sequence
  Description of Artificial Sequence: Synthetic oligonucleotide
gggugguucuuggcaaggc

SEQ ID NO: 2881036 - RNA, 19 nt, Artificial Sequence
  Description of Artificial Sequence: Synthetic oligonucleotide
gggucucaccgggaggugc

SEQ ID NO: 2881037 - RNA, 19 nt, Artificial Sequence
  Description of Artificial Sequence: Synthetic oligonucleotide
gcaggacgccccacggugg

SEQ ID NO: 2881038 - RNA, 19 nt, Artificial Sequence
  Description of Artificial Sequence: Synthetic oligonucleotide
cucagccuuaggagcagcu

SEQ ID NO: 2881039 - RNA, 19 nt, Artificial Sequence
  Description of Artificial Sequence: Synthetic oligonucleotide
cacccauaaccagcuccug

SEQ ID NO: 2881040 - RNA, 19 nt, Artificial Sequence
  Description of Artificial Sequence: Synthetic oligonucleotide
agcccagcagccagagaga

SEQ ID NO: 2881041 - RNA, 19 nt, Artificial Sequence
  Description of Artificial Sequence: Synthetic oligonucleotide
gccuuaggagcagcuagac

SEQ ID NO: 2881042 - RNA, 19 nt, Artificial Sequence
  Description of Artificial Sequence: Synthetic oligonucleotide
ggaccgaacagggcaggac

SEQ ID NO: 2881043 - RNA, 19 nt, Artificial Sequence
  Description of Artificial Sequence: Synthetic oligonucleotide
uccaaggaccccggccuuu

SEQ ID NO: 2881044 - RNA, 19 nt, Artificial Sequence
  Description of Artificial Sequence: Synthetic oligonucleotide
gggugcaaagucucagagu

SEQ ID NO: 2881045 - RNA, 19 nt, Artificial Sequence
  Description of Artificial Sequence: Synthetic oligonucleotide
cagaccaucgugggaccga

SEQ ID NO: 2881046 - RNA, 19 nt, Artificial Sequence
  Description of Artificial Sequence: Synthetic oligonucleotide
caccgggaggugcugcaga

SEQ ID NO: 2881047 - RNA, 19 nt, Artificial Sequence
  Description of Artificial Sequence: Synthetic oligonucleotide
ccacagcccggcuuuagga

SEQ ID NO: 2881048 - RNA, 19 nt, Artificial Sequence
  Description of Artificial Sequence: Synthetic oligonucleotide
ggggucaggagggucucac

SEQ ID NO: 2881049 - RNA, 19 nt, Artificial Sequence
  Description of Artificial Sequence: Synthetic oligonucleotide
guguuccgcucugagugaa

SEQ ID NO: 2881050 - RNA, 19 nt, Artificial Sequence
  Description of Artificial Sequence: Synthetic oligonucleotide
cuccaagaggaagugggau

SEQ ID NO: 2881051 - RNA, 19 nt, Artificial Sequence
  Description of Artificial Sequence: Synthetic oligonucleotide
ccuuaggagcagcuagaca

SEQ ID NO: 2881052 - RNA, 19 nt, Artificial Sequence
  Description of Artificial Sequence: Synthetic oligonucleotide
agggucucaccgggaggug

SEQ ID NO: 2881053 - RNA, 19 nt, Artificial Sequence
  Description of Artificial Sequence: Synthetic oligonucleotide
gcuuuaggacacugacuua

SEQ ID NO: 2881054 - RNA, 19 nt, Artificial Sequence
  Description of Artificial Sequence: Synthetic oligonucleotide
gacccaggcugaacaccca

SEQ ID NO: 2881055 - RNA, 19 nt, Artificial Sequence
  Description of Artificial Sequence: Synthetic oligonucleotide
ggccuuuccuccauucgaa

SEQ ID NO: 2881056 - RNA, 19 nt, Artificial Sequence
  Description of Artificial Sequence: Synthetic oligonucleotide
caggagggucucaccggga

SEQ ID NO: 2881057 - RNA, 19 nt, Artificial Sequence
  Description of Artificial Sequence: Synthetic oligonucleotide
gaccaucgugggaccgaac

SEQ ID NO: 2881058 - RNA, 19 nt, Artificial Sequence
  Description of Artificial Sequence: Synthetic oligonucleotide
gguggggugcaaagucuca

SEQ ID NO: 2881059 - RNA, 19 nt, Artificial Sequence
  Description of Artificial Sequence: Synthetic oligonucleotide
gucucaccgggaggugcug

SEQ ID NO: 2881060 - RNA, 19 nt, Artificial Sequence
  Description of Artificial Sequence: Synthetic oligonucleotide
accccggccuuuccuccau

SEQ ID NO: 2881061 - RNA, 19 nt, Artificial Sequence
  Description of Artificial Sequence: Synthetic oligonucleotide
cgggaggugcugcagacca

SEQ ID NO: 2881062 - RNA, 19 nt, Artificial Sequence
  Description of Artificial Sequence: Synthetic oligonucleotide
aggagcagcuagacagcua

SEQ ID NO: 2881063 - RNA, 19 nt, Artificial Sequence
  Description of Artificial Sequence: Synthetic oligonucleotide
ccagcuccugguggggugc

SEQ ID NO: 2881064 - RNA, 19 nt, Artificial Sequence
  Description of Artificial Sequence: Synthetic oligonucleotide
gaggggcaccaaagaccac

SEQ ID NO: 2881065 - RNA, 19 nt, Artificial Sequence
  Description of Artificial Sequence: Synthetic oligonucleotide
ccccacgguggccuugggc

SEQ ID NO: 2881066 - RNA, 19 nt, Artificial Sequence
  Description of Artificial Sequence: Synthetic oligonucleotide
aggccaggaggaagaccca

SEQ ID NO: 2881067 - RNA, 19 nt, Artificial Sequence
  Description of Artificial Sequence: Synthetic oligonucleotide
cccggccuuuccuccauuc

SEQ ID NO: 2881068 - RNA, 19 nt, Artificial Sequence
  Description of Artificial Sequence: Synthetic oligonucleotide
ccauucgaaugugcacaac

SEQ ID NO: 2881069 - RNA, 19 nt, Artificial Sequence
  Description of Artificial Sequence: Synthetic oligonucleotide
caggccacagcccggcuuu

SEQ ID NO: 2881070 - RNA, 19 nt, Artificial Sequence
  Description of Artificial Sequence: Synthetic oligonucleotide
ggacugggagaggggcacc

SEQ ID NO: 2881071 - RNA, 19 nt, Artificial Sequence
  Description of Artificial Sequence: Synthetic oligonucleotide
cccggcuuuaggacacuga

SEQ ID NO: 2881072 - RNA, 19 nt, Artificial Sequence
  Description of Artificial Sequence: Synthetic oligonucleotide
ccgaacagggcaggacaug

SEQ ID NO: 2881073 - RNA, 19 nt, Artificial Sequence
  Description of Artificial Sequence: Synthetic oligonucleotide
ccacccaaacauuggcucu

SEQ ID NO: 2881074 - RNA, 19 nt, Artificial Sequence
  Description of Artificial Sequence: Synthetic oligonucleotide
ggaggaaggccaggaggaa

SEQ ID NO: 2881075 - RNA, 19 nt, Artificial Sequence
  Description of Artificial Sequence: Synthetic oligonucleotide
ggccacagcccggcuuuag

SEQ ID NO: 2881076 - RNA, 19 nt, Artificial Sequence
  Description of Artificial Sequence: Synthetic oligonucleotide
ggggacugggagaggggca

SEQ ID NO: 2881077 - RNA, 19 nt, Artificial Sequence
  Description of Artificial Sequence: Synthetic oligonucleotide
gggcaccaaagaccaccca

SEQ ID NO: 2881078 - RNA, 19 nt, Artificial Sequence
  Description of Artificial Sequence: Synthetic oligonucleotide
cggccuuuccuccauucga

SEQ ID NO: 2881079 - RNA, 19 nt, Artificial Sequence
  Description of Artificial Sequence: Synthetic oligonucleotide
ccaaggaccccggccuuuc

SEQ ID NO: 2881080 - RNA, 19 nt, Artificial Sequence
  Description of Artificial Sequence: Synthetic oligonucleotide
gggaccgaacagggcagga

SEQ ID NO: 2881081 - RNA, 19 nt, Artificial Sequence
  Description of Artificial Sequence: Synthetic oligonucleotide
cccagaucuccaagaggaa

SEQ ID NO: 2881082 - RNA, 19 nt, Artificial Sequence
  Description of Artificial Sequence: Synthetic oligonucleotide
ggcaaggcugagagggugu

SEQ ID NO: 2881083 - RNA, 19 nt, Artificial Sequence
  Description of Artificial Sequence: Synthetic oligonucleotide
ggucucaccgggaggugcu

SEQ ID NO: 2881084 - RNA, 19 nt, Artificial Sequence
  Description of Artificial Sequence: Synthetic oligonucleotide
ccgggaggugcugcagacc

SEQ ID NO: 2881085 - RNA, 19 nt, Artificial Sequence
  Description of Artificial Sequence: Synthetic oligonucleotide
acgccccacgguggccuug

SEQ ID NO: 2881086 - RNA, 19 nt, Artificial Sequence
  Description of Artificial Sequence: Synthetic oligonucleotide
gcccggcuuuaggacacug

SEQ ID NO: 2881087 - RNA, 19 nt, Artificial Sequence
  Description of Artificial Sequence: Synthetic oligonucleotide
gccuuuccuccauucgaau

SEQ ID NO: 2881088 - RNA, 19 nt, Artificial Sequence
  Description of Artificial Sequence: Synthetic oligonucleotide
agcuccugguggggugcaa

SEQ ID NO: 2881089 - RNA, 19 nt, Artificial Sequence
  Description of Artificial Sequence: Synthetic oligonucleotide
gcuccugguggggugcaaa

SEQ ID NO: 2881090 - RNA, 19 nt, Artificial Sequence
  Description of Artificial Sequence: Synthetic oligonucleotide
ccgcucugagugaaagaua

SEQ ID NO: 2881091 - RNA, 19 nt, Artificial Sequence
  Description of Artificial Sequence: Synthetic oligonucleotide
caagaggaagugggaucau

SEQ ID NO: 2881092 - RNA, 19 nt, Artificial Sequence
  Description of Artificial Sequence: Synthetic oligonucleotide
cccaggcugaacacccaua

SEQ ID NO: 2881093 - RNA, 19 nt, Artificial Sequence
  Description of Artificial Sequence: Synthetic oligonucleotide
ggacgccccacgguggccu

SEQ ID NO: 2881094 - RNA, 19 nt, Artificial Sequence
  Description of Artificial Sequence: Synthetic oligonucleotide
cagcuccugguggggugca

SEQ ID NO: 2881095 - RNA, 19 nt, Artificial Sequence
  Description of Artificial Sequence: Synthetic oligonucleotide
gggcacccaucuccccaga

SEQ ID NO: 2881096 - RNA, 19 nt, Artificial Sequence
  Description of Artificial Sequence: Synthetic oligonucleotide
ggcacccaucuccccagau

SEQ ID NO: 2881097 - RNA, 19 nt, Artificial Sequence
  Description of Artificial Sequence: Synthetic oligonucleotide
acgguggccuugggccuua

SEQ ID NO: 2881098 - RNA, 19 nt, Artificial Sequence
  Description of Artificial Sequence: Synthetic oligonucleotide
cagcuaccagggcacccau

SEQ ID NO: 2881099 - RNA, 19 nt, Artificial Sequence
  Description of Artificial Sequence: Synthetic oligonucleotide
gccccacgguggccuuggg

SEQ ID NO: 2881100 - RNA, 19 nt, Artificial Sequence
  Description of Artificial Sequence: Synthetic oligonucleotide
cggcuuuaggacacugacu

SEQ ID NO: 2881101 - RNA, 19 nt, Artificial Sequence
  Description of Artificial Sequence: Synthetic oligonucleotide
aggccacagcccggcuuua

SEQ ID NO: 2881102 - RNA, 19 nt, Artificial Sequence
  Description of Artificial Sequence: Synthetic oligonucleotide
cgccccacgguggccuugg

SEQ ID NO: 2881103 - RNA, 19 nt, Artificial Sequence
  Description of Artificial Sequence: Synthetic oligonucleotide
gucucagaguugggugguu

SEQ ID NO: 2881104 - RNA, 19 nt, Artificial Sequence
  Description of Artificial Sequence: Synthetic oligonucleotide
gcaaggcugagaggguguu

SEQ ID NO: 2881105 - RNA, 19 nt, Artificial Sequence
  Description of Artificial Sequence: Synthetic oligonucleotide
gacgccccacgguggccuu

SEQ ID NO: 2881106 - RNA, 19 nt, Artificial Sequence
  Description of Artificial Sequence: Synthetic oligonucleotide
ccacgguggccuugggccu

SEQ ID NO: 2881107 - RNA, 19 nt, Artificial Sequence
  Description of Artificial Sequence: Synthetic oligonucleotide
cacgguggccuugggccuu

SEQ ID NO: 2881108 - RNA, 19 nt, Artificial Sequence
  Description of Artificial Sequence: Synthetic oligonucleotide
ccaggccacagcccggcuu

SEQ ID NO: 2881109 - RNA, 19 nt, Artificial Sequence
  Description of Artificial Sequence: Synthetic oligonucleotide
gggaggugcugcagaccau

SEQ ID NO: 2881110 - RNA, 19 nt, Artificial Sequence
  Description of Artificial Sequence: Synthetic oligonucleotide
gcaggacaugguagucauu

SEQ ID NO: 2881111 - RNA, 19 nt, Artificial Sequence
  Description of Artificial Sequence: Synthetic oligonucleotide
cccaaacauuggcucuguu

SEQ ID NO: 2881112 - RNA, 19 nt, Artificial Sequence
  Description of Artificial Sequence: Synthetic oligonucleotide
cccaggccacagcccggcu

SEQ ID NO: 2881113 - RNA, 19 nt, Artificial Sequence
  Description of Artificial Sequence: Synthetic oligonucleotide
ccccggccuuuccuccauu

SEQ ID NO: 2881114 - RNA, 19 nt, Artificial Sequence
  Description of Artificial Sequence: Synthetic oligonucleotide
aauaaucuccacuuggucc

SEQ ID NO: 2881115 - RNA, 19 nt, Artificial Sequence
  Description of Artificial Sequence: Synthetic oligonucleotide
aaaaugagaauuuacugag

SEQ ID NO: 2881116 - RNA, 19 nt, Artificial Sequence
  Description of Artificial Sequence: Synthetic oligonucleotide
aaugagaauuuacugagag

SEQ ID NO: 2881117 - RNA, 19 nt, Artificial Sequence
  Description of Artificial Sequence: Synthetic oligonucleotide
aaauucgucuuccauggcc

SEQ ID NO: 2881118 - RNA, 19 nt, Artificial Sequence
  Description of Artificial Sequence: Synthetic oligonucleotide
ugauacuuuauucauauac

SEQ ID NO: 2881119 - RNA, 19 nt, Artificial Sequence
  Description of Artificial Sequence: Synthetic oligonucleotide
uauaucaggaauuucaaac

SEQ ID NO: 2881120 - RNA, 19 nt, Artificial Sequence
  Description of Artificial Sequence: Synthetic oligonucleotide
auaucaggaauuucaaacc

SEQ ID NO: 2881121 - RNA, 19 nt, Artificial Sequence
  Description of Artificial Sequence: Synthetic oligonucleotide
uaaaaugagaauuuacuga

SEQ ID NO: 2881122 - RNA, 19 nt, Artificial Sequence
  Description of Artificial Sequence: Synthetic oligonucleotide
acugucuaagcccaggucc

SEQ ID NO: 2881123 - RNA, 19 nt, Artificial Sequence
  Description of Artificial Sequence: Synthetic oligonucleotide
ugugugagcgccaagacag

SEQ ID NO: 2881124 - RNA, 19 nt, Artificial Sequence
  Description of Artificial Sequence: Synthetic oligonucleotide
aguuucaagacauacagca

SEQ ID NO: 2881125 - RNA, 19 nt, Artificial Sequence
  Description of Artificial Sequence: Synthetic oligonucleotide
agaguuucaagacauacag

SEQ ID NO: 2881126 - RNA, 19 nt, Artificial Sequence
  Description of Artificial Sequence: Synthetic oligonucleotide
auaaaaugagaauuuacug

SEQ ID NO: 2881127 - RNA, 19 nt, Artificial Sequence
  Description of Artificial Sequence: Synthetic oligonucleotide
aauuucaaacccaaauucg

SEQ ID NO: 2881128 - RNA, 19 nt, Artificial Sequence
  Description of Artificial Sequence: Synthetic oligonucleotide
uuuacugagagcuuuucug

SEQ ID NO: 2881129 - RNA, 19 nt, Artificial Sequence
  Description of Artificial Sequence: Synthetic oligonucleotide
cauaauaaucuccacuugg

SEQ ID NO: 2881130 - RNA, 19 nt, Artificial Sequence
  Description of Artificial Sequence: Synthetic oligonucleotide
auauacauccuucuuaucu

SEQ ID NO: 2881131 - RNA, 19 nt, Artificial Sequence
  Description of Artificial Sequence: Synthetic oligonucleotide
ucuuccauggccauaauaa

SEQ ID NO: 2881132 - RNA, 19 nt, Artificial Sequence
  Description of Artificial Sequence: Synthetic oligonucleotide
gaauuucaaacccaaauuc

SEQ ID NO: 2881133 - RNA, 19 nt, Artificial Sequence
  Description of Artificial Sequence: Synthetic oligonucleotide
uuucaagacauacagcacu

SEQ ID NO: 2881134 - RNA, 19 nt, Artificial Sequence
  Description of Artificial Sequence: Synthetic oligonucleotide
uugucauagaguuucaaga

SEQ ID NO: 2881135 - RNA, 19 nt, Artificial Sequence
  Description of Artificial Sequence: Synthetic oligonucleotide
gacacauuaacuucucugc

SEQ ID NO: 2881136 - RNA, 19 nt, Artificial Sequence
  Description of Artificial Sequence: Synthetic oligonucleotide
cuucuuaucugcaauguag

SEQ ID NO: 2881137 - RNA, 19 nt, Artificial Sequence
  Description of Artificial Sequence: Synthetic oligonucleotide
ucuaucuugucauagaguu

SEQ ID NO: 2881138 - RNA, 19 nt, Artificial Sequence
  Description of Artificial Sequence: Synthetic oligonucleotide
aagugugugacccuuccag

SEQ ID NO: 2881139 - RNA, 19 nt, Artificial Sequence
  Description of Artificial Sequence: Synthetic oligonucleotide
uuacugagagcuuuucugg

SEQ ID NO: 2881140 - RNA, 19 nt, Artificial Sequence
  Description of Artificial Sequence: Synthetic oligonucleotide
agcacucuguccuugauuc

SEQ ID NO: 2881141 - RNA, 19 nt, Artificial Sequence
  Description of Artificial Sequence: Synthetic oligonucleotide
ucauaaaaugagaauuuac

SEQ ID NO: 2881142 - RNA, 19 nt, Artificial Sequence
  Description of Artificial Sequence: Synthetic oligonucleotide
ugcaucacuguacuggcgg

SEQ ID NO: 2881143 - RNA, 19 nt, Artificial Sequence
  Description of Artificial Sequence: Synthetic oligonucleotide
uccauggccauaauaaucu

SEQ ID NO: 2881144 - RNA, 19 nt, Artificial Sequence
  Description of Artificial Sequence: Synthetic oligonucleotide
ucugauacuuuauucauau

SEQ ID NO: 2881145 - RNA, 19 nt, Artificial Sequence
  Description of Artificial Sequence: Synthetic oligonucleotide
auagaguuucaagacauac

SEQ ID NO: 2881146 - RNA, 19 nt, Artificial Sequence
  Description of Artificial Sequence: Synthetic oligonucleotide
uauacauccuucuuaucug

SEQ ID NO: 2881147 - RNA, 19 nt, Artificial Sequence
  Description of Artificial Sequence: Synthetic oligonucleotide
aaacccaaauucgucuucc

SEQ ID NO: 2881148 - RNA, 19 nt, Artificial Sequence
  Description of Artificial Sequence: Synthetic oligonucleotide
ugcaauguagucuacaauu

SEQ ID NO: 2881149 - RNA, 19 nt, Artificial Sequence
  Description of Artificial Sequence: Synthetic oligonucleotide
acauuaacuucucugcauc

SEQ ID NO: 2881150 - RNA, 19 nt, Artificial Sequence
  Description of Artificial Sequence: Synthetic oligonucleotide
augagaauuuacugagagc

SEQ ID NO: 2881151 - RNA, 19 nt, Artificial Sequence
  Description of Artificial Sequence: Synthetic oligonucleotide
auacauccuucuuaucugc

SEQ ID NO: 2881152 - RNA, 19 nt, Artificial Sequence
  Description of Artificial Sequence: Synthetic oligonucleotide
ucauagaguuucaagacau

SEQ ID NO: 2881153 - RNA, 19 nt, Artificial Sequence
  Description of Artificial Sequence: Synthetic oligonucleotide
uucauauacauccuucuua

SEQ ID NO: 2881154 - RNA, 19 nt, Artificial Sequence
  Description of Artificial Sequence: Synthetic oligonucleotide
agacauacagcacucuguc

SEQ ID NO: 2881155 - RNA, 19 nt, Artificial Sequence
  Description of Artificial Sequence: Synthetic oligonucleotide
ugucauagaguuucaagac

SEQ ID NO: 2881156 - RNA, 19 nt, Artificial Sequence
  Description of Artificial Sequence: Synthetic oligonucleotide
acauacagcacucuguccu

SEQ ID NO: 2881157 - RNA, 19 nt, Artificial Sequence
  Description of Artificial Sequence: Synthetic oligonucleotide
uauucauauacauccuucu

SEQ ID NO: 2881158 - RNA, 19 nt, Artificial Sequence
  Description of Artificial Sequence: Synthetic oligonucleotide
uagucuacaauuucuugug

SEQ ID NO: 2881159 - RNA, 19 nt, Artificial Sequence
  Description of Artificial Sequence: Synthetic oligonucleotide
uacaauuucuuguggacac

SEQ ID NO: 2881160 - RNA, 19 nt, Artificial Sequence
  Description of Artificial Sequence: Synthetic oligonucleotide
uccuugauucccucuaacg

SEQ ID NO: 2881161 - RNA, 19 nt, Artificial Sequence
  Description of Artificial Sequence: Synthetic oligonucleotide
cuugucauagaguuucaag

SEQ ID NO: 2881162 - RNA, 19 nt, Artificial Sequence
  Description of Artificial Sequence: Synthetic oligonucleotide
uuaucugcaauguagucua

SEQ ID NO: 2881163 - RNA, 19 nt, Artificial Sequence
  Description of Artificial Sequence: Synthetic oligonucleotide
uucaaacccaaauucgucu

SEQ ID NO: 2881164 - RNA, 19 nt, Artificial Sequence
  Description of Artificial Sequence: Synthetic oligonucleotide
ucauauacauccuucuuau

SEQ ID NO: 2881165 - RNA, 19 nt, Artificial Sequence
  Description of Artificial Sequence: Synthetic oligonucleotide
uaucuugucauagaguuuc

SEQ ID NO: 2881166 - RNA, 19 nt, Artificial Sequence
  Description of Artificial Sequence: Synthetic oligonucleotide
uguggacacauuaacuucu

SEQ ID NO: 2881167 - RNA, 19 nt, Artificial Sequence
  Description of Artificial Sequence: Synthetic oligonucleotide
aggaauuucaaacccaaau

SEQ ID NO: 2881168 - RNA, 19 nt, Artificial Sequence
  Description of Artificial Sequence: Synthetic oligonucleotide
ucuauaucaggaauuucaa

SEQ ID NO: 2881169 - RNA, 19 nt, Artificial Sequence
  Description of Artificial Sequence: Synthetic oligonucleotide
uguacuggcggcacaagug

SEQ ID NO: 2881170 - RNA, 19 nt, Artificial Sequence
  Description of Artificial Sequence: Synthetic oligonucleotide
acaagugugugacccuucc

SEQ ID NO: 2881171 - RNA, 19 nt, Artificial Sequence
  Description of Artificial Sequence: Synthetic oligonucleotide
cagagaguggugcugagcg

SEQ ID NO: 2881172 - RNA, 19 nt, Artificial Sequence
  Description of Artificial Sequence: Synthetic oligonucleotide
ucuacaauuucuuguggac

SEQ ID NO: 2881173 - RNA, 19 nt, Artificial Sequence
  Description of Artificial Sequence: Synthetic oligonucleotide
uccggguucccucagagca

SEQ ID NO: 2881174 - RNA, 19 nt, Artificial Sequence
  Description of Artificial Sequence: Synthetic oligonucleotide
ucccucuaacgucaaaggg

SEQ ID NO: 2881175 - RNA, 19 nt, Artificial Sequence
  Description of Artificial Sequence: Synthetic oligonucleotide
ucuuguggacacauuaacu

SEQ ID NO: 2881176 - RNA, 19 nt, Artificial Sequence
  Description of Artificial Sequence: Synthetic oligonucleotide
agagucccgagcuuccucc

SEQ ID NO: 2881177 - RNA, 19 nt, Artificial Sequence
  Description of Artificial Sequence: Synthetic oligonucleotide
auacuuuauucauauacau

SEQ ID NO: 2881178 - RNA, 19 nt, Artificial Sequence
  Description of Artificial Sequence: Synthetic oligonucleotide
aucuauaucaggaauuuca

SEQ ID NO: 2881179 - RNA, 19 nt, Artificial Sequence
  Description of Artificial Sequence: Synthetic oligonucleotide
gauacuuuauucauauaca

SEQ ID NO: 2881180 - RNA, 19 nt, Artificial Sequence
  Description of Artificial Sequence: Synthetic oligonucleotide
uugauucccucuaacguca

SEQ ID NO: 2881181 - RNA, 19 nt, Artificial Sequence
  Description of Artificial Sequence: Synthetic oligonucleotide
uucucugcaucuauaucag

SEQ ID NO: 2881182 - RNA, 19 nt, Artificial Sequence
  Description of Artificial Sequence: Synthetic oligonucleotide
uagaguuucaagacauaca

SEQ ID NO: 2881183 - RNA, 19 nt, Artificial Sequence
  Description of Artificial Sequence: Synthetic oligonucleotide
aacugucuaagcccagguc

SEQ ID NO: 2881184 - RNA, 19 nt, Artificial Sequence
  Description of Artificial Sequence: Synthetic oligonucleotide
uucuuaucugcaauguagu

SEQ ID NO: 2881185 - RNA, 19 nt, Artificial Sequence
  Description of Artificial Sequence: Synthetic oligonucleotide
uguagucuacaauuucuug

SEQ ID NO: 2881186 - RNA, 19 nt, Artificial Sequence
  Description of Artificial Sequence: Synthetic oligonucleotide
uuuucugggucuaucuugu

SEQ ID NO: 2881187 - RNA, 19 nt, Artificial Sequence
  Description of Artificial Sequence: Synthetic oligonucleotide
aauuuacugagagcuuuuc

SEQ ID NO: 2881188 - RNA, 19 nt, Artificial Sequence
  Description of Artificial Sequence: Synthetic oligonucleotide
cauaaaaugagaauuuacu

SEQ ID NO: 2881189 - RNA, 19 nt, Artificial Sequence
  Description of Artificial Sequence: Synthetic oligonucleotide
uuuauucauauacauccuu

SEQ ID NO: 2881190 - RNA, 19 nt, Artificial Sequence
  Description of Artificial Sequence: Synthetic oligonucleotide
uucccucuaacgucaaagg

SEQ ID NO: 2881191 - RNA, 19 nt, Artificial Sequence
  Description of Artificial Sequence: Synthetic oligonucleotide
uucuuguggacacauuaac

SEQ ID NO: 2881192 - RNA, 19 nt, Artificial Sequence
  Description of Artificial Sequence: Synthetic oligonucleotide
guucccucagagcagagag

SEQ ID NO: 2881193 - RNA, 19 nt, Artificial Sequence
  Description of Artificial Sequence: Synthetic oligonucleotide
auuucuuguggacacauua

SEQ ID NO: 2881194 - RNA, 19 nt, Artificial Sequence
  Description of Artificial Sequence: Synthetic oligonucleotide
cuuuucugggucuaucuug

SEQ ID NO: 2881195 - RNA, 19 nt, Artificial Sequence
  Description of Artificial Sequence: Synthetic oligonucleotide
cuugauucccucuaacguc

SEQ ID NO: 2881196 - RNA, 19 nt, Artificial Sequence
  Description of Artificial Sequence: Synthetic oligonucleotide
uacugagagcuuuucuggg

SEQ ID NO: 2881197 - RNA, 19 nt, Artificial Sequence
  Description of Artificial Sequence: Synthetic oligonucleotide
uaauaaucuccacuugguc

SEQ ID NO: 2881198 - RNA, 19 nt, Artificial Sequence
  Description of Artificial Sequence: Synthetic oligonucleotide
aacuucucugcaucuauau

SEQ ID NO: 2881199 - RNA, 19 nt, Artificial Sequence
  Description of Artificial Sequence: Synthetic oligonucleotide
cauggccauaauaaucucc

SEQ ID NO: 2881200 - RNA, 19 nt, Artificial Sequence
  Description of Artificial Sequence: Synthetic oligonucleotide
uuaacuucucugcaucuau

SEQ ID NO: 2881201 - RNA, 19 nt, Artificial Sequence
  Description of Artificial Sequence: Synthetic oligonucleotide
uccacuugguccaaacugu

SEQ ID NO: 2881202 - RNA, 19 nt, Artificial Sequence
  Description of Artificial Sequence: Synthetic oligonucleotide
aaacugucuaagcccaggu

SEQ ID NO: 2881203 - RNA, 19 nt, Artificial Sequence
  Description of Artificial Sequence: Synthetic oligonucleotide
ucugcaauguagucuacaa

SEQ ID NO: 2881204 - RNA, 19 nt, Artificial Sequence
  Description of Artificial Sequence: Synthetic oligonucleotide
ccaaauucgucuuccaugg

SEQ ID NO: 2881205 - RNA, 19 nt, Artificial Sequence
  Description of Artificial Sequence: Synthetic oligonucleotide
guccaaacugucuaagccc

SEQ ID NO: 2881206 - RNA, 19 nt, Artificial Sequence
  Description of Artificial Sequence: Synthetic oligonucleotide
ugagcgccaagacaggcug

SEQ ID NO: 2881207 - RNA, 19 nt, Artificial Sequence
  Description of Artificial Sequence: Synthetic oligonucleotide
agugugugacccuuccagg

SEQ ID NO: 2881208 - RNA, 19 nt, Artificial Sequence
  Description of Artificial Sequence: Synthetic oligonucleotide
aggcggaaaggacacgagc

SEQ ID NO: 2881209 - RNA, 19 nt, Artificial Sequence
  Description of Artificial Sequence: Synthetic oligonucleotide
uucaagacauacagcacuc

SEQ ID NO: 2881210 - RNA, 19 nt, Artificial Sequence
  Description of Artificial Sequence: Synthetic oligonucleotide
uucugggucuaucuuguca

SEQ ID NO: 2881211 - RNA, 19 nt, Artificial Sequence
  Description of Artificial Sequence: Synthetic oligonucleotide
uuucuuguggacacauuaa

SEQ ID NO: 2881212 - RNA, 19 nt, Artificial Sequence
  Description of Artificial Sequence: Synthetic oligonucleotide
ugcaucuauaucaggaauu

SEQ ID NO: 2881213 - RNA, 19 nt, Artificial Sequence
  Description of Artificial Sequence: Synthetic oligonucleotide
auucccucuaacgucaaag

SEQ ID NO: 2881214 - RNA, 19 nt, Artificial Sequence
  Description of Artificial Sequence: Synthetic oligonucleotide
auuuacugagagcuuuucu

SEQ ID NO: 2881215 - RNA, 19 nt, Artificial Sequence
  Description of Artificial Sequence: Synthetic oligonucleotide
ucugggucuaucuugucau

SEQ ID NO: 2881216 - RNA, 19 nt, Artificial Sequence
  Description of Artificial Sequence: Synthetic oligonucleotide
ucugcaucuauaucaggaa

SEQ ID NO: 2881217 - RNA, 19 nt, Artificial Sequence
  Description of Artificial Sequence: Synthetic oligonucleotide
aagacauacagcacucugu

SEQ ID NO: 2881218 - RNA, 19 nt, Artificial Sequence
  Description of Artificial Sequence: Synthetic oligonucleotide
cuccacuugguccaaacug

SEQ ID NO: 2881219 - RNA, 19 nt, Artificial Sequence
  Description of Artificial Sequence: Synthetic oligonucleotide
auuucaaacccaaauucgu

SEQ ID NO: 2881220 - RNA, 19 nt, Artificial Sequence
  Description of Artificial Sequence: Synthetic oligonucleotide
aagacaggcugcagagucc

SEQ ID NO: 2881221 - RNA, 19 nt, Artificial Sequence
  Description of Artificial Sequence: Synthetic oligonucleotide
agguccuucauaaaaugag

SEQ ID NO: 2881222 - RNA, 19 nt, Artificial Sequence
  Description of Artificial Sequence: Synthetic oligonucleotide
gguccaaacugucuaagcc

SEQ ID NO: 2881223 - RNA, 19 nt, Artificial Sequence
  Description of Artificial Sequence: Synthetic oligonucleotide
caagacaggcugcagaguc

SEQ ID NO: 2881224 - RNA, 19 nt, Artificial Sequence
  Description of Artificial Sequence: Synthetic oligonucleotide
auaauaaucuccacuuggu

SEQ ID NO: 2881225 - RNA, 19 nt, Artificial Sequence
  Description of Artificial Sequence: Synthetic oligonucleotide
uccuucauaaaaugagaau

SEQ ID NO: 2881226 - RNA, 19 nt, Artificial Sequence
  Description of Artificial Sequence: Synthetic oligonucleotide
uuguggacacauuaacuuc

SEQ ID NO: 2881227 - RNA, 19 nt, Artificial Sequence
  Description of Artificial Sequence: Synthetic oligonucleotide
ggacacauuaacuucucug

SEQ ID NO: 2881228 - RNA, 19 nt, Artificial Sequence
  Description of Artificial Sequence: Synthetic oligonucleotide
cucugcaucuauaucagga

SEQ ID NO: 2881229 - RNA, 19 nt, Artificial Sequence
  Description of Artificial Sequence: Synthetic oligonucleotide
ucccucagagcagagagug

SEQ ID NO: 2881230 - RNA, 19 nt, Artificial Sequence
  Description of Artificial Sequence: Synthetic oligonucleotide
acacauuaacuucucugca

SEQ ID NO: 2881231 - RNA, 19 nt, Artificial Sequence
  Description of Artificial Sequence: Synthetic oligonucleotide
ugugugacccuuccaggca

SEQ ID NO: 2881232 - RNA, 19 nt, Artificial Sequence
  Description of Artificial Sequence: Synthetic oligonucleotide
agacaggcugcagaguccc

SEQ ID NO: 2881233 - RNA, 19 nt, Artificial Sequence
  Description of Artificial Sequence: Synthetic oligonucleotide
aucuccacuugguccaaac

SEQ ID NO: 2881234 - RNA, 19 nt, Artificial Sequence
  Description of Artificial Sequence: Synthetic oligonucleotide
ggucuaucuugucauagag

SEQ ID NO: 2881235 - RNA, 19 nt, Artificial Sequence
  Description of Artificial Sequence: Synthetic oligonucleotide
aaaggacacgagcagccau

SEQ ID NO: 2881236 - RNA, 19 nt, Artificial Sequence
  Description of Artificial Sequence: Synthetic oligonucleotide
ucuuaucugcaauguaguc

SEQ ID NO: 2881237 - RNA, 19 nt, Artificial Sequence
  Description of Artificial Sequence: Synthetic oligonucleotide
cccucuaacgucaaagggg

SEQ ID NO: 2881238 - RNA, 19 nt, Artificial Sequence
  Description of Artificial Sequence: Synthetic oligonucleotide
guagucuacaauuucuugu

SEQ ID NO: 2881239 - RNA, 19 nt, Artificial Sequence
  Description of Artificial Sequence: Synthetic oligonucleotide
acaggcaggcgacggacac

SEQ ID NO: 2881240 - RNA, 19 nt, Artificial Sequence
  Description of Artificial Sequence: Synthetic oligonucleotide
gucauagaguuucaagaca

SEQ ID NO: 2881241 - RNA, 19 nt, Artificial Sequence
  Description of Artificial Sequence: Synthetic oligonucleotide
caauguagucuacaauuuc

SEQ ID NO: 2881242 - RNA, 19 nt, Artificial Sequence
  Description of Artificial Sequence: Synthetic oligonucleotide
aacgccacaggcaggcgac

SEQ ID NO: 2881243 - RNA, 19 nt, Artificial Sequence
  Description of Artificial Sequence: Synthetic oligonucleotide
auccuucuuaucugcaaug

SEQ ID NO: 2881244 - RNA, 19 nt, Artificial Sequence
  Description of Artificial Sequence: Synthetic oligonucleotide
ugggucuaucuugucauag

SEQ ID NO: 2881245 - RNA, 19 nt, Artificial Sequence
  Description of Artificial Sequence: Synthetic oligonucleotide
agaauuuacugagagcuuu

SEQ ID NO: 2881246 - RNA, 19 nt, Artificial Sequence
  Description of Artificial Sequence: Synthetic oligonucleotide
ugguccaaacugucuaagc

SEQ ID NO: 2881247 - RNA, 19 nt, Artificial Sequence
  Description of Artificial Sequence: Synthetic oligonucleotide
acuugguccaaacugucua

SEQ ID NO: 2881248 - RNA, 19 nt, Artificial Sequence
  Description of Artificial Sequence: Synthetic oligonucleotide
gacauacagcacucugucc

SEQ ID NO: 2881249 - RNA, 19 nt, Artificial Sequence
  Description of Artificial Sequence: Synthetic oligonucleotide
auggccauaauaaucucca

SEQ ID NO: 2881250 - RNA, 19 nt, Artificial Sequence
  Description of Artificial Sequence: Synthetic oligonucleotide
aaaugagaauuuacugaga

SEQ ID NO: 2881251 - RNA, 19 nt, Artificial Sequence
  Description of Artificial Sequence: Synthetic oligonucleotide
ucucugcaucuauaucagg

SEQ ID NO: 2881252 - RNA, 19 nt, Artificial Sequence
  Description of Artificial Sequence: Synthetic oligonucleotide
gucuacaauuucuugugga

SEQ ID NO: 2881253 - RNA, 19 nt, Artificial Sequence
  Description of Artificial Sequence: Synthetic oligonucleotide
gagaguggugcugagcggc

SEQ ID NO: 2881254 - RNA, 19 nt, Artificial Sequence
  Description of Artificial Sequence: Synthetic oligonucleotide
gacacaggcggaaaggaca

SEQ ID NO: 2881255 - RNA, 19 nt, Artificial Sequence
  Description of Artificial Sequence: Synthetic oligonucleotide
uacauccuucuuaucugca

SEQ ID NO: 2881256 - RNA, 19 nt, Artificial Sequence
  Description of Artificial Sequence: Synthetic oligonucleotide
auucauauacauccuucuu

SEQ ID NO: 2881257 - RNA, 19 nt, Artificial Sequence
  Description of Artificial Sequence: Synthetic oligonucleotide
acugagagcuuuucugggu

SEQ ID NO: 2881258 - RNA, 19 nt, Artificial Sequence
  Description of Artificial Sequence: Synthetic oligonucleotide
gacacgagcagccauggcu

SEQ ID NO: 2881259 - RNA, 19 nt, Artificial Sequence
  Description of Artificial Sequence: Synthetic oligonucleotide
ucaaacccaaauucgucuu

SEQ ID NO: 2881260 - RNA, 19 nt, Artificial Sequence
  Description of Artificial Sequence: Synthetic oligonucleotide
gugugugacccuuccaggc

SEQ ID NO: 2881261 - RNA, 19 nt, Artificial Sequence
  Description of Artificial Sequence: Synthetic oligonucleotide
ucuaagcccagguccuuca

SEQ ID NO: 2881262 - RNA, 19 nt, Artificial Sequence
  Description of Artificial Sequence: Synthetic oligonucleotide
caaacugucuaagcccagg

SEQ ID NO: 2881263 - RNA, 19 nt, Artificial Sequence
  Description of Artificial Sequence: Synthetic oligonucleotide
agagaguggugcugagcgg

SEQ ID NO: 2881264 - RNA, 19 nt, Artificial Sequence
  Description of Artificial Sequence: Synthetic oligonucleotide
aggcgacggacacaggcgg

SEQ ID NO: 2881265 - RNA, 19 nt, Artificial Sequence
  Description of Artificial Sequence: Synthetic oligonucleotide
gacggacacaggcggaaag

SEQ ID NO: 2881266 - RNA, 19 nt, Artificial Sequence
  Description of Artificial Sequence: Synthetic oligonucleotide
aucacuguacuggcggcac

SEQ ID NO: 2881267 - RNA, 19 nt, Artificial Sequence
  Description of Artificial Sequence: Synthetic oligonucleotide
uccuucuuaucugcaaugu

SEQ ID NO: 2881268 - RNA, 19 nt, Artificial Sequence
  Description of Artificial Sequence: Synthetic oligonucleotide
gaguuucaagacauacagc

SEQ ID NO: 2881269 - RNA, 19 nt, Artificial Sequence
  Description of Artificial Sequence: Synthetic oligonucleotide
caggcgacggacacaggcg

SEQ ID NO: 2881270 - RNA, 19 nt, Artificial Sequence
  Description of Artificial Sequence: Synthetic oligonucleotide
uugguccaaacugucuaag

SEQ ID NO: 2881271 - RNA, 19 nt, Artificial Sequence
  Description of Artificial Sequence: Synthetic oligonucleotide
aacccaaauucgucuucca

SEQ ID NO: 2881272 - RNA, 19 nt, Artificial Sequence
  Description of Artificial Sequence: Synthetic oligonucleotide
cacucuguccuugauuccc

SEQ ID NO: 2881273 - RNA, 19 nt, Artificial Sequence
  Description of Artificial Sequence: Synthetic oligonucleotide
aaggacacgagcagccaug

SEQ ID NO: 2881274 - RNA, 19 nt, Artificial Sequence
  Description of Artificial Sequence: Synthetic oligonucleotide
acacaggcggaaaggacac

SEQ ID NO: 2881275 - RNA, 19 nt, Artificial Sequence
  Description of Artificial Sequence: Synthetic oligonucleotide
ugagagcuuuucugggucu

SEQ ID NO: 2881276 - RNA, 19 nt, Artificial Sequence
  Description of Artificial Sequence: Synthetic oligonucleotide
ugagcggccgggccaaggc

SEQ ID NO: 2881277 - RNA, 19 nt, Artificial Sequence
  Description of Artificial Sequence: Synthetic oligonucleotide
uggacacauuaacuucucu

SEQ ID NO: 2881278 - RNA, 19 nt, Artificial Sequence
  Description of Artificial Sequence: Synthetic oligonucleotide
cugagagcuuuucuggguc

SEQ ID NO: 2881279 - RNA, 19 nt, Artificial Sequence
  Description of Artificial Sequence: Synthetic oligonucleotide
ugugagcgccaagacaggc

SEQ ID NO: 2881280 - RNA, 19 nt, Artificial Sequence
  Description of Artificial Sequence: Synthetic oligonucleotide
ggugcaucacuguacuggc

SEQ ID NO: 2881281 - RNA, 19 nt, Artificial Sequence
  Description of Artificial Sequence: Synthetic oligonucleotide
ucuguccuugauucccucu

SEQ ID NO: 2881282 - RNA, 19 nt, Artificial Sequence
  Description of Artificial Sequence: Synthetic oligonucleotide
cccaaauucgucuuccaug

SEQ ID NO: 2881283 - RNA, 19 nt, Artificial Sequence
  Description of Artificial Sequence: Synthetic oligonucleotide
agcgugggaagccggagca

SEQ ID NO: 2881284 - RNA, 19 nt, Artificial Sequence
  Description of Artificial Sequence: Synthetic oligonucleotide
cuuguggacacauuaacuu

SEQ ID NO: 2881285 - RNA, 19 nt, Artificial Sequence
  Description of Artificial Sequence: Synthetic oligonucleotide
ucgucuuccauggccauaa

SEQ ID NO: 2881286 - RNA, 19 nt, Artificial Sequence
  Description of Artificial Sequence: Synthetic oligonucleotide
guuucaagacauacagcac

SEQ ID NO: 2881287 - RNA, 19 nt, Artificial Sequence
  Description of Artificial Sequence: Synthetic oligonucleotide
ggaaaggacacgagcagcc

SEQ ID NO: 2881288 - RNA, 19 nt, Artificial Sequence
  Description of Artificial Sequence: Synthetic oligonucleotide
cuauaucaggaauuucaaa

SEQ ID NO: 2881289 - RNA, 19 nt, Artificial Sequence
  Description of Artificial Sequence: Synthetic oligonucleotide
cuacaauuucuuguggaca

SEQ ID NO: 2881290 - RNA, 19 nt, Artificial Sequence
  Description of Artificial Sequence: Synthetic oligonucleotide
gccaagacaggcugcagag

SEQ ID NO: 2881291 - RNA, 19 nt, Artificial Sequence
  Description of Artificial Sequence: Synthetic oligonucleotide
acggacacaggcggaaagg

SEQ ID NO: 2881292 - RNA, 19 nt, Artificial Sequence
  Description of Artificial Sequence: Synthetic oligonucleotide
cuuaucugcaauguagucu

SEQ ID NO: 2881293 - RNA, 19 nt, Artificial Sequence
  Description of Artificial Sequence: Synthetic oligonucleotide
uacuggcggcacaagugug

SEQ ID NO: 2881294 - RNA, 19 nt, Artificial Sequence
  Description of Artificial Sequence: Synthetic oligonucleotide
ugugacccuuccaggcacc

SEQ ID NO: 2881295 - RNA, 19 nt, Artificial Sequence
  Description of Artificial Sequence: Synthetic oligonucleotide
cauauacauccuucuuauc

SEQ ID NO: 2881296 - RNA, 19 nt, Artificial Sequence
  Description of Artificial Sequence: Synthetic oligonucleotide
caaacccaaauucgucuuc

SEQ ID NO: 2881297 - RNA, 19 nt, Artificial Sequence
  Description of Artificial Sequence: Synthetic oligonucleotide
acaggcggaaaggacacga

SEQ ID NO: 2881298 - RNA, 19 nt, Artificial Sequence
  Description of Artificial Sequence: Synthetic oligonucleotide
cagguccuucauaaaauga

SEQ ID NO: 2881299 - RNA, 19 nt, Artificial Sequence
  Description of Artificial Sequence: Synthetic oligonucleotide
uacagcacucuguccuuga

SEQ ID NO: 2881300 - RNA, 19 nt, Artificial Sequence
  Description of Artificial Sequence: Synthetic oligonucleotide
aggcaggcgacggacacag

SEQ ID NO: 2881301 - RNA, 19 nt, Artificial Sequence
  Description of Artificial Sequence: Synthetic oligonucleotide
aggcugcagagucccgagc

SEQ ID NO: 2881302 - RNA, 19 nt, Artificial Sequence
  Description of Artificial Sequence: Synthetic oligonucleotide
cuuccaggcaccuguguga

SEQ ID NO: 2881303 - RNA, 19 nt, Artificial Sequence
  Description of Artificial Sequence: Synthetic oligonucleotide
aggacacgagcagccaugg

SEQ ID NO: 2881304 - RNA, 19 nt, Artificial Sequence
  Description of Artificial Sequence: Synthetic oligonucleotide
accugugugagcgccaaga

SEQ ID NO: 2881305 - RNA, 19 nt, Artificial Sequence
  Description of Artificial Sequence: Synthetic oligonucleotide
cuuuauucauauacauccu

SEQ ID NO: 2881306 - RNA, 19 nt, Artificial Sequence
  Description of Artificial Sequence: Synthetic oligonucleotide
aggcaccugugugagcgcc

SEQ ID NO: 2881307 - RNA, 19 nt, Artificial Sequence
  Description of Artificial Sequence: Synthetic oligonucleotide
gcaggcgacggacacaggc

SEQ ID NO: 2881308 - RNA, 19 nt, Artificial Sequence
  Description of Artificial Sequence: Synthetic oligonucleotide
gagucccgagcuuccuccg

SEQ ID NO: 2881309 - RNA, 19 nt, Artificial Sequence
  Description of Artificial Sequence: Synthetic oligonucleotide
acccaaauucgucuuccau

SEQ ID NO: 2881310 - RNA, 19 nt, Artificial Sequence
  Description of Artificial Sequence: Synthetic oligonucleotide
gaacgccacaggcaggcga

SEQ ID NO: 2881311 - RNA, 19 nt, Artificial Sequence
  Description of Artificial Sequence: Synthetic oligonucleotide
caaauucgucuuccauggc

SEQ ID NO: 2881312 - RNA, 19 nt, Artificial Sequence
  Description of Artificial Sequence: Synthetic oligonucleotide
auuaacuucucugcaucua

SEQ ID NO: 2881313 - RNA, 19 nt, Artificial Sequence
  Description of Artificial Sequence: Synthetic oligonucleotide
uaagcccagguccuucaua

SEQ ID NO: 2881314 - RNA, 19 nt, Artificial Sequence
  Description of Artificial Sequence: Synthetic oligonucleotide
guccuucauaaaaugagaa

SEQ ID NO: 2881315 - RNA, 19 nt, Artificial Sequence
  Description of Artificial Sequence: Synthetic oligonucleotide
ccaggcaccugugugagcg

SEQ ID NO: 2881316 - RNA, 19 nt, Artificial Sequence
  Description of Artificial Sequence: Synthetic oligonucleotide
ggaauuucaaacccaaauu

SEQ ID NO: 2881317 - RNA, 19 nt, Artificial Sequence
  Description of Artificial Sequence: Synthetic oligonucleotide
uucccucagagcagagagu

SEQ ID NO: 2881318 - RNA, 19 nt, Artificial Sequence
  Description of Artificial Sequence: Synthetic oligonucleotide
gucccgagcuuccuccggg

SEQ ID NO: 2881319 - RNA, 19 nt, Artificial Sequence
  Description of Artificial Sequence: Synthetic oligonucleotide
agaguggugcugagcggcc

SEQ ID NO: 2881320 - RNA, 19 nt, Artificial Sequence
  Description of Artificial Sequence: Synthetic oligonucleotide
agucccgagcuuccuccgg

SEQ ID NO: 2881321 - RNA, 19 nt, Artificial Sequence
  Description of Artificial Sequence: Synthetic oligonucleotide
cucagagcagagaguggug

SEQ ID NO: 2881322 - RNA, 19 nt, Artificial Sequence
  Description of Artificial Sequence: Synthetic oligonucleotide
aagccggagcagcggcgcg

SEQ ID NO: 2881323 - RNA, 19 nt, Artificial Sequence
  Description of Artificial Sequence: Synthetic oligonucleotide
aucugcaauguagucuaca

SEQ ID NO: 2881324 - RNA, 19 nt, Artificial Sequence
  Description of Artificial Sequence: Synthetic oligonucleotide
uggccauaauaaucuccac

SEQ ID NO: 2881325 - RNA, 19 nt, Artificial Sequence
  Description of Artificial Sequence: Synthetic oligonucleotide
gaagccggagcagcggcgc

SEQ ID NO: 2881326 - RNA, 19 nt, Artificial Sequence
  Description of Artificial Sequence: Synthetic oligonucleotide
uaucugcaauguagucuac

SEQ ID NO: 2881327 - RNA, 19 nt, Artificial Sequence
  Description of Artificial Sequence: Synthetic oligonucleotide
gugugacccuuccaggcac

SEQ ID NO: 2881328 - RNA, 19 nt, Artificial Sequence
  Description of Artificial Sequence: Synthetic oligonucleotide
ucacuguacuggcggcaca

SEQ ID NO: 2881329 - RNA, 19 nt, Artificial Sequence
  Description of Artificial Sequence: Synthetic oligonucleotide
agcagagaguggugcugag

SEQ ID NO: 2881330 - RNA, 19 nt, Artificial Sequence
  Description of Artificial Sequence: Synthetic oligonucleotide
guccuugauucccucuaac

SEQ ID NO: 2881331 - RNA, 19 nt, Artificial Sequence
  Description of Artificial Sequence: Synthetic oligonucleotide
caucuauaucaggaauuuc

SEQ ID NO: 2881332 - RNA, 19 nt, Artificial Sequence
  Description of Artificial Sequence: Synthetic oligonucleotide
gccauaauaaucuccacuu

SEQ ID NO: 2881333 - RNA, 19 nt, Artificial Sequence
  Description of Artificial Sequence: Synthetic oligonucleotide
gaaaggacacgagcagcca

SEQ ID NO: 2881334 - RNA, 19 nt, Artificial Sequence
  Description of Artificial Sequence: Synthetic oligonucleotide
aauuucuuguggacacauu

SEQ ID NO: 2881335 - RNA, 19 nt, Artificial Sequence
  Description of Artificial Sequence: Synthetic oligonucleotide
gcggaaaggacacgagcag

SEQ ID NO: 2881336 - RNA, 19 nt, Artificial Sequence
  Description of Artificial Sequence: Synthetic oligonucleotide
cuugguccaaacugucuaa

SEQ ID NO: 2881337 - RNA, 19 nt, Artificial Sequence
  Description of Artificial Sequence: Synthetic oligonucleotide
caggcugcagagucccgag

SEQ ID NO: 2881338 - RNA, 19 nt, Artificial Sequence
  Description of Artificial Sequence: Synthetic oligonucleotide
ccagguccuucauaaaaug

SEQ ID NO: 2881339 - RNA, 19 nt, Artificial Sequence
  Description of Artificial Sequence: Synthetic oligonucleotide
caggcggaaaggacacgag

SEQ ID NO: 2881340 - RNA, 19 nt, Artificial Sequence
  Description of Artificial Sequence: Synthetic oligonucleotide
cugugugagcgccaagaca

SEQ ID NO: 2881341 - RNA, 19 nt, Artificial Sequence
  Description of Artificial Sequence: Synthetic oligonucleotide
ccauaauaaucuccacuug

SEQ ID NO: 2881342 - RNA, 19 nt, Artificial Sequence
  Description of Artificial Sequence: Synthetic oligonucleotide
gguccuucauaaaaugaga

SEQ ID NO: 2881343 - RNA, 19 nt, Artificial Sequence
  Description of Artificial Sequence: Synthetic oligonucleotide
agcggcgcgaacgccacag

SEQ ID NO: 2881344 - RNA, 19 nt, Artificial Sequence
  Description of Artificial Sequence: Synthetic oligonucleotide
ggcggaaaggacacgagca

SEQ ID NO: 2881345 - RNA, 19 nt, Artificial Sequence
  Description of Artificial Sequence: Synthetic oligonucleotide
gaguggugcugagcggccg

SEQ ID NO: 2881346 - RNA, 19 nt, Artificial Sequence
  Description of Artificial Sequence: Synthetic oligonucleotide
ugauucccucuaacgucaa

SEQ ID NO: 2881347 - RNA, 19 nt, Artificial Sequence
  Description of Artificial Sequence: Synthetic oligonucleotide
cagcgugggaagccggagc

SEQ ID NO: 2881348 - RNA, 19 nt, Artificial Sequence
  Description of Artificial Sequence: Synthetic oligonucleotide
auacagcacucuguccuug

SEQ ID NO: 2881349 - RNA, 19 nt, Artificial Sequence
  Description of Artificial Sequence: Synthetic oligonucleotide
guacuggcggcacaagugu

SEQ ID NO: 2881350 - RNA, 19 nt, Artificial Sequence
  Description of Artificial Sequence: Synthetic oligonucleotide
cacaagugugugacccuuc

SEQ ID NO: 2881351 - RNA, 19 nt, Artificial Sequence
  Description of Artificial Sequence: Synthetic oligonucleotide
gcgcgaacgccacaggcag

SEQ ID NO: 2881352 - RNA, 19 nt, Artificial Sequence
  Description of Artificial Sequence: Synthetic oligonucleotide
acaggcugcagagucccga

SEQ ID NO: 2881353 - RNA, 19 nt, Artificial Sequence
  Description of Artificial Sequence: Synthetic oligonucleotide
gagcagagaguggugcuga

SEQ ID NO: 2881354 - RNA, 19 nt, Artificial Sequence
  Description of Artificial Sequence: Synthetic oligonucleotide
ggccauaauaaucuccacu

SEQ ID NO: 2881355 - RNA, 19 nt, Artificial Sequence
  Description of Artificial Sequence: Synthetic oligonucleotide
uuucugggucuaucuuguc

SEQ ID NO: 2881356 - RNA, 19 nt, Artificial Sequence
  Description of Artificial Sequence: Synthetic oligonucleotide
cacauuaacuucucugcau

SEQ ID NO: 2881357 - RNA, 19 nt, Artificial Sequence
  Description of Artificial Sequence: Synthetic oligonucleotide
ggcggcacaagugugugac

SEQ ID NO: 2881358 - RNA, 19 nt, Artificial Sequence
  Description of Artificial Sequence: Synthetic oligonucleotide
ggagcagcggcgcgaacgc

SEQ ID NO: 2881359 - RNA, 19 nt, Artificial Sequence
  Description of Artificial Sequence: Synthetic oligonucleotide
auucgucuuccauggccau

SEQ ID NO: 2881360 - RNA, 19 nt, Artificial Sequence
  Description of Artificial Sequence: Synthetic oligonucleotide
gugcaucacuguacuggcg

SEQ ID NO: 2881361 - RNA, 19 nt, Artificial Sequence
  Description of Artificial Sequence: Synthetic oligonucleotide
acuggcggcacaagugugu

SEQ ID NO: 2881362 - RNA, 19 nt, Artificial Sequence
  Description of Artificial Sequence: Synthetic oligonucleotide
cauagaguuucaagacaua

SEQ ID NO: 2881363 - RNA, 19 nt, Artificial Sequence
  Description of Artificial Sequence: Synthetic oligonucleotide
cuccggguucccucagagc

SEQ ID NO: 2881364 - RNA, 19 nt, Artificial Sequence
  Description of Artificial Sequence: Synthetic oligonucleotide
agcgccaagacaggcugca

SEQ ID NO: 2881365 - RNA, 19 nt, Artificial Sequence
  Description of Artificial Sequence: Synthetic oligonucleotide
acuguacuggcggcacaag

SEQ ID NO: 2881366 - RNA, 19 nt, Artificial Sequence
  Description of Artificial Sequence: Synthetic oligonucleotide
gucuuccauggccauaaua

SEQ ID NO: 2881367 - RNA, 19 nt, Artificial Sequence
  Description of Artificial Sequence: Synthetic oligonucleotide
gagcggccgggccaaggcc

SEQ ID NO: 2881368 - RNA, 19 nt, Artificial Sequence
  Description of Artificial Sequence: Synthetic oligonucleotide
cugcagagucccgagcuuc

SEQ ID NO: 2881369 - RNA, 19 nt, Artificial Sequence
  Description of Artificial Sequence: Synthetic oligonucleotide
ccuuccaggcaccugugug

SEQ ID NO: 2881370 - RNA, 19 nt, Artificial Sequence
  Description of Artificial Sequence: Synthetic oligonucleotide
uuccuccggguucccucag

SEQ ID NO: 2881371 - RNA, 19 nt, Artificial Sequence
  Description of Artificial Sequence: Synthetic oligonucleotide
gggucuaucuugucauaga

SEQ ID NO: 2881372 - RNA, 19 nt, Artificial Sequence
  Description of Artificial Sequence: Synthetic oligonucleotide
gcaucacuguacuggcggc

SEQ ID NO: 2881373 - RNA, 19 nt, Artificial Sequence
  Description of Artificial Sequence: Synthetic oligonucleotide
aggccagcgugggaagccg

SEQ ID NO: 2881374 - RNA, 19 nt, Artificial Sequence
  Description of Artificial Sequence: Synthetic oligonucleotide
cacgagcagccauggcuac

SEQ ID NO: 2881375 - RNA, 19 nt, Artificial Sequence
  Description of Artificial Sequence: Synthetic oligonucleotide
uccuccggguucccucaga

SEQ ID NO: 2881376 - RNA, 19 nt, Artificial Sequence
  Description of Artificial Sequence: Synthetic oligonucleotide
cucuguccuugauucccuc

SEQ ID NO: 2881377 - RNA, 19 nt, Artificial Sequence
  Description of Artificial Sequence: Synthetic oligonucleotide
gauucccucuaacgucaaa

SEQ ID NO: 2881378 - RNA, 19 nt, Artificial Sequence
  Description of Artificial Sequence: Synthetic oligonucleotide
gugugagcgccaagacagg

SEQ ID NO: 2881379 - RNA, 19 nt, Artificial Sequence
  Description of Artificial Sequence: Synthetic oligonucleotide
cuuccuccggguucccuca

SEQ ID NO: 2881380 - RNA, 19 nt, Artificial Sequence
  Description of Artificial Sequence: Synthetic oligonucleotide
cugucuaagcccagguccu

SEQ ID NO: 2881381 - RNA, 19 nt, Artificial Sequence
  Description of Artificial Sequence: Synthetic oligonucleotide
cuuccauggccauaauaau

SEQ ID NO: 2881382 - RNA, 19 nt, Artificial Sequence
  Description of Artificial Sequence: Synthetic oligonucleotide
caaggccagcgugggaagc

SEQ ID NO: 2881383 - RNA, 19 nt, Artificial Sequence
  Description of Artificial Sequence: Synthetic oligonucleotide
cuggcggcacaagugugug

SEQ ID NO: 2881384 - RNA, 19 nt, Artificial Sequence
  Description of Artificial Sequence: Synthetic oligonucleotide
caagugugugacccuucca

SEQ ID NO: 2881385 - RNA, 19 nt, Artificial Sequence
  Description of Artificial Sequence: Synthetic oligonucleotide
cagagucccgagcuuccuc

SEQ ID NO: 2881386 - RNA, 19 nt, Artificial Sequence
  Description of Artificial Sequence: Synthetic oligonucleotide
gucuaucuugucauagagu

SEQ ID NO: 2881387 - RNA, 19 nt, Artificial Sequence
  Description of Artificial Sequence: Synthetic oligonucleotide
guggacacauuaacuucuc

SEQ ID NO: 2881388 - RNA, 19 nt, Artificial Sequence
  Description of Artificial Sequence: Synthetic oligonucleotide
gacaggcugcagagucccg

SEQ ID NO: 2881389 - RNA, 19 nt, Artificial Sequence
  Description of Artificial Sequence: Synthetic oligonucleotide
uccaggcaccugugugagc

SEQ ID NO: 2881390 - RNA, 19 nt, Artificial Sequence
  Description of Artificial Sequence: Synthetic oligonucleotide
ucccgagcuuccuccgggu

SEQ ID NO: 2881391 - RNA, 19 nt, Artificial Sequence
  Description of Artificial Sequence: Synthetic oligonucleotide
gcgaacgccacaggcaggc

SEQ ID NO: 2881392 - RNA, 19 nt, Artificial Sequence
  Description of Artificial Sequence: Synthetic oligonucleotide
gaauuuacugagagcuuuu

SEQ ID NO: 2881393 - RNA, 19 nt, Artificial Sequence
  Description of Artificial Sequence: Synthetic oligonucleotide
uggcggcacaaguguguga

SEQ ID NO: 2881394 - RNA, 19 nt, Artificial Sequence
  Description of Artificial Sequence: Synthetic oligonucleotide
aaucuccacuugguccaaa

SEQ ID NO: 2881395 - RNA, 19 nt, Artificial Sequence
  Description of Artificial Sequence: Synthetic oligonucleotide
uaaucuccacuugguccaa

SEQ ID NO: 2881396 - RNA, 19 nt, Artificial Sequence
  Description of Artificial Sequence: Synthetic oligonucleotide
ccuugauucccucuaacgu

SEQ ID NO: 2881397 - RNA, 19 nt, Artificial Sequence
  Description of Artificial Sequence: Synthetic oligonucleotide
ugacccuuccaggcaccug

SEQ ID NO: 2881398 - RNA, 19 nt, Artificial Sequence
  Description of Artificial Sequence: Synthetic oligonucleotide
aucuugucauagaguuuca

SEQ ID NO: 2881399 - RNA, 19 nt, Artificial Sequence
  Description of Artificial Sequence: Synthetic oligonucleotide
cugcaucuauaucaggaau

SEQ ID NO: 2881400 - RNA, 19 nt, Artificial Sequence
  Description of Artificial Sequence: Synthetic oligonucleotide
gcccagguccuucauaaaa

SEQ ID NO: 2881401 - RNA, 19 nt, Artificial Sequence
  Description of Artificial Sequence: Synthetic oligonucleotide
uucgucuuccauggccaua

SEQ ID NO: 2881402 - RNA, 19 nt, Artificial Sequence
  Description of Artificial Sequence: Synthetic oligonucleotide
ccugugugagcgccaagac

SEQ ID NO: 2881403 - RNA, 19 nt, Artificial Sequence
  Description of Artificial Sequence: Synthetic oligonucleotide
cugauacuuuauucauaua

SEQ ID NO: 2881404 - RNA, 19 nt, Artificial Sequence
  Description of Artificial Sequence: Synthetic oligonucleotide
caucacuguacuggcggca

SEQ ID NO: 2881405 - RNA, 19 nt, Artificial Sequence
  Description of Artificial Sequence: Synthetic oligonucleotide
gucuaagcccagguccuuc

SEQ ID NO: 2881406 - RNA, 19 nt, Artificial Sequence
  Description of Artificial Sequence: Synthetic oligonucleotide
cacaggcggaaaggacacg

SEQ ID NO: 2881407 - RNA, 19 nt, Artificial Sequence
  Description of Artificial Sequence: Synthetic oligonucleotide
caggcaccugugugagcgc

SEQ ID NO: 2881408 - RNA, 19 nt, Artificial Sequence
  Description of Artificial Sequence: Synthetic oligonucleotide
guggugcugagcggccggg

SEQ ID NO: 2881409 - RNA, 19 nt, Artificial Sequence
  Description of Artificial Sequence: Synthetic oligonucleotide
caauuucuuguggacacau

SEQ ID NO: 2881410 - RNA, 19 nt, Artificial Sequence
  Description of Artificial Sequence: Synthetic oligonucleotide
gcuuccuccggguucccuc

SEQ ID NO: 2881411 - RNA, 19 nt, Artificial Sequence
  Description of Artificial Sequence: Synthetic oligonucleotide
gagcgccaagacaggcugc

SEQ ID NO: 2881412 - RNA, 19 nt, Artificial Sequence
  Description of Artificial Sequence: Synthetic oligonucleotide
ggacacaggcggaaaggac

SEQ ID NO: 2881413 - RNA, 19 nt, Artificial Sequence
  Description of Artificial Sequence: Synthetic oligonucleotide
ccaaacugucuaagcccag

SEQ ID NO: 2881414 - RNA, 19 nt, Artificial Sequence
  Description of Artificial Sequence: Synthetic oligonucleotide
gugcugagcggccgggcca

SEQ ID NO: 2881415 - RNA, 19 nt, Artificial Sequence
  Description of Artificial Sequence: Synthetic oligonucleotide
cacuugguccaaacugucu

SEQ ID NO: 2881416 - RNA, 19 nt, Artificial Sequence
  Description of Artificial Sequence: Synthetic oligonucleotide
gagagcuuuucugggucua

SEQ ID NO: 2881417 - RNA, 19 nt, Artificial Sequence
  Description of Artificial Sequence: Synthetic oligonucleotide
gcacucuguccuugauucc

SEQ ID NO: 2881418 - RNA, 19 nt, Artificial Sequence
  Description of Artificial Sequence: Synthetic oligonucleotide
cugagcggccgggccaagg

SEQ ID NO: 2881419 - RNA, 19 nt, Artificial Sequence
  Description of Artificial Sequence: Synthetic oligonucleotide
gagaauuuacugagagcuu

SEQ ID NO: 2881420 - RNA, 19 nt, Artificial Sequence
  Description of Artificial Sequence: Synthetic oligonucleotide
ccuccggguucccucagag

SEQ ID NO: 2881421 - RNA, 19 nt, Artificial Sequence
  Description of Artificial Sequence: Synthetic oligonucleotide
ugcugagcggccgggccaa

SEQ ID NO: 2881422 - RNA, 19 nt, Artificial Sequence
  Description of Artificial Sequence: Synthetic oligonucleotide
ccacuugguccaaacuguc

SEQ ID NO: 2881423 - RNA, 19 nt, Artificial Sequence
  Description of Artificial Sequence: Synthetic oligonucleotide
ugucuaagcccagguccuu

SEQ ID NO: 2881424 - RNA, 19 nt, Artificial Sequence
  Description of Artificial Sequence: Synthetic oligonucleotide
cuguacuggcggcacaagu

SEQ ID NO: 2881425 - RNA, 19 nt, Artificial Sequence
  Description of Artificial Sequence: Synthetic oligonucleotide
cggcacaagugugugaccc

SEQ ID NO: 2881426 - RNA, 19 nt, Artificial Sequence
  Description of Artificial Sequence: Synthetic oligonucleotide
cuaucuugucauagaguuu

SEQ ID NO: 2881427 - RNA, 19 nt, Artificial Sequence
  Description of Artificial Sequence: Synthetic oligonucleotide
cacaggcaggcgacggaca

SEQ ID NO: 2881428 - RNA, 19 nt, Artificial Sequence
  Description of Artificial Sequence: Synthetic oligonucleotide
cugcaauguagucuacaau

SEQ ID NO: 2881429 - RNA, 19 nt, Artificial Sequence
  Description of Artificial Sequence: Synthetic oligonucleotide
cccucagagcagagagugg

SEQ ID NO: 2881430 - RNA, 19 nt, Artificial Sequence
  Description of Artificial Sequence: Synthetic oligonucleotide
cacuguacuggcggcacaa

SEQ ID NO: 2881431 - RNA, 19 nt, Artificial Sequence
  Description of Artificial Sequence: Synthetic oligonucleotide
gccaaggccagcgugggaa

SEQ ID NO: 2881432 - RNA, 19 nt, Artificial Sequence
  Description of Artificial Sequence: Synthetic oligonucleotide
cgggccaaggccagcgugg

SEQ ID NO: 2881433 - RNA, 19 nt, Artificial Sequence
  Description of Artificial Sequence: Synthetic oligonucleotide
cagagcagagaguggugcu

SEQ ID NO: 2881434 - RNA, 19 nt, Artificial Sequence
  Description of Artificial Sequence: Synthetic oligonucleotide
cggaaaggacacgagcagc

SEQ ID NO: 2881435 - RNA, 19 nt, Artificial Sequence
  Description of Artificial Sequence: Synthetic oligonucleotide
ccaaggccagcgugggaag

SEQ ID NO: 2881436 - RNA, 19 nt, Artificial Sequence
  Description of Artificial Sequence: Synthetic oligonucleotide
ccauggccauaauaaucuc

SEQ ID NO: 2881437 - RNA, 19 nt, Artificial Sequence
  Description of Artificial Sequence: Synthetic oligonucleotide
cggagcagcggcgcgaacg

SEQ ID NO: 2881438 - RNA, 19 nt, Artificial Sequence
  Description of Artificial Sequence: Synthetic oligonucleotide
gcaucuauaucaggaauuu

SEQ ID NO: 2881439 - RNA, 19 nt, Artificial Sequence
  Description of Artificial Sequence: Synthetic oligonucleotide
acgccacaggcaggcgacg

SEQ ID NO: 2881440 - RNA, 19 nt, Artificial Sequence
  Description of Artificial Sequence: Synthetic oligonucleotide
ggcgcgaacgccacaggca

SEQ ID NO: 2881441 - RNA, 19 nt, Artificial Sequence
  Description of Artificial Sequence: Synthetic oligonucleotide
gggccaaggccagcguggg

SEQ ID NO: 2881442 - RNA, 19 nt, Artificial Sequence
  Description of Artificial Sequence: Synthetic oligonucleotide
ggccgggccaaggccagcg

SEQ ID NO: 2881443 - RNA, 19 nt, Artificial Sequence
  Description of Artificial Sequence: Synthetic oligonucleotide
ggacacgagcagccauggc

SEQ ID NO: 2881444 - RNA, 19 nt, Artificial Sequence
  Description of Artificial Sequence: Synthetic oligonucleotide
cauacagcacucuguccuu

SEQ ID NO: 2881445 - RNA, 19 nt, Artificial Sequence
  Description of Artificial Sequence: Synthetic oligonucleotide
ggggugcaucacuguacug

SEQ ID NO: 2881446 - RNA, 19 nt, Artificial Sequence
  Description of Artificial Sequence: Synthetic oligonucleotide
gcaauguagucuacaauuu

SEQ ID NO: 2881447 - RNA, 19 nt, Artificial Sequence
  Description of Artificial Sequence: Synthetic oligonucleotide
gguucccucagagcagaga

SEQ ID NO: 2881448 - RNA, 19 nt, Artificial Sequence
  Description of Artificial Sequence: Synthetic oligonucleotide
ccgagcuuccuccggguuc

SEQ ID NO: 2881449 - RNA, 19 nt, Artificial Sequence
  Description of Artificial Sequence: Synthetic oligonucleotide
cgugggaagccggagcagc

SEQ ID NO: 2881450 - RNA, 19 nt, Artificial Sequence
  Description of Artificial Sequence: Synthetic oligonucleotide
caccugugugagcgccaag

SEQ ID NO: 2881451 - RNA, 19 nt, Artificial Sequence
  Description of Artificial Sequence: Synthetic oligonucleotide
cugggucuaucuugucaua

SEQ ID NO: 2881452 - RNA, 19 nt, Artificial Sequence
  Description of Artificial Sequence: Synthetic oligonucleotide
ccggguucccucagagcag

SEQ ID NO: 2881453 - RNA, 19 nt, Artificial Sequence
  Description of Artificial Sequence: Synthetic oligonucleotide
gugagcgccaagacaggcu

SEQ ID NO: 2881454 - RNA, 19 nt, Artificial Sequence
  Description of Artificial Sequence: Synthetic oligonucleotide
agccggagcagcggcgcga

SEQ ID NO: 2881455 - RNA, 19 nt, Artificial Sequence
  Description of Artificial Sequence: Synthetic oligonucleotide
gcggcacaagugugugacc

SEQ ID NO: 2881456 - RNA, 19 nt, Artificial Sequence
  Description of Artificial Sequence: Synthetic oligonucleotide
ccuucuuaucugcaaugua

SEQ ID NO: 2881457 - RNA, 19 nt, Artificial Sequence
  Description of Artificial Sequence: Synthetic oligonucleotide
acccuuccaggcaccugug

SEQ ID NO: 2881458 - RNA, 19 nt, Artificial Sequence
  Description of Artificial Sequence: Synthetic oligonucleotide
gcuuuucugggucuaucuu

SEQ ID NO: 2881459 - RNA, 19 nt, Artificial Sequence
  Description of Artificial Sequence: Synthetic oligonucleotide
agcuuccuccggguucccu

SEQ ID NO: 2881460 - RNA, 19 nt, Artificial Sequence
  Description of Artificial Sequence: Synthetic oligonucleotide
ccucagagcagagaguggu

SEQ ID NO: 2881461 - RNA, 19 nt, Artificial Sequence
  Description of Artificial Sequence: Synthetic oligonucleotide
ggcacaagugugugacccu

SEQ ID NO: 2881462 - RNA, 19 nt, Artificial Sequence
  Description of Artificial Sequence: Synthetic oligonucleotide
ggccagcgugggaagccgg

SEQ ID NO: 2881463 - RNA, 19 nt, Artificial Sequence
  Description of Artificial Sequence: Synthetic oligonucleotide
cccagguccuucauaaaau

SEQ ID NO: 2881464 - RNA, 19 nt, Artificial Sequence
  Description of Artificial Sequence: Synthetic oligonucleotide
cggcgcgaacgccacaggc

SEQ ID NO: 2881465 - RNA, 19 nt, Artificial Sequence
  Description of Artificial Sequence: Synthetic oligonucleotide
ccagcgugggaagccggag

SEQ ID NO: 2881466 - RNA, 19 nt, Artificial Sequence
  Description of Artificial Sequence: Synthetic oligonucleotide
gcggcgcgaacgccacagg

SEQ ID NO: 2881467 - RNA, 19 nt, Artificial Sequence
  Description of Artificial Sequence: Synthetic oligonucleotide
cuaagcccagguccuucau

SEQ ID NO: 2881468 - RNA, 19 nt, Artificial Sequence
  Description of Artificial Sequence: Synthetic oligonucleotide
caggcaggcgacggacaca

SEQ ID NO: 2881469 - RNA, 19 nt, Artificial Sequence
  Description of Artificial Sequence: Synthetic oligonucleotide
cgccaagacaggcugcaga

SEQ ID NO: 2881470 - RNA, 19 nt, Artificial Sequence
  Description of Artificial Sequence: Synthetic oligonucleotide
gcgugggaagccggagcag

SEQ ID NO: 2881471 - RNA, 19 nt, Artificial Sequence
  Description of Artificial Sequence: Synthetic oligonucleotide
cgcgaacgccacaggcagg

SEQ ID NO: 2881472 - RNA, 19 nt, Artificial Sequence
  Description of Artificial Sequence: Synthetic oligonucleotide
gcagcggcgcgaacgccac

SEQ ID NO: 2881473 - RNA, 19 nt, Artificial Sequence
  Description of Artificial Sequence: Synthetic oligonucleotide
gugacccuuccaggcaccu

SEQ ID NO: 2881474 - RNA, 19 nt, Artificial Sequence
  Description of Artificial Sequence: Synthetic oligonucleotide
gcgacggacacaggcggaa

SEQ ID NO: 2881475 - RNA, 19 nt, Artificial Sequence
  Description of Artificial Sequence: Synthetic oligonucleotide
ggcaccugugugagcgcca

SEQ ID NO: 2881476 - RNA, 19 nt, Artificial Sequence
  Description of Artificial Sequence: Synthetic oligonucleotide
gcgccaagacaggcugcag

SEQ ID NO: 2881477 - RNA, 19 nt, Artificial Sequence
  Description of Artificial Sequence: Synthetic oligonucleotide
gcaccugugugagcgccaa

SEQ ID NO: 2881478 - RNA, 19 nt, Artificial Sequence
  Description of Artificial Sequence: Synthetic oligonucleotide
cgccacaggcaggcgacgg

SEQ ID NO: 2881479 - RNA, 19 nt, Artificial Sequence
  Description of Artificial Sequence: Synthetic oligonucleotide
ggcgacggacacaggcgga

SEQ ID NO: 2881480 - RNA, 19 nt, Artificial Sequence
  Description of Artificial Sequence: Synthetic oligonucleotide
cggacacaggcggaaagga

SEQ ID NO: 2881481 - RNA, 19 nt, Artificial Sequence
  Description of Artificial Sequence: Synthetic oligonucleotide
gccagcgugggaagccgga

SEQ ID NO: 2881482 - RNA, 19 nt, Artificial Sequence
  Description of Artificial Sequence: Synthetic oligonucleotide
gcacaagugugugacccuu

SEQ ID NO: 2881483 - RNA, 19 nt, Artificial Sequence
  Description of Artificial Sequence: Synthetic oligonucleotide
ggcaggcgacggacacagg

SEQ ID NO: 2881484 - RNA, 19 nt, Artificial Sequence
  Description of Artificial Sequence: Synthetic oligonucleotide
ggccaaggccagcguggga

SEQ ID NO: 2881485 - RNA, 19 nt, Artificial Sequence
  Description of Artificial Sequence: Synthetic oligonucleotide
gcugcagagucccgagcuu

SEQ ID NO: 2881486 - RNA, 19 nt, Artificial Sequence
  Description of Artificial Sequence: Synthetic oligonucleotide
gcggccgggccaaggccag

SEQ ID NO: 2881487 - RNA, 19 nt, Artificial Sequence
  Description of Artificial Sequence: Synthetic oligonucleotide
cgaacgccacaggcaggcg

SEQ ID NO: 2881488 - RNA, 19 nt, Artificial Sequence
  Description of Artificial Sequence: Synthetic oligonucleotide
gcagagucccgagcuuccu

SEQ ID NO: 2881489 - RNA, 19 nt, Artificial Sequence
  Description of Artificial Sequence: Synthetic oligonucleotide
cagcggcgcgaacgccaca

SEQ ID NO: 2881490 - RNA, 19 nt, Artificial Sequence
  Description of Artificial Sequence: Synthetic oligonucleotide
ccaagacaggcugcagagu

SEQ ID NO: 2881491 - RNA, 19 nt, Artificial Sequence
  Description of Artificial Sequence: Synthetic oligonucleotide
gcugagcggccgggccaag

SEQ ID NO: 2881492 - RNA, 19 nt, Artificial Sequence
  Description of Artificial Sequence: Synthetic oligonucleotide
cccuuccaggcaccugugu

SEQ ID NO: 2881493 - RNA, 19 nt, Artificial Sequence
  Description of Artificial Sequence: Synthetic oligonucleotide
ccggagcagcggcgcgaac

SEQ ID NO: 2881494 - RNA, 19 nt, Artificial Sequence
  Description of Artificial Sequence: Synthetic oligonucleotide
gccgggccaaggccagcgu

SEQ ID NO: 2881495 - RNA, 19 nt, Artificial Sequence
  Description of Artificial Sequence: Synthetic oligonucleotide
cgacggacacaggcggaaa

SEQ ID NO: 2881496 - RNA, 19 nt, Artificial Sequence
  Description of Artificial Sequence: Synthetic oligonucleotide
cccgagcuuccuccggguu

SEQ ID NO: 2881497 - RNA, 19 nt, Artificial Sequence
  Description of Artificial Sequence: Synthetic oligonucleotide
cggccgggccaaggccagc

SEQ ID NO: 2881498 - RNA, 19 nt, Artificial Sequence
  Description of Artificial Sequence: Synthetic oligonucleotide
cgucuuccauggccauaau

SEQ ID NO: 2881499 - RNA, 19 nt, Artificial Sequence
  Description of Artificial Sequence: Synthetic oligonucleotide
uauuuaaucacucagaaug

SEQ ID NO: 2881500 - RNA, 19 nt, Artificial Sequence
  Description of Artificial Sequence: Synthetic oligonucleotide
aaaauauuuaaucacucag

SEQ ID NO: 2881501 - RNA, 19 nt, Artificial Sequence
  Description of Artificial Sequence: Synthetic oligonucleotide
aauuuguuucugcagacgc

SEQ ID NO: 2881502 - RNA, 19 nt, Artificial Sequence
  Description of Artificial Sequence: Synthetic oligonucleotide
uuuauuaucuguuaguagc

SEQ ID NO: 2881503 - RNA, 19 nt, Artificial Sequence
  Description of Artificial Sequence: Synthetic oligonucleotide
aauauuuaaucacucagaa

SEQ ID NO: 2881504 - RNA, 19 nt, Artificial Sequence
  Description of Artificial Sequence: Synthetic oligonucleotide
ugcauuuuaaucauuauuu

SEQ ID NO: 2881505 - RNA, 19 nt, Artificial Sequence
  Description of Artificial Sequence: Synthetic oligonucleotide
uaaucacucagaaugaacu

SEQ ID NO: 2881506 - RNA, 19 nt, Artificial Sequence
  Description of Artificial Sequence: Synthetic oligonucleotide
aaugacaccgaccauucug

SEQ ID NO: 2881507 - RNA, 19 nt, Artificial Sequence
  Description of Artificial Sequence: Synthetic oligonucleotide
ucaucuucuucuuaugccg

SEQ ID NO: 2881508 - RNA, 19 nt, Artificial Sequence
  Description of Artificial Sequence: Synthetic oligonucleotide
acugcaugcauuuuaauca

SEQ ID NO: 2881509 - RNA, 19 nt, Artificial Sequence
  Description of Artificial Sequence: Synthetic oligonucleotide
gaaguagcgauccucuucg

SEQ ID NO: 2881510 - RNA, 19 nt, Artificial Sequence
  Description of Artificial Sequence: Synthetic oligonucleotide
gaaauggggaaugacaccg

SEQ ID NO: 2881511 - RNA, 19 nt, Artificial Sequence
  Description of Artificial Sequence: Synthetic oligonucleotide
ucuuaugccgcucaauuug

SEQ ID NO: 2881512 - RNA, 19 nt, Artificial Sequence
  Description of Artificial Sequence: Synthetic oligonucleotide
acaauuuauuaucuguuag

SEQ ID NO: 2881513 - RNA, 19 nt, Artificial Sequence
  Description of Artificial Sequence: Synthetic oligonucleotide
guuucuucaaggcagcuag

SEQ ID NO: 2881514 - RNA, 19 nt, Artificial Sequence
  Description of Artificial Sequence: Synthetic oligonucleotide
augaacuacaucucuacag

SEQ ID NO: 2881515 - RNA, 19 nt, Artificial Sequence
  Description of Artificial Sequence: Synthetic oligonucleotide
ugguguuucuucaaggcag

SEQ ID NO: 2881516 - RNA, 19 nt, Artificial Sequence
  Description of Artificial Sequence: Synthetic oligonucleotide
ugaacuacaucucuacaga

SEQ ID NO: 2881517 - RNA, 19 nt, Artificial Sequence
  Description of Artificial Sequence: Synthetic oligonucleotide
uuaucuguuaguagcacac

SEQ ID NO: 2881518 - RNA, 19 nt, Artificial Sequence
  Description of Artificial Sequence: Synthetic oligonucleotide
auuuauuaucuguuaguag

SEQ ID NO: 2881519 - RNA, 19 nt, Artificial Sequence
  Description of Artificial Sequence: Synthetic oligonucleotide
uuucaucuucuucuuaugc

SEQ ID NO: 2881520 - RNA, 19 nt, Artificial Sequence
  Description of Artificial Sequence: Synthetic oligonucleotide
uuauuaucuguuaguagca

SEQ ID NO: 2881521 - RNA, 19 nt, Artificial Sequence
  Description of Artificial Sequence: Synthetic oligonucleotide
agcuaguuguucuuuaguc

SEQ ID NO: 2881522 - RNA, 19 nt, Artificial Sequence
  Description of Artificial Sequence: Synthetic oligonucleotide
aaauauuuaaucacucaga

SEQ ID NO: 2881523 - RNA, 19 nt, Artificial Sequence
  Description of Artificial Sequence: Synthetic oligonucleotide
aauggggaaugacaccgac

SEQ ID NO: 2881524 - RNA, 19 nt, Artificial Sequence
  Description of Artificial Sequence: Synthetic oligonucleotide
gaccaaaauauuuaaucac

SEQ ID NO: 2881525 - RNA, 19 nt, Artificial Sequence
  Description of Artificial Sequence: Synthetic oligonucleotide
agaaauggggaaugacacc

SEQ ID NO: 2881526 - RNA, 19 nt, Artificial Sequence
  Description of Artificial Sequence: Synthetic oligonucleotide
aauuuauuaucuguuagua

SEQ ID NO: 2881527 - RNA, 19 nt, Artificial Sequence
  Description of Artificial Sequence: Synthetic oligonucleotide
ucuucucucggaaguagcg

SEQ ID NO: 2881528 - RNA, 19 nt, Artificial Sequence
  Description of Artificial Sequence: Synthetic oligonucleotide
aucuguuaguagcacacgg

SEQ ID NO: 2881529 - RNA, 19 nt, Artificial Sequence
  Description of Artificial Sequence: Synthetic oligonucleotide
uucuuuagucuucucucgg

SEQ ID NO: 2881530 - RNA, 19 nt, Artificial Sequence
  Description of Artificial Sequence: Synthetic oligonucleotide
uuagucuucucucggaagu

SEQ ID NO: 2881531 - RNA, 19 nt, Artificial Sequence
  Description of Artificial Sequence: Synthetic oligonucleotide
guuaguagcacacggacca

SEQ ID NO: 2881532 - RNA, 19 nt, Artificial Sequence
  Description of Artificial Sequence: Synthetic oligonucleotide
ucaugguguuucuucaagg

SEQ ID NO: 2881533 - RNA, 19 nt, Artificial Sequence
  Description of Artificial Sequence: Synthetic oligonucleotide
uuaaucacucagaaugaac

SEQ ID NO: 2881534 - RNA, 19 nt, Artificial Sequence
  Description of Artificial Sequence: Synthetic oligonucleotide
gaagccucgggucuguagg

SEQ ID NO: 2881535 - RNA, 19 nt, Artificial Sequence
  Description of Artificial Sequence: Synthetic oligonucleotide
uguucuuuagucuucucuc

SEQ ID NO: 2881536 - RNA, 19 nt, Artificial Sequence
  Description of Artificial Sequence: Synthetic oligonucleotide
uuggugacaauuuauuauc

SEQ ID NO: 2881537 - RNA, 19 nt, Artificial Sequence
  Description of Artificial Sequence: Synthetic oligonucleotide
gaaugaacuacaucucuac

SEQ ID NO: 2881538 - RNA, 19 nt, Artificial Sequence
  Description of Artificial Sequence: Synthetic oligonucleotide
aaugaacuacaucucuaca

SEQ ID NO: 2881539 - RNA, 19 nt, Artificial Sequence
  Description of Artificial Sequence: Synthetic oligonucleotide
acuacaucucuacagaaau

SEQ ID NO: 2881540 - RNA, 19 nt, Artificial Sequence
  Description of Artificial Sequence: Synthetic oligonucleotide
cagaaauggggaaugacac

SEQ ID NO: 2881541 - RNA, 19 nt, Artificial Sequence
  Description of Artificial Sequence: Synthetic oligonucleotide
uuguucuuuagucuucucu

SEQ ID NO: 2881542 - RNA, 19 nt, Artificial Sequence
  Description of Artificial Sequence: Synthetic oligonucleotide
uucaugguguuucuucaag

SEQ ID NO: 2881543 - RNA, 19 nt, Artificial Sequence
  Description of Artificial Sequence: Synthetic oligonucleotide
caugguguuucuucaaggc

SEQ ID NO: 2881544 - RNA, 19 nt, Artificial Sequence
  Description of Artificial Sequence: Synthetic oligonucleotide
uguuaguagcacacggacc

SEQ ID NO: 2881545 - RNA, 19 nt, Artificial Sequence
  Description of Artificial Sequence: Synthetic oligonucleotide
uuuagucuucucucggaag

SEQ ID NO: 2881546 - RNA, 19 nt, Artificial Sequence
  Description of Artificial Sequence: Synthetic oligonucleotide
aucacucagaaugaacuac

SEQ ID NO: 2881547 - RNA, 19 nt, Artificial Sequence
  Description of Artificial Sequence: Synthetic oligonucleotide
gacugcaugcauuuuaauc

SEQ ID NO: 2881548 - RNA, 19 nt, Artificial Sequence
  Description of Artificial Sequence: Synthetic oligonucleotide
guucuuuagucuucucucg

SEQ ID NO: 2881549 - RNA, 19 nt, Artificial Sequence
  Description of Artificial Sequence: Synthetic oligonucleotide
ucuacagaaauggggaaug

SEQ ID NO: 2881550 - RNA, 19 nt, Artificial Sequence
  Description of Artificial Sequence: Synthetic oligonucleotide
ugacaauuuauuaucuguu

SEQ ID NO: 2881551 - RNA, 19 nt, Artificial Sequence
  Description of Artificial Sequence: Synthetic oligonucleotide
ucuguuaguagcacacgga

SEQ ID NO: 2881552 - RNA, 19 nt, Artificial Sequence
  Description of Artificial Sequence: Synthetic oligonucleotide
ucacucagaaugaacuaca

SEQ ID NO: 2881553 - RNA, 19 nt, Artificial Sequence
  Description of Artificial Sequence: Synthetic oligonucleotide
acaccgaccauucugugug

SEQ ID NO: 2881554 - RNA, 19 nt, Artificial Sequence
  Description of Artificial Sequence: Synthetic oligonucleotide
uuguuuauuucuuggugac

SEQ ID NO: 2881555 - RNA, 19 nt, Artificial Sequence
  Description of Artificial Sequence: Synthetic oligonucleotide
ucuucaaggcagcuaguug

SEQ ID NO: 2881556 - RNA, 19 nt, Artificial Sequence
  Description of Artificial Sequence: Synthetic oligonucleotide
ugugugucugacugcaugc

SEQ ID NO: 2881557 - RNA, 19 nt, Artificial Sequence
  Description of Artificial Sequence: Synthetic oligonucleotide
ucucucuuuccgaaggccc

SEQ ID NO: 2881558 - RNA, 19 nt, Artificial Sequence
  Description of Artificial Sequence: Synthetic oligonucleotide
ucuucaugguguuucuuca

SEQ ID NO: 2881559 - RNA, 19 nt, Artificial Sequence
  Description of Artificial Sequence: Synthetic oligonucleotide
auuaucuguuaguagcaca

SEQ ID NO: 2881560 - RNA, 19 nt, Artificial Sequence
  Description of Artificial Sequence: Synthetic oligonucleotide
ucaauuuguuucugcagac

SEQ ID NO: 2881561 - RNA, 19 nt, Artificial Sequence
  Description of Artificial Sequence: Synthetic oligonucleotide
ucagaaugaacuacaucuc

SEQ ID NO: 2881562 - RNA, 19 nt, Artificial Sequence
  Description of Artificial Sequence: Synthetic oligonucleotide
augccgcucaauuuguuuc

SEQ ID NO: 2881563 - RNA, 19 nt, Artificial Sequence
  Description of Artificial Sequence: Synthetic oligonucleotide
acucagaaugaacuacauc

SEQ ID NO: 2881564 - RNA, 19 nt, Artificial Sequence
  Description of Artificial Sequence: Synthetic oligonucleotide
uuuccgaaggccccaccgg

SEQ ID NO: 2881565 - RNA, 19 nt, Artificial Sequence
  Description of Artificial Sequence: Synthetic oligonucleotide
uauuucuuggugacaauuu

SEQ ID NO: 2881566 - RNA, 19 nt, Artificial Sequence
  Description of Artificial Sequence: Synthetic oligonucleotide
uguaggacccucacgcccc

SEQ ID NO: 2881567 - RNA, 19 nt, Artificial Sequence
  Description of Artificial Sequence: Synthetic oligonucleotide
uccccgacgaguccgagcc

SEQ ID NO: 2881568 - RNA, 19 nt, Artificial Sequence
  Description of Artificial Sequence: Synthetic oligonucleotide
accaaaauauuuaaucacu

SEQ ID NO: 2881569 - RNA, 19 nt, Artificial Sequence
  Description of Artificial Sequence: Synthetic oligonucleotide
uuucuuggugacaauuuau

SEQ ID NO: 2881570 - RNA, 19 nt, Artificial Sequence
  Description of Artificial Sequence: Synthetic oligonucleotide
aaucacucagaaugaacua

SEQ ID NO: 2881571 - RNA, 19 nt, Artificial Sequence
  Description of Artificial Sequence: Synthetic oligonucleotide
ucugacugcaugcauuuua

SEQ ID NO: 2881572 - RNA, 19 nt, Artificial Sequence
  Description of Artificial Sequence: Synthetic oligonucleotide
acgaguccgagccgaagcc

SEQ ID NO: 2881573 - RNA, 19 nt, Artificial Sequence
  Description of Artificial Sequence: Synthetic oligonucleotide
uagcacacggaccaaaaua

SEQ ID NO: 2881574 - RNA, 19 nt, Artificial Sequence
  Description of Artificial Sequence: Synthetic oligonucleotide
cuguuaguagcacacggac

SEQ ID NO: 2881575 - RNA, 19 nt, Artificial Sequence
  Description of Artificial Sequence: Synthetic oligonucleotide
ucugcagacgcucuaucuc

SEQ ID NO: 2881576 - RNA, 19 nt, Artificial Sequence
  Description of Artificial Sequence: Synthetic oligonucleotide
guagcgauccucuucggac

SEQ ID NO: 2881577 - RNA, 19 nt, Artificial Sequence
  Description of Artificial Sequence: Synthetic oligonucleotide
cucaauuuguuucugcaga

SEQ ID NO: 2881578 - RNA, 19 nt, Artificial Sequence
  Description of Artificial Sequence: Synthetic oligonucleotide
ggaccaaaauauuuaauca

SEQ ID NO: 2881579 - RNA, 19 nt, Artificial Sequence
  Description of Artificial Sequence: Synthetic oligonucleotide
uggugacaauuuauuaucu

SEQ ID NO: 2881580 - RNA, 19 nt, Artificial Sequence
  Description of Artificial Sequence: Synthetic oligonucleotide
ucuuuagucuucucucgga

SEQ ID NO: 2881581 - RNA, 19 nt, Artificial Sequence
  Description of Artificial Sequence: Synthetic oligonucleotide
gagucgccaacgcugagcc

SEQ ID NO: 2881582 - RNA, 19 nt, Artificial Sequence
  Description of Artificial Sequence: Synthetic oligonucleotide
uuccgaaggccccaccggg

SEQ ID NO: 2881583 - RNA, 19 nt, Artificial Sequence
  Description of Artificial Sequence: Synthetic oligonucleotide
uucuuggugacaauuuauu

SEQ ID NO: 2881584 - RNA, 19 nt, Artificial Sequence
  Description of Artificial Sequence: Synthetic oligonucleotide
uuuguuucugcagacgcuc

SEQ ID NO: 2881585 - RNA, 19 nt, Artificial Sequence
  Description of Artificial Sequence: Synthetic oligonucleotide
auauuuaaucacucagaau

SEQ ID NO: 2881586 - RNA, 19 nt, Artificial Sequence
  Description of Artificial Sequence: Synthetic oligonucleotide
cuuuccgaaggccccaccg

SEQ ID NO: 2881587 - RNA, 19 nt, Artificial Sequence
  Description of Artificial Sequence: Synthetic oligonucleotide
ucuuggugacaauuuauua

SEQ ID NO: 2881588 - RNA, 19 nt, Artificial Sequence
  Description of Artificial Sequence: Synthetic oligonucleotide
ucggaaguagcgauccucu

SEQ ID NO: 2881589 - RNA, 19 nt, Artificial Sequence
  Description of Artificial Sequence: Synthetic oligonucleotide
gacaauuuauuaucuguua

SEQ ID NO: 2881590 - RNA, 19 nt, Artificial Sequence
  Description of Artificial Sequence: Synthetic oligonucleotide
acccucacgccccaggcac

SEQ ID NO: 2881591 - RNA, 19 nt, Artificial Sequence
  Description of Artificial Sequence: Synthetic oligonucleotide
uaucuguuaguagcacacg

SEQ ID NO: 2881592 - RNA, 19 nt, Artificial Sequence
  Description of Artificial Sequence: Synthetic oligonucleotide
ucuaucuccugcucguggu

SEQ ID NO: 2881593 - RNA, 19 nt, Artificial Sequence
  Description of Artificial Sequence: Synthetic oligonucleotide
uuuaaucacucagaaugaa

SEQ ID NO: 2881594 - RNA, 19 nt, Artificial Sequence
  Description of Artificial Sequence: Synthetic oligonucleotide
gacgaguccgagccgaagc

SEQ ID NO: 2881595 - RNA, 19 nt, Artificial Sequence
  Description of Artificial Sequence: Synthetic oligonucleotide
cugcagacgcucuaucucc

SEQ ID NO: 2881596 - RNA, 19 nt, Artificial Sequence
  Description of Artificial Sequence: Synthetic oligonucleotide
auuuaaucacucagaauga

SEQ ID NO: 2881597 - RNA, 19 nt, Artificial Sequence
  Description of Artificial Sequence: Synthetic oligonucleotide
caucuucuucuuaugccgc

SEQ ID NO: 2881598 - RNA, 19 nt, Artificial Sequence
  Description of Artificial Sequence: Synthetic oligonucleotide
uuauuucuuggugacaauu

SEQ ID NO: 2881599 - RNA, 19 nt, Artificial Sequence
  Description of Artificial Sequence: Synthetic oligonucleotide
ucggacuucucucucuuuc

SEQ ID NO: 2881600 - RNA, 19 nt, Artificial Sequence
  Description of Artificial Sequence: Synthetic oligonucleotide
gugacaauuuauuaucugu

SEQ ID NO: 2881601 - RNA, 19 nt, Artificial Sequence
  Description of Artificial Sequence: Synthetic oligonucleotide
uauuaucuguuaguagcac

SEQ ID NO: 2881602 - RNA, 19 nt, Artificial Sequence
  Description of Artificial Sequence: Synthetic oligonucleotide
aacgcugagccugccauug

SEQ ID NO: 2881603 - RNA, 19 nt, Artificial Sequence
  Description of Artificial Sequence: Synthetic oligonucleotide
caauuuguuucugcagacg

SEQ ID NO: 2881604 - RNA, 19 nt, Artificial Sequence
  Description of Artificial Sequence: Synthetic oligonucleotide
uccucuucggacuucucuc

SEQ ID NO: 2881605 - RNA, 19 nt, Artificial Sequence
  Description of Artificial Sequence: Synthetic oligonucleotide
ucucucucuuuccgaaggc

SEQ ID NO: 2881606 - RNA, 19 nt, Artificial Sequence
  Description of Artificial Sequence: Synthetic oligonucleotide
cucucuuuccgaaggcccc

SEQ ID NO: 2881607 - RNA, 19 nt, Artificial Sequence
  Description of Artificial Sequence: Synthetic oligonucleotide
cuacaucucuacagaaaug

SEQ ID NO: 2881608 - RNA, 19 nt, Artificial Sequence
  Description of Artificial Sequence: Synthetic oligonucleotide
aacuacaucucuacagaaa

SEQ ID NO: 2881609 - RNA, 19 nt, Artificial Sequence
  Description of Artificial Sequence: Synthetic oligonucleotide
aaguagcgauccucuucgg

SEQ ID NO: 2881610 - RNA, 19 nt, Artificial Sequence
  Description of Artificial Sequence: Synthetic oligonucleotide
ucuguaggacccucacgcc

SEQ ID NO: 2881611 - RNA, 19 nt, Artificial Sequence
  Description of Artificial Sequence: Synthetic oligonucleotide
cuguaggacccucacgccc

SEQ ID NO: 2881612 - RNA, 19 nt, Artificial Sequence
  Description of Artificial Sequence: Synthetic oligonucleotide
cucuaucuccugcucgugg

SEQ ID NO: 2881613 - RNA, 19 nt, Artificial Sequence
  Description of Artificial Sequence: Synthetic oligonucleotide
ucugugugugucugacugc

SEQ ID NO: 2881614 - RNA, 19 nt, Artificial Sequence
  Description of Artificial Sequence: Synthetic oligonucleotide
uacagaaauggggaaugac

SEQ ID NO: 2881615 - RNA, 19 nt, Artificial Sequence
  Description of Artificial Sequence: Synthetic oligonucleotide
ggugacaauuuauuaucug

SEQ ID NO: 2881616 - RNA, 19 nt, Artificial Sequence
  Description of Artificial Sequence: Synthetic oligonucleotide
cuucaaggcagcuaguugu

SEQ ID NO: 2881617 - RNA, 19 nt, Artificial Sequence
  Description of Artificial Sequence: Synthetic oligonucleotide
acuucucucucuuuccgaa

SEQ ID NO: 2881618 - RNA, 19 nt, Artificial Sequence
  Description of Artificial Sequence: Synthetic oligonucleotide
uguuuauuucuuggugaca

SEQ ID NO: 2881619 - RNA, 19 nt, Artificial Sequence
  Description of Artificial Sequence: Synthetic oligonucleotide
ucucuacagaaauggggaa

SEQ ID NO: 2881620 - RNA, 19 nt, Artificial Sequence
  Description of Artificial Sequence: Synthetic oligonucleotide
gaacuacaucucuacagaa

SEQ ID NO: 2881621 - RNA, 19 nt, Artificial Sequence
  Description of Artificial Sequence: Synthetic oligonucleotide
caauuuauuaucuguuagu

SEQ ID NO: 2881622 - RNA, 19 nt, Artificial Sequence
  Description of Artificial Sequence: Synthetic oligonucleotide
ucaucuucaugguguuucu

SEQ ID NO: 2881623 - RNA, 19 nt, Artificial Sequence
  Description of Artificial Sequence: Synthetic oligonucleotide
cuuggugacaauuuauuau

SEQ ID NO: 2881624 - RNA, 19 nt, Artificial Sequence
  Description of Artificial Sequence: Synthetic oligonucleotide
cucucggaaguagcgaucc

SEQ ID NO: 2881625 - RNA, 19 nt, Artificial Sequence
  Description of Artificial Sequence: Synthetic oligonucleotide
aguagcgauccucuucgga

SEQ ID NO: 2881626 - RNA, 19 nt, Artificial Sequence
  Description of Artificial Sequence: Synthetic oligonucleotide
ucuucggacuucucucucu

SEQ ID NO: 2881627 - RNA, 19 nt, Artificial Sequence
  Description of Artificial Sequence: Synthetic oligonucleotide
agcacacggaccaaaauau

SEQ ID NO: 2881628 - RNA, 19 nt, Artificial Sequence
  Description of Artificial Sequence: Synthetic oligonucleotide
uucuuaugccgcucaauuu

SEQ ID NO: 2881629 - RNA, 19 nt, Artificial Sequence
  Description of Artificial Sequence: Synthetic oligonucleotide
auggggaaugacaccgacc

SEQ ID NO: 2881630 - RNA, 19 nt, Artificial Sequence
  Description of Artificial Sequence: Synthetic oligonucleotide
ugagccugccauugucucc

SEQ ID NO: 2881631 - RNA, 19 nt, Artificial Sequence
  Description of Artificial Sequence: Synthetic oligonucleotide
gacuccgugcuccccgacg

SEQ ID NO: 2881632 - RNA, 19 nt, Artificial Sequence
  Description of Artificial Sequence: Synthetic oligonucleotide
gguacuggaucucaucuuc

SEQ ID NO: 2881633 - RNA, 19 nt, Artificial Sequence
  Description of Artificial Sequence: Synthetic oligonucleotide
uggaucucaucuucauggu

SEQ ID NO: 2881634 - RNA, 19 nt, Artificial Sequence
  Description of Artificial Sequence: Synthetic oligonucleotide
ugugucugacugcaugcau

SEQ ID NO: 2881635 - RNA, 19 nt, Artificial Sequence
  Description of Artificial Sequence: Synthetic oligonucleotide
ugccauugucuccugcgcu

SEQ ID NO: 2881636 - RNA, 19 nt, Artificial Sequence
  Description of Artificial Sequence: Synthetic oligonucleotide
uucucggauggcgccagcg

SEQ ID NO: 2881637 - RNA, 19 nt, Artificial Sequence
  Description of Artificial Sequence: Synthetic oligonucleotide
gucgccaacgcugagccug

SEQ ID NO: 2881638 - RNA, 19 nt, Artificial Sequence
  Description of Artificial Sequence: Synthetic oligonucleotide
gcucaauuuguuucugcag

SEQ ID NO: 2881639 - RNA, 19 nt, Artificial Sequence
  Description of Artificial Sequence: Synthetic oligonucleotide
uaugccgcucaauuuguuu

SEQ ID NO: 2881640 - RNA, 19 nt, Artificial Sequence
  Description of Artificial Sequence: Synthetic oligonucleotide
uagcgauccucuucggacu

SEQ ID NO: 2881641 - RNA, 19 nt, Artificial Sequence
  Description of Artificial Sequence: Synthetic oligonucleotide
cggaccaaaauauuuaauc

SEQ ID NO: 2881642 - RNA, 19 nt, Artificial Sequence
  Description of Artificial Sequence: Synthetic oligonucleotide
uuguuucugcagacgcucu

SEQ ID NO: 2881643 - RNA, 19 nt, Artificial Sequence
  Description of Artificial Sequence: Synthetic oligonucleotide
cucggauggcgccagcgcc

SEQ ID NO: 2881644 - RNA, 19 nt, Artificial Sequence
  Description of Artificial Sequence: Synthetic oligonucleotide
ggacuucucucucuuuccg

SEQ ID NO: 2881645 - RNA, 19 nt, Artificial Sequence
  Description of Artificial Sequence: Synthetic oligonucleotide
agucuucucucggaaguag

SEQ ID NO: 2881646 - RNA, 19 nt, Artificial Sequence
  Description of Artificial Sequence: Synthetic oligonucleotide
aguuguucuuuagucuucu

SEQ ID NO: 2881647 - RNA, 19 nt, Artificial Sequence
  Description of Artificial Sequence: Synthetic oligonucleotide
uuucugcagacgcucuauc

SEQ ID NO: 2881648 - RNA, 19 nt, Artificial Sequence
  Description of Artificial Sequence: Synthetic oligonucleotide
acgccccaggcaccgagcc

SEQ ID NO: 2881649 - RNA, 19 nt, Artificial Sequence
  Description of Artificial Sequence: Synthetic oligonucleotide
uacuggaucucaucuucau

SEQ ID NO: 2881650 - RNA, 19 nt, Artificial Sequence
  Description of Artificial Sequence: Synthetic oligonucleotide
aagccucgggucuguagga

SEQ ID NO: 2881651 - RNA, 19 nt, Artificial Sequence
  Description of Artificial Sequence: Synthetic oligonucleotide
uuucuucaaggcagcuagu

SEQ ID NO: 2881652 - RNA, 19 nt, Artificial Sequence
  Description of Artificial Sequence: Synthetic oligonucleotide
ugccgcucaauuuguuucu

SEQ ID NO: 2881653 - RNA, 19 nt, Artificial Sequence
  Description of Artificial Sequence: Synthetic oligonucleotide
uucaaggcagcuaguuguu

SEQ ID NO: 2881654 - RNA, 19 nt, Artificial Sequence
  Description of Artificial Sequence: Synthetic oligonucleotide
gauggcgccagcgccagac

SEQ ID NO: 2881655 - RNA, 19 nt, Artificial Sequence
  Description of Artificial Sequence: Synthetic oligonucleotide
cagacgcucuaucuccugc

SEQ ID NO: 2881656 - RNA, 19 nt, Artificial Sequence
  Description of Artificial Sequence: Synthetic oligonucleotide
uguuucugcagacgcucua

SEQ ID NO: 2881657 - RNA, 19 nt, Artificial Sequence
  Description of Artificial Sequence: Synthetic oligonucleotide
augacaccgaccauucugu

SEQ ID NO: 2881658 - RNA, 19 nt, Artificial Sequence
  Description of Artificial Sequence: Synthetic oligonucleotide
agacgcucuaucuccugcu

SEQ ID NO: 2881659 - RNA, 19 nt, Artificial Sequence
  Description of Artificial Sequence: Synthetic oligonucleotide
uucuucaaggcagcuaguu

SEQ ID NO: 2881660 - RNA, 19 nt, Artificial Sequence
  Description of Artificial Sequence: Synthetic oligonucleotide
ucggauggcgccagcgcca

SEQ ID NO: 2881661 - RNA, 19 nt, Artificial Sequence
  Description of Artificial Sequence: Synthetic oligonucleotide
gacuucucucucuuuccga

SEQ ID NO: 2881662 - RNA, 19 nt, Artificial Sequence
  Description of Artificial Sequence: Synthetic oligonucleotide
cucucucuuuccgaaggcc

SEQ ID NO: 2881663 - RNA, 19 nt, Artificial Sequence
  Description of Artificial Sequence: Synthetic oligonucleotide
ggaaguagcgauccucuuc

SEQ ID NO: 2881664 - RNA, 19 nt, Artificial Sequence
  Description of Artificial Sequence: Synthetic oligonucleotide
ucacgccccaggcaccgag

SEQ ID NO: 2881665 - RNA, 19 nt, Artificial Sequence
  Description of Artificial Sequence: Synthetic oligonucleotide
aggacccucacgccccagg

SEQ ID NO: 2881666 - RNA, 19 nt, Artificial Sequence
  Description of Artificial Sequence: Synthetic oligonucleotide
uccgaaggccccaccgggc

SEQ ID NO: 2881667 - RNA, 19 nt, Artificial Sequence
  Description of Artificial Sequence: Synthetic oligonucleotide
cugccauugucuccugcgc

SEQ ID NO: 2881668 - RNA, 19 nt, Artificial Sequence
  Description of Artificial Sequence: Synthetic oligonucleotide
acuccgugcuccccgacga

SEQ ID NO: 2881669 - RNA, 19 nt, Artificial Sequence
  Description of Artificial Sequence: Synthetic oligonucleotide
cuuuagucuucucucggaa

SEQ ID NO: 2881670 - RNA, 19 nt, Artificial Sequence
  Description of Artificial Sequence: Synthetic oligonucleotide
ccugccauugucuccugcg

SEQ ID NO: 2881671 - RNA, 19 nt, Artificial Sequence
  Description of Artificial Sequence: Synthetic oligonucleotide
cugcucgugguacuggauc

SEQ ID NO: 2881672 - RNA, 19 nt, Artificial Sequence
  Description of Artificial Sequence: Synthetic oligonucleotide
uucuucuuaugccgcucaa

SEQ ID NO: 2881673 - RNA, 19 nt, Artificial Sequence
  Description of Artificial Sequence: Synthetic oligonucleotide
accauucugugugugucug

SEQ ID NO: 2881674 - RNA, 19 nt, Artificial Sequence
  Description of Artificial Sequence: Synthetic oligonucleotide
ucuuuccgaaggccccacc

SEQ ID NO: 2881675 - RNA, 19 nt, Artificial Sequence
  Description of Artificial Sequence: Synthetic oligonucleotide
gugguacuggaucucaucu

SEQ ID NO: 2881676 - RNA, 19 nt, Artificial Sequence
  Description of Artificial Sequence: Synthetic oligonucleotide
gcagcuaguuguucuuuag

SEQ ID NO: 2881677 - RNA, 19 nt, Artificial Sequence
  Description of Artificial Sequence: Synthetic oligonucleotide
aaauggggaaugacaccga

SEQ ID NO: 2881678 - RNA, 19 nt, Artificial Sequence
  Description of Artificial Sequence: Synthetic oligonucleotide
uccgagccgaagccucggg

SEQ ID NO: 2881679 - RNA, 19 nt, Artificial Sequence
  Description of Artificial Sequence: Synthetic oligonucleotide
cuaguuguucuuuagucuu

SEQ ID NO: 2881680 - RNA, 19 nt, Artificial Sequence
  Description of Artificial Sequence: Synthetic oligonucleotide
uccugcucgugguacugga

SEQ ID NO: 2881681 - RNA, 19 nt, Artificial Sequence
  Description of Artificial Sequence: Synthetic oligonucleotide
ucuucuuaugccgcucaau

SEQ ID NO: 2881682 - RNA, 19 nt, Artificial Sequence
  Description of Artificial Sequence: Synthetic oligonucleotide
auucugugugugucugacu

SEQ ID NO: 2881683 - RNA, 19 nt, Artificial Sequence
  Description of Artificial Sequence: Synthetic oligonucleotide
cacggaccaaaauauuuaa

SEQ ID NO: 2881684 - RNA, 19 nt, Artificial Sequence
  Description of Artificial Sequence: Synthetic oligonucleotide
ugacaccgaccauucugug

SEQ ID NO: 2881685 - RNA, 19 nt, Artificial Sequence
  Description of Artificial Sequence: Synthetic oligonucleotide
cucggaaguagcgauccuc

SEQ ID NO: 2881686 - RNA, 19 nt, Artificial Sequence
  Description of Artificial Sequence: Synthetic oligonucleotide
cugagccugccauugucuc

SEQ ID NO: 2881687 - RNA, 19 nt, Artificial Sequence
  Description of Artificial Sequence: Synthetic oligonucleotide
ggucuguaggacccucacg

SEQ ID NO: 2881688 - RNA, 19 nt, Artificial Sequence
  Description of Artificial Sequence: Synthetic oligonucleotide
ugguacuggaucucaucuu

SEQ ID NO: 2881689 - RNA, 19 nt, Artificial Sequence
  Description of Artificial Sequence: Synthetic oligonucleotide
ugcaugcauuuuaaucauu

SEQ ID NO: 2881690 - RNA, 19 nt, Artificial Sequence
  Description of Artificial Sequence: Synthetic oligonucleotide
acacggaccaaaauauuua

SEQ ID NO: 2881691 - RNA, 19 nt, Artificial Sequence
  Description of Artificial Sequence: Synthetic oligonucleotide
caccgggcuucucggaugg

SEQ ID NO: 2881692 - RNA, 19 nt, Artificial Sequence
  Description of Artificial Sequence: Synthetic oligonucleotide
cagaaugaacuacaucucu

SEQ ID NO: 2881693 - RNA, 19 nt, Artificial Sequence
  Description of Artificial Sequence: Synthetic oligonucleotide
cuucuucuuaugccgcuca

SEQ ID NO: 2881694 - RNA, 19 nt, Artificial Sequence
  Description of Artificial Sequence: Synthetic oligonucleotide
ucucuuuccgaaggcccca

SEQ ID NO: 2881695 - RNA, 19 nt, Artificial Sequence
  Description of Artificial Sequence: Synthetic oligonucleotide
agcgccagacuccgugcuc

SEQ ID NO: 2881696 - RNA, 19 nt, Artificial Sequence
  Description of Artificial Sequence: Synthetic oligonucleotide
aucucaucuucaugguguu

SEQ ID NO: 2881697 - RNA, 19 nt, Artificial Sequence
  Description of Artificial Sequence: Synthetic oligonucleotide
ugacugcaugcauuuuaau

SEQ ID NO: 2881698 - RNA, 19 nt, Artificial Sequence
  Description of Artificial Sequence: Synthetic oligonucleotide
gacgcucuaucuccugcuc

SEQ ID NO: 2881699 - RNA, 19 nt, Artificial Sequence
  Description of Artificial Sequence: Synthetic oligonucleotide
uuaugccgcucaauuuguu

SEQ ID NO: 2881700 - RNA, 19 nt, Artificial Sequence
  Description of Artificial Sequence: Synthetic oligonucleotide
gcuaguuguucuuuagucu

SEQ ID NO: 2881701 - RNA, 19 nt, Artificial Sequence
  Description of Artificial Sequence: Synthetic oligonucleotide
ucucggaaguagcgauccu

SEQ ID NO: 2881702 - RNA, 19 nt, Artificial Sequence
  Description of Artificial Sequence: Synthetic oligonucleotide
cuucuuaugccgcucaauu

SEQ ID NO: 2881703 - RNA, 19 nt, Artificial Sequence
  Description of Artificial Sequence: Synthetic oligonucleotide
gacaccgaccauucugugu

SEQ ID NO: 2881704 - RNA, 19 nt, Artificial Sequence
  Description of Artificial Sequence: Synthetic oligonucleotide
ucgccaacgcugagccugc

SEQ ID NO: 2881705 - RNA, 19 nt, Artificial Sequence
  Description of Artificial Sequence: Synthetic oligonucleotide
gguguuucuucaaggcagc

SEQ ID NO: 2881706 - RNA, 19 nt, Artificial Sequence
  Description of Artificial Sequence: Synthetic oligonucleotide
aucuccugcucgugguacu

SEQ ID NO: 2881707 - RNA, 19 nt, Artificial Sequence
  Description of Artificial Sequence: Synthetic oligonucleotide
uaguagcacacggaccaaa

SEQ ID NO: 2881708 - RNA, 19 nt, Artificial Sequence
  Description of Artificial Sequence: Synthetic oligonucleotide
aguagcacacggaccaaaa

SEQ ID NO: 2881709 - RNA, 19 nt, Artificial Sequence
  Description of Artificial Sequence: Synthetic oligonucleotide
ucaaggcagcuaguuguuc

SEQ ID NO: 2881710 - RNA, 19 nt, Artificial Sequence
  Description of Artificial Sequence: Synthetic oligonucleotide
ccaggcaccgagccgagcc

SEQ ID NO: 2881711 - RNA, 19 nt, Artificial Sequence
  Description of Artificial Sequence: Synthetic oligonucleotide
gccauugucuccugcgcug

SEQ ID NO: 2881712 - RNA, 19 nt, Artificial Sequence
  Description of Artificial Sequence: Synthetic oligonucleotide
ugugugugucugacugcau

SEQ ID NO: 2881713 - RNA, 19 nt, Artificial Sequence
  Description of Artificial Sequence: Synthetic oligonucleotide
cuuaugccgcucaauuugu

SEQ ID NO: 2881714 - RNA, 19 nt, Artificial Sequence
  Description of Artificial Sequence: Synthetic oligonucleotide
agacuccgugcuccccgac

SEQ ID NO: 2881715 - RNA, 19 nt, Artificial Sequence
  Description of Artificial Sequence: Synthetic oligonucleotide
cuucaugguguuucuucaa

SEQ ID NO: 2881716 - RNA, 19 nt, Artificial Sequence
  Description of Artificial Sequence: Synthetic oligonucleotide
agccucgggucuguaggac

SEQ ID NO: 2881717 - RNA, 19 nt, Artificial Sequence
  Description of Artificial Sequence: Synthetic oligonucleotide
cacacggaccaaaauauuu

SEQ ID NO: 2881718 - RNA, 19 nt, Artificial Sequence
  Description of Artificial Sequence: Synthetic oligonucleotide
ucgugguacuggaucucau

SEQ ID NO: 2881719 - RNA, 19 nt, Artificial Sequence
  Description of Artificial Sequence: Synthetic oligonucleotide
gagcccgagucgccaacgc

SEQ ID NO: 2881720 - RNA, 19 nt, Artificial Sequence
  Description of Artificial Sequence: Synthetic oligonucleotide
uuaguagcacacggaccaa

SEQ ID NO: 2881721 - RNA, 19 nt, Artificial Sequence
  Description of Artificial Sequence: Synthetic oligonucleotide
uggcgccagcgccagacuc

SEQ ID NO: 2881722 - RNA, 19 nt, Artificial Sequence
  Description of Artificial Sequence: Synthetic oligonucleotide
uagucuucucucggaagua

SEQ ID NO: 2881723 - RNA, 19 nt, Artificial Sequence
  Description of Artificial Sequence: Synthetic oligonucleotide
cucuucggacuucucucuc

SEQ ID NO: 2881724 - RNA, 19 nt, Artificial Sequence
  Description of Artificial Sequence: Synthetic oligonucleotide
gugcuccccgacgaguccg

SEQ ID NO: 2881725 - RNA, 19 nt, Artificial Sequence
  Description of Artificial Sequence: Synthetic oligonucleotide
aguccgagccgaagccucg

SEQ ID NO: 2881726 - RNA, 19 nt, Artificial Sequence
  Description of Artificial Sequence: Synthetic oligonucleotide
ccucgggucuguaggaccc

SEQ ID NO: 2881727 - RNA, 19 nt, Artificial Sequence
  Description of Artificial Sequence: Synthetic oligonucleotide
ggccccaccgggcuucucg

SEQ ID NO: 2881728 - RNA, 19 nt, Artificial Sequence
  Description of Artificial Sequence: Synthetic oligonucleotide
caugcauuuuaaucauuau

SEQ ID NO: 2881729 - RNA, 19 nt, Artificial Sequence
  Description of Artificial Sequence: Synthetic oligonucleotide
gcaugcauuuuaaucauua

SEQ ID NO: 2881730 - RNA, 19 nt, Artificial Sequence
  Description of Artificial Sequence: Synthetic oligonucleotide
agcccgagucgccaacgcu

SEQ ID NO: 2881731 - RNA, 19 nt, Artificial Sequence
  Description of Artificial Sequence: Synthetic oligonucleotide
cuccccgacgaguccgagc

SEQ ID NO: 2881732 - RNA, 19 nt, Artificial Sequence
  Description of Artificial Sequence: Synthetic oligonucleotide
gaccauucugugugugucu

SEQ ID NO: 2881733 - RNA, 19 nt, Artificial Sequence
  Description of Artificial Sequence: Synthetic oligonucleotide
aggcaccgagccgagcccg

SEQ ID NO: 2881734 - RNA, 19 nt, Artificial Sequence
  Description of Artificial Sequence: Synthetic oligonucleotide
acggaccaaaauauuuaau

SEQ ID NO: 2881735 - RNA, 19 nt, Artificial Sequence
  Description of Artificial Sequence: Synthetic oligonucleotide
guacuggaucucaucuuca

SEQ ID NO: 2881736 - RNA, 19 nt, Artificial Sequence
  Description of Artificial Sequence: Synthetic oligonucleotide
caggcaccgagccgagccc

SEQ ID NO: 2881737 - RNA, 19 nt, Artificial Sequence
  Description of Artificial Sequence: Synthetic oligonucleotide
agcgauccucuucggacuu

SEQ ID NO: 2881738 - RNA, 19 nt, Artificial Sequence
  Description of Artificial Sequence: Synthetic oligonucleotide
cuacagaaauggggaauga

SEQ ID NO: 2881739 - RNA, 19 nt, Artificial Sequence
  Description of Artificial Sequence: Synthetic oligonucleotide
uccgugcuccccgacgagu

SEQ ID NO: 2881740 - RNA, 19 nt, Artificial Sequence
  Description of Artificial Sequence: Synthetic oligonucleotide
gaaggccccaccgggcuuc

SEQ ID NO: 2881741 - RNA, 19 nt, Artificial Sequence
  Description of Artificial Sequence: Synthetic oligonucleotide
gccagcgccagacuccgug

SEQ ID NO: 2881742 - RNA, 19 nt, Artificial Sequence
  Description of Artificial Sequence: Synthetic oligonucleotide
gacccucacgccccaggca

SEQ ID NO: 2881743 - RNA, 19 nt, Artificial Sequence
  Description of Artificial Sequence: Synthetic oligonucleotide
cuccugcucgugguacugg

SEQ ID NO: 2881744 - RNA, 19 nt, Artificial Sequence
  Description of Artificial Sequence: Synthetic oligonucleotide
ugcuccccgacgaguccga

SEQ ID NO: 2881745 - RNA, 19 nt, Artificial Sequence
  Description of Artificial Sequence: Synthetic oligonucleotide
accgaccauucugugugug

SEQ ID NO: 2881746 - RNA, 19 nt, Artificial Sequence
  Description of Artificial Sequence: Synthetic oligonucleotide
gagccugccauugucuccu

SEQ ID NO: 2881747 - RNA, 19 nt, Artificial Sequence
  Description of Artificial Sequence: Synthetic oligonucleotide
uucggacuucucucucuuu

SEQ ID NO: 2881748 - RNA, 19 nt, Artificial Sequence
  Description of Artificial Sequence: Synthetic oligonucleotide
gagccgaagccucgggucu

SEQ ID NO: 2881749 - RNA, 19 nt, Artificial Sequence
  Description of Artificial Sequence: Synthetic oligonucleotide
gggucuguaggacccucac

SEQ ID NO: 2881750 - RNA, 19 nt, Artificial Sequence
  Description of Artificial Sequence: Synthetic oligonucleotide
cacgccccaggcaccgagc

SEQ ID NO: 2881751 - RNA, 19 nt, Artificial Sequence
  Description of Artificial Sequence: Synthetic oligonucleotide
gaaugacaccgaccauucu

SEQ ID NO: 2881752 - RNA, 19 nt, Artificial Sequence
  Description of Artificial Sequence: Synthetic oligonucleotide
gccucgggucuguaggacc

SEQ ID NO: 2881753 - RNA, 19 nt, Artificial Sequence
  Description of Artificial Sequence: Synthetic oligonucleotide
guagcacacggaccaaaau

SEQ ID NO: 2881754 - RNA, 19 nt, Artificial Sequence
  Description of Artificial Sequence: Synthetic oligonucleotide
cggacuucucucucuuucc

SEQ ID NO: 2881755 - RNA, 19 nt, Artificial Sequence
  Description of Artificial Sequence: Synthetic oligonucleotide
ccgcucaauuuguuucugc

SEQ ID NO: 2881756 - RNA, 19 nt, Artificial Sequence
  Description of Artificial Sequence: Synthetic oligonucleotide
guccgagccgaagccucgg

SEQ ID NO: 2881757 - RNA, 19 nt, Artificial Sequence
  Description of Artificial Sequence: Synthetic oligonucleotide
gggcuucucggauggcgcc

SEQ ID NO: 2881758 - RNA, 19 nt, Artificial Sequence
  Description of Artificial Sequence: Synthetic oligonucleotide
gcccgagucgccaacgcug

SEQ ID NO: 2881759 - RNA, 19 nt, Artificial Sequence
  Description of Artificial Sequence: Synthetic oligonucleotide
cagcuaguuguucuuuagu

SEQ ID NO: 2881760 - RNA, 19 nt, Artificial Sequence
  Description of Artificial Sequence: Synthetic oligonucleotide
cuucucggauggcgccagc

SEQ ID NO: 2881761 - RNA, 19 nt, Artificial Sequence
  Description of Artificial Sequence: Synthetic oligonucleotide
cucuuuccgaaggccccac

SEQ ID NO: 2881762 - RNA, 19 nt, Artificial Sequence
  Description of Artificial Sequence: Synthetic oligonucleotide
cacucagaaugaacuacau

SEQ ID NO: 2881763 - RNA, 19 nt, Artificial Sequence
  Description of Artificial Sequence: Synthetic oligonucleotide
agucgccaacgcugagccu

SEQ ID NO: 2881764 - RNA, 19 nt, Artificial Sequence
  Description of Artificial Sequence: Synthetic oligonucleotide
cucuacagaaauggggaau

SEQ ID NO: 2881765 - RNA, 19 nt, Artificial Sequence
  Description of Artificial Sequence: Synthetic oligonucleotide
auggcgccagcgccagacu

SEQ ID NO: 2881766 - RNA, 19 nt, Artificial Sequence
  Description of Artificial Sequence: Synthetic oligonucleotide
cgcucaauuuguuucugca

SEQ ID NO: 2881767 - RNA, 19 nt, Artificial Sequence
  Description of Artificial Sequence: Synthetic oligonucleotide
acgcugagccugccauugu

SEQ ID NO: 2881768 - RNA, 19 nt, Artificial Sequence
  Description of Artificial Sequence: Synthetic oligonucleotide
ucgggucuguaggacccuc

SEQ ID NO: 2881769 - RNA, 19 nt, Artificial Sequence
  Description of Artificial Sequence: Synthetic oligonucleotide
cuccgugcuccccgacgag

SEQ ID NO: 2881770 - RNA, 19 nt, Artificial Sequence
  Description of Artificial Sequence: Synthetic oligonucleotide
guuucugcagacgcucuau

SEQ ID NO: 2881771 - RNA, 19 nt, Artificial Sequence
  Description of Artificial Sequence: Synthetic oligonucleotide
cuaucuccugcucguggua

SEQ ID NO: 2881772 - RNA, 19 nt, Artificial Sequence
  Description of Artificial Sequence: Synthetic oligonucleotide
cgugguacuggaucucauc

SEQ ID NO: 2881773 - RNA, 19 nt, Artificial Sequence
  Description of Artificial Sequence: Synthetic oligonucleotide
ggcagcuaguuguucuuua

SEQ ID NO: 2881774 - RNA, 19 nt, Artificial Sequence
  Description of Artificial Sequence: Synthetic oligonucleotide
gggaaugacaccgaccauu

SEQ ID NO: 2881775 - RNA, 19 nt, Artificial Sequence
  Description of Artificial Sequence: Synthetic oligonucleotide
ccauugucuccugcgcugc

SEQ ID NO: 2881776 - RNA, 19 nt, Artificial Sequence
  Description of Artificial Sequence: Synthetic oligonucleotide
agccgaagccucgggucug

SEQ ID NO: 2881777 - RNA, 19 nt, Artificial Sequence
  Description of Artificial Sequence: Synthetic oligonucleotide
gccccaccgggcuucucgg

SEQ ID NO: 2881778 - RNA, 19 nt, Artificial Sequence
  Description of Artificial Sequence: Synthetic oligonucleotide
ggcgccagcgccagacucc

SEQ ID NO: 2881779 - RNA, 19 nt, Artificial Sequence
  Description of Artificial Sequence: Synthetic oligonucleotide
ccgggcuucucggauggcg

SEQ ID NO: 2881780 - RNA, 19 nt, Artificial Sequence
  Description of Artificial Sequence: Synthetic oligonucleotide
guaggacccucacgcccca

SEQ ID NO: 2881781 - RNA, 19 nt, Artificial Sequence
  Description of Artificial Sequence: Synthetic oligonucleotide
gcgccagacuccgugcucc

SEQ ID NO: 2881782 - RNA, 19 nt, Artificial Sequence
  Description of Artificial Sequence: Synthetic oligonucleotide
aggcagcuaguuguucuuu

SEQ ID NO: 2881783 - RNA, 19 nt, Artificial Sequence
  Description of Artificial Sequence: Synthetic oligonucleotide
accgggcuucucggauggc

SEQ ID NO: 2881784 - RNA, 19 nt, Artificial Sequence
  Description of Artificial Sequence: Synthetic oligonucleotide
cgagccgaagccucggguc

SEQ ID NO: 2881785 - RNA, 19 nt, Artificial Sequence
  Description of Artificial Sequence: Synthetic oligonucleotide
gagccgagcccgagucgcc

SEQ ID NO: 2881786 - RNA, 19 nt, Artificial Sequence
  Description of Artificial Sequence: Synthetic oligonucleotide
cagacuccgugcuccccga

SEQ ID NO: 2881787 - RNA, 19 nt, Artificial Sequence
  Description of Artificial Sequence: Synthetic oligonucleotide
gcuucucggauggcgccag

SEQ ID NO: 2881788 - RNA, 19 nt, Artificial Sequence
  Description of Artificial Sequence: Synthetic oligonucleotide
cgggcuucucggauggcgc

SEQ ID NO: 2881789 - RNA, 19 nt, Artificial Sequence
  Description of Artificial Sequence: Synthetic oligonucleotide
uaggacccucacgccccag

SEQ ID NO: 2881790 - RNA, 19 nt, Artificial Sequence
  Description of Artificial Sequence: Synthetic oligonucleotide
gugucugacugcaugcauu

SEQ ID NO: 2881791 - RNA, 19 nt, Artificial Sequence
  Description of Artificial Sequence: Synthetic oligonucleotide
agccgagcccgagucgcca

SEQ ID NO: 2881792 - RNA, 19 nt, Artificial Sequence
  Description of Artificial Sequence: Synthetic oligonucleotide
cgaagccucgggucuguag

SEQ ID NO: 2881793 - RNA, 19 nt, Artificial Sequence
  Description of Artificial Sequence: Synthetic oligonucleotide
cgaccauucuguguguguc

SEQ ID NO: 2881794 - RNA, 19 nt, Artificial Sequence
  Description of Artificial Sequence: Synthetic oligonucleotide
agccugccauugucuccug

SEQ ID NO: 2881795 - RNA, 19 nt, Artificial Sequence
  Description of Artificial Sequence: Synthetic oligonucleotide
gcgccagcgccagacuccg

SEQ ID NO: 2881796 - RNA, 19 nt, Artificial Sequence
  Description of Artificial Sequence: Synthetic oligonucleotide
cgagucgccaacgcugagc

SEQ ID NO: 2881797 - RNA, 19 nt, Artificial Sequence
  Description of Artificial Sequence: Synthetic oligonucleotide
ccaccgggcuucucggaug

SEQ ID NO: 2881798 - RNA, 19 nt, Artificial Sequence
  Description of Artificial Sequence: Synthetic oligonucleotide
cuucggacuucucucucuu

SEQ ID NO: 2881799 - RNA, 19 nt, Artificial Sequence
  Description of Artificial Sequence: Synthetic oligonucleotide
cgagccgagcccgagucgc

SEQ ID NO: 2881800 - RNA, 19 nt, Artificial Sequence
  Description of Artificial Sequence: Synthetic oligonucleotide
gccgcucaauuuguuucug

SEQ ID NO: 2881801 - RNA, 19 nt, Artificial Sequence
  Description of Artificial Sequence: Synthetic oligonucleotide
ccucacgccccaggcaccg

SEQ ID NO: 2881802 - RNA, 19 nt, Artificial Sequence
  Description of Artificial Sequence: Synthetic oligonucleotide
ccgugcuccccgacgaguc

SEQ ID NO: 2881803 - RNA, 19 nt, Artificial Sequence
  Description of Artificial Sequence: Synthetic oligonucleotide
gccccaggcaccgagccga

SEQ ID NO: 2881804 - RNA, 19 nt, Artificial Sequence
  Description of Artificial Sequence: Synthetic oligonucleotide
gccugccauugucuccugc

SEQ ID NO: 2881805 - RNA, 19 nt, Artificial Sequence
  Description of Artificial Sequence: Synthetic oligonucleotide
gccaacgcugagccugcca

SEQ ID NO: 2881806 - RNA, 19 nt, Artificial Sequence
  Description of Artificial Sequence: Synthetic oligonucleotide
ccgagccgagcccgagucg

SEQ ID NO: 2881807 - RNA, 19 nt, Artificial Sequence
  Description of Artificial Sequence: Synthetic oligonucleotide
cccgagucgccaacgcuga

SEQ ID NO: 2881808 - RNA, 19 nt, Artificial Sequence
  Description of Artificial Sequence: Synthetic oligonucleotide
ccauucugugugugucuga

SEQ ID NO: 2881809 - RNA, 19 nt, Artificial Sequence
  Description of Artificial Sequence: Synthetic oligonucleotide
ggcuucucggauggcgcca

SEQ ID NO: 2881810 - RNA, 19 nt, Artificial Sequence
  Description of Artificial Sequence: Synthetic oligonucleotide
gcugagccugccauugucu

SEQ ID NO: 2881811 - RNA, 19 nt, Artificial Sequence
  Description of Artificial Sequence: Synthetic oligonucleotide
cauugucuccugcgcugcu

SEQ ID NO: 2881812 - RNA, 19 nt, Artificial Sequence
  Description of Artificial Sequence: Synthetic oligonucleotide
cgugcuccccgacgagucc

SEQ ID NO: 2881813 - RNA, 19 nt, Artificial Sequence
  Description of Artificial Sequence: Synthetic oligonucleotide
ccaacgcugagccugccau

SEQ ID NO: 2881814 - RNA, 19 nt, Artificial Sequence
  Description of Artificial Sequence: Synthetic oligonucleotide
ccucuucggacuucucucu

SEQ ID NO: 2881815 - RNA, 19 nt, Artificial Sequence
  Description of Artificial Sequence: Synthetic oligonucleotide
cgagcccgagucgccaacg

SEQ ID NO: 2881816 - RNA, 19 nt, Artificial Sequence
  Description of Artificial Sequence: Synthetic oligonucleotide
cagcgccagacuccgugcu

SEQ ID NO: 2881817 - RNA, 19 nt, Artificial Sequence
  Description of Artificial Sequence: Synthetic oligonucleotide
cccgacgaguccgagccga

SEQ ID NO: 2881818 - RNA, 19 nt, Artificial Sequence
  Description of Artificial Sequence: Synthetic oligonucleotide
gcaccgagccgagcccgag

SEQ ID NO: 2881819 - RNA, 19 nt, Artificial Sequence
  Description of Artificial Sequence: Synthetic oligonucleotide
caacgcugagccugccauu

SEQ ID NO: 2881820 - RNA, 19 nt, Artificial Sequence
  Description of Artificial Sequence: Synthetic oligonucleotide
caccgaccauucugugugu

SEQ ID NO: 2881821 - RNA, 19 nt, Artificial Sequence
  Description of Artificial Sequence: Synthetic oligonucleotide
caucuucaugguguuucuu

SEQ ID NO: 2881822 - RNA, 19 nt, Artificial Sequence
  Description of Artificial Sequence: Synthetic oligonucleotide
ccgagcccgagucgccaac

SEQ ID NO: 2881823 - RNA, 19 nt, Artificial Sequence
  Description of Artificial Sequence: Synthetic oligonucleotide
ccgagucgccaacgcugag

SEQ ID NO: 2881824 - RNA, 19 nt, Artificial Sequence
  Description of Artificial Sequence: Synthetic oligonucleotide
ccgaccauucugugugugu

SEQ ID NO: 2881825 - RNA, 19 nt, Artificial Sequence
  Description of Artificial Sequence: Synthetic oligonucleotide
ccccgacgaguccgagccg

SEQ ID NO: 2881826 - RNA, 19 nt, Artificial Sequence
  Description of Artificial Sequence: Synthetic oligonucleotide
cgccagacuccgugcuccc

SEQ ID NO: 2881827 - RNA, 19 nt, Artificial Sequence
  Description of Artificial Sequence: Synthetic oligonucleotide
gcuccccgacgaguccgag

SEQ ID NO: 2881828 - RNA, 19 nt, Artificial Sequence
  Description of Artificial Sequence: Synthetic oligonucleotide
caccgagccgagcccgagu

SEQ ID NO: 2881829 - RNA, 19 nt, Artificial Sequence
  Description of Artificial Sequence: Synthetic oligonucleotide
ggggaaugacaccgaccau

SEQ ID NO: 2881830 - RNA, 19 nt, Artificial Sequence
  Description of Artificial Sequence: Synthetic oligonucleotide
aggccccaccgggcuucuc

SEQ ID NO: 2881831 - RNA, 19 nt, Artificial Sequence
  Description of Artificial Sequence: Synthetic oligonucleotide
gcgauccucuucggacuuc

SEQ ID NO: 2881832 - RNA, 19 nt, Artificial Sequence
  Description of Artificial Sequence: Synthetic oligonucleotide
gccgagcccgagucgccaa

SEQ ID NO: 2881833 - RNA, 19 nt, Artificial Sequence
  Description of Artificial Sequence: Synthetic oligonucleotide
cggauggcgccagcgccag

SEQ ID NO: 2881834 - RNA, 19 nt, Artificial Sequence
  Description of Artificial Sequence: Synthetic oligonucleotide
gcacacggaccaaaauauu

SEQ ID NO: 2881835 - RNA, 19 nt, Artificial Sequence
  Description of Artificial Sequence: Synthetic oligonucleotide
cgggucuguaggacccuca

SEQ ID NO: 2881836 - RNA, 19 nt, Artificial Sequence
  Description of Artificial Sequence: Synthetic oligonucleotide
ggcaccgagccgagcccga

SEQ ID NO: 2881837 - RNA, 19 nt, Artificial Sequence
  Description of Artificial Sequence: Synthetic oligonucleotide
cucgggucuguaggacccu

SEQ ID NO: 2881838 - RNA, 19 nt, Artificial Sequence
  Description of Artificial Sequence: Synthetic oligonucleotide
ccgaaggccccaccgggcu

SEQ ID NO: 2881839 - RNA, 19 nt, Artificial Sequence
  Description of Artificial Sequence: Synthetic oligonucleotide
cucacgccccaggcaccga

SEQ ID NO: 2881840 - RNA, 19 nt, Artificial Sequence
  Description of Artificial Sequence: Synthetic oligonucleotide
ggauggcgccagcgccaga

SEQ ID NO: 2881841 - RNA, 19 nt, Artificial Sequence
  Description of Artificial Sequence: Synthetic oligonucleotide
cccaggcaccgagccgagc

SEQ ID NO: 2881842 - RNA, 19 nt, Artificial Sequence
  Description of Artificial Sequence: Synthetic oligonucleotide
ccgagccgaagccucgggu

SEQ ID NO: 2881843 - RNA, 19 nt, Artificial Sequence
  Description of Artificial Sequence: Synthetic oligonucleotide
ccugcucgugguacuggau

SEQ ID NO: 2881844 - RNA, 19 nt, Artificial Sequence
  Description of Artificial Sequence: Synthetic oligonucleotide
ccgacgaguccgagccgaa

SEQ ID NO: 2881845 - RNA, 19 nt, Artificial Sequence
  Description of Artificial Sequence: Synthetic oligonucleotide
cccaccgggcuucucggau

SEQ ID NO: 2881846 - RNA, 19 nt, Artificial Sequence
  Description of Artificial Sequence: Synthetic oligonucleotide
ccccaccgggcuucucgga

SEQ ID NO: 2881847 - RNA, 19 nt, Artificial Sequence
  Description of Artificial Sequence: Synthetic oligonucleotide
cgauccucuucggacuucu

SEQ ID NO: 2881848 - RNA, 19 nt, Artificial Sequence
  Description of Artificial Sequence: Synthetic oligonucleotide
gccgaagccucgggucugu

SEQ ID NO: 2881849 - RNA, 19 nt, Artificial Sequence
  Description of Artificial Sequence: Synthetic oligonucleotide
cgaguccgagccgaagccu

SEQ ID NO: 2881850 - RNA, 19 nt, Artificial Sequence
  Description of Artificial Sequence: Synthetic oligonucleotide
cggaaguagcgauccucuu

SEQ ID NO: 2881851 - RNA, 19 nt, Artificial Sequence
  Description of Artificial Sequence: Synthetic oligonucleotide
cgccaacgcugagccugcc

SEQ ID NO: 2881852 - RNA, 19 nt, Artificial Sequence
  Description of Artificial Sequence: Synthetic oligonucleotide
ccgaagccucgggucugua

SEQ ID NO: 2881853 - RNA, 19 nt, Artificial Sequence
  Description of Artificial Sequence: Synthetic oligonucleotide
cgaaggccccaccgggcuu

SEQ ID NO: 2881854 - RNA, 19 nt, Artificial Sequence
  Description of Artificial Sequence: Synthetic oligonucleotide
aaauaaauaaauaacaugu

SEQ ID NO: 2881855 - RNA, 19 nt, Artificial Sequence
  Description of Artificial Sequence: Synthetic oligonucleotide
uuuuaaaagacgaugucgg

SEQ ID NO: 2881856 - RNA, 19 nt, Artificial Sequence
  Description of Artificial Sequence: Synthetic oligonucleotide
aaauaaauaacauguggcu

SEQ ID NO: 2881857 - RNA, 19 nt, Artificial Sequence
  Description of Artificial Sequence: Synthetic oligonucleotide
uaaaagacgaugucggugg

SEQ ID NO: 2881858 - RNA, 19 nt, Artificial Sequence
  Description of Artificial Sequence: Synthetic oligonucleotide
cuuuuaaaagacgaugucg

SEQ ID NO: 2881859 - RNA, 19 nt, Artificial Sequence
  Description of Artificial Sequence: Synthetic oligonucleotide
uguggcaugccccugauca

SEQ ID NO: 2881860 - RNA, 19 nt, Artificial Sequence
  Description of Artificial Sequence: Synthetic oligonucleotide
uguggcuuuuaaaagacga

SEQ ID NO: 2881861 - RNA, 19 nt, Artificial Sequence
  Description of Artificial Sequence: Synthetic oligonucleotide
uaacauguggcuuuuaaaa

SEQ ID NO: 2881862 - RNA, 19 nt, Artificial Sequence
  Description of Artificial Sequence: Synthetic oligonucleotide
aguguaucuagcugggugg

SEQ ID NO: 2881863 - RNA, 19 nt, Artificial Sequence
  Description of Artificial Sequence: Synthetic oligonucleotide
ucaguccugagucacagcc

SEQ ID NO: 2881864 - RNA, 19 nt, Artificial Sequence
  Description of Artificial Sequence: Synthetic oligonucleotide
aauaacauguggcuuuuaa

SEQ ID NO: 2881865 - RNA, 19 nt, Artificial Sequence
  Description of Artificial Sequence: Synthetic oligonucleotide
ugcaacccucccaagaugg

SEQ ID NO: 2881866 - RNA, 19 nt, Artificial Sequence
  Description of Artificial Sequence: Synthetic oligonucleotide
agggaguguaucuagcugg

SEQ ID NO: 2881867 - RNA, 19 nt, Artificial Sequence
  Description of Artificial Sequence: Synthetic oligonucleotide
acaacagcagaccucgaac

SEQ ID NO: 2881868 - RNA, 19 nt, Artificial Sequence
  Description of Artificial Sequence: Synthetic oligonucleotide
aagacgaugucgguggugg

SEQ ID NO: 2881869 - RNA, 19 nt, Artificial Sequence
  Description of Artificial Sequence: Synthetic oligonucleotide
aguaccaaaauaaauaaau

SEQ ID NO: 2881870 - RNA, 19 nt, Artificial Sequence
  Description of Artificial Sequence: Synthetic oligonucleotide
auaaauaacauguggcuuu

SEQ ID NO: 2881871 - RNA, 19 nt, Artificial Sequence
  Description of Artificial Sequence: Synthetic oligonucleotide
uuaaaagacgaugucggug

SEQ ID NO: 2881872 - RNA, 19 nt, Artificial Sequence
  Description of Artificial Sequence: Synthetic oligonucleotide
uuuaacaacagcagaccuc

SEQ ID NO: 2881873 - RNA, 19 nt, Artificial Sequence
  Description of Artificial Sequence: Synthetic oligonucleotide
aauaaauaacauguggcuu

SEQ ID NO: 2881874 - RNA, 19 nt, Artificial Sequence
  Description of Artificial Sequence: Synthetic oligonucleotide
aacagcccaguccaggguc

SEQ ID NO: 2881875 - RNA, 19 nt, Artificial Sequence
  Description of Artificial Sequence: Synthetic oligonucleotide
accucgaacagcccagucc

SEQ ID NO: 2881876 - RNA, 19 nt, Artificial Sequence
  Description of Artificial Sequence: Synthetic oligonucleotide
ucuuuaacaacagcagacc

SEQ ID NO: 2881877 - RNA, 19 nt, Artificial Sequence
  Description of Artificial Sequence: Synthetic oligonucleotide
aacagcagaccucgaacag

SEQ ID NO: 2881878 - RNA, 19 nt, Artificial Sequence
  Description of Artificial Sequence: Synthetic oligonucleotide
acauguggcuuuuaaaaga

SEQ ID NO: 2881879 - RNA, 19 nt, Artificial Sequence
  Description of Artificial Sequence: Synthetic oligonucleotide
gaguguaucuagcugggug

SEQ ID NO: 2881880 - RNA, 19 nt, Artificial Sequence
  Description of Artificial Sequence: Synthetic oligonucleotide
gagucuuuaacaacagcag

SEQ ID NO: 2881881 - RNA, 19 nt, Artificial Sequence
  Description of Artificial Sequence: Synthetic oligonucleotide
aaggcaugcgcuaccaacg

SEQ ID NO: 2881882 - RNA, 19 nt, Artificial Sequence
  Description of Artificial Sequence: Synthetic oligonucleotide
ucccaagauggcaugagca

SEQ ID NO: 2881883 - RNA, 19 nt, Artificial Sequence
  Description of Artificial Sequence: Synthetic oligonucleotide
cauguggcuuuuaaaagac

SEQ ID NO: 2881884 - RNA, 19 nt, Artificial Sequence
  Description of Artificial Sequence: Synthetic oligonucleotide
caagauggcaugagcagcc

SEQ ID NO: 2881885 - RNA, 19 nt, Artificial Sequence
  Description of Artificial Sequence: Synthetic oligonucleotide
uggguggucaggaagugug

SEQ ID NO: 2881886 - RNA, 19 nt, Artificial Sequence
  Description of Artificial Sequence: Synthetic oligonucleotide
uggcuuucaguccugaguc

SEQ ID NO: 2881887 - RNA, 19 nt, Artificial Sequence
  Description of Artificial Sequence: Synthetic oligonucleotide
agucuuuaacaacagcaga

SEQ ID NO: 2881888 - RNA, 19 nt, Artificial Sequence
  Description of Artificial Sequence: Synthetic oligonucleotide
uuuaaaagacgaugucggu

SEQ ID NO: 2881889 - RNA, 19 nt, Artificial Sequence
  Description of Artificial Sequence: Synthetic oligonucleotide
aacaacagcagaccucgaa

SEQ ID NO: 2881890 - RNA, 19 nt, Artificial Sequence
  Description of Artificial Sequence: Synthetic oligonucleotide
gauggcaugagcagcccgg

SEQ ID NO: 2881891 - RNA, 19 nt, Artificial Sequence
  Description of Artificial Sequence: Synthetic oligonucleotide
gucuuuaacaacagcagac

SEQ ID NO: 2881892 - RNA, 19 nt, Artificial Sequence
  Description of Artificial Sequence: Synthetic oligonucleotide
ucaggugcaacccucccaa

SEQ ID NO: 2881893 - RNA, 19 nt, Artificial Sequence
  Description of Artificial Sequence: Synthetic oligonucleotide
auaacauguggcuuuuaaa

SEQ ID NO: 2881894 - RNA, 19 nt, Artificial Sequence
  Description of Artificial Sequence: Synthetic oligonucleotide
aaguguggguguggcaugc

SEQ ID NO: 2881895 - RNA, 19 nt, Artificial Sequence
  Description of Artificial Sequence: Synthetic oligonucleotide
uuucaguccugagucacag

SEQ ID NO: 2881896 - RNA, 19 nt, Artificial Sequence
  Description of Artificial Sequence: Synthetic oligonucleotide
ucggugguggcuuucaguc

SEQ ID NO: 2881897 - RNA, 19 nt, Artificial Sequence
  Description of Artificial Sequence: Synthetic oligonucleotide
uguggguguggcaugcccc

SEQ ID NO: 2881898 - RNA, 19 nt, Artificial Sequence
  Description of Artificial Sequence: Synthetic oligonucleotide
cagcagaccucgaacagcc

SEQ ID NO: 2881899 - RNA, 19 nt, Artificial Sequence
  Description of Artificial Sequence: Synthetic oligonucleotide
uccagggucaggugcaacc

SEQ ID NO: 2881900 - RNA, 19 nt, Artificial Sequence
  Description of Artificial Sequence: Synthetic oligonucleotide
guaggagggccccaagggg

SEQ ID NO: 2881901 - RNA, 19 nt, Artificial Sequence
  Description of Artificial Sequence: Synthetic oligonucleotide
acaguguuucucuguguag

SEQ ID NO: 2881902 - RNA, 19 nt, Artificial Sequence
  Description of Artificial Sequence: Synthetic oligonucleotide
aggcaugcgcuaccaacgc

SEQ ID NO: 2881903 - RNA, 19 nt, Artificial Sequence
  Description of Artificial Sequence: Synthetic oligonucleotide
gagggaguguaucuagcug

SEQ ID NO: 2881904 - RNA, 19 nt, Artificial Sequence
  Description of Artificial Sequence: Synthetic oligonucleotide
gguaggagggccccaaggg

SEQ ID NO: 2881905 - RNA, 19 nt, Artificial Sequence
  Description of Artificial Sequence: Synthetic oligonucleotide
acagccgagucuuuaacaa

SEQ ID NO: 2881906 - RNA, 19 nt, Artificial Sequence
  Description of Artificial Sequence: Synthetic oligonucleotide
uagcuggguggucaggaag

SEQ ID NO: 2881907 - RNA, 19 nt, Artificial Sequence
  Description of Artificial Sequence: Synthetic oligonucleotide
aguccugagucacagccga

SEQ ID NO: 2881908 - RNA, 19 nt, Artificial Sequence
  Description of Artificial Sequence: Synthetic oligonucleotide
aacgccuggcuccccuuac

SEQ ID NO: 2881909 - RNA, 19 nt, Artificial Sequence
  Description of Artificial Sequence: Synthetic oligonucleotide
aguguuucucuguguagcu

SEQ ID NO: 2881910 - RNA, 19 nt, Artificial Sequence
  Description of Artificial Sequence: Synthetic oligonucleotide
agguaggagggccccaagg

SEQ ID NO: 2881911 - RNA, 19 nt, Artificial Sequence
  Description of Artificial Sequence: Synthetic oligonucleotide
caguguuucucuguguagc

SEQ ID NO: 2881912 - RNA, 19 nt, Artificial Sequence
  Description of Artificial Sequence: Synthetic oligonucleotide
aaguaccaaaauaaauaaa

SEQ ID NO: 2881913 - RNA, 19 nt, Artificial Sequence
  Description of Artificial Sequence: Synthetic oligonucleotide
agauggcaugagcagcccg

SEQ ID NO: 2881914 - RNA, 19 nt, Artificial Sequence
  Description of Artificial Sequence: Synthetic oligonucleotide
aaaagacgaugucgguggu

SEQ ID NO: 2881915 - RNA, 19 nt, Artificial Sequence
  Description of Artificial Sequence: Synthetic oligonucleotide
ucuagcuggguggucagga

SEQ ID NO: 2881916 - RNA, 19 nt, Artificial Sequence
  Description of Artificial Sequence: Synthetic oligonucleotide
gcuaccaacgccuggcucc

SEQ ID NO: 2881917 - RNA, 19 nt, Artificial Sequence
  Description of Artificial Sequence: Synthetic oligonucleotide
ugagucacagccgagucuu

SEQ ID NO: 2881918 - RNA, 19 nt, Artificial Sequence
  Description of Artificial Sequence: Synthetic oligonucleotide
ccaaguaccaaaauaaaua

SEQ ID NO: 2881919 - RNA, 19 nt, Artificial Sequence
  Description of Artificial Sequence: Synthetic oligonucleotide
cuggagggaguguaucuag

SEQ ID NO: 2881920 - RNA, 19 nt, Artificial Sequence
  Description of Artificial Sequence: Synthetic oligonucleotide
uaucuagcuggguggucag

SEQ ID NO: 2881921 - RNA, 19 nt, Artificial Sequence
  Description of Artificial Sequence: Synthetic oligonucleotide
ugcgcuaccaacgccuggc

SEQ ID NO: 2881922 - RNA, 19 nt, Artificial Sequence
  Description of Artificial Sequence: Synthetic oligonucleotide
ucacagccgagucuuuaac

SEQ ID NO: 2881923 - RNA, 19 nt, Artificial Sequence
  Description of Artificial Sequence: Synthetic oligonucleotide
gaaguguggguguggcaug

SEQ ID NO: 2881924 - RNA, 19 nt, Artificial Sequence
  Description of Artificial Sequence: Synthetic oligonucleotide
aaagacgaugucgguggug

SEQ ID NO: 2881925 - RNA, 19 nt, Artificial Sequence
  Description of Artificial Sequence: Synthetic oligonucleotide
ccccugaucaucuugcccc

SEQ ID NO: 2881926 - RNA, 19 nt, Artificial Sequence
  Description of Artificial Sequence: Synthetic oligonucleotide
caacagcagaccucgaaca

SEQ ID NO: 2881927 - RNA, 19 nt, Artificial Sequence
  Description of Artificial Sequence: Synthetic oligonucleotide
ucaggaagugugggugugg

SEQ ID NO: 2881928 - RNA, 19 nt, Artificial Sequence
  Description of Artificial Sequence: Synthetic oligonucleotide
cagaccucgaacagcccag

SEQ ID NO: 2881929 - RNA, 19 nt, Artificial Sequence
  Description of Artificial Sequence: Synthetic oligonucleotide
aggcugagguaggagggcc

SEQ ID NO: 2881930 - RNA, 19 nt, Artificial Sequence
  Description of Artificial Sequence: Synthetic oligonucleotide
caguccugagucacagccg

SEQ ID NO: 2881931 - RNA, 19 nt, Artificial Sequence
  Description of Artificial Sequence: Synthetic oligonucleotide
agccgagucuuuaacaaca

SEQ ID NO: 2881932 - RNA, 19 nt, Artificial Sequence
  Description of Artificial Sequence: Synthetic oligonucleotide
uaaauaacauguggcuuuu

SEQ ID NO: 2881933 - RNA, 19 nt, Artificial Sequence
  Description of Artificial Sequence: Synthetic oligonucleotide
aggugcaacccucccaaga

SEQ ID NO: 2881934 - RNA, 19 nt, Artificial Sequence
  Description of Artificial Sequence: Synthetic oligonucleotide
agacgaugucggugguggc

SEQ ID NO: 2881935 - RNA, 19 nt, Artificial Sequence
  Description of Artificial Sequence: Synthetic oligonucleotide
guaucuagcugggugguca

SEQ ID NO: 2881936 - RNA, 19 nt, Artificial Sequence
  Description of Artificial Sequence: Synthetic oligonucleotide
cucccaagauggcaugagc

SEQ ID NO: 2881937 - RNA, 19 nt, Artificial Sequence
  Description of Artificial Sequence: Synthetic oligonucleotide
gcaugagcagcccggaugc

SEQ ID NO: 2881938 - RNA, 19 nt, Artificial Sequence
  Description of Artificial Sequence: Synthetic oligonucleotide
cgagucuuuaacaacagca

SEQ ID NO: 2881939 - RNA, 19 nt, Artificial Sequence
  Description of Artificial Sequence: Synthetic oligonucleotide
gcuuuuaaaagacgauguc

SEQ ID NO: 2881940 - RNA, 19 nt, Artificial Sequence
  Description of Artificial Sequence: Synthetic oligonucleotide
uuccccaggcugagguagg

SEQ ID NO: 2881941 - RNA, 19 nt, Artificial Sequence
  Description of Artificial Sequence: Synthetic oligonucleotide
caugccccugaucaucuug

SEQ ID NO: 2881942 - RNA, 19 nt, Artificial Sequence
  Description of Artificial Sequence: Synthetic oligonucleotide
ggcaugagcagcccggaug

SEQ ID NO: 2881943 - RNA, 19 nt, Artificial Sequence
  Description of Artificial Sequence: Synthetic oligonucleotide
gaugccuuccccaggcuga

SEQ ID NO: 2881944 - RNA, 19 nt, Artificial Sequence
  Description of Artificial Sequence: Synthetic oligonucleotide
auguggcuuuuaaaagacg

SEQ ID NO: 2881945 - RNA, 19 nt, Artificial Sequence
  Description of Artificial Sequence: Synthetic oligonucleotide
uccugagucacagccgagu

SEQ ID NO: 2881946 - RNA, 19 nt, Artificial Sequence
  Description of Artificial Sequence: Synthetic oligonucleotide
ugucggugguggcuuucag

SEQ ID NO: 2881947 - RNA, 19 nt, Artificial Sequence
  Description of Artificial Sequence: Synthetic oligonucleotide
agacaguguuucucugugu

SEQ ID NO: 2881948 - RNA, 19 nt, Artificial Sequence
  Description of Artificial Sequence: Synthetic oligonucleotide
acgccuggcuccccuuacc

SEQ ID NO: 2881949 - RNA, 19 nt, Artificial Sequence
  Description of Artificial Sequence: Synthetic oligonucleotide
uucaguccugagucacagc

SEQ ID NO: 2881950 - RNA, 19 nt, Artificial Sequence
  Description of Artificial Sequence: Synthetic oligonucleotide
aacccucccaagauggcau

SEQ ID NO: 2881951 - RNA, 19 nt, Artificial Sequence
  Description of Artificial Sequence: Synthetic oligonucleotide
ugagcagcccggaugccuu

SEQ ID NO: 2881952 - RNA, 19 nt, Artificial Sequence
  Description of Artificial Sequence: Synthetic oligonucleotide
cagccgagucuuuaacaac

SEQ ID NO: 2881953 - RNA, 19 nt, Artificial Sequence
  Description of Artificial Sequence: Synthetic oligonucleotide
cacagccgagucuuuaaca

SEQ ID NO: 2881954 - RNA, 19 nt, Artificial Sequence
  Description of Artificial Sequence: Synthetic oligonucleotide
cccaagauggcaugagcag

SEQ ID NO: 2881955 - RNA, 19 nt, Artificial Sequence
  Description of Artificial Sequence: Synthetic oligonucleotide
gacgggaggguuggucugg

SEQ ID NO: 2881956 - RNA, 19 nt, Artificial Sequence
  Description of Artificial Sequence: Synthetic oligonucleotide
caggaaguguggguguggc

SEQ ID NO: 2881957 - RNA, 19 nt, Artificial Sequence
  Description of Artificial Sequence: Synthetic oligonucleotide
guguggguguggcaugccc

SEQ ID NO: 2881958 - RNA, 19 nt, Artificial Sequence
  Description of Artificial Sequence: Synthetic oligonucleotide
guggcuuucaguccugagu

SEQ ID NO: 2881959 - RNA, 19 nt, Artificial Sequence
  Description of Artificial Sequence: Synthetic oligonucleotide
agggucaggugcaacccuc

SEQ ID NO: 2881960 - RNA, 19 nt, Artificial Sequence
  Description of Artificial Sequence: Synthetic oligonucleotide
caugcgcuaccaacgccug

SEQ ID NO: 2881961 - RNA, 19 nt, Artificial Sequence
  Description of Artificial Sequence: Synthetic oligonucleotide
gugcaacccucccaagaug

SEQ ID NO: 2881962 - RNA, 19 nt, Artificial Sequence
  Description of Artificial Sequence: Synthetic oligonucleotide
guagacaguguuucucugu

SEQ ID NO: 2881963 - RNA, 19 nt, Artificial Sequence
  Description of Artificial Sequence: Synthetic oligonucleotide
aguguggguguggcaugcc

SEQ ID NO: 2881964 - RNA, 19 nt, Artificial Sequence
  Description of Artificial Sequence: Synthetic oligonucleotide
augcgcuaccaacgccugg

SEQ ID NO: 2881965 - RNA, 19 nt, Artificial Sequence
  Description of Artificial Sequence: Synthetic oligonucleotide
ucuccuggagggaguguau

SEQ ID NO: 2881966 - RNA, 19 nt, Artificial Sequence
  Description of Artificial Sequence: Synthetic oligonucleotide
uaacaacagcagaccucga

SEQ ID NO: 2881967 - RNA, 19 nt, Artificial Sequence
  Description of Artificial Sequence: Synthetic oligonucleotide
gagguaggagggccccaag

SEQ ID NO: 2881968 - RNA, 19 nt, Artificial Sequence
  Description of Artificial Sequence: Synthetic oligonucleotide
cuuucaguccugagucaca

SEQ ID NO: 2881969 - RNA, 19 nt, Artificial Sequence
  Description of Artificial Sequence: Synthetic oligonucleotide
agcuggguggucaggaagu

SEQ ID NO: 2881970 - RNA, 19 nt, Artificial Sequence
  Description of Artificial Sequence: Synthetic oligonucleotide
ccaguccagggucaggugc

SEQ ID NO: 2881971 - RNA, 19 nt, Artificial Sequence
  Description of Artificial Sequence: Synthetic oligonucleotide
ccaagauggcaugagcagc

SEQ ID NO: 2881972 - RNA, 19 nt, Artificial Sequence
  Description of Artificial Sequence: Synthetic oligonucleotide
gggaguguaucuagcuggg

SEQ ID NO: 2881973 - RNA, 19 nt, Artificial Sequence
  Description of Artificial Sequence: Synthetic oligonucleotide
gucaggugcaacccuccca

SEQ ID NO: 2881974 - RNA, 19 nt, Artificial Sequence
  Description of Artificial Sequence: Synthetic oligonucleotide
ggcuuuuaaaagacgaugu

SEQ ID NO: 2881975 - RNA, 19 nt, Artificial Sequence
  Description of Artificial Sequence: Synthetic oligonucleotide
cuggcuccccuuacccagg

SEQ ID NO: 2881976 - RNA, 19 nt, Artificial Sequence
  Description of Artificial Sequence: Synthetic oligonucleotide
agcagcccggaugccuucc

SEQ ID NO: 2881977 - RNA, 19 nt, Artificial Sequence
  Description of Artificial Sequence: Synthetic oligonucleotide
aggaaguguggguguggca

SEQ ID NO: 2881978 - RNA, 19 nt, Artificial Sequence
  Description of Artificial Sequence: Synthetic oligonucleotide
cuaccaacgccuggcuccc

SEQ ID NO: 2881979 - RNA, 19 nt, Artificial Sequence
  Description of Artificial Sequence: Synthetic oligonucleotide
ugagguaggagggccccaa

SEQ ID NO: 2881980 - RNA, 19 nt, Artificial Sequence
  Description of Artificial Sequence: Synthetic oligonucleotide
ggaugccuuccccaggcug

SEQ ID NO: 2881981 - RNA, 19 nt, Artificial Sequence
  Description of Artificial Sequence: Synthetic oligonucleotide
augagcagcccggaugccu

SEQ ID NO: 2881982 - RNA, 19 nt, Artificial Sequence
  Description of Artificial Sequence: Synthetic oligonucleotide
ccuggcuccccuuacccag

SEQ ID NO: 2881983 - RNA, 19 nt, Artificial Sequence
  Description of Artificial Sequence: Synthetic oligonucleotide
cuuacccaggucuccugga

SEQ ID NO: 2881984 - RNA, 19 nt, Artificial Sequence
  Description of Artificial Sequence: Synthetic oligonucleotide
aaauaacauguggcuuuua

SEQ ID NO: 2881985 - RNA, 19 nt, Artificial Sequence
  Description of Artificial Sequence: Synthetic oligonucleotide
gucacagccgagucuuuaa

SEQ ID NO: 2881986 - RNA, 19 nt, Artificial Sequence
  Description of Artificial Sequence: Synthetic oligonucleotide
agcccggaugccuucccca

SEQ ID NO: 2881987 - RNA, 19 nt, Artificial Sequence
  Description of Artificial Sequence: Synthetic oligonucleotide
uggcaugccccugaucauc

SEQ ID NO: 2881988 - RNA, 19 nt, Artificial Sequence
  Description of Artificial Sequence: Synthetic oligonucleotide
accaacgccuggcuccccu

SEQ ID NO: 2881989 - RNA, 19 nt, Artificial Sequence
  Description of Artificial Sequence: Synthetic oligonucleotide
gucaggaagugugggugug

SEQ ID NO: 2881990 - RNA, 19 nt, Artificial Sequence
  Description of Artificial Sequence: Synthetic oligonucleotide
uguaucuagcugggugguc

SEQ ID NO: 2881991 - RNA, 19 nt, Artificial Sequence
  Description of Artificial Sequence: Synthetic oligonucleotide
gcagaccucgaacagccca

SEQ ID NO: 2881992 - RNA, 19 nt, Artificial Sequence
  Description of Artificial Sequence: Synthetic oligonucleotide
ccuuacccaggucuccugg

SEQ ID NO: 2881993 - RNA, 19 nt, Artificial Sequence
  Description of Artificial Sequence: Synthetic oligonucleotide
cgaacagcccaguccaggg

SEQ ID NO: 2881994 - RNA, 19 nt, Artificial Sequence
  Description of Artificial Sequence: Synthetic oligonucleotide
cucgaacagcccaguccag

SEQ ID NO: 2881995 - RNA, 19 nt, Artificial Sequence
  Description of Artificial Sequence: Synthetic oligonucleotide
cuccccuuacccaggucuc

SEQ ID NO: 2881996 - RNA, 19 nt, Artificial Sequence
  Description of Artificial Sequence: Synthetic oligonucleotide
aucuagcuggguggucagg

SEQ ID NO: 2881997 - RNA, 19 nt, Artificial Sequence
  Description of Artificial Sequence: Synthetic oligonucleotide
uccccuuacccaggucucc

SEQ ID NO: 2881998 - RNA, 19 nt, Artificial Sequence
  Description of Artificial Sequence: Synthetic oligonucleotide
gcuuucaguccugagucac

SEQ ID NO: 2881999 - RNA, 19 nt, Artificial Sequence
  Description of Artificial Sequence: Synthetic oligonucleotide
ccucgaacagcccagucca

SEQ ID NO: 2882000 - RNA, 19 nt, Artificial Sequence
  Description of Artificial Sequence: Synthetic oligonucleotide
agcagaccucgaacagccc

SEQ ID NO: 2882001 - RNA, 19 nt, Artificial Sequence
  Description of Artificial Sequence: Synthetic oligonucleotide
acccucccaagauggcaug

SEQ ID NO: 2882002 - RNA, 19 nt, Artificial Sequence
  Description of Artificial Sequence: Synthetic oligonucleotide
gaccucgaacagcccaguc

SEQ ID NO: 2882003 - RNA, 19 nt, Artificial Sequence
  Description of Artificial Sequence: Synthetic oligonucleotide
ccgagucuuuaacaacagc

SEQ ID NO: 2882004 - RNA, 19 nt, Artificial Sequence
  Description of Artificial Sequence: Synthetic oligonucleotide
caacccucccaagauggca

SEQ ID NO: 2882005 - RNA, 19 nt, Artificial Sequence
  Description of Artificial Sequence: Synthetic oligonucleotide
ggcaugcgcuaccaacgcc

SEQ ID NO: 2882006 - RNA, 19 nt, Artificial Sequence
  Description of Artificial Sequence: Synthetic oligonucleotide
gacgaugucggugguggcu

SEQ ID NO: 2882007 - RNA, 19 nt, Artificial Sequence
  Description of Artificial Sequence: Synthetic oligonucleotide
acgaugucggugguggcuu

SEQ ID NO: 2882008 - RNA, 19 nt, Artificial Sequence
  Description of Artificial Sequence: Synthetic oligonucleotide
ggucaggugcaacccuccc

SEQ ID NO: 2882009 - RNA, 19 nt, Artificial Sequence
  Description of Artificial Sequence: Synthetic oligonucleotide
uggcuccccuuacccaggu

SEQ ID NO: 2882010 - RNA, 19 nt, Artificial Sequence
  Description of Artificial Sequence: Synthetic oligonucleotide
agucacagccgagucuuua

SEQ ID NO: 2882011 - RNA, 19 nt, Artificial Sequence
  Description of Artificial Sequence: Synthetic oligonucleotide
uggcaugagcagcccggau

SEQ ID NO: 2882012 - RNA, 19 nt, Artificial Sequence
  Description of Artificial Sequence: Synthetic oligonucleotide
ggagggaguguaucuagcu

SEQ ID NO: 2882013 - RNA, 19 nt, Artificial Sequence
  Description of Artificial Sequence: Synthetic oligonucleotide
caggugcaacccucccaag

SEQ ID NO: 2882014 - RNA, 19 nt, Artificial Sequence
  Description of Artificial Sequence: Synthetic oligonucleotide
gaugucggugguggcuuuc

SEQ ID NO: 2882015 - RNA, 19 nt, Artificial Sequence
  Description of Artificial Sequence: Synthetic oligonucleotide
ccggaugccuuccccaggc

SEQ ID NO: 2882016 - RNA, 19 nt, Artificial Sequence
  Description of Artificial Sequence: Synthetic oligonucleotide
auggcaugagcagcccgga

SEQ ID NO: 2882017 - RNA, 19 nt, Artificial Sequence
  Description of Artificial Sequence: Synthetic oligonucleotide
cuccuggagggaguguauc

SEQ ID NO: 2882018 - RNA, 19 nt, Artificial Sequence
  Description of Artificial Sequence: Synthetic oligonucleotide
augucggugguggcuuuca

SEQ ID NO: 2882019 - RNA, 19 nt, Artificial Sequence
  Description of Artificial Sequence: Synthetic oligonucleotide
ggaaguguggguguggcau

SEQ ID NO: 2882020 - RNA, 19 nt, Artificial Sequence
  Description of Artificial Sequence: Synthetic oligonucleotide
acgggaggguuggucuggg

SEQ ID NO: 2882021 - RNA, 19 nt, Artificial Sequence
  Description of Artificial Sequence: Synthetic oligonucleotide
ggugcaacccucccaagau

SEQ ID NO: 2882022 - RNA, 19 nt, Artificial Sequence
  Description of Artificial Sequence: Synthetic oligonucleotide
augccuuccccaggcugag

SEQ ID NO: 2882023 - RNA, 19 nt, Artificial Sequence
  Description of Artificial Sequence: Synthetic oligonucleotide
gcuccccuuacccaggucu

SEQ ID NO: 2882024 - RNA, 19 nt, Artificial Sequence
  Description of Artificial Sequence: Synthetic oligonucleotide
cagcccggaugccuucccc

SEQ ID NO: 2882025 - RNA, 19 nt, Artificial Sequence
  Description of Artificial Sequence: Synthetic oligonucleotide
gccgagucuuuaacaacag

SEQ ID NO: 2882026 - RNA, 19 nt, Artificial Sequence
  Description of Artificial Sequence: Synthetic oligonucleotide
ggacgggaggguuggucug

SEQ ID NO: 2882027 - RNA, 19 nt, Artificial Sequence
  Description of Artificial Sequence: Synthetic oligonucleotide
cuagcuggguggucaggaa

SEQ ID NO: 2882028 - RNA, 19 nt, Artificial Sequence
  Description of Artificial Sequence: Synthetic oligonucleotide
caugagcagcccggaugcc

SEQ ID NO: 2882029 - RNA, 19 nt, Artificial Sequence
  Description of Artificial Sequence: Synthetic oligonucleotide
gucuccuggagggagugua

SEQ ID NO: 2882030 - RNA, 19 nt, Artificial Sequence
  Description of Artificial Sequence: Synthetic oligonucleotide
agaccucgaacagcccagu

SEQ ID NO: 2882031 - RNA, 19 nt, Artificial Sequence
  Description of Artificial Sequence: Synthetic oligonucleotide
ccagggucaggugcaaccc

SEQ ID NO: 2882032 - RNA, 19 nt, Artificial Sequence
  Description of Artificial Sequence: Synthetic oligonucleotide
gucggugguggcuuucagu

SEQ ID NO: 2882033 - RNA, 19 nt, Artificial Sequence
  Description of Artificial Sequence: Synthetic oligonucleotide
gcugagguaggagggcccc

SEQ ID NO: 2882034 - RNA, 19 nt, Artificial Sequence
  Description of Artificial Sequence: Synthetic oligonucleotide
uccccaggcugagguagga

SEQ ID NO: 2882035 - RNA, 19 nt, Artificial Sequence
  Description of Artificial Sequence: Synthetic oligonucleotide
ugccuuccccaggcugagg

SEQ ID NO: 2882036 - RNA, 19 nt, Artificial Sequence
  Description of Artificial Sequence: Synthetic oligonucleotide
ggcuuucaguccugaguca

SEQ ID NO: 2882037 - RNA, 19 nt, Artificial Sequence
  Description of Artificial Sequence: Synthetic oligonucleotide
guggguguggcaugccccu

SEQ ID NO: 2882038 - RNA, 19 nt, Artificial Sequence
  Description of Artificial Sequence: Synthetic oligonucleotide
agcccaguccagggucagg

SEQ ID NO: 2882039 - RNA, 19 nt, Artificial Sequence
  Description of Artificial Sequence: Synthetic oligonucleotide
ccaggucuccuggagggag

SEQ ID NO: 2882040 - RNA, 19 nt, Artificial Sequence
  Description of Artificial Sequence: Synthetic oligonucleotide
gcccggaugccuuccccag

SEQ ID NO: 2882041 - RNA, 19 nt, Artificial Sequence
  Description of Artificial Sequence: Synthetic oligonucleotide
gagcagcccggaugccuuc

SEQ ID NO: 2882042 - RNA, 19 nt, Artificial Sequence
  Description of Artificial Sequence: Synthetic oligonucleotide
guccugagucacagccgag

SEQ ID NO: 2882043 - RNA, 19 nt, Artificial Sequence
  Description of Artificial Sequence: Synthetic oligonucleotide
gggacgggaggguuggucu

SEQ ID NO: 2882044 - RNA, 19 nt, Artificial Sequence
  Description of Artificial Sequence: Synthetic oligonucleotide
guguaucuagcuggguggu

SEQ ID NO: 2882045 - RNA, 19 nt, Artificial Sequence
  Description of Artificial Sequence: Synthetic oligonucleotide
gggucaggugcaacccucc

SEQ ID NO: 2882046 - RNA, 19 nt, Artificial Sequence
  Description of Artificial Sequence: Synthetic oligonucleotide
ggucaggaagugugggugu

SEQ ID NO: 2882047 - RNA, 19 nt, Artificial Sequence
  Description of Artificial Sequence: Synthetic oligonucleotide
ggcugagguaggagggccc

SEQ ID NO: 2882048 - RNA, 19 nt, Artificial Sequence
  Description of Artificial Sequence: Synthetic oligonucleotide
ccccaaguaccaaaauaaa

SEQ ID NO: 2882049 - RNA, 19 nt, Artificial Sequence
  Description of Artificial Sequence: Synthetic oligonucleotide
ccucccaagauggcaugag

SEQ ID NO: 2882050 - RNA, 19 nt, Artificial Sequence
  Description of Artificial Sequence: Synthetic oligonucleotide
gcaugcgcuaccaacgccu

SEQ ID NO: 2882051 - RNA, 19 nt, Artificial Sequence
  Description of Artificial Sequence: Synthetic oligonucleotide
guguggcaugccccugauc

SEQ ID NO: 2882052 - RNA, 19 nt, Artificial Sequence
  Description of Artificial Sequence: Synthetic oligonucleotide
gcuggguggucaggaagug

SEQ ID NO: 2882053 - RNA, 19 nt, Artificial Sequence
  Description of Artificial Sequence: Synthetic oligonucleotide
gcaacccucccaagauggc

SEQ ID NO: 2882054 - RNA, 19 nt, Artificial Sequence
  Description of Artificial Sequence: Synthetic oligonucleotide
aguccagggucaggugcaa

SEQ ID NO: 2882055 - RNA, 19 nt, Artificial Sequence
  Description of Artificial Sequence: Synthetic oligonucleotide
cagcccaguccagggucag

SEQ ID NO: 2882056 - RNA, 19 nt, Artificial Sequence
  Description of Artificial Sequence: Synthetic oligonucleotide
cccggaugccuuccccagg

SEQ ID NO: 2882057 - RNA, 19 nt, Artificial Sequence
  Description of Artificial Sequence: Synthetic oligonucleotide
gccuuccccaggcugaggu

SEQ ID NO: 2882058 - RNA, 19 nt, Artificial Sequence
  Description of Artificial Sequence: Synthetic oligonucleotide
guccagggucaggugcaac

SEQ ID NO: 2882059 - RNA, 19 nt, Artificial Sequence
  Description of Artificial Sequence: Synthetic oligonucleotide
gcagcccggaugccuuccc

SEQ ID NO: 2882060 - RNA, 19 nt, Artificial Sequence
  Description of Artificial Sequence: Synthetic oligonucleotide
cccuuacccaggucuccug

SEQ ID NO: 2882061 - RNA, 19 nt, Artificial Sequence
  Description of Artificial Sequence: Synthetic oligonucleotide
cgccuggcuccccuuaccc

SEQ ID NO: 2882062 - RNA, 19 nt, Artificial Sequence
  Description of Artificial Sequence: Synthetic oligonucleotide
cccaguccagggucaggug

SEQ ID NO: 2882063 - RNA, 19 nt, Artificial Sequence
  Description of Artificial Sequence: Synthetic oligonucleotide
gccuggcuccccuuaccca

SEQ ID NO: 2882064 - RNA, 19 nt, Artificial Sequence
  Description of Artificial Sequence: Synthetic oligonucleotide
guggcaugccccugaucau

SEQ ID NO: 2882065 - RNA, 19 nt, Artificial Sequence
  Description of Artificial Sequence: Synthetic oligonucleotide
ggggacgggaggguugguc

SEQ ID NO: 2882066 - RNA, 19 nt, Artificial Sequence
  Description of Artificial Sequence: Synthetic oligonucleotide
cugagguaggagggcccca

SEQ ID NO: 2882067 - RNA, 19 nt, Artificial Sequence
  Description of Artificial Sequence: Synthetic oligonucleotide
caacgccuggcuccccuua

SEQ ID NO: 2882068 - RNA, 19 nt, Artificial Sequence
  Description of Artificial Sequence: Synthetic oligonucleotide
gggguuggccuggaggcaa

SEQ ID NO: 2882069 - RNA, 19 nt, Artificial Sequence
  Description of Artificial Sequence: Synthetic oligonucleotide
ggcaugccccugaucaucu

SEQ ID NO: 2882070 - RNA, 19 nt, Artificial Sequence
  Description of Artificial Sequence: Synthetic oligonucleotide
cuggguggucaggaagugu

SEQ ID NO: 2882071 - RNA, 19 nt, Artificial Sequence
  Description of Artificial Sequence: Synthetic oligonucleotide
cgccccaaguaccaaaaua

SEQ ID NO: 2882072 - RNA, 19 nt, Artificial Sequence
  Description of Artificial Sequence: Synthetic oligonucleotide
cccgccccaaguaccaaaa

SEQ ID NO: 2882073 - RNA, 19 nt, Artificial Sequence
  Description of Artificial Sequence: Synthetic oligonucleotide
ccuggagggaguguaucua

SEQ ID NO: 2882074 - RNA, 19 nt, Artificial Sequence
  Description of Artificial Sequence: Synthetic oligonucleotide
gcccaguccagggucaggu

SEQ ID NO: 2882075 - RNA, 19 nt, Artificial Sequence
  Description of Artificial Sequence: Synthetic oligonucleotide
ggaguguaucuagcugggu

SEQ ID NO: 2882076 - RNA, 19 nt, Artificial Sequence
  Description of Artificial Sequence: Synthetic oligonucleotide
cgcuaccaacgccuggcuc

SEQ ID NO: 2882077 - RNA, 19 nt, Artificial Sequence
  Description of Artificial Sequence: Synthetic oligonucleotide
gguguggcaugccccugau

SEQ ID NO: 2882078 - RNA, 19 nt, Artificial Sequence
  Description of Artificial Sequence: Synthetic oligonucleotide
ggcuccccuuacccagguc

SEQ ID NO: 2882079 - RNA, 19 nt, Artificial Sequence
  Description of Artificial Sequence: Synthetic oligonucleotide
cgggaggguuggucugggg

SEQ ID NO: 2882080 - RNA, 19 nt, Artificial Sequence
  Description of Artificial Sequence: Synthetic oligonucleotide
cccucccaagauggcauga

SEQ ID NO: 2882081 - RNA, 19 nt, Artificial Sequence
  Description of Artificial Sequence: Synthetic oligonucleotide
gagucacagccgagucuuu

SEQ ID NO: 2882082 - RNA, 19 nt, Artificial Sequence
  Description of Artificial Sequence: Synthetic oligonucleotide
ccuuccccaggcugaggua

SEQ ID NO: 2882083 - RNA, 19 nt, Artificial Sequence
  Description of Artificial Sequence: Synthetic oligonucleotide
ccccgccccaaguaccaaa

SEQ ID NO: 2882084 - RNA, 19 nt, Artificial Sequence
  Description of Artificial Sequence: Synthetic oligonucleotide
gcgcuaccaacgccuggcu

SEQ ID NO: 2882085 - RNA, 19 nt, Artificial Sequence
  Description of Artificial Sequence: Synthetic oligonucleotide
cccaggucuccuggaggga

SEQ ID NO: 2882086 - RNA, 19 nt, Artificial Sequence
  Description of Artificial Sequence: Synthetic oligonucleotide
ccccuuacccaggucuccu

SEQ ID NO: 2882087 - RNA, 19 nt, Artificial Sequence
  Description of Artificial Sequence: Synthetic oligonucleotide
gcaugccccugaucaucuu

SEQ ID NO: 2882088 - RNA, 19 nt, Artificial Sequence
  Description of Artificial Sequence: Synthetic oligonucleotide
ccaacgccuggcuccccuu

SEQ ID NO: 2882089 - RNA, 19 nt, Artificial Sequence
  Description of Artificial Sequence: Synthetic oligonucleotide
ccgccccaaguaccaaaau

SEQ ID NO: 2882090 - RNA, 19 nt, Artificial Sequence
  Description of Artificial Sequence: Synthetic oligonucleotide
cggaugccuuccccaggcu

SEQ ID NO: 2882091 - RNA, 19 nt, Artificial Sequence
  Description of Artificial Sequence: Synthetic oligonucleotide
cgaugucggugguggcuuu

SEQ ID NO: 2882092 - RNA, 19 nt, Artificial Sequence
  Description of Artificial Sequence: Synthetic oligonucleotide
aaaacuaccacugugaugg

SEQ ID NO: 2882093 - RNA, 19 nt, Artificial Sequence
  Description of Artificial Sequence: Synthetic oligonucleotide
agaaauucaaaucaguagc

SEQ ID NO: 2882094 - RNA, 19 nt, Artificial Sequence
  Description of Artificial Sequence: Synthetic oligonucleotide
uguaaaaucaacauuaaga

SEQ ID NO: 2882095 - RNA, 19 nt, Artificial Sequence
  Description of Artificial Sequence: Synthetic oligonucleotide
uaaaacaucaaaaugaggu

SEQ ID NO: 2882096 - RNA, 19 nt, Artificial Sequence
  Description of Artificial Sequence: Synthetic oligonucleotide
aacauuaagaguauguugc

SEQ ID NO: 2882097 - RNA, 19 nt, Artificial Sequence
  Description of Artificial Sequence: Synthetic oligonucleotide
aaguugaggaauuuuauac

SEQ ID NO: 2882098 - RNA, 19 nt, Artificial Sequence
  Description of Artificial Sequence: Synthetic oligonucleotide
uuuuauacaaauaaacgug

SEQ ID NO: 2882099 - RNA, 19 nt, Artificial Sequence
  Description of Artificial Sequence: Synthetic oligonucleotide
aauuuuauacaaauaaacg

SEQ ID NO: 2882100 - RNA, 19 nt, Artificial Sequence
  Description of Artificial Sequence: Synthetic oligonucleotide
agaacaaagacuuuaggac

SEQ ID NO: 2882101 - RNA, 19 nt, Artificial Sequence
  Description of Artificial Sequence: Synthetic oligonucleotide
uuuauacaaauaaacgugg

SEQ ID NO: 2882102 - RNA, 19 nt, Artificial Sequence
  Description of Artificial Sequence: Synthetic oligonucleotide
guaaaaucaacauuaagag

SEQ ID NO: 2882103 - RNA, 19 nt, Artificial Sequence
  Description of Artificial Sequence: Synthetic oligonucleotide
uauuguaaaaucaacauua

SEQ ID NO: 2882104 - RNA, 19 nt, Artificial Sequence
  Description of Artificial Sequence: Synthetic oligonucleotide
auuuuauacaaauaaacgu

SEQ ID NO: 2882105 - RNA, 19 nt, Artificial Sequence
  Description of Artificial Sequence: Synthetic oligonucleotide
uuuauuuacaaacucugug

SEQ ID NO: 2882106 - RNA, 19 nt, Artificial Sequence
  Description of Artificial Sequence: Synthetic oligonucleotide
aaaacaucaaaaugagguc

SEQ ID NO: 2882107 - RNA, 19 nt, Artificial Sequence
  Description of Artificial Sequence: Synthetic oligonucleotide
aaaaucaacauuaagagua

SEQ ID NO: 2882108 - RNA, 19 nt, Artificial Sequence
  Description of Artificial Sequence: Synthetic oligonucleotide
aagaacaaagacuuuagga

SEQ ID NO: 2882109 - RNA, 19 nt, Artificial Sequence
  Description of Artificial Sequence: Synthetic oligonucleotide
aauaccuugcauuucaaga

SEQ ID NO: 2882110 - RNA, 19 nt, Artificial Sequence
  Description of Artificial Sequence: Synthetic oligonucleotide
uauacaaauaaacgugggg

SEQ ID NO: 2882111 - RNA, 19 nt, Artificial Sequence
  Description of Artificial Sequence: Synthetic oligonucleotide
uugcauuucaagaacaaag

SEQ ID NO: 2882112 - RNA, 19 nt, Artificial Sequence
  Description of Artificial Sequence: Synthetic oligonucleotide
aauaaaacgaacggguuuc

SEQ ID NO: 2882113 - RNA, 19 nt, Artificial Sequence
  Description of Artificial Sequence: Synthetic oligonucleotide
uuucuuaauaaauaacccc

SEQ ID NO: 2882114 - RNA, 19 nt, Artificial Sequence
  Description of Artificial Sequence: Synthetic oligonucleotide
ucauauuguaaaaucaaca

SEQ ID NO: 2882115 - RNA, 19 nt, Artificial Sequence
  Description of Artificial Sequence: Synthetic oligonucleotide
aaugaggucauccgcaaag

SEQ ID NO: 2882116 - RNA, 19 nt, Artificial Sequence
  Description of Artificial Sequence: Synthetic oligonucleotide
gacaccuuuauuuacaaac

SEQ ID NO: 2882117 - RNA, 19 nt, Artificial Sequence
  Description of Artificial Sequence: Synthetic oligonucleotide
cuuucuuaauaaauaaccc

SEQ ID NO: 2882118 - RNA, 19 nt, Artificial Sequence
  Description of Artificial Sequence: Synthetic oligonucleotide
ucuucauauuguaaaauca

SEQ ID NO: 2882119 - RNA, 19 nt, Artificial Sequence
  Description of Artificial Sequence: Synthetic oligonucleotide
aguagcuuaauuuaacuga

SEQ ID NO: 2882120 - RNA, 19 nt, Artificial Sequence
  Description of Artificial Sequence: Synthetic oligonucleotide
aggaauuuuauacaaauaa

SEQ ID NO: 2882121 - RNA, 19 nt, Artificial Sequence
  Description of Artificial Sequence: Synthetic oligonucleotide
uuauuuacaaacucugugu

SEQ ID NO: 2882122 - RNA, 19 nt, Artificial Sequence
  Description of Artificial Sequence: Synthetic oligonucleotide
uuauacaaauaaacguggg

SEQ ID NO: 2882123 - RNA, 19 nt, Artificial Sequence
  Description of Artificial Sequence: Synthetic oligonucleotide
uuaaaacaucaaaaugagg

SEQ ID NO: 2882124 - RNA, 19 nt, Artificial Sequence
  Description of Artificial Sequence: Synthetic oligonucleotide
aaucucuucauauuguaaa

SEQ ID NO: 2882125 - RNA, 19 nt, Artificial Sequence
  Description of Artificial Sequence: Synthetic oligonucleotide
aaaucaguagcuuaauuua

SEQ ID NO: 2882126 - RNA, 19 nt, Artificial Sequence
  Description of Artificial Sequence: Synthetic oligonucleotide
aucaaaaugaggucauccg

SEQ ID NO: 2882127 - RNA, 19 nt, Artificial Sequence
  Description of Artificial Sequence: Synthetic oligonucleotide
aauaguccuuaauucaucu

SEQ ID NO: 2882128 - RNA, 19 nt, Artificial Sequence
  Description of Artificial Sequence: Synthetic oligonucleotide
ucaagaacaaagacuuuag

SEQ ID NO: 2882129 - RNA, 19 nt, Artificial Sequence
  Description of Artificial Sequence: Synthetic oligonucleotide
aaacgaacggguuucugag

SEQ ID NO: 2882130 - RNA, 19 nt, Artificial Sequence
  Description of Artificial Sequence: Synthetic oligonucleotide
ucaaaaugaggucauccgc

SEQ ID NO: 2882131 - RNA, 19 nt, Artificial Sequence
  Description of Artificial Sequence: Synthetic oligonucleotide
aaagucugaaaaguugagg

SEQ ID NO: 2882132 - RNA, 19 nt, Artificial Sequence
  Description of Artificial Sequence: Synthetic oligonucleotide
aaaacgaacggguuucuga

SEQ ID NO: 2882133 - RNA, 19 nt, Artificial Sequence
  Description of Artificial Sequence: Synthetic oligonucleotide
ugcaguuuucacaacuggg

SEQ ID NO: 2882134 - RNA, 19 nt, Artificial Sequence
  Description of Artificial Sequence: Synthetic oligonucleotide
auuuacaaacucugugucg

SEQ ID NO: 2882135 - RNA, 19 nt, Artificial Sequence
  Description of Artificial Sequence: Synthetic oligonucleotide
aaacaucaaaaugagguca

SEQ ID NO: 2882136 - RNA, 19 nt, Artificial Sequence
  Description of Artificial Sequence: Synthetic oligonucleotide
agauacuuuaaacacauuu

SEQ ID NO: 2882137 - RNA, 19 nt, Artificial Sequence
  Description of Artificial Sequence: Synthetic oligonucleotide
uucauauuguaaaaucaac

SEQ ID NO: 2882138 - RNA, 19 nt, Artificial Sequence
  Description of Artificial Sequence: Synthetic oligonucleotide
uaaguugcaguuuucacaa

SEQ ID NO: 2882139 - RNA, 19 nt, Artificial Sequence
  Description of Artificial Sequence: Synthetic oligonucleotide
aaauaaaacgaacggguuu

SEQ ID NO: 2882140 - RNA, 19 nt, Artificial Sequence
  Description of Artificial Sequence: Synthetic oligonucleotide
aauucaaaucaguagcuua

SEQ ID NO: 2882141 - RNA, 19 nt, Artificial Sequence
  Description of Artificial Sequence: Synthetic oligonucleotide
uuuugcagcguccacauau

SEQ ID NO: 2882142 - RNA, 19 nt, Artificial Sequence
  Description of Artificial Sequence: Synthetic oligonucleotide
aaauaccuugcauuucaag

SEQ ID NO: 2882143 - RNA, 19 nt, Artificial Sequence
  Description of Artificial Sequence: Synthetic oligonucleotide
aaacucugugucgaagucc

SEQ ID NO: 2882144 - RNA, 19 nt, Artificial Sequence
  Description of Artificial Sequence: Synthetic oligonucleotide
ugaggaauuuuauacaaau

SEQ ID NO: 2882145 - RNA, 19 nt, Artificial Sequence
  Description of Artificial Sequence: Synthetic oligonucleotide
uaaacguggggaaaucugc

SEQ ID NO: 2882146 - RNA, 19 nt, Artificial Sequence
  Description of Artificial Sequence: Synthetic oligonucleotide
uuuacaaacucugugucga

SEQ ID NO: 2882147 - RNA, 19 nt, Artificial Sequence
  Description of Artificial Sequence: Synthetic oligonucleotide
uauuuacaaacucuguguc

SEQ ID NO: 2882148 - RNA, 19 nt, Artificial Sequence
  Description of Artificial Sequence: Synthetic oligonucleotide
auacaaauaaacgugggga

SEQ ID NO: 2882149 - RNA, 19 nt, Artificial Sequence
  Description of Artificial Sequence: Synthetic oligonucleotide
uaaaaucaacauuaagagu

SEQ ID NO: 2882150 - RNA, 19 nt, Artificial Sequence
  Description of Artificial Sequence: Synthetic oligonucleotide
auuucaagaacaaagacuu

SEQ ID NO: 2882151 - RNA, 19 nt, Artificial Sequence
  Description of Artificial Sequence: Synthetic oligonucleotide
gaacaaagacuuuaggaca

SEQ ID NO: 2882152 - RNA, 19 nt, Artificial Sequence
  Description of Artificial Sequence: Synthetic oligonucleotide
uauguugcuuucuuaauaa

SEQ ID NO: 2882153 - RNA, 19 nt, Artificial Sequence
  Description of Artificial Sequence: Synthetic oligonucleotide
aaaagaaauucaaaucagu

SEQ ID NO: 2882154 - RNA, 19 nt, Artificial Sequence
  Description of Artificial Sequence: Synthetic oligonucleotide
ucgaaguccgggcuaauag

SEQ ID NO: 2882155 - RNA, 19 nt, Artificial Sequence
  Description of Artificial Sequence: Synthetic oligonucleotide
uccuuaauucaucuuaaaa

SEQ ID NO: 2882156 - RNA, 19 nt, Artificial Sequence
  Description of Artificial Sequence: Synthetic oligonucleotide
aacucugugucgaaguccg

SEQ ID NO: 2882157 - RNA, 19 nt, Artificial Sequence
  Description of Artificial Sequence: Synthetic oligonucleotide
aaaguugaggaauuuuaua

SEQ ID NO: 2882158 - RNA, 19 nt, Artificial Sequence
  Description of Artificial Sequence: Synthetic oligonucleotide
uguugcuuucuuaauaaau

SEQ ID NO: 2882159 - RNA, 19 nt, Artificial Sequence
  Description of Artificial Sequence: Synthetic oligonucleotide
aacguggggaaaucugcac

SEQ ID NO: 2882160 - RNA, 19 nt, Artificial Sequence
  Description of Artificial Sequence: Synthetic oligonucleotide
auuaagaguauguugcuuu

SEQ ID NO: 2882161 - RNA, 19 nt, Artificial Sequence
  Description of Artificial Sequence: Synthetic oligonucleotide
caacauuaagaguauguug

SEQ ID NO: 2882162 - RNA, 19 nt, Artificial Sequence
  Description of Artificial Sequence: Synthetic oligonucleotide
uugcaguuuucacaacugg

SEQ ID NO: 2882163 - RNA, 19 nt, Artificial Sequence
  Description of Artificial Sequence: Synthetic oligonucleotide
agcuuaauuuaacugagaa

SEQ ID NO: 2882164 - RNA, 19 nt, Artificial Sequence
  Description of Artificial Sequence: Synthetic oligonucleotide
uaguccuuaauucaucuua

SEQ ID NO: 2882165 - RNA, 19 nt, Artificial Sequence
  Description of Artificial Sequence: Synthetic oligonucleotide
gcuuucuuaauaaauaacc

SEQ ID NO: 2882166 - RNA, 19 nt, Artificial Sequence
  Description of Artificial Sequence: Synthetic oligonucleotide
aguugaggaauuuuauaca

SEQ ID NO: 2882167 - RNA, 19 nt, Artificial Sequence
  Description of Artificial Sequence: Synthetic oligonucleotide
aaauaaacguggggaaauc

SEQ ID NO: 2882168 - RNA, 19 nt, Artificial Sequence
  Description of Artificial Sequence: Synthetic oligonucleotide
ucaguagcuuaauuuaacu

SEQ ID NO: 2882169 - RNA, 19 nt, Artificial Sequence
  Description of Artificial Sequence: Synthetic oligonucleotide
uacaaauaaacguggggaa

SEQ ID NO: 2882170 - RNA, 19 nt, Artificial Sequence
  Description of Artificial Sequence: Synthetic oligonucleotide
cucuucauauuguaaaauc

SEQ ID NO: 2882171 - RNA, 19 nt, Artificial Sequence
  Description of Artificial Sequence: Synthetic oligonucleotide
auauuguaaaaucaacauu

SEQ ID NO: 2882172 - RNA, 19 nt, Artificial Sequence
  Description of Artificial Sequence: Synthetic oligonucleotide
uugcuuucuuaauaaauaa

SEQ ID NO: 2882173 - RNA, 19 nt, Artificial Sequence
  Description of Artificial Sequence: Synthetic oligonucleotide
cuaaguugcaguuuucaca

SEQ ID NO: 2882174 - RNA, 19 nt, Artificial Sequence
  Description of Artificial Sequence: Synthetic oligonucleotide
aguugcaguuuucacaacu

SEQ ID NO: 2882175 - RNA, 19 nt, Artificial Sequence
  Description of Artificial Sequence: Synthetic oligonucleotide
aauaaacguggggaaaucu

SEQ ID NO: 2882176 - RNA, 19 nt, Artificial Sequence
  Description of Artificial Sequence: Synthetic oligonucleotide
gaggucacugcuaaguugc

SEQ ID NO: 2882177 - RNA, 19 nt, Artificial Sequence
  Description of Artificial Sequence: Synthetic oligonucleotide
agacuuuaggacaagauaa

SEQ ID NO: 2882178 - RNA, 19 nt, Artificial Sequence
  Description of Artificial Sequence: Synthetic oligonucleotide
uucaagaacaaagacuuua

SEQ ID NO: 2882179 - RNA, 19 nt, Artificial Sequence
  Description of Artificial Sequence: Synthetic oligonucleotide
guagcuuaauuuaacugag

SEQ ID NO: 2882180 - RNA, 19 nt, Artificial Sequence
  Description of Artificial Sequence: Synthetic oligonucleotide
caucaaaaugaggucaucc

SEQ ID NO: 2882181 - RNA, 19 nt, Artificial Sequence
  Description of Artificial Sequence: Synthetic oligonucleotide
aaaaugaggucauccgcaa

SEQ ID NO: 2882182 - RNA, 19 nt, Artificial Sequence
  Description of Artificial Sequence: Synthetic oligonucleotide
aacgaacggguuucugagg

SEQ ID NO: 2882183 - RNA, 19 nt, Artificial Sequence
  Description of Artificial Sequence: Synthetic oligonucleotide
aaaaguugaggaauuuuau

SEQ ID NO: 2882184 - RNA, 19 nt, Artificial Sequence
  Description of Artificial Sequence: Synthetic oligonucleotide
acaaacucugugucgaagu

SEQ ID NO: 2882185 - RNA, 19 nt, Artificial Sequence
  Description of Artificial Sequence: Synthetic oligonucleotide
aggucauccgcaaaggcac

SEQ ID NO: 2882186 - RNA, 19 nt, Artificial Sequence
  Description of Artificial Sequence: Synthetic oligonucleotide
caguagcuuaauuuaacug

SEQ ID NO: 2882187 - RNA, 19 nt, Artificial Sequence
  Description of Artificial Sequence: Synthetic oligonucleotide
uccgcaaaggcaccuaaac

SEQ ID NO: 2882188 - RNA, 19 nt, Artificial Sequence
  Description of Artificial Sequence: Synthetic oligonucleotide
uaaucucuucauauuguaa

SEQ ID NO: 2882189 - RNA, 19 nt, Artificial Sequence
  Description of Artificial Sequence: Synthetic oligonucleotide
ucugaggucacugcuaagu

SEQ ID NO: 2882190 - RNA, 19 nt, Artificial Sequence
  Description of Artificial Sequence: Synthetic oligonucleotide
ucugaaaaguugaggaauu

SEQ ID NO: 2882191 - RNA, 19 nt, Artificial Sequence
  Description of Artificial Sequence: Synthetic oligonucleotide
uaauaguccuuaauucauc

SEQ ID NO: 2882192 - RNA, 19 nt, Artificial Sequence
  Description of Artificial Sequence: Synthetic oligonucleotide
aucaguagcuuaauuuaac

SEQ ID NO: 2882193 - RNA, 19 nt, Artificial Sequence
  Description of Artificial Sequence: Synthetic oligonucleotide
aaaauaaaacgaacggguu

SEQ ID NO: 2882194 - RNA, 19 nt, Artificial Sequence
  Description of Artificial Sequence: Synthetic oligonucleotide
ugaggucacugcuaaguug

SEQ ID NO: 2882195 - RNA, 19 nt, Artificial Sequence
  Description of Artificial Sequence: Synthetic oligonucleotide
gaaaaguugaggaauuuua

SEQ ID NO: 2882196 - RNA, 19 nt, Artificial Sequence
  Description of Artificial Sequence: Synthetic oligonucleotide
uuucugaggucacugcuaa

SEQ ID NO: 2882197 - RNA, 19 nt, Artificial Sequence
  Description of Artificial Sequence: Synthetic oligonucleotide
gggaaaucugcacagacac

SEQ ID NO: 2882198 - RNA, 19 nt, Artificial Sequence
  Description of Artificial Sequence: Synthetic oligonucleotide
cuucauauuguaaaaucaa

SEQ ID NO: 2882199 - RNA, 19 nt, Artificial Sequence
  Description of Artificial Sequence: Synthetic oligonucleotide
aaguccgggcuaauagucc

SEQ ID NO: 2882200 - RNA, 19 nt, Artificial Sequence
  Description of Artificial Sequence: Synthetic oligonucleotide
gaguauguugcuuucuuaa

SEQ ID NO: 2882201 - RNA, 19 nt, Artificial Sequence
  Description of Artificial Sequence: Synthetic oligonucleotide
cauuucaagaacaaagacu

SEQ ID NO: 2882202 - RNA, 19 nt, Artificial Sequence
  Description of Artificial Sequence: Synthetic oligonucleotide
ucaacauuaagaguauguu

SEQ ID NO: 2882203 - RNA, 19 nt, Artificial Sequence
  Description of Artificial Sequence: Synthetic oligonucleotide
uuaagaguauguugcuuuc

SEQ ID NO: 2882204 - RNA, 19 nt, Artificial Sequence
  Description of Artificial Sequence: Synthetic oligonucleotide
aacaaagacuuuaggacaa

SEQ ID NO: 2882205 - RNA, 19 nt, Artificial Sequence
  Description of Artificial Sequence: Synthetic oligonucleotide
aucaacauuaagaguaugu

SEQ ID NO: 2882206 - RNA, 19 nt, Artificial Sequence
  Description of Artificial Sequence: Synthetic oligonucleotide
acugcuaaguugcaguuuu

SEQ ID NO: 2882207 - RNA, 19 nt, Artificial Sequence
  Description of Artificial Sequence: Synthetic oligonucleotide
gaaaucugcacagacaccu

SEQ ID NO: 2882208 - RNA, 19 nt, Artificial Sequence
  Description of Artificial Sequence: Synthetic oligonucleotide
ucugugucgaaguccgggc

SEQ ID NO: 2882209 - RNA, 19 nt, Artificial Sequence
  Description of Artificial Sequence: Synthetic oligonucleotide
ugaggucauccgcaaaggc

SEQ ID NO: 2882210 - RNA, 19 nt, Artificial Sequence
  Description of Artificial Sequence: Synthetic oligonucleotide
uaccuugcauuucaagaac

SEQ ID NO: 2882211 - RNA, 19 nt, Artificial Sequence
  Description of Artificial Sequence: Synthetic oligonucleotide
uggggaaaucugcacagac

SEQ ID NO: 2882212 - RNA, 19 nt, Artificial Sequence
  Description of Artificial Sequence: Synthetic oligonucleotide
ccuuuauuuacaaacucug

SEQ ID NO: 2882213 - RNA, 19 nt, Artificial Sequence
  Description of Artificial Sequence: Synthetic oligonucleotide
cauauuguaaaaucaacau

SEQ ID NO: 2882214 - RNA, 19 nt, Artificial Sequence
  Description of Artificial Sequence: Synthetic oligonucleotide
auaaucucuucauauugua

SEQ ID NO: 2882215 - RNA, 19 nt, Artificial Sequence
  Description of Artificial Sequence: Synthetic oligonucleotide
ucaaaucaguagcuuaauu

SEQ ID NO: 2882216 - RNA, 19 nt, Artificial Sequence
  Description of Artificial Sequence: Synthetic oligonucleotide
acauuaagaguauguugcu

SEQ ID NO: 2882217 - RNA, 19 nt, Artificial Sequence
  Description of Artificial Sequence: Synthetic oligonucleotide
gcuaauaguccuuaauuca

SEQ ID NO: 2882218 - RNA, 19 nt, Artificial Sequence
  Description of Artificial Sequence: Synthetic oligonucleotide
aaguugcaguuuucacaac

SEQ ID NO: 2882219 - RNA, 19 nt, Artificial Sequence
  Description of Artificial Sequence: Synthetic oligonucleotide
aaucaacauuaagaguaug

SEQ ID NO: 2882220 - RNA, 19 nt, Artificial Sequence
  Description of Artificial Sequence: Synthetic oligonucleotide
aaucaguagcuuaauuuaa

SEQ ID NO: 2882221 - RNA, 19 nt, Artificial Sequence
  Description of Artificial Sequence: Synthetic oligonucleotide
acgaacggguuucugaggu

SEQ ID NO: 2882222 - RNA, 19 nt, Artificial Sequence
  Description of Artificial Sequence: Synthetic oligonucleotide
aaauucaaaucaguagcuu

SEQ ID NO: 2882223 - RNA, 19 nt, Artificial Sequence
  Description of Artificial Sequence: Synthetic oligonucleotide
aaucugcacagacaccuuu

SEQ ID NO: 2882224 - RNA, 19 nt, Artificial Sequence
  Description of Artificial Sequence: Synthetic oligonucleotide
auaaacguggggaaaucug

SEQ ID NO: 2882225 - RNA, 19 nt, Artificial Sequence
  Description of Artificial Sequence: Synthetic oligonucleotide
accuuuauuuacaaacucu

SEQ ID NO: 2882226 - RNA, 19 nt, Artificial Sequence
  Description of Artificial Sequence: Synthetic oligonucleotide
ggcaccuaaacuuuuaaaa

SEQ ID NO: 2882227 - RNA, 19 nt, Artificial Sequence
  Description of Artificial Sequence: Synthetic oligonucleotide
aucucuucauauuguaaaa

SEQ ID NO: 2882228 - RNA, 19 nt, Artificial Sequence
  Description of Artificial Sequence: Synthetic oligonucleotide
aaggcaccuaaacuuuuaa

SEQ ID NO: 2882229 - RNA, 19 nt, Artificial Sequence
  Description of Artificial Sequence: Synthetic oligonucleotide
acuaccacugugauggaug

SEQ ID NO: 2882230 - RNA, 19 nt, Artificial Sequence
  Description of Artificial Sequence: Synthetic oligonucleotide
ggcuaauaguccuuaauuc

SEQ ID NO: 2882231 - RNA, 19 nt, Artificial Sequence
  Description of Artificial Sequence: Synthetic oligonucleotide
ugcuaaguugcaguuuuca

SEQ ID NO: 2882232 - RNA, 19 nt, Artificial Sequence
  Description of Artificial Sequence: Synthetic oligonucleotide
aguauguugcuuucuuaau

SEQ ID NO: 2882233 - RNA, 19 nt, Artificial Sequence
  Description of Artificial Sequence: Synthetic oligonucleotide
aacaucaaaaugaggucau

SEQ ID NO: 2882234 - RNA, 19 nt, Artificial Sequence
  Description of Artificial Sequence: Synthetic oligonucleotide
auucaaaucaguagcuuaa

SEQ ID NO: 2882235 - RNA, 19 nt, Artificial Sequence
  Description of Artificial Sequence: Synthetic oligonucleotide
uagcuuaauuuaacugaga

SEQ ID NO: 2882236 - RNA, 19 nt, Artificial Sequence
  Description of Artificial Sequence: Synthetic oligonucleotide
ugcagcguccacauauuaa

SEQ ID NO: 2882237 - RNA, 19 nt, Artificial Sequence
  Description of Artificial Sequence: Synthetic oligonucleotide
caccuuuauuuacaaacuc

SEQ ID NO: 2882238 - RNA, 19 nt, Artificial Sequence
  Description of Artificial Sequence: Synthetic oligonucleotide
gauacuuuaaacacauuuu

SEQ ID NO: 2882239 - RNA, 19 nt, Artificial Sequence
  Description of Artificial Sequence: Synthetic oligonucleotide
ucucuucauauuguaaaau

SEQ ID NO: 2882240 - RNA, 19 nt, Artificial Sequence
  Description of Artificial Sequence: Synthetic oligonucleotide
gaaauucaaaucaguagcu

SEQ ID NO: 2882241 - RNA, 19 nt, Artificial Sequence
  Description of Artificial Sequence: Synthetic oligonucleotide
guauguugcuuucuuaaua

SEQ ID NO: 2882242 - RNA, 19 nt, Artificial Sequence
  Description of Artificial Sequence: Synthetic oligonucleotide
gcauuucaagaacaaagac

SEQ ID NO: 2882243 - RNA, 19 nt, Artificial Sequence
  Description of Artificial Sequence: Synthetic oligonucleotide
gaaguccgggcuaauaguc

SEQ ID NO: 2882244 - RNA, 19 nt, Artificial Sequence
  Description of Artificial Sequence: Synthetic oligonucleotide
acaccuuuauuuacaaacu

SEQ ID NO: 2882245 - RNA, 19 nt, Artificial Sequence
  Description of Artificial Sequence: Synthetic oligonucleotide
augaggucauccgcaaagg

SEQ ID NO: 2882246 - RNA, 19 nt, Artificial Sequence
  Description of Artificial Sequence: Synthetic oligonucleotide
aaacguggggaaaucugca

SEQ ID NO: 2882247 - RNA, 19 nt, Artificial Sequence
  Description of Artificial Sequence: Synthetic oligonucleotide
ucugcacagacaccuuuau

SEQ ID NO: 2882248 - RNA, 19 nt, Artificial Sequence
  Description of Artificial Sequence: Synthetic oligonucleotide
gaggucauccgcaaaggca

SEQ ID NO: 2882249 - RNA, 19 nt, Artificial Sequence
  Description of Artificial Sequence: Synthetic oligonucleotide
acaaauaaacguggggaaa

SEQ ID NO: 2882250 - RNA, 19 nt, Artificial Sequence
  Description of Artificial Sequence: Synthetic oligonucleotide
aguccgggcuaauaguccu

SEQ ID NO: 2882251 - RNA, 19 nt, Artificial Sequence
  Description of Artificial Sequence: Synthetic oligonucleotide
uaagaguauguugcuuucu

SEQ ID NO: 2882252 - RNA, 19 nt, Artificial Sequence
  Description of Artificial Sequence: Synthetic oligonucleotide
acguggggaaaucugcaca

SEQ ID NO: 2882253 - RNA, 19 nt, Artificial Sequence
  Description of Artificial Sequence: Synthetic oligonucleotide
acagacaccuuuauuuaca

SEQ ID NO: 2882254 - RNA, 19 nt, Artificial Sequence
  Description of Artificial Sequence: Synthetic oligonucleotide
acuuuaggacaagauaaaa

SEQ ID NO: 2882255 - RNA, 19 nt, Artificial Sequence
  Description of Artificial Sequence: Synthetic oligonucleotide
auuguaaaaucaacauuaa

SEQ ID NO: 2882256 - RNA, 19 nt, Artificial Sequence
  Description of Artificial Sequence: Synthetic oligonucleotide
uaaaacgaacggguuucug

SEQ ID NO: 2882257 - RNA, 19 nt, Artificial Sequence
  Description of Artificial Sequence: Synthetic oligonucleotide
caaacucugugucgaaguc

SEQ ID NO: 2882258 - RNA, 19 nt, Artificial Sequence
  Description of Artificial Sequence: Synthetic oligonucleotide
gaacggguuucugagguca

SEQ ID NO: 2882259 - RNA, 19 nt, Artificial Sequence
  Description of Artificial Sequence: Synthetic oligonucleotide
cuaauaguccuuaauucau

SEQ ID NO: 2882260 - RNA, 19 nt, Artificial Sequence
  Description of Artificial Sequence: Synthetic oligonucleotide
agaguauguugcuuucuua

SEQ ID NO: 2882261 - RNA, 19 nt, Artificial Sequence
  Description of Artificial Sequence: Synthetic oligonucleotide
ugugucgaaguccgggcua

SEQ ID NO: 2882262 - RNA, 19 nt, Artificial Sequence
  Description of Artificial Sequence: Synthetic oligonucleotide
cuuuauuuacaaacucugu

SEQ ID NO: 2882263 - RNA, 19 nt, Artificial Sequence
  Description of Artificial Sequence: Synthetic oligonucleotide
acaucaaaaugaggucauc

SEQ ID NO: 2882264 - RNA, 19 nt, Artificial Sequence
  Description of Artificial Sequence: Synthetic oligonucleotide
uuucaagaacaaagacuuu

SEQ ID NO: 2882265 - RNA, 19 nt, Artificial Sequence
  Description of Artificial Sequence: Synthetic oligonucleotide
uuugcagcguccacauauu

SEQ ID NO: 2882266 - RNA, 19 nt, Artificial Sequence
  Description of Artificial Sequence: Synthetic oligonucleotide
uucaaaucaguagcuuaau

SEQ ID NO: 2882267 - RNA, 19 nt, Artificial Sequence
  Description of Artificial Sequence: Synthetic oligonucleotide
ucacugcuaaguugcaguu

SEQ ID NO: 2882268 - RNA, 19 nt, Artificial Sequence
  Description of Artificial Sequence: Synthetic oligonucleotide
aacggguuucugaggucac

SEQ ID NO: 2882269 - RNA, 19 nt, Artificial Sequence
  Description of Artificial Sequence: Synthetic oligonucleotide
gucacugcuaaguugcagu

SEQ ID NO: 2882270 - RNA, 19 nt, Artificial Sequence
  Description of Artificial Sequence: Synthetic oligonucleotide
gacuuuaggacaagauaaa

SEQ ID NO: 2882271 - RNA, 19 nt, Artificial Sequence
  Description of Artificial Sequence: Synthetic oligonucleotide
gcuaaguugcaguuuucac

SEQ ID NO: 2882272 - RNA, 19 nt, Artificial Sequence
  Description of Artificial Sequence: Synthetic oligonucleotide
auaguccuuaauucaucuu

SEQ ID NO: 2882273 - RNA, 19 nt, Artificial Sequence
  Description of Artificial Sequence: Synthetic oligonucleotide
gaggaauuuuauacaaaua

SEQ ID NO: 2882274 - RNA, 19 nt, Artificial Sequence
  Description of Artificial Sequence: Synthetic oligonucleotide
uuacaaacucugugucgaa

SEQ ID NO: 2882275 - RNA, 19 nt, Artificial Sequence
  Description of Artificial Sequence: Synthetic oligonucleotide
cacugugauggaugaggag

SEQ ID NO: 2882276 - RNA, 19 nt, Artificial Sequence
  Description of Artificial Sequence: Synthetic oligonucleotide
acaaagacuuuaggacaag

SEQ ID NO: 2882277 - RNA, 19 nt, Artificial Sequence
  Description of Artificial Sequence: Synthetic oligonucleotide
auguugcuuucuuaauaaa

SEQ ID NO: 2882278 - RNA, 19 nt, Artificial Sequence
  Description of Artificial Sequence: Synthetic oligonucleotide
aggcaccuaaacuuuuaaa

SEQ ID NO: 2882279 - RNA, 19 nt, Artificial Sequence
  Description of Artificial Sequence: Synthetic oligonucleotide
aguccuuaauucaucuuaa

SEQ ID NO: 2882280 - RNA, 19 nt, Artificial Sequence
  Description of Artificial Sequence: Synthetic oligonucleotide
aaaggcaccuaaacuuuua

SEQ ID NO: 2882281 - RNA, 19 nt, Artificial Sequence
  Description of Artificial Sequence: Synthetic oligonucleotide
ccaaauaccuugcauuuca

SEQ ID NO: 2882282 - RNA, 19 nt, Artificial Sequence
  Description of Artificial Sequence: Synthetic oligonucleotide
uucugaggucacugcuaag

SEQ ID NO: 2882283 - RNA, 19 nt, Artificial Sequence
  Description of Artificial Sequence: Synthetic oligonucleotide
cuaccacugugauggauga

SEQ ID NO: 2882284 - RNA, 19 nt, Artificial Sequence
  Description of Artificial Sequence: Synthetic oligonucleotide
auaaaacgaacggguuucu

SEQ ID NO: 2882285 - RNA, 19 nt, Artificial Sequence
  Description of Artificial Sequence: Synthetic oligonucleotide
gcagcguccacauauuaaa

SEQ ID NO: 2882286 - RNA, 19 nt, Artificial Sequence
  Description of Artificial Sequence: Synthetic oligonucleotide
aaacuaccacugugaugga

SEQ ID NO: 2882287 - RNA, 19 nt, Artificial Sequence
  Description of Artificial Sequence: Synthetic oligonucleotide
aacuaccacugugauggau

SEQ ID NO: 2882288 - RNA, 19 nt, Artificial Sequence
  Description of Artificial Sequence: Synthetic oligonucleotide
agacaccuuuauuuacaaa

SEQ ID NO: 2882289 - RNA, 19 nt, Artificial Sequence
  Description of Artificial Sequence: Synthetic oligonucleotide
gucugaaaaguugaggaau

SEQ ID NO: 2882290 - RNA, 19 nt, Artificial Sequence
  Description of Artificial Sequence: Synthetic oligonucleotide
cuugcauuucaagaacaaa

SEQ ID NO: 2882291 - RNA, 19 nt, Artificial Sequence
  Description of Artificial Sequence: Synthetic oligonucleotide
cagacaccuuuauuuacaa

SEQ ID NO: 2882292 - RNA, 19 nt, Artificial Sequence
  Description of Artificial Sequence: Synthetic oligonucleotide
caaauaaacguggggaaau

SEQ ID NO: 2882293 - RNA, 19 nt, Artificial Sequence
  Description of Artificial Sequence: Synthetic oligonucleotide
caaauaccuugcauuucaa

SEQ ID NO: 2882294 - RNA, 19 nt, Artificial Sequence
  Description of Artificial Sequence: Synthetic oligonucleotide
guccuuaauucaucuuaaa

SEQ ID NO: 2882295 - RNA, 19 nt, Artificial Sequence
  Description of Artificial Sequence: Synthetic oligonucleotide
aaaucugcacagacaccuu

SEQ ID NO: 2882296 - RNA, 19 nt, Artificial Sequence
  Description of Artificial Sequence: Synthetic oligonucleotide
cguggggaaaucugcacag

SEQ ID NO: 2882297 - RNA, 19 nt, Artificial Sequence
  Description of Artificial Sequence: Synthetic oligonucleotide
ggaaaucugcacagacacc

SEQ ID NO: 2882298 - RNA, 19 nt, Artificial Sequence
  Description of Artificial Sequence: Synthetic oligonucleotide
uaccacugugauggaugag

SEQ ID NO: 2882299 - RNA, 19 nt, Artificial Sequence
  Description of Artificial Sequence: Synthetic oligonucleotide
guuucugaggucacugcua

SEQ ID NO: 2882300 - RNA, 19 nt, Artificial Sequence
  Description of Artificial Sequence: Synthetic oligonucleotide
aagauacuuuaaacacauu

SEQ ID NO: 2882301 - RNA, 19 nt, Artificial Sequence
  Description of Artificial Sequence: Synthetic oligonucleotide
gguuucugaggucacugcu

SEQ ID NO: 2882302 - RNA, 19 nt, Artificial Sequence
  Description of Artificial Sequence: Synthetic oligonucleotide
ggucacugcuaaguugcag

SEQ ID NO: 2882303 - RNA, 19 nt, Artificial Sequence
  Description of Artificial Sequence: Synthetic oligonucleotide
uccgggcuaauaguccuua

SEQ ID NO: 2882304 - RNA, 19 nt, Artificial Sequence
  Description of Artificial Sequence: Synthetic oligonucleotide
gggcuaauaguccuuaauu

SEQ ID NO: 2882305 - RNA, 19 nt, Artificial Sequence
  Description of Artificial Sequence: Synthetic oligonucleotide
cagcguccacauauuaaaa

SEQ ID NO: 2882306 - RNA, 19 nt, Artificial Sequence
  Description of Artificial Sequence: Synthetic oligonucleotide
ggggaaaucugcacagaca

SEQ ID NO: 2882307 - RNA, 19 nt, Artificial Sequence
  Description of Artificial Sequence: Synthetic oligonucleotide
ucauccgcaaaggcaccua

SEQ ID NO: 2882308 - RNA, 19 nt, Artificial Sequence
  Description of Artificial Sequence: Synthetic oligonucleotide
aucugcacagacaccuuua

SEQ ID NO: 2882309 - RNA, 19 nt, Artificial Sequence
  Description of Artificial Sequence: Synthetic oligonucleotide
cauccgcaaaggcaccuaa

SEQ ID NO: 2882310 - RNA, 19 nt, Artificial Sequence
  Description of Artificial Sequence: Synthetic oligonucleotide
ccuugcauuucaagaacaa

SEQ ID NO: 2882311 - RNA, 19 nt, Artificial Sequence
  Description of Artificial Sequence: Synthetic oligonucleotide
acggguuucugaggucacu

SEQ ID NO: 2882312 - RNA, 19 nt, Artificial Sequence
  Description of Artificial Sequence: Synthetic oligonucleotide
acucugugucgaaguccgg

SEQ ID NO: 2882313 - RNA, 19 nt, Artificial Sequence
  Description of Artificial Sequence: Synthetic oligonucleotide
ccacugugauggaugagga

SEQ ID NO: 2882314 - RNA, 19 nt, Artificial Sequence
  Description of Artificial Sequence: Synthetic oligonucleotide
cauuaagaguauguugcuu

SEQ ID NO: 2882315 - RNA, 19 nt, Artificial Sequence
  Description of Artificial Sequence: Synthetic oligonucleotide
caaaggcaccuaaacuuuu

SEQ ID NO: 2882316 - RNA, 19 nt, Artificial Sequence
  Description of Artificial Sequence: Synthetic oligonucleotide
gugucgaaguccgggcuaa

SEQ ID NO: 2882317 - RNA, 19 nt, Artificial Sequence
  Description of Artificial Sequence: Synthetic oligonucleotide
auccgcaaaggcaccuaaa

SEQ ID NO: 2882318 - RNA, 19 nt, Artificial Sequence
  Description of Artificial Sequence: Synthetic oligonucleotide
ggucauccgcaaaggcacc

SEQ ID NO: 2882319 - RNA, 19 nt, Artificial Sequence
  Description of Artificial Sequence: Synthetic oligonucleotide
cgcaaaggcaccuaaacuu

SEQ ID NO: 2882320 - RNA, 19 nt, Artificial Sequence
  Description of Artificial Sequence: Synthetic oligonucleotide
cugugucgaaguccgggcu

SEQ ID NO: 2882321 - RNA, 19 nt, Artificial Sequence
  Description of Artificial Sequence: Synthetic oligonucleotide
gucgaaguccgggcuaaua

SEQ ID NO: 2882322 - RNA, 19 nt, Artificial Sequence
  Description of Artificial Sequence: Synthetic oligonucleotide
cccaaauaccuugcauuuc

SEQ ID NO: 2882323 - RNA, 19 nt, Artificial Sequence
  Description of Artificial Sequence: Synthetic oligonucleotide
aggucacugcuaaguugca

SEQ ID NO: 2882324 - RNA, 19 nt, Artificial Sequence
  Description of Artificial Sequence: Synthetic oligonucleotide
ugucgaaguccgggcuaau

SEQ ID NO: 2882325 - RNA, 19 nt, Artificial Sequence
  Description of Artificial Sequence: Synthetic oligonucleotide
cugaaaaguugaggaauuu

SEQ ID NO: 2882326 - RNA, 19 nt, Artificial Sequence
  Description of Artificial Sequence: Synthetic oligonucleotide
gucauccgcaaaggcaccu

SEQ ID NO: 2882327 - RNA, 19 nt, Artificial Sequence
  Description of Artificial Sequence: Synthetic oligonucleotide
gcaaaggcaccuaaacuuu

SEQ ID NO: 2882328 - RNA, 19 nt, Artificial Sequence
  Description of Artificial Sequence: Synthetic oligonucleotide
ccccaaauaccuugcauuu

SEQ ID NO: 2882329 - RNA, 19 nt, Artificial Sequence
  Description of Artificial Sequence: Synthetic oligonucleotide
ccgcaaaggcaccuaaacu

SEQ ID NO: 2882330 - RNA, 19 nt, Artificial Sequence
  Description of Artificial Sequence: Synthetic oligonucleotide
cgaacggguuucugagguc

SEQ ID NO: 2882331 - RNA, 19 nt, Artificial Sequence
  Description of Artificial Sequence: Synthetic oligonucleotide
cgaaguccgggcuaauagu

SEQ ID NO: 2882332 - RNA, 19 nt, Artificial Sequence
  Description of Artificial Sequence: Synthetic oligonucleotide
cacugcuaaguugcaguuu

SEQ ID NO: 2882333 - RNA, 19 nt, Artificial Sequence
  Description of Artificial Sequence: Synthetic oligonucleotide
ccgggcuaauaguccuuaa

SEQ ID NO: 2882334 - RNA, 19 nt, Artificial Sequence
  Description of Artificial Sequence: Synthetic oligonucleotide
cgggcuaauaguccuuaau

SEQ ID NO: 2882335 - RNA, 19 nt, Artificial Sequence
  Description of Artificial Sequence: Synthetic oligonucleotide
guccgggcuaauaguccuu

SEQ ID NO: 2882336 - RNA, 19 nt, Artificial Sequence
  Description of Artificial Sequence: Synthetic oligonucleotide
aaaggcuuaagccaaaacc

SEQ ID NO: 2882337 - RNA, 19 nt, Artificial Sequence
  Description of Artificial Sequence: Synthetic oligonucleotide
uuuauugacgauuacaucu

SEQ ID NO: 2882338 - RNA, 19 nt, Artificial Sequence
  Description of Artificial Sequence: Synthetic oligonucleotide
aacagugaaccacagauuc

SEQ ID NO: 2882339 - RNA, 19 nt, Artificial Sequence
  Description of Artificial Sequence: Synthetic oligonucleotide
aaaacagugaaccacagau

SEQ ID NO: 2882340 - RNA, 19 nt, Artificial Sequence
  Description of Artificial Sequence: Synthetic oligonucleotide
aaugcuguuaguugacucc

SEQ ID NO: 2882341 - RNA, 19 nt, Artificial Sequence
  Description of Artificial Sequence: Synthetic oligonucleotide
uuggauaugaauuuggaug

SEQ ID NO: 2882342 - RNA, 19 nt, Artificial Sequence
  Description of Artificial Sequence: Synthetic oligonucleotide
aaaaccuggguucaaacuc

SEQ ID NO: 2882343 - RNA, 19 nt, Artificial Sequence
  Description of Artificial Sequence: Synthetic oligonucleotide
ugauagaucccacagaacu

SEQ ID NO: 2882344 - RNA, 19 nt, Artificial Sequence
  Description of Artificial Sequence: Synthetic oligonucleotide
agcauuaaaauuccauggc

SEQ ID NO: 2882345 - RNA, 19 nt, Artificial Sequence
  Description of Artificial Sequence: Synthetic oligonucleotide
uuaucuuuggauaugaauu

SEQ ID NO: 2882346 - RNA, 19 nt, Artificial Sequence
  Description of Artificial Sequence: Synthetic oligonucleotide
uuucccauauuuauugacg

SEQ ID NO: 2882347 - RNA, 19 nt, Artificial Sequence
  Description of Artificial Sequence: Synthetic oligonucleotide
uuucauuccuccuaacugg

SEQ ID NO: 2882348 - RNA, 19 nt, Artificial Sequence
  Description of Artificial Sequence: Synthetic oligonucleotide
uauuuauugacgauuacau

SEQ ID NO: 2882349 - RNA, 19 nt, Artificial Sequence
  Description of Artificial Sequence: Synthetic oligonucleotide
uuuucauuccuccuaacug

SEQ ID NO: 2882350 - RNA, 19 nt, Artificial Sequence
  Description of Artificial Sequence: Synthetic oligonucleotide
aaugcgaacauuaacaaaa

SEQ ID NO: 2882351 - RNA, 19 nt, Artificial Sequence
  Description of Artificial Sequence: Synthetic oligonucleotide
aaaggcauuaucuuuggau

SEQ ID NO: 2882352 - RNA, 19 nt, Artificial Sequence
  Description of Artificial Sequence: Synthetic oligonucleotide
ucuuuggauaugaauuugg

SEQ ID NO: 2882353 - RNA, 19 nt, Artificial Sequence
  Description of Artificial Sequence: Synthetic oligonucleotide
ucagcauuaaaauuccaug

SEQ ID NO: 2882354 - RNA, 19 nt, Artificial Sequence
  Description of Artificial Sequence: Synthetic oligonucleotide
ucugauguuuaucuugucc

SEQ ID NO: 2882355 - RNA, 19 nt, Artificial Sequence
  Description of Artificial Sequence: Synthetic oligonucleotide
gaugucagcauuaaaauuc

SEQ ID NO: 2882356 - RNA, 19 nt, Artificial Sequence
  Description of Artificial Sequence: Synthetic oligonucleotide
ugugaugaacuuuggaaag

SEQ ID NO: 2882357 - RNA, 19 nt, Artificial Sequence
  Description of Artificial Sequence: Synthetic oligonucleotide
uuggaugugaugaacuuug

SEQ ID NO: 2882358 - RNA, 19 nt, Artificial Sequence
  Description of Artificial Sequence: Synthetic oligonucleotide
cagcauuaaaauuccaugg

SEQ ID NO: 2882359 - RNA, 19 nt, Artificial Sequence
  Description of Artificial Sequence: Synthetic oligonucleotide
uccaugauagaucccacag

SEQ ID NO: 2882360 - RNA, 19 nt, Artificial Sequence
  Description of Artificial Sequence: Synthetic oligonucleotide
acauuaacaaaacagugaa

SEQ ID NO: 2882361 - RNA, 19 nt, Artificial Sequence
  Description of Artificial Sequence: Synthetic oligonucleotide
uggauaugaauuuggaugu

SEQ ID NO: 2882362 - RNA, 19 nt, Artificial Sequence
  Description of Artificial Sequence: Synthetic oligonucleotide
uguuaguugacuccuggug

SEQ ID NO: 2882363 - RNA, 19 nt, Artificial Sequence
  Description of Artificial Sequence: Synthetic oligonucleotide
ucggucacuuccaugauag

SEQ ID NO: 2882364 - RNA, 19 nt, Artificial Sequence
  Description of Artificial Sequence: Synthetic oligonucleotide
ugcacugaaucaaaggaug

SEQ ID NO: 2882365 - RNA, 19 nt, Artificial Sequence
  Description of Artificial Sequence: Synthetic oligonucleotide
uguugucugauguuuaucu

SEQ ID NO: 2882366 - RNA, 19 nt, Artificial Sequence
  Description of Artificial Sequence: Synthetic oligonucleotide
gaugugaugaacuuuggaa

SEQ ID NO: 2882367 - RNA, 19 nt, Artificial Sequence
  Description of Artificial Sequence: Synthetic oligonucleotide
aacauuaacaaaacaguga

SEQ ID NO: 2882368 - RNA, 19 nt, Artificial Sequence
  Description of Artificial Sequence: Synthetic oligonucleotide
ucaucggucacuuccauga

SEQ ID NO: 2882369 - RNA, 19 nt, Artificial Sequence
  Description of Artificial Sequence: Synthetic oligonucleotide
uuauugacgauuacaucug

SEQ ID NO: 2882370 - RNA, 19 nt, Artificial Sequence
  Description of Artificial Sequence: Synthetic oligonucleotide
agaaaugcgaacauuaaca

SEQ ID NO: 2882371 - RNA, 19 nt, Artificial Sequence
  Description of Artificial Sequence: Synthetic oligonucleotide
auuuauugacgauuacauc

SEQ ID NO: 2882372 - RNA, 19 nt, Artificial Sequence
  Description of Artificial Sequence: Synthetic oligonucleotide
ucaaaggauggcaucuggg

SEQ ID NO: 2882373 - RNA, 19 nt, Artificial Sequence
  Description of Artificial Sequence: Synthetic oligonucleotide
ucaugcccaaaccaaagcc

SEQ ID NO: 2882374 - RNA, 19 nt, Artificial Sequence
  Description of Artificial Sequence: Synthetic oligonucleotide
uuaacaaaacagugaacca

SEQ ID NO: 2882375 - RNA, 19 nt, Artificial Sequence
  Description of Artificial Sequence: Synthetic oligonucleotide
gaacauuaacaaaacagug

SEQ ID NO: 2882376 - RNA, 19 nt, Artificial Sequence
  Description of Artificial Sequence: Synthetic oligonucleotide
aaggcuuaagccaaaaccu

SEQ ID NO: 2882377 - RNA, 19 nt, Artificial Sequence
  Description of Artificial Sequence: Synthetic oligonucleotide
ucacuuccaugauagaucc

SEQ ID NO: 2882378 - RNA, 19 nt, Artificial Sequence
  Description of Artificial Sequence: Synthetic oligonucleotide
acgauuacaucugagaucu

SEQ ID NO: 2882379 - RNA, 19 nt, Artificial Sequence
  Description of Artificial Sequence: Synthetic oligonucleotide
aucuggggcauuucaaggc

SEQ ID NO: 2882380 - RNA, 19 nt, Artificial Sequence
  Description of Artificial Sequence: Synthetic oligonucleotide
auguuuaucuuguccacuc

SEQ ID NO: 2882381 - RNA, 19 nt, Artificial Sequence
  Description of Artificial Sequence: Synthetic oligonucleotide
aauugucuuucccauauuu

SEQ ID NO: 2882382 - RNA, 19 nt, Artificial Sequence
  Description of Artificial Sequence: Synthetic oligonucleotide
aaccacagauucuuucuuc

SEQ ID NO: 2882383 - RNA, 19 nt, Artificial Sequence
  Description of Artificial Sequence: Synthetic oligonucleotide
uggccuuccaagaaaugcg

SEQ ID NO: 2882384 - RNA, 19 nt, Artificial Sequence
  Description of Artificial Sequence: Synthetic oligonucleotide
gaaaaggcauuaucuuugg

SEQ ID NO: 2882385 - RNA, 19 nt, Artificial Sequence
  Description of Artificial Sequence: Synthetic oligonucleotide
auuaucuuuggauaugaau

SEQ ID NO: 2882386 - RNA, 19 nt, Artificial Sequence
  Description of Artificial Sequence: Synthetic oligonucleotide
aaggcauuaucuuuggaua

SEQ ID NO: 2882387 - RNA, 19 nt, Artificial Sequence
  Description of Artificial Sequence: Synthetic oligonucleotide
uacaucugagaucugcuca

SEQ ID NO: 2882388 - RNA, 19 nt, Artificial Sequence
  Description of Artificial Sequence: Synthetic oligonucleotide
guuaguugacuccuggugc

SEQ ID NO: 2882389 - RNA, 19 nt, Artificial Sequence
  Description of Artificial Sequence: Synthetic oligonucleotide
ucaaacucaugcccaaacc

SEQ ID NO: 2882390 - RNA, 19 nt, Artificial Sequence
  Description of Artificial Sequence: Synthetic oligonucleotide
auggccuuccaagaaaugc

SEQ ID NO: 2882391 - RNA, 19 nt, Artificial Sequence
  Description of Artificial Sequence: Synthetic oligonucleotide
uugucugauguuuaucuug

SEQ ID NO: 2882392 - RNA, 19 nt, Artificial Sequence
  Description of Artificial Sequence: Synthetic oligonucleotide
cucaaucugaugcucaggc

SEQ ID NO: 2882393 - RNA, 19 nt, Artificial Sequence
  Description of Artificial Sequence: Synthetic oligonucleotide
uugacgauuacaucugaga

SEQ ID NO: 2882394 - RNA, 19 nt, Artificial Sequence
  Description of Artificial Sequence: Synthetic oligonucleotide
acuuuggaaagaugucagc

SEQ ID NO: 2882395 - RNA, 19 nt, Artificial Sequence
  Description of Artificial Sequence: Synthetic oligonucleotide
gauuacaucugagaucugc

SEQ ID NO: 2882396 - RNA, 19 nt, Artificial Sequence
  Description of Artificial Sequence: Synthetic oligonucleotide
ugacgauuacaucugagau

SEQ ID NO: 2882397 - RNA, 19 nt, Artificial Sequence
  Description of Artificial Sequence: Synthetic oligonucleotide
uucauuccuccuaacuggg

SEQ ID NO: 2882398 - RNA, 19 nt, Artificial Sequence
  Description of Artificial Sequence: Synthetic oligonucleotide
guucucaucggucacuucc

SEQ ID NO: 2882399 - RNA, 19 nt, Artificial Sequence
  Description of Artificial Sequence: Synthetic oligonucleotide
gucuuucccauauuuauug

SEQ ID NO: 2882400 - RNA, 19 nt, Artificial Sequence
  Description of Artificial Sequence: Synthetic oligonucleotide
uaacaaaacagugaaccac

SEQ ID NO: 2882401 - RNA, 19 nt, Artificial Sequence
  Description of Artificial Sequence: Synthetic oligonucleotide
gauucuuucuucguucucc

SEQ ID NO: 2882402 - RNA, 19 nt, Artificial Sequence
  Description of Artificial Sequence: Synthetic oligonucleotide
uaugaauuuggaugugaug

SEQ ID NO: 2882403 - RNA, 19 nt, Artificial Sequence
  Description of Artificial Sequence: Synthetic oligonucleotide
cugcucaagguucucaucg

SEQ ID NO: 2882404 - RNA, 19 nt, Artificial Sequence
  Description of Artificial Sequence: Synthetic oligonucleotide
ucaagguucucaucgguca

SEQ ID NO: 2882405 - RNA, 19 nt, Artificial Sequence
  Description of Artificial Sequence: Synthetic oligonucleotide
acuccuggugcacugaauc

SEQ ID NO: 2882406 - RNA, 19 nt, Artificial Sequence
  Description of Artificial Sequence: Synthetic oligonucleotide
auauuuauugacgauuaca

SEQ ID NO: 2882407 - RNA, 19 nt, Artificial Sequence
  Description of Artificial Sequence: Synthetic oligonucleotide
ucugagaucugcucaaggu

SEQ ID NO: 2882408 - RNA, 19 nt, Artificial Sequence
  Description of Artificial Sequence: Synthetic oligonucleotide
aauuuggaugugaugaacu

SEQ ID NO: 2882409 - RNA, 19 nt, Artificial Sequence
  Description of Artificial Sequence: Synthetic oligonucleotide
uuuaucuuguccacuccca

SEQ ID NO: 2882410 - RNA, 19 nt, Artificial Sequence
  Description of Artificial Sequence: Synthetic oligonucleotide
uaaaauuccauggccuucc

SEQ ID NO: 2882411 - RNA, 19 nt, Artificial Sequence
  Description of Artificial Sequence: Synthetic oligonucleotide
aacaaaacagugaaccaca

SEQ ID NO: 2882412 - RNA, 19 nt, Artificial Sequence
  Description of Artificial Sequence: Synthetic oligonucleotide
uccgcagcaaugcuguuag

SEQ ID NO: 2882413 - RNA, 19 nt, Artificial Sequence
  Description of Artificial Sequence: Synthetic oligonucleotide
aacuuuggaaagaugucag

SEQ ID NO: 2882414 - RNA, 19 nt, Artificial Sequence
  Description of Artificial Sequence: Synthetic oligonucleotide
uuauggcuguccuacuggg

SEQ ID NO: 2882415 - RNA, 19 nt, Artificial Sequence
  Description of Artificial Sequence: Synthetic oligonucleotide
guuauggcuguccuacugg

SEQ ID NO: 2882416 - RNA, 19 nt, Artificial Sequence
  Description of Artificial Sequence: Synthetic oligonucleotide
ucuucguucuccuucuucu

SEQ ID NO: 2882417 - RNA, 19 nt, Artificial Sequence
  Description of Artificial Sequence: Synthetic oligonucleotide
ugaugcucaggccuguacc

SEQ ID NO: 2882418 - RNA, 19 nt, Artificial Sequence
  Description of Artificial Sequence: Synthetic oligonucleotide
uucccauauuuauugacga

SEQ ID NO: 2882419 - RNA, 19 nt, Artificial Sequence
  Description of Artificial Sequence: Synthetic oligonucleotide
aaggcucuggcucaaucug

SEQ ID NO: 2882420 - RNA, 19 nt, Artificial Sequence
  Description of Artificial Sequence: Synthetic oligonucleotide
uuucucagguuucuguugu

SEQ ID NO: 2882421 - RNA, 19 nt, Artificial Sequence
  Description of Artificial Sequence: Synthetic oligonucleotide
augugaugaacuuuggaaa

SEQ ID NO: 2882422 - RNA, 19 nt, Artificial Sequence
  Description of Artificial Sequence: Synthetic oligonucleotide
aaaugcgaacauuaacaaa

SEQ ID NO: 2882423 - RNA, 19 nt, Artificial Sequence
  Description of Artificial Sequence: Synthetic oligonucleotide
uugucuuucccauauuuau

SEQ ID NO: 2882424 - RNA, 19 nt, Artificial Sequence
  Description of Artificial Sequence: Synthetic oligonucleotide
uuuggauaugaauuuggau

SEQ ID NO: 2882425 - RNA, 19 nt, Artificial Sequence
  Description of Artificial Sequence: Synthetic oligonucleotide
cauuucaaggcucuggcuc

SEQ ID NO: 2882426 - RNA, 19 nt, Artificial Sequence
  Description of Artificial Sequence: Synthetic oligonucleotide
caugcccaaaccaaagccc

SEQ ID NO: 2882427 - RNA, 19 nt, Artificial Sequence
  Description of Artificial Sequence: Synthetic oligonucleotide
uggugcacugaaucaaagg

SEQ ID NO: 2882428 - RNA, 19 nt, Artificial Sequence
  Description of Artificial Sequence: Synthetic oligonucleotide
acucccaauugucuuuccc

SEQ ID NO: 2882429 - RNA, 19 nt, Artificial Sequence
  Description of Artificial Sequence: Synthetic oligonucleotide
gcgaacauuaacaaaacag

SEQ ID NO: 2882430 - RNA, 19 nt, Artificial Sequence
  Description of Artificial Sequence: Synthetic oligonucleotide
aucaaaggauggcaucugg

SEQ ID NO: 2882431 - RNA, 19 nt, Artificial Sequence
  Description of Artificial Sequence: Synthetic oligonucleotide
gaaaugcgaacauuaacaa

SEQ ID NO: 2882432 - RNA, 19 nt, Artificial Sequence
  Description of Artificial Sequence: Synthetic oligonucleotide
guuuaucuuguccacuccc

SEQ ID NO: 2882433 - RNA, 19 nt, Artificial Sequence
  Description of Artificial Sequence: Synthetic oligonucleotide
uuaguugacuccuggugca

SEQ ID NO: 2882434 - RNA, 19 nt, Artificial Sequence
  Description of Artificial Sequence: Synthetic oligonucleotide
uaucuuuggauaugaauuu

SEQ ID NO: 2882435 - RNA, 19 nt, Artificial Sequence
  Description of Artificial Sequence: Synthetic oligonucleotide
cugauguuuaucuugucca

SEQ ID NO: 2882436 - RNA, 19 nt, Artificial Sequence
  Description of Artificial Sequence: Synthetic oligonucleotide
gaugcucaggccuguaccc

SEQ ID NO: 2882437 - RNA, 19 nt, Artificial Sequence
  Description of Artificial Sequence: Synthetic oligonucleotide
auuaaaauuccauggccuu

SEQ ID NO: 2882438 - RNA, 19 nt, Artificial Sequence
  Description of Artificial Sequence: Synthetic oligonucleotide
uuaagccaaaaccuggguu

SEQ ID NO: 2882439 - RNA, 19 nt, Artificial Sequence
  Description of Artificial Sequence: Synthetic oligonucleotide
aacuggguuauggcugucc

SEQ ID NO: 2882440 - RNA, 19 nt, Artificial Sequence
  Description of Artificial Sequence: Synthetic oligonucleotide
uguuuaucuuguccacucc

SEQ ID NO: 2882441 - RNA, 19 nt, Artificial Sequence
  Description of Artificial Sequence: Synthetic oligonucleotide
gacgauuacaucugagauc

SEQ ID NO: 2882442 - RNA, 19 nt, Artificial Sequence
  Description of Artificial Sequence: Synthetic oligonucleotide
gaacuuuggaaagauguca

SEQ ID NO: 2882443 - RNA, 19 nt, Artificial Sequence
  Description of Artificial Sequence: Synthetic oligonucleotide
caugauagaucccacagaa

SEQ ID NO: 2882444 - RNA, 19 nt, Artificial Sequence
  Description of Artificial Sequence: Synthetic oligonucleotide
ugaaucaaaggauggcauc

SEQ ID NO: 2882445 - RNA, 19 nt, Artificial Sequence
  Description of Artificial Sequence: Synthetic oligonucleotide
acuuccaugauagauccca

SEQ ID NO: 2882446 - RNA, 19 nt, Artificial Sequence
  Description of Artificial Sequence: Synthetic oligonucleotide
uucuuuucauuccuccuaa

SEQ ID NO: 2882447 - RNA, 19 nt, Artificial Sequence
  Description of Artificial Sequence: Synthetic oligonucleotide
caucuggggcauuucaagg

SEQ ID NO: 2882448 - RNA, 19 nt, Artificial Sequence
  Description of Artificial Sequence: Synthetic oligonucleotide
ugcgaacauuaacaaaaca

SEQ ID NO: 2882449 - RNA, 19 nt, Artificial Sequence
  Description of Artificial Sequence: Synthetic oligonucleotide
cuggguucaaacucaugcc

SEQ ID NO: 2882450 - RNA, 19 nt, Artificial Sequence
  Description of Artificial Sequence: Synthetic oligonucleotide
acugaaucaaaggauggca

SEQ ID NO: 2882451 - RNA, 19 nt, Artificial Sequence
  Description of Artificial Sequence: Synthetic oligonucleotide
uccuaacuggguuauggcu

SEQ ID NO: 2882452 - RNA, 19 nt, Artificial Sequence
  Description of Artificial Sequence: Synthetic oligonucleotide
auuucaaggcucuggcuca

SEQ ID NO: 2882453 - RNA, 19 nt, Artificial Sequence
  Description of Artificial Sequence: Synthetic oligonucleotide
gcauuaaaauuccauggcc

SEQ ID NO: 2882454 - RNA, 19 nt, Artificial Sequence
  Description of Artificial Sequence: Synthetic oligonucleotide
gauagaucccacagaacug

SEQ ID NO: 2882455 - RNA, 19 nt, Artificial Sequence
  Description of Artificial Sequence: Synthetic oligonucleotide
uccuacuggguuuucucag

SEQ ID NO: 2882456 - RNA, 19 nt, Artificial Sequence
  Description of Artificial Sequence: Synthetic oligonucleotide
uuggaaagaugucagcauu

SEQ ID NO: 2882457 - RNA, 19 nt, Artificial Sequence
  Description of Artificial Sequence: Synthetic oligonucleotide
aucugagaucugcucaagg

SEQ ID NO: 2882458 - RNA, 19 nt, Artificial Sequence
  Description of Artificial Sequence: Synthetic oligonucleotide
ugauguuuaucuuguccac

SEQ ID NO: 2882459 - RNA, 19 nt, Artificial Sequence
  Description of Artificial Sequence: Synthetic oligonucleotide
uguacccaggcccaggcaa

SEQ ID NO: 2882460 - RNA, 19 nt, Artificial Sequence
  Description of Artificial Sequence: Synthetic oligonucleotide
ugaauuuggaugugaugaa

SEQ ID NO: 2882461 - RNA, 19 nt, Artificial Sequence
  Description of Artificial Sequence: Synthetic oligonucleotide
agaacuguucuccgcagca

SEQ ID NO: 2882462 - RNA, 19 nt, Artificial Sequence
  Description of Artificial Sequence: Synthetic oligonucleotide
ucaaucugaugcucaggcc

SEQ ID NO: 2882463 - RNA, 19 nt, Artificial Sequence
  Description of Artificial Sequence: Synthetic oligonucleotide
ccuggguucaaacucaugc

SEQ ID NO: 2882464 - RNA, 19 nt, Artificial Sequence
  Description of Artificial Sequence: Synthetic oligonucleotide
uggguuauggcuguccuac

SEQ ID NO: 2882465 - RNA, 19 nt, Artificial Sequence
  Description of Artificial Sequence: Synthetic oligonucleotide
cauuaacaaaacagugaac

SEQ ID NO: 2882466 - RNA, 19 nt, Artificial Sequence
  Description of Artificial Sequence: Synthetic oligonucleotide
aaaaggcauuaucuuugga

SEQ ID NO: 2882467 - RNA, 19 nt, Artificial Sequence
  Description of Artificial Sequence: Synthetic oligonucleotide
uggaugugaugaacuuugg

SEQ ID NO: 2882468 - RNA, 19 nt, Artificial Sequence
  Description of Artificial Sequence: Synthetic oligonucleotide
ucagguuucuguugucuga

SEQ ID NO: 2882469 - RNA, 19 nt, Artificial Sequence
  Description of Artificial Sequence: Synthetic oligonucleotide
ucuggggcauuucaaggcu

SEQ ID NO: 2882470 - RNA, 19 nt, Artificial Sequence
  Description of Artificial Sequence: Synthetic oligonucleotide
uauugacgauuacaucuga

SEQ ID NO: 2882471 - RNA, 19 nt, Artificial Sequence
  Description of Artificial Sequence: Synthetic oligonucleotide
ugcucaagguucucaucgg

SEQ ID NO: 2882472 - RNA, 19 nt, Artificial Sequence
  Description of Artificial Sequence: Synthetic oligonucleotide
ucuuguccacucccaauug

SEQ ID NO: 2882473 - RNA, 19 nt, Artificial Sequence
  Description of Artificial Sequence: Synthetic oligonucleotide
ggugcacugaaucaaagga

SEQ ID NO: 2882474 - RNA, 19 nt, Artificial Sequence
  Description of Artificial Sequence: Synthetic oligonucleotide
gauaugaauuuggauguga

SEQ ID NO: 2882475 - RNA, 19 nt, Artificial Sequence
  Description of Artificial Sequence: Synthetic oligonucleotide
aaucaaaggauggcaucug

SEQ ID NO: 2882476 - RNA, 19 nt, Artificial Sequence
  Description of Artificial Sequence: Synthetic oligonucleotide
caggcaaaggcuuaagcca

SEQ ID NO: 2882477 - RNA, 19 nt, Artificial Sequence
  Description of Artificial Sequence: Synthetic oligonucleotide
acuggguuuucucagguuu

SEQ ID NO: 2882478 - RNA, 19 nt, Artificial Sequence
  Description of Artificial Sequence: Synthetic oligonucleotide
caaacucaugcccaaacca

SEQ ID NO: 2882479 - RNA, 19 nt, Artificial Sequence
  Description of Artificial Sequence: Synthetic oligonucleotide
auagaucccacagaacugu

SEQ ID NO: 2882480 - RNA, 19 nt, Artificial Sequence
  Description of Artificial Sequence: Synthetic oligonucleotide
aacuguucuccgcagcaau

SEQ ID NO: 2882481 - RNA, 19 nt, Artificial Sequence
  Description of Artificial Sequence: Synthetic oligonucleotide
uggaaagaugucagcauua

SEQ ID NO: 2882482 - RNA, 19 nt, Artificial Sequence
  Description of Artificial Sequence: Synthetic oligonucleotide
gaauuuggaugugaugaac

SEQ ID NO: 2882483 - RNA, 19 nt, Artificial Sequence
  Description of Artificial Sequence: Synthetic oligonucleotide
ucuuucccauauuuauuga

SEQ ID NO: 2882484 - RNA, 19 nt, Artificial Sequence
  Description of Artificial Sequence: Synthetic oligonucleotide
uuaaaauuccauggccuuc

SEQ ID NO: 2882485 - RNA, 19 nt, Artificial Sequence
  Description of Artificial Sequence: Synthetic oligonucleotide
uucucaucggucacuucca

SEQ ID NO: 2882486 - RNA, 19 nt, Artificial Sequence
  Description of Artificial Sequence: Synthetic oligonucleotide
uguccacucccaauugucu

SEQ ID NO: 2882487 - RNA, 19 nt, Artificial Sequence
  Description of Artificial Sequence: Synthetic oligonucleotide
ucccacagaacuguucucc

SEQ ID NO: 2882488 - RNA, 19 nt, Artificial Sequence
  Description of Artificial Sequence: Synthetic oligonucleotide
agaugucagcauuaaaauu

SEQ ID NO: 2882489 - RNA, 19 nt, Artificial Sequence
  Description of Artificial Sequence: Synthetic oligonucleotide
cauuaaaauuccauggccu

SEQ ID NO: 2882490 - RNA, 19 nt, Artificial Sequence
  Description of Artificial Sequence: Synthetic oligonucleotide
aaacucaugcccaaaccaa

SEQ ID NO: 2882491 - RNA, 19 nt, Artificial Sequence
  Description of Artificial Sequence: Synthetic oligonucleotide
cuuuggaaagaugucagca

SEQ ID NO: 2882492 - RNA, 19 nt, Artificial Sequence
  Description of Artificial Sequence: Synthetic oligonucleotide
uuacaucugagaucugcuc

SEQ ID NO: 2882493 - RNA, 19 nt, Artificial Sequence
  Description of Artificial Sequence: Synthetic oligonucleotide
aaaccuggguucaaacuca

SEQ ID NO: 2882494 - RNA, 19 nt, Artificial Sequence
  Description of Artificial Sequence: Synthetic oligonucleotide
cuuuggauaugaauuugga

SEQ ID NO: 2882495 - RNA, 19 nt, Artificial Sequence
  Description of Artificial Sequence: Synthetic oligonucleotide
cuuccaagaaaugcgaaca

SEQ ID NO: 2882496 - RNA, 19 nt, Artificial Sequence
  Description of Artificial Sequence: Synthetic oligonucleotide
uuguccacucccaauuguc

SEQ ID NO: 2882497 - RNA, 19 nt, Artificial Sequence
  Description of Artificial Sequence: Synthetic oligonucleotide
ugucuuucccauauuuauu

SEQ ID NO: 2882498 - RNA, 19 nt, Artificial Sequence
  Description of Artificial Sequence: Synthetic oligonucleotide
cucaugcccaaaccaaagc

SEQ ID NO: 2882499 - RNA, 19 nt, Artificial Sequence
  Description of Artificial Sequence: Synthetic oligonucleotide
auuuggaugugaugaacuu

SEQ ID NO: 2882500 - RNA, 19 nt, Artificial Sequence
  Description of Artificial Sequence: Synthetic oligonucleotide
uuccaugauagaucccaca

SEQ ID NO: 2882501 - RNA, 19 nt, Artificial Sequence
  Description of Artificial Sequence: Synthetic oligonucleotide
caaugcuguuaguugacuc

SEQ ID NO: 2882502 - RNA, 19 nt, Artificial Sequence
  Description of Artificial Sequence: Synthetic oligonucleotide
uccauggccuuccaagaaa

SEQ ID NO: 2882503 - RNA, 19 nt, Artificial Sequence
  Description of Artificial Sequence: Synthetic oligonucleotide
aucuuguccacucccaauu

SEQ ID NO: 2882504 - RNA, 19 nt, Artificial Sequence
  Description of Artificial Sequence: Synthetic oligonucleotide
aaaauuccauggccuucca

SEQ ID NO: 2882505 - RNA, 19 nt, Artificial Sequence
  Description of Artificial Sequence: Synthetic oligonucleotide
gaucccacagaacuguucu

SEQ ID NO: 2882506 - RNA, 19 nt, Artificial Sequence
  Description of Artificial Sequence: Synthetic oligonucleotide
auuacaucugagaucugcu

SEQ ID NO: 2882507 - RNA, 19 nt, Artificial Sequence
  Description of Artificial Sequence: Synthetic oligonucleotide
acagaacuguucuccgcag

SEQ ID NO: 2882508 - RNA, 19 nt, Artificial Sequence
  Description of Artificial Sequence: Synthetic oligonucleotide
ucuguugucugauguuuau

SEQ ID NO: 2882509 - RNA, 19 nt, Artificial Sequence
  Description of Artificial Sequence: Synthetic oligonucleotide
uuccaagaaaugcgaacau

SEQ ID NO: 2882510 - RNA, 19 nt, Artificial Sequence
  Description of Artificial Sequence: Synthetic oligonucleotide
augcgaacauuaacaaaac

SEQ ID NO: 2882511 - RNA, 19 nt, Artificial Sequence
  Description of Artificial Sequence: Synthetic oligonucleotide
uguccuacuggguuuucuc

SEQ ID NO: 2882512 - RNA, 19 nt, Artificial Sequence
  Description of Artificial Sequence: Synthetic oligonucleotide
uuucuguugucugauguuu

SEQ ID NO: 2882513 - RNA, 19 nt, Artificial Sequence
  Description of Artificial Sequence: Synthetic oligonucleotide
gucacuuccaugauagauc

SEQ ID NO: 2882514 - RNA, 19 nt, Artificial Sequence
  Description of Artificial Sequence: Synthetic oligonucleotide
cuccuaacuggguuauggc

SEQ ID NO: 2882515 - RNA, 19 nt, Artificial Sequence
  Description of Artificial Sequence: Synthetic oligonucleotide
aggcauuaucuuuggauau

SEQ ID NO: 2882516 - RNA, 19 nt, Artificial Sequence
  Description of Artificial Sequence: Synthetic oligonucleotide
aucuuuggauaugaauuug

SEQ ID NO: 2882517 - RNA, 19 nt, Artificial Sequence
  Description of Artificial Sequence: Synthetic oligonucleotide
cucaagguucucaucgguc

SEQ ID NO: 2882518 - RNA, 19 nt, Artificial Sequence
  Description of Artificial Sequence: Synthetic oligonucleotide
uucuucguucuccuucuuc

SEQ ID NO: 2882519 - RNA, 19 nt, Artificial Sequence
  Description of Artificial Sequence: Synthetic oligonucleotide
cucagguuucuguugucug

SEQ ID NO: 2882520 - RNA, 19 nt, Artificial Sequence
  Description of Artificial Sequence: Synthetic oligonucleotide
cacugaaucaaaggauggc

SEQ ID NO: 2882521 - RNA, 19 nt, Artificial Sequence
  Description of Artificial Sequence: Synthetic oligonucleotide
auugacgauuacaucugag

SEQ ID NO: 2882522 - RNA, 19 nt, Artificial Sequence
  Description of Artificial Sequence: Synthetic oligonucleotide
gcuguuaguugacuccugg

SEQ ID NO: 2882523 - RNA, 19 nt, Artificial Sequence
  Description of Artificial Sequence: Synthetic oligonucleotide
gcagcaaugcuguuaguug

SEQ ID NO: 2882524 - RNA, 19 nt, Artificial Sequence
  Description of Artificial Sequence: Synthetic oligonucleotide
ggcauuucaaggcucuggc

SEQ ID NO: 2882525 - RNA, 19 nt, Artificial Sequence
  Description of Artificial Sequence: Synthetic oligonucleotide
gaaucaaaggauggcaucu

SEQ ID NO: 2882526 - RNA, 19 nt, Artificial Sequence
  Description of Artificial Sequence: Synthetic oligonucleotide
ucccaauugucuuucccau

SEQ ID NO: 2882527 - RNA, 19 nt, Artificial Sequence
  Description of Artificial Sequence: Synthetic oligonucleotide
ccuaacuggguuauggcug

SEQ ID NO: 2882528 - RNA, 19 nt, Artificial Sequence
  Description of Artificial Sequence: Synthetic oligonucleotide
acuggguuauggcuguccu

SEQ ID NO: 2882529 - RNA, 19 nt, Artificial Sequence
  Description of Artificial Sequence: Synthetic oligonucleotide
ugucagcauuaaaauucca

SEQ ID NO: 2882530 - RNA, 19 nt, Artificial Sequence
  Description of Artificial Sequence: Synthetic oligonucleotide
aaaccaaagcccaggccca

SEQ ID NO: 2882531 - RNA, 19 nt, Artificial Sequence
  Description of Artificial Sequence: Synthetic oligonucleotide
uggcucaaucugaugcuca

SEQ ID NO: 2882532 - RNA, 19 nt, Artificial Sequence
  Description of Artificial Sequence: Synthetic oligonucleotide
caaaggcuuaagccaaaac

SEQ ID NO: 2882533 - RNA, 19 nt, Artificial Sequence
  Description of Artificial Sequence: Synthetic oligonucleotide
agcaaugcuguuaguugac

SEQ ID NO: 2882534 - RNA, 19 nt, Artificial Sequence
  Description of Artificial Sequence: Synthetic oligonucleotide
ucaaggcucuggcucaauc

SEQ ID NO: 2882535 - RNA, 19 nt, Artificial Sequence
  Description of Artificial Sequence: Synthetic oligonucleotide
uguucuccgcagcaaugcu

SEQ ID NO: 2882536 - RNA, 19 nt, Artificial Sequence
  Description of Artificial Sequence: Synthetic oligonucleotide
uuuggaugugaugaacuuu

SEQ ID NO: 2882537 - RNA, 19 nt, Artificial Sequence
  Description of Artificial Sequence: Synthetic oligonucleotide
gugaaccacagauucuuuc

SEQ ID NO: 2882538 - RNA, 19 nt, Artificial Sequence
  Description of Artificial Sequence: Synthetic oligonucleotide
ucucagguuucuguugucu

SEQ ID NO: 2882539 - RNA, 19 nt, Artificial Sequence
  Description of Artificial Sequence: Synthetic oligonucleotide
uggggcauuucaaggcucu

SEQ ID NO: 2882540 - RNA, 19 nt, Artificial Sequence
  Description of Artificial Sequence: Synthetic oligonucleotide
augauagaucccacagaac

SEQ ID NO: 2882541 - RNA, 19 nt, Artificial Sequence
  Description of Artificial Sequence: Synthetic oligonucleotide
uaucuuguccacucccaau

SEQ ID NO: 2882542 - RNA, 19 nt, Artificial Sequence
  Description of Artificial Sequence: Synthetic oligonucleotide
uucuguugucugauguuua

SEQ ID NO: 2882543 - RNA, 19 nt, Artificial Sequence
  Description of Artificial Sequence: Synthetic oligonucleotide
uggcaucuggggcauuuca

SEQ ID NO: 2882544 - RNA, 19 nt, Artificial Sequence
  Description of Artificial Sequence: Synthetic oligonucleotide
auggcuguccuacuggguu

SEQ ID NO: 2882545 - RNA, 19 nt, Artificial Sequence
  Description of Artificial Sequence: Synthetic oligonucleotide
guugacuccuggugcacug

SEQ ID NO: 2882546 - RNA, 19 nt, Artificial Sequence
  Description of Artificial Sequence: Synthetic oligonucleotide
aagccaaaaccuggguuca

SEQ ID NO: 2882547 - RNA, 19 nt, Artificial Sequence
  Description of Artificial Sequence: Synthetic oligonucleotide
gaaagaugucagcauuaaa

SEQ ID NO: 2882548 - RNA, 19 nt, Artificial Sequence
  Description of Artificial Sequence: Synthetic oligonucleotide
ggcuuaagccaaaaccugg

SEQ ID NO: 2882549 - RNA, 19 nt, Artificial Sequence
  Description of Artificial Sequence: Synthetic oligonucleotide
auaugaauuuggaugugau

SEQ ID NO: 2882550 - RNA, 19 nt, Artificial Sequence
  Description of Artificial Sequence: Synthetic oligonucleotide
uuccauggccuuccaagaa

SEQ ID NO: 2882551 - RNA, 19 nt, Artificial Sequence
  Description of Artificial Sequence: Synthetic oligonucleotide
ugcucaggccuguacccag

SEQ ID NO: 2882552 - RNA, 19 nt, Artificial Sequence
  Description of Artificial Sequence: Synthetic oligonucleotide
cuggugcacugaaucaaag

SEQ ID NO: 2882553 - RNA, 19 nt, Artificial Sequence
  Description of Artificial Sequence: Synthetic oligonucleotide
cucccaauugucuuuccca

SEQ ID NO: 2882554 - RNA, 19 nt, Artificial Sequence
  Description of Artificial Sequence: Synthetic oligonucleotide
caagaaaugcgaacauuaa

SEQ ID NO: 2882555 - RNA, 19 nt, Artificial Sequence
  Description of Artificial Sequence: Synthetic oligonucleotide
acaaaacagugaaccacag

SEQ ID NO: 2882556 - RNA, 19 nt, Artificial Sequence
  Description of Artificial Sequence: Synthetic oligonucleotide
cuguucuccgcagcaaugc

SEQ ID NO: 2882557 - RNA, 19 nt, Artificial Sequence
  Description of Artificial Sequence: Synthetic oligonucleotide
uucguucuccuucuucuuu

SEQ ID NO: 2882558 - RNA, 19 nt, Artificial Sequence
  Description of Artificial Sequence: Synthetic oligonucleotide
acucaugcccaaaccaaag

SEQ ID NO: 2882559 - RNA, 19 nt, Artificial Sequence
  Description of Artificial Sequence: Synthetic oligonucleotide
caaucugaugcucaggccu

SEQ ID NO: 2882560 - RNA, 19 nt, Artificial Sequence
  Description of Artificial Sequence: Synthetic oligonucleotide
ucuuuucauuccuccuaac

SEQ ID NO: 2882561 - RNA, 19 nt, Artificial Sequence
  Description of Artificial Sequence: Synthetic oligonucleotide
ugcccaaaccaaagcccag

SEQ ID NO: 2882562 - RNA, 19 nt, Artificial Sequence
  Description of Artificial Sequence: Synthetic oligonucleotide
aacucaugcccaaaccaaa

SEQ ID NO: 2882563 - RNA, 19 nt, Artificial Sequence
  Description of Artificial Sequence: Synthetic oligonucleotide
gcuuaagccaaaaccuggg

SEQ ID NO: 2882564 - RNA, 19 nt, Artificial Sequence
  Description of Artificial Sequence: Synthetic oligonucleotide
cagcaaugcuguuaguuga

SEQ ID NO: 2882565 - RNA, 19 nt, Artificial Sequence
  Description of Artificial Sequence: Synthetic oligonucleotide
cuuccaugauagaucccac

SEQ ID NO: 2882566 - RNA, 19 nt, Artificial Sequence
  Description of Artificial Sequence: Synthetic oligonucleotide
aaacagugaaccacagauu

SEQ ID NO: 2882567 - RNA, 19 nt, Artificial Sequence
  Description of Artificial Sequence: Synthetic oligonucleotide
gcaucuggggcauuucaag

SEQ ID NO: 2882568 - RNA, 19 nt, Artificial Sequence
  Description of Artificial Sequence: Synthetic oligonucleotide
gguuauggcuguccuacug

SEQ ID NO: 2882569 - RNA, 19 nt, Artificial Sequence
  Description of Artificial Sequence: Synthetic oligonucleotide
ucccauauuuauugacgau

SEQ ID NO: 2882570 - RNA, 19 nt, Artificial Sequence
  Description of Artificial Sequence: Synthetic oligonucleotide
aucccacagaacuguucuc

SEQ ID NO: 2882571 - RNA, 19 nt, Artificial Sequence
  Description of Artificial Sequence: Synthetic oligonucleotide
aagguucucaucggucacu

SEQ ID NO: 2882572 - RNA, 19 nt, Artificial Sequence
  Description of Artificial Sequence: Synthetic oligonucleotide
aucugcucaagguucucau

SEQ ID NO: 2882573 - RNA, 19 nt, Artificial Sequence
  Description of Artificial Sequence: Synthetic oligonucleotide
auuccuccuaacuggguua

SEQ ID NO: 2882574 - RNA, 19 nt, Artificial Sequence
  Description of Artificial Sequence: Synthetic oligonucleotide
ugcuguuaguugacuccug

SEQ ID NO: 2882575 - RNA, 19 nt, Artificial Sequence
  Description of Artificial Sequence: Synthetic oligonucleotide
ucauuccuccuaacugggu

SEQ ID NO: 2882576 - RNA, 19 nt, Artificial Sequence
  Description of Artificial Sequence: Synthetic oligonucleotide
ucugcucaagguucucauc

SEQ ID NO: 2882577 - RNA, 19 nt, Artificial Sequence
  Description of Artificial Sequence: Synthetic oligonucleotide
cuggguuuucucagguuuc

SEQ ID NO: 2882578 - RNA, 19 nt, Artificial Sequence
  Description of Artificial Sequence: Synthetic oligonucleotide
cagaacuguucuccgcagc

SEQ ID NO: 2882579 - RNA, 19 nt, Artificial Sequence
  Description of Artificial Sequence: Synthetic oligonucleotide
agaucccacagaacuguuc

SEQ ID NO: 2882580 - RNA, 19 nt, Artificial Sequence
  Description of Artificial Sequence: Synthetic oligonucleotide
cuuuucauuccuccuaacu

SEQ ID NO: 2882581 - RNA, 19 nt, Artificial Sequence
  Description of Artificial Sequence: Synthetic oligonucleotide
cuucuuuucauuccuccua

SEQ ID NO: 2882582 - RNA, 19 nt, Artificial Sequence
  Description of Artificial Sequence: Synthetic oligonucleotide
aggcuuaagccaaaaccug

SEQ ID NO: 2882583 - RNA, 19 nt, Artificial Sequence
  Description of Artificial Sequence: Synthetic oligonucleotide
caagguucucaucggucac

SEQ ID NO: 2882584 - RNA, 19 nt, Artificial Sequence
  Description of Artificial Sequence: Synthetic oligonucleotide
uccuggugcacugaaucaa

SEQ ID NO: 2882585 - RNA, 19 nt, Artificial Sequence
  Description of Artificial Sequence: Synthetic oligonucleotide
ucguucuccuucuucuuuu

SEQ ID NO: 2882586 - RNA, 19 nt, Artificial Sequence
  Description of Artificial Sequence: Synthetic oligonucleotide
uccacucccaauugucuuu

SEQ ID NO: 2882587 - RNA, 19 nt, Artificial Sequence
  Description of Artificial Sequence: Synthetic oligonucleotide
cucaucggucacuuccaug

SEQ ID NO: 2882588 - RNA, 19 nt, Artificial Sequence
  Description of Artificial Sequence: Synthetic oligonucleotide
auugucuuucccauauuua

SEQ ID NO: 2882589 - RNA, 19 nt, Artificial Sequence
  Description of Artificial Sequence: Synthetic oligonucleotide
ccuuccaagaaaugcgaac

SEQ ID NO: 2882590 - RNA, 19 nt, Artificial Sequence
  Description of Artificial Sequence: Synthetic oligonucleotide
gcacugaaucaaaggaugg

SEQ ID NO: 2882591 - RNA, 19 nt, Artificial Sequence
  Description of Artificial Sequence: Synthetic oligonucleotide
uggguuuucucagguuucu

SEQ ID NO: 2882592 - RNA, 19 nt, Artificial Sequence
  Description of Artificial Sequence: Synthetic oligonucleotide
caaaacagugaaccacaga

SEQ ID NO: 2882593 - RNA, 19 nt, Artificial Sequence
  Description of Artificial Sequence: Synthetic oligonucleotide
augcccaaaccaaagccca

SEQ ID NO: 2882594 - RNA, 19 nt, Artificial Sequence
  Description of Artificial Sequence: Synthetic oligonucleotide
ccuccuaacuggguuaugg

SEQ ID NO: 2882595 - RNA, 19 nt, Artificial Sequence
  Description of Artificial Sequence: Synthetic oligonucleotide
caaaaccuggguucaaacu

SEQ ID NO: 2882596 - RNA, 19 nt, Artificial Sequence
  Description of Artificial Sequence: Synthetic oligonucleotide
ccuacuggguuuucucagg

SEQ ID NO: 2882597 - RNA, 19 nt, Artificial Sequence
  Description of Artificial Sequence: Synthetic oligonucleotide
gauguuuaucuuguccacu

SEQ ID NO: 2882598 - RNA, 19 nt, Artificial Sequence
  Description of Artificial Sequence: Synthetic oligonucleotide
ggcucaaucugaugcucag

SEQ ID NO: 2882599 - RNA, 19 nt, Artificial Sequence
  Description of Artificial Sequence: Synthetic oligonucleotide
cugaugcucaggccuguac

SEQ ID NO: 2882600 - RNA, 19 nt, Artificial Sequence
  Description of Artificial Sequence: Synthetic oligonucleotide
cauggccuuccaagaaaug

SEQ ID NO: 2882601 - RNA, 19 nt, Artificial Sequence
  Description of Artificial Sequence: Synthetic oligonucleotide
guccuacuggguuuucuca

SEQ ID NO: 2882602 - RNA, 19 nt, Artificial Sequence
  Description of Artificial Sequence: Synthetic oligonucleotide
gugaugaacuuuggaaaga

SEQ ID NO: 2882603 - RNA, 19 nt, Artificial Sequence
  Description of Artificial Sequence: Synthetic oligonucleotide
gaucugcucaagguucuca

SEQ ID NO: 2882604 - RNA, 19 nt, Artificial Sequence
  Description of Artificial Sequence: Synthetic oligonucleotide
agguuucuguugucugaug

SEQ ID NO: 2882605 - RNA, 19 nt, Artificial Sequence
  Description of Artificial Sequence: Synthetic oligonucleotide
ucucaucggucacuuccau

SEQ ID NO: 2882606 - RNA, 19 nt, Artificial Sequence
  Description of Artificial Sequence: Synthetic oligonucleotide
acuguucuccgcagcaaug

SEQ ID NO: 2882607 - RNA, 19 nt, Artificial Sequence
  Description of Artificial Sequence: Synthetic oligonucleotide
ccaaaaccuggguucaaac

SEQ ID NO: 2882608 - RNA, 19 nt, Artificial Sequence
  Description of Artificial Sequence: Synthetic oligonucleotide
cuuucuucguucuccuucu

SEQ ID NO: 2882609 - RNA, 19 nt, Artificial Sequence
  Description of Artificial Sequence: Synthetic oligonucleotide
gguuucuguugucugaugu

SEQ ID NO: 2882610 - RNA, 19 nt, Artificial Sequence
  Description of Artificial Sequence: Synthetic oligonucleotide
acagugaaccacagauucu

SEQ ID NO: 2882611 - RNA, 19 nt, Artificial Sequence
  Description of Artificial Sequence: Synthetic oligonucleotide
aucggucacuuccaugaua

SEQ ID NO: 2882612 - RNA, 19 nt, Artificial Sequence
  Description of Artificial Sequence: Synthetic oligonucleotide
ggcauuaucuuuggauaug

SEQ ID NO: 2882613 - RNA, 19 nt, Artificial Sequence
  Description of Artificial Sequence: Synthetic oligonucleotide
gggcauuucaaggcucugg

SEQ ID NO: 2882614 - RNA, 19 nt, Artificial Sequence
  Description of Artificial Sequence: Synthetic oligonucleotide
cucaggccuguacccaggc

SEQ ID NO: 2882615 - RNA, 19 nt, Artificial Sequence
  Description of Artificial Sequence: Synthetic oligonucleotide
guuuucucagguuucuguu

SEQ ID NO: 2882616 - RNA, 19 nt, Artificial Sequence
  Description of Artificial Sequence: Synthetic oligonucleotide
ccauauuuauugacgauua

SEQ ID NO: 2882617 - RNA, 19 nt, Artificial Sequence
  Description of Artificial Sequence: Synthetic oligonucleotide
cugaaucaaaggauggcau

SEQ ID NO: 2882618 - RNA, 19 nt, Artificial Sequence
  Description of Artificial Sequence: Synthetic oligonucleotide
aggcaaaggcuuaagccaa

SEQ ID NO: 2882619 - RNA, 19 nt, Artificial Sequence
  Description of Artificial Sequence: Synthetic oligonucleotide
cgaacauuaacaaaacagu

SEQ ID NO: 2882620 - RNA, 19 nt, Artificial Sequence
  Description of Artificial Sequence: Synthetic oligonucleotide
cauuaucuuuggauaugaa

SEQ ID NO: 2882621 - RNA, 19 nt, Artificial Sequence
  Description of Artificial Sequence: Synthetic oligonucleotide
gguuuucucagguuucugu

SEQ ID NO: 2882622 - RNA, 19 nt, Artificial Sequence
  Description of Artificial Sequence: Synthetic oligonucleotide
agaucugcucaagguucuc

SEQ ID NO: 2882623 - RNA, 19 nt, Artificial Sequence
  Description of Artificial Sequence: Synthetic oligonucleotide
cuccuggugcacugaauca

SEQ ID NO: 2882624 - RNA, 19 nt, Artificial Sequence
  Description of Artificial Sequence: Synthetic oligonucleotide
cccacagaacuguucuccg

SEQ ID NO: 2882625 - RNA, 19 nt, Artificial Sequence
  Description of Artificial Sequence: Synthetic oligonucleotide
caucugagaucugcucaag

SEQ ID NO: 2882626 - RNA, 19 nt, Artificial Sequence
  Description of Artificial Sequence: Synthetic oligonucleotide
uucucagguuucuguuguc

SEQ ID NO: 2882627 - RNA, 19 nt, Artificial Sequence
  Description of Artificial Sequence: Synthetic oligonucleotide
cacuuccaugauagauccc

SEQ ID NO: 2882628 - RNA, 19 nt, Artificial Sequence
  Description of Artificial Sequence: Synthetic oligonucleotide
cuggggcauuucaaggcuc

SEQ ID NO: 2882629 - RNA, 19 nt, Artificial Sequence
  Description of Artificial Sequence: Synthetic oligonucleotide
cuguugucugauguuuauc

SEQ ID NO: 2882630 - RNA, 19 nt, Artificial Sequence
  Description of Artificial Sequence: Synthetic oligonucleotide
gcauuaucuuuggauauga

SEQ ID NO: 2882631 - RNA, 19 nt, Artificial Sequence
  Description of Artificial Sequence: Synthetic oligonucleotide
cuaacuggguuauggcugu

SEQ ID NO: 2882632 - RNA, 19 nt, Artificial Sequence
  Description of Artificial Sequence: Synthetic oligonucleotide
uagaucccacagaacuguu

SEQ ID NO: 2882633 - RNA, 19 nt, Artificial Sequence
  Description of Artificial Sequence: Synthetic oligonucleotide
aguugacuccuggugcacu

SEQ ID NO: 2882634 - RNA, 19 nt, Artificial Sequence
  Description of Artificial Sequence: Synthetic oligonucleotide
uacuggguuuucucagguu

SEQ ID NO: 2882635 - RNA, 19 nt, Artificial Sequence
  Description of Artificial Sequence: Synthetic oligonucleotide
caaggcucuggcucaaucu

SEQ ID NO: 2882636 - RNA, 19 nt, Artificial Sequence
  Description of Artificial Sequence: Synthetic oligonucleotide
uacccaggcccaggcaaag

SEQ ID NO: 2882637 - RNA, 19 nt, Artificial Sequence
  Description of Artificial Sequence: Synthetic oligonucleotide
auggcaucuggggcauuuc

SEQ ID NO: 2882638 - RNA, 19 nt, Artificial Sequence
  Description of Artificial Sequence: Synthetic oligonucleotide
uuccuccuaacuggguuau

SEQ ID NO: 2882639 - RNA, 19 nt, Artificial Sequence
  Description of Artificial Sequence: Synthetic oligonucleotide
cuggcucaaucugaugcuc

SEQ ID NO: 2882640 - RNA, 19 nt, Artificial Sequence
  Description of Artificial Sequence: Synthetic oligonucleotide
uaguugacuccuggugcac

SEQ ID NO: 2882641 - RNA, 19 nt, Artificial Sequence
  Description of Artificial Sequence: Synthetic oligonucleotide
cuuaagccaaaaccugggu

SEQ ID NO: 2882642 - RNA, 19 nt, Artificial Sequence
  Description of Artificial Sequence: Synthetic oligonucleotide
cacucccaauugucuuucc

SEQ ID NO: 2882643 - RNA, 19 nt, Artificial Sequence
  Description of Artificial Sequence: Synthetic oligonucleotide
gguucaaacucaugcccaa

SEQ ID NO: 2882644 - RNA, 19 nt, Artificial Sequence
  Description of Artificial Sequence: Synthetic oligonucleotide
ggauaugaauuuggaugug

SEQ ID NO: 2882645 - RNA, 19 nt, Artificial Sequence
  Description of Artificial Sequence: Synthetic oligonucleotide
gucugauguuuaucuuguc

SEQ ID NO: 2882646 - RNA, 19 nt, Artificial Sequence
  Description of Artificial Sequence: Synthetic oligonucleotide
uggcuguccuacuggguuu

SEQ ID NO: 2882647 - RNA, 19 nt, Artificial Sequence
  Description of Artificial Sequence: Synthetic oligonucleotide
gcccaaaccaaagcccagg

SEQ ID NO: 2882648 - RNA, 19 nt, Artificial Sequence
  Description of Artificial Sequence: Synthetic oligonucleotide
gcucaaucugaugcucagg

SEQ ID NO: 2882649 - RNA, 19 nt, Artificial Sequence
  Description of Artificial Sequence: Synthetic oligonucleotide
ggaaagaugucagcauuaa

SEQ ID NO: 2882650 - RNA, 19 nt, Artificial Sequence
  Description of Artificial Sequence: Synthetic oligonucleotide
cccaggcaaaggcuuaagc

SEQ ID NO: 2882651 - RNA, 19 nt, Artificial Sequence
  Description of Artificial Sequence: Synthetic oligonucleotide
aaccuggguucaaacucau

SEQ ID NO: 2882652 - RNA, 19 nt, Artificial Sequence
  Description of Artificial Sequence: Synthetic oligonucleotide
gaacuguucuccgcagcaa

SEQ ID NO: 2882653 - RNA, 19 nt, Artificial Sequence
  Description of Artificial Sequence: Synthetic oligonucleotide
cugagaucugcucaagguu

SEQ ID NO: 2882654 - RNA, 19 nt, Artificial Sequence
  Description of Artificial Sequence: Synthetic oligonucleotide
guugucugauguuuaucuu

SEQ ID NO: 2882655 - RNA, 19 nt, Artificial Sequence
  Description of Artificial Sequence: Synthetic oligonucleotide
ccuguacccaggcccaggc

SEQ ID NO: 2882656 - RNA, 19 nt, Artificial Sequence
  Description of Artificial Sequence: Synthetic oligonucleotide
cuuguccacucccaauugu

SEQ ID NO: 2882657 - RNA, 19 nt, Artificial Sequence
  Description of Artificial Sequence: Synthetic oligonucleotide
cauuccuccuaacuggguu

SEQ ID NO: 2882658 - RNA, 19 nt, Artificial Sequence
  Description of Artificial Sequence: Synthetic oligonucleotide
cuguuaguugacuccuggu

SEQ ID NO: 2882659 - RNA, 19 nt, Artificial Sequence
  Description of Artificial Sequence: Synthetic oligonucleotide
agguucucaucggucacuu

SEQ ID NO: 2882660 - RNA, 19 nt, Artificial Sequence
  Description of Artificial Sequence: Synthetic oligonucleotide
gugcacugaaucaaaggau

SEQ ID NO: 2882661 - RNA, 19 nt, Artificial Sequence
  Description of Artificial Sequence: Synthetic oligonucleotide
aggcucuggcucaaucuga

SEQ ID NO: 2882662 - RNA, 19 nt, Artificial Sequence
  Description of Artificial Sequence: Synthetic oligonucleotide
acccaggcccaggcaaagg

SEQ ID NO: 2882663 - RNA, 19 nt, Artificial Sequence
  Description of Artificial Sequence: Synthetic oligonucleotide
cuacuggguuuucucaggu

SEQ ID NO: 2882664 - RNA, 19 nt, Artificial Sequence
  Description of Artificial Sequence: Synthetic oligonucleotide
ggucacuuccaugauagau

SEQ ID NO: 2882665 - RNA, 19 nt, Artificial Sequence
  Description of Artificial Sequence: Synthetic oligonucleotide
agugaaccacagauucuuu

SEQ ID NO: 2882666 - RNA, 19 nt, Artificial Sequence
  Description of Artificial Sequence: Synthetic oligonucleotide
guucaaacucaugcccaaa

SEQ ID NO: 2882667 - RNA, 19 nt, Artificial Sequence
  Description of Artificial Sequence: Synthetic oligonucleotide
ccaugauagaucccacaga

SEQ ID NO: 2882668 - RNA, 19 nt, Artificial Sequence
  Description of Artificial Sequence: Synthetic oligonucleotide
uccuccuaacuggguuaug

SEQ ID NO: 2882669 - RNA, 19 nt, Artificial Sequence
  Description of Artificial Sequence: Synthetic oligonucleotide
ucugaugcucaggccugua

SEQ ID NO: 2882670 - RNA, 19 nt, Artificial Sequence
  Description of Artificial Sequence: Synthetic oligonucleotide
ccaauugucuuucccauau

SEQ ID NO: 2882671 - RNA, 19 nt, Artificial Sequence
  Description of Artificial Sequence: Synthetic oligonucleotide
cagugaaccacagauucuu

SEQ ID NO: 2882672 - RNA, 19 nt, Artificial Sequence
  Description of Artificial Sequence: Synthetic oligonucleotide
ggccuuccaagaaaugcga

SEQ ID NO: 2882673 - RNA, 19 nt, Artificial Sequence
  Description of Artificial Sequence: Synthetic oligonucleotide
aggccuguacccaggccca

SEQ ID NO: 2882674 - RNA, 19 nt, Artificial Sequence
  Description of Artificial Sequence: Synthetic oligonucleotide
gauggcaucuggggcauuu

SEQ ID NO: 2882675 - RNA, 19 nt, Artificial Sequence
  Description of Artificial Sequence: Synthetic oligonucleotide
ggguuuucucagguuucug

SEQ ID NO: 2882676 - RNA, 19 nt, Artificial Sequence
  Description of Artificial Sequence: Synthetic oligonucleotide
accuggguucaaacucaug

SEQ ID NO: 2882677 - RNA, 19 nt, Artificial Sequence
  Description of Artificial Sequence: Synthetic oligonucleotide
cuggguuauggcuguccua

SEQ ID NO: 2882678 - RNA, 19 nt, Artificial Sequence
  Description of Artificial Sequence: Synthetic oligonucleotide
guccacucccaauugucuu

SEQ ID NO: 2882679 - RNA, 19 nt, Artificial Sequence
  Description of Artificial Sequence: Synthetic oligonucleotide
uucaaggcucuggcucaau

SEQ ID NO: 2882680 - RNA, 19 nt, Artificial Sequence
  Description of Artificial Sequence: Synthetic oligonucleotide
uaacuggguuauggcuguc

SEQ ID NO: 2882681 - RNA, 19 nt, Artificial Sequence
  Description of Artificial Sequence: Synthetic oligonucleotide
gcucaggccuguacccagg

SEQ ID NO: 2882682 - RNA, 19 nt, Artificial Sequence
  Description of Artificial Sequence: Synthetic oligonucleotide
cuguacccaggcccaggca

SEQ ID NO: 2882683 - RNA, 19 nt, Artificial Sequence
  Description of Artificial Sequence: Synthetic oligonucleotide
ggcaucuggggcauuucaa

SEQ ID NO: 2882684 - RNA, 19 nt, Artificial Sequence
  Description of Artificial Sequence: Synthetic oligonucleotide
gcauuucaaggcucuggcu

SEQ ID NO: 2882685 - RNA, 19 nt, Artificial Sequence
  Description of Artificial Sequence: Synthetic oligonucleotide
guacccaggcccaggcaaa

SEQ ID NO: 2882686 - RNA, 19 nt, Artificial Sequence
  Description of Artificial Sequence: Synthetic oligonucleotide
gguucucaucggucacuuc

SEQ ID NO: 2882687 - RNA, 19 nt, Artificial Sequence
  Description of Artificial Sequence: Synthetic oligonucleotide
gcucaagguucucaucggu

SEQ ID NO: 2882688 - RNA, 19 nt, Artificial Sequence
  Description of Artificial Sequence: Synthetic oligonucleotide
ucuccgcagcaaugcuguu

SEQ ID NO: 2882689 - RNA, 19 nt, Artificial Sequence
  Description of Artificial Sequence: Synthetic oligonucleotide
cuccgcagcaaugcuguua

SEQ ID NO: 2882690 - RNA, 19 nt, Artificial Sequence
  Description of Artificial Sequence: Synthetic oligonucleotide
gcaaaggcuuaagccaaaa

SEQ ID NO: 2882691 - RNA, 19 nt, Artificial Sequence
  Description of Artificial Sequence: Synthetic oligonucleotide
agccaaaaccuggguucaa

SEQ ID NO: 2882692 - RNA, 19 nt, Artificial Sequence
  Description of Artificial Sequence: Synthetic oligonucleotide
gccuguacccaggcccagg

SEQ ID NO: 2882693 - RNA, 19 nt, Artificial Sequence
  Description of Artificial Sequence: Synthetic oligonucleotide
cagguuucuguugucugau

SEQ ID NO: 2882694 - RNA, 19 nt, Artificial Sequence
  Description of Artificial Sequence: Synthetic oligonucleotide
cuucguucuccuucuucuu

SEQ ID NO: 2882695 - RNA, 19 nt, Artificial Sequence
  Description of Artificial Sequence: Synthetic oligonucleotide
gccaaaaccuggguucaaa

SEQ ID NO: 2882696 - RNA, 19 nt, Artificial Sequence
  Description of Artificial Sequence: Synthetic oligonucleotide
cccauauuuauugacgauu

SEQ ID NO: 2882697 - RNA, 19 nt, Artificial Sequence
  Description of Artificial Sequence: Synthetic oligonucleotide
cguucuccuucuucuuuuc

SEQ ID NO: 2882698 - RNA, 19 nt, Artificial Sequence
  Description of Artificial Sequence: Synthetic oligonucleotide
ccacucccaauugucuuuc

SEQ ID NO: 2882699 - RNA, 19 nt, Artificial Sequence
  Description of Artificial Sequence: Synthetic oligonucleotide
ggggcauuucaaggcucug

SEQ ID NO: 2882700 - RNA, 19 nt, Artificial Sequence
  Description of Artificial Sequence: Synthetic oligonucleotide
caauugucuuucccauauu

SEQ ID NO: 2882701 - RNA, 19 nt, Artificial Sequence
  Description of Artificial Sequence: Synthetic oligonucleotide
gcaaugcuguuaguugacu

SEQ ID NO: 2882702 - RNA, 19 nt, Artificial Sequence
  Description of Artificial Sequence: Synthetic oligonucleotide
gccuuccaagaaaugcgaa

SEQ ID NO: 2882703 - RNA, 19 nt, Artificial Sequence
  Description of Artificial Sequence: Synthetic oligonucleotide
gacuccuggugcacugaau

SEQ ID NO: 2882704 - RNA, 19 nt, Artificial Sequence
  Description of Artificial Sequence: Synthetic oligonucleotide
gcccaggcaaaggcuuaag

SEQ ID NO: 2882705 - RNA, 19 nt, Artificial Sequence
  Description of Artificial Sequence: Synthetic oligonucleotide
ggcaaaggcuuaagccaaa

SEQ ID NO: 2882706 - RNA, 19 nt, Artificial Sequence
  Description of Artificial Sequence: Synthetic oligonucleotide
ccauggccuuccaagaaau

SEQ ID NO: 2882707 - RNA, 19 nt, Artificial Sequence
  Description of Artificial Sequence: Synthetic oligonucleotide
aggcccaggcaaaggcuua

SEQ ID NO: 2882708 - RNA, 19 nt, Artificial Sequence
  Description of Artificial Sequence: Synthetic oligonucleotide
cccaauugucuuucccaua

SEQ ID NO: 2882709 - RNA, 19 nt, Artificial Sequence
  Description of Artificial Sequence: Synthetic oligonucleotide
caucggucacuuccaugau

SEQ ID NO: 2882710 - RNA, 19 nt, Artificial Sequence
  Description of Artificial Sequence: Synthetic oligonucleotide
ggguuauggcuguccuacu

SEQ ID NO: 2882711 - RNA, 19 nt, Artificial Sequence
  Description of Artificial Sequence: Synthetic oligonucleotide
ggccuguacccaggcccag

SEQ ID NO: 2882712 - RNA, 19 nt, Artificial Sequence
  Description of Artificial Sequence: Synthetic oligonucleotide
ccaggcccaggcaaaggcu

SEQ ID NO: 2882713 - RNA, 19 nt, Artificial Sequence
  Description of Artificial Sequence: Synthetic oligonucleotide
cgauuacaucugagaucug

SEQ ID NO: 2882714 - RNA, 19 nt, Artificial Sequence
  Description of Artificial Sequence: Synthetic oligonucleotide
ggcccaggcaaaggcuuaa

SEQ ID NO: 2882715 - RNA, 19 nt, Artificial Sequence
  Description of Artificial Sequence: Synthetic oligonucleotide
gcuguccuacuggguuuuc

SEQ ID NO: 2882716 - RNA, 19 nt, Artificial Sequence
  Description of Artificial Sequence: Synthetic oligonucleotide
cgcagcaaugcuguuaguu

SEQ ID NO: 2882717 - RNA, 19 nt, Artificial Sequence
  Description of Artificial Sequence: Synthetic oligonucleotide
ggcuguccuacuggguuuu

SEQ ID NO: 2882718 - RNA, 19 nt, Artificial Sequence
  Description of Artificial Sequence: Synthetic oligonucleotide
cggucacuuccaugauaga

SEQ ID NO: 2882719 - RNA, 19 nt, Artificial Sequence
  Description of Artificial Sequence: Synthetic oligonucleotide
aaauauauuaaacuggaac

SEQ ID NO: 2882720 - RNA, 19 nt, Artificial Sequence
  Description of Artificial Sequence: Synthetic oligonucleotide
aauauauuaaacuggaaca

SEQ ID NO: 2882721 - RNA, 19 nt, Artificial Sequence
  Description of Artificial Sequence: Synthetic oligonucleotide
uacaaauauauuaaacugg

SEQ ID NO: 2882722 - RNA, 19 nt, Artificial Sequence
  Description of Artificial Sequence: Synthetic oligonucleotide
uuuacaaauauauuaaacu

SEQ ID NO: 2882723 - RNA, 19 nt, Artificial Sequence
  Description of Artificial Sequence: Synthetic oligonucleotide
uuuuacaaauauauuaaac

SEQ ID NO: 2882724 - RNA, 19 nt, Artificial Sequence
  Description of Artificial Sequence: Synthetic oligonucleotide
aacuggaacauucaguaca

SEQ ID NO: 2882725 - RNA, 19 nt, Artificial Sequence
  Description of Artificial Sequence: Synthetic oligonucleotide
aacaugacgacagucuggc

SEQ ID NO: 2882726 - RNA, 19 nt, Artificial Sequence
  Description of Artificial Sequence: Synthetic oligonucleotide
uuugauguccuucugcgug

SEQ ID NO: 2882727 - RNA, 19 nt, Artificial Sequence
  Description of Artificial Sequence: Synthetic oligonucleotide
ugguuuuacaaauauauua

SEQ ID NO: 2882728 - RNA, 19 nt, Artificial Sequence
  Description of Artificial Sequence: Synthetic oligonucleotide
gaacauucaguacagcugc

SEQ ID NO: 2882729 - RNA, 19 nt, Artificial Sequence
  Description of Artificial Sequence: Synthetic oligonucleotide
acuucaagggucucaacac

SEQ ID NO: 2882730 - RNA, 19 nt, Artificial Sequence
  Description of Artificial Sequence: Synthetic oligonucleotide
agcuccaucaagcuggacg

SEQ ID NO: 2882731 - RNA, 19 nt, Artificial Sequence
  Description of Artificial Sequence: Synthetic oligonucleotide
agggucucaacacagggac

SEQ ID NO: 2882732 - RNA, 19 nt, Artificial Sequence
  Description of Artificial Sequence: Synthetic oligonucleotide
agcugcagaguccuaagcc

SEQ ID NO: 2882733 - RNA, 19 nt, Artificial Sequence
  Description of Artificial Sequence: Synthetic oligonucleotide
uuugggguuguaaacacac

SEQ ID NO: 2882734 - RNA, 19 nt, Artificial Sequence
  Description of Artificial Sequence: Synthetic oligonucleotide
caagagggugaccagaugg

SEQ ID NO: 2882735 - RNA, 19 nt, Artificial Sequence
  Description of Artificial Sequence: Synthetic oligonucleotide
uucaggugagguuugaugu

SEQ ID NO: 2882736 - RNA, 19 nt, Artificial Sequence
  Description of Artificial Sequence: Synthetic oligonucleotide
aaacuggaacauucaguac

SEQ ID NO: 2882737 - RNA, 19 nt, Artificial Sequence
  Description of Artificial Sequence: Synthetic oligonucleotide
ugggguuguaaacacacgc

SEQ ID NO: 2882738 - RNA, 19 nt, Artificial Sequence
  Description of Artificial Sequence: Synthetic oligonucleotide
aguacagcugcuuuggggu

SEQ ID NO: 2882739 - RNA, 19 nt, Artificial Sequence
  Description of Artificial Sequence: Synthetic oligonucleotide
uucaagggucucaacacag

SEQ ID NO: 2882740 - RNA, 19 nt, Artificial Sequence
  Description of Artificial Sequence: Synthetic oligonucleotide
agguuugauguccuucugc

SEQ ID NO: 2882741 - RNA, 19 nt, Artificial Sequence
  Description of Artificial Sequence: Synthetic oligonucleotide
acaaauauauuaaacugga

SEQ ID NO: 2882742 - RNA, 19 nt, Artificial Sequence
  Description of Artificial Sequence: Synthetic oligonucleotide
uggaacaugacgacagucu

SEQ ID NO: 2882743 - RNA, 19 nt, Artificial Sequence
  Description of Artificial Sequence: Synthetic oligonucleotide
uuucaggugagguuugaug

SEQ ID NO: 2882744 - RNA, 19 nt, Artificial Sequence
  Description of Artificial Sequence: Synthetic oligonucleotide
uuccauuugcuccacugcc

SEQ ID NO: 2882745 - RNA, 19 nt, Artificial Sequence
  Description of Artificial Sequence: Synthetic oligonucleotide
uguaaacacacgcggcucc

SEQ ID NO: 2882746 - RNA, 19 nt, Artificial Sequence
  Description of Artificial Sequence: Synthetic oligonucleotide
uucaguacagcugcuuugg

SEQ ID NO: 2882747 - RNA, 19 nt, Artificial Sequence
  Description of Artificial Sequence: Synthetic oligonucleotide
uggggcuggaacaugacga

SEQ ID NO: 2882748 - RNA, 19 nt, Artificial Sequence
  Description of Artificial Sequence: Synthetic oligonucleotide
uccacucucagcugcagag

SEQ ID NO: 2882749 - RNA, 19 nt, Artificial Sequence
  Description of Artificial Sequence: Synthetic oligonucleotide
aacacagggacucuuccau

SEQ ID NO: 2882750 - RNA, 19 nt, Artificial Sequence
  Description of Artificial Sequence: Synthetic oligonucleotide
gguuugauguccuucugcg

SEQ ID NO: 2882751 - RNA, 19 nt, Artificial Sequence
  Description of Artificial Sequence: Synthetic oligonucleotide
augacgacagucuggccac

SEQ ID NO: 2882752 - RNA, 19 nt, Artificial Sequence
  Description of Artificial Sequence: Synthetic oligonucleotide
ugcuguucaguauucgccc

SEQ ID NO: 2882753 - RNA, 19 nt, Artificial Sequence
  Description of Artificial Sequence: Synthetic oligonucleotide
aaacacacgcggcuccagg

SEQ ID NO: 2882754 - RNA, 19 nt, Artificial Sequence
  Description of Artificial Sequence: Synthetic oligonucleotide
uugggcagcuccaucaagc

SEQ ID NO: 2882755 - RNA, 19 nt, Artificial Sequence
  Description of Artificial Sequence: Synthetic oligonucleotide
ugagguuugauguccuucu

SEQ ID NO: 2882756 - RNA, 19 nt, Artificial Sequence
  Description of Artificial Sequence: Synthetic oligonucleotide
ucaagggucucaacacagg

SEQ ID NO: 2882757 - RNA, 19 nt, Artificial Sequence
  Description of Artificial Sequence: Synthetic oligonucleotide
ucuuguggaccccagcaca

SEQ ID NO: 2882758 - RNA, 19 nt, Artificial Sequence
  Description of Artificial Sequence: Synthetic oligonucleotide
ugugcuguucaguauucgc

SEQ ID NO: 2882759 - RNA, 19 nt, Artificial Sequence
  Description of Artificial Sequence: Synthetic oligonucleotide
ucaacacagggacucuucc

SEQ ID NO: 2882760 - RNA, 19 nt, Artificial Sequence
  Description of Artificial Sequence: Synthetic oligonucleotide
uccugggccaccaagcaug

SEQ ID NO: 2882761 - RNA, 19 nt, Artificial Sequence
  Description of Artificial Sequence: Synthetic oligonucleotide
caggcuauggguacagagg

SEQ ID NO: 2882762 - RNA, 19 nt, Artificial Sequence
  Description of Artificial Sequence: Synthetic oligonucleotide
aagcauggugacgaccacc

SEQ ID NO: 2882763 - RNA, 19 nt, Artificial Sequence
  Description of Artificial Sequence: Synthetic oligonucleotide
ugggccaccaagcauggug

SEQ ID NO: 2882764 - RNA, 19 nt, Artificial Sequence
  Description of Artificial Sequence: Synthetic oligonucleotide
aguuugggcagcuccauca

SEQ ID NO: 2882765 - RNA, 19 nt, Artificial Sequence
  Description of Artificial Sequence: Synthetic oligonucleotide
uuuccuguugaucgugggc

SEQ ID NO: 2882766 - RNA, 19 nt, Artificial Sequence
  Description of Artificial Sequence: Synthetic oligonucleotide
caagggucucaacacaggg

SEQ ID NO: 2882767 - RNA, 19 nt, Artificial Sequence
  Description of Artificial Sequence: Synthetic oligonucleotide
cauggugacgaccaccagc

SEQ ID NO: 2882768 - RNA, 19 nt, Artificial Sequence
  Description of Artificial Sequence: Synthetic oligonucleotide
gauacuguuucaggugagg

SEQ ID NO: 2882769 - RNA, 19 nt, Artificial Sequence
  Description of Artificial Sequence: Synthetic oligonucleotide
cuauggguacagaggaccg

SEQ ID NO: 2882770 - RNA, 19 nt, Artificial Sequence
  Description of Artificial Sequence: Synthetic oligonucleotide
auucaguacagcugcuuug

SEQ ID NO: 2882771 - RNA, 19 nt, Artificial Sequence
  Description of Artificial Sequence: Synthetic oligonucleotide
cacugcccaacacugaccg

SEQ ID NO: 2882772 - RNA, 19 nt, Artificial Sequence
  Description of Artificial Sequence: Synthetic oligonucleotide
aggugauacuguuucaggu

SEQ ID NO: 2882773 - RNA, 19 nt, Artificial Sequence
  Description of Artificial Sequence: Synthetic oligonucleotide
aggcuauggguacagagga

SEQ ID NO: 2882774 - RNA, 19 nt, Artificial Sequence
  Description of Artificial Sequence: Synthetic oligonucleotide
uccauuugcuccacugccc

SEQ ID NO: 2882775 - RNA, 19 nt, Artificial Sequence
  Description of Artificial Sequence: Synthetic oligonucleotide
uuccuguugaucgugggca

SEQ ID NO: 2882776 - RNA, 19 nt, Artificial Sequence
  Description of Artificial Sequence: Synthetic oligonucleotide
ggguuguaaacacacgcgg

SEQ ID NO: 2882777 - RNA, 19 nt, Artificial Sequence
  Description of Artificial Sequence: Synthetic oligonucleotide
caguacagcugcuuugggg

SEQ ID NO: 2882778 - RNA, 19 nt, Artificial Sequence
  Description of Artificial Sequence: Synthetic oligonucleotide
uugggguuguaaacacacg

SEQ ID NO: 2882779 - RNA, 19 nt, Artificial Sequence
  Description of Artificial Sequence: Synthetic oligonucleotide
gaacaugacgacagucugg

SEQ ID NO: 2882780 - RNA, 19 nt, Artificial Sequence
  Description of Artificial Sequence: Synthetic oligonucleotide
cuaagccugcccauggcgc

SEQ ID NO: 2882781 - RNA, 19 nt, Artificial Sequence
  Description of Artificial Sequence: Synthetic oligonucleotide
ugauacuguuucaggugag

SEQ ID NO: 2882782 - RNA, 19 nt, Artificial Sequence
  Description of Artificial Sequence: Synthetic oligonucleotide
gaccccagcacacuucaag

SEQ ID NO: 2882783 - RNA, 19 nt, Artificial Sequence
  Description of Artificial Sequence: Synthetic oligonucleotide
gcuccaucaagcuggacgg

SEQ ID NO: 2882784 - RNA, 19 nt, Artificial Sequence
  Description of Artificial Sequence: Synthetic oligonucleotide
caggugauacuguuucagg

SEQ ID NO: 2882785 - RNA, 19 nt, Artificial Sequence
  Description of Artificial Sequence: Synthetic oligonucleotide
cuuccauuugcuccacugc

SEQ ID NO: 2882786 - RNA, 19 nt, Artificial Sequence
  Description of Artificial Sequence: Synthetic oligonucleotide
caugacgacagucuggcca

SEQ ID NO: 2882787 - RNA, 19 nt, Artificial Sequence
  Description of Artificial Sequence: Synthetic oligonucleotide
auuugcuccacugcccaac

SEQ ID NO: 2882788 - RNA, 19 nt, Artificial Sequence
  Description of Artificial Sequence: Synthetic oligonucleotide
uccacugcccaacacugac

SEQ ID NO: 2882789 - RNA, 19 nt, Artificial Sequence
  Description of Artificial Sequence: Synthetic oligonucleotide
agaguccuaagccugccca

SEQ ID NO: 2882790 - RNA, 19 nt, Artificial Sequence
  Description of Artificial Sequence: Synthetic oligonucleotide
cuuuccaagagggugacca

SEQ ID NO: 2882791 - RNA, 19 nt, Artificial Sequence
  Description of Artificial Sequence: Synthetic oligonucleotide
ugcuuugggguuguaaaca

SEQ ID NO: 2882792 - RNA, 19 nt, Artificial Sequence
  Description of Artificial Sequence: Synthetic oligonucleotide
ugcuccacugcccaacacu

SEQ ID NO: 2882793 - RNA, 19 nt, Artificial Sequence
  Description of Artificial Sequence: Synthetic oligonucleotide
ucaguacagcugcuuuggg

SEQ ID NO: 2882794 - RNA, 19 nt, Artificial Sequence
  Description of Artificial Sequence: Synthetic oligonucleotide
ggugauacuguuucaggug

SEQ ID NO: 2882795 - RNA, 19 nt, Artificial Sequence
  Description of Artificial Sequence: Synthetic oligonucleotide
gacucuuccauuugcucca

SEQ ID NO: 2882796 - RNA, 19 nt, Artificial Sequence
  Description of Artificial Sequence: Synthetic oligonucleotide
ucgcuuuccaagaggguga

SEQ ID NO: 2882797 - RNA, 19 nt, Artificial Sequence
  Description of Artificial Sequence: Synthetic oligonucleotide
gugauacuguuucagguga

SEQ ID NO: 2882798 - RNA, 19 nt, Artificial Sequence
  Description of Artificial Sequence: Synthetic oligonucleotide
acugaccgcagcguggggc

SEQ ID NO: 2882799 - RNA, 19 nt, Artificial Sequence
  Description of Artificial Sequence: Synthetic oligonucleotide
uuugggcagcuccaucaag

SEQ ID NO: 2882800 - RNA, 19 nt, Artificial Sequence
  Description of Artificial Sequence: Synthetic oligonucleotide
gauggugugcuguucagua

SEQ ID NO: 2882801 - RNA, 19 nt, Artificial Sequence
  Description of Artificial Sequence: Synthetic oligonucleotide
ucagcugcagaguccuaag

SEQ ID NO: 2882802 - RNA, 19 nt, Artificial Sequence
  Description of Artificial Sequence: Synthetic oligonucleotide
acgacagucuggccacucc

SEQ ID NO: 2882803 - RNA, 19 nt, Artificial Sequence
  Description of Artificial Sequence: Synthetic oligonucleotide
gguuuuacaaauauauuaa

SEQ ID NO: 2882804 - RNA, 19 nt, Artificial Sequence
  Description of Artificial Sequence: Synthetic oligonucleotide
ggacucuuccauuugcucc

SEQ ID NO: 2882805 - RNA, 19 nt, Artificial Sequence
  Description of Artificial Sequence: Synthetic oligonucleotide
accagcacacgucaugcug

SEQ ID NO: 2882806 - RNA, 19 nt, Artificial Sequence
  Description of Artificial Sequence: Synthetic oligonucleotide
cuuuccuguugaucguggg

SEQ ID NO: 2882807 - RNA, 19 nt, Artificial Sequence
  Description of Artificial Sequence: Synthetic oligonucleotide
ucuucuuguggaccccagc

SEQ ID NO: 2882808 - RNA, 19 nt, Artificial Sequence
  Description of Artificial Sequence: Synthetic oligonucleotide
agggugaccagauggugug

SEQ ID NO: 2882809 - RNA, 19 nt, Artificial Sequence
  Description of Artificial Sequence: Synthetic oligonucleotide
uucuuguggaccccagcac

SEQ ID NO: 2882810 - RNA, 19 nt, Artificial Sequence
  Description of Artificial Sequence: Synthetic oligonucleotide
cucgcuuuccaagagggug

SEQ ID NO: 2882811 - RNA, 19 nt, Artificial Sequence
  Description of Artificial Sequence: Synthetic oligonucleotide
ggaacauucaguacagcug

SEQ ID NO: 2882812 - RNA, 19 nt, Artificial Sequence
  Description of Artificial Sequence: Synthetic oligonucleotide
uccggacagccucaguuug

SEQ ID NO: 2882813 - RNA, 19 nt, Artificial Sequence
  Description of Artificial Sequence: Synthetic oligonucleotide
gugucugucuucuugugga

SEQ ID NO: 2882814 - RNA, 19 nt, Artificial Sequence
  Description of Artificial Sequence: Synthetic oligonucleotide
agucuggccacuccggaca

SEQ ID NO: 2882815 - RNA, 19 nt, Artificial Sequence
  Description of Artificial Sequence: Synthetic oligonucleotide
ugcagaguccuaagccugc

SEQ ID NO: 2882816 - RNA, 19 nt, Artificial Sequence
  Description of Artificial Sequence: Synthetic oligonucleotide
cagaggaccgcuaggcagc

SEQ ID NO: 2882817 - RNA, 19 nt, Artificial Sequence
  Description of Artificial Sequence: Synthetic oligonucleotide
cacuucaagggucucaaca

SEQ ID NO: 2882818 - RNA, 19 nt, Artificial Sequence
  Description of Artificial Sequence: Synthetic oligonucleotide
guacagaggaccgcuaggc

SEQ ID NO: 2882819 - RNA, 19 nt, Artificial Sequence
  Description of Artificial Sequence: Synthetic oligonucleotide
ggaacaugacgacagucug

SEQ ID NO: 2882820 - RNA, 19 nt, Artificial Sequence
  Description of Artificial Sequence: Synthetic oligonucleotide
uuugcuccacugcccaaca

SEQ ID NO: 2882821 - RNA, 19 nt, Artificial Sequence
  Description of Artificial Sequence: Synthetic oligonucleotide
uccaagagggugaccagau

SEQ ID NO: 2882822 - RNA, 19 nt, Artificial Sequence
  Description of Artificial Sequence: Synthetic oligonucleotide
ugcgugucugucuucuugu

SEQ ID NO: 2882823 - RNA, 19 nt, Artificial Sequence
  Description of Artificial Sequence: Synthetic oligonucleotide
uacagaggaccgcuaggca

SEQ ID NO: 2882824 - RNA, 19 nt, Artificial Sequence
  Description of Artificial Sequence: Synthetic oligonucleotide
uaagccugcccauggcgcc

SEQ ID NO: 2882825 - RNA, 19 nt, Artificial Sequence
  Description of Artificial Sequence: Synthetic oligonucleotide
accaagcauggugacgacc

SEQ ID NO: 2882826 - RNA, 19 nt, Artificial Sequence
  Description of Artificial Sequence: Synthetic oligonucleotide
uugauguccuucugcgugu

SEQ ID NO: 2882827 - RNA, 19 nt, Artificial Sequence
  Description of Artificial Sequence: Synthetic oligonucleotide
uccaucaagcuggacggcc

SEQ ID NO: 2882828 - RNA, 19 nt, Artificial Sequence
  Description of Artificial Sequence: Synthetic oligonucleotide
aggaccgcuaggcagcugu

SEQ ID NO: 2882829 - RNA, 19 nt, Artificial Sequence
  Description of Artificial Sequence: Synthetic oligonucleotide
uggugugcuguucaguauu

SEQ ID NO: 2882830 - RNA, 19 nt, Artificial Sequence
  Description of Artificial Sequence: Synthetic oligonucleotide
auggugacgaccaccagca

SEQ ID NO: 2882831 - RNA, 19 nt, Artificial Sequence
  Description of Artificial Sequence: Synthetic oligonucleotide
cuguccugggccaccaagc

SEQ ID NO: 2882832 - RNA, 19 nt, Artificial Sequence
  Description of Artificial Sequence: Synthetic oligonucleotide
cuucuuguggaccccagca

SEQ ID NO: 2882833 - RNA, 19 nt, Artificial Sequence
  Description of Artificial Sequence: Synthetic oligonucleotide
cuuguggaccccagcacac

SEQ ID NO: 2882834 - RNA, 19 nt, Artificial Sequence
  Description of Artificial Sequence: Synthetic oligonucleotide
gugcuguucaguauucgcc

SEQ ID NO: 2882835 - RNA, 19 nt, Artificial Sequence
  Description of Artificial Sequence: Synthetic oligonucleotide
guuguaaacacacgcggcu

SEQ ID NO: 2882836 - RNA, 19 nt, Artificial Sequence
  Description of Artificial Sequence: Synthetic oligonucleotide
guggggcuggaacaugacg

SEQ ID NO: 2882837 - RNA, 19 nt, Artificial Sequence
  Description of Artificial Sequence: Synthetic oligonucleotide
gugacgaccaccagcacac

SEQ ID NO: 2882838 - RNA, 19 nt, Artificial Sequence
  Description of Artificial Sequence: Synthetic oligonucleotide
uugaucgugggcaggugau

SEQ ID NO: 2882839 - RNA, 19 nt, Artificial Sequence
  Description of Artificial Sequence: Synthetic oligonucleotide
acacgucaugcugugcccc

SEQ ID NO: 2882840 - RNA, 19 nt, Artificial Sequence
  Description of Artificial Sequence: Synthetic oligonucleotide
guccuaagccugcccaugg

SEQ ID NO: 2882841 - RNA, 19 nt, Artificial Sequence
  Description of Artificial Sequence: Synthetic oligonucleotide
ggugguuuuacaaauauau

SEQ ID NO: 2882842 - RNA, 19 nt, Artificial Sequence
  Description of Artificial Sequence: Synthetic oligonucleotide
ucaggugagguuugauguc

SEQ ID NO: 2882843 - RNA, 19 nt, Artificial Sequence
  Description of Artificial Sequence: Synthetic oligonucleotide
uccuguugaucgugggcag

SEQ ID NO: 2882844 - RNA, 19 nt, Artificial Sequence
  Description of Artificial Sequence: Synthetic oligonucleotide
cugcuuugggguuguaaac

SEQ ID NO: 2882845 - RNA, 19 nt, Artificial Sequence
  Description of Artificial Sequence: Synthetic oligonucleotide
caggugagguuugaugucc

SEQ ID NO: 2882846 - RNA, 19 nt, Artificial Sequence
  Description of Artificial Sequence: Synthetic oligonucleotide
uacuguuucaggugagguu

SEQ ID NO: 2882847 - RNA, 19 nt, Artificial Sequence
  Description of Artificial Sequence: Synthetic oligonucleotide
auacuguuucaggugaggu

SEQ ID NO: 2882848 - RNA, 19 nt, Artificial Sequence
  Description of Artificial Sequence: Synthetic oligonucleotide
ucgugggcaggugauacug

SEQ ID NO: 2882849 - RNA, 19 nt, Artificial Sequence
  Description of Artificial Sequence: Synthetic oligonucleotide
gacagucuggccacuccgg

SEQ ID NO: 2882850 - RNA, 19 nt, Artificial Sequence
  Description of Artificial Sequence: Synthetic oligonucleotide
gguacagaggaccgcuagg

SEQ ID NO: 2882851 - RNA, 19 nt, Artificial Sequence
  Description of Artificial Sequence: Synthetic oligonucleotide
acaugacgacagucuggcc

SEQ ID NO: 2882852 - RNA, 19 nt, Artificial Sequence
  Description of Artificial Sequence: Synthetic oligonucleotide
gaucgugggcaggugauac

SEQ ID NO: 2882853 - RNA, 19 nt, Artificial Sequence
  Description of Artificial Sequence: Synthetic oligonucleotide
aagggucucaacacaggga

SEQ ID NO: 2882854 - RNA, 19 nt, Artificial Sequence
  Description of Artificial Sequence: Synthetic oligonucleotide
gcuauggguacagaggacc

SEQ ID NO: 2882855 - RNA, 19 nt, Artificial Sequence
  Description of Artificial Sequence: Synthetic oligonucleotide
uauggguacagaggaccgc

SEQ ID NO: 2882856 - RNA, 19 nt, Artificial Sequence
  Description of Artificial Sequence: Synthetic oligonucleotide
cagggacucuuccauuugc

SEQ ID NO: 2882857 - RNA, 19 nt, Artificial Sequence
  Description of Artificial Sequence: Synthetic oligonucleotide
ugaccagauggugugcugu

SEQ ID NO: 2882858 - RNA, 19 nt, Artificial Sequence
  Description of Artificial Sequence: Synthetic oligonucleotide
cucaacacagggacucuuc

SEQ ID NO: 2882859 - RNA, 19 nt, Artificial Sequence
  Description of Artificial Sequence: Synthetic oligonucleotide
uccuaagccugcccauggc

SEQ ID NO: 2882860 - RNA, 19 nt, Artificial Sequence
  Description of Artificial Sequence: Synthetic oligonucleotide
gagguuugauguccuucug

SEQ ID NO: 2882861 - RNA, 19 nt, Artificial Sequence
  Description of Artificial Sequence: Synthetic oligonucleotide
caaauauauuaaacuggaa

SEQ ID NO: 2882862 - RNA, 19 nt, Artificial Sequence
  Description of Artificial Sequence: Synthetic oligonucleotide
guugaucgugggcagguga

SEQ ID NO: 2882863 - RNA, 19 nt, Artificial Sequence
  Description of Artificial Sequence: Synthetic oligonucleotide
uuguaaacacacgcggcuc

SEQ ID NO: 2882864 - RNA, 19 nt, Artificial Sequence
  Description of Artificial Sequence: Synthetic oligonucleotide
uuccaagagggugaccaga

SEQ ID NO: 2882865 - RNA, 19 nt, Artificial Sequence
  Description of Artificial Sequence: Synthetic oligonucleotide
acacugaccgcagcguggg

SEQ ID NO: 2882866 - RNA, 19 nt, Artificial Sequence
  Description of Artificial Sequence: Synthetic oligonucleotide
acugcccaacacugaccgc

SEQ ID NO: 2882867 - RNA, 19 nt, Artificial Sequence
  Description of Artificial Sequence: Synthetic oligonucleotide
acacuucaagggucucaac

SEQ ID NO: 2882868 - RNA, 19 nt, Artificial Sequence
  Description of Artificial Sequence: Synthetic oligonucleotide
gucaugcugugccccaucc

SEQ ID NO: 2882869 - RNA, 19 nt, Artificial Sequence
  Description of Artificial Sequence: Synthetic oligonucleotide
acgaccaccagcacacguc

SEQ ID NO: 2882870 - RNA, 19 nt, Artificial Sequence
  Description of Artificial Sequence: Synthetic oligonucleotide
acagggacucuuccauuug

SEQ ID NO: 2882871 - RNA, 19 nt, Artificial Sequence
  Description of Artificial Sequence: Synthetic oligonucleotide
ugggcagcuccaucaagcu

SEQ ID NO: 2882872 - RNA, 19 nt, Artificial Sequence
  Description of Artificial Sequence: Synthetic oligonucleotide
gcacacgucaugcugugcc

SEQ ID NO: 2882873 - RNA, 19 nt, Artificial Sequence
  Description of Artificial Sequence: Synthetic oligonucleotide
cuaggcagcuguccugggc

SEQ ID NO: 2882874 - RNA, 19 nt, Artificial Sequence
  Description of Artificial Sequence: Synthetic oligonucleotide
cacacgucaugcugugccc

SEQ ID NO: 2882875 - RNA, 19 nt, Artificial Sequence
  Description of Artificial Sequence: Synthetic oligonucleotide
ugucugucuucuuguggac

SEQ ID NO: 2882876 - RNA, 19 nt, Artificial Sequence
  Description of Artificial Sequence: Synthetic oligonucleotide
ugccccauccacucucagc

SEQ ID NO: 2882877 - RNA, 19 nt, Artificial Sequence
  Description of Artificial Sequence: Synthetic oligonucleotide
ugcccaacacugaccgcag

SEQ ID NO: 2882878 - RNA, 19 nt, Artificial Sequence
  Description of Artificial Sequence: Synthetic oligonucleotide
uguccuucugcgugucugu

SEQ ID NO: 2882879 - RNA, 19 nt, Artificial Sequence
  Description of Artificial Sequence: Synthetic oligonucleotide
cacucucagcugcagaguc

SEQ ID NO: 2882880 - RNA, 19 nt, Artificial Sequence
  Description of Artificial Sequence: Synthetic oligonucleotide
gguuguaaacacacgcggc

SEQ ID NO: 2882881 - RNA, 19 nt, Artificial Sequence
  Description of Artificial Sequence: Synthetic oligonucleotide
ggcuggaacaugacgacag

SEQ ID NO: 2882882 - RNA, 19 nt, Artificial Sequence
  Description of Artificial Sequence: Synthetic oligonucleotide
accgcuaggcagcuguccu

SEQ ID NO: 2882883 - RNA, 19 nt, Artificial Sequence
  Description of Artificial Sequence: Synthetic oligonucleotide
uucugcgugucugucuucu

SEQ ID NO: 2882884 - RNA, 19 nt, Artificial Sequence
  Description of Artificial Sequence: Synthetic oligonucleotide
cuucaagggucucaacaca

SEQ ID NO: 2882885 - RNA, 19 nt, Artificial Sequence
  Description of Artificial Sequence: Synthetic oligonucleotide
ugcugugccccauccacuc

SEQ ID NO: 2882886 - RNA, 19 nt, Artificial Sequence
  Description of Artificial Sequence: Synthetic oligonucleotide
ugcccucgcuuuccaagag

SEQ ID NO: 2882887 - RNA, 19 nt, Artificial Sequence
  Description of Artificial Sequence: Synthetic oligonucleotide
ucaagcuggacggcccuug

SEQ ID NO: 2882888 - RNA, 19 nt, Artificial Sequence
  Description of Artificial Sequence: Synthetic oligonucleotide
auggguacagaggaccgcu

SEQ ID NO: 2882889 - RNA, 19 nt, Artificial Sequence
  Description of Artificial Sequence: Synthetic oligonucleotide
cugcgugucugucuucuug

SEQ ID NO: 2882890 - RNA, 19 nt, Artificial Sequence
  Description of Artificial Sequence: Synthetic oligonucleotide
uacagcugcuuugggguug

SEQ ID NO: 2882891 - RNA, 19 nt, Artificial Sequence
  Description of Artificial Sequence: Synthetic oligonucleotide
uccuucugcgugucugucu

SEQ ID NO: 2882892 - RNA, 19 nt, Artificial Sequence
  Description of Artificial Sequence: Synthetic oligonucleotide
cuggccacuccggacagcc

SEQ ID NO: 2882893 - RNA, 19 nt, Artificial Sequence
  Description of Artificial Sequence: Synthetic oligonucleotide
uaaacacacgcggcuccag

SEQ ID NO: 2882894 - RNA, 19 nt, Artificial Sequence
  Description of Artificial Sequence: Synthetic oligonucleotide
ugugccccauccacucuca

SEQ ID NO: 2882895 - RNA, 19 nt, Artificial Sequence
  Description of Artificial Sequence: Synthetic oligonucleotide
acagucuggccacuccgga

SEQ ID NO: 2882896 - RNA, 19 nt, Artificial Sequence
  Description of Artificial Sequence: Synthetic oligonucleotide
ccaggcuauggguacagag

SEQ ID NO: 2882897 - RNA, 19 nt, Artificial Sequence
  Description of Artificial Sequence: Synthetic oligonucleotide
cccucgcuuuccaagaggg

SEQ ID NO: 2882898 - RNA, 19 nt, Artificial Sequence
  Description of Artificial Sequence: Synthetic oligonucleotide
cuggaacaugacgacaguc

SEQ ID NO: 2882899 - RNA, 19 nt, Artificial Sequence
  Description of Artificial Sequence: Synthetic oligonucleotide
agagggugaccagauggug

SEQ ID NO: 2882900 - RNA, 19 nt, Artificial Sequence
  Description of Artificial Sequence: Synthetic oligonucleotide
ccuaagccugcccauggcg

SEQ ID NO: 2882901 - RNA, 19 nt, Artificial Sequence
  Description of Artificial Sequence: Synthetic oligonucleotide
gcaggugauacuguuucag

SEQ ID NO: 2882902 - RNA, 19 nt, Artificial Sequence
  Description of Artificial Sequence: Synthetic oligonucleotide
ggugacgaccaccagcaca

SEQ ID NO: 2882903 - RNA, 19 nt, Artificial Sequence
  Description of Artificial Sequence: Synthetic oligonucleotide
cuuugggguuguaaacaca

SEQ ID NO: 2882904 - RNA, 19 nt, Artificial Sequence
  Description of Artificial Sequence: Synthetic oligonucleotide
gcuuugggguuguaaacac

SEQ ID NO: 2882905 - RNA, 19 nt, Artificial Sequence
  Description of Artificial Sequence: Synthetic oligonucleotide
ugucuucuuguggacccca

SEQ ID NO: 2882906 - RNA, 19 nt, Artificial Sequence
  Description of Artificial Sequence: Synthetic oligonucleotide
cccaacacugaccgcagcg

SEQ ID NO: 2882907 - RNA, 19 nt, Artificial Sequence
  Description of Artificial Sequence: Synthetic oligonucleotide
gcugcuuugggguuguaaa

SEQ ID NO: 2882908 - RNA, 19 nt, Artificial Sequence
  Description of Artificial Sequence: Synthetic oligonucleotide
uguuucaggugagguuuga

SEQ ID NO: 2882909 - RNA, 19 nt, Artificial Sequence
  Description of Artificial Sequence: Synthetic oligonucleotide
cuguuucaggugagguuug

SEQ ID NO: 2882910 - RNA, 19 nt, Artificial Sequence
  Description of Artificial Sequence: Synthetic oligonucleotide
ugcccauggcgccugcccu

SEQ ID NO: 2882911 - RNA, 19 nt, Artificial Sequence
  Description of Artificial Sequence: Synthetic oligonucleotide
cagcugcagaguccuaagc

SEQ ID NO: 2882912 - RNA, 19 nt, Artificial Sequence
  Description of Artificial Sequence: Synthetic oligonucleotide
gggcaggugauacuguuuc

SEQ ID NO: 2882913 - RNA, 19 nt, Artificial Sequence
  Description of Artificial Sequence: Synthetic oligonucleotide
acacacgcggcuccaggcu

SEQ ID NO: 2882914 - RNA, 19 nt, Artificial Sequence
  Description of Artificial Sequence: Synthetic oligonucleotide
accagauggugugcuguuc

SEQ ID NO: 2882915 - RNA, 19 nt, Artificial Sequence
  Description of Artificial Sequence: Synthetic oligonucleotide
gugugcuguucaguauucg

SEQ ID NO: 2882916 - RNA, 19 nt, Artificial Sequence
  Description of Artificial Sequence: Synthetic oligonucleotide
ggguacagaggaccgcuag

SEQ ID NO: 2882917 - RNA, 19 nt, Artificial Sequence
  Description of Artificial Sequence: Synthetic oligonucleotide
aguccuaagccugcccaug

SEQ ID NO: 2882918 - RNA, 19 nt, Artificial Sequence
  Description of Artificial Sequence: Synthetic oligonucleotide
ggucucaacacagggacuc

SEQ ID NO: 2882919 - RNA, 19 nt, Artificial Sequence
  Description of Artificial Sequence: Synthetic oligonucleotide
gugagguuugauguccuuc

SEQ ID NO: 2882920 - RNA, 19 nt, Artificial Sequence
  Description of Artificial Sequence: Synthetic oligonucleotide
ccaagcauggugacgacca

SEQ ID NO: 2882921 - RNA, 19 nt, Artificial Sequence
  Description of Artificial Sequence: Synthetic oligonucleotide
cagaguccuaagccugccc

SEQ ID NO: 2882922 - RNA, 19 nt, Artificial Sequence
  Description of Artificial Sequence: Synthetic oligonucleotide
auggugugcuguucaguau

SEQ ID NO: 2882923 - RNA, 19 nt, Artificial Sequence
  Description of Artificial Sequence: Synthetic oligonucleotide
caacacagggacucuucca

SEQ ID NO: 2882924 - RNA, 19 nt, Artificial Sequence
  Description of Artificial Sequence: Synthetic oligonucleotide
agcacacgucaugcugugc

SEQ ID NO: 2882925 - RNA, 19 nt, Artificial Sequence
  Description of Artificial Sequence: Synthetic oligonucleotide
uguugaucgugggcaggug

SEQ ID NO: 2882926 - RNA, 19 nt, Artificial Sequence
  Description of Artificial Sequence: Synthetic oligonucleotide
cugcccauggcgccugccc

SEQ ID NO: 2882927 - RNA, 19 nt, Artificial Sequence
  Description of Artificial Sequence: Synthetic oligonucleotide
agauggugugcuguucagu

SEQ ID NO: 2882928 - RNA, 19 nt, Artificial Sequence
  Description of Artificial Sequence: Synthetic oligonucleotide
gcuguucaguauucgcccc

SEQ ID NO: 2882929 - RNA, 19 nt, Artificial Sequence
  Description of Artificial Sequence: Synthetic oligonucleotide
ccuuuccuguugaucgugg

SEQ ID NO: 2882930 - RNA, 19 nt, Artificial Sequence
  Description of Artificial Sequence: Synthetic oligonucleotide
ucaguuugggcagcuccau

SEQ ID NO: 2882931 - RNA, 19 nt, Artificial Sequence
  Description of Artificial Sequence: Synthetic oligonucleotide
aucgugggcaggugauacu

SEQ ID NO: 2882932 - RNA, 19 nt, Artificial Sequence
  Description of Artificial Sequence: Synthetic oligonucleotide
cagucuggccacuccggac

SEQ ID NO: 2882933 - RNA, 19 nt, Artificial Sequence
  Description of Artificial Sequence: Synthetic oligonucleotide
gugaccagauggugugcug

SEQ ID NO: 2882934 - RNA, 19 nt, Artificial Sequence
  Description of Artificial Sequence: Synthetic oligonucleotide
cugugccccauccacucuc

SEQ ID NO: 2882935 - RNA, 19 nt, Artificial Sequence
  Description of Artificial Sequence: Synthetic oligonucleotide
gcuguccugggccaccaag

SEQ ID NO: 2882936 - RNA, 19 nt, Artificial Sequence
  Description of Artificial Sequence: Synthetic oligonucleotide
gaccgcuaggcagcugucc

SEQ ID NO: 2882937 - RNA, 19 nt, Artificial Sequence
  Description of Artificial Sequence: Synthetic oligonucleotide
caagcauggugacgaccac

SEQ ID NO: 2882938 - RNA, 19 nt, Artificial Sequence
  Description of Artificial Sequence: Synthetic oligonucleotide
uugcuccacugcccaacac

SEQ ID NO: 2882939 - RNA, 19 nt, Artificial Sequence
  Description of Artificial Sequence: Synthetic oligonucleotide
ccccagcacacuucaaggg

SEQ ID NO: 2882940 - RNA, 19 nt, Artificial Sequence
  Description of Artificial Sequence: Synthetic oligonucleotide
ccugcccucgcuuuccaag

SEQ ID NO: 2882941 - RNA, 19 nt, Artificial Sequence
  Description of Artificial Sequence: Synthetic oligonucleotide
cagcacacgucaugcugug

SEQ ID NO: 2882942 - RNA, 19 nt, Artificial Sequence
  Description of Artificial Sequence: Synthetic oligonucleotide
cuggaacauucaguacagc

SEQ ID NO: 2882943 - RNA, 19 nt, Artificial Sequence
  Description of Artificial Sequence: Synthetic oligonucleotide
agggacucuuccauuugcu

SEQ ID NO: 2882944 - RNA, 19 nt, Artificial Sequence
  Description of Artificial Sequence: Synthetic oligonucleotide
gucuggccacuccggacag

SEQ ID NO: 2882945 - RNA, 19 nt, Artificial Sequence
  Description of Artificial Sequence: Synthetic oligonucleotide
cccauccacucucagcugc

SEQ ID NO: 2882946 - RNA, 19 nt, Artificial Sequence
  Description of Artificial Sequence: Synthetic oligonucleotide
ucucaacacagggacucuu

SEQ ID NO: 2882947 - RNA, 19 nt, Artificial Sequence
  Description of Artificial Sequence: Synthetic oligonucleotide
agcacacuucaagggucuc

SEQ ID NO: 2882948 - RNA, 19 nt, Artificial Sequence
  Description of Artificial Sequence: Synthetic oligonucleotide
guuugggcagcuccaucaa

SEQ ID NO: 2882949 - RNA, 19 nt, Artificial Sequence
  Description of Artificial Sequence: Synthetic oligonucleotide
guaaacacacgcggcucca

SEQ ID NO: 2882950 - RNA, 19 nt, Artificial Sequence
  Description of Artificial Sequence: Synthetic oligonucleotide
cacacuucaagggucucaa

SEQ ID NO: 2882951 - RNA, 19 nt, Artificial Sequence
  Description of Artificial Sequence: Synthetic oligonucleotide
acacagggacucuuccauu

SEQ ID NO: 2882952 - RNA, 19 nt, Artificial Sequence
  Description of Artificial Sequence: Synthetic oligonucleotide
guuugauguccuucugcgu

SEQ ID NO: 2882953 - RNA, 19 nt, Artificial Sequence
  Description of Artificial Sequence: Synthetic oligonucleotide
gggacucuuccauuugcuc

SEQ ID NO: 2882954 - RNA, 19 nt, Artificial Sequence
  Description of Artificial Sequence: Synthetic oligonucleotide
gaccgcagcguggggcugg

SEQ ID NO: 2882955 - RNA, 19 nt, Artificial Sequence
  Description of Artificial Sequence: Synthetic oligonucleotide
ugacgaccaccagcacacg

SEQ ID NO: 2882956 - RNA, 19 nt, Artificial Sequence
  Description of Artificial Sequence: Synthetic oligonucleotide
uggguacagaggaccgcua

SEQ ID NO: 2882957 - RNA, 19 nt, Artificial Sequence
  Description of Artificial Sequence: Synthetic oligonucleotide
gagggugaccagauggugu

SEQ ID NO: 2882958 - RNA, 19 nt, Artificial Sequence
  Description of Artificial Sequence: Synthetic oligonucleotide
uuguggaccccagcacacu

SEQ ID NO: 2882959 - RNA, 19 nt, Artificial Sequence
  Description of Artificial Sequence: Synthetic oligonucleotide
gcagcguggggcuggaaca

SEQ ID NO: 2882960 - RNA, 19 nt, Artificial Sequence
  Description of Artificial Sequence: Synthetic oligonucleotide
cugucuucuuguggacccc

SEQ ID NO: 2882961 - RNA, 19 nt, Artificial Sequence
  Description of Artificial Sequence: Synthetic oligonucleotide
gcugcagaguccuaagccu

SEQ ID NO: 2882962 - RNA, 19 nt, Artificial Sequence
  Description of Artificial Sequence: Synthetic oligonucleotide
ggggcuggaacaugacgac

SEQ ID NO: 2882963 - RNA, 19 nt, Artificial Sequence
  Description of Artificial Sequence: Synthetic oligonucleotide
cuccaggcuauggguacag

SEQ ID NO: 2882964 - RNA, 19 nt, Artificial Sequence
  Description of Artificial Sequence: Synthetic oligonucleotide
gccccauccacucucagcu

SEQ ID NO: 2882965 - RNA, 19 nt, Artificial Sequence
  Description of Artificial Sequence: Synthetic oligonucleotide
gucuucuuguggaccccag

SEQ ID NO: 2882966 - RNA, 19 nt, Artificial Sequence
  Description of Artificial Sequence: Synthetic oligonucleotide
ugauguccuucugcguguc

SEQ ID NO: 2882967 - RNA, 19 nt, Artificial Sequence
  Description of Artificial Sequence: Synthetic oligonucleotide
ggcuccaggcuauggguac

SEQ ID NO: 2882968 - RNA, 19 nt, Artificial Sequence
  Description of Artificial Sequence: Synthetic oligonucleotide
cugcccucgcuuuccaaga

SEQ ID NO: 2882969 - RNA, 19 nt, Artificial Sequence
  Description of Artificial Sequence: Synthetic oligonucleotide
caguuugggcagcuccauc

SEQ ID NO: 2882970 - RNA, 19 nt, Artificial Sequence
  Description of Artificial Sequence: Synthetic oligonucleotide
aagccugcccauggcgccu

SEQ ID NO: 2882971 - RNA, 19 nt, Artificial Sequence
  Description of Artificial Sequence: Synthetic oligonucleotide
gacgaccaccagcacacgu

SEQ ID NO: 2882972 - RNA, 19 nt, Artificial Sequence
  Description of Artificial Sequence: Synthetic oligonucleotide
cauucaguacagcugcuuu

SEQ ID NO: 2882973 - RNA, 19 nt, Artificial Sequence
  Description of Artificial Sequence: Synthetic oligonucleotide
aggugguuuuacaaauaua

SEQ ID NO: 2882974 - RNA, 19 nt, Artificial Sequence
  Description of Artificial Sequence: Synthetic oligonucleotide
gcccucgcuuuccaagagg

SEQ ID NO: 2882975 - RNA, 19 nt, Artificial Sequence
  Description of Artificial Sequence: Synthetic oligonucleotide
cucagcugcagaguccuaa

SEQ ID NO: 2882976 - RNA, 19 nt, Artificial Sequence
  Description of Artificial Sequence: Synthetic oligonucleotide
ugaucgugggcaggugaua

SEQ ID NO: 2882977 - RNA, 19 nt, Artificial Sequence
  Description of Artificial Sequence: Synthetic oligonucleotide
agcugcuuugggguuguaa

SEQ ID NO: 2882978 - RNA, 19 nt, Artificial Sequence
  Description of Artificial Sequence: Synthetic oligonucleotide
ccaccaagcauggugacga

SEQ ID NO: 2882979 - RNA, 19 nt, Artificial Sequence
  Description of Artificial Sequence: Synthetic oligonucleotide
gccaccaagcauggugacg

SEQ ID NO: 2882980 - RNA, 19 nt, Artificial Sequence
  Description of Artificial Sequence: Synthetic oligonucleotide
uggugacgaccaccagcac

SEQ ID NO: 2882981 - RNA, 19 nt, Artificial Sequence
  Description of Artificial Sequence: Synthetic oligonucleotide
ggccacuccggacagccuc

SEQ ID NO: 2882982 - RNA, 19 nt, Artificial Sequence
  Description of Artificial Sequence: Synthetic oligonucleotide
acagcugcuuugggguugu

SEQ ID NO: 2882983 - RNA, 19 nt, Artificial Sequence
  Description of Artificial Sequence: Synthetic oligonucleotide
cuccaucaagcuggacggc

SEQ ID NO: 2882984 - RNA, 19 nt, Artificial Sequence
  Description of Artificial Sequence: Synthetic oligonucleotide
gacgacagucuggccacuc

SEQ ID NO: 2882985 - RNA, 19 nt, Artificial Sequence
  Description of Artificial Sequence: Synthetic oligonucleotide
cgacagucuggccacuccg

SEQ ID NO: 2882986 - RNA, 19 nt, Artificial Sequence
  Description of Artificial Sequence: Synthetic oligonucleotide
caccaagcauggugacgac

SEQ ID NO: 2882987 - RNA, 19 nt, Artificial Sequence
  Description of Artificial Sequence: Synthetic oligonucleotide
cuucugcgugucugucuuc

SEQ ID NO: 2882988 - RNA, 19 nt, Artificial Sequence
  Description of Artificial Sequence: Synthetic oligonucleotide
ccugggccaccaagcaugg

SEQ ID NO: 2882989 - RNA, 19 nt, Artificial Sequence
  Description of Artificial Sequence: Synthetic oligonucleotide
cacgucaugcugugcccca

SEQ ID NO: 2882990 - RNA, 19 nt, Artificial Sequence
  Description of Artificial Sequence: Synthetic oligonucleotide
uccaggcuauggguacaga

SEQ ID NO: 2882991 - RNA, 19 nt, Artificial Sequence
  Description of Artificial Sequence: Synthetic oligonucleotide
aggugagguuugauguccu

SEQ ID NO: 2882992 - RNA, 19 nt, Artificial Sequence
  Description of Artificial Sequence: Synthetic oligonucleotide
ccagauggugugcuguuca

SEQ ID NO: 2882993 - RNA, 19 nt, Artificial Sequence
  Description of Artificial Sequence: Synthetic oligonucleotide
gggcagcuccaucaagcug

SEQ ID NO: 2882994 - RNA, 19 nt, Artificial Sequence
  Description of Artificial Sequence: Synthetic oligonucleotide
ccggacagccucaguuugg

SEQ ID NO: 2882995 - RNA, 19 nt, Artificial Sequence
  Description of Artificial Sequence: Synthetic oligonucleotide
gugguuuuacaaauauauu

SEQ ID NO: 2882996 - RNA, 19 nt, Artificial Sequence
  Description of Artificial Sequence: Synthetic oligonucleotide
ucugcgugucugucuucuu

SEQ ID NO: 2882997 - RNA, 19 nt, Artificial Sequence
  Description of Artificial Sequence: Synthetic oligonucleotide
ccacugcccaacacugacc

SEQ ID NO: 2882998 - RNA, 19 nt, Artificial Sequence
  Description of Artificial Sequence: Synthetic oligonucleotide
ggugugcuguucaguauuc

SEQ ID NO: 2882999 - RNA, 19 nt, Artificial Sequence
  Description of Artificial Sequence: Synthetic oligonucleotide
augcugugccccauccacu

SEQ ID NO: 2883000 - RNA, 19 nt, Artificial Sequence
  Description of Artificial Sequence: Synthetic oligonucleotide
agaggaccgcuaggcagcu

SEQ ID NO: 2883001 - RNA, 19 nt, Artificial Sequence
  Description of Artificial Sequence: Synthetic oligonucleotide
gaguccuaagccugcccau

SEQ ID NO: 2883002 - RNA, 19 nt, Artificial Sequence
  Description of Artificial Sequence: Synthetic oligonucleotide
ccauuugcuccacugccca

SEQ ID NO: 2883003 - RNA, 19 nt, Artificial Sequence
  Description of Artificial Sequence: Synthetic oligonucleotide
ggcaggugauacuguuuca

SEQ ID NO: 2883004 - RNA, 19 nt, Artificial Sequence
  Description of Artificial Sequence: Synthetic oligonucleotide
ucuggccacuccggacagc

SEQ ID NO: 2883005 - RNA, 19 nt, Artificial Sequence
  Description of Artificial Sequence: Synthetic oligonucleotide
cacagggacucuuccauuu

SEQ ID NO: 2883006 - RNA, 19 nt, Artificial Sequence
  Description of Artificial Sequence: Synthetic oligonucleotide
uggccacuccggacagccu

SEQ ID NO: 2883007 - RNA, 19 nt, Artificial Sequence
  Description of Artificial Sequence: Synthetic oligonucleotide
gugccccauccacucucag

SEQ ID NO: 2883008 - RNA, 19 nt, Artificial Sequence
  Description of Artificial Sequence: Synthetic oligonucleotide
gcgugucugucuucuugug

SEQ ID NO: 2883009 - RNA, 19 nt, Artificial Sequence
  Description of Artificial Sequence: Synthetic oligonucleotide
ccuguugaucgugggcagg

SEQ ID NO: 2883010 - RNA, 19 nt, Artificial Sequence
  Description of Artificial Sequence: Synthetic oligonucleotide
cacugaccgcagcgugggg

SEQ ID NO: 2883011 - RNA, 19 nt, Artificial Sequence
  Description of Artificial Sequence: Synthetic oligonucleotide
gggccaccaagcaugguga

SEQ ID NO: 2883012 - RNA, 19 nt, Artificial Sequence
  Description of Artificial Sequence: Synthetic oligonucleotide
auggcgccugcccucgcuu

SEQ ID NO: 2883013 - RNA, 19 nt, Artificial Sequence
  Description of Artificial Sequence: Synthetic oligonucleotide
cauuugcuccacugcccaa

SEQ ID NO: 2883014 - RNA, 19 nt, Artificial Sequence
  Description of Artificial Sequence: Synthetic oligonucleotide
cagcacacuucaagggucu

SEQ ID NO: 2883015 - RNA, 19 nt, Artificial Sequence
  Description of Artificial Sequence: Synthetic oligonucleotide
agcguggggcuggaacaug

SEQ ID NO: 2883016 - RNA, 19 nt, Artificial Sequence
  Description of Artificial Sequence: Synthetic oligonucleotide
guggaccccagcacacuuc

SEQ ID NO: 2883017 - RNA, 19 nt, Artificial Sequence
  Description of Artificial Sequence: Synthetic oligonucleotide
gcagaguccuaagccugcc

SEQ ID NO: 2883018 - RNA, 19 nt, Artificial Sequence
  Description of Artificial Sequence: Synthetic oligonucleotide
gaccagauggugugcuguu

SEQ ID NO: 2883019 - RNA, 19 nt, Artificial Sequence
  Description of Artificial Sequence: Synthetic oligonucleotide
cugaccgcagcguggggcu

SEQ ID NO: 2883020 - RNA, 19 nt, Artificial Sequence
  Description of Artificial Sequence: Synthetic oligonucleotide
gcauggugacgaccaccag

SEQ ID NO: 2883021 - RNA, 19 nt, Artificial Sequence
  Description of Artificial Sequence: Synthetic oligonucleotide
acgcggcuccaggcuaugg

SEQ ID NO: 2883022 - RNA, 19 nt, Artificial Sequence
  Description of Artificial Sequence: Synthetic oligonucleotide
ccaagagggugaccagaug

SEQ ID NO: 2883023 - RNA, 19 nt, Artificial Sequence
  Description of Artificial Sequence: Synthetic oligonucleotide
ugacgacagucuggccacu

SEQ ID NO: 2883024 - RNA, 19 nt, Artificial Sequence
  Description of Artificial Sequence: Synthetic oligonucleotide
ugaccgcagcguggggcug

SEQ ID NO: 2883025 - RNA, 19 nt, Artificial Sequence
  Description of Artificial Sequence: Synthetic oligonucleotide
cuguugaucgugggcaggu

SEQ ID NO: 2883026 - RNA, 19 nt, Artificial Sequence
  Description of Artificial Sequence: Synthetic oligonucleotide
ggcuauggguacagaggac

SEQ ID NO: 2883027 - RNA, 19 nt, Artificial Sequence
  Description of Artificial Sequence: Synthetic oligonucleotide
guccuucugcgugucuguc

SEQ ID NO: 2883028 - RNA, 19 nt, Artificial Sequence
  Description of Artificial Sequence: Synthetic oligonucleotide
cgcggcuccaggcuauggg

SEQ ID NO: 2883029 - RNA, 19 nt, Artificial Sequence
  Description of Artificial Sequence: Synthetic oligonucleotide
gcacacuucaagggucuca

SEQ ID NO: 2883030 - RNA, 19 nt, Artificial Sequence
  Description of Artificial Sequence: Synthetic oligonucleotide
cggacagccucaguuuggg

SEQ ID NO: 2883031 - RNA, 19 nt, Artificial Sequence
  Description of Artificial Sequence: Synthetic oligonucleotide
ggccaccaagcauggugac

SEQ ID NO: 2883032 - RNA, 19 nt, Artificial Sequence
  Description of Artificial Sequence: Synthetic oligonucleotide
cacacgcggcuccaggcua

SEQ ID NO: 2883033 - RNA, 19 nt, Artificial Sequence
  Description of Artificial Sequence: Synthetic oligonucleotide
uggcgccugcccucgcuuu

SEQ ID NO: 2883034 - RNA, 19 nt, Artificial Sequence
  Description of Artificial Sequence: Synthetic oligonucleotide
cgcagcguggggcuggaac

SEQ ID NO: 2883035 - RNA, 19 nt, Artificial Sequence
  Description of Artificial Sequence: Synthetic oligonucleotide
guuucaggugagguuugau

SEQ ID NO: 2883036 - RNA, 19 nt, Artificial Sequence
  Description of Artificial Sequence: Synthetic oligonucleotide
aucaagcuggacggcccuu

SEQ ID NO: 2883037 - RNA, 19 nt, Artificial Sequence
  Description of Artificial Sequence: Synthetic oligonucleotide
ggugaccagauggugugcu

SEQ ID NO: 2883038 - RNA, 19 nt, Artificial Sequence
  Description of Artificial Sequence: Synthetic oligonucleotide
cccuuuccuguugaucgug

SEQ ID NO: 2883039 - RNA, 19 nt, Artificial Sequence
  Description of Artificial Sequence: Synthetic oligonucleotide
cuccggacagccucaguuu

SEQ ID NO: 2883040 - RNA, 19 nt, Artificial Sequence
  Description of Artificial Sequence: Synthetic oligonucleotide
gggugaccagauggugugc

SEQ ID NO: 2883041 - RNA, 19 nt, Artificial Sequence
  Description of Artificial Sequence: Synthetic oligonucleotide
acgucaugcugugccccau

SEQ ID NO: 2883042 - RNA, 19 nt, Artificial Sequence
  Description of Artificial Sequence: Synthetic oligonucleotide
gggcuggaacaugacgaca

SEQ ID NO: 2883043 - RNA, 19 nt, Artificial Sequence
  Description of Artificial Sequence: Synthetic oligonucleotide
gcagcuguccugggccacc

SEQ ID NO: 2883044 - RNA, 19 nt, Artificial Sequence
  Description of Artificial Sequence: Synthetic oligonucleotide
agccugcccauggcgccug

SEQ ID NO: 2883045 - RNA, 19 nt, Artificial Sequence
  Description of Artificial Sequence: Synthetic oligonucleotide
agcuguccugggccaccaa

SEQ ID NO: 2883046 - RNA, 19 nt, Artificial Sequence
  Description of Artificial Sequence: Synthetic oligonucleotide
gaggaccgcuaggcagcug

SEQ ID NO: 2883047 - RNA, 19 nt, Artificial Sequence
  Description of Artificial Sequence: Synthetic oligonucleotide
acacgcggcuccaggcuau

SEQ ID NO: 2883048 - RNA, 19 nt, Artificial Sequence
  Description of Artificial Sequence: Synthetic oligonucleotide
gcccaacacugaccgcagc

SEQ ID NO: 2883049 - RNA, 19 nt, Artificial Sequence
  Description of Artificial Sequence: Synthetic oligonucleotide
gcggcuccaggcuaugggu

SEQ ID NO: 2883050 - RNA, 19 nt, Artificial Sequence
  Description of Artificial Sequence: Synthetic oligonucleotide
gucucaacacagggacucu

SEQ ID NO: 2883051 - RNA, 19 nt, Artificial Sequence
  Description of Artificial Sequence: Synthetic oligonucleotide
cccauggcgccugcccucg

SEQ ID NO: 2883052 - RNA, 19 nt, Artificial Sequence
  Description of Artificial Sequence: Synthetic oligonucleotide
ccgcuaggcagcuguccug

SEQ ID NO: 2883053 - RNA, 19 nt, Artificial Sequence
  Description of Artificial Sequence: Synthetic oligonucleotide
gcuggaacaugacgacagu

SEQ ID NO: 2883054 - RNA, 19 nt, Artificial Sequence
  Description of Artificial Sequence: Synthetic oligonucleotide
gcuuuccaagagggugacc

SEQ ID NO: 2883055 - RNA, 19 nt, Artificial Sequence
  Description of Artificial Sequence: Synthetic oligonucleotide
gcguggggcuggaacauga

SEQ ID NO: 2883056 - RNA, 19 nt, Artificial Sequence
  Description of Artificial Sequence: Synthetic oligonucleotide
caagcuggacggcccuugu

SEQ ID NO: 2883057 - RNA, 19 nt, Artificial Sequence
  Description of Artificial Sequence: Synthetic oligonucleotide
cgaccaccagcacacguca

SEQ ID NO: 2883058 - RNA, 19 nt, Artificial Sequence
  Description of Artificial Sequence: Synthetic oligonucleotide
ggcgccugcccucgcuuuc

SEQ ID NO: 2883059 - RNA, 19 nt, Artificial Sequence
  Description of Artificial Sequence: Synthetic oligonucleotide
caccagcacacgucaugcu

SEQ ID NO: 2883060 - RNA, 19 nt, Artificial Sequence
  Description of Artificial Sequence: Synthetic oligonucleotide
cguggggcuggaacaugac

SEQ ID NO: 2883061 - RNA, 19 nt, Artificial Sequence
  Description of Artificial Sequence: Synthetic oligonucleotide
ccccauccacucucagcug

SEQ ID NO: 2883062 - RNA, 19 nt, Artificial Sequence
  Description of Artificial Sequence: Synthetic oligonucleotide
cacgcggcuccaggcuaug

SEQ ID NO: 2883063 - RNA, 19 nt, Artificial Sequence
  Description of Artificial Sequence: Synthetic oligonucleotide
gcccauggcgccugcccuc

SEQ ID NO: 2883064 - RNA, 19 nt, Artificial Sequence
  Description of Artificial Sequence: Synthetic oligonucleotide
cauggcgccugcccucgcu

SEQ ID NO: 2883065 - RNA, 19 nt, Artificial Sequence
  Description of Artificial Sequence: Synthetic oligonucleotide
cagcuguccugggccacca

SEQ ID NO: 2883066 - RNA, 19 nt, Artificial Sequence
  Description of Artificial Sequence: Synthetic oligonucleotide
gcuccaggcuauggguaca

SEQ ID NO: 2883067 - RNA, 19 nt, Artificial Sequence
  Description of Artificial Sequence: Synthetic oligonucleotide
gccacuccggacagccuca

SEQ ID NO: 2883068 - RNA, 19 nt, Artificial Sequence
  Description of Artificial Sequence: Synthetic oligonucleotide
ggcagcuguccugggccac

SEQ ID NO: 2883069 - RNA, 19 nt, Artificial Sequence
  Description of Artificial Sequence: Synthetic oligonucleotide
accgcagcguggggcugga

SEQ ID NO: 2883070 - RNA, 19 nt, Artificial Sequence
  Description of Artificial Sequence: Synthetic oligonucleotide
cucuuccauuugcuccacu

SEQ ID NO: 2883071 - RNA, 19 nt, Artificial Sequence
  Description of Artificial Sequence: Synthetic oligonucleotide
ggugagguuugauguccuu

SEQ ID NO: 2883072 - RNA, 19 nt, Artificial Sequence
  Description of Artificial Sequence: Synthetic oligonucleotide
ccuucugcgugucugucuu

SEQ ID NO: 2883073 - RNA, 19 nt, Artificial Sequence
  Description of Artificial Sequence: Synthetic oligonucleotide
gcgccugcccucgcuuucc

SEQ ID NO: 2883074 - RNA, 19 nt, Artificial Sequence
  Description of Artificial Sequence: Synthetic oligonucleotide
cgcuuuccaagagggugac

SEQ ID NO: 2883075 - RNA, 19 nt, Artificial Sequence
  Description of Artificial Sequence: Synthetic oligonucleotide
cgucaugcugugccccauc

SEQ ID NO: 2883076 - RNA, 19 nt, Artificial Sequence
  Description of Artificial Sequence: Synthetic oligonucleotide
ggaccgcuaggcagcuguc

SEQ ID NO: 2883077 - RNA, 19 nt, Artificial Sequence
  Description of Artificial Sequence: Synthetic oligonucleotide
gggucucaacacagggacu

SEQ ID NO: 2883078 - RNA, 19 nt, Artificial Sequence
  Description of Artificial Sequence: Synthetic oligonucleotide
ccacuccggacagccucag

SEQ ID NO: 2883079 - RNA, 19 nt, Artificial Sequence
  Description of Artificial Sequence: Synthetic oligonucleotide
gcugugccccauccacucu

SEQ ID NO: 2883080 - RNA, 19 nt, Artificial Sequence
  Description of Artificial Sequence: Synthetic oligonucleotide
gccucaguuugggcagcuc

SEQ ID NO: 2883081 - RNA, 19 nt, Artificial Sequence
  Description of Artificial Sequence: Synthetic oligonucleotide
cagcguggggcuggaacau

SEQ ID NO: 2883082 - RNA, 19 nt, Artificial Sequence
  Description of Artificial Sequence: Synthetic oligonucleotide
ccucgcuuuccaagagggu

SEQ ID NO: 2883083 - RNA, 19 nt, Artificial Sequence
  Description of Artificial Sequence: Synthetic oligonucleotide
cacuccggacagccucagu

SEQ ID NO: 2883084 - RNA, 19 nt, Artificial Sequence
  Description of Artificial Sequence: Synthetic oligonucleotide
gccugcccucgcuuuccaa

SEQ ID NO: 2883085 - RNA, 19 nt, Artificial Sequence
  Description of Artificial Sequence: Synthetic oligonucleotide
ccauggcgccugcccucgc

SEQ ID NO: 2883086 - RNA, 19 nt, Artificial Sequence
  Description of Artificial Sequence: Synthetic oligonucleotide
ccccuuuccuguugaucgu

SEQ ID NO: 2883087 - RNA, 19 nt, Artificial Sequence
  Description of Artificial Sequence: Synthetic oligonucleotide
gccugcccauggcgccugc

SEQ ID NO: 2883088 - RNA, 19 nt, Artificial Sequence
  Description of Artificial Sequence: Synthetic oligonucleotide
cggcuccaggcuaugggua

SEQ ID NO: 2883089 - RNA, 19 nt, Artificial Sequence
  Description of Artificial Sequence: Synthetic oligonucleotide
ccacucucagcugcagagu

SEQ ID NO: 2883090 - RNA, 19 nt, Artificial Sequence
  Description of Artificial Sequence: Synthetic oligonucleotide
cgugggcaggugauacugu

SEQ ID NO: 2883091 - RNA, 19 nt, Artificial Sequence
  Description of Artificial Sequence: Synthetic oligonucleotide
cugggccaccaagcauggu

SEQ ID NO: 2883092 - RNA, 19 nt, Artificial Sequence
  Description of Artificial Sequence: Synthetic oligonucleotide
cagcugcuuugggguugua

SEQ ID NO: 2883093 - RNA, 19 nt, Artificial Sequence
  Description of Artificial Sequence: Synthetic oligonucleotide
cgccugcccucgcuuucca

SEQ ID NO: 2883094 - RNA, 19 nt, Artificial Sequence
  Description of Artificial Sequence: Synthetic oligonucleotide
ccgcagcguggggcuggaa

SEQ ID NO: 2883095 - RNA, 19 nt, Artificial Sequence
  Description of Artificial Sequence: Synthetic oligonucleotide
uauaaauauccuuugaucc

SEQ ID NO: 2883096 - RNA, 19 nt, Artificial Sequence
  Description of Artificial Sequence: Synthetic oligonucleotide
aauuacagcagcaauuucc

SEQ ID NO: 2883097 - RNA, 19 nt, Artificial Sequence
  Description of Artificial Sequence: Synthetic oligonucleotide
uuucauuguauaaauaucc

SEQ ID NO: 2883098 - RNA, 19 nt, Artificial Sequence
  Description of Artificial Sequence: Synthetic oligonucleotide
aaaucuaauaagcuggcag

SEQ ID NO: 2883099 - RNA, 19 nt, Artificial Sequence
  Description of Artificial Sequence: Synthetic oligonucleotide
aaucuaauaagcuggcagg

SEQ ID NO: 2883100 - RNA, 19 nt, Artificial Sequence
  Description of Artificial Sequence: Synthetic oligonucleotide
uuuagaaucacgaaucagu

SEQ ID NO: 2883101 - RNA, 19 nt, Artificial Sequence
  Description of Artificial Sequence: Synthetic oligonucleotide
ggaauugucauuucgaugg

SEQ ID NO: 2883102 - RNA, 19 nt, Artificial Sequence
  Description of Artificial Sequence: Synthetic oligonucleotide
agaagugcaauuuucauug

SEQ ID NO: 2883103 - RNA, 19 nt, Artificial Sequence
  Description of Artificial Sequence: Synthetic oligonucleotide
acauauggauauuugagcg

SEQ ID NO: 2883104 - RNA, 19 nt, Artificial Sequence
  Description of Artificial Sequence: Synthetic oligonucleotide
aguccauuacuuuagaauc

SEQ ID NO: 2883105 - RNA, 19 nt, Artificial Sequence
  Description of Artificial Sequence: Synthetic oligonucleotide
auuugagcgaucuacauug

SEQ ID NO: 2883106 - RNA, 19 nt, Artificial Sequence
  Description of Artificial Sequence: Synthetic oligonucleotide
agaaucacgaaucaguucu

SEQ ID NO: 2883107 - RNA, 19 nt, Artificial Sequence
  Description of Artificial Sequence: Synthetic oligonucleotide
auauguaguucuuuucugc

SEQ ID NO: 2883108 - RNA, 19 nt, Artificial Sequence
  Description of Artificial Sequence: Synthetic oligonucleotide
acagccaucgcccaguuuc

SEQ ID NO: 2883109 - RNA, 19 nt, Artificial Sequence
  Description of Artificial Sequence: Synthetic oligonucleotide
aucuacauuggucagagcu

SEQ ID NO: 2883110 - RNA, 19 nt, Artificial Sequence
  Description of Artificial Sequence: Synthetic oligonucleotide
uguauaaauauccuuugau

SEQ ID NO: 2883111 - RNA, 19 nt, Artificial Sequence
  Description of Artificial Sequence: Synthetic oligonucleotide
uguuuacuuggccagaaug

SEQ ID NO: 2883112 - RNA, 19 nt, Artificial Sequence
  Description of Artificial Sequence: Synthetic oligonucleotide
ugggaacugaaccugaacc

SEQ ID NO: 2883113 - RNA, 19 nt, Artificial Sequence
  Description of Artificial Sequence: Synthetic oligonucleotide
uacuuuagaaucacgaauc

SEQ ID NO: 2883114 - RNA, 19 nt, Artificial Sequence
  Description of Artificial Sequence: Synthetic oligonucleotide
auuucgauggacuugcugu

SEQ ID NO: 2883115 - RNA, 19 nt, Artificial Sequence
  Description of Artificial Sequence: Synthetic oligonucleotide
uuggucagagcucacagcc

SEQ ID NO: 2883116 - RNA, 19 nt, Artificial Sequence
  Description of Artificial Sequence: Synthetic oligonucleotide
uuuucauuguauaaauauc

SEQ ID NO: 2883117 - RNA, 19 nt, Artificial Sequence
  Description of Artificial Sequence: Synthetic oligonucleotide
uuacuuuagaaucacgaau

SEQ ID NO: 2883118 - RNA, 19 nt, Artificial Sequence
  Description of Artificial Sequence: Synthetic oligonucleotide
uagaaauucugaaacugug

SEQ ID NO: 2883119 - RNA, 19 nt, Artificial Sequence
  Description of Artificial Sequence: Synthetic oligonucleotide
aauucugaaacuguggaau

SEQ ID NO: 2883120 - RNA, 19 nt, Artificial Sequence
  Description of Artificial Sequence: Synthetic oligonucleotide
auuguauaaauauccuuug

SEQ ID NO: 2883121 - RNA, 19 nt, Artificial Sequence
  Description of Artificial Sequence: Synthetic oligonucleotide
agagcucacagccaucgcc

SEQ ID NO: 2883122 - RNA, 19 nt, Artificial Sequence
  Description of Artificial Sequence: Synthetic oligonucleotide
aauuuccuugaauugucug

SEQ ID NO: 2883123 - RNA, 19 nt, Artificial Sequence
  Description of Artificial Sequence: Synthetic oligonucleotide
uguaguucuuuucugcaug

SEQ ID NO: 2883124 - RNA, 19 nt, Artificial Sequence
  Description of Artificial Sequence: Synthetic oligonucleotide
gaaauucugaaacugugga

SEQ ID NO: 2883125 - RNA, 19 nt, Artificial Sequence
  Description of Artificial Sequence: Synthetic oligonucleotide
uuuucugcaugguagaguc

SEQ ID NO: 2883126 - RNA, 19 nt, Artificial Sequence
  Description of Artificial Sequence: Synthetic oligonucleotide
uacagcagcaauuuccuug

SEQ ID NO: 2883127 - RNA, 19 nt, Artificial Sequence
  Description of Artificial Sequence: Synthetic oligonucleotide
cacauauggauauuugagc

SEQ ID NO: 2883128 - RNA, 19 nt, Artificial Sequence
  Description of Artificial Sequence: Synthetic oligonucleotide
auaaauauccuuugaucca

SEQ ID NO: 2883129 - RNA, 19 nt, Artificial Sequence
  Description of Artificial Sequence: Synthetic oligonucleotide
uguggaauugucauuucga

SEQ ID NO: 2883130 - RNA, 19 nt, Artificial Sequence
  Description of Artificial Sequence: Synthetic oligonucleotide
guauaaauauccuuugauc

SEQ ID NO: 2883131 - RNA, 19 nt, Artificial Sequence
  Description of Artificial Sequence: Synthetic oligonucleotide
ugcuccuaaccucugagcc

SEQ ID NO: 2883132 - RNA, 19 nt, Artificial Sequence
  Description of Artificial Sequence: Synthetic oligonucleotide
uucauuguauaaauauccu

SEQ ID NO: 2883133 - RNA, 19 nt, Artificial Sequence
  Description of Artificial Sequence: Synthetic oligonucleotide
ugaaacuguggaauuguca

SEQ ID NO: 2883134 - RNA, 19 nt, Artificial Sequence
  Description of Artificial Sequence: Synthetic oligonucleotide
guuuacuuggccagaaugg

SEQ ID NO: 2883135 - RNA, 19 nt, Artificial Sequence
  Description of Artificial Sequence: Synthetic oligonucleotide
ugaaccugaaccugggccc

SEQ ID NO: 2883136 - RNA, 19 nt, Artificial Sequence
  Description of Artificial Sequence: Synthetic oligonucleotide
uucaauuacagcagcaauu

SEQ ID NO: 2883137 - RNA, 19 nt, Artificial Sequence
  Description of Artificial Sequence: Synthetic oligonucleotide
aauggucugccacuuugag

SEQ ID NO: 2883138 - RNA, 19 nt, Artificial Sequence
  Description of Artificial Sequence: Synthetic oligonucleotide
aauaagcuggcaggugacc

SEQ ID NO: 2883139 - RNA, 19 nt, Artificial Sequence
  Description of Artificial Sequence: Synthetic oligonucleotide
cauuacuuuagaaucacga

SEQ ID NO: 2883140 - RNA, 19 nt, Artificial Sequence
  Description of Artificial Sequence: Synthetic oligonucleotide
uacuuggccagaauggucu

SEQ ID NO: 2883141 - RNA, 19 nt, Artificial Sequence
  Description of Artificial Sequence: Synthetic oligonucleotide
uauguaguucuuuucugca

SEQ ID NO: 2883142 - RNA, 19 nt, Artificial Sequence
  Description of Artificial Sequence: Synthetic oligonucleotide
uugaauugucuguagaaau

SEQ ID NO: 2883143 - RNA, 19 nt, Artificial Sequence
  Description of Artificial Sequence: Synthetic oligonucleotide
uuguauaaauauccuuuga

SEQ ID NO: 2883144 - RNA, 19 nt, Artificial Sequence
  Description of Artificial Sequence: Synthetic oligonucleotide
uuagaaucacgaaucaguu

SEQ ID NO: 2883145 - RNA, 19 nt, Artificial Sequence
  Description of Artificial Sequence: Synthetic oligonucleotide
auuuccuugaauugucugu

SEQ ID NO: 2883146 - RNA, 19 nt, Artificial Sequence
  Description of Artificial Sequence: Synthetic oligonucleotide
caccguuucaauuacagca

SEQ ID NO: 2883147 - RNA, 19 nt, Artificial Sequence
  Description of Artificial Sequence: Synthetic oligonucleotide
auuacuuuagaaucacgaa

SEQ ID NO: 2883148 - RNA, 19 nt, Artificial Sequence
  Description of Artificial Sequence: Synthetic oligonucleotide
aauugucauuucgauggac

SEQ ID NO: 2883149 - RNA, 19 nt, Artificial Sequence
  Description of Artificial Sequence: Synthetic oligonucleotide
aaauucugaaacuguggaa

SEQ ID NO: 2883150 - RNA, 19 nt, Artificial Sequence
  Description of Artificial Sequence: Synthetic oligonucleotide
ugcaauuuucauuguauaa

SEQ ID NO: 2883151 - RNA, 19 nt, Artificial Sequence
  Description of Artificial Sequence: Synthetic oligonucleotide
guucuuuucugcaugguag

SEQ ID NO: 2883152 - RNA, 19 nt, Artificial Sequence
  Description of Artificial Sequence: Synthetic oligonucleotide
agaaauucugaaacugugg

SEQ ID NO: 2883153 - RNA, 19 nt, Artificial Sequence
  Description of Artificial Sequence: Synthetic oligonucleotide
uuucaauuacagcagcaau

SEQ ID NO: 2883154 - RNA, 19 nt, Artificial Sequence
  Description of Artificial Sequence: Synthetic oligonucleotide
ucacgaaucaguucucaca

SEQ ID NO: 2883155 - RNA, 19 nt, Artificial Sequence
  Description of Artificial Sequence: Synthetic oligonucleotide
aaccagugcuccuaaccuc

SEQ ID NO: 2883156 - RNA, 19 nt, Artificial Sequence
  Description of Artificial Sequence: Synthetic oligonucleotide
ucagagcucacagccaucg

SEQ ID NO: 2883157 - RNA, 19 nt, Artificial Sequence
  Description of Artificial Sequence: Synthetic oligonucleotide
ugagcgaucuacauugguc

SEQ ID NO: 2883158 - RNA, 19 nt, Artificial Sequence
  Description of Artificial Sequence: Synthetic oligonucleotide
auggucugccacuuugagc

SEQ ID NO: 2883159 - RNA, 19 nt, Artificial Sequence
  Description of Artificial Sequence: Synthetic oligonucleotide
acuugcuguuuacuuggcc

SEQ ID NO: 2883160 - RNA, 19 nt, Artificial Sequence
  Description of Artificial Sequence: Synthetic oligonucleotide
acaccguuucaauuacagc

SEQ ID NO: 2883161 - RNA, 19 nt, Artificial Sequence
  Description of Artificial Sequence: Synthetic oligonucleotide
uggaauugucauuucgaug

SEQ ID NO: 2883162 - RNA, 19 nt, Artificial Sequence
  Description of Artificial Sequence: Synthetic oligonucleotide
aauauccuuugauccauau

SEQ ID NO: 2883163 - RNA, 19 nt, Artificial Sequence
  Description of Artificial Sequence: Synthetic oligonucleotide
guaguucuuuucugcaugg

SEQ ID NO: 2883164 - RNA, 19 nt, Artificial Sequence
  Description of Artificial Sequence: Synthetic oligonucleotide
ucuacauuggucagagcuc

SEQ ID NO: 2883165 - RNA, 19 nt, Artificial Sequence
  Description of Artificial Sequence: Synthetic oligonucleotide
gccacuuugagcaucaccg

SEQ ID NO: 2883166 - RNA, 19 nt, Artificial Sequence
  Description of Artificial Sequence: Synthetic oligonucleotide
ugaauugucuguagaaauu

SEQ ID NO: 2883167 - RNA, 19 nt, Artificial Sequence
  Description of Artificial Sequence: Synthetic oligonucleotide
cauauguaguucuuuucug

SEQ ID NO: 2883168 - RNA, 19 nt, Artificial Sequence
  Description of Artificial Sequence: Synthetic oligonucleotide
cacgaaucaguucucacac

SEQ ID NO: 2883169 - RNA, 19 nt, Artificial Sequence
  Description of Artificial Sequence: Synthetic oligonucleotide
ucaguucucacaccguuuc

SEQ ID NO: 2883170 - RNA, 19 nt, Artificial Sequence
  Description of Artificial Sequence: Synthetic oligonucleotide
aucacgaaucaguucucac

SEQ ID NO: 2883171 - RNA, 19 nt, Artificial Sequence
  Description of Artificial Sequence: Synthetic oligonucleotide
aaucaguucucacaccguu

SEQ ID NO: 2883172 - RNA, 19 nt, Artificial Sequence
  Description of Artificial Sequence: Synthetic oligonucleotide
cacaccguuucaauuacag

SEQ ID NO: 2883173 - RNA, 19 nt, Artificial Sequence
  Description of Artificial Sequence: Synthetic oligonucleotide
uggacuugcuguuuacuug

SEQ ID NO: 2883174 - RNA, 19 nt, Artificial Sequence
  Description of Artificial Sequence: Synthetic oligonucleotide
ucauuguauaaauauccuu

SEQ ID NO: 2883175 - RNA, 19 nt, Artificial Sequence
  Description of Artificial Sequence: Synthetic oligonucleotide
ucaauuacagcagcaauuu

SEQ ID NO: 2883176 - RNA, 19 nt, Artificial Sequence
  Description of Artificial Sequence: Synthetic oligonucleotide
gaauugucuguagaaauuc

SEQ ID NO: 2883177 - RNA, 19 nt, Artificial Sequence
  Description of Artificial Sequence: Synthetic oligonucleotide
gagcgaucuacauugguca

SEQ ID NO: 2883178 - RNA, 19 nt, Artificial Sequence
  Description of Artificial Sequence: Synthetic oligonucleotide
aucaccgccacauauggau

SEQ ID NO: 2883179 - RNA, 19 nt, Artificial Sequence
  Description of Artificial Sequence: Synthetic oligonucleotide
uugcuguuuacuuggccag

SEQ ID NO: 2883180 - RNA, 19 nt, Artificial Sequence
  Description of Artificial Sequence: Synthetic oligonucleotide
ucucacaccguuucaauua

SEQ ID NO: 2883181 - RNA, 19 nt, Artificial Sequence
  Description of Artificial Sequence: Synthetic oligonucleotide
aacuguggaauugucauuu

SEQ ID NO: 2883182 - RNA, 19 nt, Artificial Sequence
  Description of Artificial Sequence: Synthetic oligonucleotide
gaaacuguggaauugucau

SEQ ID NO: 2883183 - RNA, 19 nt, Artificial Sequence
  Description of Artificial Sequence: Synthetic oligonucleotide
uuugagcgaucuacauugg

SEQ ID NO: 2883184 - RNA, 19 nt, Artificial Sequence
  Description of Artificial Sequence: Synthetic oligonucleotide
gaacugaaccugaaccugg

SEQ ID NO: 2883185 - RNA, 19 nt, Artificial Sequence
  Description of Artificial Sequence: Synthetic oligonucleotide
uucugcaugguagagucca

SEQ ID NO: 2883186 - RNA, 19 nt, Artificial Sequence
  Description of Artificial Sequence: Synthetic oligonucleotide
cuaauaagcuggcagguga

SEQ ID NO: 2883187 - RNA, 19 nt, Artificial Sequence
  Description of Artificial Sequence: Synthetic oligonucleotide
uggcaggugaccuuuuggc

SEQ ID NO: 2883188 - RNA, 19 nt, Artificial Sequence
  Description of Artificial Sequence: Synthetic oligonucleotide
uauuugagcgaucuacauu

SEQ ID NO: 2883189 - RNA, 19 nt, Artificial Sequence
  Description of Artificial Sequence: Synthetic oligonucleotide
uuuacuuggccagaauggu

SEQ ID NO: 2883190 - RNA, 19 nt, Artificial Sequence
  Description of Artificial Sequence: Synthetic oligonucleotide
agugcuccuaaccucugag

SEQ ID NO: 2883191 - RNA, 19 nt, Artificial Sequence
  Description of Artificial Sequence: Synthetic oligonucleotide
cuuuuggcguccagcaccg

SEQ ID NO: 2883192 - RNA, 19 nt, Artificial Sequence
  Description of Artificial Sequence: Synthetic oligonucleotide
ucucuccugccccagaagu

SEQ ID NO: 2883193 - RNA, 19 nt, Artificial Sequence
  Description of Artificial Sequence: Synthetic oligonucleotide
gucauuucgauggacuugc

SEQ ID NO: 2883194 - RNA, 19 nt, Artificial Sequence
  Description of Artificial Sequence: Synthetic oligonucleotide
agcaauuuccuugaauugu

SEQ ID NO: 2883195 - RNA, 19 nt, Artificial Sequence
  Description of Artificial Sequence: Synthetic oligonucleotide
guagaguccauuacuuuag

SEQ ID NO: 2883196 - RNA, 19 nt, Artificial Sequence
  Description of Artificial Sequence: Synthetic oligonucleotide
uaauaagcuggcaggugac

SEQ ID NO: 2883197 - RNA, 19 nt, Artificial Sequence
  Description of Artificial Sequence: Synthetic oligonucleotide
gauauuugagcgaucuaca

SEQ ID NO: 2883198 - RNA, 19 nt, Artificial Sequence
  Description of Artificial Sequence: Synthetic oligonucleotide
cauuggucagagcucacag

SEQ ID NO: 2883199 - RNA, 19 nt, Artificial Sequence
  Description of Artificial Sequence: Synthetic oligonucleotide
uucuuuucugcaugguaga

SEQ ID NO: 2883200 - RNA, 19 nt, Artificial Sequence
  Description of Artificial Sequence: Synthetic oligonucleotide
aaaaucuaauaagcuggca

SEQ ID NO: 2883201 - RNA, 19 nt, Artificial Sequence
  Description of Artificial Sequence: Synthetic oligonucleotide
ucugaaacuguggaauugu

SEQ ID NO: 2883202 - RNA, 19 nt, Artificial Sequence
  Description of Artificial Sequence: Synthetic oligonucleotide
uaaauauccuuugauccau

SEQ ID NO: 2883203 - RNA, 19 nt, Artificial Sequence
  Description of Artificial Sequence: Synthetic oligonucleotide
acgaaucaguucucacacc

SEQ ID NO: 2883204 - RNA, 19 nt, Artificial Sequence
  Description of Artificial Sequence: Synthetic oligonucleotide
aaccugggcccucuggaag

SEQ ID NO: 2883205 - RNA, 19 nt, Artificial Sequence
  Description of Artificial Sequence: Synthetic oligonucleotide
ggauauuugagcgaucuac

SEQ ID NO: 2883206 - RNA, 19 nt, Artificial Sequence
  Description of Artificial Sequence: Synthetic oligonucleotide
aauugucuguagaaauucu

SEQ ID NO: 2883207 - RNA, 19 nt, Artificial Sequence
  Description of Artificial Sequence: Synthetic oligonucleotide
auggauauuugagcgaucu

SEQ ID NO: 2883208 - RNA, 19 nt, Artificial Sequence
  Description of Artificial Sequence: Synthetic oligonucleotide
ccaguuuccaacuagaaaa

SEQ ID NO: 2883209 - RNA, 19 nt, Artificial Sequence
  Description of Artificial Sequence: Synthetic oligonucleotide
auauuugagcgaucuacau

SEQ ID NO: 2883210 - RNA, 19 nt, Artificial Sequence
  Description of Artificial Sequence: Synthetic oligonucleotide
cuuuagaaucacgaaucag

SEQ ID NO: 2883211 - RNA, 19 nt, Artificial Sequence
  Description of Artificial Sequence: Synthetic oligonucleotide
uccauauguaguucuuuuc

SEQ ID NO: 2883212 - RNA, 19 nt, Artificial Sequence
  Description of Artificial Sequence: Synthetic oligonucleotide
ucuaauaagcuggcaggug

SEQ ID NO: 2883213 - RNA, 19 nt, Artificial Sequence
  Description of Artificial Sequence: Synthetic oligonucleotide
ccacauauggauauuugag

SEQ ID NO: 2883214 - RNA, 19 nt, Artificial Sequence
  Description of Artificial Sequence: Synthetic oligonucleotide
auugucauuucgauggacu

SEQ ID NO: 2883215 - RNA, 19 nt, Artificial Sequence
  Description of Artificial Sequence: Synthetic oligonucleotide
uugagcaucaccgccacau

SEQ ID NO: 2883216 - RNA, 19 nt, Artificial Sequence
  Description of Artificial Sequence: Synthetic oligonucleotide
auauggauauuugagcgau

SEQ ID NO: 2883217 - RNA, 19 nt, Artificial Sequence
  Description of Artificial Sequence: Synthetic oligonucleotide
cauuguauaaauauccuuu

SEQ ID NO: 2883218 - RNA, 19 nt, Artificial Sequence
  Description of Artificial Sequence: Synthetic oligonucleotide
aagugcaauuuucauugua

SEQ ID NO: 2883219 - RNA, 19 nt, Artificial Sequence
  Description of Artificial Sequence: Synthetic oligonucleotide
uucugaaacuguggaauug

SEQ ID NO: 2883220 - RNA, 19 nt, Artificial Sequence
  Description of Artificial Sequence: Synthetic oligonucleotide
cacuuugagcaucaccgcc

SEQ ID NO: 2883221 - RNA, 19 nt, Artificial Sequence
  Description of Artificial Sequence: Synthetic oligonucleotide
ugucauuucgauggacuug

SEQ ID NO: 2883222 - RNA, 19 nt, Artificial Sequence
  Description of Artificial Sequence: Synthetic oligonucleotide
uccauuacuuuagaaucac

SEQ ID NO: 2883223 - RNA, 19 nt, Artificial Sequence
  Description of Artificial Sequence: Synthetic oligonucleotide
ugccacuuugagcaucacc

SEQ ID NO: 2883224 - RNA, 19 nt, Artificial Sequence
  Description of Artificial Sequence: Synthetic oligonucleotide
aacugaaccugaaccuggg

SEQ ID NO: 2883225 - RNA, 19 nt, Artificial Sequence
  Description of Artificial Sequence: Synthetic oligonucleotide
ucuuuucugcaugguagag

SEQ ID NO: 2883226 - RNA, 19 nt, Artificial Sequence
  Description of Artificial Sequence: Synthetic oligonucleotide
aaucacgaaucaguucuca

SEQ ID NO: 2883227 - RNA, 19 nt, Artificial Sequence
  Description of Artificial Sequence: Synthetic oligonucleotide
uagaaucacgaaucaguuc

SEQ ID NO: 2883228 - RNA, 19 nt, Artificial Sequence
  Description of Artificial Sequence: Synthetic oligonucleotide
agugcaauuuucauuguau

SEQ ID NO: 2883229 - RNA, 19 nt, Artificial Sequence
  Description of Artificial Sequence: Synthetic oligonucleotide
uuacuuggccagaaugguc

SEQ ID NO: 2883230 - RNA, 19 nt, Artificial Sequence
  Description of Artificial Sequence: Synthetic oligonucleotide
aguucuuuucugcauggua

SEQ ID NO: 2883231 - RNA, 19 nt, Artificial Sequence
  Description of Artificial Sequence: Synthetic oligonucleotide
uuccuugaauugucuguag

SEQ ID NO: 2883232 - RNA, 19 nt, Artificial Sequence
  Description of Artificial Sequence: Synthetic oligonucleotide
aaacuguggaauugucauu

SEQ ID NO: 2883233 - RNA, 19 nt, Artificial Sequence
  Description of Artificial Sequence: Synthetic oligonucleotide
uuuccuugaauugucugua

SEQ ID NO: 2883234 - RNA, 19 nt, Artificial Sequence
  Description of Artificial Sequence: Synthetic oligonucleotide
uuuggcguccagcaccggu

SEQ ID NO: 2883235 - RNA, 19 nt, Artificial Sequence
  Description of Artificial Sequence: Synthetic oligonucleotide
ugcaugguagaguccauua

SEQ ID NO: 2883236 - RNA, 19 nt, Artificial Sequence
  Description of Artificial Sequence: Synthetic oligonucleotide
uuugauccauauguaguuc

SEQ ID NO: 2883237 - RNA, 19 nt, Artificial Sequence
  Description of Artificial Sequence: Synthetic oligonucleotide
ugggcccucuggaagagca

SEQ ID NO: 2883238 - RNA, 19 nt, Artificial Sequence
  Description of Artificial Sequence: Synthetic oligonucleotide
accguuucaauuacagcag

SEQ ID NO: 2883239 - RNA, 19 nt, Artificial Sequence
  Description of Artificial Sequence: Synthetic oligonucleotide
agcaccgguucccggagcg

SEQ ID NO: 2883240 - RNA, 19 nt, Artificial Sequence
  Description of Artificial Sequence: Synthetic oligonucleotide
uugagcgaucuacauuggu

SEQ ID NO: 2883241 - RNA, 19 nt, Artificial Sequence
  Description of Artificial Sequence: Synthetic oligonucleotide
cauauggauauuugagcga

SEQ ID NO: 2883242 - RNA, 19 nt, Artificial Sequence
  Description of Artificial Sequence: Synthetic oligonucleotide
uagaguccauuacuuuaga

SEQ ID NO: 2883243 - RNA, 19 nt, Artificial Sequence
  Description of Artificial Sequence: Synthetic oligonucleotide
ugaccuuuuggcguccagc

SEQ ID NO: 2883244 - RNA, 19 nt, Artificial Sequence
  Description of Artificial Sequence: Synthetic oligonucleotide
ucgcccaguuuccaacuag

SEQ ID NO: 2883245 - RNA, 19 nt, Artificial Sequence
  Description of Artificial Sequence: Synthetic oligonucleotide
gcaucaccgccacauaugg

SEQ ID NO: 2883246 - RNA, 19 nt, Artificial Sequence
  Description of Artificial Sequence: Synthetic oligonucleotide
aucuaauaagcuggcaggu

SEQ ID NO: 2883247 - RNA, 19 nt, Artificial Sequence
  Description of Artificial Sequence: Synthetic oligonucleotide
agcgaucuacauuggucag

SEQ ID NO: 2883248 - RNA, 19 nt, Artificial Sequence
  Description of Artificial Sequence: Synthetic oligonucleotide
cuggcaggugaccuuuugg

SEQ ID NO: 2883249 - RNA, 19 nt, Artificial Sequence
  Description of Artificial Sequence: Synthetic oligonucleotide
cauuucgauggacuugcug

SEQ ID NO: 2883250 - RNA, 19 nt, Artificial Sequence
  Description of Artificial Sequence: Synthetic oligonucleotide
cgaaucaguucucacaccg

SEQ ID NO: 2883251 - RNA, 19 nt, Artificial Sequence
  Description of Artificial Sequence: Synthetic oligonucleotide
aagagcaaccagugcuccu

SEQ ID NO: 2883252 - RNA, 19 nt, Artificial Sequence
  Description of Artificial Sequence: Synthetic oligonucleotide
accuuuuggcguccagcac

SEQ ID NO: 2883253 - RNA, 19 nt, Artificial Sequence
  Description of Artificial Sequence: Synthetic oligonucleotide
gagcucacagccaucgccc

SEQ ID NO: 2883254 - RNA, 19 nt, Artificial Sequence
  Description of Artificial Sequence: Synthetic oligonucleotide
auggacuugcuguuuacuu

SEQ ID NO: 2883255 - RNA, 19 nt, Artificial Sequence
  Description of Artificial Sequence: Synthetic oligonucleotide
uuggccagaauggucugcc

SEQ ID NO: 2883256 - RNA, 19 nt, Artificial Sequence
  Description of Artificial Sequence: Synthetic oligonucleotide
gaagagcaaccagugcucc

SEQ ID NO: 2883257 - RNA, 19 nt, Artificial Sequence
  Description of Artificial Sequence: Synthetic oligonucleotide
auaagcuggcaggugaccu

SEQ ID NO: 2883258 - RNA, 19 nt, Artificial Sequence
  Description of Artificial Sequence: Synthetic oligonucleotide
cucacaccguuucaauuac

SEQ ID NO: 2883259 - RNA, 19 nt, Artificial Sequence
  Description of Artificial Sequence: Synthetic oligonucleotide
agaguccauuacuuuagaa

SEQ ID NO: 2883260 - RNA, 19 nt, Artificial Sequence
  Description of Artificial Sequence: Synthetic oligonucleotide
ggcaggugaccuuuuggcg

SEQ ID NO: 2883261 - RNA, 19 nt, Artificial Sequence
  Description of Artificial Sequence: Synthetic oligonucleotide
auguaguucuuuucugcau

SEQ ID NO: 2883262 - RNA, 19 nt, Artificial Sequence
  Description of Artificial Sequence: Synthetic oligonucleotide
gcaaccagugcuccuaacc

SEQ ID NO: 2883263 - RNA, 19 nt, Artificial Sequence
  Description of Artificial Sequence: Synthetic oligonucleotide
caauuuucauuguauaaau

SEQ ID NO: 2883264 - RNA, 19 nt, Artificial Sequence
  Description of Artificial Sequence: Synthetic oligonucleotide
ugauccauauguaguucuu

SEQ ID NO: 2883265 - RNA, 19 nt, Artificial Sequence
  Description of Artificial Sequence: Synthetic oligonucleotide
ccuuuuggcguccagcacc

SEQ ID NO: 2883266 - RNA, 19 nt, Artificial Sequence
  Description of Artificial Sequence: Synthetic oligonucleotide
uuucgauggacuugcuguu

SEQ ID NO: 2883267 - RNA, 19 nt, Artificial Sequence
  Description of Artificial Sequence: Synthetic oligonucleotide
agcagcaauuuccuugaau

SEQ ID NO: 2883268 - RNA, 19 nt, Artificial Sequence
  Description of Artificial Sequence: Synthetic oligonucleotide
uccagcaccgguucccgga

SEQ ID NO: 2883269 - RNA, 19 nt, Artificial Sequence
  Description of Artificial Sequence: Synthetic oligonucleotide
uucucacaccguuucaauu

SEQ ID NO: 2883270 - RNA, 19 nt, Artificial Sequence
  Description of Artificial Sequence: Synthetic oligonucleotide
cuugaauugucuguagaaa

SEQ ID NO: 2883271 - RNA, 19 nt, Artificial Sequence
  Description of Artificial Sequence: Synthetic oligonucleotide
cuuugagcaucaccgccac

SEQ ID NO: 2883272 - RNA, 19 nt, Artificial Sequence
  Description of Artificial Sequence: Synthetic oligonucleotide
acuuugagcaucaccgcca

SEQ ID NO: 2883273 - RNA, 19 nt, Artificial Sequence
  Description of Artificial Sequence: Synthetic oligonucleotide
ucgauggacuugcuguuua

SEQ ID NO: 2883274 - RNA, 19 nt, Artificial Sequence
  Description of Artificial Sequence: Synthetic oligonucleotide
gguagaguccauuacuuua

SEQ ID NO: 2883275 - RNA, 19 nt, Artificial Sequence
  Description of Artificial Sequence: Synthetic oligonucleotide
cugaaacuguggaauuguc

SEQ ID NO: 2883276 - RNA, 19 nt, Artificial Sequence
  Description of Artificial Sequence: Synthetic oligonucleotide
uauggauauuugagcgauc

SEQ ID NO: 2883277 - RNA, 19 nt, Artificial Sequence
  Description of Artificial Sequence: Synthetic oligonucleotide
gcaauuuucauuguauaaa

SEQ ID NO: 2883278 - RNA, 19 nt, Artificial Sequence
  Description of Artificial Sequence: Synthetic oligonucleotide
agcaaccagugcuccuaac

SEQ ID NO: 2883279 - RNA, 19 nt, Artificial Sequence
  Description of Artificial Sequence: Synthetic oligonucleotide
cuacauuggucagagcuca

SEQ ID NO: 2883280 - RNA, 19 nt, Artificial Sequence
  Description of Artificial Sequence: Synthetic oligonucleotide
uggucagagcucacagcca

SEQ ID NO: 2883281 - RNA, 19 nt, Artificial Sequence
  Description of Artificial Sequence: Synthetic oligonucleotide
caugguagaguccauuacu

SEQ ID NO: 2883282 - RNA, 19 nt, Artificial Sequence
  Description of Artificial Sequence: Synthetic oligonucleotide
ucacaccguuucaauuaca

SEQ ID NO: 2883283 - RNA, 19 nt, Artificial Sequence
  Description of Artificial Sequence: Synthetic oligonucleotide
ggaacugaaccugaaccug

SEQ ID NO: 2883284 - RNA, 19 nt, Artificial Sequence
  Description of Artificial Sequence: Synthetic oligonucleotide
aguucucacaccguuucaa

SEQ ID NO: 2883285 - RNA, 19 nt, Artificial Sequence
  Description of Artificial Sequence: Synthetic oligonucleotide
caauuacagcagcaauuuc

SEQ ID NO: 2883286 - RNA, 19 nt, Artificial Sequence
  Description of Artificial Sequence: Synthetic oligonucleotide
guccauuacuuuagaauca

SEQ ID NO: 2883287 - RNA, 19 nt, Artificial Sequence
  Description of Artificial Sequence: Synthetic oligonucleotide
ugguagaguccauuacuuu

SEQ ID NO: 2883288 - RNA, 19 nt, Artificial Sequence
  Description of Artificial Sequence: Synthetic oligonucleotide
uggauauuugagcgaucua

SEQ ID NO: 2883289 - RNA, 19 nt, Artificial Sequence
  Description of Artificial Sequence: Synthetic oligonucleotide
gccacauauggauauuuga

SEQ ID NO: 2883290 - RNA, 19 nt, Artificial Sequence
  Description of Artificial Sequence: Synthetic oligonucleotide
cuuugauccauauguaguu

SEQ ID NO: 2883291 - RNA, 19 nt, Artificial Sequence
  Description of Artificial Sequence: Synthetic oligonucleotide
gugcaauuuucauuguaua

SEQ ID NO: 2883292 - RNA, 19 nt, Artificial Sequence
  Description of Artificial Sequence: Synthetic oligonucleotide
agcaucaccgccacauaug

SEQ ID NO: 2883293 - RNA, 19 nt, Artificial Sequence
  Description of Artificial Sequence: Synthetic oligonucleotide
gugcuccuaaccucugagc

SEQ ID NO: 2883294 - RNA, 19 nt, Artificial Sequence
  Description of Artificial Sequence: Synthetic oligonucleotide
uuggcguccagcaccgguu

SEQ ID NO: 2883295 - RNA, 19 nt, Artificial Sequence
  Description of Artificial Sequence: Synthetic oligonucleotide
cucuccugccccagaagug

SEQ ID NO: 2883296 - RNA, 19 nt, Artificial Sequence
  Description of Artificial Sequence: Synthetic oligonucleotide
acauuggucagagcucaca

SEQ ID NO: 2883297 - RNA, 19 nt, Artificial Sequence
  Description of Artificial Sequence: Synthetic oligonucleotide
ccauuacuuuagaaucacg

SEQ ID NO: 2883298 - RNA, 19 nt, Artificial Sequence
  Description of Artificial Sequence: Synthetic oligonucleotide
acuuggccagaauggucug

SEQ ID NO: 2883299 - RNA, 19 nt, Artificial Sequence
  Description of Artificial Sequence: Synthetic oligonucleotide
caggugaccuuuuggcguc

SEQ ID NO: 2883300 - RNA, 19 nt, Artificial Sequence
  Description of Artificial Sequence: Synthetic oligonucleotide
gcagcaauuuccuugaauu

SEQ ID NO: 2883301 - RNA, 19 nt, Artificial Sequence
  Description of Artificial Sequence: Synthetic oligonucleotide
augguagaguccauuacuu

SEQ ID NO: 2883302 - RNA, 19 nt, Artificial Sequence
  Description of Artificial Sequence: Synthetic oligonucleotide
uaagcuggcaggugaccuu

SEQ ID NO: 2883303 - RNA, 19 nt, Artificial Sequence
  Description of Artificial Sequence: Synthetic oligonucleotide
ucaccgccacauauggaua

SEQ ID NO: 2883304 - RNA, 19 nt, Artificial Sequence
  Description of Artificial Sequence: Synthetic oligonucleotide
uacauuggucagagcucac

SEQ ID NO: 2883305 - RNA, 19 nt, Artificial Sequence
  Description of Artificial Sequence: Synthetic oligonucleotide
accugggcccucuggaaga

SEQ ID NO: 2883306 - RNA, 19 nt, Artificial Sequence
  Description of Artificial Sequence: Synthetic oligonucleotide
cuguagaaauucugaaacu

SEQ ID NO: 2883307 - RNA, 19 nt, Artificial Sequence
  Description of Artificial Sequence: Synthetic oligonucleotide
ucauuucgauggacuugcu

SEQ ID NO: 2883308 - RNA, 19 nt, Artificial Sequence
  Description of Artificial Sequence: Synthetic oligonucleotide
ugagcaucaccgccacaua

SEQ ID NO: 2883309 - RNA, 19 nt, Artificial Sequence
  Description of Artificial Sequence: Synthetic oligonucleotide
agagcaaccagugcuccua

SEQ ID NO: 2883310 - RNA, 19 nt, Artificial Sequence
  Description of Artificial Sequence: Synthetic oligonucleotide
cagccaucgcccaguuucc

SEQ ID NO: 2883311 - RNA, 19 nt, Artificial Sequence
  Description of Artificial Sequence: Synthetic oligonucleotide
gaaucacgaaucaguucuc

SEQ ID NO: 2883312 - RNA, 19 nt, Artificial Sequence
  Description of Artificial Sequence: Synthetic oligonucleotide
guggaauugucauuucgau

SEQ ID NO: 2883313 - RNA, 19 nt, Artificial Sequence
  Description of Artificial Sequence: Synthetic oligonucleotide
ugcuguuuacuuggccaga

SEQ ID NO: 2883314 - RNA, 19 nt, Artificial Sequence
  Description of Artificial Sequence: Synthetic oligonucleotide
uaguucuuuucugcauggu

SEQ ID NO: 2883315 - RNA, 19 nt, Artificial Sequence
  Description of Artificial Sequence: Synthetic oligonucleotide
aaauauccuuugauccaua

SEQ ID NO: 2883316 - RNA, 19 nt, Artificial Sequence
  Description of Artificial Sequence: Synthetic oligonucleotide
guucccggagcggagacuc

SEQ ID NO: 2883317 - RNA, 19 nt, Artificial Sequence
  Description of Artificial Sequence: Synthetic oligonucleotide
gcaauuuccuugaauuguc

SEQ ID NO: 2883318 - RNA, 19 nt, Artificial Sequence
  Description of Artificial Sequence: Synthetic oligonucleotide
cuuggccagaauggucugc

SEQ ID NO: 2883319 - RNA, 19 nt, Artificial Sequence
  Description of Artificial Sequence: Synthetic oligonucleotide
ucugcaugguagaguccau

SEQ ID NO: 2883320 - RNA, 19 nt, Artificial Sequence
  Description of Artificial Sequence: Synthetic oligonucleotide
gcaugguagaguccauuac

SEQ ID NO: 2883321 - RNA, 19 nt, Artificial Sequence
  Description of Artificial Sequence: Synthetic oligonucleotide
ucccggagcggagacucag

SEQ ID NO: 2883322 - RNA, 19 nt, Artificial Sequence
  Description of Artificial Sequence: Synthetic oligonucleotide
ugccccagaagugcaauuu

SEQ ID NO: 2883323 - RNA, 19 nt, Artificial Sequence
  Description of Artificial Sequence: Synthetic oligonucleotide
gacuugcuguuuacuuggc

SEQ ID NO: 2883324 - RNA, 19 nt, Artificial Sequence
  Description of Artificial Sequence: Synthetic oligonucleotide
caaccagugcuccuaaccu

SEQ ID NO: 2883325 - RNA, 19 nt, Artificial Sequence
  Description of Artificial Sequence: Synthetic oligonucleotide
uuacagcagcaauuuccuu

SEQ ID NO: 2883326 - RNA, 19 nt, Artificial Sequence
  Description of Artificial Sequence: Synthetic oligonucleotide
ccuugaauugucuguagaa

SEQ ID NO: 2883327 - RNA, 19 nt, Artificial Sequence
  Description of Artificial Sequence: Synthetic oligonucleotide
aagcuggcaggugaccuuu

SEQ ID NO: 2883328 - RNA, 19 nt, Artificial Sequence
  Description of Artificial Sequence: Synthetic oligonucleotide
ggccagaauggucugccac

SEQ ID NO: 2883329 - RNA, 19 nt, Artificial Sequence
  Description of Artificial Sequence: Synthetic oligonucleotide
gggaacugaaccugaaccu

SEQ ID NO: 2883330 - RNA, 19 nt, Artificial Sequence
  Description of Artificial Sequence: Synthetic oligonucleotide
aaccugaaccugggcccuc

SEQ ID NO: 2883331 - RNA, 19 nt, Artificial Sequence
  Description of Artificial Sequence: Synthetic oligonucleotide
gaagugcaauuuucauugu

SEQ ID NO: 2883332 - RNA, 19 nt, Artificial Sequence
  Description of Artificial Sequence: Synthetic oligonucleotide
uggcguccagcaccgguuc

SEQ ID NO: 2883333 - RNA, 19 nt, Artificial Sequence
  Description of Artificial Sequence: Synthetic oligonucleotide
cgaucuacauuggucagag

SEQ ID NO: 2883334 - RNA, 19 nt, Artificial Sequence
  Description of Artificial Sequence: Synthetic oligonucleotide
gauggacuugcuguuuacu

SEQ ID NO: 2883335 - RNA, 19 nt, Artificial Sequence
  Description of Artificial Sequence: Synthetic oligonucleotide
gagcaucaccgccacauau

SEQ ID NO: 2883336 - RNA, 19 nt, Artificial Sequence
  Description of Artificial Sequence: Synthetic oligonucleotide
gcugccacgugggugcugg

SEQ ID NO: 2883337 - RNA, 19 nt, Artificial Sequence
  Description of Artificial Sequence: Synthetic oligonucleotide
caauuuccuugaauugucu

SEQ ID NO: 2883338 - RNA, 19 nt, Artificial Sequence
  Description of Artificial Sequence: Synthetic oligonucleotide
ccguuucaauuacagcagc

SEQ ID NO: 2883339 - RNA, 19 nt, Artificial Sequence
  Description of Artificial Sequence: Synthetic oligonucleotide
uggccagaauggucugcca

SEQ ID NO: 2883340 - RNA, 19 nt, Artificial Sequence
  Description of Artificial Sequence: Synthetic oligonucleotide
aggugaccuuuuggcgucc

SEQ ID NO: 2883341 - RNA, 19 nt, Artificial Sequence
  Description of Artificial Sequence: Synthetic oligonucleotide
uucgauggacuugcuguuu

SEQ ID NO: 2883342 - RNA, 19 nt, Artificial Sequence
  Description of Artificial Sequence: Synthetic oligonucleotide
ucccuuggaauuggaguua

SEQ ID NO: 2883343 - RNA, 19 nt, Artificial Sequence
  Description of Artificial Sequence: Synthetic oligonucleotide
ccauauguaguucuuuucu

SEQ ID NO: 2883344 - RNA, 19 nt, Artificial Sequence
  Description of Artificial Sequence: Synthetic oligonucleotide
ggagcggagacucagccau

SEQ ID NO: 2883345 - RNA, 19 nt, Artificial Sequence
  Description of Artificial Sequence: Synthetic oligonucleotide
cagagcucacagccaucgc

SEQ ID NO: 2883346 - RNA, 19 nt, Artificial Sequence
  Description of Artificial Sequence: Synthetic oligonucleotide
uccugccccagaagugcaa

SEQ ID NO: 2883347 - RNA, 19 nt, Artificial Sequence
  Description of Artificial Sequence: Synthetic oligonucleotide
ccaucgcccaguuuccaac

SEQ ID NO: 2883348 - RNA, 19 nt, Artificial Sequence
  Description of Artificial Sequence: Synthetic oligonucleotide
cuuuucugcaugguagagu

SEQ ID NO: 2883349 - RNA, 19 nt, Artificial Sequence
  Description of Artificial Sequence: Synthetic oligonucleotide
uuuuggcguccagcaccgg

SEQ ID NO: 2883350 - RNA, 19 nt, Artificial Sequence
  Description of Artificial Sequence: Synthetic oligonucleotide
ugccacgugggugcuggga

SEQ ID NO: 2883351 - RNA, 19 nt, Artificial Sequence
  Description of Artificial Sequence: Synthetic oligonucleotide
aucaguucucacaccguuu

SEQ ID NO: 2883352 - RNA, 19 nt, Artificial Sequence
  Description of Artificial Sequence: Synthetic oligonucleotide
gcuccuaaccucugagcca

SEQ ID NO: 2883353 - RNA, 19 nt, Artificial Sequence
  Description of Artificial Sequence: Synthetic oligonucleotide
gcaggugaccuuuuggcgu

SEQ ID NO: 2883354 - RNA, 19 nt, Artificial Sequence
  Description of Artificial Sequence: Synthetic oligonucleotide
gaaucaguucucacaccgu

SEQ ID NO: 2883355 - RNA, 19 nt, Artificial Sequence
  Description of Artificial Sequence: Synthetic oligonucleotide
caucucuccugccccagaa

SEQ ID NO: 2883356 - RNA, 19 nt, Artificial Sequence
  Description of Artificial Sequence: Synthetic oligonucleotide
gauccauauguaguucuuu

SEQ ID NO: 2883357 - RNA, 19 nt, Artificial Sequence
  Description of Artificial Sequence: Synthetic oligonucleotide
guucucacaccguuucaau

SEQ ID NO: 2883358 - RNA, 19 nt, Artificial Sequence
  Description of Artificial Sequence: Synthetic oligonucleotide
gagcaaccagugcuccuaa

SEQ ID NO: 2883359 - RNA, 19 nt, Artificial Sequence
  Description of Artificial Sequence: Synthetic oligonucleotide
aucgcccaguuuccaacua

SEQ ID NO: 2883360 - RNA, 19 nt, Artificial Sequence
  Description of Artificial Sequence: Synthetic oligonucleotide
uucccggagcggagacuca

SEQ ID NO: 2883361 - RNA, 19 nt, Artificial Sequence
  Description of Artificial Sequence: Synthetic oligonucleotide
ucacagccaucgcccaguu

SEQ ID NO: 2883362 - RNA, 19 nt, Artificial Sequence
  Description of Artificial Sequence: Synthetic oligonucleotide
ccggagcggagacucagcc

SEQ ID NO: 2883363 - RNA, 19 nt, Artificial Sequence
  Description of Artificial Sequence: Synthetic oligonucleotide
caucaccgccacauaugga

SEQ ID NO: 2883364 - RNA, 19 nt, Artificial Sequence
  Description of Artificial Sequence: Synthetic oligonucleotide
caguucucacaccguuuca

SEQ ID NO: 2883365 - RNA, 19 nt, Artificial Sequence
  Description of Artificial Sequence: Synthetic oligonucleotide
gcuggcaggugaccuuuug

SEQ ID NO: 2883366 - RNA, 19 nt, Artificial Sequence
  Description of Artificial Sequence: Synthetic oligonucleotide
cguuucaauuacagcagca

SEQ ID NO: 2883367 - RNA, 19 nt, Artificial Sequence
  Description of Artificial Sequence: Synthetic oligonucleotide
ggucagagcucacagccau

SEQ ID NO: 2883368 - RNA, 19 nt, Artificial Sequence
  Description of Artificial Sequence: Synthetic oligonucleotide
cccaguuuccaacuagaaa

SEQ ID NO: 2883369 - RNA, 19 nt, Artificial Sequence
  Description of Artificial Sequence: Synthetic oligonucleotide
gaaccugaaccugggcccu

SEQ ID NO: 2883370 - RNA, 19 nt, Artificial Sequence
  Description of Artificial Sequence: Synthetic oligonucleotide
cuccugccccagaagugca

SEQ ID NO: 2883371 - RNA, 19 nt, Artificial Sequence
  Description of Artificial Sequence: Synthetic oligonucleotide
cagugcuccuaaccucuga

SEQ ID NO: 2883372 - RNA, 19 nt, Artificial Sequence
  Description of Artificial Sequence: Synthetic oligonucleotide
gagcggagacucagccaug

SEQ ID NO: 2883373 - RNA, 19 nt, Artificial Sequence
  Description of Artificial Sequence: Synthetic oligonucleotide
accugaaccugggcccucu

SEQ ID NO: 2883374 - RNA, 19 nt, Artificial Sequence
  Description of Artificial Sequence: Synthetic oligonucleotide
cuccuaaccucugagccau

SEQ ID NO: 2883375 - RNA, 19 nt, Artificial Sequence
  Description of Artificial Sequence: Synthetic oligonucleotide
cgccacauauggauauuug

SEQ ID NO: 2883376 - RNA, 19 nt, Artificial Sequence
  Description of Artificial Sequence: Synthetic oligonucleotide
caucgcccaguuuccaacu

SEQ ID NO: 2883377 - RNA, 19 nt, Artificial Sequence
  Description of Artificial Sequence: Synthetic oligonucleotide
cagcaccgguucccggagc

SEQ ID NO: 2883378 - RNA, 19 nt, Artificial Sequence
  Description of Artificial Sequence: Synthetic oligonucleotide
acgugggugcugggaacug

SEQ ID NO: 2883379 - RNA, 19 nt, Artificial Sequence
  Description of Artificial Sequence: Synthetic oligonucleotide
gcuguuuacuuggccagaa

SEQ ID NO: 2883380 - RNA, 19 nt, Artificial Sequence
  Description of Artificial Sequence: Synthetic oligonucleotide
gccacgugggugcugggaa

SEQ ID NO: 2883381 - RNA, 19 nt, Artificial Sequence
  Description of Artificial Sequence: Synthetic oligonucleotide
gucagagcucacagccauc

SEQ ID NO: 2883382 - RNA, 19 nt, Artificial Sequence
  Description of Artificial Sequence: Synthetic oligonucleotide
cccuuggaauuggaguuac

SEQ ID NO: 2883383 - RNA, 19 nt, Artificial Sequence
  Description of Artificial Sequence: Synthetic oligonucleotide
gcccucuggaagagcaacc

SEQ ID NO: 2883384 - RNA, 19 nt, Artificial Sequence
  Description of Artificial Sequence: Synthetic oligonucleotide
gcgaucuacauuggucaga

SEQ ID NO: 2883385 - RNA, 19 nt, Artificial Sequence
  Description of Artificial Sequence: Synthetic oligonucleotide
agccaucgcccaguuucca

SEQ ID NO: 2883386 - RNA, 19 nt, Artificial Sequence
  Description of Artificial Sequence: Synthetic oligonucleotide
caccgccacauauggauau

SEQ ID NO: 2883387 - RNA, 19 nt, Artificial Sequence
  Description of Artificial Sequence: Synthetic oligonucleotide
ccagcaccgguucccggag

SEQ ID NO: 2883388 - RNA, 19 nt, Artificial Sequence
  Description of Artificial Sequence: Synthetic oligonucleotide
cugccacgugggugcuggg

SEQ ID NO: 2883389 - RNA, 19 nt, Artificial Sequence
  Description of Artificial Sequence: Synthetic oligonucleotide
cucacagccaucgcccagu

SEQ ID NO: 2883390 - RNA, 19 nt, Artificial Sequence
  Description of Artificial Sequence: Synthetic oligonucleotide
cgauggacuugcuguuuac

SEQ ID NO: 2883391 - RNA, 19 nt, Artificial Sequence
  Description of Artificial Sequence: Synthetic oligonucleotide
caccgguucccggagcgga

SEQ ID NO: 2883392 - RNA, 19 nt, Artificial Sequence
  Description of Artificial Sequence: Synthetic oligonucleotide
cugggcccucuggaagagc

SEQ ID NO: 2883393 - RNA, 19 nt, Artificial Sequence
  Description of Artificial Sequence: Synthetic oligonucleotide
ccacgugggugcugggaac

SEQ ID NO: 2883394 - RNA, 19 nt, Artificial Sequence
  Description of Artificial Sequence: Synthetic oligonucleotide
accgccacauauggauauu

SEQ ID NO: 2883395 - RNA, 19 nt, Artificial Sequence
  Description of Artificial Sequence: Synthetic oligonucleotide
cuguuuacuuggccagaau

SEQ ID NO: 2883396 - RNA, 19 nt, Artificial Sequence
  Description of Artificial Sequence: Synthetic oligonucleotide
cccggagcggagacucagc

SEQ ID NO: 2883397 - RNA, 19 nt, Artificial Sequence
  Description of Artificial Sequence: Synthetic oligonucleotide
gccaucgcccaguuuccaa

SEQ ID NO: 2883398 - RNA, 19 nt, Artificial Sequence
  Description of Artificial Sequence: Synthetic oligonucleotide
cacgugggugcugggaacu

SEQ ID NO: 2883399 - RNA, 19 nt, Artificial Sequence
  Description of Artificial Sequence: Synthetic oligonucleotide
gcaccgguucccggagcgg

SEQ ID NO: 2883400 - RNA, 19 nt, Artificial Sequence
  Description of Artificial Sequence: Synthetic oligonucleotide
gcccaguuuccaacuagaa

SEQ ID NO: 2883401 - RNA, 19 nt, Artificial Sequence
  Description of Artificial Sequence: Synthetic oligonucleotide
ccuuggaauuggaguuaca

SEQ ID NO: 2883402 - RNA, 19 nt, Artificial Sequence
  Description of Artificial Sequence: Synthetic oligonucleotide
cgcccaguuuccaacuaga

SEQ ID NO: 2883403 - RNA, 19 nt, Artificial Sequence
  Description of Artificial Sequence: Synthetic oligonucleotide
agcugccacgugggugcug

SEQ ID NO: 2883404 - RNA, 19 nt, Artificial Sequence
  Description of Artificial Sequence: Synthetic oligonucleotide
ccugggcccucuggaagag

SEQ ID NO: 2883405 - RNA, 19 nt, Artificial Sequence
  Description of Artificial Sequence: Synthetic oligonucleotide
cguccagcaccgguucccg

SEQ ID NO: 2883406 - RNA, 19 nt, Artificial Sequence
  Description of Artificial Sequence: Synthetic oligonucleotide
ggugaccuuuuggcgucca

SEQ ID NO: 2883407 - RNA, 19 nt, Artificial Sequence
  Description of Artificial Sequence: Synthetic oligonucleotide
cugcaugguagaguccauu

SEQ ID NO: 2883408 - RNA, 19 nt, Artificial Sequence
  Description of Artificial Sequence: Synthetic oligonucleotide
cagaauggucugccacuuu

SEQ ID NO: 2883409 - RNA, 19 nt, Artificial Sequence
  Description of Artificial Sequence: Synthetic oligonucleotide
cugccccagaagugcaauu

SEQ ID NO: 2883410 - RNA, 19 nt, Artificial Sequence
  Description of Artificial Sequence: Synthetic oligonucleotide
agcuggcaggugaccuuuu

SEQ ID NO: 2883411 - RNA, 19 nt, Artificial Sequence
  Description of Artificial Sequence: Synthetic oligonucleotide
cggagcggagacucagcca

SEQ ID NO: 2883412 - RNA, 19 nt, Artificial Sequence
  Description of Artificial Sequence: Synthetic oligonucleotide
cgguucccggagcggagac

SEQ ID NO: 2883413 - RNA, 19 nt, Artificial Sequence
  Description of Artificial Sequence: Synthetic oligonucleotide
ggucugccacuuugagcau

SEQ ID NO: 2883414 - RNA, 19 nt, Artificial Sequence
  Description of Artificial Sequence: Synthetic oligonucleotide
gguucccggagcggagacu

SEQ ID NO: 2883415 - RNA, 19 nt, Artificial Sequence
  Description of Artificial Sequence: Synthetic oligonucleotide
ccagaauggucugccacuu

SEQ ID NO: 2883416 - RNA, 19 nt, Artificial Sequence
  Description of Artificial Sequence: Synthetic oligonucleotide
cacagccaucgcccaguuu

SEQ ID NO: 2883417 - RNA, 19 nt, Artificial Sequence
  Description of Artificial Sequence: Synthetic oligonucleotide
ccgguucccggagcggaga

SEQ ID NO: 2883418 - RNA, 19 nt, Artificial Sequence
  Description of Artificial Sequence: Synthetic oligonucleotide
ccgccacauauggauauuu

SEQ ID NO: 2883419 - RNA, 19 nt, Artificial Sequence
  Description of Artificial Sequence: Synthetic oligonucleotide
uuauccaagaaccucaaag

SEQ ID NO: 2883420 - RNA, 19 nt, Artificial Sequence
  Description of Artificial Sequence: Synthetic oligonucleotide
aauaaaauccucaauagga

SEQ ID NO: 2883421 - RNA, 19 nt, Artificial Sequence
  Description of Artificial Sequence: Synthetic oligonucleotide
cuugacuuauccaagaacc

SEQ ID NO: 2883422 - RNA, 19 nt, Artificial Sequence
  Description of Artificial Sequence: Synthetic oligonucleotide
aguucuaucuuuuggauuc

SEQ ID NO: 2883423 - RNA, 19 nt, Artificial Sequence
  Description of Artificial Sequence: Synthetic oligonucleotide
uaauaaaauccucaauagg

SEQ ID NO: 2883424 - RNA, 19 nt, Artificial Sequence
  Description of Artificial Sequence: Synthetic oligonucleotide
uauccaagaaccucaaagg

SEQ ID NO: 2883425 - RNA, 19 nt, Artificial Sequence
  Description of Artificial Sequence: Synthetic oligonucleotide
agcucugucacucugacuc

SEQ ID NO: 2883426 - RNA, 19 nt, Artificial Sequence
  Description of Artificial Sequence: Synthetic oligonucleotide
aauaggaauuaguucuugg

SEQ ID NO: 2883427 - RNA, 19 nt, Artificial Sequence
  Description of Artificial Sequence: Synthetic oligonucleotide
ugugcauacaccuugguga

SEQ ID NO: 2883428 - RNA, 19 nt, Artificial Sequence
  Description of Artificial Sequence: Synthetic oligonucleotide
guaauaaaauccucaauag

SEQ ID NO: 2883429 - RNA, 19 nt, Artificial Sequence
  Description of Artificial Sequence: Synthetic oligonucleotide
gguaguuagagauuggugg

SEQ ID NO: 2883430 - RNA, 19 nt, Artificial Sequence
  Description of Artificial Sequence: Synthetic oligonucleotide
caaagggguaauaaaaucc

SEQ ID NO: 2883431 - RNA, 19 nt, Artificial Sequence
  Description of Artificial Sequence: Synthetic oligonucleotide
aaaagaaugcuccuccuga

SEQ ID NO: 2883432 - RNA, 19 nt, Artificial Sequence
  Description of Artificial Sequence: Synthetic oligonucleotide
uguaccuuccuucaggggc

SEQ ID NO: 2883433 - RNA, 19 nt, Artificial Sequence
  Description of Artificial Sequence: Synthetic oligonucleotide
ucuacuugugcauacaccu

SEQ ID NO: 2883434 - RNA, 19 nt, Artificial Sequence
  Description of Artificial Sequence: Synthetic oligonucleotide
uccaagaaccucaaagggg

SEQ ID NO: 2883435 - RNA, 19 nt, Artificial Sequence
  Description of Artificial Sequence: Synthetic oligonucleotide
uucucaaaggggaacaggc

SEQ ID NO: 2883436 - RNA, 19 nt, Artificial Sequence
  Description of Artificial Sequence: Synthetic oligonucleotide
uggaaaguagacuucagcu

SEQ ID NO: 2883437 - RNA, 19 nt, Artificial Sequence
  Description of Artificial Sequence: Synthetic oligonucleotide
uuuggauucuacuugugca

SEQ ID NO: 2883438 - RNA, 19 nt, Artificial Sequence
  Description of Artificial Sequence: Synthetic oligonucleotide
aggaauuaguucuugguug

SEQ ID NO: 2883439 - RNA, 19 nt, Artificial Sequence
  Description of Artificial Sequence: Synthetic oligonucleotide
uuuuggauucuacuugugc

SEQ ID NO: 2883440 - RNA, 19 nt, Artificial Sequence
  Description of Artificial Sequence: Synthetic oligonucleotide
auuaguucuugguuggcuc

SEQ ID NO: 2883441 - RNA, 19 nt, Artificial Sequence
  Description of Artificial Sequence: Synthetic oligonucleotide
auccaagaaccucaaaggg

SEQ ID NO: 2883442 - RNA, 19 nt, Artificial Sequence
  Description of Artificial Sequence: Synthetic oligonucleotide
uucaguucuaucuuuugga

SEQ ID NO: 2883443 - RNA, 19 nt, Artificial Sequence
  Description of Artificial Sequence: Synthetic oligonucleotide
uagacuucagcucugucac

SEQ ID NO: 2883444 - RNA, 19 nt, Artificial Sequence
  Description of Artificial Sequence: Synthetic oligonucleotide
aaagaaugcuccuccugag

SEQ ID NO: 2883445 - RNA, 19 nt, Artificial Sequence
  Description of Artificial Sequence: Synthetic oligonucleotide
auuguaccuuccuucaggg

SEQ ID NO: 2883446 - RNA, 19 nt, Artificial Sequence
  Description of Artificial Sequence: Synthetic oligonucleotide
aaugcuccuccugaggucg

SEQ ID NO: 2883447 - RNA, 19 nt, Artificial Sequence
  Description of Artificial Sequence: Synthetic oligonucleotide
cucaaaagaaugcuccucc

SEQ ID NO: 2883448 - RNA, 19 nt, Artificial Sequence
  Description of Artificial Sequence: Synthetic oligonucleotide
aagaaugcuccuccugagg

SEQ ID NO: 2883449 - RNA, 19 nt, Artificial Sequence
  Description of Artificial Sequence: Synthetic oligonucleotide
ucuuguauagugcccaccu

SEQ ID NO: 2883450 - RNA, 19 nt, Artificial Sequence
  Description of Artificial Sequence: Synthetic oligonucleotide
auucuacuugugcauacac

SEQ ID NO: 2883451 - RNA, 19 nt, Artificial Sequence
  Description of Artificial Sequence: Synthetic oligonucleotide
uuguauagugcccaccucu

SEQ ID NO: 2883452 - RNA, 19 nt, Artificial Sequence
  Description of Artificial Sequence: Synthetic oligonucleotide
cuccucaaaagaaugcucc

SEQ ID NO: 2883453 - RNA, 19 nt, Artificial Sequence
  Description of Artificial Sequence: Synthetic oligonucleotide
gucacucugacuccuaggg

SEQ ID NO: 2883454 - RNA, 19 nt, Artificial Sequence
  Description of Artificial Sequence: Synthetic oligonucleotide
uauagugcccaccucuuca

SEQ ID NO: 2883455 - RNA, 19 nt, Artificial Sequence
  Description of Artificial Sequence: Synthetic oligonucleotide
uacuugugcauacaccuug

SEQ ID NO: 2883456 - RNA, 19 nt, Artificial Sequence
  Description of Artificial Sequence: Synthetic oligonucleotide
cucaauaggaauuaguucu

SEQ ID NO: 2883457 - RNA, 19 nt, Artificial Sequence
  Description of Artificial Sequence: Synthetic oligonucleotide
gguaauaaaauccucaaua

SEQ ID NO: 2883458 - RNA, 19 nt, Artificial Sequence
  Description of Artificial Sequence: Synthetic oligonucleotide
auaggaauuaguucuuggu

SEQ ID NO: 2883459 - RNA, 19 nt, Artificial Sequence
  Description of Artificial Sequence: Synthetic oligonucleotide
ucuugacuuauccaagaac

SEQ ID NO: 2883460 - RNA, 19 nt, Artificial Sequence
  Description of Artificial Sequence: Synthetic oligonucleotide
ucuuugcucacucuccuca

SEQ ID NO: 2883461 - RNA, 19 nt, Artificial Sequence
  Description of Artificial Sequence: Synthetic oligonucleotide
uccucaauaggaauuaguu

SEQ ID NO: 2883462 - RNA, 19 nt, Artificial Sequence
  Description of Artificial Sequence: Synthetic oligonucleotide
cuuuauggccucuucguag

SEQ ID NO: 2883463 - RNA, 19 nt, Artificial Sequence
  Description of Artificial Sequence: Synthetic oligonucleotide
aagagcucuuugcucacuc

SEQ ID NO: 2883464 - RNA, 19 nt, Artificial Sequence
  Description of Artificial Sequence: Synthetic oligonucleotide
ucuucguagagcucuggag

SEQ ID NO: 2883465 - RNA, 19 nt, Artificial Sequence
  Description of Artificial Sequence: Synthetic oligonucleotide
cacucugacuccuagggcc

SEQ ID NO: 2883466 - RNA, 19 nt, Artificial Sequence
  Description of Artificial Sequence: Synthetic oligonucleotide
ucuugguuggcucuuucca

SEQ ID NO: 2883467 - RNA, 19 nt, Artificial Sequence
  Description of Artificial Sequence: Synthetic oligonucleotide
caagcuucaguucuugaag

SEQ ID NO: 2883468 - RNA, 19 nt, Artificial Sequence
  Description of Artificial Sequence: Synthetic oligonucleotide
ucuuuuggauucuacuugu

SEQ ID NO: 2883469 - RNA, 19 nt, Artificial Sequence
  Description of Artificial Sequence: Synthetic oligonucleotide
uccuucaggggccugguag

SEQ ID NO: 2883470 - RNA, 19 nt, Artificial Sequence
  Description of Artificial Sequence: Synthetic oligonucleotide
aaggggaacaggcuggggu

SEQ ID NO: 2883471 - RNA, 19 nt, Artificial Sequence
  Description of Artificial Sequence: Synthetic oligonucleotide
uucuacuugugcauacacc

SEQ ID NO: 2883472 - RNA, 19 nt, Artificial Sequence
  Description of Artificial Sequence: Synthetic oligonucleotide
ucuuuccaguuuucgaucc

SEQ ID NO: 2883473 - RNA, 19 nt, Artificial Sequence
  Description of Artificial Sequence: Synthetic oligonucleotide
ugucauuguaccuuccuuc

SEQ ID NO: 2883474 - RNA, 19 nt, Artificial Sequence
  Description of Artificial Sequence: Synthetic oligonucleotide
cuuucuugacuuauccaag

SEQ ID NO: 2883475 - RNA, 19 nt, Artificial Sequence
  Description of Artificial Sequence: Synthetic oligonucleotide
uaaaauccucaauaggaau

SEQ ID NO: 2883476 - RNA, 19 nt, Artificial Sequence
  Description of Artificial Sequence: Synthetic oligonucleotide
uuucuugacuuauccaaga

SEQ ID NO: 2883477 - RNA, 19 nt, Artificial Sequence
  Description of Artificial Sequence: Synthetic oligonucleotide
uugugcauacaccuuggug

SEQ ID NO: 2883478 - RNA, 19 nt, Artificial Sequence
  Description of Artificial Sequence: Synthetic oligonucleotide
ggaauuaguucuugguugg

SEQ ID NO: 2883479 - RNA, 19 nt, Artificial Sequence
  Description of Artificial Sequence: Synthetic oligonucleotide
uccugcuucuuguauagug

SEQ ID NO: 2883480 - RNA, 19 nt, Artificial Sequence
  Description of Artificial Sequence: Synthetic oligonucleotide
uuuauggccucuucguaga

SEQ ID NO: 2883481 - RNA, 19 nt, Artificial Sequence
  Description of Artificial Sequence: Synthetic oligonucleotide
ugugauguggcccuucuuu

SEQ ID NO: 2883482 - RNA, 19 nt, Artificial Sequence
  Description of Artificial Sequence: Synthetic oligonucleotide
ugguaguuagagauuggug

SEQ ID NO: 2883483 - RNA, 19 nt, Artificial Sequence
  Description of Artificial Sequence: Synthetic oligonucleotide
uggcccuucuuucucaaag

SEQ ID NO: 2883484 - RNA, 19 nt, Artificial Sequence
  Description of Artificial Sequence: Synthetic oligonucleotide
agaucuuccgacgacagca

SEQ ID NO: 2883485 - RNA, 19 nt, Artificial Sequence
  Description of Artificial Sequence: Synthetic oligonucleotide
ugggcuuccagcauggcuc

SEQ ID NO: 2883486 - RNA, 19 nt, Artificial Sequence
  Description of Artificial Sequence: Synthetic oligonucleotide
agacucaagcuucaguucu

SEQ ID NO: 2883487 - RNA, 19 nt, Artificial Sequence
  Description of Artificial Sequence: Synthetic oligonucleotide
ucgcuuucuugacuuaucc

SEQ ID NO: 2883488 - RNA, 19 nt, Artificial Sequence
  Description of Artificial Sequence: Synthetic oligonucleotide
uaggaauuaguucuugguu

SEQ ID NO: 2883489 - RNA, 19 nt, Artificial Sequence
  Description of Artificial Sequence: Synthetic oligonucleotide
ucaagcuucaguucuugaa

SEQ ID NO: 2883490 - RNA, 19 nt, Artificial Sequence
  Description of Artificial Sequence: Synthetic oligonucleotide
aaaauccucaauaggaauu

SEQ ID NO: 2883491 - RNA, 19 nt, Artificial Sequence
  Description of Artificial Sequence: Synthetic oligonucleotide
agaaugcuccuccugaggu

SEQ ID NO: 2883492 - RNA, 19 nt, Artificial Sequence
  Description of Artificial Sequence: Synthetic oligonucleotide
aauuaguucuugguuggcu

SEQ ID NO: 2883493 - RNA, 19 nt, Artificial Sequence
  Description of Artificial Sequence: Synthetic oligonucleotide
ucagcagaagagcucuuug

SEQ ID NO: 2883494 - RNA, 19 nt, Artificial Sequence
  Description of Artificial Sequence: Synthetic oligonucleotide
uugacuuauccaagaaccu

SEQ ID NO: 2883495 - RNA, 19 nt, Artificial Sequence
  Description of Artificial Sequence: Synthetic oligonucleotide
ucuucagcagaagagcucu

SEQ ID NO: 2883496 - RNA, 19 nt, Artificial Sequence
  Description of Artificial Sequence: Synthetic oligonucleotide
agcaguuuucaguucuauc

SEQ ID NO: 2883497 - RNA, 19 nt, Artificial Sequence
  Description of Artificial Sequence: Synthetic oligonucleotide
uguggaaaguagacuucag

SEQ ID NO: 2883498 - RNA, 19 nt, Artificial Sequence
  Description of Artificial Sequence: Synthetic oligonucleotide
agcagaagagcucuuugcu

SEQ ID NO: 2883499 - RNA, 19 nt, Artificial Sequence
  Description of Artificial Sequence: Synthetic oligonucleotide
ucuugcugggcuuccagca

SEQ ID NO: 2883500 - RNA, 19 nt, Artificial Sequence
  Description of Artificial Sequence: Synthetic oligonucleotide
uugguggugugugaugugg

SEQ ID NO: 2883501 - RNA, 19 nt, Artificial Sequence
  Description of Artificial Sequence: Synthetic oligonucleotide
ucuuucucaaaggggaaca

SEQ ID NO: 2883502 - RNA, 19 nt, Artificial Sequence
  Description of Artificial Sequence: Synthetic oligonucleotide
cuggggucccgcuuuaugg

SEQ ID NO: 2883503 - RNA, 19 nt, Artificial Sequence
  Description of Artificial Sequence: Synthetic oligonucleotide
gagcucuggagacucaagc

SEQ ID NO: 2883504 - RNA, 19 nt, Artificial Sequence
  Description of Artificial Sequence: Synthetic oligonucleotide
acucuccucaaaagaaugc

SEQ ID NO: 2883505 - RNA, 19 nt, Artificial Sequence
  Description of Artificial Sequence: Synthetic oligonucleotide
guggaaaguagacuucagc

SEQ ID NO: 2883506 - RNA, 19 nt, Artificial Sequence
  Description of Artificial Sequence: Synthetic oligonucleotide
gauggcgucccucucugcc

SEQ ID NO: 2883507 - RNA, 19 nt, Artificial Sequence
  Description of Artificial Sequence: Synthetic oligonucleotide
uuaguucuugguuggcucu

SEQ ID NO: 2883508 - RNA, 19 nt, Artificial Sequence
  Description of Artificial Sequence: Synthetic oligonucleotide
ucaguucuaucuuuuggau

SEQ ID NO: 2883509 - RNA, 19 nt, Artificial Sequence
  Description of Artificial Sequence: Synthetic oligonucleotide
ucaggggccugguaguuag

SEQ ID NO: 2883510 - RNA, 19 nt, Artificial Sequence
  Description of Artificial Sequence: Synthetic oligonucleotide
ucauuguaccuuccuucag

SEQ ID NO: 2883511 - RNA, 19 nt, Artificial Sequence
  Description of Artificial Sequence: Synthetic oligonucleotide
aaauccucaauaggaauua

SEQ ID NO: 2883512 - RNA, 19 nt, Artificial Sequence
  Description of Artificial Sequence: Synthetic oligonucleotide
ugucacucugacuccuagg

SEQ ID NO: 2883513 - RNA, 19 nt, Artificial Sequence
  Description of Artificial Sequence: Synthetic oligonucleotide
cuugguuggcucuuuccag

SEQ ID NO: 2883514 - RNA, 19 nt, Artificial Sequence
  Description of Artificial Sequence: Synthetic oligonucleotide
cugcuucuuguauagugcc

SEQ ID NO: 2883515 - RNA, 19 nt, Artificial Sequence
  Description of Artificial Sequence: Synthetic oligonucleotide
uucguagagcucuggagac

SEQ ID NO: 2883516 - RNA, 19 nt, Artificial Sequence
  Description of Artificial Sequence: Synthetic oligonucleotide
ucaaaagaaugcuccuccu

SEQ ID NO: 2883517 - RNA, 19 nt, Artificial Sequence
  Description of Artificial Sequence: Synthetic oligonucleotide
aagggguaauaaaauccuc

SEQ ID NO: 2883518 - RNA, 19 nt, Artificial Sequence
  Description of Artificial Sequence: Synthetic oligonucleotide
gacuuauccaagaaccuca

SEQ ID NO: 2883519 - RNA, 19 nt, Artificial Sequence
  Description of Artificial Sequence: Synthetic oligonucleotide
uagagauugguggugugug

SEQ ID NO: 2883520 - RNA, 19 nt, Artificial Sequence
  Description of Artificial Sequence: Synthetic oligonucleotide
ucuccucaaaagaaugcuc

SEQ ID NO: 2883521 - RNA, 19 nt, Artificial Sequence
  Description of Artificial Sequence: Synthetic oligonucleotide
ugcucacucuccucaaaag

SEQ ID NO: 2883522 - RNA, 19 nt, Artificial Sequence
  Description of Artificial Sequence: Synthetic oligonucleotide
uuggauucuacuugugcau

SEQ ID NO: 2883523 - RNA, 19 nt, Artificial Sequence
  Description of Artificial Sequence: Synthetic oligonucleotide
ucucaaaggggaacaggcu

SEQ ID NO: 2883524 - RNA, 19 nt, Artificial Sequence
  Description of Artificial Sequence: Synthetic oligonucleotide
uucuugacuuauccaagaa

SEQ ID NO: 2883525 - RNA, 19 nt, Artificial Sequence
  Description of Artificial Sequence: Synthetic oligonucleotide
gacuccuagggccagaucu

SEQ ID NO: 2883526 - RNA, 19 nt, Artificial Sequence
  Description of Artificial Sequence: Synthetic oligonucleotide
auaaaauccucaauaggaa

SEQ ID NO: 2883527 - RNA, 19 nt, Artificial Sequence
  Description of Artificial Sequence: Synthetic oligonucleotide
acgacagcaguuuucaguu

SEQ ID NO: 2883528 - RNA, 19 nt, Artificial Sequence
  Description of Artificial Sequence: Synthetic oligonucleotide
agaagagcucuuugcucac

SEQ ID NO: 2883529 - RNA, 19 nt, Artificial Sequence
  Description of Artificial Sequence: Synthetic oligonucleotide
caaaagaaugcuccuccug

SEQ ID NO: 2883530 - RNA, 19 nt, Artificial Sequence
  Description of Artificial Sequence: Synthetic oligonucleotide
ucugauggcgucccucucu

SEQ ID NO: 2883531 - RNA, 19 nt, Artificial Sequence
  Description of Artificial Sequence: Synthetic oligonucleotide
ucuguggaaaguagacuuc

SEQ ID NO: 2883532 - RNA, 19 nt, Artificial Sequence
  Description of Artificial Sequence: Synthetic oligonucleotide
ucaauaggaauuaguucuu

SEQ ID NO: 2883533 - RNA, 19 nt, Artificial Sequence
  Description of Artificial Sequence: Synthetic oligonucleotide
ugcuucuuguauagugccc

SEQ ID NO: 2883534 - RNA, 19 nt, Artificial Sequence
  Description of Artificial Sequence: Synthetic oligonucleotide
uucuugguuggcucuuucc

SEQ ID NO: 2883535 - RNA, 19 nt, Artificial Sequence
  Description of Artificial Sequence: Synthetic oligonucleotide
cacucuccucaaaagaaug

SEQ ID NO: 2883536 - RNA, 19 nt, Artificial Sequence
  Description of Artificial Sequence: Synthetic oligonucleotide
aauccucaauaggaauuag

SEQ ID NO: 2883537 - RNA, 19 nt, Artificial Sequence
  Description of Artificial Sequence: Synthetic oligonucleotide
cuucguagagcucuggaga

SEQ ID NO: 2883538 - RNA, 19 nt, Artificial Sequence
  Description of Artificial Sequence: Synthetic oligonucleotide
cagcagaagagcucuuugc

SEQ ID NO: 2883539 - RNA, 19 nt, Artificial Sequence
  Description of Artificial Sequence: Synthetic oligonucleotide
uuagagauugguggugugu

SEQ ID NO: 2883540 - RNA, 19 nt, Artificial Sequence
  Description of Artificial Sequence: Synthetic oligonucleotide
ucacucuccucaaaagaau

SEQ ID NO: 2883541 - RNA, 19 nt, Artificial Sequence
  Description of Artificial Sequence: Synthetic oligonucleotide
auagugcccaccucuucag

SEQ ID NO: 2883542 - RNA, 19 nt, Artificial Sequence
  Description of Artificial Sequence: Synthetic oligonucleotide
ugacuuauccaagaaccuc

SEQ ID NO: 2883543 - RNA, 19 nt, Artificial Sequence
  Description of Artificial Sequence: Synthetic oligonucleotide
ucagcucugucacucugac

SEQ ID NO: 2883544 - RNA, 19 nt, Artificial Sequence
  Description of Artificial Sequence: Synthetic oligonucleotide
ucaugcuccugcuucuugu

SEQ ID NO: 2883545 - RNA, 19 nt, Artificial Sequence
  Description of Artificial Sequence: Synthetic oligonucleotide
uccucaaaagaaugcuccu

SEQ ID NO: 2883546 - RNA, 19 nt, Artificial Sequence
  Description of Artificial Sequence: Synthetic oligonucleotide
ucaguucuugaagagcuuc

SEQ ID NO: 2883547 - RNA, 19 nt, Artificial Sequence
  Description of Artificial Sequence: Synthetic oligonucleotide
aguagacuucagcucuguc

SEQ ID NO: 2883548 - RNA, 19 nt, Artificial Sequence
  Description of Artificial Sequence: Synthetic oligonucleotide
uugguuggcucuuuccagu

SEQ ID NO: 2883549 - RNA, 19 nt, Artificial Sequence
  Description of Artificial Sequence: Synthetic oligonucleotide
ggaaaguagacuucagcuc

SEQ ID NO: 2883550 - RNA, 19 nt, Artificial Sequence
  Description of Artificial Sequence: Synthetic oligonucleotide
uggagacucaagcuucagu

SEQ ID NO: 2883551 - RNA, 19 nt, Artificial Sequence
  Description of Artificial Sequence: Synthetic oligonucleotide
uuguaccuuccuucagggg

SEQ ID NO: 2883552 - RNA, 19 nt, Artificial Sequence
  Description of Artificial Sequence: Synthetic oligonucleotide
agggguaauaaaauccuca

SEQ ID NO: 2883553 - RNA, 19 nt, Artificial Sequence
  Description of Artificial Sequence: Synthetic oligonucleotide
agggccagaucuuccgacg

SEQ ID NO: 2883554 - RNA, 19 nt, Artificial Sequence
  Description of Artificial Sequence: Synthetic oligonucleotide
ugugugauguggcccuucu

SEQ ID NO: 2883555 - RNA, 19 nt, Artificial Sequence
  Description of Artificial Sequence: Synthetic oligonucleotide
gucauuguaccuuccuuca

SEQ ID NO: 2883556 - RNA, 19 nt, Artificial Sequence
  Description of Artificial Sequence: Synthetic oligonucleotide
ugccucaugcuccugcuuc

SEQ ID NO: 2883557 - RNA, 19 nt, Artificial Sequence
  Description of Artificial Sequence: Synthetic oligonucleotide
uugcucacucuccucaaaa

SEQ ID NO: 2883558 - RNA, 19 nt, Artificial Sequence
  Description of Artificial Sequence: Synthetic oligonucleotide
gagacucaagcuucaguuc

SEQ ID NO: 2883559 - RNA, 19 nt, Artificial Sequence
  Description of Artificial Sequence: Synthetic oligonucleotide
aguuuucaguucuaucuuu

SEQ ID NO: 2883560 - RNA, 19 nt, Artificial Sequence
  Description of Artificial Sequence: Synthetic oligonucleotide
aaccucaaagggguaauaa

SEQ ID NO: 2883561 - RNA, 19 nt, Artificial Sequence
  Description of Artificial Sequence: Synthetic oligonucleotide
agugcccaccucuucagca

SEQ ID NO: 2883562 - RNA, 19 nt, Artificial Sequence
  Description of Artificial Sequence: Synthetic oligonucleotide
uguauagugcccaccucuu

SEQ ID NO: 2883563 - RNA, 19 nt, Artificial Sequence
  Description of Artificial Sequence: Synthetic oligonucleotide
accucaaagggguaauaaa

SEQ ID NO: 2883564 - RNA, 19 nt, Artificial Sequence
  Description of Artificial Sequence: Synthetic oligonucleotide
ugauguggcccuucuuucu

SEQ ID NO: 2883565 - RNA, 19 nt, Artificial Sequence
  Description of Artificial Sequence: Synthetic oligonucleotide
gcaguuuucaguucuaucu

SEQ ID NO: 2883566 - RNA, 19 nt, Artificial Sequence
  Description of Artificial Sequence: Synthetic oligonucleotide
cucacucuccucaaaagaa

SEQ ID NO: 2883567 - RNA, 19 nt, Artificial Sequence
  Description of Artificial Sequence: Synthetic oligonucleotide
gcuuucuugacuuauccaa

SEQ ID NO: 2883568 - RNA, 19 nt, Artificial Sequence
  Description of Artificial Sequence: Synthetic oligonucleotide
aagaaccucaaagggguaa

SEQ ID NO: 2883569 - RNA, 19 nt, Artificial Sequence
  Description of Artificial Sequence: Synthetic oligonucleotide
ugaugucauuguaccuucc

SEQ ID NO: 2883570 - RNA, 19 nt, Artificial Sequence
  Description of Artificial Sequence: Synthetic oligonucleotide
uaguuagagauugguggug

SEQ ID NO: 2883571 - RNA, 19 nt, Artificial Sequence
  Description of Artificial Sequence: Synthetic oligonucleotide
aguuagagauugguggugu

SEQ ID NO: 2883572 - RNA, 19 nt, Artificial Sequence
  Description of Artificial Sequence: Synthetic oligonucleotide
aaaguagacuucagcucug

SEQ ID NO: 2883573 - RNA, 19 nt, Artificial Sequence
  Description of Artificial Sequence: Synthetic oligonucleotide
uuauggccucuucguagag

SEQ ID NO: 2883574 - RNA, 19 nt, Artificial Sequence
  Description of Artificial Sequence: Synthetic oligonucleotide
gacgacagcaguuuucagu

SEQ ID NO: 2883575 - RNA, 19 nt, Artificial Sequence
  Description of Artificial Sequence: Synthetic oligonucleotide
uucuuucucaaaggggaac

SEQ ID NO: 2883576 - RNA, 19 nt, Artificial Sequence
  Description of Artificial Sequence: Synthetic oligonucleotide
ugaggucgcuuucuugacu

SEQ ID NO: 2883577 - RNA, 19 nt, Artificial Sequence
  Description of Artificial Sequence: Synthetic oligonucleotide
agauugguggugugugaug

SEQ ID NO: 2883578 - RNA, 19 nt, Artificial Sequence
  Description of Artificial Sequence: Synthetic oligonucleotide
ucuuccgacgacagcaguu

SEQ ID NO: 2883579 - RNA, 19 nt, Artificial Sequence
  Description of Artificial Sequence: Synthetic oligonucleotide
uugcugggcuuccagcaug

SEQ ID NO: 2883580 - RNA, 19 nt, Artificial Sequence
  Description of Artificial Sequence: Synthetic oligonucleotide
uggggucccgcuuuauggc

SEQ ID NO: 2883581 - RNA, 19 nt, Artificial Sequence
  Description of Artificial Sequence: Synthetic oligonucleotide
gacagcaguuuucaguucu

SEQ ID NO: 2883582 - RNA, 19 nt, Artificial Sequence
  Description of Artificial Sequence: Synthetic oligonucleotide
gauguggcccuucuuucuc

SEQ ID NO: 2883583 - RNA, 19 nt, Artificial Sequence
  Description of Artificial Sequence: Synthetic oligonucleotide
auggcucugauggcguccc

SEQ ID NO: 2883584 - RNA, 19 nt, Artificial Sequence
  Description of Artificial Sequence: Synthetic oligonucleotide
cuuuuggauucuacuugug

SEQ ID NO: 2883585 - RNA, 19 nt, Artificial Sequence
  Description of Artificial Sequence: Synthetic oligonucleotide
ccuucuuucucaaagggga

SEQ ID NO: 2883586 - RNA, 19 nt, Artificial Sequence
  Description of Artificial Sequence: Synthetic oligonucleotide
acuugugcauacaccuugg

SEQ ID NO: 2883587 - RNA, 19 nt, Artificial Sequence
  Description of Artificial Sequence: Synthetic oligonucleotide
cuaucuuuuggauucuacu

SEQ ID NO: 2883588 - RNA, 19 nt, Artificial Sequence
  Description of Artificial Sequence: Synthetic oligonucleotide
uggcucuuuccaguuuucg

SEQ ID NO: 2883589 - RNA, 19 nt, Artificial Sequence
  Description of Artificial Sequence: Synthetic oligonucleotide
guaguuagagauugguggu

SEQ ID NO: 2883590 - RNA, 19 nt, Artificial Sequence
  Description of Artificial Sequence: Synthetic oligonucleotide
uucuuguauagugcccacc

SEQ ID NO: 2883591 - RNA, 19 nt, Artificial Sequence
  Description of Artificial Sequence: Synthetic oligonucleotide
uccuagggccagaucuucc

SEQ ID NO: 2883592 - RNA, 19 nt, Artificial Sequence
  Description of Artificial Sequence: Synthetic oligonucleotide
gugaugucauuguaccuuc

SEQ ID NO: 2883593 - RNA, 19 nt, Artificial Sequence
  Description of Artificial Sequence: Synthetic oligonucleotide
gucccucucugccucaugc

SEQ ID NO: 2883594 - RNA, 19 nt, Artificial Sequence
  Description of Artificial Sequence: Synthetic oligonucleotide
ccugcuucuuguauagugc

SEQ ID NO: 2883595 - RNA, 19 nt, Artificial Sequence
  Description of Artificial Sequence: Synthetic oligonucleotide
gaauuaguucuugguuggc

SEQ ID NO: 2883596 - RNA, 19 nt, Artificial Sequence
  Description of Artificial Sequence: Synthetic oligonucleotide
uuugcucacucuccucaaa

SEQ ID NO: 2883597 - RNA, 19 nt, Artificial Sequence
  Description of Artificial Sequence: Synthetic oligonucleotide
guuagagauugguggugug

SEQ ID NO: 2883598 - RNA, 19 nt, Artificial Sequence
  Description of Artificial Sequence: Synthetic oligonucleotide
agagauuggugguguguga

SEQ ID NO: 2883599 - RNA, 19 nt, Artificial Sequence
  Description of Artificial Sequence: Synthetic oligonucleotide
accuuggugaugucauugu

SEQ ID NO: 2883600 - RNA, 19 nt, Artificial Sequence
  Description of Artificial Sequence: Synthetic oligonucleotide
aaaggggaacaggcugggg

SEQ ID NO: 2883601 - RNA, 19 nt, Artificial Sequence
  Description of Artificial Sequence: Synthetic oligonucleotide
augucauuguaccuuccuu

SEQ ID NO: 2883602 - RNA, 19 nt, Artificial Sequence
  Description of Artificial Sequence: Synthetic oligonucleotide
uccgacgacagcaguuuuc

SEQ ID NO: 2883603 - RNA, 19 nt, Artificial Sequence
  Description of Artificial Sequence: Synthetic oligonucleotide
caauaggaauuaguucuug

SEQ ID NO: 2883604 - RNA, 19 nt, Artificial Sequence
  Description of Artificial Sequence: Synthetic oligonucleotide
gaugucauuguaccuuccu

SEQ ID NO: 2883605 - RNA, 19 nt, Artificial Sequence
  Description of Artificial Sequence: Synthetic oligonucleotide
gaaugcuccuccugagguc

SEQ ID NO: 2883606 - RNA, 19 nt, Artificial Sequence
  Description of Artificial Sequence: Synthetic oligonucleotide
gaucuuccgacgacagcag

SEQ ID NO: 2883607 - RNA, 19 nt, Artificial Sequence
  Description of Artificial Sequence: Synthetic oligonucleotide
cagcauggcucugauggcg

SEQ ID NO: 2883608 - RNA, 19 nt, Artificial Sequence
  Description of Artificial Sequence: Synthetic oligonucleotide
ccucaauaggaauuaguuc

SEQ ID NO: 2883609 - RNA, 19 nt, Artificial Sequence
  Description of Artificial Sequence: Synthetic oligonucleotide
uagggccagaucuuccgac

SEQ ID NO: 2883610 - RNA, 19 nt, Artificial Sequence
  Description of Artificial Sequence: Synthetic oligonucleotide
cuucuugcugggcuuccag

SEQ ID NO: 2883611 - RNA, 19 nt, Artificial Sequence
  Description of Artificial Sequence: Synthetic oligonucleotide
gauucuacuugugcauaca

SEQ ID NO: 2883612 - RNA, 19 nt, Artificial Sequence
  Description of Artificial Sequence: Synthetic oligonucleotide
gcccuucuuucucaaaggg

SEQ ID NO: 2883613 - RNA, 19 nt, Artificial Sequence
  Description of Artificial Sequence: Synthetic oligonucleotide
uccugaggucgcuuucuug

SEQ ID NO: 2883614 - RNA, 19 nt, Artificial Sequence
  Description of Artificial Sequence: Synthetic oligonucleotide
auugguggugugugaugug

SEQ ID NO: 2883615 - RNA, 19 nt, Artificial Sequence
  Description of Artificial Sequence: Synthetic oligonucleotide
gucuguggaaaguagacuu

SEQ ID NO: 2883616 - RNA, 19 nt, Artificial Sequence
  Description of Artificial Sequence: Synthetic oligonucleotide
cuucuuguauagugcccac

SEQ ID NO: 2883617 - RNA, 19 nt, Artificial Sequence
  Description of Artificial Sequence: Synthetic oligonucleotide
guaccuuccuucaggggcc

SEQ ID NO: 2883618 - RNA, 19 nt, Artificial Sequence
  Description of Artificial Sequence: Synthetic oligonucleotide
aaguagacuucagcucugu

SEQ ID NO: 2883619 - RNA, 19 nt, Artificial Sequence
  Description of Artificial Sequence: Synthetic oligonucleotide
gauugguggugugugaugu

SEQ ID NO: 2883620 - RNA, 19 nt, Artificial Sequence
  Description of Artificial Sequence: Synthetic oligonucleotide
ggcccuucuuucucaaagg

SEQ ID NO: 2883621 - RNA, 19 nt, Artificial Sequence
  Description of Artificial Sequence: Synthetic oligonucleotide
agagcucuuugcucacucu

SEQ ID NO: 2883622 - RNA, 19 nt, Artificial Sequence
  Description of Artificial Sequence: Synthetic oligonucleotide
cuuguauagugcccaccuc

SEQ ID NO: 2883623 - RNA, 19 nt, Artificial Sequence
  Description of Artificial Sequence: Synthetic oligonucleotide
cugucacucugacuccuag

SEQ ID NO: 2883624 - RNA, 19 nt, Artificial Sequence
  Description of Artificial Sequence: Synthetic oligonucleotide
cccuucuuucucaaagggg

SEQ ID NO: 2883625 - RNA, 19 nt, Artificial Sequence
  Description of Artificial Sequence: Synthetic oligonucleotide
caaaggggaacaggcuggg

SEQ ID NO: 2883626 - RNA, 19 nt, Artificial Sequence
  Description of Artificial Sequence: Synthetic oligonucleotide
auacaccuuggugauguca

SEQ ID NO: 2883627 - RNA, 19 nt, Artificial Sequence
  Description of Artificial Sequence: Synthetic oligonucleotide
caccuuggugaugucauug

SEQ ID NO: 2883628 - RNA, 19 nt, Artificial Sequence
  Description of Artificial Sequence: Synthetic oligonucleotide
cucaaagggguaauaaaau

SEQ ID NO: 2883629 - RNA, 19 nt, Artificial Sequence
  Description of Artificial Sequence: Synthetic oligonucleotide
gcuccugcuucuuguauag

SEQ ID NO: 2883630 - RNA, 19 nt, Artificial Sequence
  Description of Artificial Sequence: Synthetic oligonucleotide
ggauucuacuugugcauac

SEQ ID NO: 2883631 - RNA, 19 nt, Artificial Sequence
  Description of Artificial Sequence: Synthetic oligonucleotide
auccucaauaggaauuagu

SEQ ID NO: 2883632 - RNA, 19 nt, Artificial Sequence
  Description of Artificial Sequence: Synthetic oligonucleotide
uagugcccaccucuucagc

SEQ ID NO: 2883633 - RNA, 19 nt, Artificial Sequence
  Description of Artificial Sequence: Synthetic oligonucleotide
gguggugugugauguggcc

SEQ ID NO: 2883634 - RNA, 19 nt, Artificial Sequence
  Description of Artificial Sequence: Synthetic oligonucleotide
gugcccaccucuucagcag

SEQ ID NO: 2883635 - RNA, 19 nt, Artificial Sequence
  Description of Artificial Sequence: Synthetic oligonucleotide
gggguaauaaaauccucaa

SEQ ID NO: 2883636 - RNA, 19 nt, Artificial Sequence
  Description of Artificial Sequence: Synthetic oligonucleotide
guggugugugauguggccc

SEQ ID NO: 2883637 - RNA, 19 nt, Artificial Sequence
  Description of Artificial Sequence: Synthetic oligonucleotide
cugaggucgcuuucuugac

SEQ ID NO: 2883638 - RNA, 19 nt, Artificial Sequence
  Description of Artificial Sequence: Synthetic oligonucleotide
uggauucuacuugugcaua

SEQ ID NO: 2883639 - RNA, 19 nt, Artificial Sequence
  Description of Artificial Sequence: Synthetic oligonucleotide
ccuagggccagaucuuccg

SEQ ID NO: 2883640 - RNA, 19 nt, Artificial Sequence
  Description of Artificial Sequence: Synthetic oligonucleotide
cugauggcgucccucucug

SEQ ID NO: 2883641 - RNA, 19 nt, Artificial Sequence
  Description of Artificial Sequence: Synthetic oligonucleotide
cagaucuuccgacgacagc

SEQ ID NO: 2883642 - RNA, 19 nt, Artificial Sequence
  Description of Artificial Sequence: Synthetic oligonucleotide
ccucaaagggguaauaaaa

SEQ ID NO: 2883643 - RNA, 19 nt, Artificial Sequence
  Description of Artificial Sequence: Synthetic oligonucleotide
ugcccaccucuucagcaga

SEQ ID NO: 2883644 - RNA, 19 nt, Artificial Sequence
  Description of Artificial Sequence: Synthetic oligonucleotide
cuguggaaaguagacuuca

SEQ ID NO: 2883645 - RNA, 19 nt, Artificial Sequence
  Description of Artificial Sequence: Synthetic oligonucleotide
uuggcucuuuccaguuuuc

SEQ ID NO: 2883646 - RNA, 19 nt, Artificial Sequence
  Description of Artificial Sequence: Synthetic oligonucleotide
ggagacucaagcuucaguu

SEQ ID NO: 2883647 - RNA, 19 nt, Artificial Sequence
  Description of Artificial Sequence: Synthetic oligonucleotide
agaaccucaaagggguaau

SEQ ID NO: 2883648 - RNA, 19 nt, Artificial Sequence
  Description of Artificial Sequence: Synthetic oligonucleotide
guauagugcccaccucuuc

SEQ ID NO: 2883649 - RNA, 19 nt, Artificial Sequence
  Description of Artificial Sequence: Synthetic oligonucleotide
uagagcucuggagacucaa

SEQ ID NO: 2883650 - RNA, 19 nt, Artificial Sequence
  Description of Artificial Sequence: Synthetic oligonucleotide
gcucacucuccucaaaaga

SEQ ID NO: 2883651 - RNA, 19 nt, Artificial Sequence
  Description of Artificial Sequence: Synthetic oligonucleotide
uucagcagaagagcucuuu

SEQ ID NO: 2883652 - RNA, 19 nt, Artificial Sequence
  Description of Artificial Sequence: Synthetic oligonucleotide
auguggcccuucuuucuca

SEQ ID NO: 2883653 - RNA, 19 nt, Artificial Sequence
  Description of Artificial Sequence: Synthetic oligonucleotide
gccugguaguuagagauug

SEQ ID NO: 2883654 - RNA, 19 nt, Artificial Sequence
  Description of Artificial Sequence: Synthetic oligonucleotide
cucaugcuccugcuucuug

SEQ ID NO: 2883655 - RNA, 19 nt, Artificial Sequence
  Description of Artificial Sequence: Synthetic oligonucleotide
aucuuccgacgacagcagu

SEQ ID NO: 2883656 - RNA, 19 nt, Artificial Sequence
  Description of Artificial Sequence: Synthetic oligonucleotide
uguggcccuucuuucucaa

SEQ ID NO: 2883657 - RNA, 19 nt, Artificial Sequence
  Description of Artificial Sequence: Synthetic oligonucleotide
gaagagcuucuugcugggc

SEQ ID NO: 2883658 - RNA, 19 nt, Artificial Sequence
  Description of Artificial Sequence: Synthetic oligonucleotide
ccugaggucgcuuucuuga

SEQ ID NO: 2883659 - RNA, 19 nt, Artificial Sequence
  Description of Artificial Sequence: Synthetic oligonucleotide
aguucuugaagagcuucuu

SEQ ID NO: 2883660 - RNA, 19 nt, Artificial Sequence
  Description of Artificial Sequence: Synthetic oligonucleotide
cucuuugcucacucuccuc

SEQ ID NO: 2883661 - RNA, 19 nt, Artificial Sequence
  Description of Artificial Sequence: Synthetic oligonucleotide
uccuccugaggucgcuuuc

SEQ ID NO: 2883662 - RNA, 19 nt, Artificial Sequence
  Description of Artificial Sequence: Synthetic oligonucleotide
ccaagaaccucaaaggggu

SEQ ID NO: 2883663 - RNA, 19 nt, Artificial Sequence
  Description of Artificial Sequence: Synthetic oligonucleotide
cucuucguagagcucugga

SEQ ID NO: 2883664 - RNA, 19 nt, Artificial Sequence
  Description of Artificial Sequence: Synthetic oligonucleotide
gaggucgcuuucuugacuu

SEQ ID NO: 2883665 - RNA, 19 nt, Artificial Sequence
  Description of Artificial Sequence: Synthetic oligonucleotide
ccagaucuuccgacgacag

SEQ ID NO: 2883666 - RNA, 19 nt, Artificial Sequence
  Description of Artificial Sequence: Synthetic oligonucleotide
agagcucuggagacucaag

SEQ ID NO: 2883667 - RNA, 19 nt, Artificial Sequence
  Description of Artificial Sequence: Synthetic oligonucleotide
uuccagcauggcucugaug

SEQ ID NO: 2883668 - RNA, 19 nt, Artificial Sequence
  Description of Artificial Sequence: Synthetic oligonucleotide
ggcucuuuccaguuuucga

SEQ ID NO: 2883669 - RNA, 19 nt, Artificial Sequence
  Description of Artificial Sequence: Synthetic oligonucleotide
ugguuggcucuuuccaguu

SEQ ID NO: 2883670 - RNA, 19 nt, Artificial Sequence
  Description of Artificial Sequence: Synthetic oligonucleotide
guucuugguuggcucuuuc

SEQ ID NO: 2883671 - RNA, 19 nt, Artificial Sequence
  Description of Artificial Sequence: Synthetic oligonucleotide
acuuauccaagaaccucaa

SEQ ID NO: 2883672 - RNA, 19 nt, Artificial Sequence
  Description of Artificial Sequence: Synthetic oligonucleotide
cucaagcuucaguucuuga

SEQ ID NO: 2883673 - RNA, 19 nt, Artificial Sequence
  Description of Artificial Sequence: Synthetic oligonucleotide
ugcauacaccuuggugaug

SEQ ID NO: 2883674 - RNA, 19 nt, Artificial Sequence
  Description of Artificial Sequence: Synthetic oligonucleotide
uucuaucuuuuggauucua

SEQ ID NO: 2883675 - RNA, 19 nt, Artificial Sequence
  Description of Artificial Sequence: Synthetic oligonucleotide
ccgcuuuauggccucuucg

SEQ ID NO: 2883676 - RNA, 19 nt, Artificial Sequence
  Description of Artificial Sequence: Synthetic oligonucleotide
augcuccugcuucuuguau

SEQ ID NO: 2883677 - RNA, 19 nt, Artificial Sequence
  Description of Artificial Sequence: Synthetic oligonucleotide
ccugguaguuagagauugg

SEQ ID NO: 2883678 - RNA, 19 nt, Artificial Sequence
  Description of Artificial Sequence: Synthetic oligonucleotide
uggcgucccucucugccuc

SEQ ID NO: 2883679 - RNA, 19 nt, Artificial Sequence
  Description of Artificial Sequence: Synthetic oligonucleotide
acucugacuccuagggcca

SEQ ID NO: 2883680 - RNA, 19 nt, Artificial Sequence
  Description of Artificial Sequence: Synthetic oligonucleotide
guuggcucuuuccaguuuu

SEQ ID NO: 2883681 - RNA, 19 nt, Artificial Sequence
  Description of Artificial Sequence: Synthetic oligonucleotide
gggccugguaguuagagau

SEQ ID NO: 2883682 - RNA, 19 nt, Artificial Sequence
  Description of Artificial Sequence: Synthetic oligonucleotide
gaacaggcuggggucccgc

SEQ ID NO: 2883683 - RNA, 19 nt, Artificial Sequence
  Description of Artificial Sequence: Synthetic oligonucleotide
ugacuccuagggccagauc

SEQ ID NO: 2883684 - RNA, 19 nt, Artificial Sequence
  Description of Artificial Sequence: Synthetic oligonucleotide
cuuauccaagaaccucaaa

SEQ ID NO: 2883685 - RNA, 19 nt, Artificial Sequence
  Description of Artificial Sequence: Synthetic oligonucleotide
ucugacuccuagggccaga

SEQ ID NO: 2883686 - RNA, 19 nt, Artificial Sequence
  Description of Artificial Sequence: Synthetic oligonucleotide
agcauggcucugauggcgu

SEQ ID NO: 2883687 - RNA, 19 nt, Artificial Sequence
  Description of Artificial Sequence: Synthetic oligonucleotide
cucuccucaaaagaaugcu

SEQ ID NO: 2883688 - RNA, 19 nt, Artificial Sequence
  Description of Artificial Sequence: Synthetic oligonucleotide
ggggucccgcuuuauggcc

SEQ ID NO: 2883689 - RNA, 19 nt, Artificial Sequence
  Description of Artificial Sequence: Synthetic oligonucleotide
uuccgacgacagcaguuuu

SEQ ID NO: 2883690 - RNA, 19 nt, Artificial Sequence
  Description of Artificial Sequence: Synthetic oligonucleotide
gagauugguggugugugau

SEQ ID NO: 2883691 - RNA, 19 nt, Artificial Sequence
  Description of Artificial Sequence: Synthetic oligonucleotide
gucgcuuucuugacuuauc

SEQ ID NO: 2883692 - RNA, 19 nt, Artificial Sequence
  Description of Artificial Sequence: Synthetic oligonucleotide
cuagggccagaucuuccga

SEQ ID NO: 2883693 - RNA, 19 nt, Artificial Sequence
  Description of Artificial Sequence: Synthetic oligonucleotide
cauacaccuuggugauguc

SEQ ID NO: 2883694 - RNA, 19 nt, Artificial Sequence
  Description of Artificial Sequence: Synthetic oligonucleotide
cugguaguuagagauuggu

SEQ ID NO: 2883695 - RNA, 19 nt, Artificial Sequence
  Description of Artificial Sequence: Synthetic oligonucleotide
uaguucuugguuggcucuu

SEQ ID NO: 2883696 - RNA, 19 nt, Artificial Sequence
  Description of Artificial Sequence: Synthetic oligonucleotide
gcucugucacucugacucc

SEQ ID NO: 2883697 - RNA, 19 nt, Artificial Sequence
  Description of Artificial Sequence: Synthetic oligonucleotide
gugcauacaccuuggugau

SEQ ID NO: 2883698 - RNA, 19 nt, Artificial Sequence
  Description of Artificial Sequence: Synthetic oligonucleotide
gcauacaccuuggugaugu

SEQ ID NO: 2883699 - RNA, 19 nt, Artificial Sequence
  Description of Artificial Sequence: Synthetic oligonucleotide
ccucaaaagaaugcuccuc

SEQ ID NO: 2883700 - RNA, 19 nt, Artificial Sequence
  Description of Artificial Sequence: Synthetic oligonucleotide
ggugaugucauuguaccuu

SEQ ID NO: 2883701 - RNA, 19 nt, Artificial Sequence
  Description of Artificial Sequence: Synthetic oligonucleotide
acaccuuggugaugucauu

SEQ ID NO: 2883702 - RNA, 19 nt, Artificial Sequence
  Description of Artificial Sequence: Synthetic oligonucleotide
gcuggggucccgcuuuaug

SEQ ID NO: 2883703 - RNA, 19 nt, Artificial Sequence
  Description of Artificial Sequence: Synthetic oligonucleotide
uucaggggccugguaguua

SEQ ID NO: 2883704 - RNA, 19 nt, Artificial Sequence
  Description of Artificial Sequence: Synthetic oligonucleotide
gagcuucuugcugggcuuc

SEQ ID NO: 2883705 - RNA, 19 nt, Artificial Sequence
  Description of Artificial Sequence: Synthetic oligonucleotide
gaaccucaaagggguaaua

SEQ ID NO: 2883706 - RNA, 19 nt, Artificial Sequence
  Description of Artificial Sequence: Synthetic oligonucleotide
caguuuucaguucuaucuu

SEQ ID NO: 2883707 - RNA, 19 nt, Artificial Sequence
  Description of Artificial Sequence: Synthetic oligonucleotide
caugcuccugcuucuugua

SEQ ID NO: 2883708 - RNA, 19 nt, Artificial Sequence
  Description of Artificial Sequence: Synthetic oligonucleotide
acaggcuggggucccgcuu

SEQ ID NO: 2883709 - RNA, 19 nt, Artificial Sequence
  Description of Artificial Sequence: Synthetic oligonucleotide
ccagcauggcucugauggc

SEQ ID NO: 2883710 - RNA, 19 nt, Artificial Sequence
  Description of Artificial Sequence: Synthetic oligonucleotide
ccuuccuucaggggccugg

SEQ ID NO: 2883711 - RNA, 19 nt, Artificial Sequence
  Description of Artificial Sequence: Synthetic oligonucleotide
cucugauggcgucccucuc

SEQ ID NO: 2883712 - RNA, 19 nt, Artificial Sequence
  Description of Artificial Sequence: Synthetic oligonucleotide
ggguaauaaaauccucaau

SEQ ID NO: 2883713 - RNA, 19 nt, Artificial Sequence
  Description of Artificial Sequence: Synthetic oligonucleotide
caguucuaucuuuuggauu

SEQ ID NO: 2883714 - RNA, 19 nt, Artificial Sequence
  Description of Artificial Sequence: Synthetic oligonucleotide
uuccuucaggggccuggua

SEQ ID NO: 2883715 - RNA, 19 nt, Artificial Sequence
  Description of Artificial Sequence: Synthetic oligonucleotide
augcuccuccugaggucgc

SEQ ID NO: 2883716 - RNA, 19 nt, Artificial Sequence
  Description of Artificial Sequence: Synthetic oligonucleotide
uggccucuucguagagcuc

SEQ ID NO: 2883717 - RNA, 19 nt, Artificial Sequence
  Description of Artificial Sequence: Synthetic oligonucleotide
aguucuugguuggcucuuu

SEQ ID NO: 2883718 - RNA, 19 nt, Artificial Sequence
  Description of Artificial Sequence: Synthetic oligonucleotide
cucugacuccuagggccag

SEQ ID NO: 2883719 - RNA, 19 nt, Artificial Sequence
  Description of Artificial Sequence: Synthetic oligonucleotide
ggccagaucuuccgacgac

SEQ ID NO: 2883720 - RNA, 19 nt, Artificial Sequence
  Description of Artificial Sequence: Synthetic oligonucleotide
acagcaguuuucaguucua

SEQ ID NO: 2883721 - RNA, 19 nt, Artificial Sequence
  Description of Artificial Sequence: Synthetic oligonucleotide
gccagaucuuccgacgaca

SEQ ID NO: 2883722 - RNA, 19 nt, Artificial Sequence
  Description of Artificial Sequence: Synthetic oligonucleotide
uaccuuccuucaggggccu

SEQ ID NO: 2883723 - RNA, 19 nt, Artificial Sequence
  Description of Artificial Sequence: Synthetic oligonucleotide
gggccagaucuuccgacga

SEQ ID NO: 2883724 - RNA, 19 nt, Artificial Sequence
  Description of Artificial Sequence: Synthetic oligonucleotide
cuugugcauacaccuuggu

SEQ ID NO: 2883725 - RNA, 19 nt, Artificial Sequence
  Description of Artificial Sequence: Synthetic oligonucleotide
cguagagcucuggagacuc

SEQ ID NO: 2883726 - RNA, 19 nt, Artificial Sequence
  Description of Artificial Sequence: Synthetic oligonucleotide
cccucucugccucaugcuc

SEQ ID NO: 2883727 - RNA, 19 nt, Artificial Sequence
  Description of Artificial Sequence: Synthetic oligonucleotide
aggucgcuuucuugacuua

SEQ ID NO: 2883728 - RNA, 19 nt, Artificial Sequence
  Description of Artificial Sequence: Synthetic oligonucleotide
gaagagcucuuugcucacu

SEQ ID NO: 2883729 - RNA, 19 nt, Artificial Sequence
  Description of Artificial Sequence: Synthetic oligonucleotide
cuacuugugcauacaccuu

SEQ ID NO: 2883730 - RNA, 19 nt, Artificial Sequence
  Description of Artificial Sequence: Synthetic oligonucleotide
guagagcucuggagacuca

SEQ ID NO: 2883731 - RNA, 19 nt, Artificial Sequence
  Description of Artificial Sequence: Synthetic oligonucleotide
uggcucugauggcgucccu

SEQ ID NO: 2883732 - RNA, 19 nt, Artificial Sequence
  Description of Artificial Sequence: Synthetic oligonucleotide
guucuaucuuuuggauucu

SEQ ID NO: 2883733 - RNA, 19 nt, Artificial Sequence
  Description of Artificial Sequence: Synthetic oligonucleotide
gcucuuugcucacucuccu

SEQ ID NO: 2883734 - RNA, 19 nt, Artificial Sequence
  Description of Artificial Sequence: Synthetic oligonucleotide
ccgacgacagcaguuuuca

SEQ ID NO: 2883735 - RNA, 19 nt, Artificial Sequence
  Description of Artificial Sequence: Synthetic oligonucleotide
ccucuucagcagaagagcu

SEQ ID NO: 2883736 - RNA, 19 nt, Artificial Sequence
  Description of Artificial Sequence: Synthetic oligonucleotide
gcucugauggcgucccucu

SEQ ID NO: 2883737 - RNA, 19 nt, Artificial Sequence
  Description of Artificial Sequence: Synthetic oligonucleotide
gugugugauguggcccuuc

SEQ ID NO: 2883738 - RNA, 19 nt, Artificial Sequence
  Description of Artificial Sequence: Synthetic oligonucleotide
cuuccgacgacagcaguuu

SEQ ID NO: 2883739 - RNA, 19 nt, Artificial Sequence
  Description of Artificial Sequence: Synthetic oligonucleotide
cuugcugggcuuccagcau

SEQ ID NO: 2883740 - RNA, 19 nt, Artificial Sequence
  Description of Artificial Sequence: Synthetic oligonucleotide
ggucccgcuuuauggccuc

SEQ ID NO: 2883741 - RNA, 19 nt, Artificial Sequence
  Description of Artificial Sequence: Synthetic oligonucleotide
ggcucugauggcgucccuc

SEQ ID NO: 2883742 - RNA, 19 nt, Artificial Sequence
  Description of Artificial Sequence: Synthetic oligonucleotide
gacucaagcuucaguucuu

SEQ ID NO: 2883743 - RNA, 19 nt, Artificial Sequence
  Description of Artificial Sequence: Synthetic oligonucleotide
ucccgcuuuauggccucuu

SEQ ID NO: 2883744 - RNA, 19 nt, Artificial Sequence
  Description of Artificial Sequence: Synthetic oligonucleotide
cgcuuucuugacuuaucca

SEQ ID NO: 2883745 - RNA, 19 nt, Artificial Sequence
  Description of Artificial Sequence: Synthetic oligonucleotide
cccgcuuuauggccucuuc

SEQ ID NO: 2883746 - RNA, 19 nt, Artificial Sequence
  Description of Artificial Sequence: Synthetic oligonucleotide
cucugucacucugacuccu

SEQ ID NO: 2883747 - RNA, 19 nt, Artificial Sequence
  Description of Artificial Sequence: Synthetic oligonucleotide
cuuccagcauggcucugau

SEQ ID NO: 2883748 - RNA, 19 nt, Artificial Sequence
  Description of Artificial Sequence: Synthetic oligonucleotide
ccuuggugaugucauugua

SEQ ID NO: 2883749 - RNA, 19 nt, Artificial Sequence
  Description of Artificial Sequence: Synthetic oligonucleotide
cgcuuuauggccucuucgu

SEQ ID NO: 2883750 - RNA, 19 nt, Artificial Sequence
  Description of Artificial Sequence: Synthetic oligonucleotide
aggcuggggucccgcuuua

SEQ ID NO: 2883751 - RNA, 19 nt, Artificial Sequence
  Description of Artificial Sequence: Synthetic oligonucleotide
accuuccuucaggggccug

SEQ ID NO: 2883752 - RNA, 19 nt, Artificial Sequence
  Description of Artificial Sequence: Synthetic oligonucleotide
ggucgcuuucuugacuuau

SEQ ID NO: 2883753 - RNA, 19 nt, Artificial Sequence
  Description of Artificial Sequence: Synthetic oligonucleotide
cuuccuucaggggccuggu

SEQ ID NO: 2883754 - RNA, 19 nt, Artificial Sequence
  Description of Artificial Sequence: Synthetic oligonucleotide
cagcaguuuucaguucuau

SEQ ID NO: 2883755 - RNA, 19 nt, Artificial Sequence
  Description of Artificial Sequence: Synthetic oligonucleotide
caggggccugguaguuaga

SEQ ID NO: 2883756 - RNA, 19 nt, Artificial Sequence
  Description of Artificial Sequence: Synthetic oligonucleotide
gggcuuccagcauggcucu

SEQ ID NO: 2883757 - RNA, 19 nt, Artificial Sequence
  Description of Artificial Sequence: Synthetic oligonucleotide
cagcucugucacucugacu

SEQ ID NO: 2883758 - RNA, 19 nt, Artificial Sequence
  Description of Artificial Sequence: Synthetic oligonucleotide
cgacagcaguuuucaguuc

SEQ ID NO: 2883759 - RNA, 19 nt, Artificial Sequence
  Description of Artificial Sequence: Synthetic oligonucleotide
caggcuggggucccgcuuu

SEQ ID NO: 2883760 - RNA, 19 nt, Artificial Sequence
  Description of Artificial Sequence: Synthetic oligonucleotide
cugacuccuagggccagau

SEQ ID NO: 2883761 - RNA, 19 nt, Artificial Sequence
  Description of Artificial Sequence: Synthetic oligonucleotide
gugugauguggcccuucuu

SEQ ID NO: 2883762 - RNA, 19 nt, Artificial Sequence
  Description of Artificial Sequence: Synthetic oligonucleotide
cuccuccugaggucgcuuu

SEQ ID NO: 2883763 - RNA, 19 nt, Artificial Sequence
  Description of Artificial Sequence: Synthetic oligonucleotide
cuucagcagaagagcucuu

SEQ ID NO: 2883764 - RNA, 19 nt, Artificial Sequence
  Description of Artificial Sequence: Synthetic oligonucleotide
cuccugaggucgcuuucuu

SEQ ID NO: 2883765 - RNA, 19 nt, Artificial Sequence
  Description of Artificial Sequence: Synthetic oligonucleotide
cuucaggggccugguaguu

SEQ ID NO: 2883766 - RNA, 19 nt, Artificial Sequence
  Description of Artificial Sequence: Synthetic oligonucleotide
gggucccgcuuuauggccu

SEQ ID NO: 2883767 - RNA, 19 nt, Artificial Sequence
  Description of Artificial Sequence: Synthetic oligonucleotide
ggcuuccagcauggcucug

SEQ ID NO: 2883768 - RNA, 19 nt, Artificial Sequence
  Description of Artificial Sequence: Synthetic oligonucleotide
cuccugcuucuuguauagu

SEQ ID NO: 2883769 - RNA, 19 nt, Artificial Sequence
  Description of Artificial Sequence: Synthetic oligonucleotide
gcccaccucuucagcagaa

SEQ ID NO: 2883770 - RNA, 19 nt, Artificial Sequence
  Description of Artificial Sequence: Synthetic oligonucleotide
cugccucaugcuccugcuu

SEQ ID NO: 2883771 - RNA, 19 nt, Artificial Sequence
  Description of Artificial Sequence: Synthetic oligonucleotide
ccuccugaggucgcuuucu

SEQ ID NO: 2883772 - RNA, 19 nt, Artificial Sequence
  Description of Artificial Sequence: Synthetic oligonucleotide
cgucccucucugccucaug

SEQ ID NO: 2883773 - RNA, 19 nt, Artificial Sequence
  Description of Artificial Sequence: Synthetic oligonucleotide
ggccugguaguuagagauu

SEQ ID NO: 2883774 - RNA, 19 nt, Artificial Sequence
  Description of Artificial Sequence: Synthetic oligonucleotide
gucccgcuuuauggccucu

SEQ ID NO: 2883775 - RNA, 19 nt, Artificial Sequence
  Description of Artificial Sequence: Synthetic oligonucleotide
ggugugugauguggcccuu

SEQ ID NO: 2883776 - RNA, 19 nt, Artificial Sequence
  Description of Artificial Sequence: Synthetic oligonucleotide
ggcuggggucccgcuuuau

SEQ ID NO: 2883777 - RNA, 19 nt, Artificial Sequence
  Description of Artificial Sequence: Synthetic oligonucleotide
gcgucccucucugccucau

SEQ ID NO: 2883778 - RNA, 19 nt, Artificial Sequence
  Description of Artificial Sequence: Synthetic oligonucleotide
aaaauaacagguuuguugc

SEQ ID NO: 2883779 - RNA, 19 nt, Artificial Sequence
  Description of Artificial Sequence: Synthetic oligonucleotide
uuugauuuuacacucgggg

SEQ ID NO: 2883780 - RNA, 19 nt, Artificial Sequence
  Description of Artificial Sequence: Synthetic oligonucleotide
uuaaauuccaaccucacaa

SEQ ID NO: 2883781 - RNA, 19 nt, Artificial Sequence
  Description of Artificial Sequence: Synthetic oligonucleotide
auuagcagguacuucaugg

SEQ ID NO: 2883782 - RNA, 19 nt, Artificial Sequence
  Description of Artificial Sequence: Synthetic oligonucleotide
aauuugaugcacgccaggc

SEQ ID NO: 2883783 - RNA, 19 nt, Artificial Sequence
  Description of Artificial Sequence: Synthetic oligonucleotide
uucacguuagaccuucugg

SEQ ID NO: 2883784 - RNA, 19 nt, Artificial Sequence
  Description of Artificial Sequence: Synthetic oligonucleotide
uccaaccucacaaaggugc

SEQ ID NO: 2883785 - RNA, 19 nt, Artificial Sequence
  Description of Artificial Sequence: Synthetic oligonucleotide
uccaauuugaugcacgcca

SEQ ID NO: 2883786 - RNA, 19 nt, Artificial Sequence
  Description of Artificial Sequence: Synthetic oligonucleotide
aaauuccaaccucacaaag

SEQ ID NO: 2883787 - RNA, 19 nt, Artificial Sequence
  Description of Artificial Sequence: Synthetic oligonucleotide
gaaacagcuggucugcugg

SEQ ID NO: 2883788 - RNA, 19 nt, Artificial Sequence
  Description of Artificial Sequence: Synthetic oligonucleotide
uguguuauccuauugcacu

SEQ ID NO: 2883789 - RNA, 19 nt, Artificial Sequence
  Description of Artificial Sequence: Synthetic oligonucleotide
uauccuauugcacugggac

SEQ ID NO: 2883790 - RNA, 19 nt, Artificial Sequence
  Description of Artificial Sequence: Synthetic oligonucleotide
guuagcguuguccacaccg

SEQ ID NO: 2883791 - RNA, 19 nt, Artificial Sequence
  Description of Artificial Sequence: Synthetic oligonucleotide
cugggguccaauuugaugc

SEQ ID NO: 2883792 - RNA, 19 nt, Artificial Sequence
  Description of Artificial Sequence: Synthetic oligonucleotide
uggagcuuaaauuccaacc

SEQ ID NO: 2883793 - RNA, 19 nt, Artificial Sequence
  Description of Artificial Sequence: Synthetic oligonucleotide
ucugcuggagcuuaaauuc

SEQ ID NO: 2883794 - RNA, 19 nt, Artificial Sequence
  Description of Artificial Sequence: Synthetic oligonucleotide
aacuuuaccccuggggucc

SEQ ID NO: 2883795 - RNA, 19 nt, Artificial Sequence
  Description of Artificial Sequence: Synthetic oligonucleotide
aaaggugccaggaagacca

SEQ ID NO: 2883796 - RNA, 19 nt, Artificial Sequence
  Description of Artificial Sequence: Synthetic oligonucleotide
aauuccaaccucacaaagg

SEQ ID NO: 2883797 - RNA, 19 nt, Artificial Sequence
  Description of Artificial Sequence: Synthetic oligonucleotide
acguuagaccuucuggucc

SEQ ID NO: 2883798 - RNA, 19 nt, Artificial Sequence
  Description of Artificial Sequence: Synthetic oligonucleotide
agaacuuuaccccuggggu

SEQ ID NO: 2883799 - RNA, 19 nt, Artificial Sequence
  Description of Artificial Sequence: Synthetic oligonucleotide
auguaugcccaccaugccc

SEQ ID NO: 2883800 - RNA, 19 nt, Artificial Sequence
  Description of Artificial Sequence: Synthetic oligonucleotide
agcucugucccauguaugc

SEQ ID NO: 2883801 - RNA, 19 nt, Artificial Sequence
  Description of Artificial Sequence: Synthetic oligonucleotide
acaccgaucucuuggaagg

SEQ ID NO: 2883802 - RNA, 19 nt, Artificial Sequence
  Description of Artificial Sequence: Synthetic oligonucleotide
auuccaaccucacaaaggu

SEQ ID NO: 2883803 - RNA, 19 nt, Artificial Sequence
  Description of Artificial Sequence: Synthetic oligonucleotide
ucuugaaacagcuggucug

SEQ ID NO: 2883804 - RNA, 19 nt, Artificial Sequence
  Description of Artificial Sequence: Synthetic oligonucleotide
gagauuagcagguacuuca

SEQ ID NO: 2883805 - RNA, 19 nt, Artificial Sequence
  Description of Artificial Sequence: Synthetic oligonucleotide
aggcauuuccgcuuucucc

SEQ ID NO: 2883806 - RNA, 19 nt, Artificial Sequence
  Description of Artificial Sequence: Synthetic oligonucleotide
cauggcuucacguuagacc

SEQ ID NO: 2883807 - RNA, 19 nt, Artificial Sequence
  Description of Artificial Sequence: Synthetic oligonucleotide
auggcuucacguuagaccu

SEQ ID NO: 2883808 - RNA, 19 nt, Artificial Sequence
  Description of Artificial Sequence: Synthetic oligonucleotide
acagguuuguugcuuuagc

SEQ ID NO: 2883809 - RNA, 19 nt, Artificial Sequence
  Description of Artificial Sequence: Synthetic oligonucleotide
uccgcuuucucccauuugc

SEQ ID NO: 2883810 - RNA, 19 nt, Artificial Sequence
  Description of Artificial Sequence: Synthetic oligonucleotide
aagaccaugucguuagcgu

SEQ ID NO: 2883811 - RNA, 19 nt, Artificial Sequence
  Description of Artificial Sequence: Synthetic oligonucleotide
uuuguggaacuccuccagg

SEQ ID NO: 2883812 - RNA, 19 nt, Artificial Sequence
  Description of Artificial Sequence: Synthetic oligonucleotide
ugcacugggacuccugagg

SEQ ID NO: 2883813 - RNA, 19 nt, Artificial Sequence
  Description of Artificial Sequence: Synthetic oligonucleotide
ucuuggaaggcccacugca

SEQ ID NO: 2883814 - RNA, 19 nt, Artificial Sequence
  Description of Artificial Sequence: Synthetic oligonucleotide
uguaugcccaccaugccca

SEQ ID NO: 2883815 - RNA, 19 nt, Artificial Sequence
  Description of Artificial Sequence: Synthetic oligonucleotide
uugauuuuacacucggggu

SEQ ID NO: 2883816 - RNA, 19 nt, Artificial Sequence
  Description of Artificial Sequence: Synthetic oligonucleotide
aggaagaccaugucguuag

SEQ ID NO: 2883817 - RNA, 19 nt, Artificial Sequence
  Description of Artificial Sequence: Synthetic oligonucleotide
uuguggaacuccuccaggg

SEQ ID NO: 2883818 - RNA, 19 nt, Artificial Sequence
  Description of Artificial Sequence: Synthetic oligonucleotide
uuugaugcacgccaggcau

SEQ ID NO: 2883819 - RNA, 19 nt, Artificial Sequence
  Description of Artificial Sequence: Synthetic oligonucleotide
ugggcaguggaccauccgg

SEQ ID NO: 2883820 - RNA, 19 nt, Artificial Sequence
  Description of Artificial Sequence: Synthetic oligonucleotide
ugauuuuacacucgggguu

SEQ ID NO: 2883821 - RNA, 19 nt, Artificial Sequence
  Description of Artificial Sequence: Synthetic oligonucleotide
ugcgcugugucucacugag

SEQ ID NO: 2883822 - RNA, 19 nt, Artificial Sequence
  Description of Artificial Sequence: Synthetic oligonucleotide
cuugcuucaguauugggca

SEQ ID NO: 2883823 - RNA, 19 nt, Artificial Sequence
  Description of Artificial Sequence: Synthetic oligonucleotide
ucacguuagaccuucuggu

SEQ ID NO: 2883824 - RNA, 19 nt, Artificial Sequence
  Description of Artificial Sequence: Synthetic oligonucleotide
uucuugaaacagcuggucu

SEQ ID NO: 2883825 - RNA, 19 nt, Artificial Sequence
  Description of Artificial Sequence: Synthetic oligonucleotide
augcacgccaggcauuucc

SEQ ID NO: 2883826 - RNA, 19 nt, Artificial Sequence
  Description of Artificial Sequence: Synthetic oligonucleotide
ugcuuugauuuuacacucg

SEQ ID NO: 2883827 - RNA, 19 nt, Artificial Sequence
  Description of Artificial Sequence: Synthetic oligonucleotide
augcccaccaugcccagcc

SEQ ID NO: 2883828 - RNA, 19 nt, Artificial Sequence
  Description of Artificial Sequence: Synthetic oligonucleotide
aaauaacagguuuguugcu

SEQ ID NO: 2883829 - RNA, 19 nt, Artificial Sequence
  Description of Artificial Sequence: Synthetic oligonucleotide
cuuugauuuuacacucggg

SEQ ID NO: 2883830 - RNA, 19 nt, Artificial Sequence
  Description of Artificial Sequence: Synthetic oligonucleotide
cagaacuuuaccccugggg

SEQ ID NO: 2883831 - RNA, 19 nt, Artificial Sequence
  Description of Artificial Sequence: Synthetic oligonucleotide
cugugucucacugagcucg

SEQ ID NO: 2883832 - RNA, 19 nt, Artificial Sequence
  Description of Artificial Sequence: Synthetic oligonucleotide
uugcuuugauuuuacacuc

SEQ ID NO: 2883833 - RNA, 19 nt, Artificial Sequence
  Description of Artificial Sequence: Synthetic oligonucleotide
aggcccacugcacaggugg

SEQ ID NO: 2883834 - RNA, 19 nt, Artificial Sequence
  Description of Artificial Sequence: Synthetic oligonucleotide
ugagcucgagcucuguccc

SEQ ID NO: 2883835 - RNA, 19 nt, Artificial Sequence
  Description of Artificial Sequence: Synthetic oligonucleotide
acagcuggucugcuggagc

SEQ ID NO: 2883836 - RNA, 19 nt, Artificial Sequence
  Description of Artificial Sequence: Synthetic oligonucleotide
gaagaccaugucguuagcg

SEQ ID NO: 2883837 - RNA, 19 nt, Artificial Sequence
  Description of Artificial Sequence: Synthetic oligonucleotide
ucaguauugggcaguggac

SEQ ID NO: 2883838 - RNA, 19 nt, Artificial Sequence
  Description of Artificial Sequence: Synthetic oligonucleotide
guguuuguggaacuccucc

SEQ ID NO: 2883839 - RNA, 19 nt, Artificial Sequence
  Description of Artificial Sequence: Synthetic oligonucleotide
aaccucacaaaggugccag

SEQ ID NO: 2883840 - RNA, 19 nt, Artificial Sequence
  Description of Artificial Sequence: Synthetic oligonucleotide
guuauccuauugcacuggg

SEQ ID NO: 2883841 - RNA, 19 nt, Artificial Sequence
  Description of Artificial Sequence: Synthetic oligonucleotide
uguuauccuauugcacugg

SEQ ID NO: 2883842 - RNA, 19 nt, Artificial Sequence
  Description of Artificial Sequence: Synthetic oligonucleotide
caugucguuagcguugucc

SEQ ID NO: 2883843 - RNA, 19 nt, Artificial Sequence
  Description of Artificial Sequence: Synthetic oligonucleotide
uguuuguggaacuccucca

SEQ ID NO: 2883844 - RNA, 19 nt, Artificial Sequence
  Description of Artificial Sequence: Synthetic oligonucleotide
aauaacagguuuguugcuu

SEQ ID NO: 2883845 - RNA, 19 nt, Artificial Sequence
  Description of Artificial Sequence: Synthetic oligonucleotide
guuuguggaacuccuccag

SEQ ID NO: 2883846 - RNA, 19 nt, Artificial Sequence
  Description of Artificial Sequence: Synthetic oligonucleotide
aguauugggcaguggacca

SEQ ID NO: 2883847 - RNA, 19 nt, Artificial Sequence
  Description of Artificial Sequence: Synthetic oligonucleotide
cugagcucgagcucugucc

SEQ ID NO: 2883848 - RNA, 19 nt, Artificial Sequence
  Description of Artificial Sequence: Synthetic oligonucleotide
ucucuuggaaggcccacug

SEQ ID NO: 2883849 - RNA, 19 nt, Artificial Sequence
  Description of Artificial Sequence: Synthetic oligonucleotide
augucguuagcguugucca

SEQ ID NO: 2883850 - RNA, 19 nt, Artificial Sequence
  Description of Artificial Sequence: Synthetic oligonucleotide
aacagguuuguugcuuuag

SEQ ID NO: 2883851 - RNA, 19 nt, Artificial Sequence
  Description of Artificial Sequence: Synthetic oligonucleotide
ugucucacugagcucgagc

SEQ ID NO: 2883852 - RNA, 19 nt, Artificial Sequence
  Description of Artificial Sequence: Synthetic oligonucleotide
cuugaaacagcuggucugc

SEQ ID NO: 2883853 - RNA, 19 nt, Artificial Sequence
  Description of Artificial Sequence: Synthetic oligonucleotide
cucugucccauguaugccc

SEQ ID NO: 2883854 - RNA, 19 nt, Artificial Sequence
  Description of Artificial Sequence: Synthetic oligonucleotide
acaaaggugccaggaagac

SEQ ID NO: 2883855 - RNA, 19 nt, Artificial Sequence
  Description of Artificial Sequence: Synthetic oligonucleotide
gcuuugauuuuacacucgg

SEQ ID NO: 2883856 - RNA, 19 nt, Artificial Sequence
  Description of Artificial Sequence: Synthetic oligonucleotide
ggcauuuccgcuuucuccc

SEQ ID NO: 2883857 - RNA, 19 nt, Artificial Sequence
  Description of Artificial Sequence: Synthetic oligonucleotide
uuggaaggcccacugcaca

SEQ ID NO: 2883858 - RNA, 19 nt, Artificial Sequence
  Description of Artificial Sequence: Synthetic oligonucleotide
caugcccagccauagggcc

SEQ ID NO: 2883859 - RNA, 19 nt, Artificial Sequence
  Description of Artificial Sequence: Synthetic oligonucleotide
uuagcguuguccacaccga

SEQ ID NO: 2883860 - RNA, 19 nt, Artificial Sequence
  Description of Artificial Sequence: Synthetic oligonucleotide
auuugaugcacgccaggca

SEQ ID NO: 2883861 - RNA, 19 nt, Artificial Sequence
  Description of Artificial Sequence: Synthetic oligonucleotide
cacagguggguguuugugg

SEQ ID NO: 2883862 - RNA, 19 nt, Artificial Sequence
  Description of Artificial Sequence: Synthetic oligonucleotide
cuuucucccauuugcuuug

SEQ ID NO: 2883863 - RNA, 19 nt, Artificial Sequence
  Description of Artificial Sequence: Synthetic oligonucleotide
gauuagcagguacuucaug

SEQ ID NO: 2883864 - RNA, 19 nt, Artificial Sequence
  Description of Artificial Sequence: Synthetic oligonucleotide
uccuauugcacugggacuc

SEQ ID NO: 2883865 - RNA, 19 nt, Artificial Sequence
  Description of Artificial Sequence: Synthetic oligonucleotide
ugcacgccaggcauuuccg

SEQ ID NO: 2883866 - RNA, 19 nt, Artificial Sequence
  Description of Artificial Sequence: Synthetic oligonucleotide
ugcuggagcuuaaauucca

SEQ ID NO: 2883867 - RNA, 19 nt, Artificial Sequence
  Description of Artificial Sequence: Synthetic oligonucleotide
ccuugcuucaguauugggc

SEQ ID NO: 2883868 - RNA, 19 nt, Artificial Sequence
  Description of Artificial Sequence: Synthetic oligonucleotide
gagcuuaaauuccaaccuc

SEQ ID NO: 2883869 - RNA, 19 nt, Artificial Sequence
  Description of Artificial Sequence: Synthetic oligonucleotide
uuauccuauugcacuggga

SEQ ID NO: 2883870 - RNA, 19 nt, Artificial Sequence
  Description of Artificial Sequence: Synthetic oligonucleotide
cacaccgaucucuuggaag

SEQ ID NO: 2883871 - RNA, 19 nt, Artificial Sequence
  Description of Artificial Sequence: Synthetic oligonucleotide
caguauugggcaguggacc

SEQ ID NO: 2883872 - RNA, 19 nt, Artificial Sequence
  Description of Artificial Sequence: Synthetic oligonucleotide
gaacuuuaccccugggguc

SEQ ID NO: 2883873 - RNA, 19 nt, Artificial Sequence
  Description of Artificial Sequence: Synthetic oligonucleotide
cuguguuauccuauugcac

SEQ ID NO: 2883874 - RNA, 19 nt, Artificial Sequence
  Description of Artificial Sequence: Synthetic oligonucleotide
acugggacuccugaggcuc

SEQ ID NO: 2883875 - RNA, 19 nt, Artificial Sequence
  Description of Artificial Sequence: Synthetic oligonucleotide
guguuauccuauugcacug

SEQ ID NO: 2883876 - RNA, 19 nt, Artificial Sequence
  Description of Artificial Sequence: Synthetic oligonucleotide
ccauguaugcccaccaugc

SEQ ID NO: 2883877 - RNA, 19 nt, Artificial Sequence
  Description of Artificial Sequence: Synthetic oligonucleotide
accuucugguccuugaaaa

SEQ ID NO: 2883878 - RNA, 19 nt, Artificial Sequence
  Description of Artificial Sequence: Synthetic oligonucleotide
auugcacugggacuccuga

SEQ ID NO: 2883879 - RNA, 19 nt, Artificial Sequence
  Description of Artificial Sequence: Synthetic oligonucleotide
caauuugaugcacgccagg

SEQ ID NO: 2883880 - RNA, 19 nt, Artificial Sequence
  Description of Artificial Sequence: Synthetic oligonucleotide
cuuaaauuccaaccucaca

SEQ ID NO: 2883881 - RNA, 19 nt, Artificial Sequence
  Description of Artificial Sequence: Synthetic oligonucleotide
caguccuucuugaaacagc

SEQ ID NO: 2883882 - RNA, 19 nt, Artificial Sequence
  Description of Artificial Sequence: Synthetic oligonucleotide
ugaaguccuugcuucagua

SEQ ID NO: 2883883 - RNA, 19 nt, Artificial Sequence
  Description of Artificial Sequence: Synthetic oligonucleotide
acuucauggcuucacguua

SEQ ID NO: 2883884 - RNA, 19 nt, Artificial Sequence
  Description of Artificial Sequence: Synthetic oligonucleotide
acugagcucgagcucuguc

SEQ ID NO: 2883885 - RNA, 19 nt, Artificial Sequence
  Description of Artificial Sequence: Synthetic oligonucleotide
auaacagguuuguugcuuu

SEQ ID NO: 2883886 - RNA, 19 nt, Artificial Sequence
  Description of Artificial Sequence: Synthetic oligonucleotide
cugcuggagcuuaaauucc

SEQ ID NO: 2883887 - RNA, 19 nt, Artificial Sequence
  Description of Artificial Sequence: Synthetic oligonucleotide
aguccuucuugaaacagcu

SEQ ID NO: 2883888 - RNA, 19 nt, Artificial Sequence
  Description of Artificial Sequence: Synthetic oligonucleotide
accgaucucuuggaaggcc

SEQ ID NO: 2883889 - RNA, 19 nt, Artificial Sequence
  Description of Artificial Sequence: Synthetic oligonucleotide
agcuuaaauuccaaccuca

SEQ ID NO: 2883890 - RNA, 19 nt, Artificial Sequence
  Description of Artificial Sequence: Synthetic oligonucleotide
uauugcacugggacuccug

SEQ ID NO: 2883891 - RNA, 19 nt, Artificial Sequence
  Description of Artificial Sequence: Synthetic oligonucleotide
uccuugcuucaguauuggg

SEQ ID NO: 2883892 - RNA, 19 nt, Artificial Sequence
  Description of Artificial Sequence: Synthetic oligonucleotide
uacuucauggcuucacguu

SEQ ID NO: 2883893 - RNA, 19 nt, Artificial Sequence
  Description of Artificial Sequence: Synthetic oligonucleotide
auccuauugcacugggacu

SEQ ID NO: 2883894 - RNA, 19 nt, Artificial Sequence
  Description of Artificial Sequence: Synthetic oligonucleotide
uuccaaccucacaaaggug

SEQ ID NO: 2883895 - RNA, 19 nt, Artificial Sequence
  Description of Artificial Sequence: Synthetic oligonucleotide
cuggagcuuaaauuccaac

SEQ ID NO: 2883896 - RNA, 19 nt, Artificial Sequence
  Description of Artificial Sequence: Synthetic oligonucleotide
uugggcaguggaccauccg

SEQ ID NO: 2883897 - RNA, 19 nt, Artificial Sequence
  Description of Artificial Sequence: Synthetic oligonucleotide
cuuggaaggcccacugcac

SEQ ID NO: 2883898 - RNA, 19 nt, Artificial Sequence
  Description of Artificial Sequence: Synthetic oligonucleotide
agguggguguuuguggaac

SEQ ID NO: 2883899 - RNA, 19 nt, Artificial Sequence
  Description of Artificial Sequence: Synthetic oligonucleotide
cauguaugcccaccaugcc

SEQ ID NO: 2883900 - RNA, 19 nt, Artificial Sequence
  Description of Artificial Sequence: Synthetic oligonucleotide
aaacagcuggucugcugga

SEQ ID NO: 2883901 - RNA, 19 nt, Artificial Sequence
  Description of Artificial Sequence: Synthetic oligonucleotide
ucucccauuugcuuugauu

SEQ ID NO: 2883902 - RNA, 19 nt, Artificial Sequence
  Description of Artificial Sequence: Synthetic oligonucleotide
gaccaugucguuagcguug

SEQ ID NO: 2883903 - RNA, 19 nt, Artificial Sequence
  Description of Artificial Sequence: Synthetic oligonucleotide
ugaggcuccuccugaaguc

SEQ ID NO: 2883904 - RNA, 19 nt, Artificial Sequence
  Description of Artificial Sequence: Synthetic oligonucleotide
uccacaccgaucucuugga

SEQ ID NO: 2883905 - RNA, 19 nt, Artificial Sequence
  Description of Artificial Sequence: Synthetic oligonucleotide
uggguguuuguggaacucc

SEQ ID NO: 2883906 - RNA, 19 nt, Artificial Sequence
  Description of Artificial Sequence: Synthetic oligonucleotide
uccaguccuucuugaaaca

SEQ ID NO: 2883907 - RNA, 19 nt, Artificial Sequence
  Description of Artificial Sequence: Synthetic oligonucleotide
uggaccauccggcccagaa

SEQ ID NO: 2883908 - RNA, 19 nt, Artificial Sequence
  Description of Artificial Sequence: Synthetic oligonucleotide
uugcuucaguauugggcag

SEQ ID NO: 2883909 - RNA, 19 nt, Artificial Sequence
  Description of Artificial Sequence: Synthetic oligonucleotide
gguccaauuugaugcacgc

SEQ ID NO: 2883910 - RNA, 19 nt, Artificial Sequence
  Description of Artificial Sequence: Synthetic oligonucleotide
cacaaaggugccaggaaga

SEQ ID NO: 2883911 - RNA, 19 nt, Artificial Sequence
  Description of Artificial Sequence: Synthetic oligonucleotide
cacguuagaccuucugguc

SEQ ID NO: 2883912 - RNA, 19 nt, Artificial Sequence
  Description of Artificial Sequence: Synthetic oligonucleotide
gccuguguuauccuauugc

SEQ ID NO: 2883913 - RNA, 19 nt, Artificial Sequence
  Description of Artificial Sequence: Synthetic oligonucleotide
ggccagggagauuagcagg

SEQ ID NO: 2883914 - RNA, 19 nt, Artificial Sequence
  Description of Artificial Sequence: Synthetic oligonucleotide
aacagcuggucugcuggag

SEQ ID NO: 2883915 - RNA, 19 nt, Artificial Sequence
  Description of Artificial Sequence: Synthetic oligonucleotide
ucgccagccuguguuaucc

SEQ ID NO: 2883916 - RNA, 19 nt, Artificial Sequence
  Description of Artificial Sequence: Synthetic oligonucleotide
cuucacguuagaccuucug

SEQ ID NO: 2883917 - RNA, 19 nt, Artificial Sequence
  Description of Artificial Sequence: Synthetic oligonucleotide
uugcacugggacuccugag

SEQ ID NO: 2883918 - RNA, 19 nt, Artificial Sequence
  Description of Artificial Sequence: Synthetic oligonucleotide
gaccauccggcccagaacu

SEQ ID NO: 2883919 - RNA, 19 nt, Artificial Sequence
  Description of Artificial Sequence: Synthetic oligonucleotide
ggagcuuaaauuccaaccu

SEQ ID NO: 2883920 - RNA, 19 nt, Artificial Sequence
  Description of Artificial Sequence: Synthetic oligonucleotide
cuucuugaaacagcugguc

SEQ ID NO: 2883921 - RNA, 19 nt, Artificial Sequence
  Description of Artificial Sequence: Synthetic oligonucleotide
cagggagauuagcagguac

SEQ ID NO: 2883922 - RNA, 19 nt, Artificial Sequence
  Description of Artificial Sequence: Synthetic oligonucleotide
uccugaaguccuugcuuca

SEQ ID NO: 2883923 - RNA, 19 nt, Artificial Sequence
  Description of Artificial Sequence: Synthetic oligonucleotide
uccuccagggccaccugca

SEQ ID NO: 2883924 - RNA, 19 nt, Artificial Sequence
  Description of Artificial Sequence: Synthetic oligonucleotide
cauagggccagggagauua

SEQ ID NO: 2883925 - RNA, 19 nt, Artificial Sequence
  Description of Artificial Sequence: Synthetic oligonucleotide
aguccuugcuucaguauug

SEQ ID NO: 2883926 - RNA, 19 nt, Artificial Sequence
  Description of Artificial Sequence: Synthetic oligonucleotide
caaaggugccaggaagacc

SEQ ID NO: 2883927 - RNA, 19 nt, Artificial Sequence
  Description of Artificial Sequence: Synthetic oligonucleotide
ucguuagcguuguccacac

SEQ ID NO: 2883928 - RNA, 19 nt, Artificial Sequence
  Description of Artificial Sequence: Synthetic oligonucleotide
ugucccauguaugcccacc

SEQ ID NO: 2883929 - RNA, 19 nt, Artificial Sequence
  Description of Artificial Sequence: Synthetic oligonucleotide
ugggguccaauuugaugca

SEQ ID NO: 2883930 - RNA, 19 nt, Artificial Sequence
  Description of Artificial Sequence: Synthetic oligonucleotide
agaccaugucguuagcguu

SEQ ID NO: 2883931 - RNA, 19 nt, Artificial Sequence
  Description of Artificial Sequence: Synthetic oligonucleotide
cucccauuugcuuugauuu

SEQ ID NO: 2883932 - RNA, 19 nt, Artificial Sequence
  Description of Artificial Sequence: Synthetic oligonucleotide
ucucacugagcucgagcuc

SEQ ID NO: 2883933 - RNA, 19 nt, Artificial Sequence
  Description of Artificial Sequence: Synthetic oligonucleotide
agggagauuagcagguacu

SEQ ID NO: 2883934 - RNA, 19 nt, Artificial Sequence
  Description of Artificial Sequence: Synthetic oligonucleotide
uucauggcuucacguuaga

SEQ ID NO: 2883935 - RNA, 19 nt, Artificial Sequence
  Description of Artificial Sequence: Synthetic oligonucleotide
ugucguuagcguuguccac

SEQ ID NO: 2883936 - RNA, 19 nt, Artificial Sequence
  Description of Artificial Sequence: Synthetic oligonucleotide
gucucacugagcucgagcu

SEQ ID NO: 2883937 - RNA, 19 nt, Artificial Sequence
  Description of Artificial Sequence: Synthetic oligonucleotide
accucacaaaggugccagg

SEQ ID NO: 2883938 - RNA, 19 nt, Artificial Sequence
  Description of Artificial Sequence: Synthetic oligonucleotide
agccuguguuauccuauug

SEQ ID NO: 2883939 - RNA, 19 nt, Artificial Sequence
  Description of Artificial Sequence: Synthetic oligonucleotide
uuccgcuuucucccauuug

SEQ ID NO: 2883940 - RNA, 19 nt, Artificial Sequence
  Description of Artificial Sequence: Synthetic oligonucleotide
uccggcccagaacuuuacc

SEQ ID NO: 2883941 - RNA, 19 nt, Artificial Sequence
  Description of Artificial Sequence: Synthetic oligonucleotide
ucauggcuucacguuagac

SEQ ID NO: 2883942 - RNA, 19 nt, Artificial Sequence
  Description of Artificial Sequence: Synthetic oligonucleotide
ugugucucacugagcucga

SEQ ID NO: 2883943 - RNA, 19 nt, Artificial Sequence
  Description of Artificial Sequence: Synthetic oligonucleotide
cucuuggaaggcccacugc

SEQ ID NO: 2883944 - RNA, 19 nt, Artificial Sequence
  Description of Artificial Sequence: Synthetic oligonucleotide
agcguuguccacaccgauc

SEQ ID NO: 2883945 - RNA, 19 nt, Artificial Sequence
  Description of Artificial Sequence: Synthetic oligonucleotide
uuuccgcuuucucccauuu

SEQ ID NO: 2883946 - RNA, 19 nt, Artificial Sequence
  Description of Artificial Sequence: Synthetic oligonucleotide
ugcuucaguauugggcagu

SEQ ID NO: 2883947 - RNA, 19 nt, Artificial Sequence
  Description of Artificial Sequence: Synthetic oligonucleotide
guccuugcuucaguauugg

SEQ ID NO: 2883948 - RNA, 19 nt, Artificial Sequence
  Description of Artificial Sequence: Synthetic oligonucleotide
ccaauuugaugcacgccag

SEQ ID NO: 2883949 - RNA, 19 nt, Artificial Sequence
  Description of Artificial Sequence: Synthetic oligonucleotide
uuguccacaccgaucucuu

SEQ ID NO: 2883950 - RNA, 19 nt, Artificial Sequence
  Description of Artificial Sequence: Synthetic oligonucleotide
ucccauuugcuuugauuuu

SEQ ID NO: 2883951 - RNA, 19 nt, Artificial Sequence
  Description of Artificial Sequence: Synthetic oligonucleotide
gucguuagcguuguccaca

SEQ ID NO: 2883952 - RNA, 19 nt, Artificial Sequence
  Description of Artificial Sequence: Synthetic oligonucleotide
uauugggcaguggaccauc

SEQ ID NO: 2883953 - RNA, 19 nt, Artificial Sequence
  Description of Artificial Sequence: Synthetic oligonucleotide
gaccuucugguccuugaaa

SEQ ID NO: 2883954 - RNA, 19 nt, Artificial Sequence
  Description of Artificial Sequence: Synthetic oligonucleotide
uaacagguuuguugcuuua

SEQ ID NO: 2883955 - RNA, 19 nt, Artificial Sequence
  Description of Artificial Sequence: Synthetic oligonucleotide
agggccagggagauuagca

SEQ ID NO: 2883956 - RNA, 19 nt, Artificial Sequence
  Description of Artificial Sequence: Synthetic oligonucleotide
uguccacaccgaucucuug

SEQ ID NO: 2883957 - RNA, 19 nt, Artificial Sequence
  Description of Artificial Sequence: Synthetic oligonucleotide
uuagaccuucugguccuug

SEQ ID NO: 2883958 - RNA, 19 nt, Artificial Sequence
  Description of Artificial Sequence: Synthetic oligonucleotide
ucacugagcucgagcucug

SEQ ID NO: 2883959 - RNA, 19 nt, Artificial Sequence
  Description of Artificial Sequence: Synthetic oligonucleotide
ccuguguuauccuauugca

SEQ ID NO: 2883960 - RNA, 19 nt, Artificial Sequence
  Description of Artificial Sequence: Synthetic oligonucleotide
agggccaccugcaggcccc

SEQ ID NO: 2883961 - RNA, 19 nt, Artificial Sequence
  Description of Artificial Sequence: Synthetic oligonucleotide
uagcguuguccacaccgau

SEQ ID NO: 2883962 - RNA, 19 nt, Artificial Sequence
  Description of Artificial Sequence: Synthetic oligonucleotide
guccaauuugaugcacgcc

SEQ ID NO: 2883963 - RNA, 19 nt, Artificial Sequence
  Description of Artificial Sequence: Synthetic oligonucleotide
gggccagggagauuagcag

SEQ ID NO: 2883964 - RNA, 19 nt, Artificial Sequence
  Description of Artificial Sequence: Synthetic oligonucleotide
uaccccugggguccaauuu

SEQ ID NO: 2883965 - RNA, 19 nt, Artificial Sequence
  Description of Artificial Sequence: Synthetic oligonucleotide
ugcccagccauagggccag

SEQ ID NO: 2883966 - RNA, 19 nt, Artificial Sequence
  Description of Artificial Sequence: Synthetic oligonucleotide
ggguccaauuugaugcacg

SEQ ID NO: 2883967 - RNA, 19 nt, Artificial Sequence
  Description of Artificial Sequence: Synthetic oligonucleotide
guacuucauggcuucacgu

SEQ ID NO: 2883968 - RNA, 19 nt, Artificial Sequence
  Description of Artificial Sequence: Synthetic oligonucleotide
ccggcccagaacuuuaccc

SEQ ID NO: 2883969 - RNA, 19 nt, Artificial Sequence
  Description of Artificial Sequence: Synthetic oligonucleotide
gagcucugucccauguaug

SEQ ID NO: 2883970 - RNA, 19 nt, Artificial Sequence
  Description of Artificial Sequence: Synthetic oligonucleotide
gcacugggacuccugaggc

SEQ ID NO: 2883971 - RNA, 19 nt, Artificial Sequence
  Description of Artificial Sequence: Synthetic oligonucleotide
uugaugcacgccaggcauu

SEQ ID NO: 2883972 - RNA, 19 nt, Artificial Sequence
  Description of Artificial Sequence: Synthetic oligonucleotide
cuucaguauugggcagugg

SEQ ID NO: 2883973 - RNA, 19 nt, Artificial Sequence
  Description of Artificial Sequence: Synthetic oligonucleotide
ccaaccucacaaaggugcc

SEQ ID NO: 2883974 - RNA, 19 nt, Artificial Sequence
  Description of Artificial Sequence: Synthetic oligonucleotide
gaucucuuggaaggcccac

SEQ ID NO: 2883975 - RNA, 19 nt, Artificial Sequence
  Description of Artificial Sequence: Synthetic oligonucleotide
ugcacagguggguguuugu

SEQ ID NO: 2883976 - RNA, 19 nt, Artificial Sequence
  Description of Artificial Sequence: Synthetic oligonucleotide
ucccauguaugcccaccau

SEQ ID NO: 2883977 - RNA, 19 nt, Artificial Sequence
  Description of Artificial Sequence: Synthetic oligonucleotide
ugaugcacgccaggcauuu

SEQ ID NO: 2883978 - RNA, 19 nt, Artificial Sequence
  Description of Artificial Sequence: Synthetic oligonucleotide
cucacaaaggugccaggaa

SEQ ID NO: 2883979 - RNA, 19 nt, Artificial Sequence
  Description of Artificial Sequence: Synthetic oligonucleotide
uugaaacagcuggucugcu

SEQ ID NO: 2883980 - RNA, 19 nt, Artificial Sequence
  Description of Artificial Sequence: Synthetic oligonucleotide
agccauagggccagggaga

SEQ ID NO: 2883981 - RNA, 19 nt, Artificial Sequence
  Description of Artificial Sequence: Synthetic oligonucleotide
gucugcuggagcuuaaauu

SEQ ID NO: 2883982 - RNA, 19 nt, Artificial Sequence
  Description of Artificial Sequence: Synthetic oligonucleotide
ccgaucucuuggaaggccc

SEQ ID NO: 2883983 - RNA, 19 nt, Artificial Sequence
  Description of Artificial Sequence: Synthetic oligonucleotide
ccauuugcuuugauuuuac

SEQ ID NO: 2883984 - RNA, 19 nt, Artificial Sequence
  Description of Artificial Sequence: Synthetic oligonucleotide
gucccauguaugcccacca

SEQ ID NO: 2883985 - RNA, 19 nt, Artificial Sequence
  Description of Artificial Sequence: Synthetic oligonucleotide
agcagguacuucauggcuu

SEQ ID NO: 2883986 - RNA, 19 nt, Artificial Sequence
  Description of Artificial Sequence: Synthetic oligonucleotide
ucgagcucugucccaugua

SEQ ID NO: 2883987 - RNA, 19 nt, Artificial Sequence
  Description of Artificial Sequence: Synthetic oligonucleotide
gaaguccuugcuucaguau

SEQ ID NO: 2883988 - RNA, 19 nt, Artificial Sequence
  Description of Artificial Sequence: Synthetic oligonucleotide
gcuuaaauuccaaccucac

SEQ ID NO: 2883989 - RNA, 19 nt, Artificial Sequence
  Description of Artificial Sequence: Synthetic oligonucleotide
ccugggguccaauuugaug

SEQ ID NO: 2883990 - RNA, 19 nt, Artificial Sequence
  Description of Artificial Sequence: Synthetic oligonucleotide
aucucuuggaaggcccacu

SEQ ID NO: 2883991 - RNA, 19 nt, Artificial Sequence
  Description of Artificial Sequence: Synthetic oligonucleotide
auuuccgcuuucucccauu

SEQ ID NO: 2883992 - RNA, 19 nt, Artificial Sequence
  Description of Artificial Sequence: Synthetic oligonucleotide
caguggaccauccggccca

SEQ ID NO: 2883993 - RNA, 19 nt, Artificial Sequence
  Description of Artificial Sequence: Synthetic oligonucleotide
accaugucguuagcguugu

SEQ ID NO: 2883994 - RNA, 19 nt, Artificial Sequence
  Description of Artificial Sequence: Synthetic oligonucleotide
guuguccacaccgaucucu

SEQ ID NO: 2883995 - RNA, 19 nt, Artificial Sequence
  Description of Artificial Sequence: Synthetic oligonucleotide
uuaccccugggguccaauu

SEQ ID NO: 2883996 - RNA, 19 nt, Artificial Sequence
  Description of Artificial Sequence: Synthetic oligonucleotide
ggacuccugaggcuccucc

SEQ ID NO: 2883997 - RNA, 19 nt, Artificial Sequence
  Description of Artificial Sequence: Synthetic oligonucleotide
uccugaggcuccuccugaa

SEQ ID NO: 2883998 - RNA, 19 nt, Artificial Sequence
  Description of Artificial Sequence: Synthetic oligonucleotide
ggcaguggaccauccggcc

SEQ ID NO: 2883999 - RNA, 19 nt, Artificial Sequence
  Description of Artificial Sequence: Synthetic oligonucleotide
gcaguggaccauccggccc

SEQ ID NO: 2884000 - RNA, 19 nt, Artificial Sequence
  Description of Artificial Sequence: Synthetic oligonucleotide
cccauguaugcccaccaug

SEQ ID NO: 2884001 - RNA, 19 nt, Artificial Sequence
  Description of Artificial Sequence: Synthetic oligonucleotide
uuucucccauuugcuuuga

SEQ ID NO: 2884002 - RNA, 19 nt, Artificial Sequence
  Description of Artificial Sequence: Synthetic oligonucleotide
gaaggcccacugcacaggu

SEQ ID NO: 2884003 - RNA, 19 nt, Artificial Sequence
  Description of Artificial Sequence: Synthetic oligonucleotide
uaugcccaccaugcccagc

SEQ ID NO: 2884004 - RNA, 19 nt, Artificial Sequence
  Description of Artificial Sequence: Synthetic oligonucleotide
ggagauuagcagguacuuc

SEQ ID NO: 2884005 - RNA, 19 nt, Artificial Sequence
  Description of Artificial Sequence: Synthetic oligonucleotide
guaugcccaccaugcccag

SEQ ID NO: 2884006 - RNA, 19 nt, Artificial Sequence
  Description of Artificial Sequence: Synthetic oligonucleotide
cccagaacuuuaccccugg

SEQ ID NO: 2884007 - RNA, 19 nt, Artificial Sequence
  Description of Artificial Sequence: Synthetic oligonucleotide
gcguuguccacaccgaucu

SEQ ID NO: 2884008 - RNA, 19 nt, Artificial Sequence
  Description of Artificial Sequence: Synthetic oligonucleotide
uucucccauuugcuuugau

SEQ ID NO: 2884009 - RNA, 19 nt, Artificial Sequence
  Description of Artificial Sequence: Synthetic oligonucleotide
acgccaggcauuuccgcuu

SEQ ID NO: 2884010 - RNA, 19 nt, Artificial Sequence
  Description of Artificial Sequence: Synthetic oligonucleotide
auccggcccagaacuuuac

SEQ ID NO: 2884011 - RNA, 19 nt, Artificial Sequence
  Description of Artificial Sequence: Synthetic oligonucleotide
caccgaucucuuggaaggc

SEQ ID NO: 2884012 - RNA, 19 nt, Artificial Sequence
  Description of Artificial Sequence: Synthetic oligonucleotide
cugcacagguggguguuug

SEQ ID NO: 2884013 - RNA, 19 nt, Artificial Sequence
  Description of Artificial Sequence: Synthetic oligonucleotide
cggcccagaacuuuacccc

SEQ ID NO: 2884014 - RNA, 19 nt, Artificial Sequence
  Description of Artificial Sequence: Synthetic oligonucleotide
cugaggcuccuccugaagu

SEQ ID NO: 2884015 - RNA, 19 nt, Artificial Sequence
  Description of Artificial Sequence: Synthetic oligonucleotide
ggaccauccggcccagaac

SEQ ID NO: 2884016 - RNA, 19 nt, Artificial Sequence
  Description of Artificial Sequence: Synthetic oligonucleotide
aaggcccacugcacaggug

SEQ ID NO: 2884017 - RNA, 19 nt, Artificial Sequence
  Description of Artificial Sequence: Synthetic oligonucleotide
ggaagaccaugucguuagc

SEQ ID NO: 2884018 - RNA, 19 nt, Artificial Sequence
  Description of Artificial Sequence: Synthetic oligonucleotide
ccaguccuucuugaaacag

SEQ ID NO: 2884019 - RNA, 19 nt, Artificial Sequence
  Description of Artificial Sequence: Synthetic oligonucleotide
uuuaccccugggguccaau

SEQ ID NO: 2884020 - RNA, 19 nt, Artificial Sequence
  Description of Artificial Sequence: Synthetic oligonucleotide
gugccaggaagaccauguc

SEQ ID NO: 2884021 - RNA, 19 nt, Artificial Sequence
  Description of Artificial Sequence: Synthetic oligonucleotide
gggcaguggaccauccggc

SEQ ID NO: 2884022 - RNA, 19 nt, Artificial Sequence
  Description of Artificial Sequence: Synthetic oligonucleotide
gcuucaguauugggcagug

SEQ ID NO: 2884023 - RNA, 19 nt, Artificial Sequence
  Description of Artificial Sequence: Synthetic oligonucleotide
uccucgccagccuguguua

SEQ ID NO: 2884024 - RNA, 19 nt, Artificial Sequence
  Description of Artificial Sequence: Synthetic oligonucleotide
ccugcgcugugucucacug

SEQ ID NO: 2884025 - RNA, 19 nt, Artificial Sequence
  Description of Artificial Sequence: Synthetic oligonucleotide
cuccugaggcuccuccuga

SEQ ID NO: 2884026 - RNA, 19 nt, Artificial Sequence
  Description of Artificial Sequence: Synthetic oligonucleotide
guggguguuuguggaacuc

SEQ ID NO: 2884027 - RNA, 19 nt, Artificial Sequence
  Description of Artificial Sequence: Synthetic oligonucleotide
agcucgagcucugucccau

SEQ ID NO: 2884028 - RNA, 19 nt, Artificial Sequence
  Description of Artificial Sequence: Synthetic oligonucleotide
ugcccaccaugcccagcca

SEQ ID NO: 2884029 - RNA, 19 nt, Artificial Sequence
  Description of Artificial Sequence: Synthetic oligonucleotide
gccaggaagaccaugucgu

SEQ ID NO: 2884030 - RNA, 19 nt, Artificial Sequence
  Description of Artificial Sequence: Synthetic oligonucleotide
ccagaacuuuaccccuggg

SEQ ID NO: 2884031 - RNA, 19 nt, Artificial Sequence
  Description of Artificial Sequence: Synthetic oligonucleotide
cucgccagccuguguuauc

SEQ ID NO: 2884032 - RNA, 19 nt, Artificial Sequence
  Description of Artificial Sequence: Synthetic oligonucleotide
ggcuucacguuagaccuuc

SEQ ID NO: 2884033 - RNA, 19 nt, Artificial Sequence
  Description of Artificial Sequence: Synthetic oligonucleotide
aggugccaggaagaccaug

SEQ ID NO: 2884034 - RNA, 19 nt, Artificial Sequence
  Description of Artificial Sequence: Synthetic oligonucleotide
uggucugcuggagcuuaaa

SEQ ID NO: 2884035 - RNA, 19 nt, Artificial Sequence
  Description of Artificial Sequence: Synthetic oligonucleotide
gcacagguggguguuugug

SEQ ID NO: 2884036 - RNA, 19 nt, Artificial Sequence
  Description of Artificial Sequence: Synthetic oligonucleotide
uggcuucacguuagaccuu

SEQ ID NO: 2884037 - RNA, 19 nt, Artificial Sequence
  Description of Artificial Sequence: Synthetic oligonucleotide
gcucugucccauguaugcc

SEQ ID NO: 2884038 - RNA, 19 nt, Artificial Sequence
  Description of Artificial Sequence: Synthetic oligonucleotide
ccugaaguccuugcuucag

SEQ ID NO: 2884039 - RNA, 19 nt, Artificial Sequence
  Description of Artificial Sequence: Synthetic oligonucleotide
auuuuacacucgggguuuu

SEQ ID NO: 2884040 - RNA, 19 nt, Artificial Sequence
  Description of Artificial Sequence: Synthetic oligonucleotide
gagcucgagcucuguccca

SEQ ID NO: 2884041 - RNA, 19 nt, Artificial Sequence
  Description of Artificial Sequence: Synthetic oligonucleotide
gcuuucucccauuugcuuu

SEQ ID NO: 2884042 - RNA, 19 nt, Artificial Sequence
  Description of Artificial Sequence: Synthetic oligonucleotide
cauccggcccagaacuuua

SEQ ID NO: 2884043 - RNA, 19 nt, Artificial Sequence
  Description of Artificial Sequence: Synthetic oligonucleotide
augcccagccauagggcca

SEQ ID NO: 2884044 - RNA, 19 nt, Artificial Sequence
  Description of Artificial Sequence: Synthetic oligonucleotide
auagggccagggagauuag

SEQ ID NO: 2884045 - RNA, 19 nt, Artificial Sequence
  Description of Artificial Sequence: Synthetic oligonucleotide
caggaagaccaugucguua

SEQ ID NO: 2884046 - RNA, 19 nt, Artificial Sequence
  Description of Artificial Sequence: Synthetic oligonucleotide
cacgccaggcauuuccgcu

SEQ ID NO: 2884047 - RNA, 19 nt, Artificial Sequence
  Description of Artificial Sequence: Synthetic oligonucleotide
cugaaguccuugcuucagu

SEQ ID NO: 2884048 - RNA, 19 nt, Artificial Sequence
  Description of Artificial Sequence: Synthetic oligonucleotide
gguguuuguggaacuccuc

SEQ ID NO: 2884049 - RNA, 19 nt, Artificial Sequence
  Description of Artificial Sequence: Synthetic oligonucleotide
caaccucacaaaggugcca

SEQ ID NO: 2884050 - RNA, 19 nt, Artificial Sequence
  Description of Artificial Sequence: Synthetic oligonucleotide
gccaccugcaggccccugc

SEQ ID NO: 2884051 - RNA, 19 nt, Artificial Sequence
  Description of Artificial Sequence: Synthetic oligonucleotide
ccugaggcuccuccugaag

SEQ ID NO: 2884052 - RNA, 19 nt, Artificial Sequence
  Description of Artificial Sequence: Synthetic oligonucleotide
cagcuggucugcuggagcu

SEQ ID NO: 2884053 - RNA, 19 nt, Artificial Sequence
  Description of Artificial Sequence: Synthetic oligonucleotide
gcacgccaggcauuuccgc

SEQ ID NO: 2884054 - RNA, 19 nt, Artificial Sequence
  Description of Artificial Sequence: Synthetic oligonucleotide
gugucucacugagcucgag

SEQ ID NO: 2884055 - RNA, 19 nt, Artificial Sequence
  Description of Artificial Sequence: Synthetic oligonucleotide
ccuauugcacugggacucc

SEQ ID NO: 2884056 - RNA, 19 nt, Artificial Sequence
  Description of Artificial Sequence: Synthetic oligonucleotide
gcugugucucacugagcuc

SEQ ID NO: 2884057 - RNA, 19 nt, Artificial Sequence
  Description of Artificial Sequence: Synthetic oligonucleotide
ugcaggccccugcgcugug

SEQ ID NO: 2884058 - RNA, 19 nt, Artificial Sequence
  Description of Artificial Sequence: Synthetic oligonucleotide
aggcuccuccugaaguccu

SEQ ID NO: 2884059 - RNA, 19 nt, Artificial Sequence
  Description of Artificial Sequence: Synthetic oligonucleotide
acuuuaccccuggggucca

SEQ ID NO: 2884060 - RNA, 19 nt, Artificial Sequence
  Description of Artificial Sequence: Synthetic oligonucleotide
caggccccugcgcuguguc

SEQ ID NO: 2884061 - RNA, 19 nt, Artificial Sequence
  Description of Artificial Sequence: Synthetic oligonucleotide
gcauuuccgcuuucuccca

SEQ ID NO: 2884062 - RNA, 19 nt, Artificial Sequence
  Description of Artificial Sequence: Synthetic oligonucleotide
guccucgccagccuguguu

SEQ ID NO: 2884063 - RNA, 19 nt, Artificial Sequence
  Description of Artificial Sequence: Synthetic oligonucleotide
cugcgcugugucucacuga

SEQ ID NO: 2884064 - RNA, 19 nt, Artificial Sequence
  Description of Artificial Sequence: Synthetic oligonucleotide
cucgagcucugucccaugu

SEQ ID NO: 2884065 - RNA, 19 nt, Artificial Sequence
  Description of Artificial Sequence: Synthetic oligonucleotide
aaggugccaggaagaccau

SEQ ID NO: 2884066 - RNA, 19 nt, Artificial Sequence
  Description of Artificial Sequence: Synthetic oligonucleotide
cccacugcacaggugggug

SEQ ID NO: 2884067 - RNA, 19 nt, Artificial Sequence
  Description of Artificial Sequence: Synthetic oligonucleotide
ccuucuugaaacagcuggu

SEQ ID NO: 2884068 - RNA, 19 nt, Artificial Sequence
  Description of Artificial Sequence: Synthetic oligonucleotide
ccucacaaaggugccagga

SEQ ID NO: 2884069 - RNA, 19 nt, Artificial Sequence
  Description of Artificial Sequence: Synthetic oligonucleotide
gggguccaauuugaugcac

SEQ ID NO: 2884070 - RNA, 19 nt, Artificial Sequence
  Description of Artificial Sequence: Synthetic oligonucleotide
ggucugcuggagcuuaaau

SEQ ID NO: 2884071 - RNA, 19 nt, Artificial Sequence
  Description of Artificial Sequence: Synthetic oligonucleotide
acugcacagguggguguuu

SEQ ID NO: 2884072 - RNA, 19 nt, Artificial Sequence
  Description of Artificial Sequence: Synthetic oligonucleotide
cgcugugucucacugagcu

SEQ ID NO: 2884073 - RNA, 19 nt, Artificial Sequence
  Description of Artificial Sequence: Synthetic oligonucleotide
gcuggagcuuaaauuccaa

SEQ ID NO: 2884074 - RNA, 19 nt, Artificial Sequence
  Description of Artificial Sequence: Synthetic oligonucleotide
cccauuugcuuugauuuua

SEQ ID NO: 2884075 - RNA, 19 nt, Artificial Sequence
  Description of Artificial Sequence: Synthetic oligonucleotide
ggguguuuguggaacuccu

SEQ ID NO: 2884076 - RNA, 19 nt, Artificial Sequence
  Description of Artificial Sequence: Synthetic oligonucleotide
gccagggagauuagcaggu

SEQ ID NO: 2884077 - RNA, 19 nt, Artificial Sequence
  Description of Artificial Sequence: Synthetic oligonucleotide
cacugggacuccugaggcu

SEQ ID NO: 2884078 - RNA, 19 nt, Artificial Sequence
  Description of Artificial Sequence: Synthetic oligonucleotide
cuggucugcuggagcuuaa

SEQ ID NO: 2884079 - RNA, 19 nt, Artificial Sequence
  Description of Artificial Sequence: Synthetic oligonucleotide
agcuggucugcuggagcuu

SEQ ID NO: 2884080 - RNA, 19 nt, Artificial Sequence
  Description of Artificial Sequence: Synthetic oligonucleotide
gccagccuguguuauccua

SEQ ID NO: 2884081 - RNA, 19 nt, Artificial Sequence
  Description of Artificial Sequence: Synthetic oligonucleotide
ggccccugcgcugugucuc

SEQ ID NO: 2884082 - RNA, 19 nt, Artificial Sequence
  Description of Artificial Sequence: Synthetic oligonucleotide
gcucgagcucugucccaug

SEQ ID NO: 2884083 - RNA, 19 nt, Artificial Sequence
  Description of Artificial Sequence: Synthetic oligonucleotide
gggagauuagcagguacuu

SEQ ID NO: 2884084 - RNA, 19 nt, Artificial Sequence
  Description of Artificial Sequence: Synthetic oligonucleotide
guauugggcaguggaccau

SEQ ID NO: 2884085 - RNA, 19 nt, Artificial Sequence
  Description of Artificial Sequence: Synthetic oligonucleotide
cagguacuucauggcuuca

SEQ ID NO: 2884086 - RNA, 19 nt, Artificial Sequence
  Description of Artificial Sequence: Synthetic oligonucleotide
cauuuccgcuuucucccau

SEQ ID NO: 2884087 - RNA, 19 nt, Artificial Sequence
  Description of Artificial Sequence: Synthetic oligonucleotide
gcuggucugcuggagcuua

SEQ ID NO: 2884088 - RNA, 19 nt, Artificial Sequence
  Description of Artificial Sequence: Synthetic oligonucleotide
accauccggcccagaacuu

SEQ ID NO: 2884089 - RNA, 19 nt, Artificial Sequence
  Description of Artificial Sequence: Synthetic oligonucleotide
ccccugggguccaauuuga

SEQ ID NO: 2884090 - RNA, 19 nt, Artificial Sequence
  Description of Artificial Sequence: Synthetic oligonucleotide
cguuagaccuucugguccu

SEQ ID NO: 2884091 - RNA, 19 nt, Artificial Sequence
  Description of Artificial Sequence: Synthetic oligonucleotide
cuauugcacugggacuccu

SEQ ID NO: 2884092 - RNA, 19 nt, Artificial Sequence
  Description of Artificial Sequence: Synthetic oligonucleotide
cgaucucuuggaaggccca

SEQ ID NO: 2884093 - RNA, 19 nt, Artificial Sequence
  Description of Artificial Sequence: Synthetic oligonucleotide
cagccuguguuauccuauu

SEQ ID NO: 2884094 - RNA, 19 nt, Artificial Sequence
  Description of Artificial Sequence: Synthetic oligonucleotide
ccagccuguguuauccuau

SEQ ID NO: 2884095 - RNA, 19 nt, Artificial Sequence
  Description of Artificial Sequence: Synthetic oligonucleotide
ggguccucgccagccugug

SEQ ID NO: 2884096 - RNA, 19 nt, Artificial Sequence
  Description of Artificial Sequence: Synthetic oligonucleotide
cccaccaugcccagccaua

SEQ ID NO: 2884097 - RNA, 19 nt, Artificial Sequence
  Description of Artificial Sequence: Synthetic oligonucleotide
cguuagcguuguccacacc

SEQ ID NO: 2884098 - RNA, 19 nt, Artificial Sequence
  Description of Artificial Sequence: Synthetic oligonucleotide
gcgcugugucucacugagc

SEQ ID NO: 2884099 - RNA, 19 nt, Artificial Sequence
  Description of Artificial Sequence: Synthetic oligonucleotide
ccgcuuucucccauuugcu

SEQ ID NO: 2884100 - RNA, 19 nt, Artificial Sequence
  Description of Artificial Sequence: Synthetic oligonucleotide
gccccugcgcugugucuca

SEQ ID NO: 2884101 - RNA, 19 nt, Artificial Sequence
  Description of Artificial Sequence: Synthetic oligonucleotide
cacugcacagguggguguu

SEQ ID NO: 2884102 - RNA, 19 nt, Artificial Sequence
  Description of Artificial Sequence: Synthetic oligonucleotide
ccacaccgaucucuuggaa

SEQ ID NO: 2884103 - RNA, 19 nt, Artificial Sequence
  Description of Artificial Sequence: Synthetic oligonucleotide
gccaggcauuuccgcuuuc

SEQ ID NO: 2884104 - RNA, 19 nt, Artificial Sequence
  Description of Artificial Sequence: Synthetic oligonucleotide
gccauagggccagggagau

SEQ ID NO: 2884105 - RNA, 19 nt, Artificial Sequence
  Description of Artificial Sequence: Synthetic oligonucleotide
guuagaccuucugguccuu

SEQ ID NO: 2884106 - RNA, 19 nt, Artificial Sequence
  Description of Artificial Sequence: Synthetic oligonucleotide
cugcaggccccugcgcugu

SEQ ID NO: 2884107 - RNA, 19 nt, Artificial Sequence
  Description of Artificial Sequence: Synthetic oligonucleotide
cuuuaccccugggguccaa

SEQ ID NO: 2884108 - RNA, 19 nt, Artificial Sequence
  Description of Artificial Sequence: Synthetic oligonucleotide
cguuguccacaccgaucuc

SEQ ID NO: 2884109 - RNA, 19 nt, Artificial Sequence
  Description of Artificial Sequence: Synthetic oligonucleotide
ccaggcauuuccgcuuucu

SEQ ID NO: 2884110 - RNA, 19 nt, Artificial Sequence
  Description of Artificial Sequence: Synthetic oligonucleotide
gggacuccugaggcuccuc

SEQ ID NO: 2884111 - RNA, 19 nt, Artificial Sequence
  Description of Artificial Sequence: Synthetic oligonucleotide
ccacugcacaggugggugu

SEQ ID NO: 2884112 - RNA, 19 nt, Artificial Sequence
  Description of Artificial Sequence: Synthetic oligonucleotide
gcccaccaugcccagccau

SEQ ID NO: 2884113 - RNA, 19 nt, Artificial Sequence
  Description of Artificial Sequence: Synthetic oligonucleotide
ccaugucguuagcguuguc

SEQ ID NO: 2884114 - RNA, 19 nt, Artificial Sequence
  Description of Artificial Sequence: Synthetic oligonucleotide
cacugagcucgagcucugu

SEQ ID NO: 2884115 - RNA, 19 nt, Artificial Sequence
  Description of Artificial Sequence: Synthetic oligonucleotide
gguccucgccagccugugu

SEQ ID NO: 2884116 - RNA, 19 nt, Artificial Sequence
  Description of Artificial Sequence: Synthetic oligonucleotide
guggaccauccggcccaga

SEQ ID NO: 2884117 - RNA, 19 nt, Artificial Sequence
  Description of Artificial Sequence: Synthetic oligonucleotide
ccaggaagaccaugucguu

SEQ ID NO: 2884118 - RNA, 19 nt, Artificial Sequence
  Description of Artificial Sequence: Synthetic oligonucleotide
ccagggagauuagcaggua

SEQ ID NO: 2884119 - RNA, 19 nt, Artificial Sequence
  Description of Artificial Sequence: Synthetic oligonucleotide
gcccacugcacaggugggu

SEQ ID NO: 2884120 - RNA, 19 nt, Artificial Sequence
  Description of Artificial Sequence: Synthetic oligonucleotide
cgcuuucucccauuugcuu

SEQ ID NO: 2884121 - RNA, 19 nt, Artificial Sequence
  Description of Artificial Sequence: Synthetic oligonucleotide
gcuucacguuagaccuucu

SEQ ID NO: 2884122 - RNA, 19 nt, Artificial Sequence
  Description of Artificial Sequence: Synthetic oligonucleotide
gcccagccauagggccagg

SEQ ID NO: 2884123 - RNA, 19 nt, Artificial Sequence
  Description of Artificial Sequence: Synthetic oligonucleotide
ggccaccugcaggccccug

SEQ ID NO: 2884124 - RNA, 19 nt, Artificial Sequence
  Description of Artificial Sequence: Synthetic oligonucleotide
ccccugcgcugugucucac

SEQ ID NO: 2884125 - RNA, 19 nt, Artificial Sequence
  Description of Artificial Sequence: Synthetic oligonucleotide
ccauccggcccagaacuuu

SEQ ID NO: 2884126 - RNA, 19 nt, Artificial Sequence
  Description of Artificial Sequence: Synthetic oligonucleotide
cccugggguccaauuugau

SEQ ID NO: 2884127 - RNA, 19 nt, Artificial Sequence
  Description of Artificial Sequence: Synthetic oligonucleotide
cccugcgcugugucucacu

SEQ ID NO: 2884128 - RNA, 19 nt, Artificial Sequence
  Description of Artificial Sequence: Synthetic oligonucleotide
gcaggccccugcgcugugu

SEQ ID NO: 2884129 - RNA, 19 nt, Artificial Sequence
  Description of Artificial Sequence: Synthetic oligonucleotide
ccucgccagccuguguuau

SEQ ID NO: 2884130 - RNA, 19 nt, Artificial Sequence
  Description of Artificial Sequence: Synthetic oligonucleotide
cgccagccuguguuauccu

SEQ ID NO: 2884131 - RNA, 19 nt, Artificial Sequence
  Description of Artificial Sequence: Synthetic oligonucleotide
cgccaggcauuuccgcuuu

SEQ ID NO: 2884132 - RNA, 19 nt, Artificial Sequence
  Description of Artificial Sequence: Synthetic oligonucleotide
ccauagggccagggagauu

SEQ ID NO: 2884133 - RNA, 19 nt, Artificial Sequence
  Description of Artificial Sequence: Synthetic oligonucleotide
aagacuuuuauuuuccugg

SEQ ID NO: 2884134 - RNA, 19 nt, Artificial Sequence
  Description of Artificial Sequence: Synthetic oligonucleotide
uguagguuggcauagaaga

SEQ ID NO: 2884135 - RNA, 19 nt, Artificial Sequence
  Description of Artificial Sequence: Synthetic oligonucleotide
acuuuuauuuuccuggcgg

SEQ ID NO: 2884136 - RNA, 19 nt, Artificial Sequence
  Description of Artificial Sequence: Synthetic oligonucleotide
gaugcuaccguguagguug

SEQ ID NO: 2884137 - RNA, 19 nt, Artificial Sequence
  Description of Artificial Sequence: Synthetic oligonucleotide
aguaaaagcugugaagggc

SEQ ID NO: 2884138 - RNA, 19 nt, Artificial Sequence
  Description of Artificial Sequence: Synthetic oligonucleotide
caugccauagggcagauag

SEQ ID NO: 2884139 - RNA, 19 nt, Artificial Sequence
  Description of Artificial Sequence: Synthetic oligonucleotide
aaagacuuuuauuuuccug

SEQ ID NO: 2884140 - RNA, 19 nt, Artificial Sequence
  Description of Artificial Sequence: Synthetic oligonucleotide
aaugggugggcucagguca

SEQ ID NO: 2884141 - RNA, 19 nt, Artificial Sequence
  Description of Artificial Sequence: Synthetic oligonucleotide
aagccgaugaccgugagag

SEQ ID NO: 2884142 - RNA, 19 nt, Artificial Sequence
  Description of Artificial Sequence: Synthetic oligonucleotide
agacuuuuauuuuccuggc

SEQ ID NO: 2884143 - RNA, 19 nt, Artificial Sequence
  Description of Artificial Sequence: Synthetic oligonucleotide
aagaggaagcgcacgaggc

SEQ ID NO: 2884144 - RNA, 19 nt, Artificial Sequence
  Description of Artificial Sequence: Synthetic oligonucleotide
uuggcauagaagaggaagc

SEQ ID NO: 2884145 - RNA, 19 nt, Artificial Sequence
  Description of Artificial Sequence: Synthetic oligonucleotide
ggucauagcagacagugcg

SEQ ID NO: 2884146 - RNA, 19 nt, Artificial Sequence
  Description of Artificial Sequence: Synthetic oligonucleotide
agagccaugccauagggca

SEQ ID NO: 2884147 - RNA, 19 nt, Artificial Sequence
  Description of Artificial Sequence: Synthetic oligonucleotide
ugccauagggcagauagcg

SEQ ID NO: 2884148 - RNA, 19 nt, Artificial Sequence
  Description of Artificial Sequence: Synthetic oligonucleotide
gaagaggaagcgcacgagg

SEQ ID NO: 2884149 - RNA, 19 nt, Artificial Sequence
  Description of Artificial Sequence: Synthetic oligonucleotide
gucacaaccagccacacga

SEQ ID NO: 2884150 - RNA, 19 nt, Artificial Sequence
  Description of Artificial Sequence: Synthetic oligonucleotide
uggaagcuaaugcagguga

SEQ ID NO: 2884151 - RNA, 19 nt, Artificial Sequence
  Description of Artificial Sequence: Synthetic oligonucleotide
aaaagacuuuuauuuuccu

SEQ ID NO: 2884152 - RNA, 19 nt, Artificial Sequence
  Description of Artificial Sequence: Synthetic oligonucleotide
uagcaggccaguaaaagcu

SEQ ID NO: 2884153 - RNA, 19 nt, Artificial Sequence
  Description of Artificial Sequence: Synthetic oligonucleotide
caggcaaugucuccgaagg

SEQ ID NO: 2884154 - RNA, 19 nt, Artificial Sequence
  Description of Artificial Sequence: Synthetic oligonucleotide
uuuuauuuuccuggcggcg

SEQ ID NO: 2884155 - RNA, 19 nt, Artificial Sequence
  Description of Artificial Sequence: Synthetic oligonucleotide
guuggcauagaagaggaag

SEQ ID NO: 2884156 - RNA, 19 nt, Artificial Sequence
  Description of Artificial Sequence: Synthetic oligonucleotide
agcugucacaaccagccac

SEQ ID NO: 2884157 - RNA, 19 nt, Artificial Sequence
  Description of Artificial Sequence: Synthetic oligonucleotide
auagcgggcggacagaaug

SEQ ID NO: 2884158 - RNA, 19 nt, Artificial Sequence
  Description of Artificial Sequence: Synthetic oligonucleotide
cacgacuccacauaccacc

SEQ ID NO: 2884159 - RNA, 19 nt, Artificial Sequence
  Description of Artificial Sequence: Synthetic oligonucleotide
cuuuuauuuuccuggcggc

SEQ ID NO: 2884160 - RNA, 19 nt, Artificial Sequence
  Description of Artificial Sequence: Synthetic oligonucleotide
augaccgugagagccaugc

SEQ ID NO: 2884161 - RNA, 19 nt, Artificial Sequence
  Description of Artificial Sequence: Synthetic oligonucleotide
agcaagaagccgaugaccg

SEQ ID NO: 2884162 - RNA, 19 nt, Artificial Sequence
  Description of Artificial Sequence: Synthetic oligonucleotide
aagauugcugugggcaggc

SEQ ID NO: 2884163 - RNA, 19 nt, Artificial Sequence
  Description of Artificial Sequence: Synthetic oligonucleotide
aaaagcugugaagggcagc

SEQ ID NO: 2884164 - RNA, 19 nt, Artificial Sequence
  Description of Artificial Sequence: Synthetic oligonucleotide
aaagauugcugugggcagg

SEQ ID NO: 2884165 - RNA, 19 nt, Artificial Sequence
  Description of Artificial Sequence: Synthetic oligonucleotide
acagauacccagguagcgc

SEQ ID NO: 2884166 - RNA, 19 nt, Artificial Sequence
  Description of Artificial Sequence: Synthetic oligonucleotide
uagaagaggaagcgcacga

SEQ ID NO: 2884167 - RNA, 19 nt, Artificial Sequence
  Description of Artificial Sequence: Synthetic oligonucleotide
ugacagauacccagguagc

SEQ ID NO: 2884168 - RNA, 19 nt, Artificial Sequence
  Description of Artificial Sequence: Synthetic oligonucleotide
ucuccgaagggccaguggu

SEQ ID NO: 2884169 - RNA, 19 nt, Artificial Sequence
  Description of Artificial Sequence: Synthetic oligonucleotide
auaccacccaggcagcacg

SEQ ID NO: 2884170 - RNA, 19 nt, Artificial Sequence
  Description of Artificial Sequence: Synthetic oligonucleotide
guagcaggccaguaaaagc

SEQ ID NO: 2884171 - RNA, 19 nt, Artificial Sequence
  Description of Artificial Sequence: Synthetic oligonucleotide
ccaguaaaagcugugaagg

SEQ ID NO: 2884172 - RNA, 19 nt, Artificial Sequence
  Description of Artificial Sequence: Synthetic oligonucleotide
uggcauagaagaggaagcg

SEQ ID NO: 2884173 - RNA, 19 nt, Artificial Sequence
  Description of Artificial Sequence: Synthetic oligonucleotide
aagcuaaugcaggugagga

SEQ ID NO: 2884174 - RNA, 19 nt, Artificial Sequence
  Description of Artificial Sequence: Synthetic oligonucleotide
gaagcuaaugcaggugagg

SEQ ID NO: 2884175 - RNA, 19 nt, Artificial Sequence
  Description of Artificial Sequence: Synthetic oligonucleotide
caguaaaagcugugaaggg

SEQ ID NO: 2884176 - RNA, 19 nt, Artificial Sequence
  Description of Artificial Sequence: Synthetic oligonucleotide
uuuauuuuccuggcggcga

SEQ ID NO: 2884177 - RNA, 19 nt, Artificial Sequence
  Description of Artificial Sequence: Synthetic oligonucleotide
uagcgcuggaagcuaaugc

SEQ ID NO: 2884178 - RNA, 19 nt, Artificial Sequence
  Description of Artificial Sequence: Synthetic oligonucleotide
gacuccacauaccacccag

SEQ ID NO: 2884179 - RNA, 19 nt, Artificial Sequence
  Description of Artificial Sequence: Synthetic oligonucleotide
ugugggcaggcacugagcu

SEQ ID NO: 2884180 - RNA, 19 nt, Artificial Sequence
  Description of Artificial Sequence: Synthetic oligonucleotide
aguagcaggccaguaaaag

SEQ ID NO: 2884181 - RNA, 19 nt, Artificial Sequence
  Description of Artificial Sequence: Synthetic oligonucleotide
uuuccuggcggcgacaggc

SEQ ID NO: 2884182 - RNA, 19 nt, Artificial Sequence
  Description of Artificial Sequence: Synthetic oligonucleotide
ugaggaacaggaugcuacc

SEQ ID NO: 2884183 - RNA, 19 nt, Artificial Sequence
  Description of Artificial Sequence: Synthetic oligonucleotide
ccacauaccacccaggcag

SEQ ID NO: 2884184 - RNA, 19 nt, Artificial Sequence
  Description of Artificial Sequence: Synthetic oligonucleotide
auagaagaggaagcgcacg

SEQ ID NO: 2884185 - RNA, 19 nt, Artificial Sequence
  Description of Artificial Sequence: Synthetic oligonucleotide
agcgcuggaagcuaaugca

SEQ ID NO: 2884186 - RNA, 19 nt, Artificial Sequence
  Description of Artificial Sequence: Synthetic oligonucleotide
caaagauugcugugggcag

SEQ ID NO: 2884187 - RNA, 19 nt, Artificial Sequence
  Description of Artificial Sequence: Synthetic oligonucleotide
gacagauacccagguagcg

SEQ ID NO: 2884188 - RNA, 19 nt, Artificial Sequence
  Description of Artificial Sequence: Synthetic oligonucleotide
auagcagacagugcgguug

SEQ ID NO: 2884189 - RNA, 19 nt, Artificial Sequence
  Description of Artificial Sequence: Synthetic oligonucleotide
ugugccagggugccagggg

SEQ ID NO: 2884190 - RNA, 19 nt, Artificial Sequence
  Description of Artificial Sequence: Synthetic oligonucleotide
caggaugcuaccguguagg

SEQ ID NO: 2884191 - RNA, 19 nt, Artificial Sequence
  Description of Artificial Sequence: Synthetic oligonucleotide
aaugucuccgaagggccag

SEQ ID NO: 2884192 - RNA, 19 nt, Artificial Sequence
  Description of Artificial Sequence: Synthetic oligonucleotide
ugucacaaccagccacacg

SEQ ID NO: 2884193 - RNA, 19 nt, Artificial Sequence
  Description of Artificial Sequence: Synthetic oligonucleotide
acaaccagccacacgacuc

SEQ ID NO: 2884194 - RNA, 19 nt, Artificial Sequence
  Description of Artificial Sequence: Synthetic oligonucleotide
agcugugaagggcagcaag

SEQ ID NO: 2884195 - RNA, 19 nt, Artificial Sequence
  Description of Artificial Sequence: Synthetic oligonucleotide
acaggcggcgggccgaugc

SEQ ID NO: 2884196 - RNA, 19 nt, Artificial Sequence
  Description of Artificial Sequence: Synthetic oligonucleotide
guaaaagcugugaagggca

SEQ ID NO: 2884197 - RNA, 19 nt, Artificial Sequence
  Description of Artificial Sequence: Synthetic oligonucleotide
agugcgguugcgcuggaug

SEQ ID NO: 2884198 - RNA, 19 nt, Artificial Sequence
  Description of Artificial Sequence: Synthetic oligonucleotide
cauagaagaggaagcgcac

SEQ ID NO: 2884199 - RNA, 19 nt, Artificial Sequence
  Description of Artificial Sequence: Synthetic oligonucleotide
ugggcucaggucauagcag

SEQ ID NO: 2884200 - RNA, 19 nt, Artificial Sequence
  Description of Artificial Sequence: Synthetic oligonucleotide
gacagugcgguugcgcugg

SEQ ID NO: 2884201 - RNA, 19 nt, Artificial Sequence
  Description of Artificial Sequence: Synthetic oligonucleotide
uuauuuuccuggcggcgac

SEQ ID NO: 2884202 - RNA, 19 nt, Artificial Sequence
  Description of Artificial Sequence: Synthetic oligonucleotide
aagggcagcaagaagccga

SEQ ID NO: 2884203 - RNA, 19 nt, Artificial Sequence
  Description of Artificial Sequence: Synthetic oligonucleotide
gaugccuguggccgcaaag

SEQ ID NO: 2884204 - RNA, 19 nt, Artificial Sequence
  Description of Artificial Sequence: Synthetic oligonucleotide
ccuguggccgcaaagauug

SEQ ID NO: 2884205 - RNA, 19 nt, Artificial Sequence
  Description of Artificial Sequence: Synthetic oligonucleotide
aacaggaugcuaccgugua

SEQ ID NO: 2884206 - RNA, 19 nt, Artificial Sequence
  Description of Artificial Sequence: Synthetic oligonucleotide
uagcgggcggacagaaugg

SEQ ID NO: 2884207 - RNA, 19 nt, Artificial Sequence
  Description of Artificial Sequence: Synthetic oligonucleotide
gauugcugugggcaggcac

SEQ ID NO: 2884208 - RNA, 19 nt, Artificial Sequence
  Description of Artificial Sequence: Synthetic oligonucleotide
cauagggcagauagcgggc

SEQ ID NO: 2884209 - RNA, 19 nt, Artificial Sequence
  Description of Artificial Sequence: Synthetic oligonucleotide
ccauagggcagauagcggg

SEQ ID NO: 2884210 - RNA, 19 nt, Artificial Sequence
  Description of Artificial Sequence: Synthetic oligonucleotide
aggaacaggaugcuaccgu

SEQ ID NO: 2884211 - RNA, 19 nt, Artificial Sequence
  Description of Artificial Sequence: Synthetic oligonucleotide
ugcgcuggaugccuguggc

SEQ ID NO: 2884212 - RNA, 19 nt, Artificial Sequence
  Description of Artificial Sequence: Synthetic oligonucleotide
cuccacauaccacccaggc

SEQ ID NO: 2884213 - RNA, 19 nt, Artificial Sequence
  Description of Artificial Sequence: Synthetic oligonucleotide
ugggcaggcacugagcugu

SEQ ID NO: 2884214 - RNA, 19 nt, Artificial Sequence
  Description of Artificial Sequence: Synthetic oligonucleotide
gugaggaacaggaugcuac

SEQ ID NO: 2884215 - RNA, 19 nt, Artificial Sequence
  Description of Artificial Sequence: Synthetic oligonucleotide
gccaguaaaagcugugaag

SEQ ID NO: 2884216 - RNA, 19 nt, Artificial Sequence
  Description of Artificial Sequence: Synthetic oligonucleotide
gaccgugagagccaugcca

SEQ ID NO: 2884217 - RNA, 19 nt, Artificial Sequence
  Description of Artificial Sequence: Synthetic oligonucleotide
gauacccagguagcgcugg

SEQ ID NO: 2884218 - RNA, 19 nt, Artificial Sequence
  Description of Artificial Sequence: Synthetic oligonucleotide
agaaugggugggcucaggu

SEQ ID NO: 2884219 - RNA, 19 nt, Artificial Sequence
  Description of Artificial Sequence: Synthetic oligonucleotide
gaggaacaggaugcuaccg

SEQ ID NO: 2884220 - RNA, 19 nt, Artificial Sequence
  Description of Artificial Sequence: Synthetic oligonucleotide
gugagagccaugccauagg

SEQ ID NO: 2884221 - RNA, 19 nt, Artificial Sequence
  Description of Artificial Sequence: Synthetic oligonucleotide
acccagguagcgcuggaag

SEQ ID NO: 2884222 - RNA, 19 nt, Artificial Sequence
  Description of Artificial Sequence: Synthetic oligonucleotide
cacgcuugugccagggugc

SEQ ID NO: 2884223 - RNA, 19 nt, Artificial Sequence
  Description of Artificial Sequence: Synthetic oligonucleotide
uugcgcuggaugccugugg

SEQ ID NO: 2884224 - RNA, 19 nt, Artificial Sequence
  Description of Artificial Sequence: Synthetic oligonucleotide
ugcggcaguagcaggccag

SEQ ID NO: 2884225 - RNA, 19 nt, Artificial Sequence
  Description of Artificial Sequence: Synthetic oligonucleotide
guagguuggcauagaagag

SEQ ID NO: 2884226 - RNA, 19 nt, Artificial Sequence
  Description of Artificial Sequence: Synthetic oligonucleotide
ucauagcagacagugcggu

SEQ ID NO: 2884227 - RNA, 19 nt, Artificial Sequence
  Description of Artificial Sequence: Synthetic oligonucleotide
acaggaugcuaccguguag

SEQ ID NO: 2884228 - RNA, 19 nt, Artificial Sequence
  Description of Artificial Sequence: Synthetic oligonucleotide
caaccagccacacgacucc

SEQ ID NO: 2884229 - RNA, 19 nt, Artificial Sequence
  Description of Artificial Sequence: Synthetic oligonucleotide
cacacgacuccacauacca

SEQ ID NO: 2884230 - RNA, 19 nt, Artificial Sequence
  Description of Artificial Sequence: Synthetic oligonucleotide
gcuaaugcaggugaggaac

SEQ ID NO: 2884231 - RNA, 19 nt, Artificial Sequence
  Description of Artificial Sequence: Synthetic oligonucleotide
gacagaaugggugggcuca

SEQ ID NO: 2884232 - RNA, 19 nt, Artificial Sequence
  Description of Artificial Sequence: Synthetic oligonucleotide
gucauagcagacagugcgg

SEQ ID NO: 2884233 - RNA, 19 nt, Artificial Sequence
  Description of Artificial Sequence: Synthetic oligonucleotide
acgacuccacauaccaccc

SEQ ID NO: 2884234 - RNA, 19 nt, Artificial Sequence
  Description of Artificial Sequence: Synthetic oligonucleotide
uagggcagauagcgggcgg

SEQ ID NO: 2884235 - RNA, 19 nt, Artificial Sequence
  Description of Artificial Sequence: Synthetic oligonucleotide
gaaugggugggcucagguc

SEQ ID NO: 2884236 - RNA, 19 nt, Artificial Sequence
  Description of Artificial Sequence: Synthetic oligonucleotide
auuuuccuggcggcgacag

SEQ ID NO: 2884237 - RNA, 19 nt, Artificial Sequence
  Description of Artificial Sequence: Synthetic oligonucleotide
auagggcagauagcgggcg

SEQ ID NO: 2884238 - RNA, 19 nt, Artificial Sequence
  Description of Artificial Sequence: Synthetic oligonucleotide
uuuuccuggcggcgacagg

SEQ ID NO: 2884239 - RNA, 19 nt, Artificial Sequence
  Description of Artificial Sequence: Synthetic oligonucleotide
ggaacaggaugcuaccgug

SEQ ID NO: 2884240 - RNA, 19 nt, Artificial Sequence
  Description of Artificial Sequence: Synthetic oligonucleotide
cagcaagaagccgaugacc

SEQ ID NO: 2884241 - RNA, 19 nt, Artificial Sequence
  Description of Artificial Sequence: Synthetic oligonucleotide
guguagguuggcauagaag

SEQ ID NO: 2884242 - RNA, 19 nt, Artificial Sequence
  Description of Artificial Sequence: Synthetic oligonucleotide
aggcaaugucuccgaaggg

SEQ ID NO: 2884243 - RNA, 19 nt, Artificial Sequence
  Description of Artificial Sequence: Synthetic oligonucleotide
gcaaagauugcugugggca

SEQ ID NO: 2884244 - RNA, 19 nt, Artificial Sequence
  Description of Artificial Sequence: Synthetic oligonucleotide
uaccacccaggcagcacgg

SEQ ID NO: 2884245 - RNA, 19 nt, Artificial Sequence
  Description of Artificial Sequence: Synthetic oligonucleotide
agaagaggaagcgcacgag

SEQ ID NO: 2884246 - RNA, 19 nt, Artificial Sequence
  Description of Artificial Sequence: Synthetic oligonucleotide
ggcaaugucuccgaagggc

SEQ ID NO: 2884247 - RNA, 19 nt, Artificial Sequence
  Description of Artificial Sequence: Synthetic oligonucleotide
uuccuggcggcgacaggcg

SEQ ID NO: 2884248 - RNA, 19 nt, Artificial Sequence
  Description of Artificial Sequence: Synthetic oligonucleotide
gaagggcagcaagaagccg

SEQ ID NO: 2884249 - RNA, 19 nt, Artificial Sequence
  Description of Artificial Sequence: Synthetic oligonucleotide
gcagauagcgggcggacag

SEQ ID NO: 2884250 - RNA, 19 nt, Artificial Sequence
  Description of Artificial Sequence: Synthetic oligonucleotide
ggcagcaagaagccgauga

SEQ ID NO: 2884251 - RNA, 19 nt, Artificial Sequence
  Description of Artificial Sequence: Synthetic oligonucleotide
aggucauagcagacagugc

SEQ ID NO: 2884252 - RNA, 19 nt, Artificial Sequence
  Description of Artificial Sequence: Synthetic oligonucleotide
auugcugugggcaggcacu

SEQ ID NO: 2884253 - RNA, 19 nt, Artificial Sequence
  Description of Artificial Sequence: Synthetic oligonucleotide
ucaggucauagcagacagu

SEQ ID NO: 2884254 - RNA, 19 nt, Artificial Sequence
  Description of Artificial Sequence: Synthetic oligonucleotide
uggccgcaaagauugcugu

SEQ ID NO: 2884255 - RNA, 19 nt, Artificial Sequence
  Description of Artificial Sequence: Synthetic oligonucleotide
gugcgguugcgcuggaugc

SEQ ID NO: 2884256 - RNA, 19 nt, Artificial Sequence
  Description of Artificial Sequence: Synthetic oligonucleotide
accguguagguuggcauag

SEQ ID NO: 2884257 - RNA, 19 nt, Artificial Sequence
  Description of Artificial Sequence: Synthetic oligonucleotide
uccuggcggcgacaggcgg

SEQ ID NO: 2884258 - RNA, 19 nt, Artificial Sequence
  Description of Artificial Sequence: Synthetic oligonucleotide
agguuggcauagaagagga

SEQ ID NO: 2884259 - RNA, 19 nt, Artificial Sequence
  Description of Artificial Sequence: Synthetic oligonucleotide
gcauagaagaggaagcgca

SEQ ID NO: 2884260 - RNA, 19 nt, Artificial Sequence
  Description of Artificial Sequence: Synthetic oligonucleotide
gccgcaaagauugcugugg

SEQ ID NO: 2884261 - RNA, 19 nt, Artificial Sequence
  Description of Artificial Sequence: Synthetic oligonucleotide
ucacaaccagccacacgac

SEQ ID NO: 2884262 - RNA, 19 nt, Artificial Sequence
  Description of Artificial Sequence: Synthetic oligonucleotide
agacagugcgguugcgcug

SEQ ID NO: 2884263 - RNA, 19 nt, Artificial Sequence
  Description of Artificial Sequence: Synthetic oligonucleotide
agcuaaugcaggugaggaa

SEQ ID NO: 2884264 - RNA, 19 nt, Artificial Sequence
  Description of Artificial Sequence: Synthetic oligonucleotide
augccauagggcagauagc

SEQ ID NO: 2884265 - RNA, 19 nt, Artificial Sequence
  Description of Artificial Sequence: Synthetic oligonucleotide
gccgaugaccgugagagcc

SEQ ID NO: 2884266 - RNA, 19 nt, Artificial Sequence
  Description of Artificial Sequence: Synthetic oligonucleotide
agccgaugaccgugagagc

SEQ ID NO: 2884267 - RNA, 19 nt, Artificial Sequence
  Description of Artificial Sequence: Synthetic oligonucleotide
uguggccgcaaagauugcu

SEQ ID NO: 2884268 - RNA, 19 nt, Artificial Sequence
  Description of Artificial Sequence: Synthetic oligonucleotide
ugaccgugagagccaugcc

SEQ ID NO: 2884269 - RNA, 19 nt, Artificial Sequence
  Description of Artificial Sequence: Synthetic oligonucleotide
cacauaccacccaggcagc

SEQ ID NO: 2884270 - RNA, 19 nt, Artificial Sequence
  Description of Artificial Sequence: Synthetic oligonucleotide
ucgccccuggcauaguuau

SEQ ID NO: 2884271 - RNA, 19 nt, Artificial Sequence
  Description of Artificial Sequence: Synthetic oligonucleotide
gagagccaugccauagggc

SEQ ID NO: 2884272 - RNA, 19 nt, Artificial Sequence
  Description of Artificial Sequence: Synthetic oligonucleotide
gucuccgaagggccagugg

SEQ ID NO: 2884273 - RNA, 19 nt, Artificial Sequence
  Description of Artificial Sequence: Synthetic oligonucleotide
acccaggcagcacggcgac

SEQ ID NO: 2884274 - RNA, 19 nt, Artificial Sequence
  Description of Artificial Sequence: Synthetic oligonucleotide
uaccguguagguuggcaua

SEQ ID NO: 2884275 - RNA, 19 nt, Artificial Sequence
  Description of Artificial Sequence: Synthetic oligonucleotide
caggccaguaaaagcugug

SEQ ID NO: 2884276 - RNA, 19 nt, Artificial Sequence
  Description of Artificial Sequence: Synthetic oligonucleotide
ugccuguggccgcaaagau

SEQ ID NO: 2884277 - RNA, 19 nt, Artificial Sequence
  Description of Artificial Sequence: Synthetic oligonucleotide
acgcuugugccagggugcc

SEQ ID NO: 2884278 - RNA, 19 nt, Artificial Sequence
  Description of Artificial Sequence: Synthetic oligonucleotide
cuggaagcuaaugcaggug

SEQ ID NO: 2884279 - RNA, 19 nt, Artificial Sequence
  Description of Artificial Sequence: Synthetic oligonucleotide
gcaaugucuccgaagggcc

SEQ ID NO: 2884280 - RNA, 19 nt, Artificial Sequence
  Description of Artificial Sequence: Synthetic oligonucleotide
gaagccgaugaccgugaga

SEQ ID NO: 2884281 - RNA, 19 nt, Artificial Sequence
  Description of Artificial Sequence: Synthetic oligonucleotide
acacgacuccacauaccac

SEQ ID NO: 2884282 - RNA, 19 nt, Artificial Sequence
  Description of Artificial Sequence: Synthetic oligonucleotide
guggccgcaaagauugcug

SEQ ID NO: 2884283 - RNA, 19 nt, Artificial Sequence
  Description of Artificial Sequence: Synthetic oligonucleotide
ggcauagaagaggaagcgc

SEQ ID NO: 2884284 - RNA, 19 nt, Artificial Sequence
  Description of Artificial Sequence: Synthetic oligonucleotide
aggaugcuaccguguaggu

SEQ ID NO: 2884285 - RNA, 19 nt, Artificial Sequence
  Description of Artificial Sequence: Synthetic oligonucleotide
acuccacauaccacccagg

SEQ ID NO: 2884286 - RNA, 19 nt, Artificial Sequence
  Description of Artificial Sequence: Synthetic oligonucleotide
gagccaugccauagggcag

SEQ ID NO: 2884287 - RNA, 19 nt, Artificial Sequence
  Description of Artificial Sequence: Synthetic oligonucleotide
aggccaguaaaagcuguga

SEQ ID NO: 2884288 - RNA, 19 nt, Artificial Sequence
  Description of Artificial Sequence: Synthetic oligonucleotide
guagcgcuggaagcuaaug

SEQ ID NO: 2884289 - RNA, 19 nt, Artificial Sequence
  Description of Artificial Sequence: Synthetic oligonucleotide
agccacacgacuccacaua

SEQ ID NO: 2884290 - RNA, 19 nt, Artificial Sequence
  Description of Artificial Sequence: Synthetic oligonucleotide
uauuuuccuggcggcgaca

SEQ ID NO: 2884291 - RNA, 19 nt, Artificial Sequence
  Description of Artificial Sequence: Synthetic oligonucleotide
ugcgguugcgcuggaugcc

SEQ ID NO: 2884292 - RNA, 19 nt, Artificial Sequence
  Description of Artificial Sequence: Synthetic oligonucleotide
cuugugccagggugccagg

SEQ ID NO: 2884293 - RNA, 19 nt, Artificial Sequence
  Description of Artificial Sequence: Synthetic oligonucleotide
agcgggcggacagaauggg

SEQ ID NO: 2884294 - RNA, 19 nt, Artificial Sequence
  Description of Artificial Sequence: Synthetic oligonucleotide
ggaagcuaaugcaggugag

SEQ ID NO: 2884295 - RNA, 19 nt, Artificial Sequence
  Description of Artificial Sequence: Synthetic oligonucleotide
gcagcaagaagccgaugac

SEQ ID NO: 2884296 - RNA, 19 nt, Artificial Sequence
  Description of Artificial Sequence: Synthetic oligonucleotide
gcaguagcaggccaguaaa

SEQ ID NO: 2884297 - RNA, 19 nt, Artificial Sequence
  Description of Artificial Sequence: Synthetic oligonucleotide
agcaggccaguaaaagcug

SEQ ID NO: 2884298 - RNA, 19 nt, Artificial Sequence
  Description of Artificial Sequence: Synthetic oligonucleotide
gcuugugccagggugccag

SEQ ID NO: 2884299 - RNA, 19 nt, Artificial Sequence
  Description of Artificial Sequence: Synthetic oligonucleotide
cagauacccagguagcgcu

SEQ ID NO: 2884300 - RNA, 19 nt, Artificial Sequence
  Description of Artificial Sequence: Synthetic oligonucleotide
cauaccacccaggcagcac

SEQ ID NO: 2884301 - RNA, 19 nt, Artificial Sequence
  Description of Artificial Sequence: Synthetic oligonucleotide
accgugagagccaugccau

SEQ ID NO: 2884302 - RNA, 19 nt, Artificial Sequence
  Description of Artificial Sequence: Synthetic oligonucleotide
caaugucuccgaagggcca

SEQ ID NO: 2884303 - RNA, 19 nt, Artificial Sequence
  Description of Artificial Sequence: Synthetic oligonucleotide
cuccgaagggccagugguc

SEQ ID NO: 2884304 - RNA, 19 nt, Artificial Sequence
  Description of Artificial Sequence: Synthetic oligonucleotide
gccacacgacuccacauac

SEQ ID NO: 2884305 - RNA, 19 nt, Artificial Sequence
  Description of Artificial Sequence: Synthetic oligonucleotide
agcgcacgaggcggcaggc

SEQ ID NO: 2884306 - RNA, 19 nt, Artificial Sequence
  Description of Artificial Sequence: Synthetic oligonucleotide
ggggugacagauacccagg

SEQ ID NO: 2884307 - RNA, 19 nt, Artificial Sequence
  Description of Artificial Sequence: Synthetic oligonucleotide
uugcugugggcaggcacug

SEQ ID NO: 2884308 - RNA, 19 nt, Artificial Sequence
  Description of Artificial Sequence: Synthetic oligonucleotide
acagaaugggugggcucag

SEQ ID NO: 2884309 - RNA, 19 nt, Artificial Sequence
  Description of Artificial Sequence: Synthetic oligonucleotide
aggcacugagcugucacaa

SEQ ID NO: 2884310 - RNA, 19 nt, Artificial Sequence
  Description of Artificial Sequence: Synthetic oligonucleotide
agauagcgggcggacagaa

SEQ ID NO: 2884311 - RNA, 19 nt, Artificial Sequence
  Description of Artificial Sequence: Synthetic oligonucleotide
gaagggccaguggucgccc

SEQ ID NO: 2884312 - RNA, 19 nt, Artificial Sequence
  Description of Artificial Sequence: Synthetic oligonucleotide
accacccaggcagcacggc

SEQ ID NO: 2884313 - RNA, 19 nt, Artificial Sequence
  Description of Artificial Sequence: Synthetic oligonucleotide
guggucgccccuggcauag

SEQ ID NO: 2884314 - RNA, 19 nt, Artificial Sequence
  Description of Artificial Sequence: Synthetic oligonucleotide
cuggcggcgacaggcggcg

SEQ ID NO: 2884315 - RNA, 19 nt, Artificial Sequence
  Description of Artificial Sequence: Synthetic oligonucleotide
gcggcaggcaaugucuccg

SEQ ID NO: 2884316 - RNA, 19 nt, Artificial Sequence
  Description of Artificial Sequence: Synthetic oligonucleotide
ugucuccgaagggccagug

SEQ ID NO: 2884317 - RNA, 19 nt, Artificial Sequence
  Description of Artificial Sequence: Synthetic oligonucleotide
aaccagccacacgacucca

SEQ ID NO: 2884318 - RNA, 19 nt, Artificial Sequence
  Description of Artificial Sequence: Synthetic oligonucleotide
cgcuggaagcuaaugcagg

SEQ ID NO: 2884319 - RNA, 19 nt, Artificial Sequence
  Description of Artificial Sequence: Synthetic oligonucleotide
gcaggcacugagcugucac

SEQ ID NO: 2884320 - RNA, 19 nt, Artificial Sequence
  Description of Artificial Sequence: Synthetic oligonucleotide
gaggcggcaggcaaugucu

SEQ ID NO: 2884321 - RNA, 19 nt, Artificial Sequence
  Description of Artificial Sequence: Synthetic oligonucleotide
ccgcaaagauugcuguggg

SEQ ID NO: 2884322 - RNA, 19 nt, Artificial Sequence
  Description of Artificial Sequence: Synthetic oligonucleotide
gggccgaugcggcaguagc

SEQ ID NO: 2884323 - RNA, 19 nt, Artificial Sequence
  Description of Artificial Sequence: Synthetic oligonucleotide
gggcucaggucauagcaga

SEQ ID NO: 2884324 - RNA, 19 nt, Artificial Sequence
  Description of Artificial Sequence: Synthetic oligonucleotide
accagccacacgacuccac

SEQ ID NO: 2884325 - RNA, 19 nt, Artificial Sequence
  Description of Artificial Sequence: Synthetic oligonucleotide
ggugggcucaggucauagc

SEQ ID NO: 2884326 - RNA, 19 nt, Artificial Sequence
  Description of Artificial Sequence: Synthetic oligonucleotide
ggcaguagcaggccaguaa

SEQ ID NO: 2884327 - RNA, 19 nt, Artificial Sequence
  Description of Artificial Sequence: Synthetic oligonucleotide
ccacgcuugugccagggug

SEQ ID NO: 2884328 - RNA, 19 nt, Artificial Sequence
  Description of Artificial Sequence: Synthetic oligonucleotide
ggccaguaaaagcugugaa

SEQ ID NO: 2884329 - RNA, 19 nt, Artificial Sequence
  Description of Artificial Sequence: Synthetic oligonucleotide
augcuaccguguagguugg

SEQ ID NO: 2884330 - RNA, 19 nt, Artificial Sequence
  Description of Artificial Sequence: Synthetic oligonucleotide
auacccagguagcgcugga

SEQ ID NO: 2884331 - RNA, 19 nt, Artificial Sequence
  Description of Artificial Sequence: Synthetic oligonucleotide
cagacagugcgguugcgcu

SEQ ID NO: 2884332 - RNA, 19 nt, Artificial Sequence
  Description of Artificial Sequence: Synthetic oligonucleotide
cagaaugggugggcucagg

SEQ ID NO: 2884333 - RNA, 19 nt, Artificial Sequence
  Description of Artificial Sequence: Synthetic oligonucleotide
caggcacugagcugucaca

SEQ ID NO: 2884334 - RNA, 19 nt, Artificial Sequence
  Description of Artificial Sequence: Synthetic oligonucleotide
augcggcaguagcaggcca

SEQ ID NO: 2884335 - RNA, 19 nt, Artificial Sequence
  Description of Artificial Sequence: Synthetic oligonucleotide
gccgaugcggcaguagcag

SEQ ID NO: 2884336 - RNA, 19 nt, Artificial Sequence
  Description of Artificial Sequence: Synthetic oligonucleotide
cacgaggcggcaggcaaug

SEQ ID NO: 2884337 - RNA, 19 nt, Artificial Sequence
  Description of Artificial Sequence: Synthetic oligonucleotide
gaacaggaugcuaccgugu

SEQ ID NO: 2884338 - RNA, 19 nt, Artificial Sequence
  Description of Artificial Sequence: Synthetic oligonucleotide
gccauagggcagauagcgg

SEQ ID NO: 2884339 - RNA, 19 nt, Artificial Sequence
  Description of Artificial Sequence: Synthetic oligonucleotide
guugcgcuggaugccugug

SEQ ID NO: 2884340 - RNA, 19 nt, Artificial Sequence
  Description of Artificial Sequence: Synthetic oligonucleotide
acauaccacccaggcagca

SEQ ID NO: 2884341 - RNA, 19 nt, Artificial Sequence
  Description of Artificial Sequence: Synthetic oligonucleotide
cgaugcggcaguagcaggc

SEQ ID NO: 2884342 - RNA, 19 nt, Artificial Sequence
  Description of Artificial Sequence: Synthetic oligonucleotide
gcugugaagggcagcaaga

SEQ ID NO: 2884343 - RNA, 19 nt, Artificial Sequence
  Description of Artificial Sequence: Synthetic oligonucleotide
agauacccagguagcgcug

SEQ ID NO: 2884344 - RNA, 19 nt, Artificial Sequence
  Description of Artificial Sequence: Synthetic oligonucleotide
gcugucacaaccagccaca

SEQ ID NO: 2884345 - RNA, 19 nt, Artificial Sequence
  Description of Artificial Sequence: Synthetic oligonucleotide
cugugaagggcagcaagaa

SEQ ID NO: 2884346 - RNA, 19 nt, Artificial Sequence
  Description of Artificial Sequence: Synthetic oligonucleotide
caggcggcgggccgaugcg

SEQ ID NO: 2884347 - RNA, 19 nt, Artificial Sequence
  Description of Artificial Sequence: Synthetic oligonucleotide
agggcagauagcgggcgga

SEQ ID NO: 2884348 - RNA, 19 nt, Artificial Sequence
  Description of Artificial Sequence: Synthetic oligonucleotide
aagcugugaagggcagcaa

SEQ ID NO: 2884349 - RNA, 19 nt, Artificial Sequence
  Description of Artificial Sequence: Synthetic oligonucleotide
ggccgcaaagauugcugug

SEQ ID NO: 2884350 - RNA, 19 nt, Artificial Sequence
  Description of Artificial Sequence: Synthetic oligonucleotide
cugucacaaccagccacac

SEQ ID NO: 2884351 - RNA, 19 nt, Artificial Sequence
  Description of Artificial Sequence: Synthetic oligonucleotide
ggacagaaugggugggcuc

SEQ ID NO: 2884352 - RNA, 19 nt, Artificial Sequence
  Description of Artificial Sequence: Synthetic oligonucleotide
agcagacagugcgguugcg

SEQ ID NO: 2884353 - RNA, 19 nt, Artificial Sequence
  Description of Artificial Sequence: Synthetic oligonucleotide
cuguggccgcaaagauugc

SEQ ID NO: 2884354 - RNA, 19 nt, Artificial Sequence
  Description of Artificial Sequence: Synthetic oligonucleotide
caguagcaggccaguaaaa

SEQ ID NO: 2884355 - RNA, 19 nt, Artificial Sequence
  Description of Artificial Sequence: Synthetic oligonucleotide
cuaccguguagguuggcau

SEQ ID NO: 2884356 - RNA, 19 nt, Artificial Sequence
  Description of Artificial Sequence: Synthetic oligonucleotide
gcagacagugcgguugcgc

SEQ ID NO: 2884357 - RNA, 19 nt, Artificial Sequence
  Description of Artificial Sequence: Synthetic oligonucleotide
agggccaguggucgccccu

SEQ ID NO: 2884358 - RNA, 19 nt, Artificial Sequence
  Description of Artificial Sequence: Synthetic oligonucleotide
ccacccaggcagcacggcg

SEQ ID NO: 2884359 - RNA, 19 nt, Artificial Sequence
  Description of Artificial Sequence: Synthetic oligonucleotide
aguggucgccccuggcaua

SEQ ID NO: 2884360 - RNA, 19 nt, Artificial Sequence
  Description of Artificial Sequence: Synthetic oligonucleotide
uacccagguagcgcuggaa

SEQ ID NO: 2884361 - RNA, 19 nt, Artificial Sequence
  Description of Artificial Sequence: Synthetic oligonucleotide
ggcacugagcugucacaac

SEQ ID NO: 2884362 - RNA, 19 nt, Artificial Sequence
  Description of Artificial Sequence: Synthetic oligonucleotide
ccacacgacuccacauacc

SEQ ID NO: 2884363 - RNA, 19 nt, Artificial Sequence
  Description of Artificial Sequence: Synthetic oligonucleotide
gcuggaagcuaaugcaggu

SEQ ID NO: 2884364 - RNA, 19 nt, Artificial Sequence
  Description of Artificial Sequence: Synthetic oligonucleotide
cgcuggaugccuguggccg

SEQ ID NO: 2884365 - RNA, 19 nt, Artificial Sequence
  Description of Artificial Sequence: Synthetic oligonucleotide
gaugaccgugagagccaug

SEQ ID NO: 2884366 - RNA, 19 nt, Artificial Sequence
  Description of Artificial Sequence: Synthetic oligonucleotide
ggcggcgacaggcggcggg

SEQ ID NO: 2884367 - RNA, 19 nt, Artificial Sequence
  Description of Artificial Sequence: Synthetic oligonucleotide
ggugacagauacccaggua

SEQ ID NO: 2884368 - RNA, 19 nt, Artificial Sequence
  Description of Artificial Sequence: Synthetic oligonucleotide
cgugagagccaugccauag

SEQ ID NO: 2884369 - RNA, 19 nt, Artificial Sequence
  Description of Artificial Sequence: Synthetic oligonucleotide
ggcgacaggcggcgggccg

SEQ ID NO: 2884370 - RNA, 19 nt, Artificial Sequence
  Description of Artificial Sequence: Synthetic oligonucleotide
ccgaugcggcaguagcagg

SEQ ID NO: 2884371 - RNA, 19 nt, Artificial Sequence
  Description of Artificial Sequence: Synthetic oligonucleotide
gcuaccguguagguuggca

SEQ ID NO: 2884372 - RNA, 19 nt, Artificial Sequence
  Description of Artificial Sequence: Synthetic oligonucleotide
agggcagcaagaagccgau

SEQ ID NO: 2884373 - RNA, 19 nt, Artificial Sequence
  Description of Artificial Sequence: Synthetic oligonucleotide
cgcaaagauugcugugggc

SEQ ID NO: 2884374 - RNA, 19 nt, Artificial Sequence
  Description of Artificial Sequence: Synthetic oligonucleotide
cacaaccagccacacgacu

SEQ ID NO: 2884375 - RNA, 19 nt, Artificial Sequence
  Description of Artificial Sequence: Synthetic oligonucleotide
ugcugugggcaggcacuga

SEQ ID NO: 2884376 - RNA, 19 nt, Artificial Sequence
  Description of Artificial Sequence: Synthetic oligonucleotide
ccuggcggcgacaggcggc

SEQ ID NO: 2884377 - RNA, 19 nt, Artificial Sequence
  Description of Artificial Sequence: Synthetic oligonucleotide
ugcuaccguguagguuggc

SEQ ID NO: 2884378 - RNA, 19 nt, Artificial Sequence
  Description of Artificial Sequence: Synthetic oligonucleotide
augucuccgaagggccagu

SEQ ID NO: 2884379 - RNA, 19 nt, Artificial Sequence
  Description of Artificial Sequence: Synthetic oligonucleotide
agguagcgcuggaagcuaa

SEQ ID NO: 2884380 - RNA, 19 nt, Artificial Sequence
  Description of Artificial Sequence: Synthetic oligonucleotide
gcggacagaaugggugggc

SEQ ID NO: 2884381 - RNA, 19 nt, Artificial Sequence
  Description of Artificial Sequence: Synthetic oligonucleotide
cagauagcgggcggacaga

SEQ ID NO: 2884382 - RNA, 19 nt, Artificial Sequence
  Description of Artificial Sequence: Synthetic oligonucleotide
gggugacagauacccaggu

SEQ ID NO: 2884383 - RNA, 19 nt, Artificial Sequence
  Description of Artificial Sequence: Synthetic oligonucleotide
ccagccacacgacuccaca

SEQ ID NO: 2884384 - RNA, 19 nt, Artificial Sequence
  Description of Artificial Sequence: Synthetic oligonucleotide
augggugggcucaggucau

SEQ ID NO: 2884385 - RNA, 19 nt, Artificial Sequence
  Description of Artificial Sequence: Synthetic oligonucleotide
acagugcgguugcgcugga

SEQ ID NO: 2884386 - RNA, 19 nt, Artificial Sequence
  Description of Artificial Sequence: Synthetic oligonucleotide
cauagcagacagugcgguu

SEQ ID NO: 2884387 - RNA, 19 nt, Artificial Sequence
  Description of Artificial Sequence: Synthetic oligonucleotide
caguggucgccccuggcau

SEQ ID NO: 2884388 - RNA, 19 nt, Artificial Sequence
  Description of Artificial Sequence: Synthetic oligonucleotide
ccgaugaccgugagagcca

SEQ ID NO: 2884389 - RNA, 19 nt, Artificial Sequence
  Description of Artificial Sequence: Synthetic oligonucleotide
ggccgaugcggcaguagca

SEQ ID NO: 2884390 - RNA, 19 nt, Artificial Sequence
  Description of Artificial Sequence: Synthetic oligonucleotide
ggcagauagcgggcggaca

SEQ ID NO: 2884391 - RNA, 19 nt, Artificial Sequence
  Description of Artificial Sequence: Synthetic oligonucleotide
cgaagggccaguggucgcc

SEQ ID NO: 2884392 - RNA, 19 nt, Artificial Sequence
  Description of Artificial Sequence: Synthetic oligonucleotide
cgaggcggcaggcaauguc

SEQ ID NO: 2884393 - RNA, 19 nt, Artificial Sequence
  Description of Artificial Sequence: Synthetic oligonucleotide
uggaugccuguggccgcaa

SEQ ID NO: 2884394 - RNA, 19 nt, Artificial Sequence
  Description of Artificial Sequence: Synthetic oligonucleotide
gggcagauagcgggcggac

SEQ ID NO: 2884395 - RNA, 19 nt, Artificial Sequence
  Description of Artificial Sequence: Synthetic oligonucleotide
gucgccccuggcauaguua

SEQ ID NO: 2884396 - RNA, 19 nt, Artificial Sequence
  Description of Artificial Sequence: Synthetic oligonucleotide
cagguagcgcuggaagcua

SEQ ID NO: 2884397 - RNA, 19 nt, Artificial Sequence
  Description of Artificial Sequence: Synthetic oligonucleotide
cguguagguuggcauagaa

SEQ ID NO: 2884398 - RNA, 19 nt, Artificial Sequence
  Description of Artificial Sequence: Synthetic oligonucleotide
gauagcgggcggacagaau

SEQ ID NO: 2884399 - RNA, 19 nt, Artificial Sequence
  Description of Artificial Sequence: Synthetic oligonucleotide
ggcaggcaaugucuccgaa

SEQ ID NO: 2884400 - RNA, 19 nt, Artificial Sequence
  Description of Artificial Sequence: Synthetic oligonucleotide
acgaggcggcaggcaaugu

SEQ ID NO: 2884401 - RNA, 19 nt, Artificial Sequence
  Description of Artificial Sequence: Synthetic oligonucleotide
cagccacacgacuccacau

SEQ ID NO: 2884402 - RNA, 19 nt, Artificial Sequence
  Description of Artificial Sequence: Synthetic oligonucleotide
uggcggcgacaggcggcgg

SEQ ID NO: 2884403 - RNA, 19 nt, Artificial Sequence
  Description of Artificial Sequence: Synthetic oligonucleotide
ugggugggcucaggucaua

SEQ ID NO: 2884404 - RNA, 19 nt, Artificial Sequence
  Description of Artificial Sequence: Synthetic oligonucleotide
gguuggcauagaagaggaa

SEQ ID NO: 2884405 - RNA, 19 nt, Artificial Sequence
  Description of Artificial Sequence: Synthetic oligonucleotide
gguugcgcuggaugccugu

SEQ ID NO: 2884406 - RNA, 19 nt, Artificial Sequence
  Description of Artificial Sequence: Synthetic oligonucleotide
gggccaguggucgccccug

SEQ ID NO: 2884407 - RNA, 19 nt, Artificial Sequence
  Description of Artificial Sequence: Synthetic oligonucleotide
gcaggccaguaaaagcugu

SEQ ID NO: 2884408 - RNA, 19 nt, Artificial Sequence
  Description of Artificial Sequence: Synthetic oligonucleotide
ccccacgcuugugccaggg

SEQ ID NO: 2884409 - RNA, 19 nt, Artificial Sequence
  Description of Artificial Sequence: Synthetic oligonucleotide
gacaggcggcgggccgaug

SEQ ID NO: 2884410 - RNA, 19 nt, Artificial Sequence
  Description of Artificial Sequence: Synthetic oligonucleotide
gcggcgacaggcggcgggc

SEQ ID NO: 2884411 - RNA, 19 nt, Artificial Sequence
  Description of Artificial Sequence: Synthetic oligonucleotide
uggucgccccuggcauagu

SEQ ID NO: 2884412 - RNA, 19 nt, Artificial Sequence
  Description of Artificial Sequence: Synthetic oligonucleotide
ggaugccuguggccgcaaa

SEQ ID NO: 2884413 - RNA, 19 nt, Artificial Sequence
  Description of Artificial Sequence: Synthetic oligonucleotide
ggaugcuaccguguagguu

SEQ ID NO: 2884414 - RNA, 19 nt, Artificial Sequence
  Description of Artificial Sequence: Synthetic oligonucleotide
gggcagcaagaagccgaug

SEQ ID NO: 2884415 - RNA, 19 nt, Artificial Sequence
  Description of Artificial Sequence: Synthetic oligonucleotide
ggcaggcacugagcuguca

SEQ ID NO: 2884416 - RNA, 19 nt, Artificial Sequence
  Description of Artificial Sequence: Synthetic oligonucleotide
cgcacgaggcggcaggcaa

SEQ ID NO: 2884417 - RNA, 19 nt, Artificial Sequence
  Description of Artificial Sequence: Synthetic oligonucleotide
gcgacaggcggcgggccga

SEQ ID NO: 2884418 - RNA, 19 nt, Artificial Sequence
  Description of Artificial Sequence: Synthetic oligonucleotide
gguagcgcuggaagcuaau

SEQ ID NO: 2884419 - RNA, 19 nt, Artificial Sequence
  Description of Artificial Sequence: Synthetic oligonucleotide
ggucgccccuggcauaguu

SEQ ID NO: 2884420 - RNA, 19 nt, Artificial Sequence
  Description of Artificial Sequence: Synthetic oligonucleotide
gcgguugcgcuggaugccu

SEQ ID NO: 2884421 - RNA, 19 nt, Artificial Sequence
  Description of Artificial Sequence: Synthetic oligonucleotide
cgguugcgcuggaugccug

SEQ ID NO: 2884422 - RNA, 19 nt, Artificial Sequence
  Description of Artificial Sequence: Synthetic oligonucleotide
gcggcgggccgaugcggca

SEQ ID NO: 2884423 - RNA, 19 nt, Artificial Sequence
  Description of Artificial Sequence: Synthetic oligonucleotide
cgacuccacauaccaccca

SEQ ID NO: 2884424 - RNA, 19 nt, Artificial Sequence
  Description of Artificial Sequence: Synthetic oligonucleotide
gccuguggccgcaaagauu

SEQ ID NO: 2884425 - RNA, 19 nt, Artificial Sequence
  Description of Artificial Sequence: Synthetic oligonucleotide
cccaggcagcacggcgacc

SEQ ID NO: 2884426 - RNA, 19 nt, Artificial Sequence
  Description of Artificial Sequence: Synthetic oligonucleotide
ccgugagagccaugccaua

SEQ ID NO: 2884427 - RNA, 19 nt, Artificial Sequence
  Description of Artificial Sequence: Synthetic oligonucleotide
ccguguagguuggcauaga

SEQ ID NO: 2884428 - RNA, 19 nt, Artificial Sequence
  Description of Artificial Sequence: Synthetic oligonucleotide
cgggccgaugcggcaguag

SEQ ID NO: 2884429 - RNA, 19 nt, Artificial Sequence
  Description of Artificial Sequence: Synthetic oligonucleotide
gcgcacgaggcggcaggca

SEQ ID NO: 2884430 - RNA, 19 nt, Artificial Sequence
  Description of Artificial Sequence: Synthetic oligonucleotide
gggcaggcacugagcuguc

SEQ ID NO: 2884431 - RNA, 19 nt, Artificial Sequence
  Description of Artificial Sequence: Synthetic oligonucleotide
ggcgggccgaugcggcagu

SEQ ID NO: 2884432 - RNA, 19 nt, Artificial Sequence
  Description of Artificial Sequence: Synthetic oligonucleotide
cggcgggccgaugcggcag

SEQ ID NO: 2884433 - RNA, 19 nt, Artificial Sequence
  Description of Artificial Sequence: Synthetic oligonucleotide
gcgggcggacagaaugggu

SEQ ID NO: 2884434 - RNA, 19 nt, Artificial Sequence
  Description of Artificial Sequence: Synthetic oligonucleotide
cggacagaaugggugggcu

SEQ ID NO: 2884435 - RNA, 19 nt, Artificial Sequence
  Description of Artificial Sequence: Synthetic oligonucleotide
gcacgaggcggcaggcaau

SEQ ID NO: 2884436 - RNA, 19 nt, Artificial Sequence
  Description of Artificial Sequence: Synthetic oligonucleotide
cagugcgguugcgcuggau

SEQ ID NO: 2884437 - RNA, 19 nt, Artificial Sequence
  Description of Artificial Sequence: Synthetic oligonucleotide
cccacgcuugugccagggu

SEQ ID NO: 2884438 - RNA, 19 nt, Artificial Sequence
  Description of Artificial Sequence: Synthetic oligonucleotide
ccaugccauagggcagaua

SEQ ID NO: 2884439 - RNA, 19 nt, Artificial Sequence
  Description of Artificial Sequence: Synthetic oligonucleotide
gccaugccauagggcagau

SEQ ID NO: 2884440 - RNA, 19 nt, Artificial Sequence
  Description of Artificial Sequence: Synthetic oligonucleotide
cgaugaccgugagagccau

SEQ ID NO: 2884441 - RNA, 19 nt, Artificial Sequence
  Description of Artificial Sequence: Synthetic oligonucleotide
cgcuugugccagggugcca

SEQ ID NO: 2884442 - RNA, 19 nt, Artificial Sequence
  Description of Artificial Sequence: Synthetic oligonucleotide
gcgggccgaugcggcagua

SEQ ID NO: 2884443 - RNA, 19 nt, Artificial Sequence
  Description of Artificial Sequence: Synthetic oligonucleotide
cgacaggcggcgggccgau

SEQ ID NO: 2884444 - RNA, 19 nt, Artificial Sequence
  Description of Artificial Sequence: Synthetic oligonucleotide
ugaacgagaaauaacaugc

SEQ ID NO: 2884445 - RNA, 19 nt, Artificial Sequence
  Description of Artificial Sequence: Synthetic oligonucleotide
agaaauaacaugcuggaac

SEQ ID NO: 2884446 - RNA, 19 nt, Artificial Sequence
  Description of Artificial Sequence: Synthetic oligonucleotide
aacucggagagguugaugg

SEQ ID NO: 2884447 - RNA, 19 nt, Artificial Sequence
  Description of Artificial Sequence: Synthetic oligonucleotide
aucucagaagcacugagcc

SEQ ID NO: 2884448 - RNA, 19 nt, Artificial Sequence
  Description of Artificial Sequence: Synthetic oligonucleotide
aauaacaugcuggaacucg

SEQ ID NO: 2884449 - RNA, 19 nt, Artificial Sequence
  Description of Artificial Sequence: Synthetic oligonucleotide
gauguuggugcucagaagc

SEQ ID NO: 2884450 - RNA, 19 nt, Artificial Sequence
  Description of Artificial Sequence: Synthetic oligonucleotide
cacaggacaaucuuaaagg

SEQ ID NO: 2884451 - RNA, 19 nt, Artificial Sequence
  Description of Artificial Sequence: Synthetic oligonucleotide
gauauugucgaugagcugc

SEQ ID NO: 2884452 - RNA, 19 nt, Artificial Sequence
  Description of Artificial Sequence: Synthetic oligonucleotide
uggugaacgagaaauaaca

SEQ ID NO: 2884453 - RNA, 19 nt, Artificial Sequence
  Description of Artificial Sequence: Synthetic oligonucleotide
ucacaggacaaucuuaaag

SEQ ID NO: 2884454 - RNA, 19 nt, Artificial Sequence
  Description of Artificial Sequence: Synthetic oligonucleotide
acaaucuuaaaggagcugg

SEQ ID NO: 2884455 - RNA, 19 nt, Artificial Sequence
  Description of Artificial Sequence: Synthetic oligonucleotide
gaagguuuuggacaggaug

SEQ ID NO: 2884456 - RNA, 19 nt, Artificial Sequence
  Description of Artificial Sequence: Synthetic oligonucleotide
aacgagaaauaacaugcug

SEQ ID NO: 2884457 - RNA, 19 nt, Artificial Sequence
  Description of Artificial Sequence: Synthetic oligonucleotide
aagcacugagccuaguguc

SEQ ID NO: 2884458 - RNA, 19 nt, Artificial Sequence
  Description of Artificial Sequence: Synthetic oligonucleotide
ugugacuugaugucugggg

SEQ ID NO: 2884459 - RNA, 19 nt, Artificial Sequence
  Description of Artificial Sequence: Synthetic oligonucleotide
ucuuccaggauauugucga

SEQ ID NO: 2884460 - RNA, 19 nt, Artificial Sequence
  Description of Artificial Sequence: Synthetic oligonucleotide
uuggacaggauguuggugc

SEQ ID NO: 2884461 - RNA, 19 nt, Artificial Sequence
  Description of Artificial Sequence: Synthetic oligonucleotide
ucuccugugaggcaguuca

SEQ ID NO: 2884462 - RNA, 19 nt, Artificial Sequence
  Description of Artificial Sequence: Synthetic oligonucleotide
acgagaaauaacaugcugg

SEQ ID NO: 2884463 - RNA, 19 nt, Artificial Sequence
  Description of Artificial Sequence: Synthetic oligonucleotide
agguugaugguuccguccc

SEQ ID NO: 2884464 - RNA, 19 nt, Artificial Sequence
  Description of Artificial Sequence: Synthetic oligonucleotide
agugggaagguuuuggaca

SEQ ID NO: 2884465 - RNA, 19 nt, Artificial Sequence
  Description of Artificial Sequence: Synthetic oligonucleotide
aaagaugcggaaggcauag

SEQ ID NO: 2884466 - RNA, 19 nt, Artificial Sequence
  Description of Artificial Sequence: Synthetic oligonucleotide
ucaaagaugcggaaggcau

SEQ ID NO: 2884467 - RNA, 19 nt, Artificial Sequence
  Description of Artificial Sequence: Synthetic oligonucleotide
caugcuggaacucggagag

SEQ ID NO: 2884468 - RNA, 19 nt, Artificial Sequence
  Description of Artificial Sequence: Synthetic oligonucleotide
aagguuuuggacaggaugu

SEQ ID NO: 2884469 - RNA, 19 nt, Artificial Sequence
  Description of Artificial Sequence: Synthetic oligonucleotide
aacaugcuggaacucggag

SEQ ID NO: 2884470 - RNA, 19 nt, Artificial Sequence
  Description of Artificial Sequence: Synthetic oligonucleotide
ucaucucagaagcacugag

SEQ ID NO: 2884471 - RNA, 19 nt, Artificial Sequence
  Description of Artificial Sequence: Synthetic oligonucleotide
ucgcugaagacacucagga

SEQ ID NO: 2884472 - RNA, 19 nt, Artificial Sequence
  Description of Artificial Sequence: Synthetic oligonucleotide
ugugaggcaguucaccagc

SEQ ID NO: 2884473 - RNA, 19 nt, Artificial Sequence
  Description of Artificial Sequence: Synthetic oligonucleotide
acucaggucuucucugucc

SEQ ID NO: 2884474 - RNA, 19 nt, Artificial Sequence
  Description of Artificial Sequence: Synthetic oligonucleotide
uaucgcugaagacacucag

SEQ ID NO: 2884475 - RNA, 19 nt, Artificial Sequence
  Description of Artificial Sequence: Synthetic oligonucleotide
uccaggaaguccucgaagc

SEQ ID NO: 2884476 - RNA, 19 nt, Artificial Sequence
  Description of Artificial Sequence: Synthetic oligonucleotide
gugaacgagaaauaacaug

SEQ ID NO: 2884477 - RNA, 19 nt, Artificial Sequence
  Description of Artificial Sequence: Synthetic oligonucleotide
guuuuggacaggauguugg

SEQ ID NO: 2884478 - RNA, 19 nt, Artificial Sequence
  Description of Artificial Sequence: Synthetic oligonucleotide
uaaaggagcuggcaaaguc

SEQ ID NO: 2884479 - RNA, 19 nt, Artificial Sequence
  Description of Artificial Sequence: Synthetic oligonucleotide
ucuuaaaggagcuggcaaa

SEQ ID NO: 2884480 - RNA, 19 nt, Artificial Sequence
  Description of Artificial Sequence: Synthetic oligonucleotide
ugcuguaucgcugaagaca

SEQ ID NO: 2884481 - RNA, 19 nt, Artificial Sequence
  Description of Artificial Sequence: Synthetic oligonucleotide
ucgaugagcugcuucaucu

SEQ ID NO: 2884482 - RNA, 19 nt, Artificial Sequence
  Description of Artificial Sequence: Synthetic oligonucleotide
auugucgaugagcugcuuc

SEQ ID NO: 2884483 - RNA, 19 nt, Artificial Sequence
  Description of Artificial Sequence: Synthetic oligonucleotide
gcugcuucaucucagaagc

SEQ ID NO: 2884484 - RNA, 19 nt, Artificial Sequence
  Description of Artificial Sequence: Synthetic oligonucleotide
cauagugugacuugauguc

SEQ ID NO: 2884485 - RNA, 19 nt, Artificial Sequence
  Description of Artificial Sequence: Synthetic oligonucleotide
aauguccgacucuuccagg

SEQ ID NO: 2884486 - RNA, 19 nt, Artificial Sequence
  Description of Artificial Sequence: Synthetic oligonucleotide
aaauaacaugcuggaacuc

SEQ ID NO: 2884487 - RNA, 19 nt, Artificial Sequence
  Description of Artificial Sequence: Synthetic oligonucleotide
agaugcggaaggcauagug

SEQ ID NO: 2884488 - RNA, 19 nt, Artificial Sequence
  Description of Artificial Sequence: Synthetic oligonucleotide
caggguuccaucaucauca

SEQ ID NO: 2884489 - RNA, 19 nt, Artificial Sequence
  Description of Artificial Sequence: Synthetic oligonucleotide
acaggacaaucuuaaagga

SEQ ID NO: 2884490 - RNA, 19 nt, Artificial Sequence
  Description of Artificial Sequence: Synthetic oligonucleotide
uugucgaugagcugcuuca

SEQ ID NO: 2884491 - RNA, 19 nt, Artificial Sequence
  Description of Artificial Sequence: Synthetic oligonucleotide
caggauauugucgaugagc

SEQ ID NO: 2884492 - RNA, 19 nt, Artificial Sequence
  Description of Artificial Sequence: Synthetic oligonucleotide
aaaggagcuggcaaagucu

SEQ ID NO: 2884493 - RNA, 19 nt, Artificial Sequence
  Description of Artificial Sequence: Synthetic oligonucleotide
agcugcuucaucucagaag

SEQ ID NO: 2884494 - RNA, 19 nt, Artificial Sequence
  Description of Artificial Sequence: Synthetic oligonucleotide
caggacaaucuuaaaggag

SEQ ID NO: 2884495 - RNA, 19 nt, Artificial Sequence
  Description of Artificial Sequence: Synthetic oligonucleotide
aaucuuaaaggagcuggca

SEQ ID NO: 2884496 - RNA, 19 nt, Artificial Sequence
  Description of Artificial Sequence: Synthetic oligonucleotide
caaucuuaaaggagcuggc

SEQ ID NO: 2884497 - RNA, 19 nt, Artificial Sequence
  Description of Artificial Sequence: Synthetic oligonucleotide
augcggaaggcauagugug

SEQ ID NO: 2884498 - RNA, 19 nt, Artificial Sequence
  Description of Artificial Sequence: Synthetic oligonucleotide
ucugguaggggacguggag

SEQ ID NO: 2884499 - RNA, 19 nt, Artificial Sequence
  Description of Artificial Sequence: Synthetic oligonucleotide
agucuggugaacgagaaau

SEQ ID NO: 2884500 - RNA, 19 nt, Artificial Sequence
  Description of Artificial Sequence: Synthetic oligonucleotide
acucuuccaggauauuguc

SEQ ID NO: 2884501 - RNA, 19 nt, Artificial Sequence
  Description of Artificial Sequence: Synthetic oligonucleotide
aggauauugucgaugagcu

SEQ ID NO: 2884502 - RNA, 19 nt, Artificial Sequence
  Description of Artificial Sequence: Synthetic oligonucleotide
cuucaucucagaagcacug

SEQ ID NO: 2884503 - RNA, 19 nt, Artificial Sequence
  Description of Artificial Sequence: Synthetic oligonucleotide
cucuuccaggauauugucg

SEQ ID NO: 2884504 - RNA, 19 nt, Artificial Sequence
  Description of Artificial Sequence: Synthetic oligonucleotide
gaaggcauagugugacuug

SEQ ID NO: 2884505 - RNA, 19 nt, Artificial Sequence
  Description of Artificial Sequence: Synthetic oligonucleotide
aucuuaaaggagcuggcaa

SEQ ID NO: 2884506 - RNA, 19 nt, Artificial Sequence
  Description of Artificial Sequence: Synthetic oligonucleotide
cuuaaaggagcuggcaaag

SEQ ID NO: 2884507 - RNA, 19 nt, Artificial Sequence
  Description of Artificial Sequence: Synthetic oligonucleotide
aagcucaggcuaucucugg

SEQ ID NO: 2884508 - RNA, 19 nt, Artificial Sequence
  Description of Artificial Sequence: Synthetic oligonucleotide
uguuggugcucagaagccg

SEQ ID NO: 2884509 - RNA, 19 nt, Artificial Sequence
  Description of Artificial Sequence: Synthetic oligonucleotide
caucucagaagcacugagc

SEQ ID NO: 2884510 - RNA, 19 nt, Artificial Sequence
  Description of Artificial Sequence: Synthetic oligonucleotide
ucagaagccgucacaggac

SEQ ID NO: 2884511 - RNA, 19 nt, Artificial Sequence
  Description of Artificial Sequence: Synthetic oligonucleotide
agaagcacugagccuagug

SEQ ID NO: 2884512 - RNA, 19 nt, Artificial Sequence
  Description of Artificial Sequence: Synthetic oligonucleotide
uagugugacuugaugucug

SEQ ID NO: 2884513 - RNA, 19 nt, Artificial Sequence
  Description of Artificial Sequence: Synthetic oligonucleotide
gagguugaugguuccgucc

SEQ ID NO: 2884514 - RNA, 19 nt, Artificial Sequence
  Description of Artificial Sequence: Synthetic oligonucleotide
auaacaugcuggaacucgg

SEQ ID NO: 2884515 - RNA, 19 nt, Artificial Sequence
  Description of Artificial Sequence: Synthetic oligonucleotide
ucuggugaacgagaaauaa

SEQ ID NO: 2884516 - RNA, 19 nt, Artificial Sequence
  Description of Artificial Sequence: Synthetic oligonucleotide
uguaucgcugaagacacuc

SEQ ID NO: 2884517 - RNA, 19 nt, Artificial Sequence
  Description of Artificial Sequence: Synthetic oligonucleotide
gugggaagguuuuggacag

SEQ ID NO: 2884518 - RNA, 19 nt, Artificial Sequence
  Description of Artificial Sequence: Synthetic oligonucleotide
gaugguuccgucccuguca

SEQ ID NO: 2884519 - RNA, 19 nt, Artificial Sequence
  Description of Artificial Sequence: Synthetic oligonucleotide
uggcaaagucuggugaacg

SEQ ID NO: 2884520 - RNA, 19 nt, Artificial Sequence
  Description of Artificial Sequence: Synthetic oligonucleotide
ugcagugcccucuccaggc

SEQ ID NO: 2884521 - RNA, 19 nt, Artificial Sequence
  Description of Artificial Sequence: Synthetic oligonucleotide
ugaugucugggguugcugu

SEQ ID NO: 2884522 - RNA, 19 nt, Artificial Sequence
  Description of Artificial Sequence: Synthetic oligonucleotide
ucucugguaggggacgugg

SEQ ID NO: 2884523 - RNA, 19 nt, Artificial Sequence
  Description of Artificial Sequence: Synthetic oligonucleotide
agagguugaugguuccguc

SEQ ID NO: 2884524 - RNA, 19 nt, Artificial Sequence
  Description of Artificial Sequence: Synthetic oligonucleotide
ucaggcuaucucugguagg

SEQ ID NO: 2884525 - RNA, 19 nt, Artificial Sequence
  Description of Artificial Sequence: Synthetic oligonucleotide
caauguccgacucuuccag

SEQ ID NO: 2884526 - RNA, 19 nt, Artificial Sequence
  Description of Artificial Sequence: Synthetic oligonucleotide
cuggugaacgagaaauaac

SEQ ID NO: 2884527 - RNA, 19 nt, Artificial Sequence
  Description of Artificial Sequence: Synthetic oligonucleotide
acaugcuggaacucggaga

SEQ ID NO: 2884528 - RNA, 19 nt, Artificial Sequence
  Description of Artificial Sequence: Synthetic oligonucleotide
ucuguccaggguuccauca

SEQ ID NO: 2884529 - RNA, 19 nt, Artificial Sequence
  Description of Artificial Sequence: Synthetic oligonucleotide
caggcuaucucugguaggg

SEQ ID NO: 2884530 - RNA, 19 nt, Artificial Sequence
  Description of Artificial Sequence: Synthetic oligonucleotide
uuuuggacaggauguuggu

SEQ ID NO: 2884531 - RNA, 19 nt, Artificial Sequence
  Description of Artificial Sequence: Synthetic oligonucleotide
aggauguuggugcucagaa

SEQ ID NO: 2884532 - RNA, 19 nt, Artificial Sequence
  Description of Artificial Sequence: Synthetic oligonucleotide
aaggcauagugugacuuga

SEQ ID NO: 2884533 - RNA, 19 nt, Artificial Sequence
  Description of Artificial Sequence: Synthetic oligonucleotide
aaggagcuggcaaagucug

SEQ ID NO: 2884534 - RNA, 19 nt, Artificial Sequence
  Description of Artificial Sequence: Synthetic oligonucleotide
aggucuucucuguccaggg

SEQ ID NO: 2884535 - RNA, 19 nt, Artificial Sequence
  Description of Artificial Sequence: Synthetic oligonucleotide
cucaggcuaucucugguag

SEQ ID NO: 2884536 - RNA, 19 nt, Artificial Sequence
  Description of Artificial Sequence: Synthetic oligonucleotide
caucaaagucaaagaugcg

SEQ ID NO: 2884537 - RNA, 19 nt, Artificial Sequence
  Description of Artificial Sequence: Synthetic oligonucleotide
ucuucucuguccaggguuc

SEQ ID NO: 2884538 - RNA, 19 nt, Artificial Sequence
  Description of Artificial Sequence: Synthetic oligonucleotide
ugcuucaucucagaagcac

SEQ ID NO: 2884539 - RNA, 19 nt, Artificial Sequence
  Description of Artificial Sequence: Synthetic oligonucleotide
uggcccucgacaccgcagg

SEQ ID NO: 2884540 - RNA, 19 nt, Artificial Sequence
  Description of Artificial Sequence: Synthetic oligonucleotide
auguuggugcucagaagcc

SEQ ID NO: 2884541 - RNA, 19 nt, Artificial Sequence
  Description of Artificial Sequence: Synthetic oligonucleotide
gagccuaguguccucgccc

SEQ ID NO: 2884542 - RNA, 19 nt, Artificial Sequence
  Description of Artificial Sequence: Synthetic oligonucleotide
gacuuuggccaccucucag

SEQ ID NO: 2884543 - RNA, 19 nt, Artificial Sequence
  Description of Artificial Sequence: Synthetic oligonucleotide
gaggcaguucaccagcuga

SEQ ID NO: 2884544 - RNA, 19 nt, Artificial Sequence
  Description of Artificial Sequence: Synthetic oligonucleotide
aagccgucacaggacaauc

SEQ ID NO: 2884545 - RNA, 19 nt, Artificial Sequence
  Description of Artificial Sequence: Synthetic oligonucleotide
ugggguugcuguaucgcug

SEQ ID NO: 2884546 - RNA, 19 nt, Artificial Sequence
  Description of Artificial Sequence: Synthetic oligonucleotide
uccgucccugucaaugucc

SEQ ID NO: 2884547 - RNA, 19 nt, Artificial Sequence
  Description of Artificial Sequence: Synthetic oligonucleotide
cucagaagccgucacagga

SEQ ID NO: 2884548 - RNA, 19 nt, Artificial Sequence
  Description of Artificial Sequence: Synthetic oligonucleotide
ucagaagcacugagccuag

SEQ ID NO: 2884549 - RNA, 19 nt, Artificial Sequence
  Description of Artificial Sequence: Synthetic oligonucleotide
uggaacucggagagguuga

SEQ ID NO: 2884550 - RNA, 19 nt, Artificial Sequence
  Description of Artificial Sequence: Synthetic oligonucleotide
ugcuggaacucggagaggu

SEQ ID NO: 2884551 - RNA, 19 nt, Artificial Sequence
  Description of Artificial Sequence: Synthetic oligonucleotide
gaagcucaggcuaucucug

SEQ ID NO: 2884552 - RNA, 19 nt, Artificial Sequence
  Description of Artificial Sequence: Synthetic oligonucleotide
gacuugaugucugggguug

SEQ ID NO: 2884553 - RNA, 19 nt, Artificial Sequence
  Description of Artificial Sequence: Synthetic oligonucleotide
uaacaugcuggaacucgga

SEQ ID NO: 2884554 - RNA, 19 nt, Artificial Sequence
  Description of Artificial Sequence: Synthetic oligonucleotide
ucggagagguugaugguuc

SEQ ID NO: 2884555 - RNA, 19 nt, Artificial Sequence
  Description of Artificial Sequence: Synthetic oligonucleotide
auagugugacuugaugucu

SEQ ID NO: 2884556 - RNA, 19 nt, Artificial Sequence
  Description of Artificial Sequence: Synthetic oligonucleotide
aaagucuggugaacgagaa

SEQ ID NO: 2884557 - RNA, 19 nt, Artificial Sequence
  Description of Artificial Sequence: Synthetic oligonucleotide
ugagccuaguguccucgcc

SEQ ID NO: 2884558 - RNA, 19 nt, Artificial Sequence
  Description of Artificial Sequence: Synthetic oligonucleotide
uccgacucuuccaggauau

SEQ ID NO: 2884559 - RNA, 19 nt, Artificial Sequence
  Description of Artificial Sequence: Synthetic oligonucleotide
agcuggcaaagucugguga

SEQ ID NO: 2884560 - RNA, 19 nt, Artificial Sequence
  Description of Artificial Sequence: Synthetic oligonucleotide
gaagcacugagccuagugu

SEQ ID NO: 2884561 - RNA, 19 nt, Artificial Sequence
  Description of Artificial Sequence: Synthetic oligonucleotide
ucagcagugggaagguuuu

SEQ ID NO: 2884562 - RNA, 19 nt, Artificial Sequence
  Description of Artificial Sequence: Synthetic oligonucleotide
caaagucuggugaacgaga

SEQ ID NO: 2884563 - RNA, 19 nt, Artificial Sequence
  Description of Artificial Sequence: Synthetic oligonucleotide
cuaucucugguaggggacg

SEQ ID NO: 2884564 - RNA, 19 nt, Artificial Sequence
  Description of Artificial Sequence: Synthetic oligonucleotide
cugacucaggucuucucug

SEQ ID NO: 2884565 - RNA, 19 nt, Artificial Sequence
  Description of Artificial Sequence: Synthetic oligonucleotide
uuccaggauauugucgaug

SEQ ID NO: 2884566 - RNA, 19 nt, Artificial Sequence
  Description of Artificial Sequence: Synthetic oligonucleotide
gaggccagacucugcagug

SEQ ID NO: 2884567 - RNA, 19 nt, Artificial Sequence
  Description of Artificial Sequence: Synthetic oligonucleotide
ucugggguugcuguaucgc

SEQ ID NO: 2884568 - RNA, 19 nt, Artificial Sequence
  Description of Artificial Sequence: Synthetic oligonucleotide
ugacuuuggccaccucuca

SEQ ID NO: 2884569 - RNA, 19 nt, Artificial Sequence
  Description of Artificial Sequence: Synthetic oligonucleotide
acugagccuaguguccucg

SEQ ID NO: 2884570 - RNA, 19 nt, Artificial Sequence
  Description of Artificial Sequence: Synthetic oligonucleotide
ucucagaagcacugagccu

SEQ ID NO: 2884571 - RNA, 19 nt, Artificial Sequence
  Description of Artificial Sequence: Synthetic oligonucleotide
aguucaccagcugacucag

SEQ ID NO: 2884572 - RNA, 19 nt, Artificial Sequence
  Description of Artificial Sequence: Synthetic oligonucleotide
auguccgacucuuccagga

SEQ ID NO: 2884573 - RNA, 19 nt, Artificial Sequence
  Description of Artificial Sequence: Synthetic oligonucleotide
ugguaggggacguggagaa

SEQ ID NO: 2884574 - RNA, 19 nt, Artificial Sequence
  Description of Artificial Sequence: Synthetic oligonucleotide
ugcggaaggcauaguguga

SEQ ID NO: 2884575 - RNA, 19 nt, Artificial Sequence
  Description of Artificial Sequence: Synthetic oligonucleotide
uuaaaggagcuggcaaagu

SEQ ID NO: 2884576 - RNA, 19 nt, Artificial Sequence
  Description of Artificial Sequence: Synthetic oligonucleotide
cagugggaagguuuuggac

SEQ ID NO: 2884577 - RNA, 19 nt, Artificial Sequence
  Description of Artificial Sequence: Synthetic oligonucleotide
ugacucaggucuucucugu

SEQ ID NO: 2884578 - RNA, 19 nt, Artificial Sequence
  Description of Artificial Sequence: Synthetic oligonucleotide
aguguccucgcccucuccu

SEQ ID NO: 2884579 - RNA, 19 nt, Artificial Sequence
  Description of Artificial Sequence: Synthetic oligonucleotide
gcaggcgugacuuuggcca

SEQ ID NO: 2884580 - RNA, 19 nt, Artificial Sequence
  Description of Artificial Sequence: Synthetic oligonucleotide
cuggaacucggagagguug

SEQ ID NO: 2884581 - RNA, 19 nt, Artificial Sequence
  Description of Artificial Sequence: Synthetic oligonucleotide
ugaggcaguucaccagcug

SEQ ID NO: 2884582 - RNA, 19 nt, Artificial Sequence
  Description of Artificial Sequence: Synthetic oligonucleotide
uguccaggguuccaucauc

SEQ ID NO: 2884583 - RNA, 19 nt, Artificial Sequence
  Description of Artificial Sequence: Synthetic oligonucleotide
uccugugaggcaguucacc

SEQ ID NO: 2884584 - RNA, 19 nt, Artificial Sequence
  Description of Artificial Sequence: Synthetic oligonucleotide
guccaggaaguccucgaag

SEQ ID NO: 2884585 - RNA, 19 nt, Artificial Sequence
  Description of Artificial Sequence: Synthetic oligonucleotide
cugugaggcaguucaccag

SEQ ID NO: 2884586 - RNA, 19 nt, Artificial Sequence
  Description of Artificial Sequence: Synthetic oligonucleotide
gacaggauguuggugcuca

SEQ ID NO: 2884587 - RNA, 19 nt, Artificial Sequence
  Description of Artificial Sequence: Synthetic oligonucleotide
aucgcugaagacacucagg

SEQ ID NO: 2884588 - RNA, 19 nt, Artificial Sequence
  Description of Artificial Sequence: Synthetic oligonucleotide
uucaucucagaagcacuga

SEQ ID NO: 2884589 - RNA, 19 nt, Artificial Sequence
  Description of Artificial Sequence: Synthetic oligonucleotide
ucgaagcucaggcuaucuc

SEQ ID NO: 2884590 - RNA, 19 nt, Artificial Sequence
  Description of Artificial Sequence: Synthetic oligonucleotide
agcgcuggcccucgacacc

SEQ ID NO: 2884591 - RNA, 19 nt, Artificial Sequence
  Description of Artificial Sequence: Synthetic oligonucleotide
uuuggccaccucucagcag

SEQ ID NO: 2884592 - RNA, 19 nt, Artificial Sequence
  Description of Artificial Sequence: Synthetic oligonucleotide
aggaaguccucgaagcuca

SEQ ID NO: 2884593 - RNA, 19 nt, Artificial Sequence
  Description of Artificial Sequence: Synthetic oligonucleotide
gacacucaggagguccagg

SEQ ID NO: 2884594 - RNA, 19 nt, Artificial Sequence
  Description of Artificial Sequence: Synthetic oligonucleotide
agcugacucaggucuucuc

SEQ ID NO: 2884595 - RNA, 19 nt, Artificial Sequence
  Description of Artificial Sequence: Synthetic oligonucleotide
aagacacucaggaggucca

SEQ ID NO: 2884596 - RNA, 19 nt, Artificial Sequence
  Description of Artificial Sequence: Synthetic oligonucleotide
caggucuucucuguccagg

SEQ ID NO: 2884597 - RNA, 19 nt, Artificial Sequence
  Description of Artificial Sequence: Synthetic oligonucleotide
uggacaggauguuggugcu

SEQ ID NO: 2884598 - RNA, 19 nt, Artificial Sequence
  Description of Artificial Sequence: Synthetic oligonucleotide
ggcauagugugacuugaug

SEQ ID NO: 2884599 - RNA, 19 nt, Artificial Sequence
  Description of Artificial Sequence: Synthetic oligonucleotide
aggcaguucaccagcugac

SEQ ID NO: 2884600 - RNA, 19 nt, Artificial Sequence
  Description of Artificial Sequence: Synthetic oligonucleotide
aagucuggugaacgagaaa

SEQ ID NO: 2884601 - RNA, 19 nt, Artificial Sequence
  Description of Artificial Sequence: Synthetic oligonucleotide
ugacuugaugucugggguu

SEQ ID NO: 2884602 - RNA, 19 nt, Artificial Sequence
  Description of Artificial Sequence: Synthetic oligonucleotide
cucagaagcacugagccua

SEQ ID NO: 2884603 - RNA, 19 nt, Artificial Sequence
  Description of Artificial Sequence: Synthetic oligonucleotide
guaggggacguggagaaga

SEQ ID NO: 2884604 - RNA, 19 nt, Artificial Sequence
  Description of Artificial Sequence: Synthetic oligonucleotide
ugaugguuccgucccuguc

SEQ ID NO: 2884605 - RNA, 19 nt, Artificial Sequence
  Description of Artificial Sequence: Synthetic oligonucleotide
ucaggucuucucuguccag

SEQ ID NO: 2884606 - RNA, 19 nt, Artificial Sequence
  Description of Artificial Sequence: Synthetic oligonucleotide
acuugaugucugggguugc

SEQ ID NO: 2884607 - RNA, 19 nt, Artificial Sequence
  Description of Artificial Sequence: Synthetic oligonucleotide
caucaucaaagucaaagau

SEQ ID NO: 2884608 - RNA, 19 nt, Artificial Sequence
  Description of Artificial Sequence: Synthetic oligonucleotide
gcuguaucgcugaagacac

SEQ ID NO: 2884609 - RNA, 19 nt, Artificial Sequence
  Description of Artificial Sequence: Synthetic oligonucleotide
gagcuggcaaagucuggug

SEQ ID NO: 2884610 - RNA, 19 nt, Artificial Sequence
  Description of Artificial Sequence: Synthetic oligonucleotide
uccucgaagcucaggcuau

SEQ ID NO: 2884611 - RNA, 19 nt, Artificial Sequence
  Description of Artificial Sequence: Synthetic oligonucleotide
ucgcccucuccugugaggc

SEQ ID NO: 2884612 - RNA, 19 nt, Artificial Sequence
  Description of Artificial Sequence: Synthetic oligonucleotide
uaggggacguggagaagac

SEQ ID NO: 2884613 - RNA, 19 nt, Artificial Sequence
  Description of Artificial Sequence: Synthetic oligonucleotide
gucccugucaauguccgac

SEQ ID NO: 2884614 - RNA, 19 nt, Artificial Sequence
  Description of Artificial Sequence: Synthetic oligonucleotide
gagguccaggaaguccucg

SEQ ID NO: 2884615 - RNA, 19 nt, Artificial Sequence
  Description of Artificial Sequence: Synthetic oligonucleotide
uguccucgcccucuccugu

SEQ ID NO: 2884616 - RNA, 19 nt, Artificial Sequence
  Description of Artificial Sequence: Synthetic oligonucleotide
uugaugguuccgucccugu

SEQ ID NO: 2884617 - RNA, 19 nt, Artificial Sequence
  Description of Artificial Sequence: Synthetic oligonucleotide
caguucaccagcugacuca

SEQ ID NO: 2884618 - RNA, 19 nt, Artificial Sequence
  Description of Artificial Sequence: Synthetic oligonucleotide
gguuccgucccugucaaug

SEQ ID NO: 2884619 - RNA, 19 nt, Artificial Sequence
  Description of Artificial Sequence: Synthetic oligonucleotide
ucccugucaauguccgacu

SEQ ID NO: 2884620 - RNA, 19 nt, Artificial Sequence
  Description of Artificial Sequence: Synthetic oligonucleotide
uugcuguaucgcugaagac

SEQ ID NO: 2884621 - RNA, 19 nt, Artificial Sequence
  Description of Artificial Sequence: Synthetic oligonucleotide
gcauagugugacuugaugu

SEQ ID NO: 2884622 - RNA, 19 nt, Artificial Sequence
  Description of Artificial Sequence: Synthetic oligonucleotide
agccuaguguccucgcccu

SEQ ID NO: 2884623 - RNA, 19 nt, Artificial Sequence
  Description of Artificial Sequence: Synthetic oligonucleotide
ggauguuggugcucagaag

SEQ ID NO: 2884624 - RNA, 19 nt, Artificial Sequence
  Description of Artificial Sequence: Synthetic oligonucleotide
ucaccagcugacucagguc

SEQ ID NO: 2884625 - RNA, 19 nt, Artificial Sequence
  Description of Artificial Sequence: Synthetic oligonucleotide
gacucuuccaggauauugu

SEQ ID NO: 2884626 - RNA, 19 nt, Artificial Sequence
  Description of Artificial Sequence: Synthetic oligonucleotide
gugacuugaugucuggggu

SEQ ID NO: 2884627 - RNA, 19 nt, Artificial Sequence
  Description of Artificial Sequence: Synthetic oligonucleotide
aggccagacucugcagugc

SEQ ID NO: 2884628 - RNA, 19 nt, Artificial Sequence
  Description of Artificial Sequence: Synthetic oligonucleotide
gcaaagucuggugaacgag

SEQ ID NO: 2884629 - RNA, 19 nt, Artificial Sequence
  Description of Artificial Sequence: Synthetic oligonucleotide
gugugacuugaugucuggg

SEQ ID NO: 2884630 - RNA, 19 nt, Artificial Sequence
  Description of Artificial Sequence: Synthetic oligonucleotide
cugaagacacucaggaggu

SEQ ID NO: 2884631 - RNA, 19 nt, Artificial Sequence
  Description of Artificial Sequence: Synthetic oligonucleotide
guugaugguuccgucccug

SEQ ID NO: 2884632 - RNA, 19 nt, Artificial Sequence
  Description of Artificial Sequence: Synthetic oligonucleotide
gaugcggaaggcauagugu

SEQ ID NO: 2884633 - RNA, 19 nt, Artificial Sequence
  Description of Artificial Sequence: Synthetic oligonucleotide
ugucugggguugcuguauc

SEQ ID NO: 2884634 - RNA, 19 nt, Artificial Sequence
  Description of Artificial Sequence: Synthetic oligonucleotide
gagaaauaacaugcuggaa

SEQ ID NO: 2884635 - RNA, 19 nt, Artificial Sequence
  Description of Artificial Sequence: Synthetic oligonucleotide
cucaggucuucucugucca

SEQ ID NO: 2884636 - RNA, 19 nt, Artificial Sequence
  Description of Artificial Sequence: Synthetic oligonucleotide
auauugucgaugagcugcu

SEQ ID NO: 2884637 - RNA, 19 nt, Artificial Sequence
  Description of Artificial Sequence: Synthetic oligonucleotide
uguccgacucuuccaggau

SEQ ID NO: 2884638 - RNA, 19 nt, Artificial Sequence
  Description of Artificial Sequence: Synthetic oligonucleotide
ucuccaggcugggccagcg

SEQ ID NO: 2884639 - RNA, 19 nt, Artificial Sequence
  Description of Artificial Sequence: Synthetic oligonucleotide
gacucaggucuucucuguc

SEQ ID NO: 2884640 - RNA, 19 nt, Artificial Sequence
  Description of Artificial Sequence: Synthetic oligonucleotide
cuuuggccaccucucagca

SEQ ID NO: 2884641 - RNA, 19 nt, Artificial Sequence
  Description of Artificial Sequence: Synthetic oligonucleotide
caggaaguccucgaagcuc

SEQ ID NO: 2884642 - RNA, 19 nt, Artificial Sequence
  Description of Artificial Sequence: Synthetic oligonucleotide
agugcccucuccaggcugg

SEQ ID NO: 2884643 - RNA, 19 nt, Artificial Sequence
  Description of Artificial Sequence: Synthetic oligonucleotide
aggggacguggagaagacc

SEQ ID NO: 2884644 - RNA, 19 nt, Artificial Sequence
  Description of Artificial Sequence: Synthetic oligonucleotide
aggaggccagacucugcag

SEQ ID NO: 2884645 - RNA, 19 nt, Artificial Sequence
  Description of Artificial Sequence: Synthetic oligonucleotide
acucggagagguugauggu

SEQ ID NO: 2884646 - RNA, 19 nt, Artificial Sequence
  Description of Artificial Sequence: Synthetic oligonucleotide
augguuccgucccugucaa

SEQ ID NO: 2884647 - RNA, 19 nt, Artificial Sequence
  Description of Artificial Sequence: Synthetic oligonucleotide
gaacucggagagguugaug

SEQ ID NO: 2884648 - RNA, 19 nt, Artificial Sequence
  Description of Artificial Sequence: Synthetic oligonucleotide
cucgcccucuccugugagg

SEQ ID NO: 2884649 - RNA, 19 nt, Artificial Sequence
  Description of Artificial Sequence: Synthetic oligonucleotide
uuggugcucagaagccguc

SEQ ID NO: 2884650 - RNA, 19 nt, Artificial Sequence
  Description of Artificial Sequence: Synthetic oligonucleotide
uuccgucccugucaauguc

SEQ ID NO: 2884651 - RNA, 19 nt, Artificial Sequence
  Description of Artificial Sequence: Synthetic oligonucleotide
ccucucagcagugggaagg

SEQ ID NO: 2884652 - RNA, 19 nt, Artificial Sequence
  Description of Artificial Sequence: Synthetic oligonucleotide
gguuuuggacaggauguug

SEQ ID NO: 2884653 - RNA, 19 nt, Artificial Sequence
  Description of Artificial Sequence: Synthetic oligonucleotide
ggauauugucgaugagcug

SEQ ID NO: 2884654 - RNA, 19 nt, Artificial Sequence
  Description of Artificial Sequence: Synthetic oligonucleotide
ggggacguggagaagacca

SEQ ID NO: 2884655 - RNA, 19 nt, Artificial Sequence
  Description of Artificial Sequence: Synthetic oligonucleotide
accucucagcagugggaag

SEQ ID NO: 2884656 - RNA, 19 nt, Artificial Sequence
  Description of Artificial Sequence: Synthetic oligonucleotide
cagaagccgucacaggaca

SEQ ID NO: 2884657 - RNA, 19 nt, Artificial Sequence
  Description of Artificial Sequence: Synthetic oligonucleotide
uaucucugguaggggacgu

SEQ ID NO: 2884658 - RNA, 19 nt, Artificial Sequence
  Description of Artificial Sequence: Synthetic oligonucleotide
gucgaugagcugcuucauc

SEQ ID NO: 2884659 - RNA, 19 nt, Artificial Sequence
  Description of Artificial Sequence: Synthetic oligonucleotide
gaugucugggguugcugua

SEQ ID NO: 2884660 - RNA, 19 nt, Artificial Sequence
  Description of Artificial Sequence: Synthetic oligonucleotide
guccucgaagcucaggcua

SEQ ID NO: 2884661 - RNA, 19 nt, Artificial Sequence
  Description of Artificial Sequence: Synthetic oligonucleotide
cuggcaaagucuggugaac

SEQ ID NO: 2884662 - RNA, 19 nt, Artificial Sequence
  Description of Artificial Sequence: Synthetic oligonucleotide
ggcuaucucugguagggga

SEQ ID NO: 2884663 - RNA, 19 nt, Artificial Sequence
  Description of Artificial Sequence: Synthetic oligonucleotide
ugggaagguuuuggacagg

SEQ ID NO: 2884664 - RNA, 19 nt, Artificial Sequence
  Description of Artificial Sequence: Synthetic oligonucleotide
cugagccuaguguccucgc

SEQ ID NO: 2884665 - RNA, 19 nt, Artificial Sequence
  Description of Artificial Sequence: Synthetic oligonucleotide
caggaggccagacucugca

SEQ ID NO: 2884666 - RNA, 19 nt, Artificial Sequence
  Description of Artificial Sequence: Synthetic oligonucleotide
uaguguccucgcccucucc

SEQ ID NO: 2884667 - RNA, 19 nt, Artificial Sequence
  Description of Artificial Sequence: Synthetic oligonucleotide
cgagaaauaacaugcugga

SEQ ID NO: 2884668 - RNA, 19 nt, Artificial Sequence
  Description of Artificial Sequence: Synthetic oligonucleotide
ucucuguccaggguuccau

SEQ ID NO: 2884669 - RNA, 19 nt, Artificial Sequence
  Description of Artificial Sequence: Synthetic oligonucleotide
uggugcucagaagccguca

SEQ ID NO: 2884670 - RNA, 19 nt, Artificial Sequence
  Description of Artificial Sequence: Synthetic oligonucleotide
gaacgagaaauaacaugcu

SEQ ID NO: 2884671 - RNA, 19 nt, Artificial Sequence
  Description of Artificial Sequence: Synthetic oligonucleotide
caaagaugcggaaggcaua

SEQ ID NO: 2884672 - RNA, 19 nt, Artificial Sequence
  Description of Artificial Sequence: Synthetic oligonucleotide
ggcaaagucuggugaacga

SEQ ID NO: 2884673 - RNA, 19 nt, Artificial Sequence
  Description of Artificial Sequence: Synthetic oligonucleotide
gacucugcagugcccucuc

SEQ ID NO: 2884674 - RNA, 19 nt, Artificial Sequence
  Description of Artificial Sequence: Synthetic oligonucleotide
cuggcccucgacaccgcag

SEQ ID NO: 2884675 - RNA, 19 nt, Artificial Sequence
  Description of Artificial Sequence: Synthetic oligonucleotide
aggcuaucucugguagggg

SEQ ID NO: 2884676 - RNA, 19 nt, Artificial Sequence
  Description of Artificial Sequence: Synthetic oligonucleotide
ggagagguugaugguuccg

SEQ ID NO: 2884677 - RNA, 19 nt, Artificial Sequence
  Description of Artificial Sequence: Synthetic oligonucleotide
uccaggguuccaucaucau

SEQ ID NO: 2884678 - RNA, 19 nt, Artificial Sequence
  Description of Artificial Sequence: Synthetic oligonucleotide
cagcgcuggcccucgacac

SEQ ID NO: 2884679 - RNA, 19 nt, Artificial Sequence
  Description of Artificial Sequence: Synthetic oligonucleotide
agacucugcagugcccucu

SEQ ID NO: 2884680 - RNA, 19 nt, Artificial Sequence
  Description of Artificial Sequence: Synthetic oligonucleotide
gagcugcuucaucucagaa

SEQ ID NO: 2884681 - RNA, 19 nt, Artificial Sequence
  Description of Artificial Sequence: Synthetic oligonucleotide
uucucuguccaggguucca

SEQ ID NO: 2884682 - RNA, 19 nt, Artificial Sequence
  Description of Artificial Sequence: Synthetic oligonucleotide
aggcgugacuuuggccacc

SEQ ID NO: 2884683 - RNA, 19 nt, Artificial Sequence
  Description of Artificial Sequence: Synthetic oligonucleotide
gcaguucaccagcugacuc

SEQ ID NO: 2884684 - RNA, 19 nt, Artificial Sequence
  Description of Artificial Sequence: Synthetic oligonucleotide
caggcgugacuuuggccac

SEQ ID NO: 2884685 - RNA, 19 nt, Artificial Sequence
  Description of Artificial Sequence: Synthetic oligonucleotide
ggugcucagaagccgucac

SEQ ID NO: 2884686 - RNA, 19 nt, Artificial Sequence
  Description of Artificial Sequence: Synthetic oligonucleotide
cucuguccaggguuccauc

SEQ ID NO: 2884687 - RNA, 19 nt, Artificial Sequence
  Description of Artificial Sequence: Synthetic oligonucleotide
gagagguugaugguuccgu

SEQ ID NO: 2884688 - RNA, 19 nt, Artificial Sequence
  Description of Artificial Sequence: Synthetic oligonucleotide
guguccucgcccucuccug

SEQ ID NO: 2884689 - RNA, 19 nt, Artificial Sequence
  Description of Artificial Sequence: Synthetic oligonucleotide
gguugcuguaucgcugaag

SEQ ID NO: 2884690 - RNA, 19 nt, Artificial Sequence
  Description of Artificial Sequence: Synthetic oligonucleotide
aagaugcggaaggcauagu

SEQ ID NO: 2884691 - RNA, 19 nt, Artificial Sequence
  Description of Artificial Sequence: Synthetic oligonucleotide
guaucgcugaagacacuca

SEQ ID NO: 2884692 - RNA, 19 nt, Artificial Sequence
  Description of Artificial Sequence: Synthetic oligonucleotide
aggagcuggcaaagucugg

SEQ ID NO: 2884693 - RNA, 19 nt, Artificial Sequence
  Description of Artificial Sequence: Synthetic oligonucleotide
agacacucaggagguccag

SEQ ID NO: 2884694 - RNA, 19 nt, Artificial Sequence
  Description of Artificial Sequence: Synthetic oligonucleotide
uggccaccucucagcagug

SEQ ID NO: 2884695 - RNA, 19 nt, Artificial Sequence
  Description of Artificial Sequence: Synthetic oligonucleotide
ugucgaugagcugcuucau

SEQ ID NO: 2884696 - RNA, 19 nt, Artificial Sequence
  Description of Artificial Sequence: Synthetic oligonucleotide
gucacaggacaaucuuaaa

SEQ ID NO: 2884697 - RNA, 19 nt, Artificial Sequence
  Description of Artificial Sequence: Synthetic oligonucleotide
accgcaggcgugacuuugg

SEQ ID NO: 2884698 - RNA, 19 nt, Artificial Sequence
  Description of Artificial Sequence: Synthetic oligonucleotide
cugguaggggacguggaga

SEQ ID NO: 2884699 - RNA, 19 nt, Artificial Sequence
  Description of Artificial Sequence: Synthetic oligonucleotide
cuaguguccucgcccucuc

SEQ ID NO: 2884700 - RNA, 19 nt, Artificial Sequence
  Description of Artificial Sequence: Synthetic oligonucleotide
gcuaucucugguaggggac

SEQ ID NO: 2884701 - RNA, 19 nt, Artificial Sequence
  Description of Artificial Sequence: Synthetic oligonucleotide
ccaggguuccaucaucauc

SEQ ID NO: 2884702 - RNA, 19 nt, Artificial Sequence
  Description of Artificial Sequence: Synthetic oligonucleotide
augucugggguugcuguau

SEQ ID NO: 2884703 - RNA, 19 nt, Artificial Sequence
  Description of Artificial Sequence: Synthetic oligonucleotide
gggguugcuguaucgcuga

SEQ ID NO: 2884704 - RNA, 19 nt, Artificial Sequence
  Description of Artificial Sequence: Synthetic oligonucleotide
cuccugugaggcaguucac

SEQ ID NO: 2884705 - RNA, 19 nt, Artificial Sequence
  Description of Artificial Sequence: Synthetic oligonucleotide
ccgucccugucaauguccg

SEQ ID NO: 2884706 - RNA, 19 nt, Artificial Sequence
  Description of Artificial Sequence: Synthetic oligonucleotide
gcuggcaaagucuggugaa

SEQ ID NO: 2884707 - RNA, 19 nt, Artificial Sequence
  Description of Artificial Sequence: Synthetic oligonucleotide
gacaccgcaggcgugacuu

SEQ ID NO: 2884708 - RNA, 19 nt, Artificial Sequence
  Description of Artificial Sequence: Synthetic oligonucleotide
guuccgucccugucaaugu

SEQ ID NO: 2884709 - RNA, 19 nt, Artificial Sequence
  Description of Artificial Sequence: Synthetic oligonucleotide
gcggaaggcauagugugac

SEQ ID NO: 2884710 - RNA, 19 nt, Artificial Sequence
  Description of Artificial Sequence: Synthetic oligonucleotide
cagugcccucuccaggcug

SEQ ID NO: 2884711 - RNA, 19 nt, Artificial Sequence
  Description of Artificial Sequence: Synthetic oligonucleotide
aggguuccaucaucaucaa

SEQ ID NO: 2884712 - RNA, 19 nt, Artificial Sequence
  Description of Artificial Sequence: Synthetic oligonucleotide
gggaagguuuuggacagga

SEQ ID NO: 2884713 - RNA, 19 nt, Artificial Sequence
  Description of Artificial Sequence: Synthetic oligonucleotide
agccgucacaggacaaucu

SEQ ID NO: 2884714 - RNA, 19 nt, Artificial Sequence
  Description of Artificial Sequence: Synthetic oligonucleotide
gcugacucaggucuucucu

SEQ ID NO: 2884715 - RNA, 19 nt, Artificial Sequence
  Description of Artificial Sequence: Synthetic oligonucleotide
cucagcagugggaagguuu

SEQ ID NO: 2884716 - RNA, 19 nt, Artificial Sequence
  Description of Artificial Sequence: Synthetic oligonucleotide
guccgacucuuccaggaua

SEQ ID NO: 2884717 - RNA, 19 nt, Artificial Sequence
  Description of Artificial Sequence: Synthetic oligonucleotide
augcuggaacucggagagg

SEQ ID NO: 2884718 - RNA, 19 nt, Artificial Sequence
  Description of Artificial Sequence: Synthetic oligonucleotide
ggacguggagaagaccaug

SEQ ID NO: 2884719 - RNA, 19 nt, Artificial Sequence
  Description of Artificial Sequence: Synthetic oligonucleotide
cucugguaggggacgugga

SEQ ID NO: 2884720 - RNA, 19 nt, Artificial Sequence
  Description of Artificial Sequence: Synthetic oligonucleotide
guuggugcucagaagccgu

SEQ ID NO: 2884721 - RNA, 19 nt, Artificial Sequence
  Description of Artificial Sequence: Synthetic oligonucleotide
aucucugguaggggacgug

SEQ ID NO: 2884722 - RNA, 19 nt, Artificial Sequence
  Description of Artificial Sequence: Synthetic oligonucleotide
caccgcaggcgugacuuug

SEQ ID NO: 2884723 - RNA, 19 nt, Artificial Sequence
  Description of Artificial Sequence: Synthetic oligonucleotide
cugcuucaucucagaagca

SEQ ID NO: 2884724 - RNA, 19 nt, Artificial Sequence
  Description of Artificial Sequence: Synthetic oligonucleotide
guccucgcccucuccugug

SEQ ID NO: 2884725 - RNA, 19 nt, Artificial Sequence
  Description of Artificial Sequence: Synthetic oligonucleotide
cucgacaccgcaggcguga

SEQ ID NO: 2884726 - RNA, 19 nt, Artificial Sequence
  Description of Artificial Sequence: Synthetic oligonucleotide
guucaccagcugacucagg

SEQ ID NO: 2884727 - RNA, 19 nt, Artificial Sequence
  Description of Artificial Sequence: Synthetic oligonucleotide
gaagccgucacaggacaau

SEQ ID NO: 2884728 - RNA, 19 nt, Artificial Sequence
  Description of Artificial Sequence: Synthetic oligonucleotide
aggcugggccagcgcuggc

SEQ ID NO: 2884729 - RNA, 19 nt, Artificial Sequence
  Description of Artificial Sequence: Synthetic oligonucleotide
cacugagccuaguguccuc

SEQ ID NO: 2884730 - RNA, 19 nt, Artificial Sequence
  Description of Artificial Sequence: Synthetic oligonucleotide
cugggguugcuguaucgcu

SEQ ID NO: 2884731 - RNA, 19 nt, Artificial Sequence
  Description of Artificial Sequence: Synthetic oligonucleotide
gucuggugaacgagaaaua

SEQ ID NO: 2884732 - RNA, 19 nt, Artificial Sequence
  Description of Artificial Sequence: Synthetic oligonucleotide
cgucacaggacaaucuuaa

SEQ ID NO: 2884733 - RNA, 19 nt, Artificial Sequence
  Description of Artificial Sequence: Synthetic oligonucleotide
caccucucagcagugggaa

SEQ ID NO: 2884734 - RNA, 19 nt, Artificial Sequence
  Description of Artificial Sequence: Synthetic oligonucleotide
ggaggccagacucugcagu

SEQ ID NO: 2884735 - RNA, 19 nt, Artificial Sequence
  Description of Artificial Sequence: Synthetic oligonucleotide
cgacucuuccaggauauug

SEQ ID NO: 2884736 - RNA, 19 nt, Artificial Sequence
  Description of Artificial Sequence: Synthetic oligonucleotide
gcgcuggcccucgacaccg

SEQ ID NO: 2884737 - RNA, 19 nt, Artificial Sequence
  Description of Artificial Sequence: Synthetic oligonucleotide
ccaggauauugucgaugag

SEQ ID NO: 2884738 - RNA, 19 nt, Artificial Sequence
  Description of Artificial Sequence: Synthetic oligonucleotide
gcccucuccugugaggcag

SEQ ID NO: 2884739 - RNA, 19 nt, Artificial Sequence
  Description of Artificial Sequence: Synthetic oligonucleotide
cuccaggcugggccagcgc

SEQ ID NO: 2884740 - RNA, 19 nt, Artificial Sequence
  Description of Artificial Sequence: Synthetic oligonucleotide
agaagccgucacaggacaa

SEQ ID NO: 2884741 - RNA, 19 nt, Artificial Sequence
  Description of Artificial Sequence: Synthetic oligonucleotide
uauugucgaugagcugcuu

SEQ ID NO: 2884742 - RNA, 19 nt, Artificial Sequence
  Description of Artificial Sequence: Synthetic oligonucleotide
ggugaacgagaaauaacau

SEQ ID NO: 2884743 - RNA, 19 nt, Artificial Sequence
  Description of Artificial Sequence: Synthetic oligonucleotide
ggagcuggcaaagucuggu

SEQ ID NO: 2884744 - RNA, 19 nt, Artificial Sequence
  Description of Artificial Sequence: Synthetic oligonucleotide
cgcugaagacacucaggag

SEQ ID NO: 2884745 - RNA, 19 nt, Artificial Sequence
  Description of Artificial Sequence: Synthetic oligonucleotide
gcccucgacaccgcaggcg

SEQ ID NO: 2884746 - RNA, 19 nt, Artificial Sequence
  Description of Artificial Sequence: Synthetic oligonucleotide
cugucaauguccgacucuu

SEQ ID NO: 2884747 - RNA, 19 nt, Artificial Sequence
  Description of Artificial Sequence: Synthetic oligonucleotide
caucaucaucaaagucaaa

SEQ ID NO: 2884748 - RNA, 19 nt, Artificial Sequence
  Description of Artificial Sequence: Synthetic oligonucleotide
gguaggggacguggagaag

SEQ ID NO: 2884749 - RNA, 19 nt, Artificial Sequence
  Description of Artificial Sequence: Synthetic oligonucleotide
aggcauagugugacuugau

SEQ ID NO: 2884750 - RNA, 19 nt, Artificial Sequence
  Description of Artificial Sequence: Synthetic oligonucleotide
ucgacaccgcaggcgugac

SEQ ID NO: 2884751 - RNA, 19 nt, Artificial Sequence
  Description of Artificial Sequence: Synthetic oligonucleotide
cucuccugugaggcaguuc

SEQ ID NO: 2884752 - RNA, 19 nt, Artificial Sequence
  Description of Artificial Sequence: Synthetic oligonucleotide
gcuucaucucagaagcacu

SEQ ID NO: 2884753 - RNA, 19 nt, Artificial Sequence
  Description of Artificial Sequence: Synthetic oligonucleotide
ugcccucuccaggcugggc

SEQ ID NO: 2884754 - RNA, 19 nt, Artificial Sequence
  Description of Artificial Sequence: Synthetic oligonucleotide
gcucaggcuaucucuggua

SEQ ID NO: 2884755 - RNA, 19 nt, Artificial Sequence
  Description of Artificial Sequence: Synthetic oligonucleotide
ggaaggcauagugugacuu

SEQ ID NO: 2884756 - RNA, 19 nt, Artificial Sequence
  Description of Artificial Sequence: Synthetic oligonucleotide
cgaagcucaggcuaucucu

SEQ ID NO: 2884757 - RNA, 19 nt, Artificial Sequence
  Description of Artificial Sequence: Synthetic oligonucleotide
cccugucaauguccgacuc

SEQ ID NO: 2884758 - RNA, 19 nt, Artificial Sequence
  Description of Artificial Sequence: Synthetic oligonucleotide
cggagagguugaugguucc

SEQ ID NO: 2884759 - RNA, 19 nt, Artificial Sequence
  Description of Artificial Sequence: Synthetic oligonucleotide
cuugaugucugggguugcu

SEQ ID NO: 2884760 - RNA, 19 nt, Artificial Sequence
  Description of Artificial Sequence: Synthetic oligonucleotide
cuuccaggauauugucgau

SEQ ID NO: 2884761 - RNA, 19 nt, Artificial Sequence
  Description of Artificial Sequence: Synthetic oligonucleotide
gugcccucuccaggcuggg

SEQ ID NO: 2884762 - RNA, 19 nt, Artificial Sequence
  Description of Artificial Sequence: Synthetic oligonucleotide
ccaccucucagcaguggga

SEQ ID NO: 2884763 - RNA, 19 nt, Artificial Sequence
  Description of Artificial Sequence: Synthetic oligonucleotide
cucggagagguugaugguu

SEQ ID NO: 2884764 - RNA, 19 nt, Artificial Sequence
  Description of Artificial Sequence: Synthetic oligonucleotide
acaccgcaggcgugacuuu

SEQ ID NO: 2884765 - RNA, 19 nt, Artificial Sequence
  Description of Artificial Sequence: Synthetic oligonucleotide
cgcaggcgugacuuuggcc

SEQ ID NO: 2884766 - RNA, 19 nt, Artificial Sequence
  Description of Artificial Sequence: Synthetic oligonucleotide
ugguuccgucccugucaau

SEQ ID NO: 2884767 - RNA, 19 nt, Artificial Sequence
  Description of Artificial Sequence: Synthetic oligonucleotide
accagcugacucaggucuu

SEQ ID NO: 2884768 - RNA, 19 nt, Artificial Sequence
  Description of Artificial Sequence: Synthetic oligonucleotide
ggcccucgacaccgcaggc

SEQ ID NO: 2884769 - RNA, 19 nt, Artificial Sequence
  Description of Artificial Sequence: Synthetic oligonucleotide
ccagcgcuggcccucgaca

SEQ ID NO: 2884770 - RNA, 19 nt, Artificial Sequence
  Description of Artificial Sequence: Synthetic oligonucleotide
ggguuccaucaucaucaaa

SEQ ID NO: 2884771 - RNA, 19 nt, Artificial Sequence
  Description of Artificial Sequence: Synthetic oligonucleotide
gccagacucugcagugccc

SEQ ID NO: 2884772 - RNA, 19 nt, Artificial Sequence
  Description of Artificial Sequence: Synthetic oligonucleotide
cucgaagcucaggcuaucu

SEQ ID NO: 2884773 - RNA, 19 nt, Artificial Sequence
  Description of Artificial Sequence: Synthetic oligonucleotide
gguugaugguuccgucccu

SEQ ID NO: 2884774 - RNA, 19 nt, Artificial Sequence
  Description of Artificial Sequence: Synthetic oligonucleotide
ccgcaggcgugacuuuggc

SEQ ID NO: 2884775 - RNA, 19 nt, Artificial Sequence
  Description of Artificial Sequence: Synthetic oligonucleotide
ggacaggauguuggugcuc

SEQ ID NO: 2884776 - RNA, 19 nt, Artificial Sequence
  Description of Artificial Sequence: Synthetic oligonucleotide
ccagcugacucaggucuuc

SEQ ID NO: 2884777 - RNA, 19 nt, Artificial Sequence
  Description of Artificial Sequence: Synthetic oligonucleotide
ccgucacaggacaaucuua

SEQ ID NO: 2884778 - RNA, 19 nt, Artificial Sequence
  Description of Artificial Sequence: Synthetic oligonucleotide
gccgucacaggacaaucuu

SEQ ID NO: 2884779 - RNA, 19 nt, Artificial Sequence
  Description of Artificial Sequence: Synthetic oligonucleotide
cuguaucgcugaagacacu

SEQ ID NO: 2884780 - RNA, 19 nt, Artificial Sequence
  Description of Artificial Sequence: Synthetic oligonucleotide
ccaggaaguccucgaagcu

SEQ ID NO: 2884781 - RNA, 19 nt, Artificial Sequence
  Description of Artificial Sequence: Synthetic oligonucleotide
gccagcgcuggcccucgac

SEQ ID NO: 2884782 - RNA, 19 nt, Artificial Sequence
  Description of Artificial Sequence: Synthetic oligonucleotide
ccugucaauguccgacucu

SEQ ID NO: 2884783 - RNA, 19 nt, Artificial Sequence
  Description of Artificial Sequence: Synthetic oligonucleotide
gcuggcccucgacaccgca

SEQ ID NO: 2884784 - RNA, 19 nt, Artificial Sequence
  Description of Artificial Sequence: Synthetic oligonucleotide
ccucgacaccgcaggcgug

SEQ ID NO: 2884785 - RNA, 19 nt, Artificial Sequence
  Description of Artificial Sequence: Synthetic oligonucleotide
gcacugagccuaguguccu

SEQ ID NO: 2884786 - RNA, 19 nt, Artificial Sequence
  Description of Artificial Sequence: Synthetic oligonucleotide
gggccagcgcuggcccucg

SEQ ID NO: 2884787 - RNA, 19 nt, Artificial Sequence
  Description of Artificial Sequence: Synthetic oligonucleotide
ggaagguuuuggacaggau

SEQ ID NO: 2884788 - RNA, 19 nt, Artificial Sequence
  Description of Artificial Sequence: Synthetic oligonucleotide
gccuaguguccucgcccuc

SEQ ID NO: 2884789 - RNA, 19 nt, Artificial Sequence
  Description of Artificial Sequence: Synthetic oligonucleotide
cccucgacaccgcaggcgu

SEQ ID NO: 2884790 - RNA, 19 nt, Artificial Sequence
  Description of Artificial Sequence: Synthetic oligonucleotide
ggguugcuguaucgcugaa

SEQ ID NO: 2884791 - RNA, 19 nt, Artificial Sequence
  Description of Artificial Sequence: Synthetic oligonucleotide
ccucgaagcucaggcuauc

SEQ ID NO: 2884792 - RNA, 19 nt, Artificial Sequence
  Description of Artificial Sequence: Synthetic oligonucleotide
cagcugacucaggucuucu

SEQ ID NO: 2884793 - RNA, 19 nt, Artificial Sequence
  Description of Artificial Sequence: Synthetic oligonucleotide
ccuaguguccucgcccucu

SEQ ID NO: 2884794 - RNA, 19 nt, Artificial Sequence
  Description of Artificial Sequence: Synthetic oligonucleotide
ggaacucggagagguugau

SEQ ID NO: 2884795 - RNA, 19 nt, Artificial Sequence
  Description of Artificial Sequence: Synthetic oligonucleotide
gcagugcccucuccaggcu

SEQ ID NO: 2884796 - RNA, 19 nt, Artificial Sequence
  Description of Artificial Sequence: Synthetic oligonucleotide
ggcgugacuuuggccaccu

SEQ ID NO: 2884797 - RNA, 19 nt, Artificial Sequence
  Description of Artificial Sequence: Synthetic oligonucleotide
gggacguggagaagaccau

SEQ ID NO: 2884798 - RNA, 19 nt, Artificial Sequence
  Description of Artificial Sequence: Synthetic oligonucleotide
cagaagcacugagccuagu

SEQ ID NO: 2884799 - RNA, 19 nt, Artificial Sequence
  Description of Artificial Sequence: Synthetic oligonucleotide
gcgugacuuuggccaccuc

SEQ ID NO: 2884800 - RNA, 19 nt, Artificial Sequence
  Description of Artificial Sequence: Synthetic oligonucleotide
cgucccugucaauguccga

SEQ ID NO: 2884801 - RNA, 19 nt, Artificial Sequence
  Description of Artificial Sequence: Synthetic oligonucleotide
gcuggaacucggagagguu

SEQ ID NO: 2884802 - RNA, 19 nt, Artificial Sequence
  Description of Artificial Sequence: Synthetic oligonucleotide
cgcuggcccucgacaccgc

SEQ ID NO: 2884803 - RNA, 19 nt, Artificial Sequence
  Description of Artificial Sequence: Synthetic oligonucleotide
cggaaggcauagugugacu

SEQ ID NO: 2884804 - RNA, 19 nt, Artificial Sequence
  Description of Artificial Sequence: Synthetic oligonucleotide
cgcccucuccugugaggca

SEQ ID NO: 2884805 - RNA, 19 nt, Artificial Sequence
  Description of Artificial Sequence: Synthetic oligonucleotide
cccucuccugugaggcagu

SEQ ID NO: 2884806 - RNA, 19 nt, Artificial Sequence
  Description of Artificial Sequence: Synthetic oligonucleotide
ggccagcgcuggcccucga

SEQ ID NO: 2884807 - RNA, 19 nt, Artificial Sequence
  Description of Artificial Sequence: Synthetic oligonucleotide
cgacaccgcaggcgugacu

SEQ ID NO: 2884808 - RNA, 19 nt, Artificial Sequence
  Description of Artificial Sequence: Synthetic oligonucleotide
ccucuccugugaggcaguu

SEQ ID NO: 2884809 - RNA, 19 nt, Artificial Sequence
  Description of Artificial Sequence: Synthetic oligonucleotide
ccgacucuuccaggauauu

SEQ ID NO: 2884810 - RNA, 19 nt, Artificial Sequence
  Description of Artificial Sequence: Synthetic oligonucleotide
aagaaaagaacacagacaa

SEQ ID NO: 2884811 - RNA, 19 nt, Artificial Sequence
  Description of Artificial Sequence: Synthetic oligonucleotide
aacacagacaaagagaaac

SEQ ID NO: 2884812 - RNA, 19 nt, Artificial Sequence
  Description of Artificial Sequence: Synthetic oligonucleotide
caggauaucacauuggugg

SEQ ID NO: 2884813 - RNA, 19 nt, Artificial Sequence
  Description of Artificial Sequence: Synthetic oligonucleotide
aaagaacacagacaaagag

SEQ ID NO: 2884814 - RNA, 19 nt, Artificial Sequence
  Description of Artificial Sequence: Synthetic oligonucleotide
gaaaagaacacagacaaag

SEQ ID NO: 2884815 - RNA, 19 nt, Artificial Sequence
  Description of Artificial Sequence: Synthetic oligonucleotide
gauccugugacauacacag

SEQ ID NO: 2884816 - RNA, 19 nt, Artificial Sequence
  Description of Artificial Sequence: Synthetic oligonucleotide
uuguucaaagaaaagaaca

SEQ ID NO: 2884817 - RNA, 19 nt, Artificial Sequence
  Description of Artificial Sequence: Synthetic oligonucleotide
uuuuguucaaagaaaagaa

SEQ ID NO: 2884818 - RNA, 19 nt, Artificial Sequence
  Description of Artificial Sequence: Synthetic oligonucleotide
aagggcucagcucugcucc

SEQ ID NO: 2884819 - RNA, 19 nt, Artificial Sequence
  Description of Artificial Sequence: Synthetic oligonucleotide
uguccuaaaguccccaugg

SEQ ID NO: 2884820 - RNA, 19 nt, Artificial Sequence
  Description of Artificial Sequence: Synthetic oligonucleotide
caaagaaaagaacacagac

SEQ ID NO: 2884821 - RNA, 19 nt, Artificial Sequence
  Description of Artificial Sequence: Synthetic oligonucleotide
uguucaaagaaaagaacac

SEQ ID NO: 2884822 - RNA, 19 nt, Artificial Sequence
  Description of Artificial Sequence: Synthetic oligonucleotide
aagaccacugucugaaggg

SEQ ID NO: 2884823 - RNA, 19 nt, Artificial Sequence
  Description of Artificial Sequence: Synthetic oligonucleotide
ucugguaugaagacucagg

SEQ ID NO: 2884824 - RNA, 19 nt, Artificial Sequence
  Description of Artificial Sequence: Synthetic oligonucleotide
ugugguuuucuucucauca

SEQ ID NO: 2884825 - RNA, 19 nt, Artificial Sequence
  Description of Artificial Sequence: Synthetic oligonucleotide
ugaggaagcauuuuggggu

SEQ ID NO: 2884826 - RNA, 19 nt, Artificial Sequence
  Description of Artificial Sequence: Synthetic oligonucleotide
uguggugugacaaccauac

SEQ ID NO: 2884827 - RNA, 19 nt, Artificial Sequence
  Description of Artificial Sequence: Synthetic oligonucleotide
gacaaagagaaacaagcug

SEQ ID NO: 2884828 - RNA, 19 nt, Artificial Sequence
  Description of Artificial Sequence: Synthetic oligonucleotide
uaagaccacugucugaagg

SEQ ID NO: 2884829 - RNA, 19 nt, Artificial Sequence
  Description of Artificial Sequence: Synthetic oligonucleotide
ugaagacucaggucuaugg

SEQ ID NO: 2884830 - RNA, 19 nt, Artificial Sequence
  Description of Artificial Sequence: Synthetic oligonucleotide
uuuguucaaagaaaagaac

SEQ ID NO: 2884831 - RNA, 19 nt, Artificial Sequence
  Description of Artificial Sequence: Synthetic oligonucleotide
uccaguuuuguucaaagaa

SEQ ID NO: 2884832 - RNA, 19 nt, Artificial Sequence
  Description of Artificial Sequence: Synthetic oligonucleotide
uucgucugugcacagaaag

SEQ ID NO: 2884833 - RNA, 19 nt, Artificial Sequence
  Description of Artificial Sequence: Synthetic oligonucleotide
uguauuccaguuuuguuca

SEQ ID NO: 2884834 - RNA, 19 nt, Artificial Sequence
  Description of Artificial Sequence: Synthetic oligonucleotide
aagaauaagaccacugucu

SEQ ID NO: 2884835 - RNA, 19 nt, Artificial Sequence
  Description of Artificial Sequence: Synthetic oligonucleotide
agauggaagaauaagacca

SEQ ID NO: 2884836 - RNA, 19 nt, Artificial Sequence
  Description of Artificial Sequence: Synthetic oligonucleotide
ugacauacacagauggaag

SEQ ID NO: 2884837 - RNA, 19 nt, Artificial Sequence
  Description of Artificial Sequence: Synthetic oligonucleotide
ugagccauguccuaaaguc

SEQ ID NO: 2884838 - RNA, 19 nt, Artificial Sequence
  Description of Artificial Sequence: Synthetic oligonucleotide
aucacauugguggucagcc

SEQ ID NO: 2884839 - RNA, 19 nt, Artificial Sequence
  Description of Artificial Sequence: Synthetic oligonucleotide
aauaagaccacugucugaa

SEQ ID NO: 2884840 - RNA, 19 nt, Artificial Sequence
  Description of Artificial Sequence: Synthetic oligonucleotide
ucugaagggaaaccgagga

SEQ ID NO: 2884841 - RNA, 19 nt, Artificial Sequence
  Description of Artificial Sequence: Synthetic oligonucleotide
acagauggaagaauaagac

SEQ ID NO: 2884842 - RNA, 19 nt, Artificial Sequence
  Description of Artificial Sequence: Synthetic oligonucleotide
uuuucuucucaucauuugu

SEQ ID NO: 2884843 - RNA, 19 nt, Artificial Sequence
  Description of Artificial Sequence: Synthetic oligonucleotide
cugugacauacacagaugg

SEQ ID NO: 2884844 - RNA, 19 nt, Artificial Sequence
  Description of Artificial Sequence: Synthetic oligonucleotide
uguggugcagggcugagcc

SEQ ID NO: 2884845 - RNA, 19 nt, Artificial Sequence
  Description of Artificial Sequence: Synthetic oligonucleotide
uccuaaaguccccaugggg

SEQ ID NO: 2884846 - RNA, 19 nt, Artificial Sequence
  Description of Artificial Sequence: Synthetic oligonucleotide
agaauaagaccacugucug

SEQ ID NO: 2884847 - RNA, 19 nt, Artificial Sequence
  Description of Artificial Sequence: Synthetic oligonucleotide
aagacucaggucuauggca

SEQ ID NO: 2884848 - RNA, 19 nt, Artificial Sequence
  Description of Artificial Sequence: Synthetic oligonucleotide
uuggcaggauaucacauug

SEQ ID NO: 2884849 - RNA, 19 nt, Artificial Sequence
  Description of Artificial Sequence: Synthetic oligonucleotide
cuguauuccaguuuuguuc

SEQ ID NO: 2884850 - RNA, 19 nt, Artificial Sequence
  Description of Artificial Sequence: Synthetic oligonucleotide
uguggaaagcuguccaggg

SEQ ID NO: 2884851 - RNA, 19 nt, Artificial Sequence
  Description of Artificial Sequence: Synthetic oligonucleotide
gaagaauaagaccacuguc

SEQ ID NO: 2884852 - RNA, 19 nt, Artificial Sequence
  Description of Artificial Sequence: Synthetic oligonucleotide
ugguggucagcccugagag

SEQ ID NO: 2884853 - RNA, 19 nt, Artificial Sequence
  Description of Artificial Sequence: Synthetic oligonucleotide
uggaagaauaagaccacug

SEQ ID NO: 2884854 - RNA, 19 nt, Artificial Sequence
  Description of Artificial Sequence: Synthetic oligonucleotide
ugucugaagggaaaccgag

SEQ ID NO: 2884855 - RNA, 19 nt, Artificial Sequence
  Description of Artificial Sequence: Synthetic oligonucleotide
aagaacacagacaaagaga

SEQ ID NO: 2884856 - RNA, 19 nt, Artificial Sequence
  Description of Artificial Sequence: Synthetic oligonucleotide
uccugugacauacacagau

SEQ ID NO: 2884857 - RNA, 19 nt, Artificial Sequence
  Description of Artificial Sequence: Synthetic oligonucleotide
agaggauccugugacauac

SEQ ID NO: 2884858 - RNA, 19 nt, Artificial Sequence
  Description of Artificial Sequence: Synthetic oligonucleotide
ugaagggaaaccgaggaca

SEQ ID NO: 2884859 - RNA, 19 nt, Artificial Sequence
  Description of Artificial Sequence: Synthetic oligonucleotide
uucuucucaucauuugucc

SEQ ID NO: 2884860 - RNA, 19 nt, Artificial Sequence
  Description of Artificial Sequence: Synthetic oligonucleotide
gauggguucugguaugaag

SEQ ID NO: 2884861 - RNA, 19 nt, Artificial Sequence
  Description of Artificial Sequence: Synthetic oligonucleotide
uggaaagcuguccagggcu

SEQ ID NO: 2884862 - RNA, 19 nt, Artificial Sequence
  Description of Artificial Sequence: Synthetic oligonucleotide
ucugugcacagaaagggcu

SEQ ID NO: 2884863 - RNA, 19 nt, Artificial Sequence
  Description of Artificial Sequence: Synthetic oligonucleotide
uuuggcaugguuucacuga

SEQ ID NO: 2884864 - RNA, 19 nt, Artificial Sequence
  Description of Artificial Sequence: Synthetic oligonucleotide
cagauggaagaauaagacc

SEQ ID NO: 2884865 - RNA, 19 nt, Artificial Sequence
  Description of Artificial Sequence: Synthetic oligonucleotide
gaagacucaggucuauggc

SEQ ID NO: 2884866 - RNA, 19 nt, Artificial Sequence
  Description of Artificial Sequence: Synthetic oligonucleotide
cugaggaagcauuuugggg

SEQ ID NO: 2884867 - RNA, 19 nt, Artificial Sequence
  Description of Artificial Sequence: Synthetic oligonucleotide
agaaacaagcugguguucg

SEQ ID NO: 2884868 - RNA, 19 nt, Artificial Sequence
  Description of Artificial Sequence: Synthetic oligonucleotide
ucgucugugcacagaaagg

SEQ ID NO: 2884869 - RNA, 19 nt, Artificial Sequence
  Description of Artificial Sequence: Synthetic oligonucleotide
uggugugacaaccauacuu

SEQ ID NO: 2884870 - RNA, 19 nt, Artificial Sequence
  Description of Artificial Sequence: Synthetic oligonucleotide
acuuccuacucuguauucc

SEQ ID NO: 2884871 - RNA, 19 nt, Artificial Sequence
  Description of Artificial Sequence: Synthetic oligonucleotide
ugugacaaccauacuuggc

SEQ ID NO: 2884872 - RNA, 19 nt, Artificial Sequence
  Description of Artificial Sequence: Synthetic oligonucleotide
ucagguagcacagucucag

SEQ ID NO: 2884873 - RNA, 19 nt, Artificial Sequence
  Description of Artificial Sequence: Synthetic oligonucleotide
aacaagcugguguucgucu

SEQ ID NO: 2884874 - RNA, 19 nt, Artificial Sequence
  Description of Artificial Sequence: Synthetic oligonucleotide
aaagggcugacguuuugcu

SEQ ID NO: 2884875 - RNA, 19 nt, Artificial Sequence
  Description of Artificial Sequence: Synthetic oligonucleotide
ugacguuuugcuuuggcau

SEQ ID NO: 2884876 - RNA, 19 nt, Artificial Sequence
  Description of Artificial Sequence: Synthetic oligonucleotide
aggauccugugacauacac

SEQ ID NO: 2884877 - RNA, 19 nt, Artificial Sequence
  Description of Artificial Sequence: Synthetic oligonucleotide
gacaaccauacuuggcagg

SEQ ID NO: 2884878 - RNA, 19 nt, Artificial Sequence
  Description of Artificial Sequence: Synthetic oligonucleotide
aaaagaacacagacaaaga

SEQ ID NO: 2884879 - RNA, 19 nt, Artificial Sequence
  Description of Artificial Sequence: Synthetic oligonucleotide
gugacaaccauacuuggca

SEQ ID NO: 2884880 - RNA, 19 nt, Artificial Sequence
  Description of Artificial Sequence: Synthetic oligonucleotide
ggcaugguuucacugaugg

SEQ ID NO: 2884881 - RNA, 19 nt, Artificial Sequence
  Description of Artificial Sequence: Synthetic oligonucleotide
uacucuguauuccaguuuu

SEQ ID NO: 2884882 - RNA, 19 nt, Artificial Sequence
  Description of Artificial Sequence: Synthetic oligonucleotide
gguaugaagacucaggucu

SEQ ID NO: 2884883 - RNA, 19 nt, Artificial Sequence
  Description of Artificial Sequence: Synthetic oligonucleotide
aaaccgaggacagcugagg

SEQ ID NO: 2884884 - RNA, 19 nt, Artificial Sequence
  Description of Artificial Sequence: Synthetic oligonucleotide
uguucgucugugcacagaa

SEQ ID NO: 2884885 - RNA, 19 nt, Artificial Sequence
  Description of Artificial Sequence: Synthetic oligonucleotide
agccauguccuaaaguccc

SEQ ID NO: 2884886 - RNA, 19 nt, Artificial Sequence
  Description of Artificial Sequence: Synthetic oligonucleotide
ugugacauacacagaugga

SEQ ID NO: 2884887 - RNA, 19 nt, Artificial Sequence
  Description of Artificial Sequence: Synthetic oligonucleotide
gacauacacagauggaaga

SEQ ID NO: 2884888 - RNA, 19 nt, Artificial Sequence
  Description of Artificial Sequence: Synthetic oligonucleotide
ugacaaccauacuuggcag

SEQ ID NO: 2884889 - RNA, 19 nt, Artificial Sequence
  Description of Artificial Sequence: Synthetic oligonucleotide
agucucaggucuccuggcc

SEQ ID NO: 2884890 - RNA, 19 nt, Artificial Sequence
  Description of Artificial Sequence: Synthetic oligonucleotide
aaacaagcugguguucguc

SEQ ID NO: 2884891 - RNA, 19 nt, Artificial Sequence
  Description of Artificial Sequence: Synthetic oligonucleotide
gacucccuccaucagguag

SEQ ID NO: 2884892 - RNA, 19 nt, Artificial Sequence
  Description of Artificial Sequence: Synthetic oligonucleotide
agagaaacaagcugguguu

SEQ ID NO: 2884893 - RNA, 19 nt, Artificial Sequence
  Description of Artificial Sequence: Synthetic oligonucleotide
cacagauggaagaauaaga

SEQ ID NO: 2884894 - RNA, 19 nt, Artificial Sequence
  Description of Artificial Sequence: Synthetic oligonucleotide
gacguuuugcuuuggcaug

SEQ ID NO: 2884895 - RNA, 19 nt, Artificial Sequence
  Description of Artificial Sequence: Synthetic oligonucleotide
gauaucacauuggugguca

SEQ ID NO: 2884896 - RNA, 19 nt, Artificial Sequence
  Description of Artificial Sequence: Synthetic oligonucleotide
cucugcuccaggcagcugg

SEQ ID NO: 2884897 - RNA, 19 nt, Artificial Sequence
  Description of Artificial Sequence: Synthetic oligonucleotide
aaagagaaacaagcuggug

SEQ ID NO: 2884898 - RNA, 19 nt, Artificial Sequence
  Description of Artificial Sequence: Synthetic oligonucleotide
uccaucagguagcacaguc

SEQ ID NO: 2884899 - RNA, 19 nt, Artificial Sequence
  Description of Artificial Sequence: Synthetic oligonucleotide
uacacagauggaagaauaa

SEQ ID NO: 2884900 - RNA, 19 nt, Artificial Sequence
  Description of Artificial Sequence: Synthetic oligonucleotide
cuaaaguccccauggggac

SEQ ID NO: 2884901 - RNA, 19 nt, Artificial Sequence
  Description of Artificial Sequence: Synthetic oligonucleotide
ugagucacuguggaaagcu

SEQ ID NO: 2884902 - RNA, 19 nt, Artificial Sequence
  Description of Artificial Sequence: Synthetic oligonucleotide
ucaggucuauggcaggcug

SEQ ID NO: 2884903 - RNA, 19 nt, Artificial Sequence
  Description of Artificial Sequence: Synthetic oligonucleotide
ucuauggcaggcugaguca

SEQ ID NO: 2884904 - RNA, 19 nt, Artificial Sequence
  Description of Artificial Sequence: Synthetic oligonucleotide
ugggguguggugcagggcu

SEQ ID NO: 2884905 - RNA, 19 nt, Artificial Sequence
  Description of Artificial Sequence: Synthetic oligonucleotide
acacagauggaagaauaag

SEQ ID NO: 2884906 - RNA, 19 nt, Artificial Sequence
  Description of Artificial Sequence: Synthetic oligonucleotide
gucuauggcaggcugaguc

SEQ ID NO: 2884907 - RNA, 19 nt, Artificial Sequence
  Description of Artificial Sequence: Synthetic oligonucleotide
uggcaggauaucacauugg

SEQ ID NO: 2884908 - RNA, 19 nt, Artificial Sequence
  Description of Artificial Sequence: Synthetic oligonucleotide
ucuucucaucauuuguccu

SEQ ID NO: 2884909 - RNA, 19 nt, Artificial Sequence
  Description of Artificial Sequence: Synthetic oligonucleotide
uacuuggcaggauaucaca

SEQ ID NO: 2884910 - RNA, 19 nt, Artificial Sequence
  Description of Artificial Sequence: Synthetic oligonucleotide
aaccauacuuggcaggaua

SEQ ID NO: 2884911 - RNA, 19 nt, Artificial Sequence
  Description of Artificial Sequence: Synthetic oligonucleotide
aguuuuguucaaagaaaag

SEQ ID NO: 2884912 - RNA, 19 nt, Artificial Sequence
  Description of Artificial Sequence: Synthetic oligonucleotide
uuccaguuuuguucaaaga

SEQ ID NO: 2884913 - RNA, 19 nt, Artificial Sequence
  Description of Artificial Sequence: Synthetic oligonucleotide
uugguggucagcccugaga

SEQ ID NO: 2884914 - RNA, 19 nt, Artificial Sequence
  Description of Artificial Sequence: Synthetic oligonucleotide
aaccgaggacagcugagga

SEQ ID NO: 2884915 - RNA, 19 nt, Artificial Sequence
  Description of Artificial Sequence: Synthetic oligonucleotide
auacuuggcaggauaucac

SEQ ID NO: 2884916 - RNA, 19 nt, Artificial Sequence
  Description of Artificial Sequence: Synthetic oligonucleotide
ggugugacaaccauacuug

SEQ ID NO: 2884917 - RNA, 19 nt, Artificial Sequence
  Description of Artificial Sequence: Synthetic oligonucleotide
gauggaagaauaagaccac

SEQ ID NO: 2884918 - RNA, 19 nt, Artificial Sequence
  Description of Artificial Sequence: Synthetic oligonucleotide
gugugacaaccauacuugg

SEQ ID NO: 2884919 - RNA, 19 nt, Artificial Sequence
  Description of Artificial Sequence: Synthetic oligonucleotide
ucuguauuccaguuuuguu

SEQ ID NO: 2884920 - RNA, 19 nt, Artificial Sequence
  Description of Artificial Sequence: Synthetic oligonucleotide
cuuuggcaugguuucacug

SEQ ID NO: 2884921 - RNA, 19 nt, Artificial Sequence
  Description of Artificial Sequence: Synthetic oligonucleotide
gcugaggaagcauuuuggg

SEQ ID NO: 2884922 - RNA, 19 nt, Artificial Sequence
  Description of Artificial Sequence: Synthetic oligonucleotide
aagggaaaccgaggacagc

SEQ ID NO: 2884923 - RNA, 19 nt, Artificial Sequence
  Description of Artificial Sequence: Synthetic oligonucleotide
agguagcacagucucaggu

SEQ ID NO: 2884924 - RNA, 19 nt, Artificial Sequence
  Description of Artificial Sequence: Synthetic oligonucleotide
acucaggucuauggcaggc

SEQ ID NO: 2884925 - RNA, 19 nt, Artificial Sequence
  Description of Artificial Sequence: Synthetic oligonucleotide
uuccuacucuguauuccag

SEQ ID NO: 2884926 - RNA, 19 nt, Artificial Sequence
  Description of Artificial Sequence: Synthetic oligonucleotide
caguuuuguucaaagaaaa

SEQ ID NO: 2884927 - RNA, 19 nt, Artificial Sequence
  Description of Artificial Sequence: Synthetic oligonucleotide
auggguucugguaugaaga

SEQ ID NO: 2884928 - RNA, 19 nt, Artificial Sequence
  Description of Artificial Sequence: Synthetic oligonucleotide
acucccuccaucagguagc

SEQ ID NO: 2884929 - RNA, 19 nt, Artificial Sequence
  Description of Artificial Sequence: Synthetic oligonucleotide
agcugaggaagcauuuugg

SEQ ID NO: 2884930 - RNA, 19 nt, Artificial Sequence
  Description of Artificial Sequence: Synthetic oligonucleotide
gaauaagaccacugucuga

SEQ ID NO: 2884931 - RNA, 19 nt, Artificial Sequence
  Description of Artificial Sequence: Synthetic oligonucleotide
agggaaaccgaggacagcu

SEQ ID NO: 2884932 - RNA, 19 nt, Artificial Sequence
  Description of Artificial Sequence: Synthetic oligonucleotide
gaaagggcugacguuuugc

SEQ ID NO: 2884933 - RNA, 19 nt, Artificial Sequence
  Description of Artificial Sequence: Synthetic oligonucleotide
acugauggguucugguaug

SEQ ID NO: 2884934 - RNA, 19 nt, Artificial Sequence
  Description of Artificial Sequence: Synthetic oligonucleotide
aggauaucacauugguggu

SEQ ID NO: 2884935 - RNA, 19 nt, Artificial Sequence
  Description of Artificial Sequence: Synthetic oligonucleotide
ugguaugaagacucagguc

SEQ ID NO: 2884936 - RNA, 19 nt, Artificial Sequence
  Description of Artificial Sequence: Synthetic oligonucleotide
agacaaagagaaacaagcu

SEQ ID NO: 2884937 - RNA, 19 nt, Artificial Sequence
  Description of Artificial Sequence: Synthetic oligonucleotide
agcacagucucaggucucc

SEQ ID NO: 2884938 - RNA, 19 nt, Artificial Sequence
  Description of Artificial Sequence: Synthetic oligonucleotide
agggcugacguuuugcuuu

SEQ ID NO: 2884939 - RNA, 19 nt, Artificial Sequence
  Description of Artificial Sequence: Synthetic oligonucleotide
ucacuuccuacucuguauu

SEQ ID NO: 2884940 - RNA, 19 nt, Artificial Sequence
  Description of Artificial Sequence: Synthetic oligonucleotide
aagcauuuugggguguggu

SEQ ID NO: 2884941 - RNA, 19 nt, Artificial Sequence
  Description of Artificial Sequence: Synthetic oligonucleotide
cauacuuggcaggauauca

SEQ ID NO: 2884942 - RNA, 19 nt, Artificial Sequence
  Description of Artificial Sequence: Synthetic oligonucleotide
uucugguaugaagacucag

SEQ ID NO: 2884943 - RNA, 19 nt, Artificial Sequence
  Description of Artificial Sequence: Synthetic oligonucleotide
auguccuaaaguccccaug

SEQ ID NO: 2884944 - RNA, 19 nt, Artificial Sequence
  Description of Artificial Sequence: Synthetic oligonucleotide
uccuacucuguauuccagu

SEQ ID NO: 2884945 - RNA, 19 nt, Artificial Sequence
  Description of Artificial Sequence: Synthetic oligonucleotide
uuuugggguguggugcagg

SEQ ID NO: 2884946 - RNA, 19 nt, Artificial Sequence
  Description of Artificial Sequence: Synthetic oligonucleotide
agacucaggucuauggcag

SEQ ID NO: 2884947 - RNA, 19 nt, Artificial Sequence
  Description of Artificial Sequence: Synthetic oligonucleotide
uggguucugguaugaagac

SEQ ID NO: 2884948 - RNA, 19 nt, Artificial Sequence
  Description of Artificial Sequence: Synthetic oligonucleotide
ugguuuucuucucaucauu

SEQ ID NO: 2884949 - RNA, 19 nt, Artificial Sequence
  Description of Artificial Sequence: Synthetic oligonucleotide
acaaccauacuuggcagga

SEQ ID NO: 2884950 - RNA, 19 nt, Artificial Sequence
  Description of Artificial Sequence: Synthetic oligonucleotide
ugagaggauccugugacau

SEQ ID NO: 2884951 - RNA, 19 nt, Artificial Sequence
  Description of Artificial Sequence: Synthetic oligonucleotide
acagaaagggcugacguuu

SEQ ID NO: 2884952 - RNA, 19 nt, Artificial Sequence
  Description of Artificial Sequence: Synthetic oligonucleotide
ucugugguuuucuucucau

SEQ ID NO: 2884953 - RNA, 19 nt, Artificial Sequence
  Description of Artificial Sequence: Synthetic oligonucleotide
gaaaccgaggacagcugag

SEQ ID NO: 2884954 - RNA, 19 nt, Artificial Sequence
  Description of Artificial Sequence: Synthetic oligonucleotide
gugacauacacagauggaa

SEQ ID NO: 2884955 - RNA, 19 nt, Artificial Sequence
  Description of Artificial Sequence: Synthetic oligonucleotide
cuguggaaagcuguccagg

SEQ ID NO: 2884956 - RNA, 19 nt, Artificial Sequence
  Description of Artificial Sequence: Synthetic oligonucleotide
gguucugguaugaagacuc

SEQ ID NO: 2884957 - RNA, 19 nt, Artificial Sequence
  Description of Artificial Sequence: Synthetic oligonucleotide
gacucaggucuauggcagg

SEQ ID NO: 2884958 - RNA, 19 nt, Artificial Sequence
  Description of Artificial Sequence: Synthetic oligonucleotide
acguuuugcuuuggcaugg

SEQ ID NO: 2884959 - RNA, 19 nt, Artificial Sequence
  Description of Artificial Sequence: Synthetic oligonucleotide
gagccauguccuaaagucc

SEQ ID NO: 2884960 - RNA, 19 nt, Artificial Sequence
  Description of Artificial Sequence: Synthetic oligonucleotide
ucacugauggguucuggua

SEQ ID NO: 2884961 - RNA, 19 nt, Artificial Sequence
  Description of Artificial Sequence: Synthetic oligonucleotide
acaagcugguguucgucug

SEQ ID NO: 2884962 - RNA, 19 nt, Artificial Sequence
  Description of Artificial Sequence: Synthetic oligonucleotide
auaagaccacugucugaag

SEQ ID NO: 2884963 - RNA, 19 nt, Artificial Sequence
  Description of Artificial Sequence: Synthetic oligonucleotide
ucuccuggcccugugggcc

SEQ ID NO: 2884964 - RNA, 19 nt, Artificial Sequence
  Description of Artificial Sequence: Synthetic oligonucleotide
auggggacucccuccauca

SEQ ID NO: 2884965 - RNA, 19 nt, Artificial Sequence
  Description of Artificial Sequence: Synthetic oligonucleotide
uaucacauugguggucagc

SEQ ID NO: 2884966 - RNA, 19 nt, Artificial Sequence
  Description of Artificial Sequence: Synthetic oligonucleotide
caugguuucacugaugggu

SEQ ID NO: 2884967 - RNA, 19 nt, Artificial Sequence
  Description of Artificial Sequence: Synthetic oligonucleotide
ugguguucgucugugcaca

SEQ ID NO: 2884968 - RNA, 19 nt, Artificial Sequence
  Description of Artificial Sequence: Synthetic oligonucleotide
ucacuguggaaagcugucc

SEQ ID NO: 2884969 - RNA, 19 nt, Artificial Sequence
  Description of Artificial Sequence: Synthetic oligonucleotide
ugggccgaagggcucagcu

SEQ ID NO: 2884970 - RNA, 19 nt, Artificial Sequence
  Description of Artificial Sequence: Synthetic oligonucleotide
cuuccuacucuguauucca

SEQ ID NO: 2884971 - RNA, 19 nt, Artificial Sequence
  Description of Artificial Sequence: Synthetic oligonucleotide
cagcugaggaagcauuuug

SEQ ID NO: 2884972 - RNA, 19 nt, Artificial Sequence
  Description of Artificial Sequence: Synthetic oligonucleotide
gucugaagggaaaccgagg

SEQ ID NO: 2884973 - RNA, 19 nt, Artificial Sequence
  Description of Artificial Sequence: Synthetic oligonucleotide
ccugagaggauccugugac

SEQ ID NO: 2884974 - RNA, 19 nt, Artificial Sequence
  Description of Artificial Sequence: Synthetic oligonucleotide
acacagacaaagagaaaca

SEQ ID NO: 2884975 - RNA, 19 nt, Artificial Sequence
  Description of Artificial Sequence: Synthetic oligonucleotide
cugacguuuugcuuuggca

SEQ ID NO: 2884976 - RNA, 19 nt, Artificial Sequence
  Description of Artificial Sequence: Synthetic oligonucleotide
cugguguucgucugugcac

SEQ ID NO: 2884977 - RNA, 19 nt, Artificial Sequence
  Description of Artificial Sequence: Synthetic oligonucleotide
uauuccaguuuuguucaaa

SEQ ID NO: 2884978 - RNA, 19 nt, Artificial Sequence
  Description of Artificial Sequence: Synthetic oligonucleotide
guggaaagcuguccagggc

SEQ ID NO: 2884979 - RNA, 19 nt, Artificial Sequence
  Description of Artificial Sequence: Synthetic oligonucleotide
cugaagggaaaccgaggac

SEQ ID NO: 2884980 - RNA, 19 nt, Artificial Sequence
  Description of Artificial Sequence: Synthetic oligonucleotide
auacacagauggaagaaua

SEQ ID NO: 2884981 - RNA, 19 nt, Artificial Sequence
  Description of Artificial Sequence: Synthetic oligonucleotide
gaagggcucagcucugcuc

SEQ ID NO: 2884982 - RNA, 19 nt, Artificial Sequence
  Description of Artificial Sequence: Synthetic oligonucleotide
agaaagggcugacguuuug

SEQ ID NO: 2884983 - RNA, 19 nt, Artificial Sequence
  Description of Artificial Sequence: Synthetic oligonucleotide
aagggcugacguuuugcuu

SEQ ID NO: 2884984 - RNA, 19 nt, Artificial Sequence
  Description of Artificial Sequence: Synthetic oligonucleotide
ccuaaaguccccaugggga

SEQ ID NO: 2884985 - RNA, 19 nt, Artificial Sequence
  Description of Artificial Sequence: Synthetic oligonucleotide
gcauuuugggguguggugc

SEQ ID NO: 2884986 - RNA, 19 nt, Artificial Sequence
  Description of Artificial Sequence: Synthetic oligonucleotide
guggucagcccugagagga

SEQ ID NO: 2884987 - RNA, 19 nt, Artificial Sequence
  Description of Artificial Sequence: Synthetic oligonucleotide
aggucuauggcaggcugag

SEQ ID NO: 2884988 - RNA, 19 nt, Artificial Sequence
  Description of Artificial Sequence: Synthetic oligonucleotide
uucucacuuccuacucugu

SEQ ID NO: 2884989 - RNA, 19 nt, Artificial Sequence
  Description of Artificial Sequence: Synthetic oligonucleotide
auggaagaauaagaccacu

SEQ ID NO: 2884990 - RNA, 19 nt, Artificial Sequence
  Description of Artificial Sequence: Synthetic oligonucleotide
aaagcuguccagggcucug

SEQ ID NO: 2884991 - RNA, 19 nt, Artificial Sequence
  Description of Artificial Sequence: Synthetic oligonucleotide
gcugagucacuguggaaag

SEQ ID NO: 2884992 - RNA, 19 nt, Artificial Sequence
  Description of Artificial Sequence: Synthetic oligonucleotide
ugcuuuggcaugguuucac

SEQ ID NO: 2884993 - RNA, 19 nt, Artificial Sequence
  Description of Artificial Sequence: Synthetic oligonucleotide
ggaagaauaagaccacugu

SEQ ID NO: 2884994 - RNA, 19 nt, Artificial Sequence
  Description of Artificial Sequence: Synthetic oligonucleotide
guagcacagucucaggucu

SEQ ID NO: 2884995 - RNA, 19 nt, Artificial Sequence
  Description of Artificial Sequence: Synthetic oligonucleotide
auaucacauugguggucag

SEQ ID NO: 2884996 - RNA, 19 nt, Artificial Sequence
  Description of Artificial Sequence: Synthetic oligonucleotide
gguagcacagucucagguc

SEQ ID NO: 2884997 - RNA, 19 nt, Artificial Sequence
  Description of Artificial Sequence: Synthetic oligonucleotide
cugguaugaagacucaggu

SEQ ID NO: 2884998 - RNA, 19 nt, Artificial Sequence
  Description of Artificial Sequence: Synthetic oligonucleotide
gcagggcugagccaugucc

SEQ ID NO: 2884999 - RNA, 19 nt, Artificial Sequence
  Description of Artificial Sequence: Synthetic oligonucleotide
cuauggcaggcugagucac

SEQ ID NO: 2885000 - RNA, 19 nt, Artificial Sequence
  Description of Artificial Sequence: Synthetic oligonucleotide
cacagucucaggucuccug

SEQ ID NO: 2885001 - RNA, 19 nt, Artificial Sequence
  Description of Artificial Sequence: Synthetic oligonucleotide
uaaaguccccauggggacu

SEQ ID NO: 2885002 - RNA, 19 nt, Artificial Sequence
  Description of Artificial Sequence: Synthetic oligonucleotide
ggggacucccuccaucagg

SEQ ID NO: 2885003 - RNA, 19 nt, Artificial Sequence
  Description of Artificial Sequence: Synthetic oligonucleotide
uggcaugguuucacugaug

SEQ ID NO: 2885004 - RNA, 19 nt, Artificial Sequence
  Description of Artificial Sequence: Synthetic oligonucleotide
uauggcaggcugagucacu

SEQ ID NO: 2885005 - RNA, 19 nt, Artificial Sequence
  Description of Artificial Sequence: Synthetic oligonucleotide
uaugaagacucaggucuau

SEQ ID NO: 2885006 - RNA, 19 nt, Artificial Sequence
  Description of Artificial Sequence: Synthetic oligonucleotide
cugucugaagggaaaccga

SEQ ID NO: 2885007 - RNA, 19 nt, Artificial Sequence
  Description of Artificial Sequence: Synthetic oligonucleotide
cauuuugggguguggugca

SEQ ID NO: 2885008 - RNA, 19 nt, Artificial Sequence
  Description of Artificial Sequence: Synthetic oligonucleotide
cacugucugaagggaaacc

SEQ ID NO: 2885009 - RNA, 19 nt, Artificial Sequence
  Description of Artificial Sequence: Synthetic oligonucleotide
auugguggucagcccugag

SEQ ID NO: 2885010 - RNA, 19 nt, Artificial Sequence
  Description of Artificial Sequence: Synthetic oligonucleotide
cagguagcacagucucagg

SEQ ID NO: 2885011 - RNA, 19 nt, Artificial Sequence
  Description of Artificial Sequence: Synthetic oligonucleotide
ugguuucacugauggguuc

SEQ ID NO: 2885012 - RNA, 19 nt, Artificial Sequence
  Description of Artificial Sequence: Synthetic oligonucleotide
cacuuccuacucuguauuc

SEQ ID NO: 2885013 - RNA, 19 nt, Artificial Sequence
  Description of Artificial Sequence: Synthetic oligonucleotide
gagucacuguggaaagcug

SEQ ID NO: 2885014 - RNA, 19 nt, Artificial Sequence
  Description of Artificial Sequence: Synthetic oligonucleotide
uggggacucccuccaucag

SEQ ID NO: 2885015 - RNA, 19 nt, Artificial Sequence
  Description of Artificial Sequence: Synthetic oligonucleotide
cagucucaggucuccuggc

SEQ ID NO: 2885016 - RNA, 19 nt, Artificial Sequence
  Description of Artificial Sequence: Synthetic oligonucleotide
augaagacucaggucuaug

SEQ ID NO: 2885017 - RNA, 19 nt, Artificial Sequence
  Description of Artificial Sequence: Synthetic oligonucleotide
uggugcagggcugagccau

SEQ ID NO: 2885018 - RNA, 19 nt, Artificial Sequence
  Description of Artificial Sequence: Synthetic oligonucleotide
auggcaggcugagucacug

SEQ ID NO: 2885019 - RNA, 19 nt, Artificial Sequence
  Description of Artificial Sequence: Synthetic oligonucleotide
accgaggacagcugaggaa

SEQ ID NO: 2885020 - RNA, 19 nt, Artificial Sequence
  Description of Artificial Sequence: Synthetic oligonucleotide
cauggggacucccuccauc

SEQ ID NO: 2885021 - RNA, 19 nt, Artificial Sequence
  Description of Artificial Sequence: Synthetic oligonucleotide
cgucugugcacagaaaggg

SEQ ID NO: 2885022 - RNA, 19 nt, Artificial Sequence
  Description of Artificial Sequence: Synthetic oligonucleotide
gagaaacaagcugguguuc

SEQ ID NO: 2885023 - RNA, 19 nt, Artificial Sequence
  Description of Artificial Sequence: Synthetic oligonucleotide
ggaaaccgaggacagcuga

SEQ ID NO: 2885024 - RNA, 19 nt, Artificial Sequence
  Description of Artificial Sequence: Synthetic oligonucleotide
ggcccugugggccgaaggg

SEQ ID NO: 2885025 - RNA, 19 nt, Artificial Sequence
  Description of Artificial Sequence: Synthetic oligonucleotide
agaccacugucugaaggga

SEQ ID NO: 2885026 - RNA, 19 nt, Artificial Sequence
  Description of Artificial Sequence: Synthetic oligonucleotide
gaaacaagcugguguucgu

SEQ ID NO: 2885027 - RNA, 19 nt, Artificial Sequence
  Description of Artificial Sequence: Synthetic oligonucleotide
caggcugagucacugugga

SEQ ID NO: 2885028 - RNA, 19 nt, Artificial Sequence
  Description of Artificial Sequence: Synthetic oligonucleotide
caggcagcuggggacgugg

SEQ ID NO: 2885029 - RNA, 19 nt, Artificial Sequence
  Description of Artificial Sequence: Synthetic oligonucleotide
acuuggcaggauaucacau

SEQ ID NO: 2885030 - RNA, 19 nt, Artificial Sequence
  Description of Artificial Sequence: Synthetic oligonucleotide
accauacuuggcaggauau

SEQ ID NO: 2885031 - RNA, 19 nt, Artificial Sequence
  Description of Artificial Sequence: Synthetic oligonucleotide
gcaugguuucacugauggg

SEQ ID NO: 2885032 - RNA, 19 nt, Artificial Sequence
  Description of Artificial Sequence: Synthetic oligonucleotide
cccuccaucagguagcaca

SEQ ID NO: 2885033 - RNA, 19 nt, Artificial Sequence
  Description of Artificial Sequence: Synthetic oligonucleotide
agaaaagaacacagacaaa

SEQ ID NO: 2885034 - RNA, 19 nt, Artificial Sequence
  Description of Artificial Sequence: Synthetic oligonucleotide
ccgaggacagcugaggaag

SEQ ID NO: 2885035 - RNA, 19 nt, Artificial Sequence
  Description of Artificial Sequence: Synthetic oligonucleotide
cugagucacuguggaaagc

SEQ ID NO: 2885036 - RNA, 19 nt, Artificial Sequence
  Description of Artificial Sequence: Synthetic oligonucleotide
uccccauggggacucccuc

SEQ ID NO: 2885037 - RNA, 19 nt, Artificial Sequence
  Description of Artificial Sequence: Synthetic oligonucleotide
cuccaggcagcuggggacg

SEQ ID NO: 2885038 - RNA, 19 nt, Artificial Sequence
  Description of Artificial Sequence: Synthetic oligonucleotide
gcugguguucgucugugca

SEQ ID NO: 2885039 - RNA, 19 nt, Artificial Sequence
  Description of Artificial Sequence: Synthetic oligonucleotide
gguggucagcccugagagg

SEQ ID NO: 2885040 - RNA, 19 nt, Artificial Sequence
  Description of Artificial Sequence: Synthetic oligonucleotide
augguuucacugauggguu

SEQ ID NO: 2885041 - RNA, 19 nt, Artificial Sequence
  Description of Artificial Sequence: Synthetic oligonucleotide
cucugugguuuucuucuca

SEQ ID NO: 2885042 - RNA, 19 nt, Artificial Sequence
  Description of Artificial Sequence: Synthetic oligonucleotide
auuuugggguguggugcag

SEQ ID NO: 2885043 - RNA, 19 nt, Artificial Sequence
  Description of Artificial Sequence: Synthetic oligonucleotide
uagcacagucucaggucuc

SEQ ID NO: 2885044 - RNA, 19 nt, Artificial Sequence
  Description of Artificial Sequence: Synthetic oligonucleotide
aguccccauggggacuccc

SEQ ID NO: 2885045 - RNA, 19 nt, Artificial Sequence
  Description of Artificial Sequence: Synthetic oligonucleotide
ggcugagucacuguggaaa

SEQ ID NO: 2885046 - RNA, 19 nt, Artificial Sequence
  Description of Artificial Sequence: Synthetic oligonucleotide
gcugacguuuugcuuuggc

SEQ ID NO: 2885047 - RNA, 19 nt, Artificial Sequence
  Description of Artificial Sequence: Synthetic oligonucleotide
cacauugguggucagcccu

SEQ ID NO: 2885048 - RNA, 19 nt, Artificial Sequence
  Description of Artificial Sequence: Synthetic oligonucleotide
aagcuguccagggcucugu

SEQ ID NO: 2885049 - RNA, 19 nt, Artificial Sequence
  Description of Artificial Sequence: Synthetic oligonucleotide
gcuguccagggcucugugg

SEQ ID NO: 2885050 - RNA, 19 nt, Artificial Sequence
  Description of Artificial Sequence: Synthetic oligonucleotide
aaguccccauggggacucc

SEQ ID NO: 2885051 - RNA, 19 nt, Artificial Sequence
  Description of Artificial Sequence: Synthetic oligonucleotide
ccugugacauacacagaug

SEQ ID NO: 2885052 - RNA, 19 nt, Artificial Sequence
  Description of Artificial Sequence: Synthetic oligonucleotide
cucuguggugugacaacca

SEQ ID NO: 2885053 - RNA, 19 nt, Artificial Sequence
  Description of Artificial Sequence: Synthetic oligonucleotide
uugcuuuggcaugguuuca

SEQ ID NO: 2885054 - RNA, 19 nt, Artificial Sequence
  Description of Artificial Sequence: Synthetic oligonucleotide
gcaggauaucacauuggug

SEQ ID NO: 2885055 - RNA, 19 nt, Artificial Sequence
  Description of Artificial Sequence: Synthetic oligonucleotide
accacugucugaagggaaa

SEQ ID NO: 2885056 - RNA, 19 nt, Artificial Sequence
  Description of Artificial Sequence: Synthetic oligonucleotide
cugagaggauccugugaca

SEQ ID NO: 2885057 - RNA, 19 nt, Artificial Sequence
  Description of Artificial Sequence: Synthetic oligonucleotide
cagcucugcuccaggcagc

SEQ ID NO: 2885058 - RNA, 19 nt, Artificial Sequence
  Description of Artificial Sequence: Synthetic oligonucleotide
gcucuguggugugacaacc

SEQ ID NO: 2885059 - RNA, 19 nt, Artificial Sequence
  Description of Artificial Sequence: Synthetic oligonucleotide
gucagcccugagaggaucc

SEQ ID NO: 2885060 - RNA, 19 nt, Artificial Sequence
  Description of Artificial Sequence: Synthetic oligonucleotide
cuccuggcccugugggccg

SEQ ID NO: 2885061 - RNA, 19 nt, Artificial Sequence
  Description of Artificial Sequence: Synthetic oligonucleotide
ggcaggauaucacauuggu

SEQ ID NO: 2885062 - RNA, 19 nt, Artificial Sequence
  Description of Artificial Sequence: Synthetic oligonucleotide
gcugagccauguccuaaag

SEQ ID NO: 2885063 - RNA, 19 nt, Artificial Sequence
  Description of Artificial Sequence: Synthetic oligonucleotide
cucacuuccuacucuguau

SEQ ID NO: 2885064 - RNA, 19 nt, Artificial Sequence
  Description of Artificial Sequence: Synthetic oligonucleotide
gagaggauccugugacaua

SEQ ID NO: 2885065 - RNA, 19 nt, Artificial Sequence
  Description of Artificial Sequence: Synthetic oligonucleotide
ugauggguucugguaugaa

SEQ ID NO: 2885066 - RNA, 19 nt, Artificial Sequence
  Description of Artificial Sequence: Synthetic oligonucleotide
aggacagcugaggaagcau

SEQ ID NO: 2885067 - RNA, 19 nt, Artificial Sequence
  Description of Artificial Sequence: Synthetic oligonucleotide
gaacacagacaaagagaaa

SEQ ID NO: 2885068 - RNA, 19 nt, Artificial Sequence
  Description of Artificial Sequence: Synthetic oligonucleotide
acucuguauuccaguuuug

SEQ ID NO: 2885069 - RNA, 19 nt, Artificial Sequence
  Description of Artificial Sequence: Synthetic oligonucleotide
caggucuauggcaggcuga

SEQ ID NO: 2885070 - RNA, 19 nt, Artificial Sequence
  Description of Artificial Sequence: Synthetic oligonucleotide
aucagguagcacagucuca

SEQ ID NO: 2885071 - RNA, 19 nt, Artificial Sequence
  Description of Artificial Sequence: Synthetic oligonucleotide
gcuccaggcagcuggggac

SEQ ID NO: 2885072 - RNA, 19 nt, Artificial Sequence
  Description of Artificial Sequence: Synthetic oligonucleotide
cuguccagggcucuguggu

SEQ ID NO: 2885073 - RNA, 19 nt, Artificial Sequence
  Description of Artificial Sequence: Synthetic oligonucleotide
cacugauggguucugguau

SEQ ID NO: 2885074 - RNA, 19 nt, Artificial Sequence
  Description of Artificial Sequence: Synthetic oligonucleotide
acagcugaggaagcauuuu

SEQ ID NO: 2885075 - RNA, 19 nt, Artificial Sequence
  Description of Artificial Sequence: Synthetic oligonucleotide
uugggguguggugcagggc

SEQ ID NO: 2885076 - RNA, 19 nt, Artificial Sequence
  Description of Artificial Sequence: Synthetic oligonucleotide
gguguucgucugugcacag

SEQ ID NO: 2885077 - RNA, 19 nt, Artificial Sequence
  Description of Artificial Sequence: Synthetic oligonucleotide
ugcagggcugagccauguc

SEQ ID NO: 2885078 - RNA, 19 nt, Artificial Sequence
  Description of Artificial Sequence: Synthetic oligonucleotide
ggcucagcucugcuccagg

SEQ ID NO: 2885079 - RNA, 19 nt, Artificial Sequence
  Description of Artificial Sequence: Synthetic oligonucleotide
ggauaucacauuggugguc

SEQ ID NO: 2885080 - RNA, 19 nt, Artificial Sequence
  Description of Artificial Sequence: Synthetic oligonucleotide
uggucagcccugagaggau

SEQ ID NO: 2885081 - RNA, 19 nt, Artificial Sequence
  Description of Artificial Sequence: Synthetic oligonucleotide
guaugaagacucaggucua

SEQ ID NO: 2885082 - RNA, 19 nt, Artificial Sequence
  Description of Artificial Sequence: Synthetic oligonucleotide
gaccacugucugaagggaa

SEQ ID NO: 2885083 - RNA, 19 nt, Artificial Sequence
  Description of Artificial Sequence: Synthetic oligonucleotide
agggcucuguggugugaca

SEQ ID NO: 2885084 - RNA, 19 nt, Artificial Sequence
  Description of Artificial Sequence: Synthetic oligonucleotide
ggcucuguggugugacaac

SEQ ID NO: 2885085 - RNA, 19 nt, Artificial Sequence
  Description of Artificial Sequence: Synthetic oligonucleotide
aggcagcuggggacguggc

SEQ ID NO: 2885086 - RNA, 19 nt, Artificial Sequence
  Description of Artificial Sequence: Synthetic oligonucleotide
ugugggccgaagggcucag

SEQ ID NO: 2885087 - RNA, 19 nt, Artificial Sequence
  Description of Artificial Sequence: Synthetic oligonucleotide
cauacacagauggaagaau

SEQ ID NO: 2885088 - RNA, 19 nt, Artificial Sequence
  Description of Artificial Sequence: Synthetic oligonucleotide
ggccgaagggcucagcucu

SEQ ID NO: 2885089 - RNA, 19 nt, Artificial Sequence
  Description of Artificial Sequence: Synthetic oligonucleotide
cagggcucuguggugugac

SEQ ID NO: 2885090 - RNA, 19 nt, Artificial Sequence
  Description of Artificial Sequence: Synthetic oligonucleotide
gggcugacguuuugcuuug

SEQ ID NO: 2885091 - RNA, 19 nt, Artificial Sequence
  Description of Artificial Sequence: Synthetic oligonucleotide
agggcucagcucugcucca

SEQ ID NO: 2885092 - RNA, 19 nt, Artificial Sequence
  Description of Artificial Sequence: Synthetic oligonucleotide
agggcugagccauguccua

SEQ ID NO: 2885093 - RNA, 19 nt, Artificial Sequence
  Description of Artificial Sequence: Synthetic oligonucleotide
cugauggguucugguauga

SEQ ID NO: 2885094 - RNA, 19 nt, Artificial Sequence
  Description of Artificial Sequence: Synthetic oligonucleotide
ggggacguggcucuguggu

SEQ ID NO: 2885095 - RNA, 19 nt, Artificial Sequence
  Description of Artificial Sequence: Synthetic oligonucleotide
cugagccauguccuaaagu

SEQ ID NO: 2885096 - RNA, 19 nt, Artificial Sequence
  Description of Artificial Sequence: Synthetic oligonucleotide
guguggugcagggcugagc

SEQ ID NO: 2885097 - RNA, 19 nt, Artificial Sequence
  Description of Artificial Sequence: Synthetic oligonucleotide
aggcugagucacuguggaa

SEQ ID NO: 2885098 - RNA, 19 nt, Artificial Sequence
  Description of Artificial Sequence: Synthetic oligonucleotide
gaaagcuguccagggcucu

SEQ ID NO: 2885099 - RNA, 19 nt, Artificial Sequence
  Description of Artificial Sequence: Synthetic oligonucleotide
ggaaagcuguccagggcuc

SEQ ID NO: 2885100 - RNA, 19 nt, Artificial Sequence
  Description of Artificial Sequence: Synthetic oligonucleotide
gaggauccugugacauaca

SEQ ID NO: 2885101 - RNA, 19 nt, Artificial Sequence
  Description of Artificial Sequence: Synthetic oligonucleotide
gacagcugaggaagcauuu

SEQ ID NO: 2885102 - RNA, 19 nt, Artificial Sequence
  Description of Artificial Sequence: Synthetic oligonucleotide
ccccauggggacucccucc

SEQ ID NO: 2885103 - RNA, 19 nt, Artificial Sequence
  Description of Artificial Sequence: Synthetic oligonucleotide
gugcacagaaagggcugac

SEQ ID NO: 2885104 - RNA, 19 nt, Artificial Sequence
  Description of Artificial Sequence: Synthetic oligonucleotide
gguuuucuucucaucauuu

SEQ ID NO: 2885105 - RNA, 19 nt, Artificial Sequence
  Description of Artificial Sequence: Synthetic oligonucleotide
cagcccugagaggauccug

SEQ ID NO: 2885106 - RNA, 19 nt, Artificial Sequence
  Description of Artificial Sequence: Synthetic oligonucleotide
gggaaaccgaggacagcug

SEQ ID NO: 2885107 - RNA, 19 nt, Artificial Sequence
  Description of Artificial Sequence: Synthetic oligonucleotide
gguuucacugauggguucu

SEQ ID NO: 2885108 - RNA, 19 nt, Artificial Sequence
  Description of Artificial Sequence: Synthetic oligonucleotide
auccugugacauacacaga

SEQ ID NO: 2885109 - RNA, 19 nt, Artificial Sequence
  Description of Artificial Sequence: Synthetic oligonucleotide
caagcugguguucgucugu

SEQ ID NO: 2885110 - RNA, 19 nt, Artificial Sequence
  Description of Artificial Sequence: Synthetic oligonucleotide
acguggcucugugguuuuc

SEQ ID NO: 2885111 - RNA, 19 nt, Artificial Sequence
  Description of Artificial Sequence: Synthetic oligonucleotide
cacagaaagggcugacguu

SEQ ID NO: 2885112 - RNA, 19 nt, Artificial Sequence
  Description of Artificial Sequence: Synthetic oligonucleotide
uccaggcagcuggggacgu

SEQ ID NO: 2885113 - RNA, 19 nt, Artificial Sequence
  Description of Artificial Sequence: Synthetic oligonucleotide
ggcugagccauguccuaaa

SEQ ID NO: 2885114 - RNA, 19 nt, Artificial Sequence
  Description of Artificial Sequence: Synthetic oligonucleotide
cauguccuaaaguccccau

SEQ ID NO: 2885115 - RNA, 19 nt, Artificial Sequence
  Description of Artificial Sequence: Synthetic oligonucleotide
guguucgucugugcacaga

SEQ ID NO: 2885116 - RNA, 19 nt, Artificial Sequence
  Description of Artificial Sequence: Synthetic oligonucleotide
ccacugucugaagggaaac

SEQ ID NO: 2885117 - RNA, 19 nt, Artificial Sequence
  Description of Artificial Sequence: Synthetic oligonucleotide
gccauguccuaaagucccc

SEQ ID NO: 2885118 - RNA, 19 nt, Artificial Sequence
  Description of Artificial Sequence: Synthetic oligonucleotide
guuuugcuuuggcaugguu

SEQ ID NO: 2885119 - RNA, 19 nt, Artificial Sequence
  Description of Artificial Sequence: Synthetic oligonucleotide
cauugguggucagcccuga

SEQ ID NO: 2885120 - RNA, 19 nt, Artificial Sequence
  Description of Artificial Sequence: Synthetic oligonucleotide
guucgucugugcacagaaa

SEQ ID NO: 2885121 - RNA, 19 nt, Artificial Sequence
  Description of Artificial Sequence: Synthetic oligonucleotide
gcucugugguuuucuucuc

SEQ ID NO: 2885122 - RNA, 19 nt, Artificial Sequence
  Description of Artificial Sequence: Synthetic oligonucleotide
ccauacuuggcaggauauc

SEQ ID NO: 2885123 - RNA, 19 nt, Artificial Sequence
  Description of Artificial Sequence: Synthetic oligonucleotide
gggccgaagggcucagcuc

SEQ ID NO: 2885124 - RNA, 19 nt, Artificial Sequence
  Description of Artificial Sequence: Synthetic oligonucleotide
cgaggacagcugaggaagc

SEQ ID NO: 2885125 - RNA, 19 nt, Artificial Sequence
  Description of Artificial Sequence: Synthetic oligonucleotide
gggacucccuccaucaggu

SEQ ID NO: 2885126 - RNA, 19 nt, Artificial Sequence
  Description of Artificial Sequence: Synthetic oligonucleotide
guccagggcucuguggugu

SEQ ID NO: 2885127 - RNA, 19 nt, Artificial Sequence
  Description of Artificial Sequence: Synthetic oligonucleotide
ggucagcccugagaggauc

SEQ ID NO: 2885128 - RNA, 19 nt, Artificial Sequence
  Description of Artificial Sequence: Synthetic oligonucleotide
gguguggugcagggcugag

SEQ ID NO: 2885129 - RNA, 19 nt, Artificial Sequence
  Description of Artificial Sequence: Synthetic oligonucleotide
cugugggccgaagggcuca

SEQ ID NO: 2885130 - RNA, 19 nt, Artificial Sequence
  Description of Artificial Sequence: Synthetic oligonucleotide
guggugugacaaccauacu

SEQ ID NO: 2885131 - RNA, 19 nt, Artificial Sequence
  Description of Artificial Sequence: Synthetic oligonucleotide
gcuuuggcaugguuucacu

SEQ ID NO: 2885132 - RNA, 19 nt, Artificial Sequence
  Description of Artificial Sequence: Synthetic oligonucleotide
gggcucuguggugugacaa

SEQ ID NO: 2885133 - RNA, 19 nt, Artificial Sequence
  Description of Artificial Sequence: Synthetic oligonucleotide
cagaaagggcugacguuuu

SEQ ID NO: 2885134 - RNA, 19 nt, Artificial Sequence
  Description of Artificial Sequence: Synthetic oligonucleotide
cucccuccaucagguagca

SEQ ID NO: 2885135 - RNA, 19 nt, Artificial Sequence
  Description of Artificial Sequence: Synthetic oligonucleotide
cccugagaggauccuguga

SEQ ID NO: 2885136 - RNA, 19 nt, Artificial Sequence
  Description of Artificial Sequence: Synthetic oligonucleotide
ggcugacguuuugcuuugg

SEQ ID NO: 2885137 - RNA, 19 nt, Artificial Sequence
  Description of Artificial Sequence: Synthetic oligonucleotide
ucccuccaucagguagcac

SEQ ID NO: 2885138 - RNA, 19 nt, Artificial Sequence
  Description of Artificial Sequence: Synthetic oligonucleotide
ccugugggccgaagggcuc

SEQ ID NO: 2885139 - RNA, 19 nt, Artificial Sequence
  Description of Artificial Sequence: Synthetic oligonucleotide
gggguguggugcagggcug

SEQ ID NO: 2885140 - RNA, 19 nt, Artificial Sequence
  Description of Artificial Sequence: Synthetic oligonucleotide
cucaggucuauggcaggcu

SEQ ID NO: 2885141 - RNA, 19 nt, Artificial Sequence
  Description of Artificial Sequence: Synthetic oligonucleotide
ggguucugguaugaagacu

SEQ ID NO: 2885142 - RNA, 19 nt, Artificial Sequence
  Description of Artificial Sequence: Synthetic oligonucleotide
cagcuggggacguggcucu

SEQ ID NO: 2885143 - RNA, 19 nt, Artificial Sequence
  Description of Artificial Sequence: Synthetic oligonucleotide
gggcucagcucugcuccag

SEQ ID NO: 2885144 - RNA, 19 nt, Artificial Sequence
  Description of Artificial Sequence: Synthetic oligonucleotide
uccuggcccugugggccga

SEQ ID NO: 2885145 - RNA, 19 nt, Artificial Sequence
  Description of Artificial Sequence: Synthetic oligonucleotide
gacguggcucugugguuuu

SEQ ID NO: 2885146 - RNA, 19 nt, Artificial Sequence
  Description of Artificial Sequence: Synthetic oligonucleotide
cccauggggacucccucca

SEQ ID NO: 2885147 - RNA, 19 nt, Artificial Sequence
  Description of Artificial Sequence: Synthetic oligonucleotide
guggcucugugguuuucuu

SEQ ID NO: 2885148 - RNA, 19 nt, Artificial Sequence
  Description of Artificial Sequence: Synthetic oligonucleotide
ccauguccuaaagucccca

SEQ ID NO: 2885149 - RNA, 19 nt, Artificial Sequence
  Description of Artificial Sequence: Synthetic oligonucleotide
cuggcccugugggccgaag

SEQ ID NO: 2885150 - RNA, 19 nt, Artificial Sequence
  Description of Artificial Sequence: Synthetic oligonucleotide
ccgaagggcucagcucugc

SEQ ID NO: 2885151 - RNA, 19 nt, Artificial Sequence
  Description of Artificial Sequence: Synthetic oligonucleotide
ggacagcugaggaagcauu

SEQ ID NO: 2885152 - RNA, 19 nt, Artificial Sequence
  Description of Artificial Sequence: Synthetic oligonucleotide
gugggccgaagggcucagc

SEQ ID NO: 2885153 - RNA, 19 nt, Artificial Sequence
  Description of Artificial Sequence: Synthetic oligonucleotide
guccccauggggacucccu

SEQ ID NO: 2885154 - RNA, 19 nt, Artificial Sequence
  Description of Artificial Sequence: Synthetic oligonucleotide
ggacguggcucugugguuu

SEQ ID NO: 2885155 - RNA, 19 nt, Artificial Sequence
  Description of Artificial Sequence: Synthetic oligonucleotide
gggcugagccauguccuaa

SEQ ID NO: 2885156 - RNA, 19 nt, Artificial Sequence
  Description of Artificial Sequence: Synthetic oligonucleotide
gccgaagggcucagcucug

SEQ ID NO: 2885157 - RNA, 19 nt, Artificial Sequence
  Description of Artificial Sequence: Synthetic oligonucleotide
ggcagcuggggacguggcu

SEQ ID NO: 2885158 - RNA, 19 nt, Artificial Sequence
  Description of Artificial Sequence: Synthetic oligonucleotide
gugcagggcugagccaugu

SEQ ID NO: 2885159 - RNA, 19 nt, Artificial Sequence
  Description of Artificial Sequence: Synthetic oligonucleotide
cccugugggccgaagggcu

SEQ ID NO: 2885160 - RNA, 19 nt, Artificial Sequence
  Description of Artificial Sequence: Synthetic oligonucleotide
caaccauacuuggcaggau

SEQ ID NO: 2885161 - RNA, 19 nt, Artificial Sequence
  Description of Artificial Sequence: Synthetic oligonucleotide
ggacucccuccaucaggua

SEQ ID NO: 2885162 - RNA, 19 nt, Artificial Sequence
  Description of Artificial Sequence: Synthetic oligonucleotide
gcucugcuccaggcagcug

SEQ ID NO: 2885163 - RNA, 19 nt, Artificial Sequence
  Description of Artificial Sequence: Synthetic oligonucleotide
gggacguggcucugugguu

SEQ ID NO: 2885164 - RNA, 19 nt, Artificial Sequence
  Description of Artificial Sequence: Synthetic oligonucleotide
ggucuauggcaggcugagu

SEQ ID NO: 2885165 - RNA, 19 nt, Artificial Sequence
  Description of Artificial Sequence: Synthetic oligonucleotide
ccaggcagcuggggacgug

SEQ ID NO: 2885166 - RNA, 19 nt, Artificial Sequence
  Description of Artificial Sequence: Synthetic oligonucleotide
gcacagucucaggucuccu

SEQ ID NO: 2885167 - RNA, 19 nt, Artificial Sequence
  Description of Artificial Sequence: Synthetic oligonucleotide
ccagggcucugugguguga

SEQ ID NO: 2885168 - RNA, 19 nt, Artificial Sequence
  Description of Artificial Sequence: Synthetic oligonucleotide
cgaagggcucagcucugcu

SEQ ID NO: 2885169 - RNA, 19 nt, Artificial Sequence
  Description of Artificial Sequence: Synthetic oligonucleotide
cguuuugcuuuggcauggu

SEQ ID NO: 2885170 - RNA, 19 nt, Artificial Sequence
  Description of Artificial Sequence: Synthetic oligonucleotide
ccauggggacucccuccau

SEQ ID NO: 2885171 - RNA, 19 nt, Artificial Sequence
  Description of Artificial Sequence: Synthetic oligonucleotide
ccuggcccugugggccgaa

SEQ ID NO: 2885172 - RNA, 19 nt, Artificial Sequence
  Description of Artificial Sequence: Synthetic oligonucleotide
aauaacuuuaauuugacga

SEQ ID NO: 2885173 - RNA, 19 nt, Artificial Sequence
  Description of Artificial Sequence: Synthetic oligonucleotide
ucuaaaaugaaacuaagca

SEQ ID NO: 2885174 - RNA, 19 nt, Artificial Sequence
  Description of Artificial Sequence: Synthetic oligonucleotide
uaaaaugaaacuaagcaag

SEQ ID NO: 2885175 - RNA, 19 nt, Artificial Sequence
  Description of Artificial Sequence: Synthetic oligonucleotide
aaacucaggaagcagagac

SEQ ID NO: 2885176 - RNA, 19 nt, Artificial Sequence
  Description of Artificial Sequence: Synthetic oligonucleotide
aacaaagucaaagacauuc

SEQ ID NO: 2885177 - RNA, 19 nt, Artificial Sequence
  Description of Artificial Sequence: Synthetic oligonucleotide
aaaccaaucugccaccucc

SEQ ID NO: 2885178 - RNA, 19 nt, Artificial Sequence
  Description of Artificial Sequence: Synthetic oligonucleotide
agauaaaccaaucugccac

SEQ ID NO: 2885179 - RNA, 19 nt, Artificial Sequence
  Description of Artificial Sequence: Synthetic oligonucleotide
aagucaaagacauuccagg

SEQ ID NO: 2885180 - RNA, 19 nt, Artificial Sequence
  Description of Artificial Sequence: Synthetic oligonucleotide
uuuaauuugacgaaaucgu

SEQ ID NO: 2885181 - RNA, 19 nt, Artificial Sequence
  Description of Artificial Sequence: Synthetic oligonucleotide
aaacuaagcaagauaaacc

SEQ ID NO: 2885182 - RNA, 19 nt, Artificial Sequence
  Description of Artificial Sequence: Synthetic oligonucleotide
aacuaagcaagauaaacca

SEQ ID NO: 2885183 - RNA, 19 nt, Artificial Sequence
  Description of Artificial Sequence: Synthetic oligonucleotide
uucucaauaaguugaacgg

SEQ ID NO: 2885184 - RNA, 19 nt, Artificial Sequence
  Description of Artificial Sequence: Synthetic oligonucleotide
aacgucaugcucuucaggg

SEQ ID NO: 2885185 - RNA, 19 nt, Artificial Sequence
  Description of Artificial Sequence: Synthetic oligonucleotide
aaaucgugcaaacaguuug

SEQ ID NO: 2885186 - RNA, 19 nt, Artificial Sequence
  Description of Artificial Sequence: Synthetic oligonucleotide
ucuauuucaaccaucagua

SEQ ID NO: 2885187 - RNA, 19 nt, Artificial Sequence
  Description of Artificial Sequence: Synthetic oligonucleotide
aguagaagaagauaagcag

SEQ ID NO: 2885188 - RNA, 19 nt, Artificial Sequence
  Description of Artificial Sequence: Synthetic oligonucleotide
cuuuaauuugacgaaaucg

SEQ ID NO: 2885189 - RNA, 19 nt, Artificial Sequence
  Description of Artificial Sequence: Synthetic oligonucleotide
agaaguagacaccaguuac

SEQ ID NO: 2885190 - RNA, 19 nt, Artificial Sequence
  Description of Artificial Sequence: Synthetic oligonucleotide
guucucaauaaguugaacg

SEQ ID NO: 2885191 - RNA, 19 nt, Artificial Sequence
  Description of Artificial Sequence: Synthetic oligonucleotide
auuagaaugauuucuaaaa

SEQ ID NO: 2885192 - RNA, 19 nt, Artificial Sequence
  Description of Artificial Sequence: Synthetic oligonucleotide
augauuucuaaaaugaaac

SEQ ID NO: 2885193 - RNA, 19 nt, Artificial Sequence
  Description of Artificial Sequence: Synthetic oligonucleotide
uccaaagucagcuucaaug

SEQ ID NO: 2885194 - RNA, 19 nt, Artificial Sequence
  Description of Artificial Sequence: Synthetic oligonucleotide
aagauaagcagcaacauca

SEQ ID NO: 2885195 - RNA, 19 nt, Artificial Sequence
  Description of Artificial Sequence: Synthetic oligonucleotide
aauuugacgaaaucgugca

SEQ ID NO: 2885196 - RNA, 19 nt, Artificial Sequence
  Description of Artificial Sequence: Synthetic oligonucleotide
aucaagaggaacgucaugc

SEQ ID NO: 2885197 - RNA, 19 nt, Artificial Sequence
  Description of Artificial Sequence: Synthetic oligonucleotide
auaguagaagaagauaagc

SEQ ID NO: 2885198 - RNA, 19 nt, Artificial Sequence
  Description of Artificial Sequence: Synthetic oligonucleotide
gacgaaaucgugcaaacag

SEQ ID NO: 2885199 - RNA, 19 nt, Artificial Sequence
  Description of Artificial Sequence: Synthetic oligonucleotide
uucuauuucaaccaucagu

SEQ ID NO: 2885200 - RNA, 19 nt, Artificial Sequence
  Description of Artificial Sequence: Synthetic oligonucleotide
uaauuugacgaaaucgugc

SEQ ID NO: 2885201 - RNA, 19 nt, Artificial Sequence
  Description of Artificial Sequence: Synthetic oligonucleotide
aaauaguagaagaagauaa

SEQ ID NO: 2885202 - RNA, 19 nt, Artificial Sequence
  Description of Artificial Sequence: Synthetic oligonucleotide
uuugagagaucucagcacc

SEQ ID NO: 2885203 - RNA, 19 nt, Artificial Sequence
  Description of Artificial Sequence: Synthetic oligonucleotide
uauuucaaccaucaguaca

SEQ ID NO: 2885204 - RNA, 19 nt, Artificial Sequence
  Description of Artificial Sequence: Synthetic oligonucleotide
uagaaugauuucuaaaaug

SEQ ID NO: 2885205 - RNA, 19 nt, Artificial Sequence
  Description of Artificial Sequence: Synthetic oligonucleotide
uuucuaaaaugaaacuaag

SEQ ID NO: 2885206 - RNA, 19 nt, Artificial Sequence
  Description of Artificial Sequence: Synthetic oligonucleotide
auuccaucaauucuauuuc

SEQ ID NO: 2885207 - RNA, 19 nt, Artificial Sequence
  Description of Artificial Sequence: Synthetic oligonucleotide
aaugaaacuaagcaagaua

SEQ ID NO: 2885208 - RNA, 19 nt, Artificial Sequence
  Description of Artificial Sequence: Synthetic oligonucleotide
agcaagauaaaccaaucug

SEQ ID NO: 2885209 - RNA, 19 nt, Artificial Sequence
  Description of Artificial Sequence: Synthetic oligonucleotide
guagacaccaguuacagca

SEQ ID NO: 2885210 - RNA, 19 nt, Artificial Sequence
  Description of Artificial Sequence: Synthetic oligonucleotide
uucuaaaaugaaacuaagc

SEQ ID NO: 2885211 - RNA, 19 nt, Artificial Sequence
  Description of Artificial Sequence: Synthetic oligonucleotide
uuaauuugacgaaaucgug

SEQ ID NO: 2885212 - RNA, 19 nt, Artificial Sequence
  Description of Artificial Sequence: Synthetic oligonucleotide
agaaaagcugaacauccac

SEQ ID NO: 2885213 - RNA, 19 nt, Artificial Sequence
  Description of Artificial Sequence: Synthetic oligonucleotide
aucaauucuauuucaacca

SEQ ID NO: 2885214 - RNA, 19 nt, Artificial Sequence
  Description of Artificial Sequence: Synthetic oligonucleotide
uaacaacaaagucaaagac

SEQ ID NO: 2885215 - RNA, 19 nt, Artificial Sequence
  Description of Artificial Sequence: Synthetic oligonucleotide
caugguaacaacaaaguca

SEQ ID NO: 2885216 - RNA, 19 nt, Artificial Sequence
  Description of Artificial Sequence: Synthetic oligonucleotide
gaaacuaagcaagauaaac

SEQ ID NO: 2885217 - RNA, 19 nt, Artificial Sequence
  Description of Artificial Sequence: Synthetic oligonucleotide
aauucuauuucaaccauca

SEQ ID NO: 2885218 - RNA, 19 nt, Artificial Sequence
  Description of Artificial Sequence: Synthetic oligonucleotide
aaaagcugaacauccacau

SEQ ID NO: 2885219 - RNA, 19 nt, Artificial Sequence
  Description of Artificial Sequence: Synthetic oligonucleotide
aacaguuugagagaucuca

SEQ ID NO: 2885220 - RNA, 19 nt, Artificial Sequence
  Description of Artificial Sequence: Synthetic oligonucleotide
ugaacauccacauuagaau

SEQ ID NO: 2885221 - RNA, 19 nt, Artificial Sequence
  Description of Artificial Sequence: Synthetic oligonucleotide
aagaacauguuguacucca

SEQ ID NO: 2885222 - RNA, 19 nt, Artificial Sequence
  Description of Artificial Sequence: Synthetic oligonucleotide
caagauaaaccaaucugcc

SEQ ID NO: 2885223 - RNA, 19 nt, Artificial Sequence
  Description of Artificial Sequence: Synthetic oligonucleotide
agaagaacauguuguacuc

SEQ ID NO: 2885224 - RNA, 19 nt, Artificial Sequence
  Description of Artificial Sequence: Synthetic oligonucleotide
uaguacuucaaagaaguag

SEQ ID NO: 2885225 - RNA, 19 nt, Artificial Sequence
  Description of Artificial Sequence: Synthetic oligonucleotide
aagcugaacauccacauua

SEQ ID NO: 2885226 - RNA, 19 nt, Artificial Sequence
  Description of Artificial Sequence: Synthetic oligonucleotide
gaacauccacauuagaaug

SEQ ID NO: 2885227 - RNA, 19 nt, Artificial Sequence
  Description of Artificial Sequence: Synthetic oligonucleotide
uauuccagaagagagaaaa

SEQ ID NO: 2885228 - RNA, 19 nt, Artificial Sequence
  Description of Artificial Sequence: Synthetic oligonucleotide
aauaguagaagaagauaag

SEQ ID NO: 2885229 - RNA, 19 nt, Artificial Sequence
  Description of Artificial Sequence: Synthetic oligonucleotide
aauaaguugaacgggaaua

SEQ ID NO: 2885230 - RNA, 19 nt, Artificial Sequence
  Description of Artificial Sequence: Synthetic oligonucleotide
aaugauuucuaaaaugaaa

SEQ ID NO: 2885231 - RNA, 19 nt, Artificial Sequence
  Description of Artificial Sequence: Synthetic oligonucleotide
agaaugauuucuaaaauga

SEQ ID NO: 2885232 - RNA, 19 nt, Artificial Sequence
  Description of Artificial Sequence: Synthetic oligonucleotide
uccagaagagagaaaagcu

SEQ ID NO: 2885233 - RNA, 19 nt, Artificial Sequence
  Description of Artificial Sequence: Synthetic oligonucleotide
uuagaaugauuucuaaaau

SEQ ID NO: 2885234 - RNA, 19 nt, Artificial Sequence
  Description of Artificial Sequence: Synthetic oligonucleotide
uguggauuccaucaauucu

SEQ ID NO: 2885235 - RNA, 19 nt, Artificial Sequence
  Description of Artificial Sequence: Synthetic oligonucleotide
aacauguuguacuccaggu

SEQ ID NO: 2885236 - RNA, 19 nt, Artificial Sequence
  Description of Artificial Sequence: Synthetic oligonucleotide
acagaguuccccgagacac

SEQ ID NO: 2885237 - RNA, 19 nt, Artificial Sequence
  Description of Artificial Sequence: Synthetic oligonucleotide
cacagcuuaguauuugugg

SEQ ID NO: 2885238 - RNA, 19 nt, Artificial Sequence
  Description of Artificial Sequence: Synthetic oligonucleotide
aaagucaaagacauuccag

SEQ ID NO: 2885239 - RNA, 19 nt, Artificial Sequence
  Description of Artificial Sequence: Synthetic oligonucleotide
aagaagauaagcagcaaca

SEQ ID NO: 2885240 - RNA, 19 nt, Artificial Sequence
  Description of Artificial Sequence: Synthetic oligonucleotide
ucugccaccuccaaaguca

SEQ ID NO: 2885241 - RNA, 19 nt, Artificial Sequence
  Description of Artificial Sequence: Synthetic oligonucleotide
acaugguaacaacaaaguc

SEQ ID NO: 2885242 - RNA, 19 nt, Artificial Sequence
  Description of Artificial Sequence: Synthetic oligonucleotide
agcaacaucaagaggaacg

SEQ ID NO: 2885243 - RNA, 19 nt, Artificial Sequence
  Description of Artificial Sequence: Synthetic oligonucleotide
aguuugagagaucucagca

SEQ ID NO: 2885244 - RNA, 19 nt, Artificial Sequence
  Description of Artificial Sequence: Synthetic oligonucleotide
caaucugccaccuccaaag

SEQ ID NO: 2885245 - RNA, 19 nt, Artificial Sequence
  Description of Artificial Sequence: Synthetic oligonucleotide
acuuuaauuugacgaaauc

SEQ ID NO: 2885246 - RNA, 19 nt, Artificial Sequence
  Description of Artificial Sequence: Synthetic oligonucleotide
ugauuucuaaaaugaaacu

SEQ ID NO: 2885247 - RNA, 19 nt, Artificial Sequence
  Description of Artificial Sequence: Synthetic oligonucleotide
uucaaagaaguagacacca

SEQ ID NO: 2885248 - RNA, 19 nt, Artificial Sequence
  Description of Artificial Sequence: Synthetic oligonucleotide
aagauaaaccaaucugcca

SEQ ID NO: 2885249 - RNA, 19 nt, Artificial Sequence
  Description of Artificial Sequence: Synthetic oligonucleotide
guaacaacaaagucaaaga

SEQ ID NO: 2885250 - RNA, 19 nt, Artificial Sequence
  Description of Artificial Sequence: Synthetic oligonucleotide
ucucaauaaguugaacggg

SEQ ID NO: 2885251 - RNA, 19 nt, Artificial Sequence
  Description of Artificial Sequence: Synthetic oligonucleotide
aacaucaagaggaacguca

SEQ ID NO: 2885252 - RNA, 19 nt, Artificial Sequence
  Description of Artificial Sequence: Synthetic oligonucleotide
cuaaaaugaaacuaagcaa

SEQ ID NO: 2885253 - RNA, 19 nt, Artificial Sequence
  Description of Artificial Sequence: Synthetic oligonucleotide
aacaccacaaacucaggaa

SEQ ID NO: 2885254 - RNA, 19 nt, Artificial Sequence
  Description of Artificial Sequence: Synthetic oligonucleotide
acauuccaggcauuauucc

SEQ ID NO: 2885255 - RNA, 19 nt, Artificial Sequence
  Description of Artificial Sequence: Synthetic oligonucleotide
gaauaguacuucaaagaag

SEQ ID NO: 2885256 - RNA, 19 nt, Artificial Sequence
  Description of Artificial Sequence: Synthetic oligonucleotide
agcagcaacaucaagagga

SEQ ID NO: 2885257 - RNA, 19 nt, Artificial Sequence
  Description of Artificial Sequence: Synthetic oligonucleotide
agcagcugaagccacacag

SEQ ID NO: 2885258 - RNA, 19 nt, Artificial Sequence
  Description of Artificial Sequence: Synthetic oligonucleotide
aaaauaguagaagaagaua

SEQ ID NO: 2885259 - RNA, 19 nt, Artificial Sequence
  Description of Artificial Sequence: Synthetic oligonucleotide
uuccagaagagagaaaagc

SEQ ID NO: 2885260 - RNA, 19 nt, Artificial Sequence
  Description of Artificial Sequence: Synthetic oligonucleotide
guauuuguggauuccauca

SEQ ID NO: 2885261 - RNA, 19 nt, Artificial Sequence
  Description of Artificial Sequence: Synthetic oligonucleotide
aaguagacaccaguuacag

SEQ ID NO: 2885262 - RNA, 19 nt, Artificial Sequence
  Description of Artificial Sequence: Synthetic oligonucleotide
ucucgagaagaacauguug

SEQ ID NO: 2885263 - RNA, 19 nt, Artificial Sequence
  Description of Artificial Sequence: Synthetic oligonucleotide
aucaacaccacaaacucag

SEQ ID NO: 2885264 - RNA, 19 nt, Artificial Sequence
  Description of Artificial Sequence: Synthetic oligonucleotide
aguacuucaaagaaguaga

SEQ ID NO: 2885265 - RNA, 19 nt, Artificial Sequence
  Description of Artificial Sequence: Synthetic oligonucleotide
aguugaacgggaauaguac

SEQ ID NO: 2885266 - RNA, 19 nt, Artificial Sequence
  Description of Artificial Sequence: Synthetic oligonucleotide
auaagcagcaacaucaaga

SEQ ID NO: 2885267 - RNA, 19 nt, Artificial Sequence
  Description of Artificial Sequence: Synthetic oligonucleotide
cauguuguacuccagguuc

SEQ ID NO: 2885268 - RNA, 19 nt, Artificial Sequence
  Description of Artificial Sequence: Synthetic oligonucleotide
acaacaaagucaaagacau

SEQ ID NO: 2885269 - RNA, 19 nt, Artificial Sequence
  Description of Artificial Sequence: Synthetic oligonucleotide
augaaacuaagcaagauaa

SEQ ID NO: 2885270 - RNA, 19 nt, Artificial Sequence
  Description of Artificial Sequence: Synthetic oligonucleotide
gauaaaccaaucugccacc

SEQ ID NO: 2885271 - RNA, 19 nt, Artificial Sequence
  Description of Artificial Sequence: Synthetic oligonucleotide
acaaagucaaagacauucc

SEQ ID NO: 2885272 - RNA, 19 nt, Artificial Sequence
  Description of Artificial Sequence: Synthetic oligonucleotide
cgugcaaacaguuugagag

SEQ ID NO: 2885273 - RNA, 19 nt, Artificial Sequence
  Description of Artificial Sequence: Synthetic oligonucleotide
cuucaaagaaguagacacc

SEQ ID NO: 2885274 - RNA, 19 nt, Artificial Sequence
  Description of Artificial Sequence: Synthetic oligonucleotide
auuucuaaaaugaaacuaa

SEQ ID NO: 2885275 - RNA, 19 nt, Artificial Sequence
  Description of Artificial Sequence: Synthetic oligonucleotide
aaaaugaaacuaagcaaga

SEQ ID NO: 2885276 - RNA, 19 nt, Artificial Sequence
  Description of Artificial Sequence: Synthetic oligonucleotide
aagaggaacgucaugcucu

SEQ ID NO: 2885277 - RNA, 19 nt, Artificial Sequence
  Description of Artificial Sequence: Synthetic oligonucleotide
auaaguugaacgggaauag

SEQ ID NO: 2885278 - RNA, 19 nt, Artificial Sequence
  Description of Artificial Sequence: Synthetic oligonucleotide
aauggccacagcuuaguau

SEQ ID NO: 2885279 - RNA, 19 nt, Artificial Sequence
  Description of Artificial Sequence: Synthetic oligonucleotide
gauuccaucaauucuauuu

SEQ ID NO: 2885280 - RNA, 19 nt, Artificial Sequence
  Description of Artificial Sequence: Synthetic oligonucleotide
aagaaguagacaccaguua

SEQ ID NO: 2885281 - RNA, 19 nt, Artificial Sequence
  Description of Artificial Sequence: Synthetic oligonucleotide
aguagacaccaguuacagc

SEQ ID NO: 2885282 - RNA, 19 nt, Artificial Sequence
  Description of Artificial Sequence: Synthetic oligonucleotide
ugaagccacacagaguucc

SEQ ID NO: 2885283 - RNA, 19 nt, Artificial Sequence
  Description of Artificial Sequence: Synthetic oligonucleotide
gaagauaagcagcaacauc

SEQ ID NO: 2885284 - RNA, 19 nt, Artificial Sequence
  Description of Artificial Sequence: Synthetic oligonucleotide
ucaaagaaguagacaccag

SEQ ID NO: 2885285 - RNA, 19 nt, Artificial Sequence
  Description of Artificial Sequence: Synthetic oligonucleotide
auuauuccagaagagagaa

SEQ ID NO: 2885286 - RNA, 19 nt, Artificial Sequence
  Description of Artificial Sequence: Synthetic oligonucleotide
gauaagcagcaacaucaag

SEQ ID NO: 2885287 - RNA, 19 nt, Artificial Sequence
  Description of Artificial Sequence: Synthetic oligonucleotide
acacagaguuccccgagac

SEQ ID NO: 2885288 - RNA, 19 nt, Artificial Sequence
  Description of Artificial Sequence: Synthetic oligonucleotide
ucaggaagcagagacgaca

SEQ ID NO: 2885289 - RNA, 19 nt, Artificial Sequence
  Description of Artificial Sequence: Synthetic oligonucleotide
ggaagcagagacgacaugg

SEQ ID NO: 2885290 - RNA, 19 nt, Artificial Sequence
  Description of Artificial Sequence: Synthetic oligonucleotide
gagaagaacauguuguacu

SEQ ID NO: 2885291 - RNA, 19 nt, Artificial Sequence
  Description of Artificial Sequence: Synthetic oligonucleotide
uuugacgaaaucgugcaaa

SEQ ID NO: 2885292 - RNA, 19 nt, Artificial Sequence
  Description of Artificial Sequence: Synthetic oligonucleotide
ucaauaaguugaacgggaa

SEQ ID NO: 2885293 - RNA, 19 nt, Artificial Sequence
  Description of Artificial Sequence: Synthetic oligonucleotide
ucagcuucaauggccacag

SEQ ID NO: 2885294 - RNA, 19 nt, Artificial Sequence
  Description of Artificial Sequence: Synthetic oligonucleotide
aaagaaguagacaccaguu

SEQ ID NO: 2885295 - RNA, 19 nt, Artificial Sequence
  Description of Artificial Sequence: Synthetic oligonucleotide
aaaugaaacuaagcaagau

SEQ ID NO: 2885296 - RNA, 19 nt, Artificial Sequence
  Description of Artificial Sequence: Synthetic oligonucleotide
caauauaauaacuuuaauu

SEQ ID NO: 2885297 - RNA, 19 nt, Artificial Sequence
  Description of Artificial Sequence: Synthetic oligonucleotide
acccaucaacaccacaaac

SEQ ID NO: 2885298 - RNA, 19 nt, Artificial Sequence
  Description of Artificial Sequence: Synthetic oligonucleotide
caagagccaauauaauaac

SEQ ID NO: 2885299 - RNA, 19 nt, Artificial Sequence
  Description of Artificial Sequence: Synthetic oligonucleotide
gcaagauaaaccaaucugc

SEQ ID NO: 2885300 - RNA, 19 nt, Artificial Sequence
  Description of Artificial Sequence: Synthetic oligonucleotide
uuuguggauuccaucaauu

SEQ ID NO: 2885301 - RNA, 19 nt, Artificial Sequence
  Description of Artificial Sequence: Synthetic oligonucleotide
uucaauggccacagcuuag

SEQ ID NO: 2885302 - RNA, 19 nt, Artificial Sequence
  Description of Artificial Sequence: Synthetic oligonucleotide
cagguucucaauaaguuga

SEQ ID NO: 2885303 - RNA, 19 nt, Artificial Sequence
  Description of Artificial Sequence: Synthetic oligonucleotide
agaguuccccgagacaccc

SEQ ID NO: 2885304 - RNA, 19 nt, Artificial Sequence
  Description of Artificial Sequence: Synthetic oligonucleotide
ugaaacuaagcaagauaaa

SEQ ID NO: 2885305 - RNA, 19 nt, Artificial Sequence
  Description of Artificial Sequence: Synthetic oligonucleotide
cagaagagagaaaagcuga

SEQ ID NO: 2885306 - RNA, 19 nt, Artificial Sequence
  Description of Artificial Sequence: Synthetic oligonucleotide
augguaacaacaaagucaa

SEQ ID NO: 2885307 - RNA, 19 nt, Artificial Sequence
  Description of Artificial Sequence: Synthetic oligonucleotide
cugaacauccacauuagaa

SEQ ID NO: 2885308 - RNA, 19 nt, Artificial Sequence
  Description of Artificial Sequence: Synthetic oligonucleotide
aggaacgucaugcucuuca

SEQ ID NO: 2885309 - RNA, 19 nt, Artificial Sequence
  Description of Artificial Sequence: Synthetic oligonucleotide
acgucaugcucuucagggc

SEQ ID NO: 2885310 - RNA, 19 nt, Artificial Sequence
  Description of Artificial Sequence: Synthetic oligonucleotide
cucaauaaguugaacggga

SEQ ID NO: 2885311 - RNA, 19 nt, Artificial Sequence
  Description of Artificial Sequence: Synthetic oligonucleotide
auuucaaccaucaguacaa

SEQ ID NO: 2885312 - RNA, 19 nt, Artificial Sequence
  Description of Artificial Sequence: Synthetic oligonucleotide
gcauuauuccagaagagag

SEQ ID NO: 2885313 - RNA, 19 nt, Artificial Sequence
  Description of Artificial Sequence: Synthetic oligonucleotide
cuggcaagagccaauauaa

SEQ ID NO: 2885314 - RNA, 19 nt, Artificial Sequence
  Description of Artificial Sequence: Synthetic oligonucleotide
caggcauuauuccagaaga

SEQ ID NO: 2885315 - RNA, 19 nt, Artificial Sequence
  Description of Artificial Sequence: Synthetic oligonucleotide
uauuuguggauuccaucaa

SEQ ID NO: 2885316 - RNA, 19 nt, Artificial Sequence
  Description of Artificial Sequence: Synthetic oligonucleotide
uccaucaauucuauuucaa

SEQ ID NO: 2885317 - RNA, 19 nt, Artificial Sequence
  Description of Artificial Sequence: Synthetic oligonucleotide
ugagagaucucagcacccg

SEQ ID NO: 2885318 - RNA, 19 nt, Artificial Sequence
  Description of Artificial Sequence: Synthetic oligonucleotide
guuugagagaucucagcac

SEQ ID NO: 2885319 - RNA, 19 nt, Artificial Sequence
  Description of Artificial Sequence: Synthetic oligonucleotide
uugagagaucucagcaccc

SEQ ID NO: 2885320 - RNA, 19 nt, Artificial Sequence
  Description of Artificial Sequence: Synthetic oligonucleotide
gauccucagcagcugaagc

SEQ ID NO: 2885321 - RNA, 19 nt, Artificial Sequence
  Description of Artificial Sequence: Synthetic oligonucleotide
aacauccacauuagaauga

SEQ ID NO: 2885322 - RNA, 19 nt, Artificial Sequence
  Description of Artificial Sequence: Synthetic oligonucleotide
gaaaagcugaacauccaca

SEQ ID NO: 2885323 - RNA, 19 nt, Artificial Sequence
  Description of Artificial Sequence: Synthetic oligonucleotide
uacuucaaagaaguagaca

SEQ ID NO: 2885324 - RNA, 19 nt, Artificial Sequence
  Description of Artificial Sequence: Synthetic oligonucleotide
gaacgucaugcucuucagg

SEQ ID NO: 2885325 - RNA, 19 nt, Artificial Sequence
  Description of Artificial Sequence: Synthetic oligonucleotide
uccacauuagaaugauuuc

SEQ ID NO: 2885326 - RNA, 19 nt, Artificial Sequence
  Description of Artificial Sequence: Synthetic oligonucleotide
uuccccgagacacccauca

SEQ ID NO: 2885327 - RNA, 19 nt, Artificial Sequence
  Description of Artificial Sequence: Synthetic oligonucleotide
uuccaucaauucuauuuca

SEQ ID NO: 2885328 - RNA, 19 nt, Artificial Sequence
  Description of Artificial Sequence: Synthetic oligonucleotide
ggaauaguacuucaaagaa

SEQ ID NO: 2885329 - RNA, 19 nt, Artificial Sequence
  Description of Artificial Sequence: Synthetic oligonucleotide
auggccacagcuuaguauu

SEQ ID NO: 2885330 - RNA, 19 nt, Artificial Sequence
  Description of Artificial Sequence: Synthetic oligonucleotide
uugacgaaaucgugcaaac

SEQ ID NO: 2885331 - RNA, 19 nt, Artificial Sequence
  Description of Artificial Sequence: Synthetic oligonucleotide
gggaauaguacuucaaaga

SEQ ID NO: 2885332 - RNA, 19 nt, Artificial Sequence
  Description of Artificial Sequence: Synthetic oligonucleotide
aagagccaauauaauaacu

SEQ ID NO: 2885333 - RNA, 19 nt, Artificial Sequence
  Description of Artificial Sequence: Synthetic oligonucleotide
uuguggauuccaucaauuc

SEQ ID NO: 2885334 - RNA, 19 nt, Artificial Sequence
  Description of Artificial Sequence: Synthetic oligonucleotide
gagagaucucagcacccgg

SEQ ID NO: 2885335 - RNA, 19 nt, Artificial Sequence
  Description of Artificial Sequence: Synthetic oligonucleotide
cauuauuccagaagagaga

SEQ ID NO: 2885336 - RNA, 19 nt, Artificial Sequence
  Description of Artificial Sequence: Synthetic oligonucleotide
ucaagaggaacgucaugcu

SEQ ID NO: 2885337 - RNA, 19 nt, Artificial Sequence
  Description of Artificial Sequence: Synthetic oligonucleotide
cucagcacccgggagaucc

SEQ ID NO: 2885338 - RNA, 19 nt, Artificial Sequence
  Description of Artificial Sequence: Synthetic oligonucleotide
caguuugagagaucucagc

SEQ ID NO: 2885339 - RNA, 19 nt, Artificial Sequence
  Description of Artificial Sequence: Synthetic oligonucleotide
auucuauuucaaccaucag

SEQ ID NO: 2885340 - RNA, 19 nt, Artificial Sequence
  Description of Artificial Sequence: Synthetic oligonucleotide
gagacgacaugguaacaac

SEQ ID NO: 2885341 - RNA, 19 nt, Artificial Sequence
  Description of Artificial Sequence: Synthetic oligonucleotide
gacauuccaggcauuauuc

SEQ ID NO: 2885342 - RNA, 19 nt, Artificial Sequence
  Description of Artificial Sequence: Synthetic oligonucleotide
uugaacgggaauaguacuu

SEQ ID NO: 2885343 - RNA, 19 nt, Artificial Sequence
  Description of Artificial Sequence: Synthetic oligonucleotide
aaguugaacgggaauagua

SEQ ID NO: 2885344 - RNA, 19 nt, Artificial Sequence
  Description of Artificial Sequence: Synthetic oligonucleotide
agccacacagaguuccccg

SEQ ID NO: 2885345 - RNA, 19 nt, Artificial Sequence
  Description of Artificial Sequence: Synthetic oligonucleotide
gaagagagaaaagcugaac

SEQ ID NO: 2885346 - RNA, 19 nt, Artificial Sequence
  Description of Artificial Sequence: Synthetic oligonucleotide
acauuagaaugauuucuaa

SEQ ID NO: 2885347 - RNA, 19 nt, Artificial Sequence
  Description of Artificial Sequence: Synthetic oligonucleotide
aucugccaccuccaaaguc

SEQ ID NO: 2885348 - RNA, 19 nt, Artificial Sequence
  Description of Artificial Sequence: Synthetic oligonucleotide
gaagaacauguuguacucc

SEQ ID NO: 2885349 - RNA, 19 nt, Artificial Sequence
  Description of Artificial Sequence: Synthetic oligonucleotide
caauucuauuucaaccauc

SEQ ID NO: 2885350 - RNA, 19 nt, Artificial Sequence
  Description of Artificial Sequence: Synthetic oligonucleotide
cagcugaagccacacagag

SEQ ID NO: 2885351 - RNA, 19 nt, Artificial Sequence
  Description of Artificial Sequence: Synthetic oligonucleotide
acucaggaagcagagacga

SEQ ID NO: 2885352 - RNA, 19 nt, Artificial Sequence
  Description of Artificial Sequence: Synthetic oligonucleotide
aaucgugcaaacaguuuga

SEQ ID NO: 2885353 - RNA, 19 nt, Artificial Sequence
  Description of Artificial Sequence: Synthetic oligonucleotide
cauuagaaugauuucuaaa

SEQ ID NO: 2885354 - RNA, 19 nt, Artificial Sequence
  Description of Artificial Sequence: Synthetic oligonucleotide
ugcaaacaguuugagagau

SEQ ID NO: 2885355 - RNA, 19 nt, Artificial Sequence
  Description of Artificial Sequence: Synthetic oligonucleotide
agagccaauauaauaacuu

SEQ ID NO: 2885356 - RNA, 19 nt, Artificial Sequence
  Description of Artificial Sequence: Synthetic oligonucleotide
gaucucagcacccgggaga

SEQ ID NO: 2885357 - RNA, 19 nt, Artificial Sequence
  Description of Artificial Sequence: Synthetic oligonucleotide
auuuguggauuccaucaau

SEQ ID NO: 2885358 - RNA, 19 nt, Artificial Sequence
  Description of Artificial Sequence: Synthetic oligonucleotide
cacaaacucaggaagcaga

SEQ ID NO: 2885359 - RNA, 19 nt, Artificial Sequence
  Description of Artificial Sequence: Synthetic oligonucleotide
agacauuccaggcauuauu

SEQ ID NO: 2885360 - RNA, 19 nt, Artificial Sequence
  Description of Artificial Sequence: Synthetic oligonucleotide
acuccagguucucaauaag

SEQ ID NO: 2885361 - RNA, 19 nt, Artificial Sequence
  Description of Artificial Sequence: Synthetic oligonucleotide
ucuucagggcccuggcaag

SEQ ID NO: 2885362 - RNA, 19 nt, Artificial Sequence
  Description of Artificial Sequence: Synthetic oligonucleotide
aaagcugaacauccacauu

SEQ ID NO: 2885363 - RNA, 19 nt, Artificial Sequence
  Description of Artificial Sequence: Synthetic oligonucleotide
cuauuucaaccaucaguac

SEQ ID NO: 2885364 - RNA, 19 nt, Artificial Sequence
  Description of Artificial Sequence: Synthetic oligonucleotide
cucgagaagaacauguugu

SEQ ID NO: 2885365 - RNA, 19 nt, Artificial Sequence
  Description of Artificial Sequence: Synthetic oligonucleotide
aagucagcuucaauggcca

SEQ ID NO: 2885366 - RNA, 19 nt, Artificial Sequence
  Description of Artificial Sequence: Synthetic oligonucleotide
agagaucucagcacccggg

SEQ ID NO: 2885367 - RNA, 19 nt, Artificial Sequence
  Description of Artificial Sequence: Synthetic oligonucleotide
ugaacgggaauaguacuuc

SEQ ID NO: 2885368 - RNA, 19 nt, Artificial Sequence
  Description of Artificial Sequence: Synthetic oligonucleotide
aaucugccaccuccaaagu

SEQ ID NO: 2885369 - RNA, 19 nt, Artificial Sequence
  Description of Artificial Sequence: Synthetic oligonucleotide
gaaguagacaccaguuaca

SEQ ID NO: 2885370 - RNA, 19 nt, Artificial Sequence
  Description of Artificial Sequence: Synthetic oligonucleotide
cauuccaggcauuauucca

SEQ ID NO: 2885371 - RNA, 19 nt, Artificial Sequence
  Description of Artificial Sequence: Synthetic oligonucleotide
ucgagaagaacauguugua

SEQ ID NO: 2885372 - RNA, 19 nt, Artificial Sequence
  Description of Artificial Sequence: Synthetic oligonucleotide
acgggaauaguacuucaaa

SEQ ID NO: 2885373 - RNA, 19 nt, Artificial Sequence
  Description of Artificial Sequence: Synthetic oligonucleotide
cuaagcaagauaaaccaau

SEQ ID NO: 2885374 - RNA, 19 nt, Artificial Sequence
  Description of Artificial Sequence: Synthetic oligonucleotide
aaacaguuugagagaucuc

SEQ ID NO: 2885375 - RNA, 19 nt, Artificial Sequence
  Description of Artificial Sequence: Synthetic oligonucleotide
ucgugcaaacaguuugaga

SEQ ID NO: 2885376 - RNA, 19 nt, Artificial Sequence
  Description of Artificial Sequence: Synthetic oligonucleotide
agaagauaagcagcaacau

SEQ ID NO: 2885377 - RNA, 19 nt, Artificial Sequence
  Description of Artificial Sequence: Synthetic oligonucleotide
agaucucagcacccgggag

SEQ ID NO: 2885378 - RNA, 19 nt, Artificial Sequence
  Description of Artificial Sequence: Synthetic oligonucleotide
uggauuccaucaauucuau

SEQ ID NO: 2885379 - RNA, 19 nt, Artificial Sequence
  Description of Artificial Sequence: Synthetic oligonucleotide
acaguuugagagaucucag

SEQ ID NO: 2885380 - RNA, 19 nt, Artificial Sequence
  Description of Artificial Sequence: Synthetic oligonucleotide
gacaugguaacaacaaagu

SEQ ID NO: 2885381 - RNA, 19 nt, Artificial Sequence
  Description of Artificial Sequence: Synthetic oligonucleotide
caagaggaacgucaugcuc

SEQ ID NO: 2885382 - RNA, 19 nt, Artificial Sequence
  Description of Artificial Sequence: Synthetic oligonucleotide
cacauuagaaugauuucua

SEQ ID NO: 2885383 - RNA, 19 nt, Artificial Sequence
  Description of Artificial Sequence: Synthetic oligonucleotide
agagacgacaugguaacaa

SEQ ID NO: 2885384 - RNA, 19 nt, Artificial Sequence
  Description of Artificial Sequence: Synthetic oligonucleotide
gacgacaugguaacaacaa

SEQ ID NO: 2885385 - RNA, 19 nt, Artificial Sequence
  Description of Artificial Sequence: Synthetic oligonucleotide
cagggcccuggcaagagcc

SEQ ID NO: 2885386 - RNA, 19 nt, Artificial Sequence
  Description of Artificial Sequence: Synthetic oligonucleotide
aagcagagacgacauggua

SEQ ID NO: 2885387 - RNA, 19 nt, Artificial Sequence
  Description of Artificial Sequence: Synthetic oligonucleotide
uaaguugaacgggaauagu

SEQ ID NO: 2885388 - RNA, 19 nt, Artificial Sequence
  Description of Artificial Sequence: Synthetic oligonucleotide
caaacaguuugagagaucu

SEQ ID NO: 2885389 - RNA, 19 nt, Artificial Sequence
  Description of Artificial Sequence: Synthetic oligonucleotide
cgacaugguaacaacaaag

SEQ ID NO: 2885390 - RNA, 19 nt, Artificial Sequence
  Description of Artificial Sequence: Synthetic oligonucleotide
gcaagagccaauauaauaa

SEQ ID NO: 2885391 - RNA, 19 nt, Artificial Sequence
  Description of Artificial Sequence: Synthetic oligonucleotide
acccgggagauccucagca

SEQ ID NO: 2885392 - RNA, 19 nt, Artificial Sequence
  Description of Artificial Sequence: Synthetic oligonucleotide
ucaauggccacagcuuagu

SEQ ID NO: 2885393 - RNA, 19 nt, Artificial Sequence
  Description of Artificial Sequence: Synthetic oligonucleotide
auuccagaagagagaaaag

SEQ ID NO: 2885394 - RNA, 19 nt, Artificial Sequence
  Description of Artificial Sequence: Synthetic oligonucleotide
gaacgggaauaguacuuca

SEQ ID NO: 2885395 - RNA, 19 nt, Artificial Sequence
  Description of Artificial Sequence: Synthetic oligonucleotide
uuauuccagaagagagaaa

SEQ ID NO: 2885396 - RNA, 19 nt, Artificial Sequence
  Description of Artificial Sequence: Synthetic oligonucleotide
uguacuccagguucucaau

SEQ ID NO: 2885397 - RNA, 19 nt, Artificial Sequence
  Description of Artificial Sequence: Synthetic oligonucleotide
ccaucaacaccacaaacuc

SEQ ID NO: 2885398 - RNA, 19 nt, Artificial Sequence
  Description of Artificial Sequence: Synthetic oligonucleotide
agcagagacgacaugguaa

SEQ ID NO: 2885399 - RNA, 19 nt, Artificial Sequence
  Description of Artificial Sequence: Synthetic oligonucleotide
acacccaucaacaccacaa

SEQ ID NO: 2885400 - RNA, 19 nt, Artificial Sequence
  Description of Artificial Sequence: Synthetic oligonucleotide
uaaaccaaucugccaccuc

SEQ ID NO: 2885401 - RNA, 19 nt, Artificial Sequence
  Description of Artificial Sequence: Synthetic oligonucleotide
ugacgaaaucgugcaaaca

SEQ ID NO: 2885402 - RNA, 19 nt, Artificial Sequence
  Description of Artificial Sequence: Synthetic oligonucleotide
uuccaggcauuauuccaga

SEQ ID NO: 2885403 - RNA, 19 nt, Artificial Sequence
  Description of Artificial Sequence: Synthetic oligonucleotide
gcagagacgacaugguaac

SEQ ID NO: 2885404 - RNA, 19 nt, Artificial Sequence
  Description of Artificial Sequence: Synthetic oligonucleotide
agucagcuucaauggccac

SEQ ID NO: 2885405 - RNA, 19 nt, Artificial Sequence
  Description of Artificial Sequence: Synthetic oligonucleotide
caacaccacaaacucagga

SEQ ID NO: 2885406 - RNA, 19 nt, Artificial Sequence
  Description of Artificial Sequence: Synthetic oligonucleotide
uagacaccaguuacagcaa

SEQ ID NO: 2885407 - RNA, 19 nt, Artificial Sequence
  Description of Artificial Sequence: Synthetic oligonucleotide
acgacaugguaacaacaaa

SEQ ID NO: 2885408 - RNA, 19 nt, Artificial Sequence
  Description of Artificial Sequence: Synthetic oligonucleotide
ccaucaauucuauuucaac

SEQ ID NO: 2885409 - RNA, 19 nt, Artificial Sequence
  Description of Artificial Sequence: Synthetic oligonucleotide
caaagaaguagacaccagu

SEQ ID NO: 2885410 - RNA, 19 nt, Artificial Sequence
  Description of Artificial Sequence: Synthetic oligonucleotide
gagaucucagcacccggga

SEQ ID NO: 2885411 - RNA, 19 nt, Artificial Sequence
  Description of Artificial Sequence: Synthetic oligonucleotide
guugaacgggaauaguacu

SEQ ID NO: 2885412 - RNA, 19 nt, Artificial Sequence
  Description of Artificial Sequence: Synthetic oligonucleotide
guggauuccaucaauucua

SEQ ID NO: 2885413 - RNA, 19 nt, Artificial Sequence
  Description of Artificial Sequence: Synthetic oligonucleotide
auaaaccaaucugccaccu

SEQ ID NO: 2885414 - RNA, 19 nt, Artificial Sequence
  Description of Artificial Sequence: Synthetic oligonucleotide
guacuucaaagaaguagac

SEQ ID NO: 2885415 - RNA, 19 nt, Artificial Sequence
  Description of Artificial Sequence: Synthetic oligonucleotide
agccaauauaauaacuuua

SEQ ID NO: 2885416 - RNA, 19 nt, Artificial Sequence
  Description of Artificial Sequence: Synthetic oligonucleotide
agauccucagcagcugaag

SEQ ID NO: 2885417 - RNA, 19 nt, Artificial Sequence
  Description of Artificial Sequence: Synthetic oligonucleotide
acgaaaucgugcaaacagu

SEQ ID NO: 2885418 - RNA, 19 nt, Artificial Sequence
  Description of Artificial Sequence: Synthetic oligonucleotide
aucgugcaaacaguuugag

SEQ ID NO: 2885419 - RNA, 19 nt, Artificial Sequence
  Description of Artificial Sequence: Synthetic oligonucleotide
auuugacgaaaucgugcaa

SEQ ID NO: 2885420 - RNA, 19 nt, Artificial Sequence
  Description of Artificial Sequence: Synthetic oligonucleotide
agcugaacauccacauuag

SEQ ID NO: 2885421 - RNA, 19 nt, Artificial Sequence
  Description of Artificial Sequence: Synthetic oligonucleotide
gugcaaacaguuugagaga

SEQ ID NO: 2885422 - RNA, 19 nt, Artificial Sequence
  Description of Artificial Sequence: Synthetic oligonucleotide
caucaacaccacaaacuca

SEQ ID NO: 2885423 - RNA, 19 nt, Artificial Sequence
  Description of Artificial Sequence: Synthetic oligonucleotide
aacgggaauaguacuucaa

SEQ ID NO: 2885424 - RNA, 19 nt, Artificial Sequence
  Description of Artificial Sequence: Synthetic oligonucleotide
gagccaauauaauaacuuu

SEQ ID NO: 2885425 - RNA, 19 nt, Artificial Sequence
  Description of Artificial Sequence: Synthetic oligonucleotide
aagacauuccaggcauuau

SEQ ID NO: 2885426 - RNA, 19 nt, Artificial Sequence
  Description of Artificial Sequence: Synthetic oligonucleotide
ggcaagagccaauauaaua

SEQ ID NO: 2885427 - RNA, 19 nt, Artificial Sequence
  Description of Artificial Sequence: Synthetic oligonucleotide
ccagguucucaauaaguug

SEQ ID NO: 2885428 - RNA, 19 nt, Artificial Sequence
  Description of Artificial Sequence: Synthetic oligonucleotide
acuaagcaagauaaaccaa

SEQ ID NO: 2885429 - RNA, 19 nt, Artificial Sequence
  Description of Artificial Sequence: Synthetic oligonucleotide
uggcaagagccaauauaau

SEQ ID NO: 2885430 - RNA, 19 nt, Artificial Sequence
  Description of Artificial Sequence: Synthetic oligonucleotide
gcugaagccacacagaguu

SEQ ID NO: 2885431 - RNA, 19 nt, Artificial Sequence
  Description of Artificial Sequence: Synthetic oligonucleotide
caccuccaaagucagcuuc

SEQ ID NO: 2885432 - RNA, 19 nt, Artificial Sequence
  Description of Artificial Sequence: Synthetic oligonucleotide
gagaaaagcugaacaucca

SEQ ID NO: 2885433 - RNA, 19 nt, Artificial Sequence
  Description of Artificial Sequence: Synthetic oligonucleotide
agaacauguuguacuccag

SEQ ID NO: 2885434 - RNA, 19 nt, Artificial Sequence
  Description of Artificial Sequence: Synthetic oligonucleotide
aguuccccgagacacccau

SEQ ID NO: 2885435 - RNA, 19 nt, Artificial Sequence
  Description of Artificial Sequence: Synthetic oligonucleotide
aggcauuauuccagaagag

SEQ ID NO: 2885436 - RNA, 19 nt, Artificial Sequence
  Description of Artificial Sequence: Synthetic oligonucleotide
acauccacauuagaaugau

SEQ ID NO: 2885437 - RNA, 19 nt, Artificial Sequence
  Description of Artificial Sequence: Synthetic oligonucleotide
caucaagaggaacgucaug

SEQ ID NO: 2885438 - RNA, 19 nt, Artificial Sequence
  Description of Artificial Sequence: Synthetic oligonucleotide
ccaggcauuauuccagaag

SEQ ID NO: 2885439 - RNA, 19 nt, Artificial Sequence
  Description of Artificial Sequence: Synthetic oligonucleotide
agacgacaugguaacaaca

SEQ ID NO: 2885440 - RNA, 19 nt, Artificial Sequence
  Description of Artificial Sequence: Synthetic oligonucleotide
gccaauauaauaacuuuaa

SEQ ID NO: 2885441 - RNA, 19 nt, Artificial Sequence
  Description of Artificial Sequence: Synthetic oligonucleotide
cuucaauggccacagcuua

SEQ ID NO: 2885442 - RNA, 19 nt, Artificial Sequence
  Description of Artificial Sequence: Synthetic oligonucleotide
ggaacgucaugcucuucag

SEQ ID NO: 2885443 - RNA, 19 nt, Artificial Sequence
  Description of Artificial Sequence: Synthetic oligonucleotide
agcuuaguauuuguggauu

SEQ ID NO: 2885444 - RNA, 19 nt, Artificial Sequence
  Description of Artificial Sequence: Synthetic oligonucleotide
ggcauuauuccagaagaga

SEQ ID NO: 2885445 - RNA, 19 nt, Artificial Sequence
  Description of Artificial Sequence: Synthetic oligonucleotide
cagaguuccccgagacacc

SEQ ID NO: 2885446 - RNA, 19 nt, Artificial Sequence
  Description of Artificial Sequence: Synthetic oligonucleotide
aaccaaucugccaccucca

SEQ ID NO: 2885447 - RNA, 19 nt, Artificial Sequence
  Description of Artificial Sequence: Synthetic oligonucleotide
gaagccacacagaguuccc

SEQ ID NO: 2885448 - RNA, 19 nt, Artificial Sequence
  Description of Artificial Sequence: Synthetic oligonucleotide
cgggaauaguacuucaaag

SEQ ID NO: 2885449 - RNA, 19 nt, Artificial Sequence
  Description of Artificial Sequence: Synthetic oligonucleotide
agaagagagaaaagcugaa

SEQ ID NO: 2885450 - RNA, 19 nt, Artificial Sequence
  Description of Artificial Sequence: Synthetic oligonucleotide
agacaccaguuacagcaaa

SEQ ID NO: 2885451 - RNA, 19 nt, Artificial Sequence
  Description of Artificial Sequence: Synthetic oligonucleotide
cucuucagggcccuggcaa

SEQ ID NO: 2885452 - RNA, 19 nt, Artificial Sequence
  Description of Artificial Sequence: Synthetic oligonucleotide
augcucuucagggcccugg

SEQ ID NO: 2885453 - RNA, 19 nt, Artificial Sequence
  Description of Artificial Sequence: Synthetic oligonucleotide
cugccaccuccaaagucag

SEQ ID NO: 2885454 - RNA, 19 nt, Artificial Sequence
  Description of Artificial Sequence: Synthetic oligonucleotide
uucagggcccuggcaagag

SEQ ID NO: 2885455 - RNA, 19 nt, Artificial Sequence
  Description of Artificial Sequence: Synthetic oligonucleotide
gcuuaguauuuguggauuc

SEQ ID NO: 2885456 - RNA, 19 nt, Artificial Sequence
  Description of Artificial Sequence: Synthetic oligonucleotide
agaggaacgucaugcucuu

SEQ ID NO: 2885457 - RNA, 19 nt, Artificial Sequence
  Description of Artificial Sequence: Synthetic oligonucleotide
aggaagcagagacgacaug

SEQ ID NO: 2885458 - RNA, 19 nt, Artificial Sequence
  Description of Artificial Sequence: Synthetic oligonucleotide
acaucaagaggaacgucau

SEQ ID NO: 2885459 - RNA, 19 nt, Artificial Sequence
  Description of Artificial Sequence: Synthetic oligonucleotide
agaagaagauaagcagcaa

SEQ ID NO: 2885460 - RNA, 19 nt, Artificial Sequence
  Description of Artificial Sequence: Synthetic oligonucleotide
uccaggcauuauuccagaa

SEQ ID NO: 2885461 - RNA, 19 nt, Artificial Sequence
  Description of Artificial Sequence: Synthetic oligonucleotide
agauaagcagcaacaucaa

SEQ ID NO: 2885462 - RNA, 19 nt, Artificial Sequence
  Description of Artificial Sequence: Synthetic oligonucleotide
auguuguacuccagguucu

SEQ ID NO: 2885463 - RNA, 19 nt, Artificial Sequence
  Description of Artificial Sequence: Synthetic oligonucleotide
cucaggaagcagagacgac

SEQ ID NO: 2885464 - RNA, 19 nt, Artificial Sequence
  Description of Artificial Sequence: Synthetic oligonucleotide
gacaccaguuacagcaaaa

SEQ ID NO: 2885465 - RNA, 19 nt, Artificial Sequence
  Description of Artificial Sequence: Synthetic oligonucleotide
gucagcuucaauggccaca

SEQ ID NO: 2885466 - RNA, 19 nt, Artificial Sequence
  Description of Artificial Sequence: Synthetic oligonucleotide
cgucaugcucuucagggcc

SEQ ID NO: 2885467 - RNA, 19 nt, Artificial Sequence
  Description of Artificial Sequence: Synthetic oligonucleotide
guacuccagguucucaaua

SEQ ID NO: 2885468 - RNA, 19 nt, Artificial Sequence
  Description of Artificial Sequence: Synthetic oligonucleotide
cuccagguucucaauaagu

SEQ ID NO: 2885469 - RNA, 19 nt, Artificial Sequence
  Description of Artificial Sequence: Synthetic oligonucleotide
ugguaacaacaaagucaaa

SEQ ID NO: 2885470 - RNA, 19 nt, Artificial Sequence
  Description of Artificial Sequence: Synthetic oligonucleotide
gaagcagagacgacauggu

SEQ ID NO: 2885471 - RNA, 19 nt, Artificial Sequence
  Description of Artificial Sequence: Synthetic oligonucleotide
accuccaaagucagcuuca

SEQ ID NO: 2885472 - RNA, 19 nt, Artificial Sequence
  Description of Artificial Sequence: Synthetic oligonucleotide
aucucagcacccgggagau

SEQ ID NO: 2885473 - RNA, 19 nt, Artificial Sequence
  Description of Artificial Sequence: Synthetic oligonucleotide
caacaucaagaggaacguc

SEQ ID NO: 2885474 - RNA, 19 nt, Artificial Sequence
  Description of Artificial Sequence: Synthetic oligonucleotide
accaaucugccaccuccaa

SEQ ID NO: 2885475 - RNA, 19 nt, Artificial Sequence
  Description of Artificial Sequence: Synthetic oligonucleotide
ucagcacccgggagauccu

SEQ ID NO: 2885476 - RNA, 19 nt, Artificial Sequence
  Description of Artificial Sequence: Synthetic oligonucleotide
cugaagccacacagaguuc

SEQ ID NO: 2885477 - RNA, 19 nt, Artificial Sequence
  Description of Artificial Sequence: Synthetic oligonucleotide
guuguacuccagguucuca

SEQ ID NO: 2885478 - RNA, 19 nt, Artificial Sequence
  Description of Artificial Sequence: Synthetic oligonucleotide
caauaaguugaacgggaau

SEQ ID NO: 2885479 - RNA, 19 nt, Artificial Sequence
  Description of Artificial Sequence: Synthetic oligonucleotide
ugccaccuccaaagucagc

SEQ ID NO: 2885480 - RNA, 19 nt, Artificial Sequence
  Description of Artificial Sequence: Synthetic oligonucleotide
ucaugcucuucagggcccu

SEQ ID NO: 2885481 - RNA, 19 nt, Artificial Sequence
  Description of Artificial Sequence: Synthetic oligonucleotide
ccacagcuuaguauuugug

SEQ ID NO: 2885482 - RNA, 19 nt, Artificial Sequence
  Description of Artificial Sequence: Synthetic oligonucleotide
cccgagacacccaucaaca

SEQ ID NO: 2885483 - RNA, 19 nt, Artificial Sequence
  Description of Artificial Sequence: Synthetic oligonucleotide
auaguacuucaaagaagua

SEQ ID NO: 2885484 - RNA, 19 nt, Artificial Sequence
  Description of Artificial Sequence: Synthetic oligonucleotide
cccaucaacaccacaaacu

SEQ ID NO: 2885485 - RNA, 19 nt, Artificial Sequence
  Description of Artificial Sequence: Synthetic oligonucleotide
ggagauccucagcagcuga

SEQ ID NO: 2885486 - RNA, 19 nt, Artificial Sequence
  Description of Artificial Sequence: Synthetic oligonucleotide
gguucucaauaaguugaac

SEQ ID NO: 2885487 - RNA, 19 nt, Artificial Sequence
  Description of Artificial Sequence: Synthetic oligonucleotide
gaaaucgugcaaacaguuu

SEQ ID NO: 2885488 - RNA, 19 nt, Artificial Sequence
  Description of Artificial Sequence: Synthetic oligonucleotide
cagcaacaucaagaggaac

SEQ ID NO: 2885489 - RNA, 19 nt, Artificial Sequence
  Description of Artificial Sequence: Synthetic oligonucleotide
agguucucaauaaguugaa

SEQ ID NO: 2885490 - RNA, 19 nt, Artificial Sequence
  Description of Artificial Sequence: Synthetic oligonucleotide
agcugaagccacacagagu

SEQ ID NO: 2885491 - RNA, 19 nt, Artificial Sequence
  Description of Artificial Sequence: Synthetic oligonucleotide
uggccacagcuuaguauuu

SEQ ID NO: 2885492 - RNA, 19 nt, Artificial Sequence
  Description of Artificial Sequence: Synthetic oligonucleotide
caaacucaggaagcagaga

SEQ ID NO: 2885493 - RNA, 19 nt, Artificial Sequence
  Description of Artificial Sequence: Synthetic oligonucleotide
agacacccaucaacaccac

SEQ ID NO: 2885494 - RNA, 19 nt, Artificial Sequence
  Description of Artificial Sequence: Synthetic oligonucleotide
cacagaguuccccgagaca

SEQ ID NO: 2885495 - RNA, 19 nt, Artificial Sequence
  Description of Artificial Sequence: Synthetic oligonucleotide
gagauccucagcagcugaa

SEQ ID NO: 2885496 - RNA, 19 nt, Artificial Sequence
  Description of Artificial Sequence: Synthetic oligonucleotide
uccccgagacacccaucaa

SEQ ID NO: 2885497 - RNA, 19 nt, Artificial Sequence
  Description of Artificial Sequence: Synthetic oligonucleotide
ccgggagauccucagcagc

SEQ ID NO: 2885498 - RNA, 19 nt, Artificial Sequence
  Description of Artificial Sequence: Synthetic oligonucleotide
gcugaacauccacauuaga

SEQ ID NO: 2885499 - RNA, 19 nt, Artificial Sequence
  Description of Artificial Sequence: Synthetic oligonucleotide
ccccgagacacccaucaac

SEQ ID NO: 2885500 - RNA, 19 nt, Artificial Sequence
  Description of Artificial Sequence: Synthetic oligonucleotide
cacccaucaacaccacaaa

SEQ ID NO: 2885501 - RNA, 19 nt, Artificial Sequence
  Description of Artificial Sequence: Synthetic oligonucleotide
cacccgggagauccucagc

SEQ ID NO: 2885502 - RNA, 19 nt, Artificial Sequence
  Description of Artificial Sequence: Synthetic oligonucleotide
caggaagcagagacgacau

SEQ ID NO: 2885503 - RNA, 19 nt, Artificial Sequence
  Description of Artificial Sequence: Synthetic oligonucleotide
cgagaagaacauguuguac

SEQ ID NO: 2885504 - RNA, 19 nt, Artificial Sequence
  Description of Artificial Sequence: Synthetic oligonucleotide
ccuggcaagagccaauaua

SEQ ID NO: 2885505 - RNA, 19 nt, Artificial Sequence
  Description of Artificial Sequence: Synthetic oligonucleotide
ccacaaacucaggaagcag

SEQ ID NO: 2885506 - RNA, 19 nt, Artificial Sequence
  Description of Artificial Sequence: Synthetic oligonucleotide
ccacauuagaaugauuucu

SEQ ID NO: 2885507 - RNA, 19 nt, Artificial Sequence
  Description of Artificial Sequence: Synthetic oligonucleotide
gcaacaucaagaggaacgu

SEQ ID NO: 2885508 - RNA, 19 nt, Artificial Sequence
  Description of Artificial Sequence: Synthetic oligonucleotide
cagcuuaguauuuguggau

SEQ ID NO: 2885509 - RNA, 19 nt, Artificial Sequence
  Description of Artificial Sequence: Synthetic oligonucleotide
ccacacagaguuccccgag

SEQ ID NO: 2885510 - RNA, 19 nt, Artificial Sequence
  Description of Artificial Sequence: Synthetic oligonucleotide
gccaccuccaaagucagcu

SEQ ID NO: 2885511 - RNA, 19 nt, Artificial Sequence
  Description of Artificial Sequence: Synthetic oligonucleotide
gcacccgggagauccucag

SEQ ID NO: 2885512 - RNA, 19 nt, Artificial Sequence
  Description of Artificial Sequence: Synthetic oligonucleotide
ggccacagcuuaguauuug

SEQ ID NO: 2885513 - RNA, 19 nt, Artificial Sequence
  Description of Artificial Sequence: Synthetic oligonucleotide
ccgagacacccaucaacac

SEQ ID NO: 2885514 - RNA, 19 nt, Artificial Sequence
  Description of Artificial Sequence: Synthetic oligonucleotide
gcagcugaagccacacaga

SEQ ID NO: 2885515 - RNA, 19 nt, Artificial Sequence
  Description of Artificial Sequence: Synthetic oligonucleotide
cuucagggcccuggcaaga

SEQ ID NO: 2885516 - RNA, 19 nt, Artificial Sequence
  Description of Artificial Sequence: Synthetic oligonucleotide
agcacccgggagauccuca

SEQ ID NO: 2885517 - RNA, 19 nt, Artificial Sequence
  Description of Artificial Sequence: Synthetic oligonucleotide
cagcuucaauggccacagc

SEQ ID NO: 2885518 - RNA, 19 nt, Artificial Sequence
  Description of Artificial Sequence: Synthetic oligonucleotide
cccgggagauccucagcag

SEQ ID NO: 2885519 - RNA, 19 nt, Artificial Sequence
  Description of Artificial Sequence: Synthetic oligonucleotide
ccaauauaauaacuuuaau

SEQ ID NO: 2885520 - RNA, 19 nt, Artificial Sequence
  Description of Artificial Sequence: Synthetic oligonucleotide
gccacagcuuaguauuugu

SEQ ID NO: 2885521 - RNA, 19 nt, Artificial Sequence
  Description of Artificial Sequence: Synthetic oligonucleotide
gcagcaacaucaagaggaa

SEQ ID NO: 2885522 - RNA, 19 nt, Artificial Sequence
  Description of Artificial Sequence: Synthetic oligonucleotide
gaggaacgucaugcucuuc

SEQ ID NO: 2885523 - RNA, 19 nt, Artificial Sequence
  Description of Artificial Sequence: Synthetic oligonucleotide
gcaaacaguuugagagauc

SEQ ID NO: 2885524 - RNA, 19 nt, Artificial Sequence
  Description of Artificial Sequence: Synthetic oligonucleotide
cagagacgacaugguaaca

SEQ ID NO: 2885525 - RNA, 19 nt, Artificial Sequence
  Description of Artificial Sequence: Synthetic oligonucleotide
caugcucuucagggcccug

SEQ ID NO: 2885526 - RNA, 19 nt, Artificial Sequence
  Description of Artificial Sequence: Synthetic oligonucleotide
cagcagcugaagccacaca

SEQ ID NO: 2885527 - RNA, 19 nt, Artificial Sequence
  Description of Artificial Sequence: Synthetic oligonucleotide
agggcccuggcaagagcca

SEQ ID NO: 2885528 - RNA, 19 nt, Artificial Sequence
  Description of Artificial Sequence: Synthetic oligonucleotide
ccaaucugccaccuccaaa

SEQ ID NO: 2885529 - RNA, 19 nt, Artificial Sequence
  Description of Artificial Sequence: Synthetic oligonucleotide
gucucgagaagaacauguu

SEQ ID NO: 2885530 - RNA, 19 nt, Artificial Sequence
  Description of Artificial Sequence: Synthetic oligonucleotide
caacaaagucaaagacauu

SEQ ID NO: 2885531 - RNA, 19 nt, Artificial Sequence
  Description of Artificial Sequence: Synthetic oligonucleotide
cauccacauuagaaugauu

SEQ ID NO: 2885532 - RNA, 19 nt, Artificial Sequence
  Description of Artificial Sequence: Synthetic oligonucleotide
cagcacccgggagauccuc

SEQ ID NO: 2885533 - RNA, 19 nt, Artificial Sequence
  Description of Artificial Sequence: Synthetic oligonucleotide
cgaaaucgugcaaacaguu

SEQ ID NO: 2885534 - RNA, 19 nt, Artificial Sequence
  Description of Artificial Sequence: Synthetic oligonucleotide
guuccccgagacacccauc

SEQ ID NO: 2885535 - RNA, 19 nt, Artificial Sequence
  Description of Artificial Sequence: Synthetic oligonucleotide
cuccaaagucagcuucaau

SEQ ID NO: 2885536 - RNA, 19 nt, Artificial Sequence
  Description of Artificial Sequence: Synthetic oligonucleotide
ucucagcacccgggagauc

SEQ ID NO: 2885537 - RNA, 19 nt, Artificial Sequence
  Description of Artificial Sequence: Synthetic oligonucleotide
ggauuccaucaauucuauu

SEQ ID NO: 2885538 - RNA, 19 nt, Artificial Sequence
  Description of Artificial Sequence: Synthetic oligonucleotide
ccuccaaagucagcuucaa

SEQ ID NO: 2885539 - RNA, 19 nt, Artificial Sequence
  Description of Artificial Sequence: Synthetic oligonucleotide
gggcccuggcaagagccaa

SEQ ID NO: 2885540 - RNA, 19 nt, Artificial Sequence
  Description of Artificial Sequence: Synthetic oligonucleotide
gcccuggcaagagccaaua

SEQ ID NO: 2885541 - RNA, 19 nt, Artificial Sequence
  Description of Artificial Sequence: Synthetic oligonucleotide
cccuggcaagagccaauau

SEQ ID NO: 2885542 - RNA, 19 nt, Artificial Sequence
  Description of Artificial Sequence: Synthetic oligonucleotide
uguuuuaccauccacgugg

SEQ ID NO: 2885543 - RNA, 19 nt, Artificial Sequence
  Description of Artificial Sequence: Synthetic oligonucleotide
agaaaugaaguuuacuucc

SEQ ID NO: 2885544 - RNA, 19 nt, Artificial Sequence
  Description of Artificial Sequence: Synthetic oligonucleotide
uuaagaaucacaccgaaga

SEQ ID NO: 2885545 - RNA, 19 nt, Artificial Sequence
  Description of Artificial Sequence: Synthetic oligonucleotide
aaucacaccgaagaaaucc

SEQ ID NO: 2885546 - RNA, 19 nt, Artificial Sequence
  Description of Artificial Sequence: Synthetic oligonucleotide
aaguuuaaagucuggcacc

SEQ ID NO: 2885547 - RNA, 19 nt, Artificial Sequence
  Description of Artificial Sequence: Synthetic oligonucleotide
aagcgcauggcauuuaagc

SEQ ID NO: 2885548 - RNA, 19 nt, Artificial Sequence
  Description of Artificial Sequence: Synthetic oligonucleotide
gauaucuucaucucgagac

SEQ ID NO: 2885549 - RNA, 19 nt, Artificial Sequence
  Description of Artificial Sequence: Synthetic oligonucleotide
agucauuuuccccagaaac

SEQ ID NO: 2885550 - RNA, 19 nt, Artificial Sequence
  Description of Artificial Sequence: Synthetic oligonucleotide
gaaguuuacuuccugaggc

SEQ ID NO: 2885551 - RNA, 19 nt, Artificial Sequence
  Description of Artificial Sequence: Synthetic oligonucleotide
acuccaugcggucagagcc

SEQ ID NO: 2885552 - RNA, 19 nt, Artificial Sequence
  Description of Artificial Sequence: Synthetic oligonucleotide
ugaaaggcagcccaaaggc

SEQ ID NO: 2885553 - RNA, 19 nt, Artificial Sequence
  Description of Artificial Sequence: Synthetic oligonucleotide
uccuugggcacacugaugg

SEQ ID NO: 2885554 - RNA, 19 nt, Artificial Sequence
  Description of Artificial Sequence: Synthetic oligonucleotide
ugugcuguagucauuuucc

SEQ ID NO: 2885555 - RNA, 19 nt, Artificial Sequence
  Description of Artificial Sequence: Synthetic oligonucleotide
ucaguagucuccuugagcu

SEQ ID NO: 2885556 - RNA, 19 nt, Artificial Sequence
  Description of Artificial Sequence: Synthetic oligonucleotide
ugaaguuuacuuccugagg

SEQ ID NO: 2885557 - RNA, 19 nt, Artificial Sequence
  Description of Artificial Sequence: Synthetic oligonucleotide
ugugauaucuucaucucga

SEQ ID NO: 2885558 - RNA, 19 nt, Artificial Sequence
  Description of Artificial Sequence: Synthetic oligonucleotide
aagaacauguguguuuuac

SEQ ID NO: 2885559 - RNA, 19 nt, Artificial Sequence
  Description of Artificial Sequence: Synthetic oligonucleotide
agaacauguguguuuuacc

SEQ ID NO: 2885560 - RNA, 19 nt, Artificial Sequence
  Description of Artificial Sequence: Synthetic oligonucleotide
uaggcuagcaacuccaugc

SEQ ID NO: 2885561 - RNA, 19 nt, Artificial Sequence
  Description of Artificial Sequence: Synthetic oligonucleotide
aacagugaaaggcagccca

SEQ ID NO: 2885562 - RNA, 19 nt, Artificial Sequence
  Description of Artificial Sequence: Synthetic oligonucleotide
aaagucuggcaccuuuugg

SEQ ID NO: 2885563 - RNA, 19 nt, Artificial Sequence
  Description of Artificial Sequence: Synthetic oligonucleotide
auaucuucaucucgagacc

SEQ ID NO: 2885564 - RNA, 19 nt, Artificial Sequence
  Description of Artificial Sequence: Synthetic oligonucleotide
uuuaagaaucacaccgaag

SEQ ID NO: 2885565 - RNA, 19 nt, Artificial Sequence
  Description of Artificial Sequence: Synthetic oligonucleotide
ucaucucgagaccaaaugc

SEQ ID NO: 2885566 - RNA, 19 nt, Artificial Sequence
  Description of Artificial Sequence: Synthetic oligonucleotide
aaaugcgcauccauaauuc

SEQ ID NO: 2885567 - RNA, 19 nt, Artificial Sequence
  Description of Artificial Sequence: Synthetic oligonucleotide
acauguguguuuuaccauc

SEQ ID NO: 2885568 - RNA, 19 nt, Artificial Sequence
  Description of Artificial Sequence: Synthetic oligonucleotide
gagaaaugaaguuuacuuc

SEQ ID NO: 2885569 - RNA, 19 nt, Artificial Sequence
  Description of Artificial Sequence: Synthetic oligonucleotide
uccauaauucucucgacac

SEQ ID NO: 2885570 - RNA, 19 nt, Artificial Sequence
  Description of Artificial Sequence: Synthetic oligonucleotide
ugaggcaaguuuaaagucu

SEQ ID NO: 2885571 - RNA, 19 nt, Artificial Sequence
  Description of Artificial Sequence: Synthetic oligonucleotide
uuuaccauccacgugggca

SEQ ID NO: 2885572 - RNA, 19 nt, Artificial Sequence
  Description of Artificial Sequence: Synthetic oligonucleotide
uucaucucgagaccaaaug

SEQ ID NO: 2885573 - RNA, 19 nt, Artificial Sequence
  Description of Artificial Sequence: Synthetic oligonucleotide
aagucuggcaccuuuuggu

SEQ ID NO: 2885574 - RNA, 19 nt, Artificial Sequence
  Description of Artificial Sequence: Synthetic oligonucleotide
uuccccagaaacuuuuggg

SEQ ID NO: 2885575 - RNA, 19 nt, Artificial Sequence
  Description of Artificial Sequence: Synthetic oligonucleotide
caucucgagaccaaaugcg

SEQ ID NO: 2885576 - RNA, 19 nt, Artificial Sequence
  Description of Artificial Sequence: Synthetic oligonucleotide
aacuccaugcggucagagc

SEQ ID NO: 2885577 - RNA, 19 nt, Artificial Sequence
  Description of Artificial Sequence: Synthetic oligonucleotide
gaacauguguguuuuacca

SEQ ID NO: 2885578 - RNA, 19 nt, Artificial Sequence
  Description of Artificial Sequence: Synthetic oligonucleotide
uguguuuuaccauccacgu

SEQ ID NO: 2885579 - RNA, 19 nt, Artificial Sequence
  Description of Artificial Sequence: Synthetic oligonucleotide
uuuuaagaaucacaccgaa

SEQ ID NO: 2885580 - RNA, 19 nt, Artificial Sequence
  Description of Artificial Sequence: Synthetic oligonucleotide
ucagagccaaagaacaugu

SEQ ID NO: 2885581 - RNA, 19 nt, Artificial Sequence
  Description of Artificial Sequence: Synthetic oligonucleotide
agagccaaagaacaugugu

SEQ ID NO: 2885582 - RNA, 19 nt, Artificial Sequence
  Description of Artificial Sequence: Synthetic oligonucleotide
uccugaggcaaguuuaaag

SEQ ID NO: 2885583 - RNA, 19 nt, Artificial Sequence
  Description of Artificial Sequence: Synthetic oligonucleotide
uugagcuuguccuucaccu

SEQ ID NO: 2885584 - RNA, 19 nt, Artificial Sequence
  Description of Artificial Sequence: Synthetic oligonucleotide
aucucugguuguuccaugc

SEQ ID NO: 2885585 - RNA, 19 nt, Artificial Sequence
  Description of Artificial Sequence: Synthetic oligonucleotide
ucuggcaccuuuugguugg

SEQ ID NO: 2885586 - RNA, 19 nt, Artificial Sequence
  Description of Artificial Sequence: Synthetic oligonucleotide
ugcgcauccauaauucucu

SEQ ID NO: 2885587 - RNA, 19 nt, Artificial Sequence
  Description of Artificial Sequence: Synthetic oligonucleotide
ucugguuguuccaugcuca

SEQ ID NO: 2885588 - RNA, 19 nt, Artificial Sequence
  Description of Artificial Sequence: Synthetic oligonucleotide
ucuccagcaucucugguug

SEQ ID NO: 2885589 - RNA, 19 nt, Artificial Sequence
  Description of Artificial Sequence: Synthetic oligonucleotide
acaccgaagaaauccuugg

SEQ ID NO: 2885590 - RNA, 19 nt, Artificial Sequence
  Description of Artificial Sequence: Synthetic oligonucleotide
uccccagaaacuuuugggc

SEQ ID NO: 2885591 - RNA, 19 nt, Artificial Sequence
  Description of Artificial Sequence: Synthetic oligonucleotide
uuuaaagucuggcaccuuu

SEQ ID NO: 2885592 - RNA, 19 nt, Artificial Sequence
  Description of Artificial Sequence: Synthetic oligonucleotide
aauccuugggcacacugau

SEQ ID NO: 2885593 - RNA, 19 nt, Artificial Sequence
  Description of Artificial Sequence: Synthetic oligonucleotide
guguguuuuaccauccacg

SEQ ID NO: 2885594 - RNA, 19 nt, Artificial Sequence
  Description of Artificial Sequence: Synthetic oligonucleotide
aaaggccccguauuugcag

SEQ ID NO: 2885595 - RNA, 19 nt, Artificial Sequence
  Description of Artificial Sequence: Synthetic oligonucleotide
ugggcaacagugaaaggca

SEQ ID NO: 2885596 - RNA, 19 nt, Artificial Sequence
  Description of Artificial Sequence: Synthetic oligonucleotide
aaguuuacuuccugaggca

SEQ ID NO: 2885597 - RNA, 19 nt, Artificial Sequence
  Description of Artificial Sequence: Synthetic oligonucleotide
uguguguuuuaccauccac

SEQ ID NO: 2885598 - RNA, 19 nt, Artificial Sequence
  Description of Artificial Sequence: Synthetic oligonucleotide
uaaagucuggcaccuuuug

SEQ ID NO: 2885599 - RNA, 19 nt, Artificial Sequence
  Description of Artificial Sequence: Synthetic oligonucleotide
gguuguuccaugcucacag

SEQ ID NO: 2885600 - RNA, 19 nt, Artificial Sequence
  Description of Artificial Sequence: Synthetic oligonucleotide
gagccaaagaacaugugug

SEQ ID NO: 2885601 - RNA, 19 nt, Artificial Sequence
  Description of Artificial Sequence: Synthetic oligonucleotide
gaaauccuugggcacacug

SEQ ID NO: 2885602 - RNA, 19 nt, Artificial Sequence
  Description of Artificial Sequence: Synthetic oligonucleotide
aagaaauccuugggcacac

SEQ ID NO: 2885603 - RNA, 19 nt, Artificial Sequence
  Description of Artificial Sequence: Synthetic oligonucleotide
aacuuuugggcuugcucug

SEQ ID NO: 2885604 - RNA, 19 nt, Artificial Sequence
  Description of Artificial Sequence: Synthetic oligonucleotide
uuugggcuugcucuguggc

SEQ ID NO: 2885605 - RNA, 19 nt, Artificial Sequence
  Description of Artificial Sequence: Synthetic oligonucleotide
uaagaaucacaccgaagaa

SEQ ID NO: 2885606 - RNA, 19 nt, Artificial Sequence
  Description of Artificial Sequence: Synthetic oligonucleotide
aagaaucacaccgaagaaa

SEQ ID NO: 2885607 - RNA, 19 nt, Artificial Sequence
  Description of Artificial Sequence: Synthetic oligonucleotide
aaugcgcauccauaauucu

SEQ ID NO: 2885608 - RNA, 19 nt, Artificial Sequence
  Description of Artificial Sequence: Synthetic oligonucleotide
ugauaucuucaucucgaga

SEQ ID NO: 2885609 - RNA, 19 nt, Artificial Sequence
  Description of Artificial Sequence: Synthetic oligonucleotide
aaggccccguauuugcagg

SEQ ID NO: 2885610 - RNA, 19 nt, Artificial Sequence
  Description of Artificial Sequence: Synthetic oligonucleotide
uucucucccagcagguagg

SEQ ID NO: 2885611 - RNA, 19 nt, Artificial Sequence
  Description of Artificial Sequence: Synthetic oligonucleotide
ucucucgacaccuucucca

SEQ ID NO: 2885612 - RNA, 19 nt, Artificial Sequence
  Description of Artificial Sequence: Synthetic oligonucleotide
cauguguguuuuaccaucc

SEQ ID NO: 2885613 - RNA, 19 nt, Artificial Sequence
  Description of Artificial Sequence: Synthetic oligonucleotide
aacauguguguuuuaccau

SEQ ID NO: 2885614 - RNA, 19 nt, Artificial Sequence
  Description of Artificial Sequence: Synthetic oligonucleotide
cacacugaugggaaccugg

SEQ ID NO: 2885615 - RNA, 19 nt, Artificial Sequence
  Description of Artificial Sequence: Synthetic oligonucleotide
cugugauaucuucaucucg

SEQ ID NO: 2885616 - RNA, 19 nt, Artificial Sequence
  Description of Artificial Sequence: Synthetic oligonucleotide
gugggcaacagugaaaggc

SEQ ID NO: 2885617 - RNA, 19 nt, Artificial Sequence
  Description of Artificial Sequence: Synthetic oligonucleotide
agucuccuugagcuugucc

SEQ ID NO: 2885618 - RNA, 19 nt, Artificial Sequence
  Description of Artificial Sequence: Synthetic oligonucleotide
uuuugggcuugcucugugg

SEQ ID NO: 2885619 - RNA, 19 nt, Artificial Sequence
  Description of Artificial Sequence: Synthetic oligonucleotide
agaaucacaccgaagaaau

SEQ ID NO: 2885620 - RNA, 19 nt, Artificial Sequence
  Description of Artificial Sequence: Synthetic oligonucleotide
aucucgagaccaaaugcgc

SEQ ID NO: 2885621 - RNA, 19 nt, Artificial Sequence
  Description of Artificial Sequence: Synthetic oligonucleotide
ugcucugggacucugugau

SEQ ID NO: 2885622 - RNA, 19 nt, Artificial Sequence
  Description of Artificial Sequence: Synthetic oligonucleotide
ugcggucagagccaaagaa

SEQ ID NO: 2885623 - RNA, 19 nt, Artificial Sequence
  Description of Artificial Sequence: Synthetic oligonucleotide
cucugcagcagccaggaug

SEQ ID NO: 2885624 - RNA, 19 nt, Artificial Sequence
  Description of Artificial Sequence: Synthetic oligonucleotide
auccauaauucucucgaca

SEQ ID NO: 2885625 - RNA, 19 nt, Artificial Sequence
  Description of Artificial Sequence: Synthetic oligonucleotide
uggcauuuaagcuuccuuu

SEQ ID NO: 2885626 - RNA, 19 nt, Artificial Sequence
  Description of Artificial Sequence: Synthetic oligonucleotide
agccaggaugcucugggac

SEQ ID NO: 2885627 - RNA, 19 nt, Artificial Sequence
  Description of Artificial Sequence: Synthetic oligonucleotide
ugcuguagucauuuucccc

SEQ ID NO: 2885628 - RNA, 19 nt, Artificial Sequence
  Description of Artificial Sequence: Synthetic oligonucleotide
ucugugauaucuucaucuc

SEQ ID NO: 2885629 - RNA, 19 nt, Artificial Sequence
  Description of Artificial Sequence: Synthetic oligonucleotide
accaaaugcgcauccauaa

SEQ ID NO: 2885630 - RNA, 19 nt, Artificial Sequence
  Description of Artificial Sequence: Synthetic oligonucleotide
agcgcauggcauuuaagcu

SEQ ID NO: 2885631 - RNA, 19 nt, Artificial Sequence
  Description of Artificial Sequence: Synthetic oligonucleotide
ucucgagaccaaaugcgca

SEQ ID NO: 2885632 - RNA, 19 nt, Artificial Sequence
  Description of Artificial Sequence: Synthetic oligonucleotide
ucuguggccauuccugccu

SEQ ID NO: 2885633 - RNA, 19 nt, Artificial Sequence
  Description of Artificial Sequence: Synthetic oligonucleotide
cucacagcggugaggaagc

SEQ ID NO: 2885634 - RNA, 19 nt, Artificial Sequence
  Description of Artificial Sequence: Synthetic oligonucleotide
aguagucuccuugagcuug

SEQ ID NO: 2885635 - RNA, 19 nt, Artificial Sequence
  Description of Artificial Sequence: Synthetic oligonucleotide
cucaguagucuccuugagc

SEQ ID NO: 2885636 - RNA, 19 nt, Artificial Sequence
  Description of Artificial Sequence: Synthetic oligonucleotide
uuuacuuccugaggcaagu

SEQ ID NO: 2885637 - RNA, 19 nt, Artificial Sequence
  Description of Artificial Sequence: Synthetic oligonucleotide
cugaggcaaguuuaaaguc

SEQ ID NO: 2885638 - RNA, 19 nt, Artificial Sequence
  Description of Artificial Sequence: Synthetic oligonucleotide
uaauucucucgacaccuuc

SEQ ID NO: 2885639 - RNA, 19 nt, Artificial Sequence
  Description of Artificial Sequence: Synthetic oligonucleotide
cuucucucccagcagguag

SEQ ID NO: 2885640 - RNA, 19 nt, Artificial Sequence
  Description of Artificial Sequence: Synthetic oligonucleotide
ugccucaguagucuccuug

SEQ ID NO: 2885641 - RNA, 19 nt, Artificial Sequence
  Description of Artificial Sequence: Synthetic oligonucleotide
ucucccagcagguaggcua

SEQ ID NO: 2885642 - RNA, 19 nt, Artificial Sequence
  Description of Artificial Sequence: Synthetic oligonucleotide
agccaaagaacaugugugu

SEQ ID NO: 2885643 - RNA, 19 nt, Artificial Sequence
  Description of Artificial Sequence: Synthetic oligonucleotide
uuaccauccacgugggcaa

SEQ ID NO: 2885644 - RNA, 19 nt, Artificial Sequence
  Description of Artificial Sequence: Synthetic oligonucleotide
aauucucucgacaccuucu

SEQ ID NO: 2885645 - RNA, 19 nt, Artificial Sequence
  Description of Artificial Sequence: Synthetic oligonucleotide
aggcuagcaacuccaugcg

SEQ ID NO: 2885646 - RNA, 19 nt, Artificial Sequence
  Description of Artificial Sequence: Synthetic oligonucleotide
acgugggcaacagugaaag

SEQ ID NO: 2885647 - RNA, 19 nt, Artificial Sequence
  Description of Artificial Sequence: Synthetic oligonucleotide
agcaacuccaugcggucag

SEQ ID NO: 2885648 - RNA, 19 nt, Artificial Sequence
  Description of Artificial Sequence: Synthetic oligonucleotide
gaggcaaguuuaaagucug

SEQ ID NO: 2885649 - RNA, 19 nt, Artificial Sequence
  Description of Artificial Sequence: Synthetic oligonucleotide
acucugugauaucuucauc

SEQ ID NO: 2885650 - RNA, 19 nt, Artificial Sequence
  Description of Artificial Sequence: Synthetic oligonucleotide
auuccugccuucucugcag

SEQ ID NO: 2885651 - RNA, 19 nt, Artificial Sequence
  Description of Artificial Sequence: Synthetic oligonucleotide
uccacuucucucccagcag

SEQ ID NO: 2885652 - RNA, 19 nt, Artificial Sequence
  Description of Artificial Sequence: Synthetic oligonucleotide
aaauccuugggcacacuga

SEQ ID NO: 2885653 - RNA, 19 nt, Artificial Sequence
  Description of Artificial Sequence: Synthetic oligonucleotide
aguuuaaagucuggcaccu

SEQ ID NO: 2885654 - RNA, 19 nt, Artificial Sequence
  Description of Artificial Sequence: Synthetic oligonucleotide
cacaccgaagaaauccuug

SEQ ID NO: 2885655 - RNA, 19 nt, Artificial Sequence
  Description of Artificial Sequence: Synthetic oligonucleotide
uuaaagucuggcaccuuuu

SEQ ID NO: 2885656 - RNA, 19 nt, Artificial Sequence
  Description of Artificial Sequence: Synthetic oligonucleotide
cuugagcuuguccuucacc

SEQ ID NO: 2885657 - RNA, 19 nt, Artificial Sequence
  Description of Artificial Sequence: Synthetic oligonucleotide
gaagaaauccuugggcaca

SEQ ID NO: 2885658 - RNA, 19 nt, Artificial Sequence
  Description of Artificial Sequence: Synthetic oligonucleotide
uucaccugugcuguaguca

SEQ ID NO: 2885659 - RNA, 19 nt, Artificial Sequence
  Description of Artificial Sequence: Synthetic oligonucleotide
uguccuucaccugugcugu

SEQ ID NO: 2885660 - RNA, 19 nt, Artificial Sequence
  Description of Artificial Sequence: Synthetic oligonucleotide
cucugugauaucuucaucu

SEQ ID NO: 2885661 - RNA, 19 nt, Artificial Sequence
  Description of Artificial Sequence: Synthetic oligonucleotide
uucucucgacaccuucucc

SEQ ID NO: 2885662 - RNA, 19 nt, Artificial Sequence
  Description of Artificial Sequence: Synthetic oligonucleotide
caugcggucagagccaaag

SEQ ID NO: 2885663 - RNA, 19 nt, Artificial Sequence
  Description of Artificial Sequence: Synthetic oligonucleotide
cagcagguaggcuagcaac

SEQ ID NO: 2885664 - RNA, 19 nt, Artificial Sequence
  Description of Artificial Sequence: Synthetic oligonucleotide
ucaccugugcuguagucau

SEQ ID NO: 2885665 - RNA, 19 nt, Artificial Sequence
  Description of Artificial Sequence: Synthetic oligonucleotide
caccgaagaaauccuuggg

SEQ ID NO: 2885666 - RNA, 19 nt, Artificial Sequence
  Description of Artificial Sequence: Synthetic oligonucleotide
gugauaucuucaucucgag

SEQ ID NO: 2885667 - RNA, 19 nt, Artificial Sequence
  Description of Artificial Sequence: Synthetic oligonucleotide
gcuguagucauuuucccca

SEQ ID NO: 2885668 - RNA, 19 nt, Artificial Sequence
  Description of Artificial Sequence: Synthetic oligonucleotide
gucagagccaaagaacaug

SEQ ID NO: 2885669 - RNA, 19 nt, Artificial Sequence
  Description of Artificial Sequence: Synthetic oligonucleotide
cuucucugcagcagccagg

SEQ ID NO: 2885670 - RNA, 19 nt, Artificial Sequence
  Description of Artificial Sequence: Synthetic oligonucleotide
uccacgugggcaacaguga

SEQ ID NO: 2885671 - RNA, 19 nt, Artificial Sequence
  Description of Artificial Sequence: Synthetic oligonucleotide
ugagcuuguccuucaccug

SEQ ID NO: 2885672 - RNA, 19 nt, Artificial Sequence
  Description of Artificial Sequence: Synthetic oligonucleotide
uugggcacacugaugggaa

SEQ ID NO: 2885673 - RNA, 19 nt, Artificial Sequence
  Description of Artificial Sequence: Synthetic oligonucleotide
ugcaggcugccucaguagu

SEQ ID NO: 2885674 - RNA, 19 nt, Artificial Sequence
  Description of Artificial Sequence: Synthetic oligonucleotide
auccacgugggcaacagug

SEQ ID NO: 2885675 - RNA, 19 nt, Artificial Sequence
  Description of Artificial Sequence: Synthetic oligonucleotide
gcauccauaauucucucga

SEQ ID NO: 2885676 - RNA, 19 nt, Artificial Sequence
  Description of Artificial Sequence: Synthetic oligonucleotide
uucuccagcaucucugguu

SEQ ID NO: 2885677 - RNA, 19 nt, Artificial Sequence
  Description of Artificial Sequence: Synthetic oligonucleotide
guuuuaccauccacguggg

SEQ ID NO: 2885678 - RNA, 19 nt, Artificial Sequence
  Description of Artificial Sequence: Synthetic oligonucleotide
cauccauaauucucucgac

SEQ ID NO: 2885679 - RNA, 19 nt, Artificial Sequence
  Description of Artificial Sequence: Synthetic oligonucleotide
agaccaaaugcgcauccau

SEQ ID NO: 2885680 - RNA, 19 nt, Artificial Sequence
  Description of Artificial Sequence: Synthetic oligonucleotide
augcgcauccauaauucuc

SEQ ID NO: 2885681 - RNA, 19 nt, Artificial Sequence
  Description of Artificial Sequence: Synthetic oligonucleotide
uugcaggcugccucaguag

SEQ ID NO: 2885682 - RNA, 19 nt, Artificial Sequence
  Description of Artificial Sequence: Synthetic oligonucleotide
uacuuccugaggcaaguuu

SEQ ID NO: 2885683 - RNA, 19 nt, Artificial Sequence
  Description of Artificial Sequence: Synthetic oligonucleotide
uguagucauuuuccccaga

SEQ ID NO: 2885684 - RNA, 19 nt, Artificial Sequence
  Description of Artificial Sequence: Synthetic oligonucleotide
ucucugguuguuccaugcu

SEQ ID NO: 2885685 - RNA, 19 nt, Artificial Sequence
  Description of Artificial Sequence: Synthetic oligonucleotide
uuuuaccauccacgugggc

SEQ ID NO: 2885686 - RNA, 19 nt, Artificial Sequence
  Description of Artificial Sequence: Synthetic oligonucleotide
acagcggugaggaagcgca

SEQ ID NO: 2885687 - RNA, 19 nt, Artificial Sequence
  Description of Artificial Sequence: Synthetic oligonucleotide
auggcauuuaagcuuccuu

SEQ ID NO: 2885688 - RNA, 19 nt, Artificial Sequence
  Description of Artificial Sequence: Synthetic oligonucleotide
uccaugcucacagcgguga

SEQ ID NO: 2885689 - RNA, 19 nt, Artificial Sequence
  Description of Artificial Sequence: Synthetic oligonucleotide
ugaggaagcgcauggcauu

SEQ ID NO: 2885690 - RNA, 19 nt, Artificial Sequence
  Description of Artificial Sequence: Synthetic oligonucleotide
ugggcuugcucuguggcca

SEQ ID NO: 2885691 - RNA, 19 nt, Artificial Sequence
  Description of Artificial Sequence: Synthetic oligonucleotide
guauuugcaggcugccuca

SEQ ID NO: 2885692 - RNA, 19 nt, Artificial Sequence
  Description of Artificial Sequence: Synthetic oligonucleotide
aggccccguauuugcaggc

SEQ ID NO: 2885693 - RNA, 19 nt, Artificial Sequence
  Description of Artificial Sequence: Synthetic oligonucleotide
guuuacuuccugaggcaag

SEQ ID NO: 2885694 - RNA, 19 nt, Artificial Sequence
  Description of Artificial Sequence: Synthetic oligonucleotide
cuagcaacuccaugcgguc

SEQ ID NO: 2885695 - RNA, 19 nt, Artificial Sequence
  Description of Artificial Sequence: Synthetic oligonucleotide
cucugguuguuccaugcuc

SEQ ID NO: 2885696 - RNA, 19 nt, Artificial Sequence
  Description of Artificial Sequence: Synthetic oligonucleotide
cuguagucauuuuccccag

SEQ ID NO: 2885697 - RNA, 19 nt, Artificial Sequence
  Description of Artificial Sequence: Synthetic oligonucleotide
guaggcuagcaacuccaug

SEQ ID NO: 2885698 - RNA, 19 nt, Artificial Sequence
  Description of Artificial Sequence: Synthetic oligonucleotide
ucucgacaccuucuccagc

SEQ ID NO: 2885699 - RNA, 19 nt, Artificial Sequence
  Description of Artificial Sequence: Synthetic oligonucleotide
aaagaacauguguguuuua

SEQ ID NO: 2885700 - RNA, 19 nt, Artificial Sequence
  Description of Artificial Sequence: Synthetic oligonucleotide
cucgacaccuucuccagca

SEQ ID NO: 2885701 - RNA, 19 nt, Artificial Sequence
  Description of Artificial Sequence: Synthetic oligonucleotide
gugcuguagucauuuuccc

SEQ ID NO: 2885702 - RNA, 19 nt, Artificial Sequence
  Description of Artificial Sequence: Synthetic oligonucleotide
guguuuuaccauccacgug

SEQ ID NO: 2885703 - RNA, 19 nt, Artificial Sequence
  Description of Artificial Sequence: Synthetic oligonucleotide
ggcaaguuuaaagucuggc

SEQ ID NO: 2885704 - RNA, 19 nt, Artificial Sequence
  Description of Artificial Sequence: Synthetic oligonucleotide
cauaauucucucgacaccu

SEQ ID NO: 2885705 - RNA, 19 nt, Artificial Sequence
  Description of Artificial Sequence: Synthetic oligonucleotide
cagguaggcuagcaacucc

SEQ ID NO: 2885706 - RNA, 19 nt, Artificial Sequence
  Description of Artificial Sequence: Synthetic oligonucleotide
augcucacagcggugagga

SEQ ID NO: 2885707 - RNA, 19 nt, Artificial Sequence
  Description of Artificial Sequence: Synthetic oligonucleotide
gucuggcaccuuuugguug

SEQ ID NO: 2885708 - RNA, 19 nt, Artificial Sequence
  Description of Artificial Sequence: Synthetic oligonucleotide
uccuucaccugugcuguag

SEQ ID NO: 2885709 - RNA, 19 nt, Artificial Sequence
  Description of Artificial Sequence: Synthetic oligonucleotide
gaagcgcauggcauuuaag

SEQ ID NO: 2885710 - RNA, 19 nt, Artificial Sequence
  Description of Artificial Sequence: Synthetic oligonucleotide
aguuuacuuccugaggcaa

SEQ ID NO: 2885711 - RNA, 19 nt, Artificial Sequence
  Description of Artificial Sequence: Synthetic oligonucleotide
guuguuccaugcucacagc

SEQ ID NO: 2885712 - RNA, 19 nt, Artificial Sequence
  Description of Artificial Sequence: Synthetic oligonucleotide
caugcucacagcggugagg

SEQ ID NO: 2885713 - RNA, 19 nt, Artificial Sequence
  Description of Artificial Sequence: Synthetic oligonucleotide
uuccaugcucacagcggug

SEQ ID NO: 2885714 - RNA, 19 nt, Artificial Sequence
  Description of Artificial Sequence: Synthetic oligonucleotide
cucccagcagguaggcuag

SEQ ID NO: 2885715 - RNA, 19 nt, Artificial Sequence
  Description of Artificial Sequence: Synthetic oligonucleotide
ucuucaucucgagaccaaa

SEQ ID NO: 2885716 - RNA, 19 nt, Artificial Sequence
  Description of Artificial Sequence: Synthetic oligonucleotide
cugccuucucugcagcagc

SEQ ID NO: 2885717 - RNA, 19 nt, Artificial Sequence
  Description of Artificial Sequence: Synthetic oligonucleotide
cucuguggccauuccugcc

SEQ ID NO: 2885718 - RNA, 19 nt, Artificial Sequence
  Description of Artificial Sequence: Synthetic oligonucleotide
aucacaccgaagaaauccu

SEQ ID NO: 2885719 - RNA, 19 nt, Artificial Sequence
  Description of Artificial Sequence: Synthetic oligonucleotide
agcaucucugguuguucca

SEQ ID NO: 2885720 - RNA, 19 nt, Artificial Sequence
  Description of Artificial Sequence: Synthetic oligonucleotide
ccaaaggccccguauuugc

SEQ ID NO: 2885721 - RNA, 19 nt, Artificial Sequence
  Description of Artificial Sequence: Synthetic oligonucleotide
ggcccauccacuucucucc

SEQ ID NO: 2885722 - RNA, 19 nt, Artificial Sequence
  Description of Artificial Sequence: Synthetic oligonucleotide
acuuccugaggcaaguuua

SEQ ID NO: 2885723 - RNA, 19 nt, Artificial Sequence
  Description of Artificial Sequence: Synthetic oligonucleotide
cuugcucuguggccauucc

SEQ ID NO: 2885724 - RNA, 19 nt, Artificial Sequence
  Description of Artificial Sequence: Synthetic oligonucleotide
gaaaugaaguuuacuuccu

SEQ ID NO: 2885725 - RNA, 19 nt, Artificial Sequence
  Description of Artificial Sequence: Synthetic oligonucleotide
gacucugugauaucuucau

SEQ ID NO: 2885726 - RNA, 19 nt, Artificial Sequence
  Description of Artificial Sequence: Synthetic oligonucleotide
ucacaccgaagaaauccuu

SEQ ID NO: 2885727 - RNA, 19 nt, Artificial Sequence
  Description of Artificial Sequence: Synthetic oligonucleotide
auguguguuuuaccaucca

SEQ ID NO: 2885728 - RNA, 19 nt, Artificial Sequence
  Description of Artificial Sequence: Synthetic oligonucleotide
agucuggcaccuuuugguu

SEQ ID NO: 2885729 - RNA, 19 nt, Artificial Sequence
  Description of Artificial Sequence: Synthetic oligonucleotide
cuuuugggcuugcucugug

SEQ ID NO: 2885730 - RNA, 19 nt, Artificial Sequence
  Description of Artificial Sequence: Synthetic oligonucleotide
agcagguaggcuagcaacu

SEQ ID NO: 2885731 - RNA, 19 nt, Artificial Sequence
  Description of Artificial Sequence: Synthetic oligonucleotide
ccauaauucucucgacacc

SEQ ID NO: 2885732 - RNA, 19 nt, Artificial Sequence
  Description of Artificial Sequence: Synthetic oligonucleotide
gagcuuguccuucaccugu

SEQ ID NO: 2885733 - RNA, 19 nt, Artificial Sequence
  Description of Artificial Sequence: Synthetic oligonucleotide
gcucacagcggugaggaag

SEQ ID NO: 2885734 - RNA, 19 nt, Artificial Sequence
  Description of Artificial Sequence: Synthetic oligonucleotide
caucucugguuguuccaug

SEQ ID NO: 2885735 - RNA, 19 nt, Artificial Sequence
  Description of Artificial Sequence: Synthetic oligonucleotide
cugguuguuccaugcucac

SEQ ID NO: 2885736 - RNA, 19 nt, Artificial Sequence
  Description of Artificial Sequence: Synthetic oligonucleotide
cuucaccugugcuguaguc

SEQ ID NO: 2885737 - RNA, 19 nt, Artificial Sequence
  Description of Artificial Sequence: Synthetic oligonucleotide
gcggugaggaagcgcaugg

SEQ ID NO: 2885738 - RNA, 19 nt, Artificial Sequence
  Description of Artificial Sequence: Synthetic oligonucleotide
gucauuuuccccagaaacu

SEQ ID NO: 2885739 - RNA, 19 nt, Artificial Sequence
  Description of Artificial Sequence: Synthetic oligonucleotide
ggugaggaagcgcauggca

SEQ ID NO: 2885740 - RNA, 19 nt, Artificial Sequence
  Description of Artificial Sequence: Synthetic oligonucleotide
augcucugggacucuguga

SEQ ID NO: 2885741 - RNA, 19 nt, Artificial Sequence
  Description of Artificial Sequence: Synthetic oligonucleotide
agguaggcuagcaacucca

SEQ ID NO: 2885742 - RNA, 19 nt, Artificial Sequence
  Description of Artificial Sequence: Synthetic oligonucleotide
ccgaagaaauccuugggca

SEQ ID NO: 2885743 - RNA, 19 nt, Artificial Sequence
  Description of Artificial Sequence: Synthetic oligonucleotide
ccacuucucucccagcagg

SEQ ID NO: 2885744 - RNA, 19 nt, Artificial Sequence
  Description of Artificial Sequence: Synthetic oligonucleotide
caacagugaaaggcagccc

SEQ ID NO: 2885745 - RNA, 19 nt, Artificial Sequence
  Description of Artificial Sequence: Synthetic oligonucleotide
gaaucacaccgaagaaauc

SEQ ID NO: 2885746 - RNA, 19 nt, Artificial Sequence
  Description of Artificial Sequence: Synthetic oligonucleotide
guuccaugcucacagcggu

SEQ ID NO: 2885747 - RNA, 19 nt, Artificial Sequence
  Description of Artificial Sequence: Synthetic oligonucleotide
cagagccaaagaacaugug

SEQ ID NO: 2885748 - RNA, 19 nt, Artificial Sequence
  Description of Artificial Sequence: Synthetic oligonucleotide
cuugggcacacugauggga

SEQ ID NO: 2885749 - RNA, 19 nt, Artificial Sequence
  Description of Artificial Sequence: Synthetic oligonucleotide
ggcuagcaacuccaugcgg

SEQ ID NO: 2885750 - RNA, 19 nt, Artificial Sequence
  Description of Artificial Sequence: Synthetic oligonucleotide
uagcaacuccaugcgguca

SEQ ID NO: 2885751 - RNA, 19 nt, Artificial Sequence
  Description of Artificial Sequence: Synthetic oligonucleotide
cauccacuucucucccagc

SEQ ID NO: 2885752 - RNA, 19 nt, Artificial Sequence
  Description of Artificial Sequence: Synthetic oligonucleotide
ugggacucugugauaucuu

SEQ ID NO: 2885753 - RNA, 19 nt, Artificial Sequence
  Description of Artificial Sequence: Synthetic oligonucleotide
gggacucugugauaucuuc

SEQ ID NO: 2885754 - RNA, 19 nt, Artificial Sequence
  Description of Artificial Sequence: Synthetic oligonucleotide
agcccaaaggccccguauu

SEQ ID NO: 2885755 - RNA, 19 nt, Artificial Sequence
  Description of Artificial Sequence: Synthetic oligonucleotide
aggcaaguuuaaagucugg

SEQ ID NO: 2885756 - RNA, 19 nt, Artificial Sequence
  Description of Artificial Sequence: Synthetic oligonucleotide
ccuucuccagcaucucugg

SEQ ID NO: 2885757 - RNA, 19 nt, Artificial Sequence
  Description of Artificial Sequence: Synthetic oligonucleotide
augcggucagagccaaaga

SEQ ID NO: 2885758 - RNA, 19 nt, Artificial Sequence
  Description of Artificial Sequence: Synthetic oligonucleotide
cuuccugaggcaaguuuaa

SEQ ID NO: 2885759 - RNA, 19 nt, Artificial Sequence
  Description of Artificial Sequence: Synthetic oligonucleotide
agaaacuuuugggcuugcu

SEQ ID NO: 2885760 - RNA, 19 nt, Artificial Sequence
  Description of Artificial Sequence: Synthetic oligonucleotide
caaaugcgcauccauaauu

SEQ ID NO: 2885761 - RNA, 19 nt, Artificial Sequence
  Description of Artificial Sequence: Synthetic oligonucleotide
ucgagaccaaaugcgcauc

SEQ ID NO: 2885762 - RNA, 19 nt, Artificial Sequence
  Description of Artificial Sequence: Synthetic oligonucleotide
gaccaaaugcgcauccaua

SEQ ID NO: 2885763 - RNA, 19 nt, Artificial Sequence
  Description of Artificial Sequence: Synthetic oligonucleotide
ucucucccagcagguaggc

SEQ ID NO: 2885764 - RNA, 19 nt, Artificial Sequence
  Description of Artificial Sequence: Synthetic oligonucleotide
accugugcuguagucauuu

SEQ ID NO: 2885765 - RNA, 19 nt, Artificial Sequence
  Description of Artificial Sequence: Synthetic oligonucleotide
cguauuugcaggcugccuc

SEQ ID NO: 2885766 - RNA, 19 nt, Artificial Sequence
  Description of Artificial Sequence: Synthetic oligonucleotide
ugggcacacugaugggaac

SEQ ID NO: 2885767 - RNA, 19 nt, Artificial Sequence
  Description of Artificial Sequence: Synthetic oligonucleotide
ucugggacucugugauauc

SEQ ID NO: 2885768 - RNA, 19 nt, Artificial Sequence
  Description of Artificial Sequence: Synthetic oligonucleotide
cgaagaaauccuugggcac

SEQ ID NO: 2885769 - RNA, 19 nt, Artificial Sequence
  Description of Artificial Sequence: Synthetic oligonucleotide
aggcugccucaguagucuc

SEQ ID NO: 2885770 - RNA, 19 nt, Artificial Sequence
  Description of Artificial Sequence: Synthetic oligonucleotide
acuuuugggcuugcucugu

SEQ ID NO: 2885771 - RNA, 19 nt, Artificial Sequence
  Description of Artificial Sequence: Synthetic oligonucleotide
caaaggccccguauuugca

SEQ ID NO: 2885772 - RNA, 19 nt, Artificial Sequence
  Description of Artificial Sequence: Synthetic oligonucleotide
gagaccaaaugcgcaucca

SEQ ID NO: 2885773 - RNA, 19 nt, Artificial Sequence
  Description of Artificial Sequence: Synthetic oligonucleotide
ucacagcggugaggaagcg

SEQ ID NO: 2885774 - RNA, 19 nt, Artificial Sequence
  Description of Artificial Sequence: Synthetic oligonucleotide
caacuccaugcggucagag

SEQ ID NO: 2885775 - RNA, 19 nt, Artificial Sequence
  Description of Artificial Sequence: Synthetic oligonucleotide
agcggugaggaagcgcaug

SEQ ID NO: 2885776 - RNA, 19 nt, Artificial Sequence
  Description of Artificial Sequence: Synthetic oligonucleotide
agcagccaggaugcucugg

SEQ ID NO: 2885777 - RNA, 19 nt, Artificial Sequence
  Description of Artificial Sequence: Synthetic oligonucleotide
gccauuccugccuucucug

SEQ ID NO: 2885778 - RNA, 19 nt, Artificial Sequence
  Description of Artificial Sequence: Synthetic oligonucleotide
uuccugaggcaaguuuaaa

SEQ ID NO: 2885779 - RNA, 19 nt, Artificial Sequence
  Description of Artificial Sequence: Synthetic oligonucleotide
cacagcggugaggaagcgc

SEQ ID NO: 2885780 - RNA, 19 nt, Artificial Sequence
  Description of Artificial Sequence: Synthetic oligonucleotide
caaagaacauguguguuuu

SEQ ID NO: 2885781 - RNA, 19 nt, Artificial Sequence
  Description of Artificial Sequence: Synthetic oligonucleotide
ucgacaccuucuccagcau

SEQ ID NO: 2885782 - RNA, 19 nt, Artificial Sequence
  Description of Artificial Sequence: Synthetic oligonucleotide
uggcaccuuuugguugggg

SEQ ID NO: 2885783 - RNA, 19 nt, Artificial Sequence
  Description of Artificial Sequence: Synthetic oligonucleotide
cuccaugcggucagagcca

SEQ ID NO: 2885784 - RNA, 19 nt, Artificial Sequence
  Description of Artificial Sequence: Synthetic oligonucleotide
uccagcaucucugguuguu

SEQ ID NO: 2885785 - RNA, 19 nt, Artificial Sequence
  Description of Artificial Sequence: Synthetic oligonucleotide
uggccauuccugccuucuc

SEQ ID NO: 2885786 - RNA, 19 nt, Artificial Sequence
  Description of Artificial Sequence: Synthetic oligonucleotide
gggcacacugaugggaacc

SEQ ID NO: 2885787 - RNA, 19 nt, Artificial Sequence
  Description of Artificial Sequence: Synthetic oligonucleotide
gcggucagagccaaagaac

SEQ ID NO: 2885788 - RNA, 19 nt, Artificial Sequence
  Description of Artificial Sequence: Synthetic oligonucleotide
cgcauggcauuuaagcuuc

SEQ ID NO: 2885789 - RNA, 19 nt, Artificial Sequence
  Description of Artificial Sequence: Synthetic oligonucleotide
uccaugcggucagagccaa

SEQ ID NO: 2885790 - RNA, 19 nt, Artificial Sequence
  Description of Artificial Sequence: Synthetic oligonucleotide
acagugaaaggcagcccaa

SEQ ID NO: 2885791 - RNA, 19 nt, Artificial Sequence
  Description of Artificial Sequence: Synthetic oligonucleotide
cgcauccauaauucucucg

SEQ ID NO: 2885792 - RNA, 19 nt, Artificial Sequence
  Description of Artificial Sequence: Synthetic oligonucleotide
gggcacagggcccauccac

SEQ ID NO: 2885793 - RNA, 19 nt, Artificial Sequence
  Description of Artificial Sequence: Synthetic oligonucleotide
cucgagaccaaaugcgcau

SEQ ID NO: 2885794 - RNA, 19 nt, Artificial Sequence
  Description of Artificial Sequence: Synthetic oligonucleotide
gccucaguagucuccuuga

SEQ ID NO: 2885795 - RNA, 19 nt, Artificial Sequence
  Description of Artificial Sequence: Synthetic oligonucleotide
agggcccauccacuucucu

SEQ ID NO: 2885796 - RNA, 19 nt, Artificial Sequence
  Description of Artificial Sequence: Synthetic oligonucleotide
agcuuguccuucaccugug

SEQ ID NO: 2885797 - RNA, 19 nt, Artificial Sequence
  Description of Artificial Sequence: Synthetic oligonucleotide
uguggccauuccugccuuc

SEQ ID NO: 2885798 - RNA, 19 nt, Artificial Sequence
  Description of Artificial Sequence: Synthetic oligonucleotide
cacagggcccauccacuuc

SEQ ID NO: 2885799 - RNA, 19 nt, Artificial Sequence
  Description of Artificial Sequence: Synthetic oligonucleotide
cggucagagccaaagaaca

SEQ ID NO: 2885800 - RNA, 19 nt, Artificial Sequence
  Description of Artificial Sequence: Synthetic oligonucleotide
auaauucucucgacaccuu

SEQ ID NO: 2885801 - RNA, 19 nt, Artificial Sequence
  Description of Artificial Sequence: Synthetic oligonucleotide
cuucaucucgagaccaaau

SEQ ID NO: 2885802 - RNA, 19 nt, Artificial Sequence
  Description of Artificial Sequence: Synthetic oligonucleotide
ccccguauuugcaggcugc

SEQ ID NO: 2885803 - RNA, 19 nt, Artificial Sequence
  Description of Artificial Sequence: Synthetic oligonucleotide
ccauuccugccuucucugc

SEQ ID NO: 2885804 - RNA, 19 nt, Artificial Sequence
  Description of Artificial Sequence: Synthetic oligonucleotide
ggaagcgcauggcauuuaa

SEQ ID NO: 2885805 - RNA, 19 nt, Artificial Sequence
  Description of Artificial Sequence: Synthetic oligonucleotide
uuacuuccugaggcaaguu

SEQ ID NO: 2885806 - RNA, 19 nt, Artificial Sequence
  Description of Artificial Sequence: Synthetic oligonucleotide
gggcccauccacuucucuc

SEQ ID NO: 2885807 - RNA, 19 nt, Artificial Sequence
  Description of Artificial Sequence: Synthetic oligonucleotide
ggcauuuaagcuuccuuuu

SEQ ID NO: 2885808 - RNA, 19 nt, Artificial Sequence
  Description of Artificial Sequence: Synthetic oligonucleotide
cuuguccuucaccugugcu

SEQ ID NO: 2885809 - RNA, 19 nt, Artificial Sequence
  Description of Artificial Sequence: Synthetic oligonucleotide
cagaaacuuuugggcuugc

SEQ ID NO: 2885810 - RNA, 19 nt, Artificial Sequence
  Description of Artificial Sequence: Synthetic oligonucleotide
cacgugggcaacagugaaa

SEQ ID NO: 2885811 - RNA, 19 nt, Artificial Sequence
  Description of Artificial Sequence: Synthetic oligonucleotide
ggacucugugauaucuuca

SEQ ID NO: 2885812 - RNA, 19 nt, Artificial Sequence
  Description of Artificial Sequence: Synthetic oligonucleotide
ccagaaacuuuugggcuug

SEQ ID NO: 2885813 - RNA, 19 nt, Artificial Sequence
  Description of Artificial Sequence: Synthetic oligonucleotide
auccuugggcacacugaug

SEQ ID NO: 2885814 - RNA, 19 nt, Artificial Sequence
  Description of Artificial Sequence: Synthetic oligonucleotide
gcuagcaacuccaugcggu

SEQ ID NO: 2885815 - RNA, 19 nt, Artificial Sequence
  Description of Artificial Sequence: Synthetic oligonucleotide
cgagaccaaaugcgcaucc

SEQ ID NO: 2885816 - RNA, 19 nt, Artificial Sequence
  Description of Artificial Sequence: Synthetic oligonucleotide
ccuugggcacacugauggg

SEQ ID NO: 2885817 - RNA, 19 nt, Artificial Sequence
  Description of Artificial Sequence: Synthetic oligonucleotide
ccucaguagucuccuugag

SEQ ID NO: 2885818 - RNA, 19 nt, Artificial Sequence
  Description of Artificial Sequence: Synthetic oligonucleotide
cugggacucugugauaucu

SEQ ID NO: 2885819 - RNA, 19 nt, Artificial Sequence
  Description of Artificial Sequence: Synthetic oligonucleotide
agaaauccuugggcacacu

SEQ ID NO: 2885820 - RNA, 19 nt, Artificial Sequence
  Description of Artificial Sequence: Synthetic oligonucleotide
gugaggaagcgcauggcau

SEQ ID NO: 2885821 - RNA, 19 nt, Artificial Sequence
  Description of Artificial Sequence: Synthetic oligonucleotide
cucugggacucugugauau

SEQ ID NO: 2885822 - RNA, 19 nt, Artificial Sequence
  Description of Artificial Sequence: Synthetic oligonucleotide
acuucucucccagcaggua

SEQ ID NO: 2885823 - RNA, 19 nt, Artificial Sequence
  Description of Artificial Sequence: Synthetic oligonucleotide
cauuuuccccagaaacuuu

SEQ ID NO: 2885824 - RNA, 19 nt, Artificial Sequence
  Description of Artificial Sequence: Synthetic oligonucleotide
accauccacgugggcaaca

SEQ ID NO: 2885825 - RNA, 19 nt, Artificial Sequence
  Description of Artificial Sequence: Synthetic oligonucleotide
gccccguauuugcaggcug

SEQ ID NO: 2885826 - RNA, 19 nt, Artificial Sequence
  Description of Artificial Sequence: Synthetic oligonucleotide
uaccauccacgugggcaac

SEQ ID NO: 2885827 - RNA, 19 nt, Artificial Sequence
  Description of Artificial Sequence: Synthetic oligonucleotide
ucucugcagcagccaggau

SEQ ID NO: 2885828 - RNA, 19 nt, Artificial Sequence
  Description of Artificial Sequence: Synthetic oligonucleotide
ugcucacagcggugaggaa

SEQ ID NO: 2885829 - RNA, 19 nt, Artificial Sequence
  Description of Artificial Sequence: Synthetic oligonucleotide
gcagguaggcuagcaacuc

SEQ ID NO: 2885830 - RNA, 19 nt, Artificial Sequence
  Description of Artificial Sequence: Synthetic oligonucleotide
gcagcagccaggaugcucu

SEQ ID NO: 2885831 - RNA, 19 nt, Artificial Sequence
  Description of Artificial Sequence: Synthetic oligonucleotide
cacuucucucccagcaggu

SEQ ID NO: 2885832 - RNA, 19 nt, Artificial Sequence
  Description of Artificial Sequence: Synthetic oligonucleotide
gcccauccacuucucuccc

SEQ ID NO: 2885833 - RNA, 19 nt, Artificial Sequence
  Description of Artificial Sequence: Synthetic oligonucleotide
cccaaaggccccguauuug

SEQ ID NO: 2885834 - RNA, 19 nt, Artificial Sequence
  Description of Artificial Sequence: Synthetic oligonucleotide
cagugaaaggcagcccaaa

SEQ ID NO: 2885835 - RNA, 19 nt, Artificial Sequence
  Description of Artificial Sequence: Synthetic oligonucleotide
ggccauuccugccuucucu

SEQ ID NO: 2885836 - RNA, 19 nt, Artificial Sequence
  Description of Artificial Sequence: Synthetic oligonucleotide
ccaaagaacauguguguuu

SEQ ID NO: 2885837 - RNA, 19 nt, Artificial Sequence
  Description of Artificial Sequence: Synthetic oligonucleotide
gcgcauggcauuuaagcuu

SEQ ID NO: 2885838 - RNA, 19 nt, Artificial Sequence
  Description of Artificial Sequence: Synthetic oligonucleotide
cagccaggaugcucuggga

SEQ ID NO: 2885839 - RNA, 19 nt, Artificial Sequence
  Description of Artificial Sequence: Synthetic oligonucleotide
gaggaagcgcauggcauuu

SEQ ID NO: 2885840 - RNA, 19 nt, Artificial Sequence
  Description of Artificial Sequence: Synthetic oligonucleotide
caggcugccucaguagucu

SEQ ID NO: 2885841 - RNA, 19 nt, Artificial Sequence
  Description of Artificial Sequence: Synthetic oligonucleotide
cccguauuugcaggcugcc

SEQ ID NO: 2885842 - RNA, 19 nt, Artificial Sequence
  Description of Artificial Sequence: Synthetic oligonucleotide
ccaugcucacagcggugag

SEQ ID NO: 2885843 - RNA, 19 nt, Artificial Sequence
  Description of Artificial Sequence: Synthetic oligonucleotide
uagucuccuugagcuuguc

SEQ ID NO: 2885844 - RNA, 19 nt, Artificial Sequence
  Description of Artificial Sequence: Synthetic oligonucleotide
ccccagaaacuuuugggcu

SEQ ID NO: 2885845 - RNA, 19 nt, Artificial Sequence
  Description of Artificial Sequence: Synthetic oligonucleotide
cauggcauuuaagcuuccu

SEQ ID NO: 2885846 - RNA, 19 nt, Artificial Sequence
  Description of Artificial Sequence: Synthetic oligonucleotide
ucccagcagguaggcuagc

SEQ ID NO: 2885847 - RNA, 19 nt, Artificial Sequence
  Description of Artificial Sequence: Synthetic oligonucleotide
gcuugcucuguggccauuc

SEQ ID NO: 2885848 - RNA, 19 nt, Artificial Sequence
  Description of Artificial Sequence: Synthetic oligonucleotide
cagggcccauccacuucuc

SEQ ID NO: 2885849 - RNA, 19 nt, Artificial Sequence
  Description of Artificial Sequence: Synthetic oligonucleotide
cgugggcaacagugaaagg

SEQ ID NO: 2885850 - RNA, 19 nt, Artificial Sequence
  Description of Artificial Sequence: Synthetic oligonucleotide
gcgcauccauaauucucuc

SEQ ID NO: 2885851 - RNA, 19 nt, Artificial Sequence
  Description of Artificial Sequence: Synthetic oligonucleotide
guagucuccuugagcuugu

SEQ ID NO: 2885852 - RNA, 19 nt, Artificial Sequence
  Description of Artificial Sequence: Synthetic oligonucleotide
cuucuccagcaucucuggu

SEQ ID NO: 2885853 - RNA, 19 nt, Artificial Sequence
  Description of Artificial Sequence: Synthetic oligonucleotide
gcacacugaugggaaccug

SEQ ID NO: 2885854 - RNA, 19 nt, Artificial Sequence
  Description of Artificial Sequence: Synthetic oligonucleotide
aggaagcgcauggcauuua

SEQ ID NO: 2885855 - RNA, 19 nt, Artificial Sequence
  Description of Artificial Sequence: Synthetic oligonucleotide
gcaggcugccucaguaguc

SEQ ID NO: 2885856 - RNA, 19 nt, Artificial Sequence
  Description of Artificial Sequence: Synthetic oligonucleotide
ccagcagguaggcuagcaa

SEQ ID NO: 2885857 - RNA, 19 nt, Artificial Sequence
  Description of Artificial Sequence: Synthetic oligonucleotide
ccacgugggcaacagugaa

SEQ ID NO: 2885858 - RNA, 19 nt, Artificial Sequence
  Description of Artificial Sequence: Synthetic oligonucleotide
ggcacacugaugggaaccu

SEQ ID NO: 2885859 - RNA, 19 nt, Artificial Sequence
  Description of Artificial Sequence: Synthetic oligonucleotide
cgacaccuucuccagcauc

SEQ ID NO: 2885860 - RNA, 19 nt, Artificial Sequence
  Description of Artificial Sequence: Synthetic oligonucleotide
gccaaagaacauguguguu

SEQ ID NO: 2885861 - RNA, 19 nt, Artificial Sequence
  Description of Artificial Sequence: Synthetic oligonucleotide
gcauggcauuuaagcuucc

SEQ ID NO: 2885862 - RNA, 19 nt, Artificial Sequence
  Description of Artificial Sequence: Synthetic oligonucleotide
cagcccaaaggccccguau

SEQ ID NO: 2885863 - RNA, 19 nt, Artificial Sequence
  Description of Artificial Sequence: Synthetic oligonucleotide
ggucagagccaaagaacau

SEQ ID NO: 2885864 - RNA, 19 nt, Artificial Sequence
  Description of Artificial Sequence: Synthetic oligonucleotide
guuuaaagucuggcaccuu

SEQ ID NO: 2885865 - RNA, 19 nt, Artificial Sequence
  Description of Artificial Sequence: Synthetic oligonucleotide
caguagucuccuugagcuu

SEQ ID NO: 2885866 - RNA, 19 nt, Artificial Sequence
  Description of Artificial Sequence: Synthetic oligonucleotide
ggcacagggcccauccacu

SEQ ID NO: 2885867 - RNA, 19 nt, Artificial Sequence
  Description of Artificial Sequence: Synthetic oligonucleotide
cauccacgugggcaacagu

SEQ ID NO: 2885868 - RNA, 19 nt, Artificial Sequence
  Description of Artificial Sequence: Synthetic oligonucleotide
ggggcacagggcccaucca

SEQ ID NO: 2885869 - RNA, 19 nt, Artificial Sequence
  Description of Artificial Sequence: Synthetic oligonucleotide
gcaucucugguuguuccau

SEQ ID NO: 2885870 - RNA, 19 nt, Artificial Sequence
  Description of Artificial Sequence: Synthetic oligonucleotide
ccaaaugcgcauccauaau

SEQ ID NO: 2885871 - RNA, 19 nt, Artificial Sequence
  Description of Artificial Sequence: Synthetic oligonucleotide
cuccagcaucucugguugu

SEQ ID NO: 2885872 - RNA, 19 nt, Artificial Sequence
  Description of Artificial Sequence: Synthetic oligonucleotide
guccuucaccugugcugua

SEQ ID NO: 2885873 - RNA, 19 nt, Artificial Sequence
  Description of Artificial Sequence: Synthetic oligonucleotide
gcaacuccaugcggucaga

SEQ ID NO: 2885874 - RNA, 19 nt, Artificial Sequence
  Description of Artificial Sequence: Synthetic oligonucleotide
gguaggcuagcaacuccau

SEQ ID NO: 2885875 - RNA, 19 nt, Artificial Sequence
  Description of Artificial Sequence: Synthetic oligonucleotide
cggugaggaagcgcauggc

SEQ ID NO: 2885876 - RNA, 19 nt, Artificial Sequence
  Description of Artificial Sequence: Synthetic oligonucleotide
gcccaaaggccccguauuu

SEQ ID NO: 2885877 - RNA, 19 nt, Artificial Sequence
  Description of Artificial Sequence: Synthetic oligonucleotide
cccauccacuucucuccca

SEQ ID NO: 2885878 - RNA, 19 nt, Artificial Sequence
  Description of Artificial Sequence: Synthetic oligonucleotide
gcucugggacucugugaua

SEQ ID NO: 2885879 - RNA, 19 nt, Artificial Sequence
  Description of Artificial Sequence: Synthetic oligonucleotide
ccuucaccugugcuguagu

SEQ ID NO: 2885880 - RNA, 19 nt, Artificial Sequence
  Description of Artificial Sequence: Synthetic oligonucleotide
cccagcagguaggcuagca

SEQ ID NO: 2885881 - RNA, 19 nt, Artificial Sequence
  Description of Artificial Sequence: Synthetic oligonucleotide
cuguggccauuccugccuu

SEQ ID NO: 2885882 - RNA, 19 nt, Artificial Sequence
  Description of Artificial Sequence: Synthetic oligonucleotide
gcacagggcccauccacuu

SEQ ID NO: 2885883 - RNA, 19 nt, Artificial Sequence
  Description of Artificial Sequence: Synthetic oligonucleotide
gcagcccaaaggccccgua

SEQ ID NO: 2885884 - RNA, 19 nt, Artificial Sequence
  Description of Artificial Sequence: Synthetic oligonucleotide
cagcggugaggaagcgcau

SEQ ID NO: 2885885 - RNA, 19 nt, Artificial Sequence
  Description of Artificial Sequence: Synthetic oligonucleotide
caccugugcuguagucauu

SEQ ID NO: 2885886 - RNA, 19 nt, Artificial Sequence
  Description of Artificial Sequence: Synthetic oligonucleotide
ggccccguauuugcaggcu

SEQ ID NO: 2885887 - RNA, 19 nt, Artificial Sequence
  Description of Artificial Sequence: Synthetic oligonucleotide
ccguauuugcaggcugccu

SEQ ID NO: 2885888 - RNA, 19 nt, Artificial Sequence
  Description of Artificial Sequence: Synthetic oligonucleotide
gggcuugcucuguggccau

SEQ ID NO: 2885889 - RNA, 19 nt, Artificial Sequence
  Description of Artificial Sequence: Synthetic oligonucleotide
cugccucaguagucuccuu

SEQ ID NO: 2885890 - RNA, 19 nt, Artificial Sequence
  Description of Artificial Sequence: Synthetic oligonucleotide
ccaugcggucagagccaaa

SEQ ID NO: 2885891 - RNA, 19 nt, Artificial Sequence
  Description of Artificial Sequence: Synthetic oligonucleotide
agaauuggugaccugaacc

SEQ ID NO: 2885892 - RNA, 19 nt, Artificial Sequence
  Description of Artificial Sequence: Synthetic oligonucleotide
aauggggccuccuaggccc

SEQ ID NO: 2885893 - RNA, 19 nt, Artificial Sequence
  Description of Artificial Sequence: Synthetic oligonucleotide
uacaauaucuuucaaggca

SEQ ID NO: 2885894 - RNA, 19 nt, Artificial Sequence
  Description of Artificial Sequence: Synthetic oligonucleotide
aagggcaugaaucagaauu

SEQ ID NO: 2885895 - RNA, 19 nt, Artificial Sequence
  Description of Artificial Sequence: Synthetic oligonucleotide
cucuguaugaggaacaggc

SEQ ID NO: 2885896 - RNA, 19 nt, Artificial Sequence
  Description of Artificial Sequence: Synthetic oligonucleotide
gcuacaauaucuuucaagg

SEQ ID NO: 2885897 - RNA, 19 nt, Artificial Sequence
  Description of Artificial Sequence: Synthetic oligonucleotide
uauuuaggcuacaauaucu

SEQ ID NO: 2885898 - RNA, 19 nt, Artificial Sequence
  Description of Artificial Sequence: Synthetic oligonucleotide
aauucucuguaugaggaac

SEQ ID NO: 2885899 - RNA, 19 nt, Artificial Sequence
  Description of Artificial Sequence: Synthetic oligonucleotide
aauaucuuucaaggcagcc

SEQ ID NO: 2885900 - RNA, 19 nt, Artificial Sequence
  Description of Artificial Sequence: Synthetic oligonucleotide
ucuauuuaggcuacaauau

SEQ ID NO: 2885901 - RNA, 19 nt, Artificial Sequence
  Description of Artificial Sequence: Synthetic oligonucleotide
aggaacaggccucagcucc

SEQ ID NO: 2885902 - RNA, 19 nt, Artificial Sequence
  Description of Artificial Sequence: Synthetic oligonucleotide
uaucuuucaaggcagcccc

SEQ ID NO: 2885903 - RNA, 19 nt, Artificial Sequence
  Description of Artificial Sequence: Synthetic oligonucleotide
acuuucuuggccuuccaac

SEQ ID NO: 2885904 - RNA, 19 nt, Artificial Sequence
  Description of Artificial Sequence: Synthetic oligonucleotide
augaaucagaauuccugcc

SEQ ID NO: 2885905 - RNA, 19 nt, Artificial Sequence
  Description of Artificial Sequence: Synthetic oligonucleotide
ugaaccaauucucuguaug

SEQ ID NO: 2885906 - RNA, 19 nt, Artificial Sequence
  Description of Artificial Sequence: Synthetic oligonucleotide
ucaccaauguguauccagg

SEQ ID NO: 2885907 - RNA, 19 nt, Artificial Sequence
  Description of Artificial Sequence: Synthetic oligonucleotide
caugaaucagaauuccugc

SEQ ID NO: 2885908 - RNA, 19 nt, Artificial Sequence
  Description of Artificial Sequence: Synthetic oligonucleotide
gcaaauucagcauugguag

SEQ ID NO: 2885909 - RNA, 19 nt, Artificial Sequence
  Description of Artificial Sequence: Synthetic oligonucleotide
cauugguagugguagaugc

SEQ ID NO: 2885910 - RNA, 19 nt, Artificial Sequence
  Description of Artificial Sequence: Synthetic oligonucleotide
aagaauuggugaccugaac

SEQ ID NO: 2885911 - RNA, 19 nt, Artificial Sequence
  Description of Artificial Sequence: Synthetic oligonucleotide
agaagcauuuggccgaugg

SEQ ID NO: 2885912 - RNA, 19 nt, Artificial Sequence
  Description of Artificial Sequence: Synthetic oligonucleotide
ugaaucagaauuccugcca

SEQ ID NO: 2885913 - RNA, 19 nt, Artificial Sequence
  Description of Artificial Sequence: Synthetic oligonucleotide
agugguagaugcuggggcc

SEQ ID NO: 2885914 - RNA, 19 nt, Artificial Sequence
  Description of Artificial Sequence: Synthetic oligonucleotide
ucagcauugguagugguag

SEQ ID NO: 2885915 - RNA, 19 nt, Artificial Sequence
  Description of Artificial Sequence: Synthetic oligonucleotide
uuaggcuacaauaucuuuc

SEQ ID NO: 2885916 - RNA, 19 nt, Artificial Sequence
  Description of Artificial Sequence: Synthetic oligonucleotide
agggcagaagcauuuggcc

SEQ ID NO: 2885917 - RNA, 19 nt, Artificial Sequence
  Description of Artificial Sequence: Synthetic oligonucleotide
auaucuuucaaggcagccc

SEQ ID NO: 2885918 - RNA, 19 nt, Artificial Sequence
  Description of Artificial Sequence: Synthetic oligonucleotide
aaauucagcauugguagug

SEQ ID NO: 2885919 - RNA, 19 nt, Artificial Sequence
  Description of Artificial Sequence: Synthetic oligonucleotide
aagggcagaagcauuuggc

SEQ ID NO: 2885920 - RNA, 19 nt, Artificial Sequence
  Description of Artificial Sequence: Synthetic oligonucleotide
aaucagaauuccugccagg

SEQ ID NO: 2885921 - RNA, 19 nt, Artificial Sequence
  Description of Artificial Sequence: Synthetic oligonucleotide
gaaucagaauuccugccag

SEQ ID NO: 2885922 - RNA, 19 nt, Artificial Sequence
  Description of Artificial Sequence: Synthetic oligonucleotide
cucucuucuuccaagacug

SEQ ID NO: 2885923 - RNA, 19 nt, Artificial Sequence
  Description of Artificial Sequence: Synthetic oligonucleotide
ugcuucaagggcaugaauc

SEQ ID NO: 2885924 - RNA, 19 nt, Artificial Sequence
  Description of Artificial Sequence: Synthetic oligonucleotide
uaggcuacaauaucuuuca

SEQ ID NO: 2885925 - RNA, 19 nt, Artificial Sequence
  Description of Artificial Sequence: Synthetic oligonucleotide
accaauucucuguaugagg

SEQ ID NO: 2885926 - RNA, 19 nt, Artificial Sequence
  Description of Artificial Sequence: Synthetic oligonucleotide
aauucagcauugguagugg

SEQ ID NO: 2885927 - RNA, 19 nt, Artificial Sequence
  Description of Artificial Sequence: Synthetic oligonucleotide
gacgugguuugcuucaagg

SEQ ID NO: 2885928 - RNA, 19 nt, Artificial Sequence
  Description of Artificial Sequence: Synthetic oligonucleotide
gaauuggugaccugaacca

SEQ ID NO: 2885929 - RNA, 19 nt, Artificial Sequence
  Description of Artificial Sequence: Synthetic oligonucleotide
acugcuuguaccacaaugg

SEQ ID NO: 2885930 - RNA, 19 nt, Artificial Sequence
  Description of Artificial Sequence: Synthetic oligonucleotide
ugaccugaaccaauggggc

SEQ ID NO: 2885931 - RNA, 19 nt, Artificial Sequence
  Description of Artificial Sequence: Synthetic oligonucleotide
gacugcuuguaccacaaug

SEQ ID NO: 2885932 - RNA, 19 nt, Artificial Sequence
  Description of Artificial Sequence: Synthetic oligonucleotide
ugccaggucaccaaugugu

SEQ ID NO: 2885933 - RNA, 19 nt, Artificial Sequence
  Description of Artificial Sequence: Synthetic oligonucleotide
acagguaugaaggcugggc

SEQ ID NO: 2885934 - RNA, 19 nt, Artificial Sequence
  Description of Artificial Sequence: Synthetic oligonucleotide
acaauaucuuucaaggcag

SEQ ID NO: 2885935 - RNA, 19 nt, Artificial Sequence
  Description of Artificial Sequence: Synthetic oligonucleotide
ccuuccaacagcauggugg

SEQ ID NO: 2885936 - RNA, 19 nt, Artificial Sequence
  Description of Artificial Sequence: Synthetic oligonucleotide
ucugggaaggaauacuggu

SEQ ID NO: 2885937 - RNA, 19 nt, Artificial Sequence
  Description of Artificial Sequence: Synthetic oligonucleotide
cuacaauaucuuucaaggc

SEQ ID NO: 2885938 - RNA, 19 nt, Artificial Sequence
  Description of Artificial Sequence: Synthetic oligonucleotide
uagugguagaugcuggggc

SEQ ID NO: 2885939 - RNA, 19 nt, Artificial Sequence
  Description of Artificial Sequence: Synthetic oligonucleotide
uucaagggcaugaaucaga

SEQ ID NO: 2885940 - RNA, 19 nt, Artificial Sequence
  Description of Artificial Sequence: Synthetic oligonucleotide
accaauguguauccagggg

SEQ ID NO: 2885941 - RNA, 19 nt, Artificial Sequence
  Description of Artificial Sequence: Synthetic oligonucleotide
uguaugaggaacaggccuc

SEQ ID NO: 2885942 - RNA, 19 nt, Artificial Sequence
  Description of Artificial Sequence: Synthetic oligonucleotide
uuucuuggccuuccaacag

SEQ ID NO: 2885943 - RNA, 19 nt, Artificial Sequence
  Description of Artificial Sequence: Synthetic oligonucleotide
uguaccacaauggcugggg

SEQ ID NO: 2885944 - RNA, 19 nt, Artificial Sequence
  Description of Artificial Sequence: Synthetic oligonucleotide
aaccaauggggccuccuag

SEQ ID NO: 2885945 - RNA, 19 nt, Artificial Sequence
  Description of Artificial Sequence: Synthetic oligonucleotide
uccaagacugcuuguacca

SEQ ID NO: 2885946 - RNA, 19 nt, Artificial Sequence
  Description of Artificial Sequence: Synthetic oligonucleotide
gugaccugaaccaaugggg

SEQ ID NO: 2885947 - RNA, 19 nt, Artificial Sequence
  Description of Artificial Sequence: Synthetic oligonucleotide
gaagggcagaagcauuugg

SEQ ID NO: 2885948 - RNA, 19 nt, Artificial Sequence
  Description of Artificial Sequence: Synthetic oligonucleotide
ucuguaugaggaacaggcc

SEQ ID NO: 2885949 - RNA, 19 nt, Artificial Sequence
  Description of Artificial Sequence: Synthetic oligonucleotide
aagcauuuggccgauggca

SEQ ID NO: 2885950 - RNA, 19 nt, Artificial Sequence
  Description of Artificial Sequence: Synthetic oligonucleotide
aaccaauucucuguaugag

SEQ ID NO: 2885951 - RNA, 19 nt, Artificial Sequence
  Description of Artificial Sequence: Synthetic oligonucleotide
acgugguuugcuucaaggg

SEQ ID NO: 2885952 - RNA, 19 nt, Artificial Sequence
  Description of Artificial Sequence: Synthetic oligonucleotide
cucuauuuaggcuacaaua

SEQ ID NO: 2885953 - RNA, 19 nt, Artificial Sequence
  Description of Artificial Sequence: Synthetic oligonucleotide
uuccaagacugcuuguacc

SEQ ID NO: 2885954 - RNA, 19 nt, Artificial Sequence
  Description of Artificial Sequence: Synthetic oligonucleotide
agguaugaaggcugggcgg

SEQ ID NO: 2885955 - RNA, 19 nt, Artificial Sequence
  Description of Artificial Sequence: Synthetic oligonucleotide
gaaccaauucucuguauga

SEQ ID NO: 2885956 - RNA, 19 nt, Artificial Sequence
  Description of Artificial Sequence: Synthetic oligonucleotide
cagguaugaaggcugggcg

SEQ ID NO: 2885957 - RNA, 19 nt, Artificial Sequence
  Description of Artificial Sequence: Synthetic oligonucleotide
uauccaggggaagaauugg

SEQ ID NO: 2885958 - RNA, 19 nt, Artificial Sequence
  Description of Artificial Sequence: Synthetic oligonucleotide
ucaagggcaugaaucagaa

SEQ ID NO: 2885959 - RNA, 19 nt, Artificial Sequence
  Description of Artificial Sequence: Synthetic oligonucleotide
ucagcuccugccuuggggc

SEQ ID NO: 2885960 - RNA, 19 nt, Artificial Sequence
  Description of Artificial Sequence: Synthetic oligonucleotide
uccauucaggacuccuugg

SEQ ID NO: 2885961 - RNA, 19 nt, Artificial Sequence
  Description of Artificial Sequence: Synthetic oligonucleotide
cuauuuaggcuacaauauc

SEQ ID NO: 2885962 - RNA, 19 nt, Artificial Sequence
  Description of Artificial Sequence: Synthetic oligonucleotide
uguauccaggggaagaauu

SEQ ID NO: 2885963 - RNA, 19 nt, Artificial Sequence
  Description of Artificial Sequence: Synthetic oligonucleotide
uccaggggaagaauuggug

SEQ ID NO: 2885964 - RNA, 19 nt, Artificial Sequence
  Description of Artificial Sequence: Synthetic oligonucleotide
gucaccaauguguauccag

SEQ ID NO: 2885965 - RNA, 19 nt, Artificial Sequence
  Description of Artificial Sequence: Synthetic oligonucleotide
ugcuuguaccacaauggcu

SEQ ID NO: 2885966 - RNA, 19 nt, Artificial Sequence
  Description of Artificial Sequence: Synthetic oligonucleotide
uuggugaccugaaccaaug

SEQ ID NO: 2885967 - RNA, 19 nt, Artificial Sequence
  Description of Artificial Sequence: Synthetic oligonucleotide
uucaggacuccuuggacgu

SEQ ID NO: 2885968 - RNA, 19 nt, Artificial Sequence
  Description of Artificial Sequence: Synthetic oligonucleotide
gaauacugguagccagugg

SEQ ID NO: 2885969 - RNA, 19 nt, Artificial Sequence
  Description of Artificial Sequence: Synthetic oligonucleotide
accugaaccaauucucugu

SEQ ID NO: 2885970 - RNA, 19 nt, Artificial Sequence
  Description of Artificial Sequence: Synthetic oligonucleotide
ggugaccugaaccaauggg

SEQ ID NO: 2885971 - RNA, 19 nt, Artificial Sequence
  Description of Artificial Sequence: Synthetic oligonucleotide
ggcuacaauaucuuucaag

SEQ ID NO: 2885972 - RNA, 19 nt, Artificial Sequence
  Description of Artificial Sequence: Synthetic oligonucleotide
uugguagugguagaugcug

SEQ ID NO: 2885973 - RNA, 19 nt, Artificial Sequence
  Description of Artificial Sequence: Synthetic oligonucleotide
ucucuauuuaggcuacaau

SEQ ID NO: 2885974 - RNA, 19 nt, Artificial Sequence
  Description of Artificial Sequence: Synthetic oligonucleotide
accaauggggccuccuagg

SEQ ID NO: 2885975 - RNA, 19 nt, Artificial Sequence
  Description of Artificial Sequence: Synthetic oligonucleotide
cagaauuccugccagguca

SEQ ID NO: 2885976 - RNA, 19 nt, Artificial Sequence
  Description of Artificial Sequence: Synthetic oligonucleotide
cuucuuccaagacugcuug

SEQ ID NO: 2885977 - RNA, 19 nt, Artificial Sequence
  Description of Artificial Sequence: Synthetic oligonucleotide
gaagcauuuggccgauggc

SEQ ID NO: 2885978 - RNA, 19 nt, Artificial Sequence
  Description of Artificial Sequence: Synthetic oligonucleotide
gcuuguaccacaauggcug

SEQ ID NO: 2885979 - RNA, 19 nt, Artificial Sequence
  Description of Artificial Sequence: Synthetic oligonucleotide
aauguguauccaggggaag

SEQ ID NO: 2885980 - RNA, 19 nt, Artificial Sequence
  Description of Artificial Sequence: Synthetic oligonucleotide
aggggaagaauuggugacc

SEQ ID NO: 2885981 - RNA, 19 nt, Artificial Sequence
  Description of Artificial Sequence: Synthetic oligonucleotide
cucugggaaggaauacugg

SEQ ID NO: 2885982 - RNA, 19 nt, Artificial Sequence
  Description of Artificial Sequence: Synthetic oligonucleotide
uccaacagcaugguggcac

SEQ ID NO: 2885983 - RNA, 19 nt, Artificial Sequence
  Description of Artificial Sequence: Synthetic oligonucleotide
uggugaccugaaccaaugg

SEQ ID NO: 2885984 - RNA, 19 nt, Artificial Sequence
  Description of Artificial Sequence: Synthetic oligonucleotide
aacucugggaaggaauacu

SEQ ID NO: 2885985 - RNA, 19 nt, Artificial Sequence
  Description of Artificial Sequence: Synthetic oligonucleotide
acuccuuggacgugguuug

SEQ ID NO: 2885986 - RNA, 19 nt, Artificial Sequence
  Description of Artificial Sequence: Synthetic oligonucleotide
agggcaugaaucagaauuc

SEQ ID NO: 2885987 - RNA, 19 nt, Artificial Sequence
  Description of Artificial Sequence: Synthetic oligonucleotide
uuuaggcuacaauaucuuu

SEQ ID NO: 2885988 - RNA, 19 nt, Artificial Sequence
  Description of Artificial Sequence: Synthetic oligonucleotide
cuuguaccacaauggcugg

SEQ ID NO: 2885989 - RNA, 19 nt, Artificial Sequence
  Description of Artificial Sequence: Synthetic oligonucleotide
aaggccugggcaaauucag

SEQ ID NO: 2885990 - RNA, 19 nt, Artificial Sequence
  Description of Artificial Sequence: Synthetic oligonucleotide
agcauuuggccgauggcac

SEQ ID NO: 2885991 - RNA, 19 nt, Artificial Sequence
  Description of Artificial Sequence: Synthetic oligonucleotide
caauaucuuucaaggcagc

SEQ ID NO: 2885992 - RNA, 19 nt, Artificial Sequence
  Description of Artificial Sequence: Synthetic oligonucleotide
cuuucuuggccuuccaaca

SEQ ID NO: 2885993 - RNA, 19 nt, Artificial Sequence
  Description of Artificial Sequence: Synthetic oligonucleotide
cugcuuguaccacaauggc

SEQ ID NO: 2885994 - RNA, 19 nt, Artificial Sequence
  Description of Artificial Sequence: Synthetic oligonucleotide
uucucuguaugaggaacag

SEQ ID NO: 2885995 - RNA, 19 nt, Artificial Sequence
  Description of Artificial Sequence: Synthetic oligonucleotide
uuggacgugguuugcuuca

SEQ ID NO: 2885996 - RNA, 19 nt, Artificial Sequence
  Description of Artificial Sequence: Synthetic oligonucleotide
caggggaagaauuggugac

SEQ ID NO: 2885997 - RNA, 19 nt, Artificial Sequence
  Description of Artificial Sequence: Synthetic oligonucleotide
ucucuguaugaggaacagg

SEQ ID NO: 2885998 - RNA, 19 nt, Artificial Sequence
  Description of Artificial Sequence: Synthetic oligonucleotide
ucagaauuccugccagguc

SEQ ID NO: 2885999 - RNA, 19 nt, Artificial Sequence
  Description of Artificial Sequence: Synthetic oligonucleotide
gaccugaaccaauggggcc

SEQ ID NO: 2886000 - RNA, 19 nt, Artificial Sequence
  Description of Artificial Sequence: Synthetic oligonucleotide
uagccaguggccagcgucc

SEQ ID NO: 2886001 - RNA, 19 nt, Artificial Sequence
  Description of Artificial Sequence: Synthetic oligonucleotide
cucagcuccugccuugggg

SEQ ID NO: 2886002 - RNA, 19 nt, Artificial Sequence
  Description of Artificial Sequence: Synthetic oligonucleotide
uuggccgauggcaccaccc

SEQ ID NO: 2886003 - RNA, 19 nt, Artificial Sequence
  Description of Artificial Sequence: Synthetic oligonucleotide
guagugguagaugcugggg

SEQ ID NO: 2886004 - RNA, 19 nt, Artificial Sequence
  Description of Artificial Sequence: Synthetic oligonucleotide
uucagcauugguaguggua

SEQ ID NO: 2886005 - RNA, 19 nt, Artificial Sequence
  Description of Artificial Sequence: Synthetic oligonucleotide
ggaaggaauacugguagcc

SEQ ID NO: 2886006 - RNA, 19 nt, Artificial Sequence
  Description of Artificial Sequence: Synthetic oligonucleotide
cuuccaagacugcuuguac

SEQ ID NO: 2886007 - RNA, 19 nt, Artificial Sequence
  Description of Artificial Sequence: Synthetic oligonucleotide
cugggcaaauucagcauug

SEQ ID NO: 2886008 - RNA, 19 nt, Artificial Sequence
  Description of Artificial Sequence: Synthetic oligonucleotide
cgugggaccacuuucuugg

SEQ ID NO: 2886009 - RNA, 19 nt, Artificial Sequence
  Description of Artificial Sequence: Synthetic oligonucleotide
cauucaggacuccuuggac

SEQ ID NO: 2886010 - RNA, 19 nt, Artificial Sequence
  Description of Artificial Sequence: Synthetic oligonucleotide
gcaugaaucagaauuccug

SEQ ID NO: 2886011 - RNA, 19 nt, Artificial Sequence
  Description of Artificial Sequence: Synthetic oligonucleotide
acugguagccaguggccag

SEQ ID NO: 2886012 - RNA, 19 nt, Artificial Sequence
  Description of Artificial Sequence: Synthetic oligonucleotide
gaaggaauacugguagcca

SEQ ID NO: 2886013 - RNA, 19 nt, Artificial Sequence
  Description of Artificial Sequence: Synthetic oligonucleotide
guauccaggggaagaauug

SEQ ID NO: 2886014 - RNA, 19 nt, Artificial Sequence
  Description of Artificial Sequence: Synthetic oligonucleotide
uguguauccaggggaagaa

SEQ ID NO: 2886015 - RNA, 19 nt, Artificial Sequence
  Description of Artificial Sequence: Synthetic oligonucleotide
ugggcaaauucagcauugg

SEQ ID NO: 2886016 - RNA, 19 nt, Artificial Sequence
  Description of Artificial Sequence: Synthetic oligonucleotide
cuccauucaggacuccuug

SEQ ID NO: 2886017 - RNA, 19 nt, Artificial Sequence
  Description of Artificial Sequence: Synthetic oligonucleotide
aauuggugaccugaaccaa

SEQ ID NO: 2886018 - RNA, 19 nt, Artificial Sequence
  Description of Artificial Sequence: Synthetic oligonucleotide
agaauuccugccaggucac

SEQ ID NO: 2886019 - RNA, 19 nt, Artificial Sequence
  Description of Artificial Sequence: Synthetic oligonucleotide
ugggaccacuuucuuggcc

SEQ ID NO: 2886020 - RNA, 19 nt, Artificial Sequence
  Description of Artificial Sequence: Synthetic oligonucleotide
guagccaguggccagcguc

SEQ ID NO: 2886021 - RNA, 19 nt, Artificial Sequence
  Description of Artificial Sequence: Synthetic oligonucleotide
agcaugguggcacgcucuc

SEQ ID NO: 2886022 - RNA, 19 nt, Artificial Sequence
  Description of Artificial Sequence: Synthetic oligonucleotide
acucugggaaggaauacug

SEQ ID NO: 2886023 - RNA, 19 nt, Artificial Sequence
  Description of Artificial Sequence: Synthetic oligonucleotide
agaugcuggggccacucca

SEQ ID NO: 2886024 - RNA, 19 nt, Artificial Sequence
  Description of Artificial Sequence: Synthetic oligonucleotide
ucuuccaagacugcuugua

SEQ ID NO: 2886025 - RNA, 19 nt, Artificial Sequence
  Description of Artificial Sequence: Synthetic oligonucleotide
cuuggacgugguuugcuuc

SEQ ID NO: 2886026 - RNA, 19 nt, Artificial Sequence
  Description of Artificial Sequence: Synthetic oligonucleotide
ugccuuggggcccuucucu

SEQ ID NO: 2886027 - RNA, 19 nt, Artificial Sequence
  Description of Artificial Sequence: Synthetic oligonucleotide
uucucuauuuaggcuacaa

SEQ ID NO: 2886028 - RNA, 19 nt, Artificial Sequence
  Description of Artificial Sequence: Synthetic oligonucleotide
uuugcuucaagggcaugaa

SEQ ID NO: 2886029 - RNA, 19 nt, Artificial Sequence
  Description of Artificial Sequence: Synthetic oligonucleotide
cacgcucucuucuuccaag

SEQ ID NO: 2886030 - RNA, 19 nt, Artificial Sequence
  Description of Artificial Sequence: Synthetic oligonucleotide
ucucuucuuccaagacugc

SEQ ID NO: 2886031 - RNA, 19 nt, Artificial Sequence
  Description of Artificial Sequence: Synthetic oligonucleotide
gcuucaagggcaugaauca

SEQ ID NO: 2886032 - RNA, 19 nt, Artificial Sequence
  Description of Artificial Sequence: Synthetic oligonucleotide
gugguuugcuucaagggca

SEQ ID NO: 2886033 - RNA, 19 nt, Artificial Sequence
  Description of Artificial Sequence: Synthetic oligonucleotide
gccuccuaggcccaggcgg

SEQ ID NO: 2886034 - RNA, 19 nt, Artificial Sequence
  Description of Artificial Sequence: Synthetic oligonucleotide
uggggccacuccauucagg

SEQ ID NO: 2886035 - RNA, 19 nt, Artificial Sequence
  Description of Artificial Sequence: Synthetic oligonucleotide
aagacugcuuguaccacaa

SEQ ID NO: 2886036 - RNA, 19 nt, Artificial Sequence
  Description of Artificial Sequence: Synthetic oligonucleotide
aacagcaugguggcacgcu

SEQ ID NO: 2886037 - RNA, 19 nt, Artificial Sequence
  Description of Artificial Sequence: Synthetic oligonucleotide
guuugcuucaagggcauga

SEQ ID NO: 2886038 - RNA, 19 nt, Artificial Sequence
  Description of Artificial Sequence: Synthetic oligonucleotide
uuguaccacaauggcuggg

SEQ ID NO: 2886039 - RNA, 19 nt, Artificial Sequence
  Description of Artificial Sequence: Synthetic oligonucleotide
ccaauucucuguaugagga

SEQ ID NO: 2886040 - RNA, 19 nt, Artificial Sequence
  Description of Artificial Sequence: Synthetic oligonucleotide
uggccgauggcaccacccc

SEQ ID NO: 2886041 - RNA, 19 nt, Artificial Sequence
  Description of Artificial Sequence: Synthetic oligonucleotide
cuucaagggcaugaaucag

SEQ ID NO: 2886042 - RNA, 19 nt, Artificial Sequence
  Description of Artificial Sequence: Synthetic oligonucleotide
auguguauccaggggaaga

SEQ ID NO: 2886043 - RNA, 19 nt, Artificial Sequence
  Description of Artificial Sequence: Synthetic oligonucleotide
caauggggccuccuaggcc

SEQ ID NO: 2886044 - RNA, 19 nt, Artificial Sequence
  Description of Artificial Sequence: Synthetic oligonucleotide
agcacccaaggccugggca

SEQ ID NO: 2886045 - RNA, 19 nt, Artificial Sequence
  Description of Artificial Sequence: Synthetic oligonucleotide
auucucuguaugaggaaca

SEQ ID NO: 2886046 - RNA, 19 nt, Artificial Sequence
  Description of Artificial Sequence: Synthetic oligonucleotide
accugaaccaauggggccu

SEQ ID NO: 2886047 - RNA, 19 nt, Artificial Sequence
  Description of Artificial Sequence: Synthetic oligonucleotide
ggcccuucucuauuuaggc

SEQ ID NO: 2886048 - RNA, 19 nt, Artificial Sequence
  Description of Artificial Sequence: Synthetic oligonucleotide
auucagcauugguaguggu

SEQ ID NO: 2886049 - RNA, 19 nt, Artificial Sequence
  Description of Artificial Sequence: Synthetic oligonucleotide
augguggcacgcucucuuc

SEQ ID NO: 2886050 - RNA, 19 nt, Artificial Sequence
  Description of Artificial Sequence: Synthetic oligonucleotide
caauguguauccaggggaa

SEQ ID NO: 2886051 - RNA, 19 nt, Artificial Sequence
  Description of Artificial Sequence: Synthetic oligonucleotide
uggcacgcucucuucuucc

SEQ ID NO: 2886052 - RNA, 19 nt, Artificial Sequence
  Description of Artificial Sequence: Synthetic oligonucleotide
uccugccaggucaccaaug

SEQ ID NO: 2886053 - RNA, 19 nt, Artificial Sequence
  Description of Artificial Sequence: Synthetic oligonucleotide
cuguaugaggaacaggccu

SEQ ID NO: 2886054 - RNA, 19 nt, Artificial Sequence
  Description of Artificial Sequence: Synthetic oligonucleotide
uuuggccgauggcaccacc

SEQ ID NO: 2886055 - RNA, 19 nt, Artificial Sequence
  Description of Artificial Sequence: Synthetic oligonucleotide
gaagaauuggugaccugaa

SEQ ID NO: 2886056 - RNA, 19 nt, Artificial Sequence
  Description of Artificial Sequence: Synthetic oligonucleotide
uagaugcuggggccacucc

SEQ ID NO: 2886057 - RNA, 19 nt, Artificial Sequence
  Description of Artificial Sequence: Synthetic oligonucleotide
uaugaaggcugggcggccc

SEQ ID NO: 2886058 - RNA, 19 nt, Artificial Sequence
  Description of Artificial Sequence: Synthetic oligonucleotide
caggacuccuuggacgugg

SEQ ID NO: 2886059 - RNA, 19 nt, Artificial Sequence
  Description of Artificial Sequence: Synthetic oligonucleotide
gacagguaugaaggcuggg

SEQ ID NO: 2886060 - RNA, 19 nt, Artificial Sequence
  Description of Artificial Sequence: Synthetic oligonucleotide
caagacugcuuguaccaca

SEQ ID NO: 2886061 - RNA, 19 nt, Artificial Sequence
  Description of Artificial Sequence: Synthetic oligonucleotide
ugguggcacgcucucuucu

SEQ ID NO: 2886062 - RNA, 19 nt, Artificial Sequence
  Description of Artificial Sequence: Synthetic oligonucleotide
ggcagaagcauuuggccga

SEQ ID NO: 2886063 - RNA, 19 nt, Artificial Sequence
  Description of Artificial Sequence: Synthetic oligonucleotide
gguaugaaggcugggcggc

SEQ ID NO: 2886064 - RNA, 19 nt, Artificial Sequence
  Description of Artificial Sequence: Synthetic oligonucleotide
ugguuugcuucaagggcau

SEQ ID NO: 2886065 - RNA, 19 nt, Artificial Sequence
  Description of Artificial Sequence: Synthetic oligonucleotide
caaggccugggcaaauuca

SEQ ID NO: 2886066 - RNA, 19 nt, Artificial Sequence
  Description of Artificial Sequence: Synthetic oligonucleotide
cgugguuugcuucaagggc

SEQ ID NO: 2886067 - RNA, 19 nt, Artificial Sequence
  Description of Artificial Sequence: Synthetic oligonucleotide
auugguagugguagaugcu

SEQ ID NO: 2886068 - RNA, 19 nt, Artificial Sequence
  Description of Artificial Sequence: Synthetic oligonucleotide
uugcuucaagggcaugaau

SEQ ID NO: 2886069 - RNA, 19 nt, Artificial Sequence
  Description of Artificial Sequence: Synthetic oligonucleotide
ccaauguguauccagggga

SEQ ID NO: 2886070 - RNA, 19 nt, Artificial Sequence
  Description of Artificial Sequence: Synthetic oligonucleotide
uucuuccaagacugcuugu

SEQ ID NO: 2886071 - RNA, 19 nt, Artificial Sequence
  Description of Artificial Sequence: Synthetic oligonucleotide
gggacagguaugaaggcug

SEQ ID NO: 2886072 - RNA, 19 nt, Artificial Sequence
  Description of Artificial Sequence: Synthetic oligonucleotide
agcauugguagugguagau

SEQ ID NO: 2886073 - RNA, 19 nt, Artificial Sequence
  Description of Artificial Sequence: Synthetic oligonucleotide
uaugaggaacaggccucag

SEQ ID NO: 2886074 - RNA, 19 nt, Artificial Sequence
  Description of Artificial Sequence: Synthetic oligonucleotide
agggcagcacccaaggccu

SEQ ID NO: 2886075 - RNA, 19 nt, Artificial Sequence
  Description of Artificial Sequence: Synthetic oligonucleotide
aggccugggcaaauucagc

SEQ ID NO: 2886076 - RNA, 19 nt, Artificial Sequence
  Description of Artificial Sequence: Synthetic oligonucleotide
agcuccugccuuggggccc

SEQ ID NO: 2886077 - RNA, 19 nt, Artificial Sequence
  Description of Artificial Sequence: Synthetic oligonucleotide
ggaauacugguagccagug

SEQ ID NO: 2886078 - RNA, 19 nt, Artificial Sequence
  Description of Artificial Sequence: Synthetic oligonucleotide
acgcucucuucuuccaaga

SEQ ID NO: 2886079 - RNA, 19 nt, Artificial Sequence
  Description of Artificial Sequence: Synthetic oligonucleotide
auuggugaccugaaccaau

SEQ ID NO: 2886080 - RNA, 19 nt, Artificial Sequence
  Description of Artificial Sequence: Synthetic oligonucleotide
ugaaccaauggggccuccu

SEQ ID NO: 2886081 - RNA, 19 nt, Artificial Sequence
  Description of Artificial Sequence: Synthetic oligonucleotide
cugggaaggaauacuggua

SEQ ID NO: 2886082 - RNA, 19 nt, Artificial Sequence
  Description of Artificial Sequence: Synthetic oligonucleotide
caacucugggaaggaauac

SEQ ID NO: 2886083 - RNA, 19 nt, Artificial Sequence
  Description of Artificial Sequence: Synthetic oligonucleotide
ugguagccaguggccagcg

SEQ ID NO: 2886084 - RNA, 19 nt, Artificial Sequence
  Description of Artificial Sequence: Synthetic oligonucleotide
ugcuggggccacuccauuc

SEQ ID NO: 2886085 - RNA, 19 nt, Artificial Sequence
  Description of Artificial Sequence: Synthetic oligonucleotide
aggcugggcggcccagggc

SEQ ID NO: 2886086 - RNA, 19 nt, Artificial Sequence
  Description of Artificial Sequence: Synthetic oligonucleotide
auuuggccgauggcaccac

SEQ ID NO: 2886087 - RNA, 19 nt, Artificial Sequence
  Description of Artificial Sequence: Synthetic oligonucleotide
caauucucuguaugaggaa

SEQ ID NO: 2886088 - RNA, 19 nt, Artificial Sequence
  Description of Artificial Sequence: Synthetic oligonucleotide
gaaccaauggggccuccua

SEQ ID NO: 2886089 - RNA, 19 nt, Artificial Sequence
  Description of Artificial Sequence: Synthetic oligonucleotide
cacggcccagcacaacccc

SEQ ID NO: 2886090 - RNA, 19 nt, Artificial Sequence
  Description of Artificial Sequence: Synthetic oligonucleotide
uuccugccaggucaccaau

SEQ ID NO: 2886091 - RNA, 19 nt, Artificial Sequence
  Description of Artificial Sequence: Synthetic oligonucleotide
cugguagccaguggccagc

SEQ ID NO: 2886092 - RNA, 19 nt, Artificial Sequence
  Description of Artificial Sequence: Synthetic oligonucleotide
gggcccuucucuauuuagg

SEQ ID NO: 2886093 - RNA, 19 nt, Artificial Sequence
  Description of Artificial Sequence: Synthetic oligonucleotide
gggcaugaaucagaauucc

SEQ ID NO: 2886094 - RNA, 19 nt, Artificial Sequence
  Description of Artificial Sequence: Synthetic oligonucleotide
ggggccacuccauucagga

SEQ ID NO: 2886095 - RNA, 19 nt, Artificial Sequence
  Description of Artificial Sequence: Synthetic oligonucleotide
ccaacagcaugguggcacg

SEQ ID NO: 2886096 - RNA, 19 nt, Artificial Sequence
  Description of Artificial Sequence: Synthetic oligonucleotide
uccuuggacgugguuugcu

SEQ ID NO: 2886097 - RNA, 19 nt, Artificial Sequence
  Description of Artificial Sequence: Synthetic oligonucleotide
guaugaggaacaggccuca

SEQ ID NO: 2886098 - RNA, 19 nt, Artificial Sequence
  Description of Artificial Sequence: Synthetic oligonucleotide
ggccacuccauucaggacu

SEQ ID NO: 2886099 - RNA, 19 nt, Artificial Sequence
  Description of Artificial Sequence: Synthetic oligonucleotide
ccuucucuauuuaggcuac

SEQ ID NO: 2886100 - RNA, 19 nt, Artificial Sequence
  Description of Artificial Sequence: Synthetic oligonucleotide
auccaggggaagaauuggu

SEQ ID NO: 2886101 - RNA, 19 nt, Artificial Sequence
  Description of Artificial Sequence: Synthetic oligonucleotide
gaauuccugccaggucacc

SEQ ID NO: 2886102 - RNA, 19 nt, Artificial Sequence
  Description of Artificial Sequence: Synthetic oligonucleotide
cuaggcccaggcggaaggg

SEQ ID NO: 2886103 - RNA, 19 nt, Artificial Sequence
  Description of Artificial Sequence: Synthetic oligonucleotide
ggggcccuucucuauuuag

SEQ ID NO: 2886104 - RNA, 19 nt, Artificial Sequence
  Description of Artificial Sequence: Synthetic oligonucleotide
cauuuggccgauggcacca

SEQ ID NO: 2886105 - RNA, 19 nt, Artificial Sequence
  Description of Artificial Sequence: Synthetic oligonucleotide
gcauuuggccgauggcacc

SEQ ID NO: 2886106 - RNA, 19 nt, Artificial Sequence
  Description of Artificial Sequence: Synthetic oligonucleotide
ccaggggaagaauugguga

SEQ ID NO: 2886107 - RNA, 19 nt, Artificial Sequence
  Description of Artificial Sequence: Synthetic oligonucleotide
uggccagcguccgccgugg

SEQ ID NO: 2886108 - RNA, 19 nt, Artificial Sequence
  Description of Artificial Sequence: Synthetic oligonucleotide
cugccaggucaccaaugug

SEQ ID NO: 2886109 - RNA, 19 nt, Artificial Sequence
  Description of Artificial Sequence: Synthetic oligonucleotide
cagcuccugccuuggggcc

SEQ ID NO: 2886110 - RNA, 19 nt, Artificial Sequence
  Description of Artificial Sequence: Synthetic oligonucleotide
ccaauggggccuccuaggc

SEQ ID NO: 2886111 - RNA, 19 nt, Artificial Sequence
  Description of Artificial Sequence: Synthetic oligonucleotide
gacuccuuggacgugguuu

SEQ ID NO: 2886112 - RNA, 19 nt, Artificial Sequence
  Description of Artificial Sequence: Synthetic oligonucleotide
guagaugcuggggccacuc

SEQ ID NO: 2886113 - RNA, 19 nt, Artificial Sequence
  Description of Artificial Sequence: Synthetic oligonucleotide
uccuaggcccaggcggaag

SEQ ID NO: 2886114 - RNA, 19 nt, Artificial Sequence
  Description of Artificial Sequence: Synthetic oligonucleotide
ugguagaugcuggggccac

SEQ ID NO: 2886115 - RNA, 19 nt, Artificial Sequence
  Description of Artificial Sequence: Synthetic oligonucleotide
caaauucagcauugguagu

SEQ ID NO: 2886116 - RNA, 19 nt, Artificial Sequence
  Description of Artificial Sequence: Synthetic oligonucleotide
uuggggcccuucucuauuu

SEQ ID NO: 2886117 - RNA, 19 nt, Artificial Sequence
  Description of Artificial Sequence: Synthetic oligonucleotide
guaugaaggcugggcggcc

SEQ ID NO: 2886118 - RNA, 19 nt, Artificial Sequence
  Description of Artificial Sequence: Synthetic oligonucleotide
aggcuacaauaucuuucaa

SEQ ID NO: 2886119 - RNA, 19 nt, Artificial Sequence
  Description of Artificial Sequence: Synthetic oligonucleotide
uccgccgugggaccacuuu

SEQ ID NO: 2886120 - RNA, 19 nt, Artificial Sequence
  Description of Artificial Sequence: Synthetic oligonucleotide
gcauugguagugguagaug

SEQ ID NO: 2886121 - RNA, 19 nt, Artificial Sequence
  Description of Artificial Sequence: Synthetic oligonucleotide
gaacaggccucagcuccug

SEQ ID NO: 2886122 - RNA, 19 nt, Artificial Sequence
  Description of Artificial Sequence: Synthetic oligonucleotide
cccacggcccagcacaacc

SEQ ID NO: 2886123 - RNA, 19 nt, Artificial Sequence
  Description of Artificial Sequence: Synthetic oligonucleotide
gggaccacuuucuuggccu

SEQ ID NO: 2886124 - RNA, 19 nt, Artificial Sequence
  Description of Artificial Sequence: Synthetic oligonucleotide
cccuucucuauuuaggcua

SEQ ID NO: 2886125 - RNA, 19 nt, Artificial Sequence
  Description of Artificial Sequence: Synthetic oligonucleotide
guggccagcguccgccgug

SEQ ID NO: 2886126 - RNA, 19 nt, Artificial Sequence
  Description of Artificial Sequence: Synthetic oligonucleotide
guggcacgcucucuucuuc

SEQ ID NO: 2886127 - RNA, 19 nt, Artificial Sequence
  Description of Artificial Sequence: Synthetic oligonucleotide
ggcugggcggcccagggca

SEQ ID NO: 2886128 - RNA, 19 nt, Artificial Sequence
  Description of Artificial Sequence: Synthetic oligonucleotide
caguggccagcguccgccg

SEQ ID NO: 2886129 - RNA, 19 nt, Artificial Sequence
  Description of Artificial Sequence: Synthetic oligonucleotide
caacagcaugguggcacgc

SEQ ID NO: 2886130 - RNA, 19 nt, Artificial Sequence
  Description of Artificial Sequence: Synthetic oligonucleotide
gugguagaugcuggggcca

SEQ ID NO: 2886131 - RNA, 19 nt, Artificial Sequence
  Description of Artificial Sequence: Synthetic oligonucleotide
uggggcccuucucuauuua

SEQ ID NO: 2886132 - RNA, 19 nt, Artificial Sequence
  Description of Artificial Sequence: Synthetic oligonucleotide
gggaagaauuggugaccug

SEQ ID NO: 2886133 - RNA, 19 nt, Artificial Sequence
  Description of Artificial Sequence: Synthetic oligonucleotide
ggacgugguuugcuucaag

SEQ ID NO: 2886134 - RNA, 19 nt, Artificial Sequence
  Description of Artificial Sequence: Synthetic oligonucleotide
gcucucuucuuccaagacu

SEQ ID NO: 2886135 - RNA, 19 nt, Artificial Sequence
  Description of Artificial Sequence: Synthetic oligonucleotide
cacuuucuuggccuuccaa

SEQ ID NO: 2886136 - RNA, 19 nt, Artificial Sequence
  Description of Artificial Sequence: Synthetic oligonucleotide
aguggccagcguccgccgu

SEQ ID NO: 2886137 - RNA, 19 nt, Artificial Sequence
  Description of Artificial Sequence: Synthetic oligonucleotide
agacugcuuguaccacaau

SEQ ID NO: 2886138 - RNA, 19 nt, Artificial Sequence
  Description of Artificial Sequence: Synthetic oligonucleotide
ccauucaggacuccuugga

SEQ ID NO: 2886139 - RNA, 19 nt, Artificial Sequence
  Description of Artificial Sequence: Synthetic oligonucleotide
uggacgugguuugcuucaa

SEQ ID NO: 2886140 - RNA, 19 nt, Artificial Sequence
  Description of Artificial Sequence: Synthetic oligonucleotide
cagcauugguagugguaga

SEQ ID NO: 2886141 - RNA, 19 nt, Artificial Sequence
  Description of Artificial Sequence: Synthetic oligonucleotide
ccagcguccgccgugggac

SEQ ID NO: 2886142 - RNA, 19 nt, Artificial Sequence
  Description of Artificial Sequence: Synthetic oligonucleotide
cuccuuggacgugguuugc

SEQ ID NO: 2886143 - RNA, 19 nt, Artificial Sequence
  Description of Artificial Sequence: Synthetic oligonucleotide
cugccuuggggcccuucuc

SEQ ID NO: 2886144 - RNA, 19 nt, Artificial Sequence
  Description of Artificial Sequence: Synthetic oligonucleotide
ccaacucugggaaggaaua

SEQ ID NO: 2886145 - RNA, 19 nt, Artificial Sequence
  Description of Artificial Sequence: Synthetic oligonucleotide
ccaaggccugggcaaauuc

SEQ ID NO: 2886146 - RNA, 19 nt, Artificial Sequence
  Description of Artificial Sequence: Synthetic oligonucleotide
cagcacccaaggccugggc

SEQ ID NO: 2886147 - RNA, 19 nt, Artificial Sequence
  Description of Artificial Sequence: Synthetic oligonucleotide
ccacggcccagcacaaccc

SEQ ID NO: 2886148 - RNA, 19 nt, Artificial Sequence
  Description of Artificial Sequence: Synthetic oligonucleotide
ggcagcacccaaggccugg

SEQ ID NO: 2886149 - RNA, 19 nt, Artificial Sequence
  Description of Artificial Sequence: Synthetic oligonucleotide
gcacccaaggccugggcaa

SEQ ID NO: 2886150 - RNA, 19 nt, Artificial Sequence
  Description of Artificial Sequence: Synthetic oligonucleotide
cagcguccgccgugggacc

SEQ ID NO: 2886151 - RNA, 19 nt, Artificial Sequence
  Description of Artificial Sequence: Synthetic oligonucleotide
ggccuccuaggcccaggcg

SEQ ID NO: 2886152 - RNA, 19 nt, Artificial Sequence
  Description of Artificial Sequence: Synthetic oligonucleotide
ggccucagcuccugccuug

SEQ ID NO: 2886153 - RNA, 19 nt, Artificial Sequence
  Description of Artificial Sequence: Synthetic oligonucleotide
caugguggcacgcucucuu

SEQ ID NO: 2886154 - RNA, 19 nt, Artificial Sequence
  Description of Artificial Sequence: Synthetic oligonucleotide
gggcaaauucagcauuggu

SEQ ID NO: 2886155 - RNA, 19 nt, Artificial Sequence
  Description of Artificial Sequence: Synthetic oligonucleotide
ggcacgcucucuucuucca

SEQ ID NO: 2886156 - RNA, 19 nt, Artificial Sequence
  Description of Artificial Sequence: Synthetic oligonucleotide
ccugaaccaauucucugua

SEQ ID NO: 2886157 - RNA, 19 nt, Artificial Sequence
  Description of Artificial Sequence: Synthetic oligonucleotide
augcuggggccacuccauu

SEQ ID NO: 2886158 - RNA, 19 nt, Artificial Sequence
  Description of Artificial Sequence: Synthetic oligonucleotide
ggggaagaauuggugaccu

SEQ ID NO: 2886159 - RNA, 19 nt, Artificial Sequence
  Description of Artificial Sequence: Synthetic oligonucleotide
cugaaccaauggggccucc

SEQ ID NO: 2886160 - RNA, 19 nt, Artificial Sequence
  Description of Artificial Sequence: Synthetic oligonucleotide
ccaagacugcuuguaccac

SEQ ID NO: 2886161 - RNA, 19 nt, Artificial Sequence
  Description of Artificial Sequence: Synthetic oligonucleotide
gccuuccaacagcauggug

SEQ ID NO: 2886162 - RNA, 19 nt, Artificial Sequence
  Description of Artificial Sequence: Synthetic oligonucleotide
ggcggcccagggcagcacc

SEQ ID NO: 2886163 - RNA, 19 nt, Artificial Sequence
  Description of Artificial Sequence: Synthetic oligonucleotide
cuucucuauuuaggcuaca

SEQ ID NO: 2886164 - RNA, 19 nt, Artificial Sequence
  Description of Artificial Sequence: Synthetic oligonucleotide
cugaaccaauucucuguau

SEQ ID NO: 2886165 - RNA, 19 nt, Artificial Sequence
  Description of Artificial Sequence: Synthetic oligonucleotide
gccacuccauucaggacuc

SEQ ID NO: 2886166 - RNA, 19 nt, Artificial Sequence
  Description of Artificial Sequence: Synthetic oligonucleotide
ggcaugaaucagaauuccu

SEQ ID NO: 2886167 - RNA, 19 nt, Artificial Sequence
  Description of Artificial Sequence: Synthetic oligonucleotide
gggccacuccauucaggac

SEQ ID NO: 2886168 - RNA, 19 nt, Artificial Sequence
  Description of Artificial Sequence: Synthetic oligonucleotide
cagcaugguggcacgcucu

SEQ ID NO: 2886169 - RNA, 19 nt, Artificial Sequence
  Description of Artificial Sequence: Synthetic oligonucleotide
gccucagcuccugccuugg

SEQ ID NO: 2886170 - RNA, 19 nt, Artificial Sequence
  Description of Artificial Sequence: Synthetic oligonucleotide
ccagggcagcacccaaggc

SEQ ID NO: 2886171 - RNA, 19 nt, Artificial Sequence
  Description of Artificial Sequence: Synthetic oligonucleotide
acggcccagcacaaccccu

SEQ ID NO: 2886172 - RNA, 19 nt, Artificial Sequence
  Description of Artificial Sequence: Synthetic oligonucleotide
aggacuccuuggacguggu

SEQ ID NO: 2886173 - RNA, 19 nt, Artificial Sequence
  Description of Artificial Sequence: Synthetic oligonucleotide
gguuugcuucaagggcaug

SEQ ID NO: 2886174 - RNA, 19 nt, Artificial Sequence
  Description of Artificial Sequence: Synthetic oligonucleotide
caggccucagcuccugccu

SEQ ID NO: 2886175 - RNA, 19 nt, Artificial Sequence
  Description of Artificial Sequence: Synthetic oligonucleotide
gcccuucucuauuuaggcu

SEQ ID NO: 2886176 - RNA, 19 nt, Artificial Sequence
  Description of Artificial Sequence: Synthetic oligonucleotide
ggggacagguaugaaggcu

SEQ ID NO: 2886177 - RNA, 19 nt, Artificial Sequence
  Description of Artificial Sequence: Synthetic oligonucleotide
agcguccgccgugggacca

SEQ ID NO: 2886178 - RNA, 19 nt, Artificial Sequence
  Description of Artificial Sequence: Synthetic oligonucleotide
cacuccauucaggacuccu

SEQ ID NO: 2886179 - RNA, 19 nt, Artificial Sequence
  Description of Artificial Sequence: Synthetic oligonucleotide
ccuccuaggcccaggcgga

SEQ ID NO: 2886180 - RNA, 19 nt, Artificial Sequence
  Description of Artificial Sequence: Synthetic oligonucleotide
uggggccuccuaggcccag

SEQ ID NO: 2886181 - RNA, 19 nt, Artificial Sequence
  Description of Artificial Sequence: Synthetic oligonucleotide
cugggcggcccagggcagc

SEQ ID NO: 2886182 - RNA, 19 nt, Artificial Sequence
  Description of Artificial Sequence: Synthetic oligonucleotide
cuuggggcccuucucuauu

SEQ ID NO: 2886183 - RNA, 19 nt, Artificial Sequence
  Description of Artificial Sequence: Synthetic oligonucleotide
cagaagcauuuggccgaug

SEQ ID NO: 2886184 - RNA, 19 nt, Artificial Sequence
  Description of Artificial Sequence: Synthetic oligonucleotide
gccaggucaccaaugugua

SEQ ID NO: 2886185 - RNA, 19 nt, Artificial Sequence
  Description of Artificial Sequence: Synthetic oligonucleotide
guguauccaggggaagaau

SEQ ID NO: 2886186 - RNA, 19 nt, Artificial Sequence
  Description of Artificial Sequence: Synthetic oligonucleotide
ggucaccaauguguaucca

SEQ ID NO: 2886187 - RNA, 19 nt, Artificial Sequence
  Description of Artificial Sequence: Synthetic oligonucleotide
ccgccgugggaccacuuuc

SEQ ID NO: 2886188 - RNA, 19 nt, Artificial Sequence
  Description of Artificial Sequence: Synthetic oligonucleotide
cccaacucugggaaggaau

SEQ ID NO: 2886189 - RNA, 19 nt, Artificial Sequence
  Description of Artificial Sequence: Synthetic oligonucleotide
ccucagcuccugccuuggg

SEQ ID NO: 2886190 - RNA, 19 nt, Artificial Sequence
  Description of Artificial Sequence: Synthetic oligonucleotide
caagggcaugaaucagaau

SEQ ID NO: 2886191 - RNA, 19 nt, Artificial Sequence
  Description of Artificial Sequence: Synthetic oligonucleotide
gcacgcucucuucuuccaa

SEQ ID NO: 2886192 - RNA, 19 nt, Artificial Sequence
  Description of Artificial Sequence: Synthetic oligonucleotide
ggcggaagggcagaagcau

SEQ ID NO: 2886193 - RNA, 19 nt, Artificial Sequence
  Description of Artificial Sequence: Synthetic oligonucleotide
cuuggccuuccaacagcau

SEQ ID NO: 2886194 - RNA, 19 nt, Artificial Sequence
  Description of Artificial Sequence: Synthetic oligonucleotide
cacccaaggccugggcaaa

SEQ ID NO: 2886195 - RNA, 19 nt, Artificial Sequence
  Description of Artificial Sequence: Synthetic oligonucleotide
ccaggcggaagggcagaag

SEQ ID NO: 2886196 - RNA, 19 nt, Artificial Sequence
  Description of Artificial Sequence: Synthetic oligonucleotide
auggggccuccuaggccca

SEQ ID NO: 2886197 - RNA, 19 nt, Artificial Sequence
  Description of Artificial Sequence: Synthetic oligonucleotide
gccagcguccgccguggga

SEQ ID NO: 2886198 - RNA, 19 nt, Artificial Sequence
  Description of Artificial Sequence: Synthetic oligonucleotide
gguggcacgcucucuucuu

SEQ ID NO: 2886199 - RNA, 19 nt, Artificial Sequence
  Description of Artificial Sequence: Synthetic oligonucleotide
uccugccuuggggcccuuc

SEQ ID NO: 2886200 - RNA, 19 nt, Artificial Sequence
  Description of Artificial Sequence: Synthetic oligonucleotide
ccugggcaaauucagcauu

SEQ ID NO: 2886201 - RNA, 19 nt, Artificial Sequence
  Description of Artificial Sequence: Synthetic oligonucleotide
ggaacaggccucagcuccu

SEQ ID NO: 2886202 - RNA, 19 nt, Artificial Sequence
  Description of Artificial Sequence: Synthetic oligonucleotide
gccuuggggcccuucucua

SEQ ID NO: 2886203 - RNA, 19 nt, Artificial Sequence
  Description of Artificial Sequence: Synthetic oligonucleotide
gcggcccagggcagcaccc

SEQ ID NO: 2886204 - RNA, 19 nt, Artificial Sequence
  Description of Artificial Sequence: Synthetic oligonucleotide
ggccagcguccgccguggg

SEQ ID NO: 2886205 - RNA, 19 nt, Artificial Sequence
  Description of Artificial Sequence: Synthetic oligonucleotide
ccacuuucuuggccuucca

SEQ ID NO: 2886206 - RNA, 19 nt, Artificial Sequence
  Description of Artificial Sequence: Synthetic oligonucleotide
ggaccacuuucuuggccuu

SEQ ID NO: 2886207 - RNA, 19 nt, Artificial Sequence
  Description of Artificial Sequence: Synthetic oligonucleotide
ccuuggacgugguuugcuu

SEQ ID NO: 2886208 - RNA, 19 nt, Artificial Sequence
  Description of Artificial Sequence: Synthetic oligonucleotide
cuccuaggcccaggcggaa

SEQ ID NO: 2886209 - RNA, 19 nt, Artificial Sequence
  Description of Artificial Sequence: Synthetic oligonucleotide
ccugccuuggggcccuucu

SEQ ID NO: 2886210 - RNA, 19 nt, Artificial Sequence
  Description of Artificial Sequence: Synthetic oligonucleotide
gguagaugcuggggccacu

SEQ ID NO: 2886211 - RNA, 19 nt, Artificial Sequence
  Description of Artificial Sequence: Synthetic oligonucleotide
ccacuccauucaggacucc

SEQ ID NO: 2886212 - RNA, 19 nt, Artificial Sequence
  Description of Artificial Sequence: Synthetic oligonucleotide
gguagccaguggccagcgu

SEQ ID NO: 2886213 - RNA, 19 nt, Artificial Sequence
  Description of Artificial Sequence: Synthetic oligonucleotide
ggccuuccaacagcauggu

SEQ ID NO: 2886214 - RNA, 19 nt, Artificial Sequence
  Description of Artificial Sequence: Synthetic oligonucleotide
ccaggucaccaauguguau

SEQ ID NO: 2886215 - RNA, 19 nt, Artificial Sequence
  Description of Artificial Sequence: Synthetic oligonucleotide
gcccaggcggaagggcaga

SEQ ID NO: 2886216 - RNA, 19 nt, Artificial Sequence
  Description of Artificial Sequence: Synthetic oligonucleotide
gcaugguggcacgcucucu

SEQ ID NO: 2886217 - RNA, 19 nt, Artificial Sequence
  Description of Artificial Sequence: Synthetic oligonucleotide
gccgugggaccacuuucuu

SEQ ID NO: 2886218 - RNA, 19 nt, Artificial Sequence
  Description of Artificial Sequence: Synthetic oligonucleotide
cgccgugggaccacuuucu

SEQ ID NO: 2886219 - RNA, 19 nt, Artificial Sequence
  Description of Artificial Sequence: Synthetic oligonucleotide
ggacuccuuggacgugguu

SEQ ID NO: 2886220 - RNA, 19 nt, Artificial Sequence
  Description of Artificial Sequence: Synthetic oligonucleotide
gcguccgccgugggaccac

SEQ ID NO: 2886221 - RNA, 19 nt, Artificial Sequence
  Description of Artificial Sequence: Synthetic oligonucleotide
ccccaacucugggaaggaa

SEQ ID NO: 2886222 - RNA, 19 nt, Artificial Sequence
  Description of Artificial Sequence: Synthetic oligonucleotide
gcuccugccuuggggcccu

SEQ ID NO: 2886223 - RNA, 19 nt, Artificial Sequence
  Description of Artificial Sequence: Synthetic oligonucleotide
ccccacggcccagcacaac

SEQ ID NO: 2886224 - RNA, 19 nt, Artificial Sequence
  Description of Artificial Sequence: Synthetic oligonucleotide
cccaggcggaagggcagaa

SEQ ID NO: 2886225 - RNA, 19 nt, Artificial Sequence
  Description of Artificial Sequence: Synthetic oligonucleotide
guccgccgugggaccacuu

SEQ ID NO: 2886226 - RNA, 19 nt, Artificial Sequence
  Description of Artificial Sequence: Synthetic oligonucleotide
cguccgccgugggaccacu

SEQ ID NO: 2886227 - RNA, 19 nt, Artificial Sequence
  Description of Artificial Sequence: Synthetic oligonucleotide
cuccugccuuggggcccuu

SEQ ID NO: 2886228 - RNA, 19 nt, Artificial Sequence
  Description of Artificial Sequence: Synthetic oligonucleotide
aaaacuaucccuaaaagcg

SEQ ID NO: 2886229 - RNA, 19 nt, Artificial Sequence
  Description of Artificial Sequence: Synthetic oligonucleotide
gaaagaaagagagagagag

SEQ ID NO: 2886230 - RNA, 19 nt, Artificial Sequence
  Description of Artificial Sequence: Synthetic oligonucleotide
aagaagaagaagaagaaag

SEQ ID NO: 2886231 - RNA, 19 nt, Artificial Sequence
  Description of Artificial Sequence: Synthetic oligonucleotide
aagaaagagagagagagag

SEQ ID NO: 2886232 - RNA, 19 nt, Artificial Sequence
  Description of Artificial Sequence: Synthetic oligonucleotide
uaaaacuaucccuaaaagc

SEQ ID NO: 2886233 - RNA, 19 nt, Artificial Sequence
  Description of Artificial Sequence: Synthetic oligonucleotide
uggugagugucuaagaagg

SEQ ID NO: 2886234 - RNA, 19 nt, Artificial Sequence
  Description of Artificial Sequence: Synthetic oligonucleotide
aaugccuaaaacuaucccu

SEQ ID NO: 2886235 - RNA, 19 nt, Artificial Sequence
  Description of Artificial Sequence: Synthetic oligonucleotide
gaaagagagagagagagag

SEQ ID NO: 2886236 - RNA, 19 nt, Artificial Sequence
  Description of Artificial Sequence: Synthetic oligonucleotide
aagaagaagaagaagaaga

SEQ ID NO: 2886237 - RNA, 19 nt, Artificial Sequence
  Description of Artificial Sequence: Synthetic oligonucleotide
caugacaucagaauaggcc

SEQ ID NO: 2886238 - RNA, 19 nt, Artificial Sequence
  Description of Artificial Sequence: Synthetic oligonucleotide
aagagagagagagagagag

SEQ ID NO: 2886239 - RNA, 19 nt, Artificial Sequence
  Description of Artificial Sequence: Synthetic oligonucleotide
aaaacacagaauuaccagu

SEQ ID NO: 2886240 - RNA, 19 nt, Artificial Sequence
  Description of Artificial Sequence: Synthetic oligonucleotide
aacaaaacacagaauuacc

SEQ ID NO: 2886241 - RNA, 19 nt, Artificial Sequence
  Description of Artificial Sequence: Synthetic oligonucleotide
ugauuaaggaaagaauugg

SEQ ID NO: 2886242 - RNA, 19 nt, Artificial Sequence
  Description of Artificial Sequence: Synthetic oligonucleotide
ucugauuaaggaaagaauu

SEQ ID NO: 2886243 - RNA, 19 nt, Artificial Sequence
  Description of Artificial Sequence: Synthetic oligonucleotide
agaauuaccagucuugaga

SEQ ID NO: 2886244 - RNA, 19 nt, Artificial Sequence
  Description of Artificial Sequence: Synthetic oligonucleotide
gaauuaccagucuugagag

SEQ ID NO: 2886245 - RNA, 19 nt, Artificial Sequence
  Description of Artificial Sequence: Synthetic oligonucleotide
uucuguuugagucaugaca

SEQ ID NO: 2886246 - RNA, 19 nt, Artificial Sequence
  Description of Artificial Sequence: Synthetic oligonucleotide
ucuuccagagaugagauag

SEQ ID NO: 2886247 - RNA, 19 nt, Artificial Sequence
  Description of Artificial Sequence: Synthetic oligonucleotide
agaagggucaacaaaacac

SEQ ID NO: 2886248 - RNA, 19 nt, Artificial Sequence
  Description of Artificial Sequence: Synthetic oligonucleotide
uguagcuuucugauuaagg

SEQ ID NO: 2886249 - RNA, 19 nt, Artificial Sequence
  Description of Artificial Sequence: Synthetic oligonucleotide
gaugagauaggugggaugg

SEQ ID NO: 2886250 - RNA, 19 nt, Artificial Sequence
  Description of Artificial Sequence: Synthetic oligonucleotide
ucagaauaggccaggaaug

SEQ ID NO: 2886251 - RNA, 19 nt, Artificial Sequence
  Description of Artificial Sequence: Synthetic oligonucleotide
aaacuaucccuaaaagcgc

SEQ ID NO: 2886252 - RNA, 19 nt, Artificial Sequence
  Description of Artificial Sequence: Synthetic oligonucleotide
ucuguuugagucaugacau

SEQ ID NO: 2886253 - RNA, 19 nt, Artificial Sequence
  Description of Artificial Sequence: Synthetic oligonucleotide
aaacacagaauuaccaguc

SEQ ID NO: 2886254 - RNA, 19 nt, Artificial Sequence
  Description of Artificial Sequence: Synthetic oligonucleotide
uuaaggaaagaauuggaau

SEQ ID NO: 2886255 - RNA, 19 nt, Artificial Sequence
  Description of Artificial Sequence: Synthetic oligonucleotide
aagaauuggaauuguggga

SEQ ID NO: 2886256 - RNA, 19 nt, Artificial Sequence
  Description of Artificial Sequence: Synthetic oligonucleotide
ugagaguguacgcaugagg

SEQ ID NO: 2886257 - RNA, 19 nt, Artificial Sequence
  Description of Artificial Sequence: Synthetic oligonucleotide
gagagagagagagagagag

SEQ ID NO: 2886258 - RNA, 19 nt, Artificial Sequence
  Description of Artificial Sequence: Synthetic oligonucleotide
gagaagaagaagaagaaga

SEQ ID NO: 2886259 - RNA, 19 nt, Artificial Sequence
  Description of Artificial Sequence: Synthetic oligonucleotide
uaaggaaagaauuggaauu

SEQ ID NO: 2886260 - RNA, 19 nt, Artificial Sequence
  Description of Artificial Sequence: Synthetic oligonucleotide
uguuugagcaccauuccca

SEQ ID NO: 2886261 - RNA, 19 nt, Artificial Sequence
  Description of Artificial Sequence: Synthetic oligonucleotide
agauaggugggauggaggg

SEQ ID NO: 2886262 - RNA, 19 nt, Artificial Sequence
  Description of Artificial Sequence: Synthetic oligonucleotide
ccagagaugagauaggugg

SEQ ID NO: 2886263 - RNA, 19 nt, Artificial Sequence
  Description of Artificial Sequence: Synthetic oligonucleotide
augacaucagaauaggcca

SEQ ID NO: 2886264 - RNA, 19 nt, Artificial Sequence
  Description of Artificial Sequence: Synthetic oligonucleotide
cuaaaacuaucccuaaaag

SEQ ID NO: 2886265 - RNA, 19 nt, Artificial Sequence
  Description of Artificial Sequence: Synthetic oligonucleotide
ugggauuucuguuugaguc

SEQ ID NO: 2886266 - RNA, 19 nt, Artificial Sequence
  Description of Artificial Sequence: Synthetic oligonucleotide
ucuaagaagggucaacaaa

SEQ ID NO: 2886267 - RNA, 19 nt, Artificial Sequence
  Description of Artificial Sequence: Synthetic oligonucleotide
aguggcagaacgcuuuccc

SEQ ID NO: 2886268 - RNA, 19 nt, Artificial Sequence
  Description of Artificial Sequence: Synthetic oligonucleotide
cuagaaguggguacgggcg

SEQ ID NO: 2886269 - RNA, 19 nt, Artificial Sequence
  Description of Artificial Sequence: Synthetic oligonucleotide
aacuaucccuaaaagcgcc

SEQ ID NO: 2886270 - RNA, 19 nt, Artificial Sequence
  Description of Artificial Sequence: Synthetic oligonucleotide
uuugugaggggaaugcgug

SEQ ID NO: 2886271 - RNA, 19 nt, Artificial Sequence
  Description of Artificial Sequence: Synthetic oligonucleotide
cugauuaaggaaagaauug

SEQ ID NO: 2886272 - RNA, 19 nt, Artificial Sequence
  Description of Artificial Sequence: Synthetic oligonucleotide
agagagaagaagaagaaga

SEQ ID NO: 2886273 - RNA, 19 nt, Artificial Sequence
  Description of Artificial Sequence: Synthetic oligonucleotide
aucagaauaggccaggaau

SEQ ID NO: 2886274 - RNA, 19 nt, Artificial Sequence
  Description of Artificial Sequence: Synthetic oligonucleotide
ugggguguagcucaguggc

SEQ ID NO: 2886275 - RNA, 19 nt, Artificial Sequence
  Description of Artificial Sequence: Synthetic oligonucleotide
agaguguacgcaugaggcc

SEQ ID NO: 2886276 - RNA, 19 nt, Artificial Sequence
  Description of Artificial Sequence: Synthetic oligonucleotide
gaagaagaagaagaagaag

SEQ ID NO: 2886277 - RNA, 19 nt, Artificial Sequence
  Description of Artificial Sequence: Synthetic oligonucleotide
aagaagggucaacaaaaca

SEQ ID NO: 2886278 - RNA, 19 nt, Artificial Sequence
  Description of Artificial Sequence: Synthetic oligonucleotide
auuaccagucuugagagug

SEQ ID NO: 2886279 - RNA, 19 nt, Artificial Sequence
  Description of Artificial Sequence: Synthetic oligonucleotide
aaagcgcccacauugcagu

SEQ ID NO: 2886280 - RNA, 19 nt, Artificial Sequence
  Description of Artificial Sequence: Synthetic oligonucleotide
aauugugggauuucuguuu

SEQ ID NO: 2886281 - RNA, 19 nt, Artificial Sequence
  Description of Artificial Sequence: Synthetic oligonucleotide
uucugauuaaggaaagaau

SEQ ID NO: 2886282 - RNA, 19 nt, Artificial Sequence
  Description of Artificial Sequence: Synthetic oligonucleotide
guagcuuucugauuaagga

SEQ ID NO: 2886283 - RNA, 19 nt, Artificial Sequence
  Description of Artificial Sequence: Synthetic oligonucleotide
ugagugucuaagaaggguc

SEQ ID NO: 2886284 - RNA, 19 nt, Artificial Sequence
  Description of Artificial Sequence: Synthetic oligonucleotide
uuucugauuaaggaaagaa

SEQ ID NO: 2886285 - RNA, 19 nt, Artificial Sequence
  Description of Artificial Sequence: Synthetic oligonucleotide
uguguuugagcaccauucc

SEQ ID NO: 2886286 - RNA, 19 nt, Artificial Sequence
  Description of Artificial Sequence: Synthetic oligonucleotide
gagagagagagagaggaag

SEQ ID NO: 2886287 - RNA, 19 nt, Artificial Sequence
  Description of Artificial Sequence: Synthetic oligonucleotide
cuaagaagggucaacaaaa

SEQ ID NO: 2886288 - RNA, 19 nt, Artificial Sequence
  Description of Artificial Sequence: Synthetic oligonucleotide
gagagagagaagaagaaga

SEQ ID NO: 2886289 - RNA, 19 nt, Artificial Sequence
  Description of Artificial Sequence: Synthetic oligonucleotide
guagcucaguggcagaacg

SEQ ID NO: 2886290 - RNA, 19 nt, Artificial Sequence
  Description of Artificial Sequence: Synthetic oligonucleotide
gaaggaaagggcuggggug

SEQ ID NO: 2886291 - RNA, 19 nt, Artificial Sequence
  Description of Artificial Sequence: Synthetic oligonucleotide
ugagucaugacaucagaau

SEQ ID NO: 2886292 - RNA, 19 nt, Artificial Sequence
  Description of Artificial Sequence: Synthetic oligonucleotide
uguuugagucaugacauca

SEQ ID NO: 2886293 - RNA, 19 nt, Artificial Sequence
  Description of Artificial Sequence: Synthetic oligonucleotide
uguggugagugucuaagaa

SEQ ID NO: 2886294 - RNA, 19 nt, Artificial Sequence
  Description of Artificial Sequence: Synthetic oligonucleotide
gaaugccuaaaacuauccc

SEQ ID NO: 2886295 - RNA, 19 nt, Artificial Sequence
  Description of Artificial Sequence: Synthetic oligonucleotide
cuguguuugagcaccauuc

SEQ ID NO: 2886296 - RNA, 19 nt, Artificial Sequence
  Description of Artificial Sequence: Synthetic oligonucleotide
gagagagagagagagaaga

SEQ ID NO: 2886297 - RNA, 19 nt, Artificial Sequence
  Description of Artificial Sequence: Synthetic oligonucleotide
aacacagaauuaccagucu

SEQ ID NO: 2886298 - RNA, 19 nt, Artificial Sequence
  Description of Artificial Sequence: Synthetic oligonucleotide
uaagaagggucaacaaaac

SEQ ID NO: 2886299 - RNA, 19 nt, Artificial Sequence
  Description of Artificial Sequence: Synthetic oligonucleotide
ccuaaaagcgcccacauug

SEQ ID NO: 2886300 - RNA, 19 nt, Artificial Sequence
  Description of Artificial Sequence: Synthetic oligonucleotide
gagagagagagagagagga

SEQ ID NO: 2886301 - RNA, 19 nt, Artificial Sequence
  Description of Artificial Sequence: Synthetic oligonucleotide
agucaugacaucagaauag

SEQ ID NO: 2886302 - RNA, 19 nt, Artificial Sequence
  Description of Artificial Sequence: Synthetic oligonucleotide
agagaagaagaagaagaag

SEQ ID NO: 2886303 - RNA, 19 nt, Artificial Sequence
  Description of Artificial Sequence: Synthetic oligonucleotide
cacagaauuaccagucuug

SEQ ID NO: 2886304 - RNA, 19 nt, Artificial Sequence
  Description of Artificial Sequence: Synthetic oligonucleotide
gagagagagagagaagaag

SEQ ID NO: 2886305 - RNA, 19 nt, Artificial Sequence
  Description of Artificial Sequence: Synthetic oligonucleotide
ugucuaagaagggucaaca

SEQ ID NO: 2886306 - RNA, 19 nt, Artificial Sequence
  Description of Artificial Sequence: Synthetic oligonucleotide
ugacaucagaauaggccag

SEQ ID NO: 2886307 - RNA, 19 nt, Artificial Sequence
  Description of Artificial Sequence: Synthetic oligonucleotide
cuaaaagcgcccacauugc

SEQ ID NO: 2886308 - RNA, 19 nt, Artificial Sequence
  Description of Artificial Sequence: Synthetic oligonucleotide
ugaggccuguguuugagca

SEQ ID NO: 2886309 - RNA, 19 nt, Artificial Sequence
  Description of Artificial Sequence: Synthetic oligonucleotide
cagcauaugugaauccccg

SEQ ID NO: 2886310 - RNA, 19 nt, Artificial Sequence
  Description of Artificial Sequence: Synthetic oligonucleotide
acaaaacacagaauuacca

SEQ ID NO: 2886311 - RNA, 19 nt, Artificial Sequence
  Description of Artificial Sequence: Synthetic oligonucleotide
agaaggaaagggcuggggu

SEQ ID NO: 2886312 - RNA, 19 nt, Artificial Sequence
  Description of Artificial Sequence: Synthetic oligonucleotide
gaagaagaagaagaaagaa

SEQ ID NO: 2886313 - RNA, 19 nt, Artificial Sequence
  Description of Artificial Sequence: Synthetic oligonucleotide
agagagagagagaagaaga

SEQ ID NO: 2886314 - RNA, 19 nt, Artificial Sequence
  Description of Artificial Sequence: Synthetic oligonucleotide
ucaugacaucagaauaggc

SEQ ID NO: 2886315 - RNA, 19 nt, Artificial Sequence
  Description of Artificial Sequence: Synthetic oligonucleotide
agaauuggaauugugggau

SEQ ID NO: 2886316 - RNA, 19 nt, Artificial Sequence
  Description of Artificial Sequence: Synthetic oligonucleotide
gagagagaagaagaagaag

SEQ ID NO: 2886317 - RNA, 19 nt, Artificial Sequence
  Description of Artificial Sequence: Synthetic oligonucleotide
aaaagcgcccacauugcag

SEQ ID NO: 2886318 - RNA, 19 nt, Artificial Sequence
  Description of Artificial Sequence: Synthetic oligonucleotide
uugagucaugacaucagaa

SEQ ID NO: 2886319 - RNA, 19 nt, Artificial Sequence
  Description of Artificial Sequence: Synthetic oligonucleotide
agagagagagaagaagaag

SEQ ID NO: 2886320 - RNA, 19 nt, Artificial Sequence
  Description of Artificial Sequence: Synthetic oligonucleotide
uggcagaacgcuuucccag

SEQ ID NO: 2886321 - RNA, 19 nt, Artificial Sequence
  Description of Artificial Sequence: Synthetic oligonucleotide
auaggugggauggagggag

SEQ ID NO: 2886322 - RNA, 19 nt, Artificial Sequence
  Description of Artificial Sequence: Synthetic oligonucleotide
agaauaggccaggaaugcc

SEQ ID NO: 2886323 - RNA, 19 nt, Artificial Sequence
  Description of Artificial Sequence: Synthetic oligonucleotide
ugagauaggugggauggag

SEQ ID NO: 2886324 - RNA, 19 nt, Artificial Sequence
  Description of Artificial Sequence: Synthetic oligonucleotide
auuucuguuugagucauga

SEQ ID NO: 2886325 - RNA, 19 nt, Artificial Sequence
  Description of Artificial Sequence: Synthetic oligonucleotide
gagagagagagagagagaa

SEQ ID NO: 2886326 - RNA, 19 nt, Artificial Sequence
  Description of Artificial Sequence: Synthetic oligonucleotide
uagcuuucugauuaaggaa

SEQ ID NO: 2886327 - RNA, 19 nt, Artificial Sequence
  Description of Artificial Sequence: Synthetic oligonucleotide
ugugggauuucuguuugag

SEQ ID NO: 2886328 - RNA, 19 nt, Artificial Sequence
  Description of Artificial Sequence: Synthetic oligonucleotide
gaagagaaggaaagggcug

SEQ ID NO: 2886329 - RNA, 19 nt, Artificial Sequence
  Description of Artificial Sequence: Synthetic oligonucleotide
guggugagugucuaagaag

SEQ ID NO: 2886330 - RNA, 19 nt, Artificial Sequence
  Description of Artificial Sequence: Synthetic oligonucleotide
aagggucaacaaaacacag

SEQ ID NO: 2886331 - RNA, 19 nt, Artificial Sequence
  Description of Artificial Sequence: Synthetic oligonucleotide
agaagaagaagaagaaaga

SEQ ID NO: 2886332 - RNA, 19 nt, Artificial Sequence
  Description of Artificial Sequence: Synthetic oligonucleotide
gaagggucaacaaaacaca

SEQ ID NO: 2886333 - RNA, 19 nt, Artificial Sequence
  Description of Artificial Sequence: Synthetic oligonucleotide
uggaauugugggauuucug

SEQ ID NO: 2886334 - RNA, 19 nt, Artificial Sequence
  Description of Artificial Sequence: Synthetic oligonucleotide
agagagagagagaggaagg

SEQ ID NO: 2886335 - RNA, 19 nt, Artificial Sequence
  Description of Artificial Sequence: Synthetic oligonucleotide
gucaugacaucagaauagg

SEQ ID NO: 2886336 - RNA, 19 nt, Artificial Sequence
  Description of Artificial Sequence: Synthetic oligonucleotide
cagagaugagauagguggg

SEQ ID NO: 2886337 - RNA, 19 nt, Artificial Sequence
  Description of Artificial Sequence: Synthetic oligonucleotide
ggaaggaagagaaggaaag

SEQ ID NO: 2886338 - RNA, 19 nt, Artificial Sequence
  Description of Artificial Sequence: Synthetic oligonucleotide
ucuugagaguguacgcaug

SEQ ID NO: 2886339 - RNA, 19 nt, Artificial Sequence
  Description of Artificial Sequence: Synthetic oligonucleotide
uaaaagcgcccacauugca

SEQ ID NO: 2886340 - RNA, 19 nt, Artificial Sequence
  Description of Artificial Sequence: Synthetic oligonucleotide
uccagagaugagauaggug

SEQ ID NO: 2886341 - RNA, 19 nt, Artificial Sequence
  Description of Artificial Sequence: Synthetic oligonucleotide
aggccuguguuugagcacc

SEQ ID NO: 2886342 - RNA, 19 nt, Artificial Sequence
  Description of Artificial Sequence: Synthetic oligonucleotide
uaugugaauccccggguuc

SEQ ID NO: 2886343 - RNA, 19 nt, Artificial Sequence
  Description of Artificial Sequence: Synthetic oligonucleotide
gagauaggugggauggagg

SEQ ID NO: 2886344 - RNA, 19 nt, Artificial Sequence
  Description of Artificial Sequence: Synthetic oligonucleotide
agcauaugugaauccccgg

SEQ ID NO: 2886345 - RNA, 19 nt, Artificial Sequence
  Description of Artificial Sequence: Synthetic oligonucleotide
gcauaugugaauccccggg

SEQ ID NO: 2886346 - RNA, 19 nt, Artificial Sequence
  Description of Artificial Sequence: Synthetic oligonucleotide
aauuaccagucuugagagu

SEQ ID NO: 2886347 - RNA, 19 nt, Artificial Sequence
  Description of Artificial Sequence: Synthetic oligonucleotide
aggaaugccuaaaacuauc

SEQ ID NO: 2886348 - RNA, 19 nt, Artificial Sequence
  Description of Artificial Sequence: Synthetic oligonucleotide
gacaucagaauaggccagg

SEQ ID NO: 2886349 - RNA, 19 nt, Artificial Sequence
  Description of Artificial Sequence: Synthetic oligonucleotide
agaugagauaggugggaug

SEQ ID NO: 2886350 - RNA, 19 nt, Artificial Sequence
  Description of Artificial Sequence: Synthetic oligonucleotide
aaagaaagagagagagaga

SEQ ID NO: 2886351 - RNA, 19 nt, Artificial Sequence
  Description of Artificial Sequence: Synthetic oligonucleotide
ugaauccccggguucuucc

SEQ ID NO: 2886352 - RNA, 19 nt, Artificial Sequence
  Description of Artificial Sequence: Synthetic oligonucleotide
aguggguacgggcgguggc

SEQ ID NO: 2886353 - RNA, 19 nt, Artificial Sequence
  Description of Artificial Sequence: Synthetic oligonucleotide
agaagaagaagaagaagaa

SEQ ID NO: 2886354 - RNA, 19 nt, Artificial Sequence
  Description of Artificial Sequence: Synthetic oligonucleotide
augaggccuguguuugagc

SEQ ID NO: 2886355 - RNA, 19 nt, Artificial Sequence
  Description of Artificial Sequence: Synthetic oligonucleotide
gaagaagaagaagaagaaa

SEQ ID NO: 2886356 - RNA, 19 nt, Artificial Sequence
  Description of Artificial Sequence: Synthetic oligonucleotide
aauuggaauugugggauuu

SEQ ID NO: 2886357 - RNA, 19 nt, Artificial Sequence
  Description of Artificial Sequence: Synthetic oligonucleotide
guguuugagcaccauuccc

SEQ ID NO: 2886358 - RNA, 19 nt, Artificial Sequence
  Description of Artificial Sequence: Synthetic oligonucleotide
uccccuagaaguggguacg

SEQ ID NO: 2886359 - RNA, 19 nt, Artificial Sequence
  Description of Artificial Sequence: Synthetic oligonucleotide
gggucaacaaaacacagaa

SEQ ID NO: 2886360 - RNA, 19 nt, Artificial Sequence
  Description of Artificial Sequence: Synthetic oligonucleotide
aauccccggguucuuccag

SEQ ID NO: 2886361 - RNA, 19 nt, Artificial Sequence
  Description of Artificial Sequence: Synthetic oligonucleotide
uuucccagcauaugugaau

SEQ ID NO: 2886362 - RNA, 19 nt, Artificial Sequence
  Description of Artificial Sequence: Synthetic oligonucleotide
aguuugugaggggaaugcg

SEQ ID NO: 2886363 - RNA, 19 nt, Artificial Sequence
  Description of Artificial Sequence: Synthetic oligonucleotide
agcuuucugauuaaggaaa

SEQ ID NO: 2886364 - RNA, 19 nt, Artificial Sequence
  Description of Artificial Sequence: Synthetic oligonucleotide
acagaauuaccagucuuga

SEQ ID NO: 2886365 - RNA, 19 nt, Artificial Sequence
  Description of Artificial Sequence: Synthetic oligonucleotide
guuugagucaugacaucag

SEQ ID NO: 2886366 - RNA, 19 nt, Artificial Sequence
  Description of Artificial Sequence: Synthetic oligonucleotide
cagaauaggccaggaaugc

SEQ ID NO: 2886367 - RNA, 19 nt, Artificial Sequence
  Description of Artificial Sequence: Synthetic oligonucleotide
cagaauuaccagucuugag

SEQ ID NO: 2886368 - RNA, 19 nt, Artificial Sequence
  Description of Artificial Sequence: Synthetic oligonucleotide
auuggaauugugggauuuc

SEQ ID NO: 2886369 - RNA, 19 nt, Artificial Sequence
  Description of Artificial Sequence: Synthetic oligonucleotide
cagucuugagaguguacgc

SEQ ID NO: 2886370 - RNA, 19 nt, Artificial Sequence
  Description of Artificial Sequence: Synthetic oligonucleotide
acgcuuucccagcauaugu

SEQ ID NO: 2886371 - RNA, 19 nt, Artificial Sequence
  Description of Artificial Sequence: Synthetic oligonucleotide
ugagcaccauucccacacg

SEQ ID NO: 2886372 - RNA, 19 nt, Artificial Sequence
  Description of Artificial Sequence: Synthetic oligonucleotide
uuggaauugugggauuucu

SEQ ID NO: 2886373 - RNA, 19 nt, Artificial Sequence
  Description of Artificial Sequence: Synthetic oligonucleotide
agcaccauucccacacgcc

SEQ ID NO: 2886374 - RNA, 19 nt, Artificial Sequence
  Description of Artificial Sequence: Synthetic oligonucleotide
guuugagcaccauucccac

SEQ ID NO: 2886375 - RNA, 19 nt, Artificial Sequence
  Description of Artificial Sequence: Synthetic oligonucleotide
uuucuguuugagucaugac

SEQ ID NO: 2886376 - RNA, 19 nt, Artificial Sequence
  Description of Artificial Sequence: Synthetic oligonucleotide
acuaucccuaaaagcgccc

SEQ ID NO: 2886377 - RNA, 19 nt, Artificial Sequence
  Description of Artificial Sequence: Synthetic oligonucleotide
gagagaagaagaagaagaa

SEQ ID NO: 2886378 - RNA, 19 nt, Artificial Sequence
  Description of Artificial Sequence: Synthetic oligonucleotide
uuccccuagaaguggguac

SEQ ID NO: 2886379 - RNA, 19 nt, Artificial Sequence
  Description of Artificial Sequence: Synthetic oligonucleotide
gagaaggaaagggcugggg

SEQ ID NO: 2886380 - RNA, 19 nt, Artificial Sequence
  Description of Artificial Sequence: Synthetic oligonucleotide
aacgcuuucccagcauaug

SEQ ID NO: 2886381 - RNA, 19 nt, Artificial Sequence
  Description of Artificial Sequence: Synthetic oligonucleotide
caguuugugaggggaaugc

SEQ ID NO: 2886382 - RNA, 19 nt, Artificial Sequence
  Description of Artificial Sequence: Synthetic oligonucleotide
uuccagagaugagauaggu

SEQ ID NO: 2886383 - RNA, 19 nt, Artificial Sequence
  Description of Artificial Sequence: Synthetic oligonucleotide
uuaccagucuugagagugu

SEQ ID NO: 2886384 - RNA, 19 nt, Artificial Sequence
  Description of Artificial Sequence: Synthetic oligonucleotide
ggcgguggcaguuugugag

SEQ ID NO: 2886385 - RNA, 19 nt, Artificial Sequence
  Description of Artificial Sequence: Synthetic oligonucleotide
agucuugagaguguacgca

SEQ ID NO: 2886386 - RNA, 19 nt, Artificial Sequence
  Description of Artificial Sequence: Synthetic oligonucleotide
cuguguagcuuucugauua

SEQ ID NO: 2886387 - RNA, 19 nt, Artificial Sequence
  Description of Artificial Sequence: Synthetic oligonucleotide
cugggguguagcucagugg

SEQ ID NO: 2886388 - RNA, 19 nt, Artificial Sequence
  Description of Artificial Sequence: Synthetic oligonucleotide
ugccuguguagcuuucuga

SEQ ID NO: 2886389 - RNA, 19 nt, Artificial Sequence
  Description of Artificial Sequence: Synthetic oligonucleotide
aaagagagagagagagaga

SEQ ID NO: 2886390 - RNA, 19 nt, Artificial Sequence
  Description of Artificial Sequence: Synthetic oligonucleotide
uacgcaugaggccuguguu

SEQ ID NO: 2886391 - RNA, 19 nt, Artificial Sequence
  Description of Artificial Sequence: Synthetic oligonucleotide
aagggcugggguguagcuc

SEQ ID NO: 2886392 - RNA, 19 nt, Artificial Sequence
  Description of Artificial Sequence: Synthetic oligonucleotide
uagcucaguggcagaacgc

SEQ ID NO: 2886393 - RNA, 19 nt, Artificial Sequence
  Description of Artificial Sequence: Synthetic oligonucleotide
acacagaauuaccagucuu

SEQ ID NO: 2886394 - RNA, 19 nt, Artificial Sequence
  Description of Artificial Sequence: Synthetic oligonucleotide
uucccagcauaugugaauc

SEQ ID NO: 2886395 - RNA, 19 nt, Artificial Sequence
  Description of Artificial Sequence: Synthetic oligonucleotide
auaugugaauccccggguu

SEQ ID NO: 2886396 - RNA, 19 nt, Artificial Sequence
  Description of Artificial Sequence: Synthetic oligonucleotide
aggggaaugcgugcucugc

SEQ ID NO: 2886397 - RNA, 19 nt, Artificial Sequence
  Description of Artificial Sequence: Synthetic oligonucleotide
ugugaggggaaugcgugcu

SEQ ID NO: 2886398 - RNA, 19 nt, Artificial Sequence
  Description of Artificial Sequence: Synthetic oligonucleotide
uaucccuaaaagcgcccac

SEQ ID NO: 2886399 - RNA, 19 nt, Artificial Sequence
  Description of Artificial Sequence: Synthetic oligonucleotide
agagagagaagaagaagaa

SEQ ID NO: 2886400 - RNA, 19 nt, Artificial Sequence
  Description of Artificial Sequence: Synthetic oligonucleotide
ucccuaaaagcgcccacau

SEQ ID NO: 2886401 - RNA, 19 nt, Artificial Sequence
  Description of Artificial Sequence: Synthetic oligonucleotide
uugagaguguacgcaugag

SEQ ID NO: 2886402 - RNA, 19 nt, Artificial Sequence
  Description of Artificial Sequence: Synthetic oligonucleotide
cuugagaguguacgcauga

SEQ ID NO: 2886403 - RNA, 19 nt, Artificial Sequence
  Description of Artificial Sequence: Synthetic oligonucleotide
agagaugagauagguggga

SEQ ID NO: 2886404 - RNA, 19 nt, Artificial Sequence
  Description of Artificial Sequence: Synthetic oligonucleotide
uuugagcaccauucccaca

SEQ ID NO: 2886405 - RNA, 19 nt, Artificial Sequence
  Description of Artificial Sequence: Synthetic oligonucleotide
gauggagggagcagaggug

SEQ ID NO: 2886406 - RNA, 19 nt, Artificial Sequence
  Description of Artificial Sequence: Synthetic oligonucleotide
ccagucuugagaguguacg

SEQ ID NO: 2886407 - RNA, 19 nt, Artificial Sequence
  Description of Artificial Sequence: Synthetic oligonucleotide
ccuagaaguggguacgggc

SEQ ID NO: 2886408 - RNA, 19 nt, Artificial Sequence
  Description of Artificial Sequence: Synthetic oligonucleotide
gagcaccauucccacacgc

SEQ ID NO: 2886409 - RNA, 19 nt, Artificial Sequence
  Description of Artificial Sequence: Synthetic oligonucleotide
agagagagagagagagagg

SEQ ID NO: 2886410 - RNA, 19 nt, Artificial Sequence
  Description of Artificial Sequence: Synthetic oligonucleotide
aaguggguacgggcggugg

SEQ ID NO: 2886411 - RNA, 19 nt, Artificial Sequence
  Description of Artificial Sequence: Synthetic oligonucleotide
gguucuuccagagaugaga

SEQ ID NO: 2886412 - RNA, 19 nt, Artificial Sequence
  Description of Artificial Sequence: Synthetic oligonucleotide
agagaaggaaagggcuggg

SEQ ID NO: 2886413 - RNA, 19 nt, Artificial Sequence
  Description of Artificial Sequence: Synthetic oligonucleotide
aaugcgugcucugccugug

SEQ ID NO: 2886414 - RNA, 19 nt, Artificial Sequence
  Description of Artificial Sequence: Synthetic oligonucleotide
gaaagggcugggguguagc

SEQ ID NO: 2886415 - RNA, 19 nt, Artificial Sequence
  Description of Artificial Sequence: Synthetic oligonucleotide
caguuccccuagaaguggg

SEQ ID NO: 2886416 - RNA, 19 nt, Artificial Sequence
  Description of Artificial Sequence: Synthetic oligonucleotide
gagagagagagaagaagaa

SEQ ID NO: 2886417 - RNA, 19 nt, Artificial Sequence
  Description of Artificial Sequence: Synthetic oligonucleotide
ucccagcauaugugaaucc

SEQ ID NO: 2886418 - RNA, 19 nt, Artificial Sequence
  Description of Artificial Sequence: Synthetic oligonucleotide
ggaaugccuaaaacuaucc

SEQ ID NO: 2886419 - RNA, 19 nt, Artificial Sequence
  Description of Artificial Sequence: Synthetic oligonucleotide
gguguggugagugucuaag

SEQ ID NO: 2886420 - RNA, 19 nt, Artificial Sequence
  Description of Artificial Sequence: Synthetic oligonucleotide
agaacgcuuucccagcaua

SEQ ID NO: 2886421 - RNA, 19 nt, Artificial Sequence
  Description of Artificial Sequence: Synthetic oligonucleotide
ggaauugugggauuucugu

SEQ ID NO: 2886422 - RNA, 19 nt, Artificial Sequence
  Description of Artificial Sequence: Synthetic oligonucleotide
acgccaguuccccuagaag

SEQ ID NO: 2886423 - RNA, 19 nt, Artificial Sequence
  Description of Artificial Sequence: Synthetic oligonucleotide
gagagagagagaggaagga

SEQ ID NO: 2886424 - RNA, 19 nt, Artificial Sequence
  Description of Artificial Sequence: Synthetic oligonucleotide
agcagagguguggugagug

SEQ ID NO: 2886425 - RNA, 19 nt, Artificial Sequence
  Description of Artificial Sequence: Synthetic oligonucleotide
caccauucccacacgccag

SEQ ID NO: 2886426 - RNA, 19 nt, Artificial Sequence
  Description of Artificial Sequence: Synthetic oligonucleotide
gagugucuaagaaggguca

SEQ ID NO: 2886427 - RNA, 19 nt, Artificial Sequence
  Description of Artificial Sequence: Synthetic oligonucleotide
aggaaagaauuggaauugu

SEQ ID NO: 2886428 - RNA, 19 nt, Artificial Sequence
  Description of Artificial Sequence: Synthetic oligonucleotide
ugccuaaaacuaucccuaa

SEQ ID NO: 2886429 - RNA, 19 nt, Artificial Sequence
  Description of Artificial Sequence: Synthetic oligonucleotide
gaauaggccaggaaugccu

SEQ ID NO: 2886430 - RNA, 19 nt, Artificial Sequence
  Description of Artificial Sequence: Synthetic oligonucleotide
augccuaaaacuaucccua

SEQ ID NO: 2886431 - RNA, 19 nt, Artificial Sequence
  Description of Artificial Sequence: Synthetic oligonucleotide
agcucaguggcagaacgcu

SEQ ID NO: 2886432 - RNA, 19 nt, Artificial Sequence
  Description of Artificial Sequence: Synthetic oligonucleotide
ggaaagaauuggaauugug

SEQ ID NO: 2886433 - RNA, 19 nt, Artificial Sequence
  Description of Artificial Sequence: Synthetic oligonucleotide
ucaguggcagaacgcuuuc

SEQ ID NO: 2886434 - RNA, 19 nt, Artificial Sequence
  Description of Artificial Sequence: Synthetic oligonucleotide
ccuaaaacuaucccuaaaa

SEQ ID NO: 2886435 - RNA, 19 nt, Artificial Sequence
  Description of Artificial Sequence: Synthetic oligonucleotide
ugaggggaaugcgugcucu

SEQ ID NO: 2886436 - RNA, 19 nt, Artificial Sequence
  Description of Artificial Sequence: Synthetic oligonucleotide
gagaggaaggaaggaagga

SEQ ID NO: 2886437 - RNA, 19 nt, Artificial Sequence
  Description of Artificial Sequence: Synthetic oligonucleotide
agagagagagaggaaggaa

SEQ ID NO: 2886438 - RNA, 19 nt, Artificial Sequence
  Description of Artificial Sequence: Synthetic oligonucleotide
aauaggccaggaaugccua

SEQ ID NO: 2886439 - RNA, 19 nt, Artificial Sequence
  Description of Artificial Sequence: Synthetic oligonucleotide
ccagcauaugugaaucccc

SEQ ID NO: 2886440 - RNA, 19 nt, Artificial Sequence
  Description of Artificial Sequence: Synthetic oligonucleotide
caugaggccuguguuugag

SEQ ID NO: 2886441 - RNA, 19 nt, Artificial Sequence
  Description of Artificial Sequence: Synthetic oligonucleotide
augugaauccccggguucu

SEQ ID NO: 2886442 - RNA, 19 nt, Artificial Sequence
  Description of Artificial Sequence: Synthetic oligonucleotide
agagagagagagagagaag

SEQ ID NO: 2886443 - RNA, 19 nt, Artificial Sequence
  Description of Artificial Sequence: Synthetic oligonucleotide
gaguguacgcaugaggccu

SEQ ID NO: 2886444 - RNA, 19 nt, Artificial Sequence
  Description of Artificial Sequence: Synthetic oligonucleotide
agaaagagagagagagaga

SEQ ID NO: 2886445 - RNA, 19 nt, Artificial Sequence
  Description of Artificial Sequence: Synthetic oligonucleotide
gucuaagaagggucaacaa

SEQ ID NO: 2886446 - RNA, 19 nt, Artificial Sequence
  Description of Artificial Sequence: Synthetic oligonucleotide
aagcgcccacauugcagug

SEQ ID NO: 2886447 - RNA, 19 nt, Artificial Sequence
  Description of Artificial Sequence: Synthetic oligonucleotide
uguagcucaguggcagaac

SEQ ID NO: 2886448 - RNA, 19 nt, Artificial Sequence
  Description of Artificial Sequence: Synthetic oligonucleotide
gaauugugggauuucuguu

SEQ ID NO: 2886449 - RNA, 19 nt, Artificial Sequence
  Description of Artificial Sequence: Synthetic oligonucleotide
uccccggguucuuccagag

SEQ ID NO: 2886450 - RNA, 19 nt, Artificial Sequence
  Description of Artificial Sequence: Synthetic oligonucleotide
gggauuucuguuugaguca

SEQ ID NO: 2886451 - RNA, 19 nt, Artificial Sequence
  Description of Artificial Sequence: Synthetic oligonucleotide
aucccuaaaagcgcccaca

SEQ ID NO: 2886452 - RNA, 19 nt, Artificial Sequence
  Description of Artificial Sequence: Synthetic oligonucleotide
accauucccacacgccagu

SEQ ID NO: 2886453 - RNA, 19 nt, Artificial Sequence
  Description of Artificial Sequence: Synthetic oligonucleotide
ccaggaaugccuaaaacua

SEQ ID NO: 2886454 - RNA, 19 nt, Artificial Sequence
  Description of Artificial Sequence: Synthetic oligonucleotide
agggucaacaaaacacaga

SEQ ID NO: 2886455 - RNA, 19 nt, Artificial Sequence
  Description of Artificial Sequence: Synthetic oligonucleotide
cuguuugagucaugacauc

SEQ ID NO: 2886456 - RNA, 19 nt, Artificial Sequence
  Description of Artificial Sequence: Synthetic oligonucleotide
ggagcagagguguggugag

SEQ ID NO: 2886457 - RNA, 19 nt, Artificial Sequence
  Description of Artificial Sequence: Synthetic oligonucleotide
gcuuucugauuaaggaaag

SEQ ID NO: 2886458 - RNA, 19 nt, Artificial Sequence
  Description of Artificial Sequence: Synthetic oligonucleotide
uugugggauuucuguuuga

SEQ ID NO: 2886459 - RNA, 19 nt, Artificial Sequence
  Description of Artificial Sequence: Synthetic oligonucleotide
ggugagugucuaagaaggg

SEQ ID NO: 2886460 - RNA, 19 nt, Artificial Sequence
  Description of Artificial Sequence: Synthetic oligonucleotide
uggcaguuugugaggggaa

SEQ ID NO: 2886461 - RNA, 19 nt, Artificial Sequence
  Description of Artificial Sequence: Synthetic oligonucleotide
ggcagaacgcuuucccagc

SEQ ID NO: 2886462 - RNA, 19 nt, Artificial Sequence
  Description of Artificial Sequence: Synthetic oligonucleotide
uaggugggauggagggagc

SEQ ID NO: 2886463 - RNA, 19 nt, Artificial Sequence
  Description of Artificial Sequence: Synthetic oligonucleotide
gaggggaaugcgugcucug

SEQ ID NO: 2886464 - RNA, 19 nt, Artificial Sequence
  Description of Artificial Sequence: Synthetic oligonucleotide
agagagagagagagaagaa

SEQ ID NO: 2886465 - RNA, 19 nt, Artificial Sequence
  Description of Artificial Sequence: Synthetic oligonucleotide
gauaggugggauggaggga

SEQ ID NO: 2886466 - RNA, 19 nt, Artificial Sequence
  Description of Artificial Sequence: Synthetic oligonucleotide
guguagcuuucugauuaag

SEQ ID NO: 2886467 - RNA, 19 nt, Artificial Sequence
  Description of Artificial Sequence: Synthetic oligonucleotide
acaucagaauaggccagga

SEQ ID NO: 2886468 - RNA, 19 nt, Artificial Sequence
  Description of Artificial Sequence: Synthetic oligonucleotide
guggcaguuugugagggga

SEQ ID NO: 2886469 - RNA, 19 nt, Artificial Sequence
  Description of Artificial Sequence: Synthetic oligonucleotide
guggcagaacgcuuuccca

SEQ ID NO: 2886470 - RNA, 19 nt, Artificial Sequence
  Description of Artificial Sequence: Synthetic oligonucleotide
accagucuugagaguguac

SEQ ID NO: 2886471 - RNA, 19 nt, Artificial Sequence
  Description of Artificial Sequence: Synthetic oligonucleotide
cuuucccagcauaugugaa

SEQ ID NO: 2886472 - RNA, 19 nt, Artificial Sequence
  Description of Artificial Sequence: Synthetic oligonucleotide
ucccacacgccaguucccc

SEQ ID NO: 2886473 - RNA, 19 nt, Artificial Sequence
  Description of Artificial Sequence: Synthetic oligonucleotide
uucuuccagagaugagaua

SEQ ID NO: 2886474 - RNA, 19 nt, Artificial Sequence
  Description of Artificial Sequence: Synthetic oligonucleotide
gcuuucccagcauauguga

SEQ ID NO: 2886475 - RNA, 19 nt, Artificial Sequence
  Description of Artificial Sequence: Synthetic oligonucleotide
uaggccaggaaugccuaaa

SEQ ID NO: 2886476 - RNA, 19 nt, Artificial Sequence
  Description of Artificial Sequence: Synthetic oligonucleotide
ggguguagcucaguggcag

SEQ ID NO: 2886477 - RNA, 19 nt, Artificial Sequence
  Description of Artificial Sequence: Synthetic oligonucleotide
gugucuaagaagggucaac

SEQ ID NO: 2886478 - RNA, 19 nt, Artificial Sequence
  Description of Artificial Sequence: Synthetic oligonucleotide
gcccacauugcaguguggg

SEQ ID NO: 2886479 - RNA, 19 nt, Artificial Sequence
  Description of Artificial Sequence: Synthetic oligonucleotide
cauaugugaauccccgggu

SEQ ID NO: 2886480 - RNA, 19 nt, Artificial Sequence
  Description of Artificial Sequence: Synthetic oligonucleotide
cuuucugauuaaggaaaga

SEQ ID NO: 2886481 - RNA, 19 nt, Artificial Sequence
  Description of Artificial Sequence: Synthetic oligonucleotide
gaauccccggguucuucca

SEQ ID NO: 2886482 - RNA, 19 nt, Artificial Sequence
  Description of Artificial Sequence: Synthetic oligonucleotide
ggagggagcagaggugugg

SEQ ID NO: 2886483 - RNA, 19 nt, Artificial Sequence
  Description of Artificial Sequence: Synthetic oligonucleotide
ggauggagggagcagaggu

SEQ ID NO: 2886484 - RNA, 19 nt, Artificial Sequence
  Description of Artificial Sequence: Synthetic oligonucleotide
cugccuguguagcuuucug

SEQ ID NO: 2886485 - RNA, 19 nt, Artificial Sequence
  Description of Artificial Sequence: Synthetic oligonucleotide
gcugggguguagcucagug

SEQ ID NO: 2886486 - RNA, 19 nt, Artificial Sequence
  Description of Artificial Sequence: Synthetic oligonucleotide
ggaaugcgugcucugccug

SEQ ID NO: 2886487 - RNA, 19 nt, Artificial Sequence
  Description of Artificial Sequence: Synthetic oligonucleotide
ucugccuguguagcuuucu

SEQ ID NO: 2886488 - RNA, 19 nt, Artificial Sequence
  Description of Artificial Sequence: Synthetic oligonucleotide
ugcgugcucugccugugua

SEQ ID NO: 2886489 - RNA, 19 nt, Artificial Sequence
  Description of Artificial Sequence: Synthetic oligonucleotide
aggccaggaaugccuaaaa

SEQ ID NO: 2886490 - RNA, 19 nt, Artificial Sequence
  Description of Artificial Sequence: Synthetic oligonucleotide
agugucuaagaagggucaa

SEQ ID NO: 2886491 - RNA, 19 nt, Artificial Sequence
  Description of Artificial Sequence: Synthetic oligonucleotide
guguggugagugucuaaga

SEQ ID NO: 2886492 - RNA, 19 nt, Artificial Sequence
  Description of Artificial Sequence: Synthetic oligonucleotide
gauuucuguuugagucaug

SEQ ID NO: 2886493 - RNA, 19 nt, Artificial Sequence
  Description of Artificial Sequence: Synthetic oligonucleotide
cagagguguggugaguguc

SEQ ID NO: 2886494 - RNA, 19 nt, Artificial Sequence
  Description of Artificial Sequence: Synthetic oligonucleotide
ggggaaugcgugcucugcc

SEQ ID NO: 2886495 - RNA, 19 nt, Artificial Sequence
  Description of Artificial Sequence: Synthetic oligonucleotide
agagagagagagagagaga

SEQ ID NO: 2886496 - RNA, 19 nt, Artificial Sequence
  Description of Artificial Sequence: Synthetic oligonucleotide
gcaccauucccacacgcca

SEQ ID NO: 2886497 - RNA, 19 nt, Artificial Sequence
  Description of Artificial Sequence: Synthetic oligonucleotide
gguggcaguuugugagggg

SEQ ID NO: 2886498 - RNA, 19 nt, Artificial Sequence
  Description of Artificial Sequence: Synthetic oligonucleotide
uggguacgggcgguggcag

SEQ ID NO: 2886499 - RNA, 19 nt, Artificial Sequence
  Description of Artificial Sequence: Synthetic oligonucleotide
cacacgccaguuccccuag

SEQ ID NO: 2886500 - RNA, 19 nt, Artificial Sequence
  Description of Artificial Sequence: Synthetic oligonucleotide
gaaguggguacgggcggug

SEQ ID NO: 2886501 - RNA, 19 nt, Artificial Sequence
  Description of Artificial Sequence: Synthetic oligonucleotide
guuugugaggggaaugcgu

SEQ ID NO: 2886502 - RNA, 19 nt, Artificial Sequence
  Description of Artificial Sequence: Synthetic oligonucleotide
cccagcauaugugaauccc

SEQ ID NO: 2886503 - RNA, 19 nt, Artificial Sequence
  Description of Artificial Sequence: Synthetic oligonucleotide
gugagugucuaagaagggu

SEQ ID NO: 2886504 - RNA, 19 nt, Artificial Sequence
  Description of Artificial Sequence: Synthetic oligonucleotide
agaaguggguacgggcggu

SEQ ID NO: 2886505 - RNA, 19 nt, Artificial Sequence
  Description of Artificial Sequence: Synthetic oligonucleotide
cccacauugcagugugggg

SEQ ID NO: 2886506 - RNA, 19 nt, Artificial Sequence
  Description of Artificial Sequence: Synthetic oligonucleotide
caucagaauaggccaggaa

SEQ ID NO: 2886507 - RNA, 19 nt, Artificial Sequence
  Description of Artificial Sequence: Synthetic oligonucleotide
ggccaggaaugccuaaaac

SEQ ID NO: 2886508 - RNA, 19 nt, Artificial Sequence
  Description of Artificial Sequence: Synthetic oligonucleotide
agggagcagagguguggug

SEQ ID NO: 2886509 - RNA, 19 nt, Artificial Sequence
  Description of Artificial Sequence: Synthetic oligonucleotide
cuaucccuaaaagcgccca

SEQ ID NO: 2886510 - RNA, 19 nt, Artificial Sequence
  Description of Artificial Sequence: Synthetic oligonucleotide
auaggccaggaaugccuaa

SEQ ID NO: 2886511 - RNA, 19 nt, Artificial Sequence
  Description of Artificial Sequence: Synthetic oligonucleotide
uaccagucuugagagugua

SEQ ID NO: 2886512 - RNA, 19 nt, Artificial Sequence
  Description of Artificial Sequence: Synthetic oligonucleotide
aguguacgcaugaggccug

SEQ ID NO: 2886513 - RNA, 19 nt, Artificial Sequence
  Description of Artificial Sequence: Synthetic oligonucleotide
guacgcaugaggccugugu

SEQ ID NO: 2886514 - RNA, 19 nt, Artificial Sequence
  Description of Artificial Sequence: Synthetic oligonucleotide
auccccggguucuuccaga

SEQ ID NO: 2886515 - RNA, 19 nt, Artificial Sequence
  Description of Artificial Sequence: Synthetic oligonucleotide
gaaugcgugcucugccugu

SEQ ID NO: 2886516 - RNA, 19 nt, Artificial Sequence
  Description of Artificial Sequence: Synthetic oligonucleotide
gcgguggcaguuugugagg

SEQ ID NO: 2886517 - RNA, 19 nt, Artificial Sequence
  Description of Artificial Sequence: Synthetic oligonucleotide
gccaguuccccuagaagug

SEQ ID NO: 2886518 - RNA, 19 nt, Artificial Sequence
  Description of Artificial Sequence: Synthetic oligonucleotide
ugcucugccuguguagcuu

SEQ ID NO: 2886519 - RNA, 19 nt, Artificial Sequence
  Description of Artificial Sequence: Synthetic oligonucleotide
agagagagagagagaggaa

SEQ ID NO: 2886520 - RNA, 19 nt, Artificial Sequence
  Description of Artificial Sequence: Synthetic oligonucleotide
ccaguuccccuagaagugg

SEQ ID NO: 2886521 - RNA, 19 nt, Artificial Sequence
  Description of Artificial Sequence: Synthetic oligonucleotide
augagauaggugggaugga

SEQ ID NO: 2886522 - RNA, 19 nt, Artificial Sequence
  Description of Artificial Sequence: Synthetic oligonucleotide
gugggauuucuguuugagu

SEQ ID NO: 2886523 - RNA, 19 nt, Artificial Sequence
  Description of Artificial Sequence: Synthetic oligonucleotide
gcaguuugugaggggaaug

SEQ ID NO: 2886524 - RNA, 19 nt, Artificial Sequence
  Description of Artificial Sequence: Synthetic oligonucleotide
uguacgcaugaggccugug

SEQ ID NO: 2886525 - RNA, 19 nt, Artificial Sequence
  Description of Artificial Sequence: Synthetic oligonucleotide
caggaaugccuaaaacuau

SEQ ID NO: 2886526 - RNA, 19 nt, Artificial Sequence
  Description of Artificial Sequence: Synthetic oligonucleotide
caguggcagaacgcuuucc

SEQ ID NO: 2886527 - RNA, 19 nt, Artificial Sequence
  Description of Artificial Sequence: Synthetic oligonucleotide
gaauuggaauugugggauu

SEQ ID NO: 2886528 - RNA, 19 nt, Artificial Sequence
  Description of Artificial Sequence: Synthetic oligonucleotide
gagaugagauaggugggau

SEQ ID NO: 2886529 - RNA, 19 nt, Artificial Sequence
  Description of Artificial Sequence: Synthetic oligonucleotide
aggugggauggagggagca

SEQ ID NO: 2886530 - RNA, 19 nt, Artificial Sequence
  Description of Artificial Sequence: Synthetic oligonucleotide
cucaguggcagaacgcuuu

SEQ ID NO: 2886531 - RNA, 19 nt, Artificial Sequence
  Description of Artificial Sequence: Synthetic oligonucleotide
gugaggggaaugcgugcuc

SEQ ID NO: 2886532 - RNA, 19 nt, Artificial Sequence
  Description of Artificial Sequence: Synthetic oligonucleotide
agcgcccacauugcagugu

SEQ ID NO: 2886533 - RNA, 19 nt, Artificial Sequence
  Description of Artificial Sequence: Synthetic oligonucleotide
gcgugcucugccuguguag

SEQ ID NO: 2886534 - RNA, 19 nt, Artificial Sequence
  Description of Artificial Sequence: Synthetic oligonucleotide
agguguggugagugucuaa

SEQ ID NO: 2886535 - RNA, 19 nt, Artificial Sequence
  Description of Artificial Sequence: Synthetic oligonucleotide
gggauggagggagcagagg

SEQ ID NO: 2886536 - RNA, 19 nt, Artificial Sequence
  Description of Artificial Sequence: Synthetic oligonucleotide
aguuccccuagaagugggu

SEQ ID NO: 2886537 - RNA, 19 nt, Artificial Sequence
  Description of Artificial Sequence: Synthetic oligonucleotide
guguagcucaguggcagaa

SEQ ID NO: 2886538 - RNA, 19 nt, Artificial Sequence
  Description of Artificial Sequence: Synthetic oligonucleotide
augcgugcucugccugugu

SEQ ID NO: 2886539 - RNA, 19 nt, Artificial Sequence
  Description of Artificial Sequence: Synthetic oligonucleotide
cucugccuguguagcuuuc

SEQ ID NO: 2886540 - RNA, 19 nt, Artificial Sequence
  Description of Artificial Sequence: Synthetic oligonucleotide
cacgccaguuccccuagaa

SEQ ID NO: 2886541 - RNA, 19 nt, Artificial Sequence
  Description of Artificial Sequence: Synthetic oligonucleotide
gaacgcuuucccagcauau

SEQ ID NO: 2886542 - RNA, 19 nt, Artificial Sequence
  Description of Artificial Sequence: Synthetic oligonucleotide
gccuaaaacuaucccuaaa

SEQ ID NO: 2886543 - RNA, 19 nt, Artificial Sequence
  Description of Artificial Sequence: Synthetic oligonucleotide
guuccccuagaagugggua

SEQ ID NO: 2886544 - RNA, 19 nt, Artificial Sequence
  Description of Artificial Sequence: Synthetic oligonucleotide
gcagaacgcuuucccagca

SEQ ID NO: 2886545 - RNA, 19 nt, Artificial Sequence
  Description of Artificial Sequence: Synthetic oligonucleotide
guggguacgggcgguggca

SEQ ID NO: 2886546 - RNA, 19 nt, Artificial Sequence
  Description of Artificial Sequence: Synthetic oligonucleotide
gguguagcucaguggcaga

SEQ ID NO: 2886547 - RNA, 19 nt, Artificial Sequence
  Description of Artificial Sequence: Synthetic oligonucleotide
gagggagcagagguguggu

SEQ ID NO: 2886548 - RNA, 19 nt, Artificial Sequence
  Description of Artificial Sequence: Synthetic oligonucleotide
gccuguguagcuuucugau

SEQ ID NO: 2886549 - RNA, 19 nt, Artificial Sequence
  Description of Artificial Sequence: Synthetic oligonucleotide
gagguguggugagugucua

SEQ ID NO: 2886550 - RNA, 19 nt, Artificial Sequence
  Description of Artificial Sequence: Synthetic oligonucleotide
cgugcucugccuguguagc

SEQ ID NO: 2886551 - RNA, 19 nt, Artificial Sequence
  Description of Artificial Sequence: Synthetic oligonucleotide
cccuagaaguggguacggg

SEQ ID NO: 2886552 - RNA, 19 nt, Artificial Sequence
  Description of Artificial Sequence: Synthetic oligonucleotide
ggauuucuguuugagucau

SEQ ID NO: 2886553 - RNA, 19 nt, Artificial Sequence
  Description of Artificial Sequence: Synthetic oligonucleotide
ggguucuuccagagaugag

SEQ ID NO: 2886554 - RNA, 19 nt, Artificial Sequence
  Description of Artificial Sequence: Synthetic oligonucleotide
acacgccaguuccccuaga

SEQ ID NO: 2886555 - RNA, 19 nt, Artificial Sequence
  Description of Artificial Sequence: Synthetic oligonucleotide
gggaaugcgugcucugccu

SEQ ID NO: 2886556 - RNA, 19 nt, Artificial Sequence
  Description of Artificial Sequence: Synthetic oligonucleotide
ccggguucuuccagagaug

SEQ ID NO: 2886557 - RNA, 19 nt, Artificial Sequence
  Description of Artificial Sequence: Synthetic oligonucleotide
cgccaguuccccuagaagu

SEQ ID NO: 2886558 - RNA, 19 nt, Artificial Sequence
  Description of Artificial Sequence: Synthetic oligonucleotide
ccccuagaaguggguacgg

SEQ ID NO: 2886559 - RNA, 19 nt, Artificial Sequence
  Description of Artificial Sequence: Synthetic oligonucleotide
cccggguucuuccagagau

SEQ ID NO: 2886560 - RNA, 19 nt, Artificial Sequence
  Description of Artificial Sequence: Synthetic oligonucleotide
gcaugaggccuguguuuga

SEQ ID NO: 2886561 - RNA, 19 nt, Artificial Sequence
  Description of Artificial Sequence: Synthetic oligonucleotide
ggucaacaaaacacagaau

SEQ ID NO: 2886562 - RNA, 19 nt, Artificial Sequence
  Description of Artificial Sequence: Synthetic oligonucleotide
cggguucuuccagagauga

SEQ ID NO: 2886563 - RNA, 19 nt, Artificial Sequence
  Description of Artificial Sequence: Synthetic oligonucleotide
gcagagguguggugagugu

SEQ ID NO: 2886564 - RNA, 19 nt, Artificial Sequence
  Description of Artificial Sequence: Synthetic oligonucleotide
gggguguagcucaguggca

SEQ ID NO: 2886565 - RNA, 19 nt, Artificial Sequence
  Description of Artificial Sequence: Synthetic oligonucleotide
gagcagagguguggugagu

SEQ ID NO: 2886566 - RNA, 19 nt, Artificial Sequence
  Description of Artificial Sequence: Synthetic oligonucleotide
acgggcgguggcaguuugu

SEQ ID NO: 2886567 - RNA, 19 nt, Artificial Sequence
  Description of Artificial Sequence: Synthetic oligonucleotide
cagaacgcuuucccagcau

SEQ ID NO: 2886568 - RNA, 19 nt, Artificial Sequence
  Description of Artificial Sequence: Synthetic oligonucleotide
ggcaguuugugaggggaau

SEQ ID NO: 2886569 - RNA, 19 nt, Artificial Sequence
  Description of Artificial Sequence: Synthetic oligonucleotide
ccacacgccaguuccccua

SEQ ID NO: 2886570 - RNA, 19 nt, Artificial Sequence
  Description of Artificial Sequence: Synthetic oligonucleotide
cgggcgguggcaguuugug

SEQ ID NO: 2886571 - RNA, 19 nt, Artificial Sequence
  Description of Artificial Sequence: Synthetic oligonucleotide
ccuguguuugagcaccauu

SEQ ID NO: 2886572 - RNA, 19 nt, Artificial Sequence
  Description of Artificial Sequence: Synthetic oligonucleotide
guguacgcaugaggccugu

SEQ ID NO: 2886573 - RNA, 19 nt, Artificial Sequence
  Description of Artificial Sequence: Synthetic oligonucleotide
cgcccacauugcagugugg

SEQ ID NO: 2886574 - RNA, 19 nt, Artificial Sequence
  Description of Artificial Sequence: Synthetic oligonucleotide
gcucugccuguguagcuuu

SEQ ID NO: 2886575 - RNA, 19 nt, Artificial Sequence
  Description of Artificial Sequence: Synthetic oligonucleotide
gguacgggcgguggcaguu

SEQ ID NO: 2886576 - RNA, 19 nt, Artificial Sequence
  Description of Artificial Sequence: Synthetic oligonucleotide
ccuguguagcuuucugauu

SEQ ID NO: 2886577 - RNA, 19 nt, Artificial Sequence
  Description of Artificial Sequence: Synthetic oligonucleotide
gggcugggguguagcucag

SEQ ID NO: 2886578 - RNA, 19 nt, Artificial Sequence
  Description of Artificial Sequence: Synthetic oligonucleotide
ggccuguguuugagcacca

SEQ ID NO: 2886579 - RNA, 19 nt, Artificial Sequence
  Description of Artificial Sequence: Synthetic oligonucleotide
gcucaguggcagaacgcuu

SEQ ID NO: 2886580 - RNA, 19 nt, Artificial Sequence
  Description of Artificial Sequence: Synthetic oligonucleotide
guacgggcgguggcaguuu

SEQ ID NO: 2886581 - RNA, 19 nt, Artificial Sequence
  Description of Artificial Sequence: Synthetic oligonucleotide
ggguacgggcgguggcagu

SEQ ID NO: 2886582 - RNA, 19 nt, Artificial Sequence
  Description of Artificial Sequence: Synthetic oligonucleotide
ccccggguucuuccagaga

SEQ ID NO: 2886583 - RNA, 19 nt, Artificial Sequence
  Description of Artificial Sequence: Synthetic oligonucleotide
cccuaaaagcgcccacauu

SEQ ID NO: 2886584 - RNA, 19 nt, Artificial Sequence
  Description of Artificial Sequence: Synthetic oligonucleotide
cccacacgccaguuccccu

SEQ ID NO: 2886585 - RNA, 19 nt, Artificial Sequence
  Description of Artificial Sequence: Synthetic oligonucleotide
gccuguguuugagcaccau

SEQ ID NO: 2886586 - RNA, 19 nt, Artificial Sequence
  Description of Artificial Sequence: Synthetic oligonucleotide
ggcugggguguagcucagu

SEQ ID NO: 2886587 - RNA, 19 nt, Artificial Sequence
  Description of Artificial Sequence: Synthetic oligonucleotide
ccauucccacacgccaguu

SEQ ID NO: 2886588 - RNA, 19 nt, Artificial Sequence
  Description of Artificial Sequence: Synthetic oligonucleotide
ugaagaauggccaugaagg

SEQ ID NO: 2886589 - RNA, 19 nt, Artificial Sequence
  Description of Artificial Sequence: Synthetic oligonucleotide
aacacaucaaaauucagac

SEQ ID NO: 2886590 - RNA, 19 nt, Artificial Sequence
  Description of Artificial Sequence: Synthetic oligonucleotide
uuaaaagugaaguaaauag

SEQ ID NO: 2886591 - RNA, 19 nt, Artificial Sequence
  Description of Artificial Sequence: Synthetic oligonucleotide
aauauauauauauauauau

SEQ ID NO: 2886592 - RNA, 19 nt, Artificial Sequence
  Description of Artificial Sequence: Synthetic oligonucleotide
  modified_base (9)..(9): a, c, u, g, unknown or other
uauauauanacacacacac

SEQ ID NO: 2886593 - RNA, 19 nt, Artificial Sequence
  Description of Artificial Sequence: Synthetic oligonucleotide
ucaaaauucagacugagga

SEQ ID NO: 2886594 - RNA, 19 nt, Artificial Sequence
  Description of Artificial Sequence: Synthetic oligonucleotide
uauauauauauauauaugu

SEQ ID NO: 2886595 - RNA, 19 nt, Artificial Sequence
  Description of Artificial Sequence: Synthetic oligonucleotide
  modified_base (13)..(13): a, c, u, g, unknown or other
uauauauauauanacacac

SEQ ID NO: 2886596 - RNA, 19 nt, Artificial Sequence
  Description of Artificial Sequence: Synthetic oligonucleotide
  modified_base (17)..(17): a, c, u, g, unknown or other
uauauauauauauauanac

SEQ ID NO: 2886597 - RNA, 19 nt, Artificial Sequence
  Description of Artificial Sequence: Synthetic oligonucleotide
  modified_base (7)..(7): a, c, u, g, unknown or other
uauauanacacacacacau

SEQ ID NO: 2886598 - RNA, 19 nt, Artificial Sequence
  Description of Artificial Sequence: Synthetic oligonucleotide
  modified_base (15)..(15): a, c, u, g, unknown or other
uauauauauauauanacac

SEQ ID NO: 2886599 - RNA, 19 nt, Artificial Sequence
  Description of Artificial Sequence: Synthetic oligonucleotide
uguauauauauauauaugu

SEQ ID NO: 2886600 - RNA, 19 nt, Artificial Sequence
  Description of Artificial Sequence: Synthetic oligonucleotide
  modified_base (19)..(19): a, c, u, g, unknown or other
uguauauauauauauauan

SEQ ID NO: 2886601 - RNA, 19 nt, Artificial Sequence
  Description of Artificial Sequence: Synthetic oligonucleotide
uauauauauauauauauau

SEQ ID NO: 2886602 - RNA, 19 nt, Artificial Sequence
  Description of Artificial Sequence: Synthetic oligonucleotide
aagaagagagggcacaagc

SEQ ID NO: 2886603 - RNA, 19 nt, Artificial Sequence
  Description of Artificial Sequence: Synthetic oligonucleotide
  modified_base (5)..(5): a, c, u, g, unknown or other
uauanacacacacacauac

SEQ ID NO: 2886604 - RNA, 19 nt, Artificial Sequence
  Description of Artificial Sequence: Synthetic oligonucleotide
uaaauauauauauauauau

SEQ ID NO: 2886605 - RNA, 19 nt, Artificial Sequence
  Description of Artificial Sequence: Synthetic oligonucleotide
aauuaacacaucaaaauuc

SEQ ID NO: 2886606 - RNA, 19 nt, Artificial Sequence
  Description of Artificial Sequence: Synthetic oligonucleotide
acauacauacaauucauac

SEQ ID NO: 2886607 - RNA, 19 nt, Artificial Sequence
  Description of Artificial Sequence: Synthetic oligonucleotide
uauauauauauauaugugu

SEQ ID NO: 2886608 - RNA, 19 nt, Artificial Sequence
  Description of Artificial Sequence: Synthetic oligonucleotide
acuaaauauauauauauau

SEQ ID NO: 2886609 - RNA, 19 nt, Artificial Sequence
  Description of Artificial Sequence: Synthetic oligonucleotide
gagggcacaagcuagaagg

SEQ ID NO: 2886610 - RNA, 19 nt, Artificial Sequence
  Description of Artificial Sequence: Synthetic oligonucleotide
uauguauauauauauauau

SEQ ID NO: 2886611 - RNA, 19 nt, Artificial Sequence
  Description of Artificial Sequence: Synthetic oligonucleotide
uaaaagugaaguaaauagc

SEQ ID NO: 2886612 - RNA, 19 nt, Artificial Sequence
  Description of Artificial Sequence: Synthetic oligonucleotide
uauauauauauauauguau

SEQ ID NO: 2886613 - RNA, 19 nt, Artificial Sequence
  Description of Artificial Sequence: Synthetic oligonucleotide
acauacaauucauacacac

SEQ ID NO: 2886614 - RNA, 19 nt, Artificial Sequence
  Description of Artificial Sequence: Synthetic oligonucleotide
uauaauuaacacaucaaaa

SEQ ID NO: 2886615 - RNA, 19 nt, Artificial Sequence
  Description of Artificial Sequence: Synthetic oligonucleotide
uucuauaauuaacacauca

SEQ ID NO: 2886616 - RNA, 19 nt, Artificial Sequence
  Description of Artificial Sequence: Synthetic oligonucleotide
uguauguauauauauauau

SEQ ID NO: 2886617 - RNA, 19 nt, Artificial Sequence
  Description of Artificial Sequence: Synthetic oligonucleotide
auaauuaacacaucaaaau

SEQ ID NO: 2886618 - RNA, 19 nt, Artificial Sequence
  Description of Artificial Sequence: Synthetic oligonucleotide
uguguauauauauauauau

SEQ ID NO: 2886619 - RNA, 19 nt, Artificial Sequence
  Description of Artificial Sequence: Synthetic oligonucleotide
auuuuaucaccuuuuauug

SEQ ID NO: 2886620 - RNA, 19 nt, Artificial Sequence
  Description of Artificial Sequence: Synthetic oligonucleotide
ucugacuaaauauauauau

SEQ ID NO: 2886621 - RNA, 19 nt, Artificial Sequence
  Description of Artificial Sequence: Synthetic oligonucleotide
uauauauauauauguaugu

SEQ ID NO: 2886622 - RNA, 19 nt, Artificial Sequence
  Description of Artificial Sequence: Synthetic oligonucleotide
cacaacacagucaagagag

SEQ ID NO: 2886623 - RNA, 19 nt, Artificial Sequence
  Description of Artificial Sequence: Synthetic oligonucleotide
cacaucaaaauucagacug

SEQ ID NO: 2886624 - RNA, 19 nt, Artificial Sequence
  Description of Artificial Sequence: Synthetic oligonucleotide
aaaagugaaguaaauagca

SEQ ID NO: 2886625 - RNA, 19 nt, Artificial Sequence
  Description of Artificial Sequence: Synthetic oligonucleotide
ugacuaaauauauauauau

SEQ ID NO: 2886626 - RNA, 19 nt, Artificial Sequence
  Description of Artificial Sequence: Synthetic oligonucleotide
uuuaucaccuuuuauugca

SEQ ID NO: 2886627 - RNA, 19 nt, Artificial Sequence
  Description of Artificial Sequence: Synthetic oligonucleotide
agagccuuagccucuaagc

SEQ ID NO: 2886628 - RNA, 19 nt, Artificial Sequence
  Description of Artificial Sequence: Synthetic oligonucleotide
aagugaaguaaauagcaga

SEQ ID NO: 2886629 - RNA, 19 nt, Artificial Sequence
  Description of Artificial Sequence: Synthetic oligonucleotide
acucagacauuuuaucacc

SEQ ID NO: 2886630 - RNA, 19 nt, Artificial Sequence
  Description of Artificial Sequence: Synthetic oligonucleotide
  modified_base (16)..(16): a, c, u, g, unknown or other
auauauauauauauanaca

SEQ ID NO: 2886631 - RNA, 19 nt, Artificial Sequence
  Description of Artificial Sequence: Synthetic oligonucleotide
uguguguauauauauauau

SEQ ID NO: 2886632 - RNA, 19 nt, Artificial Sequence
  Description of Artificial Sequence: Synthetic oligonucleotide
uaacacaucaaaauucaga

SEQ ID NO: 2886633 - RNA, 19 nt, Artificial Sequence
  Description of Artificial Sequence: Synthetic oligonucleotide
  modified_base (3)..(3): a, c, u, g, unknown or other
uanacacacacacauacau

SEQ ID NO: 2886634 - RNA, 19 nt, Artificial Sequence
  Description of Artificial Sequence: Synthetic oligonucleotide
uauauauauauaugugugu

SEQ ID NO: 2886635 - RNA, 19 nt, Artificial Sequence
  Description of Artificial Sequence: Synthetic oligonucleotide
aacacagucaagagagucc

SEQ ID NO: 2886636 - RNA, 19 nt, Artificial Sequence
  Description of Artificial Sequence: Synthetic oligonucleotide
ucuauaauuaacacaucaa

SEQ ID NO: 2886637 - RNA, 19 nt, Artificial Sequence
  Description of Artificial Sequence: Synthetic oligonucleotide
auauauauauauaugugug

SEQ ID NO: 2886638 - RNA, 19 nt, Artificial Sequence
  Description of Artificial Sequence: Synthetic oligonucleotide
auauauauauauauguaug

SEQ ID NO: 2886639 - RNA, 19 nt, Artificial Sequence
  Description of Artificial Sequence: Synthetic oligonucleotide
gucaagagaguccugagag

SEQ ID NO: 2886640 - RNA, 19 nt, Artificial Sequence
  Description of Artificial Sequence: Synthetic oligonucleotide
aaaauucagacugaggaaa

SEQ ID NO: 2886641 - RNA, 19 nt, Artificial Sequence
  Description of Artificial Sequence: Synthetic oligonucleotide
auauauauauaugugugug

SEQ ID NO: 2886642 - RNA, 19 nt, Artificial Sequence
  Description of Artificial Sequence: Synthetic oligonucleotide
agauguguucacuuucccc

SEQ ID NO: 2886643 - RNA, 19 nt, Artificial Sequence
  Description of Artificial Sequence: Synthetic oligonucleotide
aaagucaaccaagggaagg

SEQ ID NO: 2886644 - RNA, 19 nt, Artificial Sequence
  Description of Artificial Sequence: Synthetic oligonucleotide
uuagauguguucacuuucc

SEQ ID NO: 2886645 - RNA, 19 nt, Artificial Sequence
  Description of Artificial Sequence: Synthetic oligonucleotide
gaagaauggccaugaaggg

SEQ ID NO: 2886646 - RNA, 19 nt, Artificial Sequence
  Description of Artificial Sequence: Synthetic oligonucleotide
  modified_base (14)..(14): a, c, u, g, unknown or other
auauauauauauanacaca

SEQ ID NO: 2886647 - RNA, 19 nt, Artificial Sequence
  Description of Artificial Sequence: Synthetic oligonucleotide
uuuagauguguucacuuuc

SEQ ID NO: 2886648 - RNA, 19 nt, Artificial Sequence
  Description of Artificial Sequence: Synthetic oligonucleotide
uuuuaucaccuuuuauugc

SEQ ID NO: 2886649 - RNA, 19 nt, Artificial Sequence
  Description of Artificial Sequence: Synthetic oligonucleotide
auauauauauauauaugug

SEQ ID NO: 2886650 - RNA, 19 nt, Artificial Sequence
  Description of Artificial Sequence: Synthetic oligonucleotide
auauauauauauauauaug

SEQ ID NO: 2886651 - RNA, 19 nt, Artificial Sequence
  Description of Artificial Sequence: Synthetic oligonucleotide
aagaauggccaugaagggg

SEQ ID NO: 2886652 - RNA, 19 nt, Artificial Sequence
  Description of Artificial Sequence: Synthetic oligonucleotide
aaucucaggauaaagcacu

SEQ ID NO: 2886653 - RNA, 19 nt, Artificial Sequence
  Description of Artificial Sequence: Synthetic oligonucleotide
cagagcaaagaagagaggg

SEQ ID NO: 2886654 - RNA, 19 nt, Artificial Sequence
  Description of Artificial Sequence: Synthetic oligonucleotide
gucagagcaaagaagagag

SEQ ID NO: 2886655 - RNA, 19 nt, Artificial Sequence
  Description of Artificial Sequence: Synthetic oligonucleotide
aaagugaaguaaauagcag

SEQ ID NO: 2886656 - RNA, 19 nt, Artificial Sequence
  Description of Artificial Sequence: Synthetic oligonucleotide
auauauauauauguaugug

SEQ ID NO: 2886657 - RNA, 19 nt, Artificial Sequence
  Description of Artificial Sequence: Synthetic oligonucleotide
aaauauauauauauauaua

SEQ ID NO: 2886658 - RNA, 19 nt, Artificial Sequence
  Description of Artificial Sequence: Synthetic oligonucleotide
aagucaaccaagggaaggg

SEQ ID NO: 2886659 - RNA, 19 nt, Artificial Sequence
  Description of Artificial Sequence: Synthetic oligonucleotide
caggauaaagcacucagac

SEQ ID NO: 2886660 - RNA, 19 nt, Artificial Sequence
  Description of Artificial Sequence: Synthetic oligonucleotide
uuuaaaagugaaguaaaua

SEQ ID NO: 2886661 - RNA, 19 nt, Artificial Sequence
  Description of Artificial Sequence: Synthetic oligonucleotide
uuaacacaucaaaauucag

SEQ ID NO: 2886662 - RNA, 19 nt, Artificial Sequence
  Description of Artificial Sequence: Synthetic oligonucleotide
agcuagaagggccagggag

SEQ ID NO: 2886663 - RNA, 19 nt, Artificial Sequence
  Description of Artificial Sequence: Synthetic oligonucleotide
aaagcacucagacauuuua

SEQ ID NO: 2886664 - RNA, 19 nt, Artificial Sequence
  Description of Artificial Sequence: Synthetic oligonucleotide
agcacucagacauuuuauc

SEQ ID NO: 2886665 - RNA, 19 nt, Artificial Sequence
  Description of Artificial Sequence: Synthetic oligonucleotide
caggcugugaagaauggcc

SEQ ID NO: 2886666 - RNA, 19 nt, Artificial Sequence
  Description of Artificial Sequence: Synthetic oligonucleotide
auuaacacaucaaaauuca

SEQ ID NO: 2886667 - RNA, 19 nt, Artificial Sequence
  Description of Artificial Sequence: Synthetic oligonucleotide
cucaggauaaagcacucag

SEQ ID NO: 2886668 - RNA, 19 nt, Artificial Sequence
  Description of Artificial Sequence: Synthetic oligonucleotide
aagggaaagucaaccaagg

SEQ ID NO: 2886669 - RNA, 19 nt, Artificial Sequence
  Description of Artificial Sequence: Synthetic oligonucleotide
ucaaccaagggaaggggca

SEQ ID NO: 2886670 - RNA, 19 nt, Artificial Sequence
  Description of Artificial Sequence: Synthetic oligonucleotide
cuaaauauauauauauaua

SEQ ID NO: 2886671 - RNA, 19 nt, Artificial Sequence
  Description of Artificial Sequence: Synthetic oligonucleotide
gugaagaauggccaugaag

SEQ ID NO: 2886672 - RNA, 19 nt, Artificial Sequence
  Description of Artificial Sequence: Synthetic oligonucleotide
caagagaguccugagagcc

SEQ ID NO: 2886673 - RNA, 19 nt, Artificial Sequence
  Description of Artificial Sequence: Synthetic oligonucleotide
uguuuguguguguauauau

SEQ ID NO: 2886674 - RNA, 19 nt, Artificial Sequence
  Description of Artificial Sequence: Synthetic oligonucleotide
agagcaaagaagagagggc

SEQ ID NO: 2886675 - RNA, 19 nt, Artificial Sequence
  Description of Artificial Sequence: Synthetic oligonucleotide
ucaggauaaagcacucaga

SEQ ID NO: 2886676 - RNA, 19 nt, Artificial Sequence
  Description of Artificial Sequence: Synthetic oligonucleotide
auguauauauauauauaug

SEQ ID NO: 2886677 - RNA, 19 nt, Artificial Sequence
  Description of Artificial Sequence: Synthetic oligonucleotide
cacucagacauuuuaucac

SEQ ID NO: 2886678 - RNA, 19 nt, Artificial Sequence
  Description of Artificial Sequence: Synthetic oligonucleotide
caaucucaggauaaagcac

SEQ ID NO: 2886679 - RNA, 19 nt, Artificial Sequence
  Description of Artificial Sequence: Synthetic oligonucleotide
gaagacucugacuaaauau

SEQ ID NO: 2886680 - RNA, 19 nt, Artificial Sequence
  Description of Artificial Sequence: Synthetic oligonucleotide
acacacauacauacaauuc

SEQ ID NO: 2886681 - RNA, 19 nt, Artificial Sequence
  Description of Artificial Sequence: Synthetic oligonucleotide
aaggggucagagcaaagaa

SEQ ID NO: 2886682 - RNA, 19 nt, Artificial Sequence
  Description of Artificial Sequence: Synthetic oligonucleotide
agccuuagccucuaagcag

SEQ ID NO: 2886683 - RNA, 19 nt, Artificial Sequence
  Description of Artificial Sequence: Synthetic oligonucleotide
  modified_base (18)..(18): a, c, u, g, unknown or other
guauauauauauauauana

SEQ ID NO: 2886684 - RNA, 19 nt, Artificial Sequence
  Description of Artificial Sequence: Synthetic oligonucleotide
  modified_base (12)..(12): a, c, u, g, unknown or other
auauauauauanacacaca

SEQ ID NO: 2886685 - RNA, 19 nt, Artificial Sequence
  Description of Artificial Sequence: Synthetic oligonucleotide
uuuuagauguguucacuuu

SEQ ID NO: 2886686 - RNA, 19 nt, Artificial Sequence
  Description of Artificial Sequence: Synthetic oligonucleotide
aaagaagagagggcacaag

SEQ ID NO: 2886687 - RNA, 19 nt, Artificial Sequence
  Description of Artificial Sequence: Synthetic oligonucleotide
auauauauauauauauaua

SEQ ID NO: 2886688 - RNA, 19 nt, Artificial Sequence
  Description of Artificial Sequence: Synthetic oligonucleotide
uacauacaauucauacaca

SEQ ID NO: 2886689 - RNA, 19 nt, Artificial Sequence
  Description of Artificial Sequence: Synthetic oligonucleotide
ucaagagaguccugagagc

SEQ ID NO: 2886690 - RNA, 19 nt, Artificial Sequence
  Description of Artificial Sequence: Synthetic oligonucleotide
agugaaguaaauagcagau

SEQ ID NO: 2886691 - RNA, 19 nt, Artificial Sequence
  Description of Artificial Sequence: Synthetic oligonucleotide
caagcuagaagggccaggg

SEQ ID NO: 2886692 - RNA, 19 nt, Artificial Sequence
  Description of Artificial Sequence: Synthetic oligonucleotide
agaauggccaugaaggggu

SEQ ID NO: 2886693 - RNA, 19 nt, Artificial Sequence
  Description of Artificial Sequence: Synthetic oligonucleotide
uagauguguucacuuuccc

SEQ ID NO: 2886694 - RNA, 19 nt, Artificial Sequence
  Description of Artificial Sequence: Synthetic oligonucleotide
cauuuuaucaccuuuuauu

SEQ ID NO: 2886695 - RNA, 19 nt, Artificial Sequence
  Description of Artificial Sequence: Synthetic oligonucleotide
cauuguggagccagggaag

SEQ ID NO: 2886696 - RNA, 19 nt, Artificial Sequence
  Description of Artificial Sequence: Synthetic oligonucleotide
aggauaaagcacucagaca

SEQ ID NO: 2886697 - RNA, 19 nt, Artificial Sequence
  Description of Artificial Sequence: Synthetic oligonucleotide
aucaaaauucagacugagg

SEQ ID NO: 2886698 - RNA, 19 nt, Artificial Sequence
  Description of Artificial Sequence: Synthetic oligonucleotide
gagcaaagaagagagggca

SEQ ID NO: 2886699 - RNA, 19 nt, Artificial Sequence
  Description of Artificial Sequence: Synthetic oligonucleotide
gggaaagucaaccaaggga

SEQ ID NO: 2886700 - RNA, 19 nt, Artificial Sequence
  Description of Artificial Sequence: Synthetic oligonucleotide
gaaggggcauuguggagcc

SEQ ID NO: 2886701 - RNA, 19 nt, Artificial Sequence
  Description of Artificial Sequence: Synthetic oligonucleotide
acauuuuaucaccuuuuau

SEQ ID NO: 2886702 - RNA, 19 nt, Artificial Sequence
  Description of Artificial Sequence: Synthetic oligonucleotide
cauacaauucauacacaca

SEQ ID NO: 2886703 - RNA, 19 nt, Artificial Sequence
  Description of Artificial Sequence: Synthetic oligonucleotide
uguguuuguguguguauau

SEQ ID NO: 2886704 - RNA, 19 nt, Artificial Sequence
  Description of Artificial Sequence: Synthetic oligonucleotide
acacaucaaaauucagacu

SEQ ID NO: 2886705 - RNA, 19 nt, Artificial Sequence
  Description of Artificial Sequence: Synthetic oligonucleotide
gagccuuagccucuaagca

SEQ ID NO: 2886706 - RNA, 19 nt, Artificial Sequence
  Description of Artificial Sequence: Synthetic oligonucleotide
uggcaagggaaagucaacc

SEQ ID NO: 2886707 - RNA, 19 nt, Artificial Sequence
  Description of Artificial Sequence: Synthetic oligonucleotide
guauauauauauauaugua

SEQ ID NO: 2886708 - RNA, 19 nt, Artificial Sequence
  Description of Artificial Sequence: Synthetic oligonucleotide
uauguguguguuugugugu

SEQ ID NO: 2886709 - RNA, 19 nt, Artificial Sequence
  Description of Artificial Sequence: Synthetic oligonucleotide
caucaaaauucagacugag

SEQ ID NO: 2886710 - RNA, 19 nt, Artificial Sequence
  Description of Artificial Sequence: Synthetic oligonucleotide
agucaagagaguccugaga

SEQ ID NO: 2886711 - RNA, 19 nt, Artificial Sequence
  Description of Artificial Sequence: Synthetic oligonucleotide
  modified_base (8)..(8): a, c, u, g, unknown or other
auauauanacacacacaca

SEQ ID NO: 2886712 - RNA, 19 nt, Artificial Sequence
  Description of Artificial Sequence: Synthetic oligonucleotide
agaagggccagggaggcag

SEQ ID NO: 2886713 - RNA, 19 nt, Artificial Sequence
  Description of Artificial Sequence: Synthetic oligonucleotide
gaagagagggcacaagcua

SEQ ID NO: 2886714 - RNA, 19 nt, Artificial Sequence
  Description of Artificial Sequence: Synthetic oligonucleotide
ggaaagucaaccaagggaa

SEQ ID NO: 2886715 - RNA, 19 nt, Artificial Sequence
  Description of Artificial Sequence: Synthetic oligonucleotide
gaggcagggauuggcaagg

SEQ ID NO: 2886716 - RNA, 19 nt, Artificial Sequence
  Description of Artificial Sequence: Synthetic oligonucleotide
agggaaggggcauugugga

SEQ ID NO: 2886717 - RNA, 19 nt, Artificial Sequence
  Description of Artificial Sequence: Synthetic oligonucleotide
agccagggaagacucugac

SEQ ID NO: 2886718 - RNA, 19 nt, Artificial Sequence
  Description of Artificial Sequence: Synthetic oligonucleotide
gaaagucaaccaagggaag

SEQ ID NO: 2886719 - RNA, 19 nt, Artificial Sequence
  Description of Artificial Sequence: Synthetic oligonucleotide
caaaauucagacugaggaa

SEQ ID NO: 2886720 - RNA, 19 nt, Artificial Sequence
  Description of Artificial Sequence: Synthetic oligonucleotide
gacuaaauauauauauaua

SEQ ID NO: 2886721 - RNA, 19 nt, Artificial Sequence
  Description of Artificial Sequence: Synthetic oligonucleotide
acagucaagagaguccuga

SEQ ID NO: 2886722 - RNA, 19 nt, Artificial Sequence
  Description of Artificial Sequence: Synthetic oligonucleotide
aucaccuuuuauugcauuu

SEQ ID NO: 2886723 - RNA, 19 nt, Artificial Sequence
  Description of Artificial Sequence: Synthetic oligonucleotide
aaauucagacugaggaaaa

SEQ ID NO: 2886724 - RNA, 19 nt, Artificial Sequence
  Description of Artificial Sequence: Synthetic oligonucleotide
uguggagccagggaagacu

SEQ ID NO: 2886725 - RNA, 19 nt, Artificial Sequence
  Description of Artificial Sequence: Synthetic oligonucleotide
agagggcacaagcuagaag

SEQ ID NO: 2886726 - RNA, 19 nt, Artificial Sequence
  Description of Artificial Sequence: Synthetic oligonucleotide
uuaucaccuuuuauugcau

SEQ ID NO: 2886727 - RNA, 19 nt, Artificial Sequence
  Description of Artificial Sequence: Synthetic oligonucleotide
agcaaagaagagagggcac

SEQ ID NO: 2886728 - RNA, 19 nt, Artificial Sequence
  Description of Artificial Sequence: Synthetic oligonucleotide
acacagucaagagaguccu

SEQ ID NO: 2886729 - RNA, 19 nt, Artificial Sequence
  Description of Artificial Sequence: Synthetic oligonucleotide
agucaaccaagggaagggg

SEQ ID NO: 2886730 - RNA, 19 nt, Artificial Sequence
  Description of Artificial Sequence: Synthetic oligonucleotide
auuggcaagggaaagucaa

SEQ ID NO: 2886731 - RNA, 19 nt, Artificial Sequence
  Description of Artificial Sequence: Synthetic oligonucleotide
gacauuuuaucaccuuuua

SEQ ID NO: 2886732 - RNA, 19 nt, Artificial Sequence
  Description of Artificial Sequence: Synthetic oligonucleotide
uauauguauguguguguuu

SEQ ID NO: 2886733 - RNA, 19 nt, Artificial Sequence
  Description of Artificial Sequence: Synthetic oligonucleotide
  modified_base (4)..(4): a, c, u, g, unknown or other
auanacacacacacauaca

SEQ ID NO: 2886734 - RNA, 19 nt, Artificial Sequence
  Description of Artificial Sequence: Synthetic oligonucleotide
cugacuaaauauauauaua

SEQ ID NO: 2886735 - RNA, 19 nt, Artificial Sequence
  Description of Artificial Sequence: Synthetic oligonucleotide
uuggcaagggaaagucaac

SEQ ID NO: 2886736 - RNA, 19 nt, Artificial Sequence
  Description of Artificial Sequence: Synthetic oligonucleotide
ugaaggggucagagcaaag

SEQ ID NO: 2886737 - RNA, 19 nt, Artificial Sequence
  Description of Artificial Sequence: Synthetic oligonucleotide
auguguguguuugugugug

SEQ ID NO: 2886738 - RNA, 19 nt, Artificial Sequence
  Description of Artificial Sequence: Synthetic oligonucleotide
guauguauauauauauaua

SEQ ID NO: 2886739 - RNA, 19 nt, Artificial Sequence
  Description of Artificial Sequence: Synthetic oligonucleotide
agaagagagggcacaagcu

SEQ ID NO: 2886740 - RNA, 19 nt, Artificial Sequence
  Description of Artificial Sequence: Synthetic oligonucleotide
caacacagucaagagaguc

SEQ ID NO: 2886741 - RNA, 19 nt, Artificial Sequence
  Description of Artificial Sequence: Synthetic oligonucleotide
uguguguuuguguguguau

SEQ ID NO: 2886742 - RNA, 19 nt, Artificial Sequence
  Description of Artificial Sequence: Synthetic oligonucleotide
gaaggggucagagcaaaga

SEQ ID NO: 2886743 - RNA, 19 nt, Artificial Sequence
  Description of Artificial Sequence: Synthetic oligonucleotide
auaaagcacucagacauuu

SEQ ID NO: 2886744 - RNA, 19 nt, Artificial Sequence
  Description of Artificial Sequence: Synthetic oligonucleotide
  modified_base (2)..(2): a, c, u, g, unknown or other
anacacacacacauacaua

SEQ ID NO: 2886745 - RNA, 19 nt, Artificial Sequence
  Description of Artificial Sequence: Synthetic oligonucleotide
cuagaagggccagggaggc

SEQ ID NO: 2886746 - RNA, 19 nt, Artificial Sequence
  Description of Artificial Sequence: Synthetic oligonucleotide
acacauacauacaauucau

SEQ ID NO: 2886747 - RNA, 19 nt, Artificial Sequence
  Description of Artificial Sequence: Synthetic oligonucleotide
ucagacauuuuaucaccuu

SEQ ID NO: 2886748 - RNA, 19 nt, Artificial Sequence
  Description of Artificial Sequence: Synthetic oligonucleotide
guguauauauauauauaua

SEQ ID NO: 2886749 - RNA, 19 nt, Artificial Sequence
  Description of Artificial Sequence: Synthetic oligonucleotide
aagcacucagacauuuuau

SEQ ID NO: 2886750 - RNA, 19 nt, Artificial Sequence
  Description of Artificial Sequence: Synthetic oligonucleotide
gcuagaagggccagggagg

SEQ ID NO: 2886751 - RNA, 19 nt, Artificial Sequence
  Description of Artificial Sequence: Synthetic oligonucleotide
cagucaagagaguccugag

SEQ ID NO: 2886752 - RNA, 19 nt, Artificial Sequence
  Description of Artificial Sequence: Synthetic oligonucleotide
ggcacaagcuagaagggcc

SEQ ID NO: 2886753 - RNA, 19 nt, Artificial Sequence
  Description of Artificial Sequence: Synthetic oligonucleotide
aggggucagagcaaagaag

SEQ ID NO: 2886754 - RNA, 19 nt, Artificial Sequence
  Description of Artificial Sequence: Synthetic oligonucleotide
ugugaagaauggccaugaa

SEQ ID NO: 2886755 - RNA, 19 nt, Artificial Sequence
  Description of Artificial Sequence: Synthetic oligonucleotide
acaagcuagaagggccagg

SEQ ID NO: 2886756 - RNA, 19 nt, Artificial Sequence
  Description of Artificial Sequence: Synthetic oligonucleotide
agggauuggcaagggaaag

SEQ ID NO: 2886757 - RNA, 19 nt, Artificial Sequence
  Description of Artificial Sequence: Synthetic oligonucleotide
ccaugaaggggucagagca

SEQ ID NO: 2886758 - RNA, 19 nt, Artificial Sequence
  Description of Artificial Sequence: Synthetic oligonucleotide
ucaccuuuuauugcauuuu

SEQ ID NO: 2886759 - RNA, 19 nt, Artificial Sequence
  Description of Artificial Sequence: Synthetic oligonucleotide
gcacucagacauuuuauca

SEQ ID NO: 2886760 - RNA, 19 nt, Artificial Sequence
  Description of Artificial Sequence: Synthetic oligonucleotide
uaaagcacucagacauuuu

SEQ ID NO: 2886761 - RNA, 19 nt, Artificial Sequence
  Description of Artificial Sequence: Synthetic oligonucleotide
gucaaccaagggaaggggc

SEQ ID NO: 2886762 - RNA, 19 nt, Artificial Sequence
  Description of Artificial Sequence: Synthetic oligonucleotide
ucucaggauaaagcacuca

SEQ ID NO: 2886763 - RNA, 19 nt, Artificial Sequence
  Description of Artificial Sequence: Synthetic oligonucleotide
uaucaccuuuuauugcauu

SEQ ID NO: 2886764 - RNA, 19 nt, Artificial Sequence
  Description of Artificial Sequence: Synthetic oligonucleotide
aggggcauuguggagccag

SEQ ID NO: 2886765 - RNA, 19 nt, Artificial Sequence
  Description of Artificial Sequence: Synthetic oligonucleotide
acaucaaaauucagacuga

SEQ ID NO: 2886766 - RNA, 19 nt, Artificial Sequence
  Description of Artificial Sequence: Synthetic oligonucleotide
agacauuuuaucaccuuuu

SEQ ID NO: 2886767 - RNA, 19 nt, Artificial Sequence
  Description of Artificial Sequence: Synthetic oligonucleotide
ggggucagagcaaagaaga

SEQ ID NO: 2886768 - RNA, 19 nt, Artificial Sequence
  Description of Artificial Sequence: Synthetic oligonucleotide
auuguggagccagggaaga

SEQ ID NO: 2886769 - RNA, 19 nt, Artificial Sequence
  Description of Artificial Sequence: Synthetic oligonucleotide
aucucaggauaaagcacuc

SEQ ID NO: 2886770 - RNA, 19 nt, Artificial Sequence
  Description of Artificial Sequence: Synthetic oligonucleotide
agggcacaagcuagaaggg

SEQ ID NO: 2886771 - RNA, 19 nt, Artificial Sequence
  Description of Artificial Sequence: Synthetic oligonucleotide
gauuggcaagggaaaguca

SEQ ID NO: 2886772 - RNA, 19 nt, Artificial Sequence
  Description of Artificial Sequence: Synthetic oligonucleotide
ggaggcagggauuggcaag

SEQ ID NO: 2886773 - RNA, 19 nt, Artificial Sequence
  Description of Artificial Sequence: Synthetic oligonucleotide
uguguguguuugugugugu

SEQ ID NO: 2886774 - RNA, 19 nt, Artificial Sequence
  Description of Artificial Sequence: Synthetic oligonucleotide
aauggccaugaagggguca

SEQ ID NO: 2886775 - RNA, 19 nt, Artificial Sequence
  Description of Artificial Sequence: Synthetic oligonucleotide
  modified_base (6)..(6): a, c, u, g, unknown or other
auauanacacacacacaua

SEQ ID NO: 2886776 - RNA, 19 nt, Artificial Sequence
  Description of Artificial Sequence: Synthetic oligonucleotide
cuuagccucuaagcagggg

SEQ ID NO: 2886777 - RNA, 19 nt, Artificial Sequence
  Description of Artificial Sequence: Synthetic oligonucleotide
cucugacuaaauauauaua

SEQ ID NO: 2886778 - RNA, 19 nt, Artificial Sequence
  Description of Artificial Sequence: Synthetic oligonucleotide
guguguauauauauauaua

SEQ ID NO: 2886779 - RNA, 19 nt, Artificial Sequence
  Description of Artificial Sequence: Synthetic oligonucleotide
gcauuguggagccagggaa

SEQ ID NO: 2886780 - RNA, 19 nt, Artificial Sequence
  Description of Artificial Sequence: Synthetic oligonucleotide
cccacaacacagucaagag

SEQ ID NO: 2886781 - RNA, 19 nt, Artificial Sequence
  Description of Artificial Sequence: Synthetic oligonucleotide
ggucagagcaaagaagaga

SEQ ID NO: 2886782 - RNA, 19 nt, Artificial Sequence
  Description of Artificial Sequence: Synthetic oligonucleotide
aggcugugaagaauggcca

SEQ ID NO: 2886783 - RNA, 19 nt, Artificial Sequence
  Description of Artificial Sequence: Synthetic oligonucleotide
ggauuggcaagggaaaguc

SEQ ID NO: 2886784 - RNA, 19 nt, Artificial Sequence
  Description of Artificial Sequence: Synthetic oligonucleotide
guguauguauauauauaua

SEQ ID NO: 2886785 - RNA, 19 nt, Artificial Sequence
  Description of Artificial Sequence: Synthetic oligonucleotide
ggcaagggaaagucaacca

SEQ ID NO: 2886786 - RNA, 19 nt, Artificial Sequence
  Description of Artificial Sequence: Synthetic oligonucleotide
ccagggaagacucugacua

SEQ ID NO: 2886787 - RNA, 19 nt, Artificial Sequence
  Description of Artificial Sequence: Synthetic oligonucleotide
accaagggaaggggcauug

SEQ ID NO: 2886788 - RNA, 19 nt, Artificial Sequence
  Description of Artificial Sequence: Synthetic oligonucleotide
gaaguaaauagcagauuuu

SEQ ID NO: 2886789 - RNA, 19 nt, Artificial Sequence
  Description of Artificial Sequence: Synthetic oligonucleotide
cugugaagaauggccauga

SEQ ID NO: 2886790 - RNA, 19 nt, Artificial Sequence
  Description of Artificial Sequence: Synthetic oligonucleotide
gcaagggaaagucaaccaa

SEQ ID NO: 2886791 - RNA, 19 nt, Artificial Sequence
  Description of Artificial Sequence: Synthetic oligonucleotide
augaaggggucagagcaaa

SEQ ID NO: 2886792 - RNA, 19 nt, Artificial Sequence
  Description of Artificial Sequence: Synthetic oligonucleotide
agggaagacucugacuaaa

SEQ ID NO: 2886793 - RNA, 19 nt, Artificial Sequence
  Description of Artificial Sequence: Synthetic oligonucleotide
gacucugacuaaauauaua

SEQ ID NO: 2886794 - RNA, 19 nt, Artificial Sequence
  Description of Artificial Sequence: Synthetic oligonucleotide
cagggauuggcaagggaaa

SEQ ID NO: 2886795 - RNA, 19 nt, Artificial Sequence
  Description of Artificial Sequence: Synthetic oligonucleotide
agagaguccugagagccuu

SEQ ID NO: 2886796 - RNA, 19 nt, Artificial Sequence
  Description of Artificial Sequence: Synthetic oligonucleotide
cagggaggcagggauuggc

SEQ ID NO: 2886797 - RNA, 19 nt, Artificial Sequence
  Description of Artificial Sequence: Synthetic oligonucleotide
ggaagacucugacuaaaua

SEQ ID NO: 2886798 - RNA, 19 nt, Artificial Sequence
  Description of Artificial Sequence: Synthetic oligonucleotide
caugaaggggucagagcaa

SEQ ID NO: 2886799 - RNA, 19 nt, Artificial Sequence
  Description of Artificial Sequence: Synthetic oligonucleotide
cucagacauuuuaucaccu

SEQ ID NO: 2886800 - RNA, 19 nt, Artificial Sequence
  Description of Artificial Sequence: Synthetic oligonucleotide
gcaaagaagagagggcaca

SEQ ID NO: 2886801 - RNA, 19 nt, Artificial Sequence
  Description of Artificial Sequence: Synthetic oligonucleotide
ggagccagggaagacucug

SEQ ID NO: 2886802 - RNA, 19 nt, Artificial Sequence
  Description of Artificial Sequence: Synthetic oligonucleotide
guggagccagggaagacuc

SEQ ID NO: 2886803 - RNA, 19 nt, Artificial Sequence
  Description of Artificial Sequence: Synthetic oligonucleotide
guccugagagccuuagccu

SEQ ID NO: 2886804 - RNA, 19 nt, Artificial Sequence
  Description of Artificial Sequence: Synthetic oligonucleotide
uggagccagggaagacucu

SEQ ID NO: 2886805 - RNA, 19 nt, Artificial Sequence
  Description of Artificial Sequence: Synthetic oligonucleotide
guguguguauauauauaua

SEQ ID NO: 2886806 - RNA, 19 nt, Artificial Sequence
  Description of Artificial Sequence: Synthetic oligonucleotide
gaagggccagggaggcagg

SEQ ID NO: 2886807 - RNA, 19 nt, Artificial Sequence
  Description of Artificial Sequence: Synthetic oligonucleotide
gcagggauuggcaagggaa

SEQ ID NO: 2886808 - RNA, 19 nt, Artificial Sequence
  Description of Artificial Sequence: Synthetic oligonucleotide
caaagaagagagggcacaa

SEQ ID NO: 2886809 - RNA, 19 nt, Artificial Sequence
  Description of Artificial Sequence: Synthetic oligonucleotide
cacagucaagagaguccug

SEQ ID NO: 2886810 - RNA, 19 nt, Artificial Sequence
  Description of Artificial Sequence: Synthetic oligonucleotide
gcugugaagaauggccaug

SEQ ID NO: 2886811 - RNA, 19 nt, Artificial Sequence
  Description of Artificial Sequence: Synthetic oligonucleotide
cagacauuuuaucaccuuu

SEQ ID NO: 2886812 - RNA, 19 nt, Artificial Sequence
  Description of Artificial Sequence: Synthetic oligonucleotide
uuguggagccagggaagac

SEQ ID NO: 2886813 - RNA, 19 nt, Artificial Sequence
  Description of Artificial Sequence: Synthetic oligonucleotide
ggcauuguggagccaggga

SEQ ID NO: 2886814 - RNA, 19 nt, Artificial Sequence
  Description of Artificial Sequence: Synthetic oligonucleotide
acaacacagucaagagagu

SEQ ID NO: 2886815 - RNA, 19 nt, Artificial Sequence
  Description of Artificial Sequence: Synthetic oligonucleotide
gggucagagcaaagaagag

SEQ ID NO: 2886816 - RNA, 19 nt, Artificial Sequence
  Description of Artificial Sequence: Synthetic oligonucleotide
aaccaagggaaggggcauu

SEQ ID NO: 2886817 - RNA, 19 nt, Artificial Sequence
  Description of Artificial Sequence: Synthetic oligonucleotide
ugagagccuuagccucuaa

SEQ ID NO: 2886818 - RNA, 19 nt, Artificial Sequence
  Description of Artificial Sequence: Synthetic oligonucleotide
gggcacaagcuagaagggc

SEQ ID NO: 2886819 - RNA, 19 nt, Artificial Sequence
  Description of Artificial Sequence: Synthetic oligonucleotide
agggaggcagggauuggca

SEQ ID NO: 2886820 - RNA, 19 nt, Artificial Sequence
  Description of Artificial Sequence: Synthetic oligonucleotide
gggcauuguggagccaggg

SEQ ID NO: 2886821 - RNA, 19 nt, Artificial Sequence
  Description of Artificial Sequence: Synthetic oligonucleotide
ccuuagccucuaagcaggg

SEQ ID NO: 2886822 - RNA, 19 nt, Artificial Sequence
  Description of Artificial Sequence: Synthetic oligonucleotide
guguuuguguguguauaua

SEQ ID NO: 2886823 - RNA, 19 nt, Artificial Sequence
  Description of Artificial Sequence: Synthetic oligonucleotide
aggcagggauuggcaaggg

SEQ ID NO: 2886824 - RNA, 19 nt, Artificial Sequence
  Description of Artificial Sequence: Synthetic oligonucleotide
ccacaacacagucaagaga

SEQ ID NO: 2886825 - RNA, 19 nt, Artificial Sequence
  Description of Artificial Sequence: Synthetic oligonucleotide
gauaaagcacucagacauu

SEQ ID NO: 2886826 - RNA, 19 nt, Artificial Sequence
  Description of Artificial Sequence: Synthetic oligonucleotide
gaauggccaugaagggguc

SEQ ID NO: 2886827 - RNA, 19 nt, Artificial Sequence
  Description of Artificial Sequence: Synthetic oligonucleotide
guguguguuugugugugua

SEQ ID NO: 2886828 - RNA, 19 nt, Artificial Sequence
  Description of Artificial Sequence: Synthetic oligonucleotide
gagccagggaagacucuga

SEQ ID NO: 2886829 - RNA, 19 nt, Artificial Sequence
  Description of Artificial Sequence: Synthetic oligonucleotide
cagggaagacucugacuaa

SEQ ID NO: 2886830 - RNA, 19 nt, Artificial Sequence
  Description of Artificial Sequence: Synthetic oligonucleotide
gccagggaggcagggauug

SEQ ID NO: 2886831 - RNA, 19 nt, Artificial Sequence
  Description of Artificial Sequence: Synthetic oligonucleotide
ccccacaacacagucaaga

SEQ ID NO: 2886832 - RNA, 19 nt, Artificial Sequence
  Description of Artificial Sequence: Synthetic oligonucleotide
ccaggcugugaagaauggc

SEQ ID NO: 2886833 - RNA, 19 nt, Artificial Sequence
  Description of Artificial Sequence: Synthetic oligonucleotide
ggagccaggcugugaagaa

SEQ ID NO: 2886834 - RNA, 19 nt, Artificial Sequence
  Description of Artificial Sequence: Synthetic oligonucleotide
gugaaguaaauagcagauu

SEQ ID NO: 2886835 - RNA, 19 nt, Artificial Sequence
  Description of Artificial Sequence: Synthetic oligonucleotide
gcacaagcuagaagggcca

SEQ ID NO: 2886836 - RNA, 19 nt, Artificial Sequence
  Description of Artificial Sequence: Synthetic oligonucleotide
ggggcauuguggagccagg

SEQ ID NO: 2886837 - RNA, 19 nt, Artificial Sequence
  Description of Artificial Sequence: Synthetic oligonucleotide
gggaggcagggauuggcaa

SEQ ID NO: 2886838 - RNA, 19 nt, Artificial Sequence
  Description of Artificial Sequence: Synthetic oligonucleotide
ggcagggauuggcaaggga

SEQ ID NO: 2886839 - RNA, 19 nt, Artificial Sequence
  Description of Artificial Sequence: Synthetic oligonucleotide
aaggggcauuguggagcca

SEQ ID NO: 2886840 - RNA, 19 nt, Artificial Sequence
  Description of Artificial Sequence: Synthetic oligonucleotide
agggccagggaggcaggga

SEQ ID NO: 2886841 - RNA, 19 nt, Artificial Sequence
  Description of Artificial Sequence: Synthetic oligonucleotide
gggauuggcaagggaaagu

SEQ ID NO: 2886842 - RNA, 19 nt, Artificial Sequence
  Description of Artificial Sequence: Synthetic oligonucleotide
gagccaggcugugaagaau

SEQ ID NO: 2886843 - RNA, 19 nt, Artificial Sequence
  Description of Artificial Sequence: Synthetic oligonucleotide
ggcugugaagaauggccau

SEQ ID NO: 2886844 - RNA, 19 nt, Artificial Sequence
  Description of Artificial Sequence: Synthetic oligonucleotide
gccagggaagacucugacu

SEQ ID NO: 2886845 - RNA, 19 nt, Artificial Sequence
  Description of Artificial Sequence: Synthetic oligonucleotide
gagaguccugagagccuua

SEQ ID NO: 2886846 - RNA, 19 nt, Artificial Sequence
  Description of Artificial Sequence: Synthetic oligonucleotide
caaccaagggaaggggcau

SEQ ID NO: 2886847 - RNA, 19 nt, Artificial Sequence
  Description of Artificial Sequence: Synthetic oligonucleotide
gggccagggaggcagggau

SEQ ID NO: 2886848 - RNA, 19 nt, Artificial Sequence
  Description of Artificial Sequence: Synthetic oligonucleotide
cugagagccuuagccucua

SEQ ID NO: 2886849 - RNA, 19 nt, Artificial Sequence
  Description of Artificial Sequence: Synthetic oligonucleotide
gggaagacucugacuaaau

SEQ ID NO: 2886850 - RNA, 19 nt, Artificial Sequence
  Description of Artificial Sequence: Synthetic oligonucleotide
ccagggaggcagggauugg

SEQ ID NO: 2886851 - RNA, 19 nt, Artificial Sequence
  Description of Artificial Sequence: Synthetic oligonucleotide
ccugagagccuuagccucu

SEQ ID NO: 2886852 - RNA, 19 nt, Artificial Sequence
  Description of Artificial Sequence: Synthetic oligonucleotide
caggggagccaggcuguga

SEQ ID NO: 2886853 - RNA, 19 nt, Artificial Sequence
  Description of Artificial Sequence: Synthetic oligonucleotide
ggcaggggagccaggcugu

SEQ ID NO: 2886854 - RNA, 19 nt, Artificial Sequence
  Description of Artificial Sequence: Synthetic oligonucleotide
ccaagggaaggggcauugu

SEQ ID NO: 2886855 - RNA, 19 nt, Artificial Sequence
  Description of Artificial Sequence: Synthetic oligonucleotide
ggccagggaggcagggauu

SEQ ID NO: 2886856 - RNA, 19 nt, Artificial Sequence
  Description of Artificial Sequence: Synthetic oligonucleotide
  modified_base (1)..(1): a, c, u, g, unknown or other
nacacacacacauacauac

SEQ ID NO: 2886857 - RNA, 19 nt, Artificial Sequence
  Description of Artificial Sequence: Synthetic oligonucleotide
aagaguaaaaccuuuugcc

SEQ ID NO: 2886858 - RNA, 19 nt, Artificial Sequence
  Description of Artificial Sequence: Synthetic oligonucleotide
aguaugaacaaucuggugc

SEQ ID NO: 2886859 - RNA, 19 nt, Artificial Sequence
  Description of Artificial Sequence: Synthetic oligonucleotide
aaagaguaaaaccuuuugc

SEQ ID NO: 2886860 - RNA, 19 nt, Artificial Sequence
  Description of Artificial Sequence: Synthetic oligonucleotide
auauguauggauuuugugg

SEQ ID NO: 2886861 - RNA, 19 nt, Artificial Sequence
  Description of Artificial Sequence: Synthetic oligonucleotide
ucuaaaguagaauaaaaca

SEQ ID NO: 2886862 - RNA, 19 nt, Artificial Sequence
  Description of Artificial Sequence: Synthetic oligonucleotide
aguagaauaaaacauuuug

SEQ ID NO: 2886863 - RNA, 19 nt, Artificial Sequence
  Description of Artificial Sequence: Synthetic oligonucleotide
acuuuucacauuuauaggg

SEQ ID NO: 2886864 - RNA, 19 nt, Artificial Sequence
  Description of Artificial Sequence: Synthetic oligonucleotide
acacuuuucacauuuauag

SEQ ID NO: 2886865 - RNA, 19 nt, Artificial Sequence
  Description of Artificial Sequence: Synthetic oligonucleotide
uagaauaaaacauuuugcc

SEQ ID NO: 2886866 - RNA, 19 nt, Artificial Sequence
  Description of Artificial Sequence: Synthetic oligonucleotide
aacuuguaaacguauagug

SEQ ID NO: 2886867 - RNA, 19 nt, Artificial Sequence
  Description of Artificial Sequence: Synthetic oligonucleotide
uguuaaauuccuauuagga

SEQ ID NO: 2886868 - RNA, 19 nt, Artificial Sequence
  Description of Artificial Sequence: Synthetic oligonucleotide
aagauuucuccccagaaug

SEQ ID NO: 2886869 - RNA, 19 nt, Artificial Sequence
  Description of Artificial Sequence: Synthetic oligonucleotide
acacuguucacauaugugg

SEQ ID NO: 2886870 - RNA, 19 nt, Artificial Sequence
  Description of Artificial Sequence: Synthetic oligonucleotide
aagaguagaaaauguuuuc

SEQ ID NO: 2886871 - RNA, 19 nt, Artificial Sequence
  Description of Artificial Sequence: Synthetic oligonucleotide
aacguauagugacauuccc

SEQ ID NO: 2886872 - RNA, 19 nt, Artificial Sequence
  Description of Artificial Sequence: Synthetic oligonucleotide
aacaaucuggugcugauug

SEQ ID NO: 2886873 - RNA, 19 nt, Artificial Sequence
  Description of Artificial Sequence: Synthetic oligonucleotide
uuaaauuccuauuaggaau

SEQ ID NO: 2886874 - RNA, 19 nt, Artificial Sequence
  Description of Artificial Sequence: Synthetic oligonucleotide
ucuuuggugauccugaagu

SEQ ID NO: 2886875 - RNA, 19 nt, Artificial Sequence
  Description of Artificial Sequence: Synthetic oligonucleotide
aacauuuugccacauacau

SEQ ID NO: 2886876 - RNA, 19 nt, Artificial Sequence
  Description of Artificial Sequence: Synthetic oligonucleotide
aaugagucccuuuaugucu

SEQ ID NO: 2886877 - RNA, 19 nt, Artificial Sequence
  Description of Artificial Sequence: Synthetic oligonucleotide
cuuguaaacguauagugac

SEQ ID NO: 2886878 - RNA, 19 nt, Artificial Sequence
  Description of Artificial Sequence: Synthetic oligonucleotide
uuuaugucuucuaagggac

SEQ ID NO: 2886879 - RNA, 19 nt, Artificial Sequence
  Description of Artificial Sequence: Synthetic oligonucleotide
uucuaagggacgaggaucg

SEQ ID NO: 2886880 - RNA, 19 nt, Artificial Sequence
  Description of Artificial Sequence: Synthetic oligonucleotide
uuguuaaauuccuauuagg

SEQ ID NO: 2886881 - RNA, 19 nt, Artificial Sequence
  Description of Artificial Sequence: Synthetic oligonucleotide
uauguauggauuuuguggu

SEQ ID NO: 2886882 - RNA, 19 nt, Artificial Sequence
  Description of Artificial Sequence: Synthetic oligonucleotide
ugugggaaagaguaaaacc

SEQ ID NO: 2886883 - RNA, 19 nt, Artificial Sequence
  Description of Artificial Sequence: Synthetic oligonucleotide
uaaauuccuauuaggaaug

SEQ ID NO: 2886884 - RNA, 19 nt, Artificial Sequence
  Description of Artificial Sequence: Synthetic oligonucleotide
uaugaaagaguagaaaaug

SEQ ID NO: 2886885 - RNA, 19 nt, Artificial Sequence
  Description of Artificial Sequence: Synthetic oligonucleotide
uaaaguagaauaaaacauu

SEQ ID NO: 2886886 - RNA, 19 nt, Artificial Sequence
  Description of Artificial Sequence: Synthetic oligonucleotide
agcugaguaacuuguaaac

SEQ ID NO: 2886887 - RNA, 19 nt, Artificial Sequence
  Description of Artificial Sequence: Synthetic oligonucleotide
agaauaaaacauuuugcca

SEQ ID NO: 2886888 - RNA, 19 nt, Artificial Sequence
  Description of Artificial Sequence: Synthetic oligonucleotide
cugauugaggcuaucaagc

SEQ ID NO: 2886889 - RNA, 19 nt, Artificial Sequence
  Description of Artificial Sequence: Synthetic oligonucleotide
agaauggcgcaauuugugc

SEQ ID NO: 2886890 - RNA, 19 nt, Artificial Sequence
  Description of Artificial Sequence: Synthetic oligonucleotide
aaacguauagugacauucc

SEQ ID NO: 2886891 - RNA, 19 nt, Artificial Sequence
  Description of Artificial Sequence: Synthetic oligonucleotide
guaacuuguaaacguauag

SEQ ID NO: 2886892 - RNA, 19 nt, Artificial Sequence
  Description of Artificial Sequence: Synthetic oligonucleotide
gaaagaguaaaaccuuuug

SEQ ID NO: 2886893 - RNA, 19 nt, Artificial Sequence
  Description of Artificial Sequence: Synthetic oligonucleotide
uaaggucuaaaguagaaua

SEQ ID NO: 2886894 - RNA, 19 nt, Artificial Sequence
  Description of Artificial Sequence: Synthetic oligonucleotide
caauuugugccaaggaagg

SEQ ID NO: 2886895 - RNA, 19 nt, Artificial Sequence
  Description of Artificial Sequence: Synthetic oligonucleotide
cuuguuaaauuccuauuag

SEQ ID NO: 2886896 - RNA, 19 nt, Artificial Sequence
  Description of Artificial Sequence: Synthetic oligonucleotide
agaaaauguuuucccacac

SEQ ID NO: 2886897 - RNA, 19 nt, Artificial Sequence
  Description of Artificial Sequence: Synthetic oligonucleotide
uuccuauuaggaaugaguc

SEQ ID NO: 2886898 - RNA, 19 nt, Artificial Sequence
  Description of Artificial Sequence: Synthetic oligonucleotide
guagaauaaaacauuuugc

SEQ ID NO: 2886899 - RNA, 19 nt, Artificial Sequence
  Description of Artificial Sequence: Synthetic oligonucleotide
uaaacguauagugacauuc

SEQ ID NO: 2886900 - RNA, 19 nt, Artificial Sequence
  Description of Artificial Sequence: Synthetic oligonucleotide
uauagugacauuccccaca

SEQ ID NO: 2886901 - RNA, 19 nt, Artificial Sequence
  Description of Artificial Sequence: Synthetic oligonucleotide
gaguagaaaauguuuuccc

SEQ ID NO: 2886902 - RNA, 19 nt, Artificial Sequence
  Description of Artificial Sequence: Synthetic oligonucleotide
uauauguauggauuuugug

SEQ ID NO: 2886903 - RNA, 19 nt, Artificial Sequence
  Description of Artificial Sequence: Synthetic oligonucleotide
uuuguaagauuucucccca

SEQ ID NO: 2886904 - RNA, 19 nt, Artificial Sequence
  Description of Artificial Sequence: Synthetic oligonucleotide
uuuuaaggucuaaaguaga

SEQ ID NO: 2886905 - RNA, 19 nt, Artificial Sequence
  Description of Artificial Sequence: Synthetic oligonucleotide
auagugacauuccccacac

SEQ ID NO: 2886906 - RNA, 19 nt, Artificial Sequence
  Description of Artificial Sequence: Synthetic oligonucleotide
agaguaaaaccuuuugcca

SEQ ID NO: 2886907 - RNA, 19 nt, Artificial Sequence
  Description of Artificial Sequence: Synthetic oligonucleotide
uuauauguauggauuuugu

SEQ ID NO: 2886908 - RNA, 19 nt, Artificial Sequence
  Description of Artificial Sequence: Synthetic oligonucleotide
uaagagcugaguaacuugu

SEQ ID NO: 2886909 - RNA, 19 nt, Artificial Sequence
  Description of Artificial Sequence: Synthetic oligonucleotide
auuccccacacuuauaugu

SEQ ID NO: 2886910 - RNA, 19 nt, Artificial Sequence
  Description of Artificial Sequence: Synthetic oligonucleotide
aguagaaaauguuuuccca

SEQ ID NO: 2886911 - RNA, 19 nt, Artificial Sequence
  Description of Artificial Sequence: Synthetic oligonucleotide
ucaagccuagaaaagauuu

SEQ ID NO: 2886912 - RNA, 19 nt, Artificial Sequence
  Description of Artificial Sequence: Synthetic oligonucleotide
uuuaaggucuaaaguagaa

SEQ ID NO: 2886913 - RNA, 19 nt, Artificial Sequence
  Description of Artificial Sequence: Synthetic oligonucleotide
ugaaagaguagaaaauguu

SEQ ID NO: 2886914 - RNA, 19 nt, Artificial Sequence
  Description of Artificial Sequence: Synthetic oligonucleotide
uagaaaauguuuucccaca

SEQ ID NO: 2886915 - RNA, 19 nt, Artificial Sequence
  Description of Artificial Sequence: Synthetic oligonucleotide
aaagaguagaaaauguuuu

SEQ ID NO: 2886916 - RNA, 19 nt, Artificial Sequence
  Description of Artificial Sequence: Synthetic oligonucleotide
aaaguagaauaaaacauuu

SEQ ID NO: 2886917 - RNA, 19 nt, Artificial Sequence
  Description of Artificial Sequence: Synthetic oligonucleotide
uucaguaagagcugaguaa

SEQ ID NO: 2886918 - RNA, 19 nt, Artificial Sequence
  Description of Artificial Sequence: Synthetic oligonucleotide
aauggcgcaauuugugcca

SEQ ID NO: 2886919 - RNA, 19 nt, Artificial Sequence
  Description of Artificial Sequence: Synthetic oligonucleotide
cacuuuucacauuuauagg

SEQ ID NO: 2886920 - RNA, 19 nt, Artificial Sequence
  Description of Artificial Sequence: Synthetic oligonucleotide
ucaguaagagcugaguaac

SEQ ID NO: 2886921 - RNA, 19 nt, Artificial Sequence
  Description of Artificial Sequence: Synthetic oligonucleotide
uguaagauuucuccccaga

SEQ ID NO: 2886922 - RNA, 19 nt, Artificial Sequence
  Description of Artificial Sequence: Synthetic oligonucleotide
uuaugucuucuaagggacg

SEQ ID NO: 2886923 - RNA, 19 nt, Artificial Sequence
  Description of Artificial Sequence: Synthetic oligonucleotide
uuccacacuguucacauau

SEQ ID NO: 2886924 - RNA, 19 nt, Artificial Sequence
  Description of Artificial Sequence: Synthetic oligonucleotide
guuaaauuccuauuaggaa

SEQ ID NO: 2886925 - RNA, 19 nt, Artificial Sequence
  Description of Artificial Sequence: Synthetic oligonucleotide
gaauggcgcaauuugugcc

SEQ ID NO: 2886926 - RNA, 19 nt, Artificial Sequence
  Description of Artificial Sequence: Synthetic oligonucleotide
cacuguucacauauguggg

SEQ ID NO: 2886927 - RNA, 19 nt, Artificial Sequence
  Description of Artificial Sequence: Synthetic oligonucleotide
gaaguugugggaaagagua

SEQ ID NO: 2886928 - RNA, 19 nt, Artificial Sequence
  Description of Artificial Sequence: Synthetic oligonucleotide
ugauugaggcuaucaagcc

SEQ ID NO: 2886929 - RNA, 19 nt, Artificial Sequence
  Description of Artificial Sequence: Synthetic oligonucleotide
acuguucacauaugugggg

SEQ ID NO: 2886930 - RNA, 19 nt, Artificial Sequence
  Description of Artificial Sequence: Synthetic oligonucleotide
cuaaaguagaauaaaacau

SEQ ID NO: 2886931 - RNA, 19 nt, Artificial Sequence
  Description of Artificial Sequence: Synthetic oligonucleotide
uccuauuaggaaugagucc

SEQ ID NO: 2886932 - RNA, 19 nt, Artificial Sequence
  Description of Artificial Sequence: Synthetic oligonucleotide
uaucaagccuagaaaagau

SEQ ID NO: 2886933 - RNA, 19 nt, Artificial Sequence
  Description of Artificial Sequence: Synthetic oligonucleotide
gguaugaaagaguagaaaa

SEQ ID NO: 2886934 - RNA, 19 nt, Artificial Sequence
  Description of Artificial Sequence: Synthetic oligonucleotide
ugaaguugugggaaagagu

SEQ ID NO: 2886935 - RNA, 19 nt, Artificial Sequence
  Description of Artificial Sequence: Synthetic oligonucleotide
uuucuccccagaauggcgc

SEQ ID NO: 2886936 - RNA, 19 nt, Artificial Sequence
  Description of Artificial Sequence: Synthetic oligonucleotide
gugauccugaaguuguggg

SEQ ID NO: 2886937 - RNA, 19 nt, Artificial Sequence
  Description of Artificial Sequence: Synthetic oligonucleotide
acauaugugggguuucucu

SEQ ID NO: 2886938 - RNA, 19 nt, Artificial Sequence
  Description of Artificial Sequence: Synthetic oligonucleotide
uaagauuucuccccagaau

SEQ ID NO: 2886939 - RNA, 19 nt, Artificial Sequence
  Description of Artificial Sequence: Synthetic oligonucleotide
uuugugccaaggaagguau

SEQ ID NO: 2886940 - RNA, 19 nt, Artificial Sequence
  Description of Artificial Sequence: Synthetic oligonucleotide
caaggaagguaugaaagag

SEQ ID NO: 2886941 - RNA, 19 nt, Artificial Sequence
  Description of Artificial Sequence: Synthetic oligonucleotide
gaaugagucccuuuauguc

SEQ ID NO: 2886942 - RNA, 19 nt, Artificial Sequence
  Description of Artificial Sequence: Synthetic oligonucleotide
uaacuuguaaacguauagu

SEQ ID NO: 2886943 - RNA, 19 nt, Artificial Sequence
  Description of Artificial Sequence: Synthetic oligonucleotide
uuguaaacguauagugaca

SEQ ID NO: 2886944 - RNA, 19 nt, Artificial Sequence
  Description of Artificial Sequence: Synthetic oligonucleotide
cuuauauguauggauuuug

SEQ ID NO: 2886945 - RNA, 19 nt, Artificial Sequence
  Description of Artificial Sequence: Synthetic oligonucleotide
guaagagcugaguaacuug

SEQ ID NO: 2886946 - RNA, 19 nt, Artificial Sequence
  Description of Artificial Sequence: Synthetic oligonucleotide
ugaguaacuuguaaacgua

SEQ ID NO: 2886947 - RNA, 19 nt, Artificial Sequence
  Description of Artificial Sequence: Synthetic oligonucleotide
ccuauuaggaaugaguccc

SEQ ID NO: 2886948 - RNA, 19 nt, Artificial Sequence
  Description of Artificial Sequence: Synthetic oligonucleotide
auuccuauuaggaaugagu

SEQ ID NO: 2886949 - RNA, 19 nt, Artificial Sequence
  Description of Artificial Sequence: Synthetic oligonucleotide
acguauagugacauucccc

SEQ ID NO: 2886950 - RNA, 19 nt, Artificial Sequence
  Description of Artificial Sequence: Synthetic oligonucleotide
uaagggacgaggaucggaa

SEQ ID NO: 2886951 - RNA, 19 nt, Artificial Sequence
  Description of Artificial Sequence: Synthetic oligonucleotide
cagaauggagucuuuggug

SEQ ID NO: 2886952 - RNA, 19 nt, Artificial Sequence
  Description of Artificial Sequence: Synthetic oligonucleotide
aauuccuauuaggaaugag

SEQ ID NO: 2886953 - RNA, 19 nt, Artificial Sequence
  Description of Artificial Sequence: Synthetic oligonucleotide
uguaaacguauagugacau

SEQ ID NO: 2886954 - RNA, 19 nt, Artificial Sequence
  Description of Artificial Sequence: Synthetic oligonucleotide
ucccuuuaugucuucuaag

SEQ ID NO: 2886955 - RNA, 19 nt, Artificial Sequence
  Description of Artificial Sequence: Synthetic oligonucleotide
cugguguucaguaagagcu

SEQ ID NO: 2886956 - RNA, 19 nt, Artificial Sequence
  Description of Artificial Sequence: Synthetic oligonucleotide
gaggcuaucaagccuagaa

SEQ ID NO: 2886957 - RNA, 19 nt, Artificial Sequence
  Description of Artificial Sequence: Synthetic oligonucleotide
aacucucugguguucagua

SEQ ID NO: 2886958 - RNA, 19 nt, Artificial Sequence
  Description of Artificial Sequence: Synthetic oligonucleotide
ugacauuccccacacuuau

SEQ ID NO: 2886959 - RNA, 19 nt, Artificial Sequence
  Description of Artificial Sequence: Synthetic oligonucleotide
aaacauuuugccacauaca

SEQ ID NO: 2886960 - RNA, 19 nt, Artificial Sequence
  Description of Artificial Sequence: Synthetic oligonucleotide
aggaaugagucccuuuaug

SEQ ID NO: 2886961 - RNA, 19 nt, Artificial Sequence
  Description of Artificial Sequence: Synthetic oligonucleotide
augaaagaguagaaaaugu

SEQ ID NO: 2886962 - RNA, 19 nt, Artificial Sequence
  Description of Artificial Sequence: Synthetic oligonucleotide
uacaucacauuuguaagau

SEQ ID NO: 2886963 - RNA, 19 nt, Artificial Sequence
  Description of Artificial Sequence: Synthetic oligonucleotide
ugauccugaaguuguggga

SEQ ID NO: 2886964 - RNA, 19 nt, Artificial Sequence
  Description of Artificial Sequence: Synthetic oligonucleotide
cagaauggcgcaauuugug

SEQ ID NO: 2886965 - RNA, 19 nt, Artificial Sequence
  Description of Artificial Sequence: Synthetic oligonucleotide
cccuuuaugucuucuaagg

SEQ ID NO: 2886966 - RNA, 19 nt, Artificial Sequence
  Description of Artificial Sequence: Synthetic oligonucleotide
aaggucuaaaguagaauaa

SEQ ID NO: 2886967 - RNA, 19 nt, Artificial Sequence
  Description of Artificial Sequence: Synthetic oligonucleotide
ucuucuaagggacgaggau

SEQ ID NO: 2886968 - RNA, 19 nt, Artificial Sequence
  Description of Artificial Sequence: Synthetic oligonucleotide
gcaauuugugccaaggaag

SEQ ID NO: 2886969 - RNA, 19 nt, Artificial Sequence
  Description of Artificial Sequence: Synthetic oligonucleotide
aacuuuugccacacuuuuc

SEQ ID NO: 2886970 - RNA, 19 nt, Artificial Sequence
  Description of Artificial Sequence: Synthetic oligonucleotide
acuuguaaacguauaguga

SEQ ID NO: 2886971 - RNA, 19 nt, Artificial Sequence
  Description of Artificial Sequence: Synthetic oligonucleotide
uuaaggucuaaaguagaau

SEQ ID NO: 2886972 - RNA, 19 nt, Artificial Sequence
  Description of Artificial Sequence: Synthetic oligonucleotide
gcugauugaggcuaucaag

SEQ ID NO: 2886973 - RNA, 19 nt, Artificial Sequence
  Description of Artificial Sequence: Synthetic oligonucleotide
gauuucuccccagaauggc

SEQ ID NO: 2886974 - RNA, 19 nt, Artificial Sequence
  Description of Artificial Sequence: Synthetic oligonucleotide
cauaugugggguuucucuc

SEQ ID NO: 2886975 - RNA, 19 nt, Artificial Sequence
  Description of Artificial Sequence: Synthetic oligonucleotide
agauuucuccccagaaugg

SEQ ID NO: 2886976 - RNA, 19 nt, Artificial Sequence
  Description of Artificial Sequence: Synthetic oligonucleotide
ugugccaaggaagguauga

SEQ ID NO: 2886977 - RNA, 19 nt, Artificial Sequence
  Description of Artificial Sequence: Synthetic oligonucleotide
ugggaaagaguaaaaccuu

SEQ ID NO: 2886978 - RNA, 19 nt, Artificial Sequence
  Description of Artificial Sequence: Synthetic oligonucleotide
cugaaguugugggaaagag

SEQ ID NO: 2886979 - RNA, 19 nt, Artificial Sequence
  Description of Artificial Sequence: Synthetic oligonucleotide
aaggaagguaugaaagagu

SEQ ID NO: 2886980 - RNA, 19 nt, Artificial Sequence
  Description of Artificial Sequence: Synthetic oligonucleotide
ugcugauugaggcuaucaa

SEQ ID NO: 2886981 - RNA, 19 nt, Artificial Sequence
  Description of Artificial Sequence: Synthetic oligonucleotide
uugugggaaagaguaaaac

SEQ ID NO: 2886982 - RNA, 19 nt, Artificial Sequence
  Description of Artificial Sequence: Synthetic oligonucleotide
uguucaguaagagcugagu

SEQ ID NO: 2886983 - RNA, 19 nt, Artificial Sequence
  Description of Artificial Sequence: Synthetic oligonucleotide
agagcugaguaacuuguaa

SEQ ID NO: 2886984 - RNA, 19 nt, Artificial Sequence
  Description of Artificial Sequence: Synthetic oligonucleotide
cuucuaagggacgaggauc

SEQ ID NO: 2886985 - RNA, 19 nt, Artificial Sequence
  Description of Artificial Sequence: Synthetic oligonucleotide
uuguaagauuucuccccag

SEQ ID NO: 2886986 - RNA, 19 nt, Artificial Sequence
  Description of Artificial Sequence: Synthetic oligonucleotide
ugguguucaguaagagcug

SEQ ID NO: 2886987 - RNA, 19 nt, Artificial Sequence
  Description of Artificial Sequence: Synthetic oligonucleotide
aguugugggaaagaguaaa

SEQ ID NO: 2886988 - RNA, 19 nt, Artificial Sequence
  Description of Artificial Sequence: Synthetic oligonucleotide
guaugaacaaucuggugcu

SEQ ID NO: 2886989 - RNA, 19 nt, Artificial Sequence
  Description of Artificial Sequence: Synthetic oligonucleotide
ugaacaaucuggugcugau

SEQ ID NO: 2886990 - RNA, 19 nt, Artificial Sequence
  Description of Artificial Sequence: Synthetic oligonucleotide
gcugaguaacuuguaaacg

SEQ ID NO: 2886991 - RNA, 19 nt, Artificial Sequence
  Description of Artificial Sequence: Synthetic oligonucleotide
aaauuccuauuaggaauga

SEQ ID NO: 2886992 - RNA, 19 nt, Artificial Sequence
  Description of Artificial Sequence: Synthetic oligonucleotide
cuaucaagccuagaaaaga

SEQ ID NO: 2886993 - RNA, 19 nt, Artificial Sequence
  Description of Artificial Sequence: Synthetic oligonucleotide
aauuugugccaaggaaggu

SEQ ID NO: 2886994 - RNA, 19 nt, Artificial Sequence
  Description of Artificial Sequence: Synthetic oligonucleotide
caaucuggugcugauugag

SEQ ID NO: 2886995 - RNA, 19 nt, Artificial Sequence
  Description of Artificial Sequence: Synthetic oligonucleotide
gugggaaagaguaaaaccu

SEQ ID NO: 2886996 - RNA, 19 nt, Artificial Sequence
  Description of Artificial Sequence: Synthetic oligonucleotide
ccuuuaugucuucuaaggg

SEQ ID NO: 2886997 - RNA, 19 nt, Artificial Sequence
  Description of Artificial Sequence: Synthetic oligonucleotide
gagcugaguaacuuguaaa

SEQ ID NO: 2886998 - RNA, 19 nt, Artificial Sequence
  Description of Artificial Sequence: Synthetic oligonucleotide
gaaagaguagaaaauguuu

SEQ ID NO: 2886999 - RNA, 19 nt, Artificial Sequence
  Description of Artificial Sequence: Synthetic oligonucleotide
ugccaaggaagguaugaaa

SEQ ID NO: 2887000 - RNA, 19 nt, Artificial Sequence
  Description of Artificial Sequence: Synthetic oligonucleotide
cugaguaacuuguaaacgu

SEQ ID NO: 2887001 - RNA, 19 nt, Artificial Sequence
  Description of Artificial Sequence: Synthetic oligonucleotide
gccaaggaagguaugaaag

SEQ ID NO: 2887002 - RNA, 19 nt, Artificial Sequence
  Description of Artificial Sequence: Synthetic oligonucleotide
guaagauuucuccccagaa

SEQ ID NO: 2887003 - RNA, 19 nt, Artificial Sequence
  Description of Artificial Sequence: Synthetic oligonucleotide
aaguagaauaaaacauuuu

SEQ ID NO: 2887004 - RNA, 19 nt, Artificial Sequence
  Description of Artificial Sequence: Synthetic oligonucleotide
caucacauuuguaagauuu

SEQ ID NO: 2887005 - RNA, 19 nt, Artificial Sequence
  Description of Artificial Sequence: Synthetic oligonucleotide
ugaacucucugguguucag

SEQ ID NO: 2887006 - RNA, 19 nt, Artificial Sequence
  Description of Artificial Sequence: Synthetic oligonucleotide
acacuuauauguauggauu

SEQ ID NO: 2887007 - RNA, 19 nt, Artificial Sequence
  Description of Artificial Sequence: Synthetic oligonucleotide
guucaguaagagcugagua

SEQ ID NO: 2887008 - RNA, 19 nt, Artificial Sequence
  Description of Artificial Sequence: Synthetic oligonucleotide
aggaagguaugaaagagua

SEQ ID NO: 2887009 - RNA, 19 nt, Artificial Sequence
  Description of Artificial Sequence: Synthetic oligonucleotide
gauccugaaguugugggaa

SEQ ID NO: 2887010 - RNA, 19 nt, Artificial Sequence
  Description of Artificial Sequence: Synthetic oligonucleotide
auugaggcuaucaagccua

SEQ ID NO: 2887011 - RNA, 19 nt, Artificial Sequence
  Description of Artificial Sequence: Synthetic oligonucleotide
aggcuaucaagccuagaaa

SEQ ID NO: 2887012 - RNA, 19 nt, Artificial Sequence
  Description of Artificial Sequence: Synthetic oligonucleotide
ggcuaucaagccuagaaaa

SEQ ID NO: 2887013 - RNA, 19 nt, Artificial Sequence
  Description of Artificial Sequence: Synthetic oligonucleotide
uccugaaguugugggaaag

SEQ ID NO: 2887014 - RNA, 19 nt, Artificial Sequence
  Description of Artificial Sequence: Synthetic oligonucleotide
aguaagagcugaguaacuu

SEQ ID NO: 2887015 - RNA, 19 nt, Artificial Sequence
  Description of Artificial Sequence: Synthetic oligonucleotide
gaaaauguuuucccacacu

SEQ ID NO: 2887016 - RNA, 19 nt, Artificial Sequence
  Description of Artificial Sequence: Synthetic oligonucleotide
auuugugccaaggaaggua

SEQ ID NO: 2887017 - RNA, 19 nt, Artificial Sequence
  Description of Artificial Sequence: Synthetic oligonucleotide
cuuuucacauuuauagggu

SEQ ID NO: 2887018 - RNA, 19 nt, Artificial Sequence
  Description of Artificial Sequence: Synthetic oligonucleotide
uugaggcuaucaagccuag

SEQ ID NO: 2887019 - RNA, 19 nt, Artificial Sequence
  Description of Artificial Sequence: Synthetic oligonucleotide
gauugaggcuaucaagccu

SEQ ID NO: 2887020 - RNA, 19 nt, Artificial Sequence
  Description of Artificial Sequence: Synthetic oligonucleotide
cccacacuuauauguaugg

SEQ ID NO: 2887021 - RNA, 19 nt, Artificial Sequence
  Description of Artificial Sequence: Synthetic oligonucleotide
aggucuaaaguagaauaaa

SEQ ID NO: 2887022 - RNA, 19 nt, Artificial Sequence
  Description of Artificial Sequence: Synthetic oligonucleotide
gcuaucaagccuagaaaag

SEQ ID NO: 2887023 - RNA, 19 nt, Artificial Sequence
  Description of Artificial Sequence: Synthetic oligonucleotide
auguuuucccacacucuuc

SEQ ID NO: 2887024 - RNA, 19 nt, Artificial Sequence
  Description of Artificial Sequence: Synthetic oligonucleotide
acaaucuggugcugauuga

SEQ ID NO: 2887025 - RNA, 19 nt, Artificial Sequence
  Description of Artificial Sequence: Synthetic oligonucleotide
uuccccacacuuauaugua

SEQ ID NO: 2887026 - RNA, 19 nt, Artificial Sequence
  Description of Artificial Sequence: Synthetic oligonucleotide
augaacaaucuggugcuga

SEQ ID NO: 2887027 - RNA, 19 nt, Artificial Sequence
  Description of Artificial Sequence: Synthetic oligonucleotide
agggacgaggaucggaaaa

SEQ ID NO: 2887028 - RNA, 19 nt, Artificial Sequence
  Description of Artificial Sequence: Synthetic oligonucleotide
acuuauauguauggauuuu

SEQ ID NO: 2887029 - RNA, 19 nt, Artificial Sequence
  Description of Artificial Sequence: Synthetic oligonucleotide
guauagugacauuccccac

SEQ ID NO: 2887030 - RNA, 19 nt, Artificial Sequence
  Description of Artificial Sequence: Synthetic oligonucleotide
ggaaugagucccuuuaugu

SEQ ID NO: 2887031 - RNA, 19 nt, Artificial Sequence
  Description of Artificial Sequence: Synthetic oligonucleotide
cacacuuauauguauggau

SEQ ID NO: 2887032 - RNA, 19 nt, Artificial Sequence
  Description of Artificial Sequence: Synthetic oligonucleotide
cauuccccacacuuauaug

SEQ ID NO: 2887033 - RNA, 19 nt, Artificial Sequence
  Description of Artificial Sequence: Synthetic oligonucleotide
uaugaacaaucuggugcug

SEQ ID NO: 2887034 - RNA, 19 nt, Artificial Sequence
  Description of Artificial Sequence: Synthetic oligonucleotide
ggugauccugaaguugugg

SEQ ID NO: 2887035 - RNA, 19 nt, Artificial Sequence
  Description of Artificial Sequence: Synthetic oligonucleotide
uggugauccugaaguugug

SEQ ID NO: 2887036 - RNA, 19 nt, Artificial Sequence
  Description of Artificial Sequence: Synthetic oligonucleotide
aguaacuuguaaacguaua

SEQ ID NO: 2887037 - RNA, 19 nt, Artificial Sequence
  Description of Artificial Sequence: Synthetic oligonucleotide
guaugaaagaguagaaaau

SEQ ID NO: 2887038 - RNA, 19 nt, Artificial Sequence
  Description of Artificial Sequence: Synthetic oligonucleotide
uguucacauaugugggguu

SEQ ID NO: 2887039 - RNA, 19 nt, Artificial Sequence
  Description of Artificial Sequence: Synthetic oligonucleotide
ucuaagggacgaggaucgg

SEQ ID NO: 2887040 - RNA, 19 nt, Artificial Sequence
  Description of Artificial Sequence: Synthetic oligonucleotide
cacacuuuucacauuuaua

SEQ ID NO: 2887041 - RNA, 19 nt, Artificial Sequence
  Description of Artificial Sequence: Synthetic oligonucleotide
aagggacgaggaucggaaa

SEQ ID NO: 2887042 - RNA, 19 nt, Artificial Sequence
  Description of Artificial Sequence: Synthetic oligonucleotide
cguauagugacauucccca

SEQ ID NO: 2887043 - RNA, 19 nt, Artificial Sequence
  Description of Artificial Sequence: Synthetic oligonucleotide
ggcgcaauuugugccaagg

SEQ ID NO: 2887044 - RNA, 19 nt, Artificial Sequence
  Description of Artificial Sequence: Synthetic oligonucleotide
augaacucucugguguuca

SEQ ID NO: 2887045 - RNA, 19 nt, Artificial Sequence
  Description of Artificial Sequence: Synthetic oligonucleotide
gucccuuuaugucuucuaa

SEQ ID NO: 2887046 - RNA, 19 nt, Artificial Sequence
  Description of Artificial Sequence: Synthetic oligonucleotide
uccccacacuuauauguau

SEQ ID NO: 2887047 - RNA, 19 nt, Artificial Sequence
  Description of Artificial Sequence: Synthetic oligonucleotide
uugugccaaggaagguaug

SEQ ID NO: 2887048 - RNA, 19 nt, Artificial Sequence
  Description of Artificial Sequence: Synthetic oligonucleotide
uucuccccagaauggcgca

SEQ ID NO: 2887049 - RNA, 19 nt, Artificial Sequence
  Description of Artificial Sequence: Synthetic oligonucleotide
ggucuaaaguagaauaaaa

SEQ ID NO: 2887050 - RNA, 19 nt, Artificial Sequence
  Description of Artificial Sequence: Synthetic oligonucleotide
ggaagguaugaaagaguag

SEQ ID NO: 2887051 - RNA, 19 nt, Artificial Sequence
  Description of Artificial Sequence: Synthetic oligonucleotide
agucccuuuaugucuucua

SEQ ID NO: 2887052 - RNA, 19 nt, Artificial Sequence
  Description of Artificial Sequence: Synthetic oligonucleotide
acaucacauuuguaagauu

SEQ ID NO: 2887053 - RNA, 19 nt, Artificial Sequence
  Description of Artificial Sequence: Synthetic oligonucleotide
ggagucuuuggugauccug

SEQ ID NO: 2887054 - RNA, 19 nt, Artificial Sequence
  Description of Artificial Sequence: Synthetic oligonucleotide
aaguugugggaaagaguaa

SEQ ID NO: 2887055 - RNA, 19 nt, Artificial Sequence
  Description of Artificial Sequence: Synthetic oligonucleotide
uauuaggaaugagucccuu

SEQ ID NO: 2887056 - RNA, 19 nt, Artificial Sequence
  Description of Artificial Sequence: Synthetic oligonucleotide
guguucaguaagagcugag

SEQ ID NO: 2887057 - RNA, 19 nt, Artificial Sequence
  Description of Artificial Sequence: Synthetic oligonucleotide
auccugaaguugugggaaa

SEQ ID NO: 2887058 - RNA, 19 nt, Artificial Sequence
  Description of Artificial Sequence: Synthetic oligonucleotide
aucaagccuagaaaagauu

SEQ ID NO: 2887059 - RNA, 19 nt, Artificial Sequence
  Description of Artificial Sequence: Synthetic oligonucleotide
ccaaggaagguaugaaaga

SEQ ID NO: 2887060 - RNA, 19 nt, Artificial Sequence
  Description of Artificial Sequence: Synthetic oligonucleotide
cacuuauauguauggauuu

SEQ ID NO: 2887061 - RNA, 19 nt, Artificial Sequence
  Description of Artificial Sequence: Synthetic oligonucleotide
gaguaacuuguaaacguau

SEQ ID NO: 2887062 - RNA, 19 nt, Artificial Sequence
  Description of Artificial Sequence: Synthetic oligonucleotide
aagagcugaguaacuugua

SEQ ID NO: 2887063 - RNA, 19 nt, Artificial Sequence
  Description of Artificial Sequence: Synthetic oligonucleotide
cuaagggacgaggaucgga

SEQ ID NO: 2887064 - RNA, 19 nt, Artificial Sequence
  Description of Artificial Sequence: Synthetic oligonucleotide
uagugacauuccccacacu

SEQ ID NO: 2887065 - RNA, 19 nt, Artificial Sequence
  Description of Artificial Sequence: Synthetic oligonucleotide
gguguucaguaagagcuga

SEQ ID NO: 2887066 - RNA, 19 nt, Artificial Sequence
  Description of Artificial Sequence: Synthetic oligonucleotide
gaauggagucuuuggugau

SEQ ID NO: 2887067 - RNA, 19 nt, Artificial Sequence
  Description of Artificial Sequence: Synthetic oligonucleotide
uggcgcaauuugugccaag

SEQ ID NO: 2887068 - RNA, 19 nt, Artificial Sequence
  Description of Artificial Sequence: Synthetic oligonucleotide
gugcugauugaggcuauca

SEQ ID NO: 2887069 - RNA, 19 nt, Artificial Sequence
  Description of Artificial Sequence: Synthetic oligonucleotide
ugaggcuaucaagccuaga

SEQ ID NO: 2887070 - RNA, 19 nt, Artificial Sequence
  Description of Artificial Sequence: Synthetic oligonucleotide
gguuucacuccagaaugga

SEQ ID NO: 2887071 - RNA, 19 nt, Artificial Sequence
  Description of Artificial Sequence: Synthetic oligonucleotide
cacauaugugggguuucuc

SEQ ID NO: 2887072 - RNA, 19 nt, Artificial Sequence
  Description of Artificial Sequence: Synthetic oligonucleotide
ccccacacuuauauguaug

SEQ ID NO: 2887073 - RNA, 19 nt, Artificial Sequence
  Description of Artificial Sequence: Synthetic oligonucleotide
ugagucccuuuaugucuuc

SEQ ID NO: 2887074 - RNA, 19 nt, Artificial Sequence
  Description of Artificial Sequence: Synthetic oligonucleotide
uggugcugauugaggcuau

SEQ ID NO: 2887075 - RNA, 19 nt, Artificial Sequence
  Description of Artificial Sequence: Synthetic oligonucleotide
augagucccuuuaugucuu

SEQ ID NO: 2887076 - RNA, 19 nt, Artificial Sequence
  Description of Artificial Sequence: Synthetic oligonucleotide
uggagucuuuggugauccu

SEQ ID NO: 2887077 - RNA, 19 nt, Artificial Sequence
  Description of Artificial Sequence: Synthetic oligonucleotide
gugacauuccccacacuua

SEQ ID NO: 2887078 - RNA, 19 nt, Artificial Sequence
  Description of Artificial Sequence: Synthetic oligonucleotide
cuggugcugauugaggcua

SEQ ID NO: 2887079 - RNA, 19 nt, Artificial Sequence
  Description of Artificial Sequence: Synthetic oligonucleotide
cuguucacauauguggggu

SEQ ID NO: 2887080 - RNA, 19 nt, Artificial Sequence
  Description of Artificial Sequence: Synthetic oligonucleotide
uccccagaauggcgcaauu

SEQ ID NO: 2887081 - RNA, 19 nt, Artificial Sequence
  Description of Artificial Sequence: Synthetic oligonucleotide
gaacucucugguguucagu

SEQ ID NO: 2887082 - RNA, 19 nt, Artificial Sequence
  Description of Artificial Sequence: Synthetic oligonucleotide
gugccaaggaagguaugaa

SEQ ID NO: 2887083 - RNA, 19 nt, Artificial Sequence
  Description of Artificial Sequence: Synthetic oligonucleotide
ucuccccagaauggcgcaa

SEQ ID NO: 2887084 - RNA, 19 nt, Artificial Sequence
  Description of Artificial Sequence: Synthetic oligonucleotide
guaaacguauagugacauu

SEQ ID NO: 2887085 - RNA, 19 nt, Artificial Sequence
  Description of Artificial Sequence: Synthetic oligonucleotide
cuuuggugauccugaaguu

SEQ ID NO: 2887086 - RNA, 19 nt, Artificial Sequence
  Description of Artificial Sequence: Synthetic oligonucleotide
caguaagagcugaguaacu

SEQ ID NO: 2887087 - RNA, 19 nt, Artificial Sequence
  Description of Artificial Sequence: Synthetic oligonucleotide
gcgcaauuugugccaagga

SEQ ID NO: 2887088 - RNA, 19 nt, Artificial Sequence
  Description of Artificial Sequence: Synthetic oligonucleotide
cgcaauuugugccaaggaa

SEQ ID NO: 2887089 - RNA, 19 nt, Artificial Sequence
  Description of Artificial Sequence: Synthetic oligonucleotide
guucacauaugugggguuu

SEQ ID NO: 2887090 - RNA, 19 nt, Artificial Sequence
  Description of Artificial Sequence: Synthetic oligonucleotide
auggcgcaauuugugccaa

SEQ ID NO: 2887091 - RNA, 19 nt, Artificial Sequence
  Description of Artificial Sequence: Synthetic oligonucleotide
ggaaagaguaaaaccuuuu

SEQ ID NO: 2887092 - RNA, 19 nt, Artificial Sequence
  Description of Artificial Sequence: Synthetic oligonucleotide
gaacaaucuggugcugauu

SEQ ID NO: 2887093 - RNA, 19 nt, Artificial Sequence
  Description of Artificial Sequence: Synthetic oligonucleotide
gagucccuuuaugucuucu

SEQ ID NO: 2887094 - RNA, 19 nt, Artificial Sequence
  Description of Artificial Sequence: Synthetic oligonucleotide
gggaaagaguaaaaccuuu

SEQ ID NO: 2887095 - RNA, 19 nt, Artificial Sequence
  Description of Artificial Sequence: Synthetic oligonucleotide
ccacacuuauauguaugga

SEQ ID NO: 2887096 - RNA, 19 nt, Artificial Sequence
  Description of Artificial Sequence: Synthetic oligonucleotide
ccugaaguugugggaaaga

SEQ ID NO: 2887097 - RNA, 19 nt, Artificial Sequence
  Description of Artificial Sequence: Synthetic oligonucleotide
ggugcugauugaggcuauc

SEQ ID NO: 2887098 - RNA, 19 nt, Artificial Sequence
  Description of Artificial Sequence: Synthetic oligonucleotide
ccacacuuuucacauuuau

SEQ ID NO: 2887099 - RNA, 19 nt, Artificial Sequence
  Description of Artificial Sequence: Synthetic oligonucleotide
cuccccagaauggcgcaau

SEQ ID NO: 2887100 - RNA, 19 nt, Artificial Sequence
  Description of Artificial Sequence: Synthetic oligonucleotide
gccacacuuuucacauuua

SEQ ID NO: 2887101 - RNA, 19 nt, Artificial Sequence
  Description of Artificial Sequence: Synthetic oligonucleotide
ccccagaauggcgcaauuu

SEQ ID NO: 2887102 - RNA, 19 nt, Artificial Sequence
  Description of Artificial Sequence: Synthetic oligonucleotide
ucuggauucagguaaaccg

SEQ ID NO: 2887103 - RNA, 19 nt, Artificial Sequence
  Description of Artificial Sequence: Synthetic oligonucleotide
aauaugaggauccauuggu

SEQ ID NO: 2887104 - RNA, 19 nt, Artificial Sequence
  Description of Artificial Sequence: Synthetic oligonucleotide
aaaauaugaggauccauug

SEQ ID NO: 2887105 - RNA, 19 nt, Artificial Sequence
  Description of Artificial Sequence: Synthetic oligonucleotide
gaagaggcaaaauaugagg

SEQ ID NO: 2887106 - RNA, 19 nt, Artificial Sequence
  Description of Artificial Sequence: Synthetic oligonucleotide
aaauaugaggauccauugg

SEQ ID NO: 2887107 - RNA, 19 nt, Artificial Sequence
  Description of Artificial Sequence: Synthetic oligonucleotide
ugaucauccauguauacgc

SEQ ID NO: 2887108 - RNA, 19 nt, Artificial Sequence
  Description of Artificial Sequence: Synthetic oligonucleotide
auaaugaucauccauguau

SEQ ID NO: 2887109 - RNA, 19 nt, Artificial Sequence
  Description of Artificial Sequence: Synthetic oligonucleotide
gauauuuccaaauaaccuc

SEQ ID NO: 2887110 - RNA, 19 nt, Artificial Sequence
  Description of Artificial Sequence: Synthetic oligonucleotide
aaggagauucgguagcggc

SEQ ID NO: 2887111 - RNA, 19 nt, Artificial Sequence
  Description of Artificial Sequence: Synthetic oligonucleotide
ugauauuuccaaauaaccu

SEQ ID NO: 2887112 - RNA, 19 nt, Artificial Sequence
  Description of Artificial Sequence: Synthetic oligonucleotide
aauaaccuccacaauaggg

SEQ ID NO: 2887113 - RNA, 19 nt, Artificial Sequence
  Description of Artificial Sequence: Synthetic oligonucleotide
cauguauacgcccacaggg

SEQ ID NO: 2887114 - RNA, 19 nt, Artificial Sequence
  Description of Artificial Sequence: Synthetic oligonucleotide
aaugaucauccauguauac

SEQ ID NO: 2887115 - RNA, 19 nt, Artificial Sequence
  Description of Artificial Sequence: Synthetic oligonucleotide
uggcauaugaccaucaggu

SEQ ID NO: 2887116 - RNA, 19 nt, Artificial Sequence
  Description of Artificial Sequence: Synthetic oligonucleotide
uguuucuguauauaugugc

SEQ ID NO: 2887117 - RNA, 19 nt, Artificial Sequence
  Description of Artificial Sequence: Synthetic oligonucleotide
auauuuccaaauaaccucc

SEQ ID NO: 2887118 - RNA, 19 nt, Artificial Sequence
  Description of Artificial Sequence: Synthetic oligonucleotide
caaauaaccuccacaauag

SEQ ID NO: 2887119 - RNA, 19 nt, Artificial Sequence
  Description of Artificial Sequence: Synthetic oligonucleotide
caucagguggcauaggugg

SEQ ID NO: 2887120 - RNA, 19 nt, Artificial Sequence
  Description of Artificial Sequence: Synthetic oligonucleotide
uccacaauagggauggggc

SEQ ID NO: 2887121 - RNA, 19 nt, Artificial Sequence
  Description of Artificial Sequence: Synthetic oligonucleotide
auucauucgagcaagcacg

SEQ ID NO: 2887122 - RNA, 19 nt, Artificial Sequence
  Description of Artificial Sequence: Synthetic oligonucleotide
aguugucuccacuuggccc

SEQ ID NO: 2887123 - RNA, 19 nt, Artificial Sequence
  Description of Artificial Sequence: Synthetic oligonucleotide
ugaaguugucuccacuugg

SEQ ID NO: 2887124 - RNA, 19 nt, Artificial Sequence
  Description of Artificial Sequence: Synthetic oligonucleotide
uuuccaaauaaccuccaca

SEQ ID NO: 2887125 - RNA, 19 nt, Artificial Sequence
  Description of Artificial Sequence: Synthetic oligonucleotide
aaguugucuccacuuggcc

SEQ ID NO: 2887126 - RNA, 19 nt, Artificial Sequence
  Description of Artificial Sequence: Synthetic oligonucleotide
aaauaaccuccacaauagg

SEQ ID NO: 2887127 - RNA, 19 nt, Artificial Sequence
  Description of Artificial Sequence: Synthetic oligonucleotide
uucuguauauaugugcccg

SEQ ID NO: 2887128 - RNA, 19 nt, Artificial Sequence
  Description of Artificial Sequence: Synthetic oligonucleotide
uggaagaggcaaaauauga

SEQ ID NO: 2887129 - RNA, 19 nt, Artificial Sequence
  Description of Artificial Sequence: Synthetic oligonucleotide
gauucagguaaaccgaggc

SEQ ID NO: 2887130 - RNA, 19 nt, Artificial Sequence
  Description of Artificial Sequence: Synthetic oligonucleotide
cauaugaccaucagguggc

SEQ ID NO: 2887131 - RNA, 19 nt, Artificial Sequence
  Description of Artificial Sequence: Synthetic oligonucleotide
uauaugugcccgaugaagu

SEQ ID NO: 2887132 - RNA, 19 nt, Artificial Sequence
  Description of Artificial Sequence: Synthetic oligonucleotide
cauucgagcaagcacgucg

SEQ ID NO: 2887133 - RNA, 19 nt, Artificial Sequence
  Description of Artificial Sequence: Synthetic oligonucleotide
gguuauaucccauagcuac

SEQ ID NO: 2887134 - RNA, 19 nt, Artificial Sequence
  Description of Artificial Sequence: Synthetic oligonucleotide
uacauguggcauaugacca

SEQ ID NO: 2887135 - RNA, 19 nt, Artificial Sequence
  Description of Artificial Sequence: Synthetic oligonucleotide
ucauguuucuguauauaug

SEQ ID NO: 2887136 - RNA, 19 nt, Artificial Sequence
  Description of Artificial Sequence: Synthetic oligonucleotide
agaucugcacucuggauuc

SEQ ID NO: 2887137 - RNA, 19 nt, Artificial Sequence
  Description of Artificial Sequence: Synthetic oligonucleotide
agcacagggugauauuucc

SEQ ID NO: 2887138 - RNA, 19 nt, Artificial Sequence
  Description of Artificial Sequence: Synthetic oligonucleotide
gauucauucgagcaagcac

SEQ ID NO: 2887139 - RNA, 19 nt, Artificial Sequence
  Description of Artificial Sequence: Synthetic oligonucleotide
guauauaugugcccgauga

SEQ ID NO: 2887140 - RNA, 19 nt, Artificial Sequence
  Description of Artificial Sequence: Synthetic oligonucleotide
agugaaggagauucgguag

SEQ ID NO: 2887141 - RNA, 19 nt, Artificial Sequence
  Description of Artificial Sequence: Synthetic oligonucleotide
uaugaggauccauugguug

SEQ ID NO: 2887142 - RNA, 19 nt, Artificial Sequence
  Description of Artificial Sequence: Synthetic oligonucleotide
uugggcaagauucauucga

SEQ ID NO: 2887143 - RNA, 19 nt, Artificial Sequence
  Description of Artificial Sequence: Synthetic oligonucleotide
auucagguaaaccgaggcg

SEQ ID NO: 2887144 - RNA, 19 nt, Artificial Sequence
  Description of Artificial Sequence: Synthetic oligonucleotide
auaucccauagcuacaugu

SEQ ID NO: 2887145 - RNA, 19 nt, Artificial Sequence
  Description of Artificial Sequence: Synthetic oligonucleotide
gugauauuuccaaauaacc

SEQ ID NO: 2887146 - RNA, 19 nt, Artificial Sequence
  Description of Artificial Sequence: Synthetic oligonucleotide
uaaaccgaggcguugggca

SEQ ID NO: 2887147 - RNA, 19 nt, Artificial Sequence
  Description of Artificial Sequence: Synthetic oligonucleotide
agcggagugaaggagauuc

SEQ ID NO: 2887148 - RNA, 19 nt, Artificial Sequence
  Description of Artificial Sequence: Synthetic oligonucleotide
gauggggccauaaugauca

SEQ ID NO: 2887149 - RNA, 19 nt, Artificial Sequence
  Description of Artificial Sequence: Synthetic oligonucleotide
guuucuguauauaugugcc

SEQ ID NO: 2887150 - RNA, 19 nt, Artificial Sequence
  Description of Artificial Sequence: Synthetic oligonucleotide
aggcaaaauaugaggaucc

SEQ ID NO: 2887151 - RNA, 19 nt, Artificial Sequence
  Description of Artificial Sequence: Synthetic oligonucleotide
gauccauugguuguggcag

SEQ ID NO: 2887152 - RNA, 19 nt, Artificial Sequence
  Description of Artificial Sequence: Synthetic oligonucleotide
aagaggcaaaauaugagga

SEQ ID NO: 2887153 - RNA, 19 nt, Artificial Sequence
  Description of Artificial Sequence: Synthetic oligonucleotide
uaucccauagcuacaugug

SEQ ID NO: 2887154 - RNA, 19 nt, Artificial Sequence
  Description of Artificial Sequence: Synthetic oligonucleotide
uagggauggggccauaaug

SEQ ID NO: 2887155 - RNA, 19 nt, Artificial Sequence
  Description of Artificial Sequence: Synthetic oligonucleotide
auauaugugcccgaugaag

SEQ ID NO: 2887156 - RNA, 19 nt, Artificial Sequence
  Description of Artificial Sequence: Synthetic oligonucleotide
gcauaugaccaucaggugg

SEQ ID NO: 2887157 - RNA, 19 nt, Artificial Sequence
  Description of Artificial Sequence: Synthetic oligonucleotide
aguugcagcggagugaagg

SEQ ID NO: 2887158 - RNA, 19 nt, Artificial Sequence
  Description of Artificial Sequence: Synthetic oligonucleotide
auuuccaaauaaccuccac

SEQ ID NO: 2887159 - RNA, 19 nt, Artificial Sequence
  Description of Artificial Sequence: Synthetic oligonucleotide
cuucgguugagguuggggc

SEQ ID NO: 2887160 - RNA, 19 nt, Artificial Sequence
  Description of Artificial Sequence: Synthetic oligonucleotide
uccauguauacgcccacag

SEQ ID NO: 2887161 - RNA, 19 nt, Artificial Sequence
  Description of Artificial Sequence: Synthetic oligonucleotide
ucauccauguauacgccca

SEQ ID NO: 2887162 - RNA, 19 nt, Artificial Sequence
  Description of Artificial Sequence: Synthetic oligonucleotide
uggauucagguaaaccgag

SEQ ID NO: 2887163 - RNA, 19 nt, Artificial Sequence
  Description of Artificial Sequence: Synthetic oligonucleotide
uucagguaaaccgaggcgu

SEQ ID NO: 2887164 - RNA, 19 nt, Artificial Sequence
  Description of Artificial Sequence: Synthetic oligonucleotide
ucccauagcuacauguggc

SEQ ID NO: 2887165 - RNA, 19 nt, Artificial Sequence
  Description of Artificial Sequence: Synthetic oligonucleotide
aucccauagcuacaugugg

SEQ ID NO: 2887166 - RNA, 19 nt, Artificial Sequence
  Description of Artificial Sequence: Synthetic oligonucleotide
uagguggccagggaaaugg

SEQ ID NO: 2887167 - RNA, 19 nt, Artificial Sequence
  Description of Artificial Sequence: Synthetic oligonucleotide
agcuacauguggcauauga

SEQ ID NO: 2887168 - RNA, 19 nt, Artificial Sequence
  Description of Artificial Sequence: Synthetic oligonucleotide
uaaugaucauccauguaua

SEQ ID NO: 2887169 - RNA, 19 nt, Artificial Sequence
  Description of Artificial Sequence: Synthetic oligonucleotide
uuucuguauauaugugccc

SEQ ID NO: 2887170 - RNA, 19 nt, Artificial Sequence
  Description of Artificial Sequence: Synthetic oligonucleotide
augaucauccauguauacg

SEQ ID NO: 2887171 - RNA, 19 nt, Artificial Sequence
  Description of Artificial Sequence: Synthetic oligonucleotide
uguauauaugugcccgaug

SEQ ID NO: 2887172 - RNA, 19 nt, Artificial Sequence
  Description of Artificial Sequence: Synthetic oligonucleotide
gacgcuucgguugagguug

SEQ ID NO: 2887173 - RNA, 19 nt, Artificial Sequence
  Description of Artificial Sequence: Synthetic oligonucleotide
guuguggcagcacagggug

SEQ ID NO: 2887174 - RNA, 19 nt, Artificial Sequence
  Description of Artificial Sequence: Synthetic oligonucleotide
agggaaauggagguggagg

SEQ ID NO: 2887175 - RNA, 19 nt, Artificial Sequence
  Description of Artificial Sequence: Synthetic oligonucleotide
acucauggccacuggaauc

SEQ ID NO: 2887176 - RNA, 19 nt, Artificial Sequence
  Description of Artificial Sequence: Synthetic oligonucleotide
ugggcaagauucauucgag

SEQ ID NO: 2887177 - RNA, 19 nt, Artificial Sequence
  Description of Artificial Sequence: Synthetic oligonucleotide
caagauucauucgagcaag

SEQ ID NO: 2887178 - RNA, 19 nt, Artificial Sequence
  Description of Artificial Sequence: Synthetic oligonucleotide
auaaccuccacaauaggga

SEQ ID NO: 2887179 - RNA, 19 nt, Artificial Sequence
  Description of Artificial Sequence: Synthetic oligonucleotide
gaggcguugggcaagauuc

SEQ ID NO: 2887180 - RNA, 19 nt, Artificial Sequence
  Description of Artificial Sequence: Synthetic oligonucleotide
guggcauaugaccaucagg

SEQ ID NO: 2887181 - RNA, 19 nt, Artificial Sequence
  Description of Artificial Sequence: Synthetic oligonucleotide
ugaaggagauucgguagcg

SEQ ID NO: 2887182 - RNA, 19 nt, Artificial Sequence
  Description of Artificial Sequence: Synthetic oligonucleotide
cauguuucuguauauaugu

SEQ ID NO: 2887183 - RNA, 19 nt, Artificial Sequence
  Description of Artificial Sequence: Synthetic oligonucleotide
uguggcauaugaccaucag

SEQ ID NO: 2887184 - RNA, 19 nt, Artificial Sequence
  Description of Artificial Sequence: Synthetic oligonucleotide
caggcauccugaauagugg

SEQ ID NO: 2887185 - RNA, 19 nt, Artificial Sequence
  Description of Artificial Sequence: Synthetic oligonucleotide
gggaaauggagguggaggg

SEQ ID NO: 2887186 - RNA, 19 nt, Artificial Sequence
  Description of Artificial Sequence: Synthetic oligonucleotide
aagauucauucgagcaagc

SEQ ID NO: 2887187 - RNA, 19 nt, Artificial Sequence
  Description of Artificial Sequence: Synthetic oligonucleotide
acgucgggguacuggaugc

SEQ ID NO: 2887188 - RNA, 19 nt, Artificial Sequence
  Description of Artificial Sequence: Synthetic oligonucleotide
uauuuccaaauaaccucca

SEQ ID NO: 2887189 - RNA, 19 nt, Artificial Sequence
  Description of Artificial Sequence: Synthetic oligonucleotide
ugaaaccagaucugcacuc

SEQ ID NO: 2887190 - RNA, 19 nt, Artificial Sequence
  Description of Artificial Sequence: Synthetic oligonucleotide
uacuggaugcgcuggaaac

SEQ ID NO: 2887191 - RNA, 19 nt, Artificial Sequence
  Description of Artificial Sequence: Synthetic oligonucleotide
augaggauccauugguugu

SEQ ID NO: 2887192 - RNA, 19 nt, Artificial Sequence
  Description of Artificial Sequence: Synthetic oligonucleotide
cuggaaacaggccuccagc

SEQ ID NO: 2887193 - RNA, 19 nt, Artificial Sequence
  Description of Artificial Sequence: Synthetic oligonucleotide
uauauaugugcccgaugaa

SEQ ID NO: 2887194 - RNA, 19 nt, Artificial Sequence
  Description of Artificial Sequence: Synthetic oligonucleotide
aaaccagaucugcacucug

SEQ ID NO: 2887195 - RNA, 19 nt, Artificial Sequence
  Description of Artificial Sequence: Synthetic oligonucleotide
augaaguugucuccacuug

SEQ ID NO: 2887196 - RNA, 19 nt, Artificial Sequence
  Description of Artificial Sequence: Synthetic oligonucleotide
uggccuaggugguacaggc

SEQ ID NO: 2887197 - RNA, 19 nt, Artificial Sequence
  Description of Artificial Sequence: Synthetic oligonucleotide
gaggcaaaauaugaggauc

SEQ ID NO: 2887198 - RNA, 19 nt, Artificial Sequence
  Description of Artificial Sequence: Synthetic oligonucleotide
uucuguucugaaaccagau

SEQ ID NO: 2887199 - RNA, 19 nt, Artificial Sequence
  Description of Artificial Sequence: Synthetic oligonucleotide
gaaguugucuccacuuggc

SEQ ID NO: 2887200 - RNA, 19 nt, Artificial Sequence
  Description of Artificial Sequence: Synthetic oligonucleotide
ucuguauauaugugcccga

SEQ ID NO: 2887201 - RNA, 19 nt, Artificial Sequence
  Description of Artificial Sequence: Synthetic oligonucleotide
aaccagaucugcacucugg

SEQ ID NO: 2887202 - RNA, 19 nt, Artificial Sequence
  Description of Artificial Sequence: Synthetic oligonucleotide
ugcagcggagugaaggaga

SEQ ID NO: 2887203 - RNA, 19 nt, Artificial Sequence
  Description of Artificial Sequence: Synthetic oligonucleotide
gugaaggagauucgguagc

SEQ ID NO: 2887204 - RNA, 19 nt, Artificial Sequence
  Description of Artificial Sequence: Synthetic oligonucleotide
acaggcauccugaauagug

SEQ ID NO: 2887205 - RNA, 19 nt, Artificial Sequence
  Description of Artificial Sequence: Synthetic oligonucleotide
ugcccgaugaaguugucuc

SEQ ID NO: 2887206 - RNA, 19 nt, Artificial Sequence
  Description of Artificial Sequence: Synthetic oligonucleotide
gauucgguagcggcgacgc

SEQ ID NO: 2887207 - RNA, 19 nt, Artificial Sequence
  Description of Artificial Sequence: Synthetic oligonucleotide
agaggcaaaauaugaggau

SEQ ID NO: 2887208 - RNA, 19 nt, Artificial Sequence
  Description of Artificial Sequence: Synthetic oligonucleotide
guacaggcauccugaauag

SEQ ID NO: 2887209 - RNA, 19 nt, Artificial Sequence
  Description of Artificial Sequence: Synthetic oligonucleotide
ggugauauuuccaaauaac

SEQ ID NO: 2887210 - RNA, 19 nt, Artificial Sequence
  Description of Artificial Sequence: Synthetic oligonucleotide
uggaaacaggccuccagcu

SEQ ID NO: 2887211 - RNA, 19 nt, Artificial Sequence
  Description of Artificial Sequence: Synthetic oligonucleotide
uucauucgagcaagcacgu

SEQ ID NO: 2887212 - RNA, 19 nt, Artificial Sequence
  Description of Artificial Sequence: Synthetic oligonucleotide
uaugugcccgaugaaguug

SEQ ID NO: 2887213 - RNA, 19 nt, Artificial Sequence
  Description of Artificial Sequence: Synthetic oligonucleotide
uauaucccauagcuacaug

SEQ ID NO: 2887214 - RNA, 19 nt, Artificial Sequence
  Description of Artificial Sequence: Synthetic oligonucleotide
ugaccaucagguggcauag

SEQ ID NO: 2887215 - RNA, 19 nt, Artificial Sequence
  Description of Artificial Sequence: Synthetic oligonucleotide
cuguucugaaaccagaucu

SEQ ID NO: 2887216 - RNA, 19 nt, Artificial Sequence
  Description of Artificial Sequence: Synthetic oligonucleotide
accaucagguggcauaggu

SEQ ID NO: 2887217 - RNA, 19 nt, Artificial Sequence
  Description of Artificial Sequence: Synthetic oligonucleotide
guugggcaagauucauucg

SEQ ID NO: 2887218 - RNA, 19 nt, Artificial Sequence
  Description of Artificial Sequence: Synthetic oligonucleotide
gguacaggcauccugaaua

SEQ ID NO: 2887219 - RNA, 19 nt, Artificial Sequence
  Description of Artificial Sequence: Synthetic oligonucleotide
guggccagggaaauggagg

SEQ ID NO: 2887220 - RNA, 19 nt, Artificial Sequence
  Description of Artificial Sequence: Synthetic oligonucleotide
aggauccauugguuguggc

SEQ ID NO: 2887221 - RNA, 19 nt, Artificial Sequence
  Description of Artificial Sequence: Synthetic oligonucleotide
uuauaucccauagcuacau

SEQ ID NO: 2887222 - RNA, 19 nt, Artificial Sequence
  Description of Artificial Sequence: Synthetic oligonucleotide
uugguuguggcagcacagg

SEQ ID NO: 2887223 - RNA, 19 nt, Artificial Sequence
  Description of Artificial Sequence: Synthetic oligonucleotide
cuaggugguacaggcaucc

SEQ ID NO: 2887224 - RNA, 19 nt, Artificial Sequence
  Description of Artificial Sequence: Synthetic oligonucleotide
uucgguugagguuggggcu

SEQ ID NO: 2887225 - RNA, 19 nt, Artificial Sequence
  Description of Artificial Sequence: Synthetic oligonucleotide
auguauacgcccacagggg

SEQ ID NO: 2887226 - RNA, 19 nt, Artificial Sequence
  Description of Artificial Sequence: Synthetic oligonucleotide
ucgagcaagcacgucgggg

SEQ ID NO: 2887227 - RNA, 19 nt, Artificial Sequence
  Description of Artificial Sequence: Synthetic oligonucleotide
uaaccuccacaauagggau

SEQ ID NO: 2887228 - RNA, 19 nt, Artificial Sequence
  Description of Artificial Sequence: Synthetic oligonucleotide
auucgagcaagcacgucgg

SEQ ID NO: 2887229 - RNA, 19 nt, Artificial Sequence
  Description of Artificial Sequence: Synthetic oligonucleotide
augcgcuggaaacaggccu

SEQ ID NO: 2887230 - RNA, 19 nt, Artificial Sequence
  Description of Artificial Sequence: Synthetic oligonucleotide
cuggauucagguaaaccga

SEQ ID NO: 2887231 - RNA, 19 nt, Artificial Sequence
  Description of Artificial Sequence: Synthetic oligonucleotide
gccauaaugaucauccaug

SEQ ID NO: 2887232 - RNA, 19 nt, Artificial Sequence
  Description of Artificial Sequence: Synthetic oligonucleotide
ggcaagauucauucgagca

SEQ ID NO: 2887233 - RNA, 19 nt, Artificial Sequence
  Description of Artificial Sequence: Synthetic oligonucleotide
aaucauguuucuguauaua

SEQ ID NO: 2887234 - RNA, 19 nt, Artificial Sequence
  Description of Artificial Sequence: Synthetic oligonucleotide
agguaaaccgaggcguugg

SEQ ID NO: 2887235 - RNA, 19 nt, Artificial Sequence
  Description of Artificial Sequence: Synthetic oligonucleotide
cauccugaauagugguggg

SEQ ID NO: 2887236 - RNA, 19 nt, Artificial Sequence
  Description of Artificial Sequence: Synthetic oligonucleotide
ggaagaggcaaaauaugag

SEQ ID NO: 2887237 - RNA, 19 nt, Artificial Sequence
  Description of Artificial Sequence: Synthetic oligonucleotide
gcauccugaauaguggugg

SEQ ID NO: 2887238 - RNA, 19 nt, Artificial Sequence
  Description of Artificial Sequence: Synthetic oligonucleotide
uccaaauaaccuccacaau

SEQ ID NO: 2887239 - RNA, 19 nt, Artificial Sequence
  Description of Artificial Sequence: Synthetic oligonucleotide
ugaggauccauugguugug

SEQ ID NO: 2887240 - RNA, 19 nt, Artificial Sequence
  Description of Artificial Sequence: Synthetic oligonucleotide
aagcacgucgggguacugg

SEQ ID NO: 2887241 - RNA, 19 nt, Artificial Sequence
  Description of Artificial Sequence: Synthetic oligonucleotide
cuccacaauagggaugggg

SEQ ID NO: 2887242 - RNA, 19 nt, Artificial Sequence
  Description of Artificial Sequence: Synthetic oligonucleotide
caaaauaugaggauccauu

SEQ ID NO: 2887243 - RNA, 19 nt, Artificial Sequence
  Description of Artificial Sequence: Synthetic oligonucleotide
gaaggagauucgguagcgg

SEQ ID NO: 2887244 - RNA, 19 nt, Artificial Sequence
  Description of Artificial Sequence: Synthetic oligonucleotide
guggaagaggcaaaauaug

SEQ ID NO: 2887245 - RNA, 19 nt, Artificial Sequence
  Description of Artificial Sequence: Synthetic oligonucleotide
aggagauucgguagcggcg

SEQ ID NO: 2887246 - RNA, 19 nt, Artificial Sequence
  Description of Artificial Sequence: Synthetic oligonucleotide
agcucccgcaguugcagcg

SEQ ID NO: 2887247 - RNA, 19 nt, Artificial Sequence
  Description of Artificial Sequence: Synthetic oligonucleotide
agggauggggccauaauga

SEQ ID NO: 2887248 - RNA, 19 nt, Artificial Sequence
  Description of Artificial Sequence: Synthetic oligonucleotide
augaccaucagguggcaua

SEQ ID NO: 2887249 - RNA, 19 nt, Artificial Sequence
  Description of Artificial Sequence: Synthetic oligonucleotide
accagaucugcacucugga

SEQ ID NO: 2887250 - RNA, 19 nt, Artificial Sequence
  Description of Artificial Sequence: Synthetic oligonucleotide
aggugguacaggcauccug

SEQ ID NO: 2887251 - RNA, 19 nt, Artificial Sequence
  Description of Artificial Sequence: Synthetic oligonucleotide
aaaccgaggcguugggcaa

SEQ ID NO: 2887252 - RNA, 19 nt, Artificial Sequence
  Description of Artificial Sequence: Synthetic oligonucleotide
auagcuacauguggcauau

SEQ ID NO: 2887253 - RNA, 19 nt, Artificial Sequence
  Description of Artificial Sequence: Synthetic oligonucleotide
auugguuguggcagcacag

SEQ ID NO: 2887254 - RNA, 19 nt, Artificial Sequence
  Description of Artificial Sequence: Synthetic oligonucleotide
cucuggauucagguaaacc

SEQ ID NO: 2887255 - RNA, 19 nt, Artificial Sequence
  Description of Artificial Sequence: Synthetic oligonucleotide
agcggcgacgcuucgguug

SEQ ID NO: 2887256 - RNA, 19 nt, Artificial Sequence
  Description of Artificial Sequence: Synthetic oligonucleotide
uucgagcaagcacgucggg

SEQ ID NO: 2887257 - RNA, 19 nt, Artificial Sequence
  Description of Artificial Sequence: Synthetic oligonucleotide
gaugaaguugucuccacuu

SEQ ID NO: 2887258 - RNA, 19 nt, Artificial Sequence
  Description of Artificial Sequence: Synthetic oligonucleotide
uggaaucauguuucuguau

SEQ ID NO: 2887259 - RNA, 19 nt, Artificial Sequence
  Description of Artificial Sequence: Synthetic oligonucleotide
agggugauauuuccaaaua

SEQ ID NO: 2887260 - RNA, 19 nt, Artificial Sequence
  Description of Artificial Sequence: Synthetic oligonucleotide
cuucuguucugaaaccaga

SEQ ID NO: 2887261 - RNA, 19 nt, Artificial Sequence
  Description of Artificial Sequence: Synthetic oligonucleotide
ugcgcuggaaacaggccuc

SEQ ID NO: 2887262 - RNA, 19 nt, Artificial Sequence
  Description of Artificial Sequence: Synthetic oligonucleotide
uggaugcgcuggaaacagg

SEQ ID NO: 2887263 - RNA, 19 nt, Artificial Sequence
  Description of Artificial Sequence: Synthetic oligonucleotide
agauucauucgagcaagca

SEQ ID NO: 2887264 - RNA, 19 nt, Artificial Sequence
  Description of Artificial Sequence: Synthetic oligonucleotide
ggaaucauguuucuguaua

SEQ ID NO: 2887265 - RNA, 19 nt, Artificial Sequence
  Description of Artificial Sequence: Synthetic oligonucleotide
agcacgucgggguacugga

SEQ ID NO: 2887266 - RNA, 19 nt, Artificial Sequence
  Description of Artificial Sequence: Synthetic oligonucleotide
aauagggauggggccauaa

SEQ ID NO: 2887267 - RNA, 19 nt, Artificial Sequence
  Description of Artificial Sequence: Synthetic oligonucleotide
aggcauccugaauaguggu

SEQ ID NO: 2887268 - RNA, 19 nt, Artificial Sequence
  Description of Artificial Sequence: Synthetic oligonucleotide
cuggaugcgcuggaaacag

SEQ ID NO: 2887269 - RNA, 19 nt, Artificial Sequence
  Description of Artificial Sequence: Synthetic oligonucleotide
gaggauccauugguugugg

SEQ ID NO: 2887270 - RNA, 19 nt, Artificial Sequence
  Description of Artificial Sequence: Synthetic oligonucleotide
auaugugcccgaugaaguu

SEQ ID NO: 2887271 - RNA, 19 nt, Artificial Sequence
  Description of Artificial Sequence: Synthetic oligonucleotide
auccugaauaguggugggg

SEQ ID NO: 2887272 - RNA, 19 nt, Artificial Sequence
  Description of Artificial Sequence: Synthetic oligonucleotide
guugcagcggagugaagga

SEQ ID NO: 2887273 - RNA, 19 nt, Artificial Sequence
  Description of Artificial Sequence: Synthetic oligonucleotide
ucagguaaaccgaggcguu

SEQ ID NO: 2887274 - RNA, 19 nt, Artificial Sequence
  Description of Artificial Sequence: Synthetic oligonucleotide
ugcacucuggauucaggua

SEQ ID NO: 2887275 - RNA, 19 nt, Artificial Sequence
  Description of Artificial Sequence: Synthetic oligonucleotide
uccacuuggcccuucuguu

SEQ ID NO: 2887276 - RNA, 19 nt, Artificial Sequence
  Description of Artificial Sequence: Synthetic oligonucleotide
acauguggcauaugaccau

SEQ ID NO: 2887277 - RNA, 19 nt, Artificial Sequence
  Description of Artificial Sequence: Synthetic oligonucleotide
gaugcgcuggaaacaggcc

SEQ ID NO: 2887278 - RNA, 19 nt, Artificial Sequence
  Description of Artificial Sequence: Synthetic oligonucleotide
guugucuccacuuggcccu

SEQ ID NO: 2887279 - RNA, 19 nt, Artificial Sequence
  Description of Artificial Sequence: Synthetic oligonucleotide
cacagggugauauuuccaa

SEQ ID NO: 2887280 - RNA, 19 nt, Artificial Sequence
  Description of Artificial Sequence: Synthetic oligonucleotide
ccaaauaaccuccacaaua

SEQ ID NO: 2887281 - RNA, 19 nt, Artificial Sequence
  Description of Artificial Sequence: Synthetic oligonucleotide
cauugguuguggcagcaca

SEQ ID NO: 2887282 - RNA, 19 nt, Artificial Sequence
  Description of Artificial Sequence: Synthetic oligonucleotide
gccagggaaauggaggugg

SEQ ID NO: 2887283 - RNA, 19 nt, Artificial Sequence
  Description of Artificial Sequence: Synthetic oligonucleotide
acagggugauauuuccaaa

SEQ ID NO: 2887284 - RNA, 19 nt, Artificial Sequence
  Description of Artificial Sequence: Synthetic oligonucleotide
auguuucuguauauaugug

SEQ ID NO: 2887285 - RNA, 19 nt, Artificial Sequence
  Description of Artificial Sequence: Synthetic oligonucleotide
gaaucauguuucuguauau

SEQ ID NO: 2887286 - RNA, 19 nt, Artificial Sequence
  Description of Artificial Sequence: Synthetic oligonucleotide
guuauaucccauagcuaca

SEQ ID NO: 2887287 - RNA, 19 nt, Artificial Sequence
  Description of Artificial Sequence: Synthetic oligonucleotide
guggcauagguggccaggg

SEQ ID NO: 2887288 - RNA, 19 nt, Artificial Sequence
  Description of Artificial Sequence: Synthetic oligonucleotide
uugcagcggagugaaggag

SEQ ID NO: 2887289 - RNA, 19 nt, Artificial Sequence
  Description of Artificial Sequence: Synthetic oligonucleotide
ucgggguacuggaugcgcu

SEQ ID NO: 2887290 - RNA, 19 nt, Artificial Sequence
  Description of Artificial Sequence: Synthetic oligonucleotide
agcaagcacgucgggguac

SEQ ID NO: 2887291 - RNA, 19 nt, Artificial Sequence
  Description of Artificial Sequence: Synthetic oligonucleotide
cacgucgggguacuggaug

SEQ ID NO: 2887292 - RNA, 19 nt, Artificial Sequence
  Description of Artificial Sequence: Synthetic oligonucleotide
cucauggccacuggaauca

SEQ ID NO: 2887293 - RNA, 19 nt, Artificial Sequence
  Description of Artificial Sequence: Synthetic oligonucleotide
agauucgguagcggcgacg

SEQ ID NO: 2887294 - RNA, 19 nt, Artificial Sequence
  Description of Artificial Sequence: Synthetic oligonucleotide
auagggauggggccauaau

SEQ ID NO: 2887295 - RNA, 19 nt, Artificial Sequence
  Description of Artificial Sequence: Synthetic oligonucleotide
acucuggauucagguaaac

SEQ ID NO: 2887296 - RNA, 19 nt, Artificial Sequence
  Description of Artificial Sequence: Synthetic oligonucleotide
gguaaaccgaggcguuggg

SEQ ID NO: 2887297 - RNA, 19 nt, Artificial Sequence
  Description of Artificial Sequence: Synthetic oligonucleotide
ggaaauggagguggagggg

SEQ ID NO: 2887298 - RNA, 19 nt, Artificial Sequence
  Description of Artificial Sequence: Synthetic oligonucleotide
uguggcagcacagggugau

SEQ ID NO: 2887299 - RNA, 19 nt, Artificial Sequence
  Description of Artificial Sequence: Synthetic oligonucleotide
ggaugcgcuggaaacaggc

SEQ ID NO: 2887300 - RNA, 19 nt, Artificial Sequence
  Description of Artificial Sequence: Synthetic oligonucleotide
ugguacaggcauccugaau

SEQ ID NO: 2887301 - RNA, 19 nt, Artificial Sequence
  Description of Artificial Sequence: Synthetic oligonucleotide
ucuccacuuggcccuucug

SEQ ID NO: 2887302 - RNA, 19 nt, Artificial Sequence
  Description of Artificial Sequence: Synthetic oligonucleotide
cauagcuacauguggcaua

SEQ ID NO: 2887303 - RNA, 19 nt, Artificial Sequence
  Description of Artificial Sequence: Synthetic oligonucleotide
guaaaccgaggcguugggc

SEQ ID NO: 2887304 - RNA, 19 nt, Artificial Sequence
  Description of Artificial Sequence: Synthetic oligonucleotide
gcacucuggauucagguaa

SEQ ID NO: 2887305 - RNA, 19 nt, Artificial Sequence
  Description of Artificial Sequence: Synthetic oligonucleotide
uucgguagcggcgacgcuu

SEQ ID NO: 2887306 - RNA, 19 nt, Artificial Sequence
  Description of Artificial Sequence: Synthetic oligonucleotide
gcuggaaacaggccuccag

SEQ ID NO: 2887307 - RNA, 19 nt, Artificial Sequence
  Description of Artificial Sequence: Synthetic oligonucleotide
cauccauguauacgcccac

SEQ ID NO: 2887308 - RNA, 19 nt, Artificial Sequence
  Description of Artificial Sequence: Synthetic oligonucleotide
gggugauauuuccaaauaa

SEQ ID NO: 2887309 - RNA, 19 nt, Artificial Sequence
  Description of Artificial Sequence: Synthetic oligonucleotide
cacaauagggauggggcca

SEQ ID NO: 2887310 - RNA, 19 nt, Artificial Sequence
  Description of Artificial Sequence: Synthetic oligonucleotide
cguugggcaagauucauuc

SEQ ID NO: 2887311 - RNA, 19 nt, Artificial Sequence
  Description of Artificial Sequence: Synthetic oligonucleotide
ggauccauugguuguggca

SEQ ID NO: 2887312 - RNA, 19 nt, Artificial Sequence
  Description of Artificial Sequence: Synthetic oligonucleotide
cagcacagggugauauuuc

SEQ ID NO: 2887313 - RNA, 19 nt, Artificial Sequence
  Description of Artificial Sequence: Synthetic oligonucleotide
ggugguacaggcauccuga

SEQ ID NO: 2887314 - RNA, 19 nt, Artificial Sequence
  Description of Artificial Sequence: Synthetic oligonucleotide
ccacaauagggauggggcc

SEQ ID NO: 2887315 - RNA, 19 nt, Artificial Sequence
  Description of Artificial Sequence: Synthetic oligonucleotide
cauguggcauaugaccauc

SEQ ID NO: 2887316 - RNA, 19 nt, Artificial Sequence
  Description of Artificial Sequence: Synthetic oligonucleotide
ccauguauacgcccacagg

SEQ ID NO: 2887317 - RNA, 19 nt, Artificial Sequence
  Description of Artificial Sequence: Synthetic oligonucleotide
gccacuggaaucauguuuc

SEQ ID NO: 2887318 - RNA, 19 nt, Artificial Sequence
  Description of Artificial Sequence: Synthetic oligonucleotide
ggauucagguaaaccgagg

SEQ ID NO: 2887319 - RNA, 19 nt, Artificial Sequence
  Description of Artificial Sequence: Synthetic oligonucleotide
ggcauaugaccaucaggug

SEQ ID NO: 2887320 - RNA, 19 nt, Artificial Sequence
  Description of Artificial Sequence: Synthetic oligonucleotide
aaccgaggcguugggcaag

SEQ ID NO: 2887321 - RNA, 19 nt, Artificial Sequence
  Description of Artificial Sequence: Synthetic oligonucleotide
uuguggcagcacaggguga

SEQ ID NO: 2887322 - RNA, 19 nt, Artificial Sequence
  Description of Artificial Sequence: Synthetic oligonucleotide
uggcauagguggccaggga

SEQ ID NO: 2887323 - RNA, 19 nt, Artificial Sequence
  Description of Artificial Sequence: Synthetic oligonucleotide
auaugaggauccauugguu

SEQ ID NO: 2887324 - RNA, 19 nt, Artificial Sequence
  Description of Artificial Sequence: Synthetic oligonucleotide
cauggccacuggaaucaug

SEQ ID NO: 2887325 - RNA, 19 nt, Artificial Sequence
  Description of Artificial Sequence: Synthetic oligonucleotide
gguggaagaggcaaaauau

SEQ ID NO: 2887326 - RNA, 19 nt, Artificial Sequence
  Description of Artificial Sequence: Synthetic oligonucleotide
cauaaugaucauccaugua

SEQ ID NO: 2887327 - RNA, 19 nt, Artificial Sequence
  Description of Artificial Sequence: Synthetic oligonucleotide
uggcccuucuguucugaaa

SEQ ID NO: 2887328 - RNA, 19 nt, Artificial Sequence
  Description of Artificial Sequence: Synthetic oligonucleotide
augugcccgaugaaguugu

SEQ ID NO: 2887329 - RNA, 19 nt, Artificial Sequence
  Description of Artificial Sequence: Synthetic oligonucleotide
uggcagcacagggugauau

SEQ ID NO: 2887330 - RNA, 19 nt, Artificial Sequence
  Description of Artificial Sequence: Synthetic oligonucleotide
gacucauggccacuggaau

SEQ ID NO: 2887331 - RNA, 19 nt, Artificial Sequence
  Description of Artificial Sequence: Synthetic oligonucleotide
ggguggaagaggcaaaaua

SEQ ID NO: 2887332 - RNA, 19 nt, Artificial Sequence
  Description of Artificial Sequence: Synthetic oligonucleotide
ugggguggaagaggcaaaa

SEQ ID NO: 2887333 - RNA, 19 nt, Artificial Sequence
  Description of Artificial Sequence: Synthetic oligonucleotide
gguggcauagguggccagg

SEQ ID NO: 2887334 - RNA, 19 nt, Artificial Sequence
  Description of Artificial Sequence: Synthetic oligonucleotide
gaaaccagaucugcacucu

SEQ ID NO: 2887335 - RNA, 19 nt, Artificial Sequence
  Description of Artificial Sequence: Synthetic oligonucleotide
guacuggaugcgcuggaaa

SEQ ID NO: 2887336 - RNA, 19 nt, Artificial Sequence
  Description of Artificial Sequence: Synthetic oligonucleotide
auagguggccagggaaaug

SEQ ID NO: 2887337 - RNA, 19 nt, Artificial Sequence
  Description of Artificial Sequence: Synthetic oligonucleotide
ggaaacaggccuccagcuc

SEQ ID NO: 2887338 - RNA, 19 nt, Artificial Sequence
  Description of Artificial Sequence: Synthetic oligonucleotide
cacuggaaucauguuucug

SEQ ID NO: 2887339 - RNA, 19 nt, Artificial Sequence
  Description of Artificial Sequence: Synthetic oligonucleotide
cagaucugcacucuggauu

SEQ ID NO: 2887340 - RNA, 19 nt, Artificial Sequence
  Description of Artificial Sequence: Synthetic oligonucleotide
acaauagggauggggccau

SEQ ID NO: 2887341 - RNA, 19 nt, Artificial Sequence
  Description of Artificial Sequence: Synthetic oligonucleotide
gcuucgguugagguugggg

SEQ ID NO: 2887342 - RNA, 19 nt, Artificial Sequence
  Description of Artificial Sequence: Synthetic oligonucleotide
uacaggcauccugaauagu

SEQ ID NO: 2887343 - RNA, 19 nt, Artificial Sequence
  Description of Artificial Sequence: Synthetic oligonucleotide
ucccgcaguugcagcggag

SEQ ID NO: 2887344 - RNA, 19 nt, Artificial Sequence
  Description of Artificial Sequence: Synthetic oligonucleotide
aacaggccuccagcucccg

SEQ ID NO: 2887345 - RNA, 19 nt, Artificial Sequence
  Description of Artificial Sequence: Synthetic oligonucleotide
cagggaaauggagguggag

SEQ ID NO: 2887346 - RNA, 19 nt, Artificial Sequence
  Description of Artificial Sequence: Synthetic oligonucleotide
cagggugauauuuccaaau

SEQ ID NO: 2887347 - RNA, 19 nt, Artificial Sequence
  Description of Artificial Sequence: Synthetic oligonucleotide
ccaucagguggcauaggug

SEQ ID NO: 2887348 - RNA, 19 nt, Artificial Sequence
  Description of Artificial Sequence: Synthetic oligonucleotide
uaugaccaucagguggcau

SEQ ID NO: 2887349 - RNA, 19 nt, Artificial Sequence
  Description of Artificial Sequence: Synthetic oligonucleotide
auccauguauacgcccaca

SEQ ID NO: 2887350 - RNA, 19 nt, Artificial Sequence
  Description of Artificial Sequence: Synthetic oligonucleotide
cagguaaaccgaggcguug

SEQ ID NO: 2887351 - RNA, 19 nt, Artificial Sequence
  Description of Artificial Sequence: Synthetic oligonucleotide
gagauucgguagcggcgac

SEQ ID NO: 2887352 - RNA, 19 nt, Artificial Sequence
  Description of Artificial Sequence: Synthetic oligonucleotide
gguggccagggaaauggag

SEQ ID NO: 2887353 - RNA, 19 nt, Artificial Sequence
  Description of Artificial Sequence: Synthetic oligonucleotide
gaccaucagguggcauagg

SEQ ID NO: 2887354 - RNA, 19 nt, Artificial Sequence
  Description of Artificial Sequence: Synthetic oligonucleotide
uggggccauaaugaucauc

SEQ ID NO: 2887355 - RNA, 19 nt, Artificial Sequence
  Description of Artificial Sequence: Synthetic oligonucleotide
ggagauucgguagcggcga

SEQ ID NO: 2887356 - RNA, 19 nt, Artificial Sequence
  Description of Artificial Sequence: Synthetic oligonucleotide
cugcacucuggauucaggu

SEQ ID NO: 2887357 - RNA, 19 nt, Artificial Sequence
  Description of Artificial Sequence: Synthetic oligonucleotide
gucgggguacuggaugcgc

SEQ ID NO: 2887358 - RNA, 19 nt, Artificial Sequence
  Description of Artificial Sequence: Synthetic oligonucleotide
caggccuccagcucccgca

SEQ ID NO: 2887359 - RNA, 19 nt, Artificial Sequence
  Description of Artificial Sequence: Synthetic oligonucleotide
guagcggcgacgcuucggu

SEQ ID NO: 2887360 - RNA, 19 nt, Artificial Sequence
  Description of Artificial Sequence: Synthetic oligonucleotide
uuggcccuucuguucugaa

SEQ ID NO: 2887361 - RNA, 19 nt, Artificial Sequence
  Description of Artificial Sequence: Synthetic oligonucleotide
auguggcauaugaccauca

SEQ ID NO: 2887362 - RNA, 19 nt, Artificial Sequence
  Description of Artificial Sequence: Synthetic oligonucleotide
ggcauccugaauaguggug

SEQ ID NO: 2887363 - RNA, 19 nt, Artificial Sequence
  Description of Artificial Sequence: Synthetic oligonucleotide
gggguacuggaugcgcugg

SEQ ID NO: 2887364 - RNA, 19 nt, Artificial Sequence
  Description of Artificial Sequence: Synthetic oligonucleotide
gcccgaugaaguugucucc

SEQ ID NO: 2887365 - RNA, 19 nt, Artificial Sequence
  Description of Artificial Sequence: Synthetic oligonucleotide
ucauucgagcaagcacguc

SEQ ID NO: 2887366 - RNA, 19 nt, Artificial Sequence
  Description of Artificial Sequence: Synthetic oligonucleotide
gcccuucuguucugaaacc

SEQ ID NO: 2887367 - RNA, 19 nt, Artificial Sequence
  Description of Artificial Sequence: Synthetic oligonucleotide
auaugaccaucagguggca

SEQ ID NO: 2887368 - RNA, 19 nt, Artificial Sequence
  Description of Artificial Sequence: Synthetic oligonucleotide
ggcaaaauaugaggaucca

SEQ ID NO: 2887369 - RNA, 19 nt, Artificial Sequence
  Description of Artificial Sequence: Synthetic oligonucleotide
gguagcggcgacgcuucgg

SEQ ID NO: 2887370 - RNA, 19 nt, Artificial Sequence
  Description of Artificial Sequence: Synthetic oligonucleotide
ugugcccgaugaaguuguc

SEQ ID NO: 2887371 - RNA, 19 nt, Artificial Sequence
  Description of Artificial Sequence: Synthetic oligonucleotide
cacucuggauucagguaaa

SEQ ID NO: 2887372 - RNA, 19 nt, Artificial Sequence
  Description of Artificial Sequence: Synthetic oligonucleotide
ggggacucauggccacugg

SEQ ID NO: 2887373 - RNA, 19 nt, Artificial Sequence
  Description of Artificial Sequence: Synthetic oligonucleotide
auucgguagcggcgacgcu

SEQ ID NO: 2887374 - RNA, 19 nt, Artificial Sequence
  Description of Artificial Sequence: Synthetic oligonucleotide
gggacucauggccacugga

SEQ ID NO: 2887375 - RNA, 19 nt, Artificial Sequence
  Description of Artificial Sequence: Synthetic oligonucleotide
ggccauaaugaucauccau

SEQ ID NO: 2887376 - RNA, 19 nt, Artificial Sequence
  Description of Artificial Sequence: Synthetic oligonucleotide
gguggccuaggugguacag

SEQ ID NO: 2887377 - RNA, 19 nt, Artificial Sequence
  Description of Artificial Sequence: Synthetic oligonucleotide
gagcaagcacgucggggua

SEQ ID NO: 2887378 - RNA, 19 nt, Artificial Sequence
  Description of Artificial Sequence: Synthetic oligonucleotide
ccauaaugaucauccaugu

SEQ ID NO: 2887379 - RNA, 19 nt, Artificial Sequence
  Description of Artificial Sequence: Synthetic oligonucleotide
cccauagcuacauguggca

SEQ ID NO: 2887380 - RNA, 19 nt, Artificial Sequence
  Description of Artificial Sequence: Synthetic oligonucleotide
uaggugguacaggcauccu

SEQ ID NO: 2887381 - RNA, 19 nt, Artificial Sequence
  Description of Artificial Sequence: Synthetic oligonucleotide
gcggagugaaggagauucg

SEQ ID NO: 2887382 - RNA, 19 nt, Artificial Sequence
  Description of Artificial Sequence: Synthetic oligonucleotide
cggagugaaggagauucgg

SEQ ID NO: 2887383 - RNA, 19 nt, Artificial Sequence
  Description of Artificial Sequence: Synthetic oligonucleotide
gugguacaggcauccugaa

SEQ ID NO: 2887384 - RNA, 19 nt, Artificial Sequence
  Description of Artificial Sequence: Synthetic oligonucleotide
gcaguugcagcggagugaa

SEQ ID NO: 2887385 - RNA, 19 nt, Artificial Sequence
  Description of Artificial Sequence: Synthetic oligonucleotide
ggacucauggccacuggaa

SEQ ID NO: 2887386 - RNA, 19 nt, Artificial Sequence
  Description of Artificial Sequence: Synthetic oligonucleotide
gaucugcacucuggauuca

SEQ ID NO: 2887387 - RNA, 19 nt, Artificial Sequence
  Description of Artificial Sequence: Synthetic oligonucleotide
aggcguugggcaagauuca

SEQ ID NO: 2887388 - RNA, 19 nt, Artificial Sequence
  Description of Artificial Sequence: Synthetic oligonucleotide
gggcugggguggaagaggc

SEQ ID NO: 2887389 - RNA, 19 nt, Artificial Sequence
  Description of Artificial Sequence: Synthetic oligonucleotide
ccuaggugguacaggcauc

SEQ ID NO: 2887390 - RNA, 19 nt, Artificial Sequence
  Description of Artificial Sequence: Synthetic oligonucleotide
ggcgacgcuucgguugagg

SEQ ID NO: 2887391 - RNA, 19 nt, Artificial Sequence
  Description of Artificial Sequence: Synthetic oligonucleotide
ccgaugaaguugucuccac

SEQ ID NO: 2887392 - RNA, 19 nt, Artificial Sequence
  Description of Artificial Sequence: Synthetic oligonucleotide
gccuaggugguacaggcau

SEQ ID NO: 2887393 - RNA, 19 nt, Artificial Sequence
  Description of Artificial Sequence: Synthetic oligonucleotide
gcauagguggccagggaaa

SEQ ID NO: 2887394 - RNA, 19 nt, Artificial Sequence
  Description of Artificial Sequence: Synthetic oligonucleotide
ucauggccacuggaaucau

SEQ ID NO: 2887395 - RNA, 19 nt, Artificial Sequence
  Description of Artificial Sequence: Synthetic oligonucleotide
caguugcagcggagugaag

SEQ ID NO: 2887396 - RNA, 19 nt, Artificial Sequence
  Description of Artificial Sequence: Synthetic oligonucleotide
gcucccgcaguugcagcgg

SEQ ID NO: 2887397 - RNA, 19 nt, Artificial Sequence
  Description of Artificial Sequence: Synthetic oligonucleotide
uagcuacauguggcauaug

SEQ ID NO: 2887398 - RNA, 19 nt, Artificial Sequence
  Description of Artificial Sequence: Synthetic oligonucleotide
gggccauaaugaucaucca

SEQ ID NO: 2887399 - RNA, 19 nt, Artificial Sequence
  Description of Artificial Sequence: Synthetic oligonucleotide
cuguauauaugugcccgau

SEQ ID NO: 2887400 - RNA, 19 nt, Artificial Sequence
  Description of Artificial Sequence: Synthetic oligonucleotide
acgcuucgguugagguugg

SEQ ID NO: 2887401 - RNA, 19 nt, Artificial Sequence
  Description of Artificial Sequence: Synthetic oligonucleotide
gcaaaauaugaggauccau

SEQ ID NO: 2887402 - RNA, 19 nt, Artificial Sequence
  Description of Artificial Sequence: Synthetic oligonucleotide
auggggccauaaugaucau

SEQ ID NO: 2887403 - RNA, 19 nt, Artificial Sequence
  Description of Artificial Sequence: Synthetic oligonucleotide
gguuguggcagcacagggu

SEQ ID NO: 2887404 - RNA, 19 nt, Artificial Sequence
  Description of Artificial Sequence: Synthetic oligonucleotide
accgaggcguugggcaaga

SEQ ID NO: 2887405 - RNA, 19 nt, Artificial Sequence
  Description of Artificial Sequence: Synthetic oligonucleotide
agguggccagggaaaugga

SEQ ID NO: 2887406 - RNA, 19 nt, Artificial Sequence
  Description of Artificial Sequence: Synthetic oligonucleotide
gggguggccuaggugguac

SEQ ID NO: 2887407 - RNA, 19 nt, Artificial Sequence
  Description of Artificial Sequence: Synthetic oligonucleotide
cauagguggccagggaaau

SEQ ID NO: 2887408 - RNA, 19 nt, Artificial Sequence
  Description of Artificial Sequence: Synthetic oligonucleotide
gguacuggaugcgcuggaa

SEQ ID NO: 2887409 - RNA, 19 nt, Artificial Sequence
  Description of Artificial Sequence: Synthetic oligonucleotide
ggguacuggaugcgcugga

SEQ ID NO: 2887410 - RNA, 19 nt, Artificial Sequence
  Description of Artificial Sequence: Synthetic oligonucleotide
gcacagggugauauuucca

SEQ ID NO: 2887411 - RNA, 19 nt, Artificial Sequence
  Description of Artificial Sequence: Synthetic oligonucleotide
ggccagggaaauggaggug

SEQ ID NO: 2887412 - RNA, 19 nt, Artificial Sequence
  Description of Artificial Sequence: Synthetic oligonucleotide
ccgcaguugcagcggagug

SEQ ID NO: 2887413 - RNA, 19 nt, Artificial Sequence
  Description of Artificial Sequence: Synthetic oligonucleotide
cccgaugaaguugucucca

SEQ ID NO: 2887414 - RNA, 19 nt, Artificial Sequence
  Description of Artificial Sequence: Synthetic oligonucleotide
cucccgcaguugcagcgga

SEQ ID NO: 2887415 - RNA, 19 nt, Artificial Sequence
  Description of Artificial Sequence: Synthetic oligonucleotide
uagcggcgacgcuucgguu

SEQ ID NO: 2887416 - RNA, 19 nt, Artificial Sequence
  Description of Artificial Sequence: Synthetic oligonucleotide
gggauggggccauaaugau

SEQ ID NO: 2887417 - RNA, 19 nt, Artificial Sequence
  Description of Artificial Sequence: Synthetic oligonucleotide
caagcacgucgggguacug

SEQ ID NO: 2887418 - RNA, 19 nt, Artificial Sequence
  Description of Artificial Sequence: Synthetic oligonucleotide
gucuccacuuggcccuucu

SEQ ID NO: 2887419 - RNA, 19 nt, Artificial Sequence
  Description of Artificial Sequence: Synthetic oligonucleotide
ugucuccacuuggcccuuc

SEQ ID NO: 2887420 - RNA, 19 nt, Artificial Sequence
  Description of Artificial Sequence: Synthetic oligonucleotide
gugcccgaugaaguugucu

SEQ ID NO: 2887421 - RNA, 19 nt, Artificial Sequence
  Description of Artificial Sequence: Synthetic oligonucleotide
cgagcaagcacgucggggu

SEQ ID NO: 2887422 - RNA, 19 nt, Artificial Sequence
  Description of Artificial Sequence: Synthetic oligonucleotide
gcgcuggaaacaggccucc

SEQ ID NO: 2887423 - RNA, 19 nt, Artificial Sequence
  Description of Artificial Sequence: Synthetic oligonucleotide
gcagcacagggugauauuu

SEQ ID NO: 2887424 - RNA, 19 nt, Artificial Sequence
  Description of Artificial Sequence: Synthetic oligonucleotide
gcgacgcuucgguugaggu

SEQ ID NO: 2887425 - RNA, 19 nt, Artificial Sequence
  Description of Artificial Sequence: Synthetic oligonucleotide
cgggguacuggaugcgcug

SEQ ID NO: 2887426 - RNA, 19 nt, Artificial Sequence
  Description of Artificial Sequence: Synthetic oligonucleotide
ccauugguuguggcagcac

SEQ ID NO: 2887427 - RNA, 19 nt, Artificial Sequence
  Description of Artificial Sequence: Synthetic oligonucleotide
ggguggccuaggugguaca

SEQ ID NO: 2887428 - RNA, 19 nt, Artificial Sequence
  Description of Artificial Sequence: Synthetic oligonucleotide
ggccuaggugguacaggca

SEQ ID NO: 2887429 - RNA, 19 nt, Artificial Sequence
  Description of Artificial Sequence: Synthetic oligonucleotide
cgucgggguacuggaugcg

SEQ ID NO: 2887430 - RNA, 19 nt, Artificial Sequence
  Description of Artificial Sequence: Synthetic oligonucleotide
gcagcggagugaaggagau

SEQ ID NO: 2887431 - RNA, 19 nt, Artificial Sequence
  Description of Artificial Sequence: Synthetic oligonucleotide
cgcaguugcagcggaguga

SEQ ID NO: 2887432 - RNA, 19 nt, Artificial Sequence
  Description of Artificial Sequence: Synthetic oligonucleotide
ccagaucugcacucuggau

SEQ ID NO: 2887433 - RNA, 19 nt, Artificial Sequence
  Description of Artificial Sequence: Synthetic oligonucleotide
ggcagcacagggugauauu

SEQ ID NO: 2887434 - RNA, 19 nt, Artificial Sequence
  Description of Artificial Sequence: Synthetic oligonucleotide
cgaugaaguugucuccacu

SEQ ID NO: 2887435 - RNA, 19 nt, Artificial Sequence
  Description of Artificial Sequence: Synthetic oligonucleotide
ccuccacaauagggauggg

SEQ ID NO: 2887436 - RNA, 19 nt, Artificial Sequence
  Description of Artificial Sequence: Synthetic oligonucleotide
gcaagcacgucgggguacu

SEQ ID NO: 2887437 - RNA, 19 nt, Artificial Sequence
  Description of Artificial Sequence: Synthetic oligonucleotide
guggcagcacagggugaua

SEQ ID NO: 2887438 - RNA, 19 nt, Artificial Sequence
  Description of Artificial Sequence: Synthetic oligonucleotide
ggcguugggcaagauucau

SEQ ID NO: 2887439 - RNA, 19 nt, Artificial Sequence
  Description of Artificial Sequence: Synthetic oligonucleotide
ccacuggaaucauguuucu

SEQ ID NO: 2887440 - RNA, 19 nt, Artificial Sequence
  Description of Artificial Sequence: Synthetic oligonucleotide
caauagggauggggccaua

SEQ ID NO: 2887441 - RNA, 19 nt, Artificial Sequence
  Description of Artificial Sequence: Synthetic oligonucleotide
cgguugagguuggggcugc

SEQ ID NO: 2887442 - RNA, 19 nt, Artificial Sequence
  Description of Artificial Sequence: Synthetic oligonucleotide
ccauagcuacauguggcau

SEQ ID NO: 2887443 - RNA, 19 nt, Artificial Sequence
  Description of Artificial Sequence: Synthetic oligonucleotide
gggguggaagaggcaaaau

SEQ ID NO: 2887444 - RNA, 19 nt, Artificial Sequence
  Description of Artificial Sequence: Synthetic oligonucleotide
gcguugggcaagauucauu

SEQ ID NO: 2887445 - RNA, 19 nt, Artificial Sequence
  Description of Artificial Sequence: Synthetic oligonucleotide
cgguagcggcgacgcuucg

SEQ ID NO: 2887446 - RNA, 19 nt, Artificial Sequence
  Description of Artificial Sequence: Synthetic oligonucleotide
cccgcaguugcagcggagu

SEQ ID NO: 2887447 - RNA, 19 nt, Artificial Sequence
  Description of Artificial Sequence: Synthetic oligonucleotide
cgcuucgguugagguuggg

SEQ ID NO: 2887448 - RNA, 19 nt, Artificial Sequence
  Description of Artificial Sequence: Synthetic oligonucleotide
cgaggcguugggcaagauu

SEQ ID NO: 2887449 - RNA, 19 nt, Artificial Sequence
  Description of Artificial Sequence: Synthetic oligonucleotide
cgacgcuucgguugagguu

SEQ ID NO: 2887450 - RNA, 19 nt, Artificial Sequence
  Description of Artificial Sequence: Synthetic oligonucleotide
cagcggagugaaggagauu

SEQ ID NO: 2887451 - RNA, 19 nt, Artificial Sequence
  Description of Artificial Sequence: Synthetic oligonucleotide
gcacgucgggguacuggau

SEQ ID NO: 2887452 - RNA, 19 nt, Artificial Sequence
  Description of Artificial Sequence: Synthetic oligonucleotide
cgcuggaaacaggccucca

SEQ ID NO: 2887453 - RNA, 19 nt, Artificial Sequence
  Description of Artificial Sequence: Synthetic oligonucleotide
cggcgacgcuucgguugag

SEQ ID NO: 2887454 - RNA, 19 nt, Artificial Sequence
  Description of Artificial Sequence: Synthetic oligonucleotide
ccgaggcguugggcaagau

SEQ ID NO: 2887455 - RNA, 19 nt, Artificial Sequence
  Description of Artificial Sequence: Synthetic oligonucleotide
auuauuucgucuuuguucc

SEQ ID NO: 2887456 - RNA, 19 nt, Artificial Sequence
  Description of Artificial Sequence: Synthetic oligonucleotide
  modified_base (15)..(15): a, c, u, g, unknown or other
uuuaacuuaacaaanaaaa

SEQ ID NO: 2887457 - RNA, 19 nt, Artificial Sequence
  Description of Artificial Sequence: Synthetic oligonucleotide
aagagauacaguucgaaac

SEQ ID NO: 2887458 - RNA, 19 nt, Artificial Sequence
  Description of Artificial Sequence: Synthetic oligonucleotide
uguuccuucaacgagaggg

SEQ ID NO: 2887459 - RNA, 19 nt, Artificial Sequence
  Description of Artificial Sequence: Synthetic oligonucleotide
aaacgugucuccaagauac

SEQ ID NO: 2887460 - RNA, 19 nt, Artificial Sequence
  Description of Artificial Sequence: Synthetic oligonucleotide
acuacuucugcauagcugg

SEQ ID NO: 2887461 - RNA, 19 nt, Artificial Sequence
  Description of Artificial Sequence: Synthetic oligonucleotide
agagauacaguucgaaacc

SEQ ID NO: 2887462 - RNA, 19 nt, Artificial Sequence
  Description of Artificial Sequence: Synthetic oligonucleotide
ucaaucucugaauaaagag

SEQ ID NO: 2887463 - RNA, 19 nt, Artificial Sequence
  Description of Artificial Sequence: Synthetic oligonucleotide
ugaauaaagagguggaggc

SEQ ID NO: 2887464 - RNA, 19 nt, Artificial Sequence
  Description of Artificial Sequence: Synthetic oligonucleotide
aauaaagcaugaucacugg

SEQ ID NO: 2887465 - RNA, 19 nt, Artificial Sequence
  Description of Artificial Sequence: Synthetic oligonucleotide
gauuauuucgucuuuguuc

SEQ ID NO: 2887466 - RNA, 19 nt, Artificial Sequence
  Description of Artificial Sequence: Synthetic oligonucleotide
aaaaccaucgcaagcauuc

SEQ ID NO: 2887467 - RNA, 19 nt, Artificial Sequence
  Description of Artificial Sequence: Synthetic oligonucleotide
aaauaaagcaugaucacug

SEQ ID NO: 2887468 - RNA, 19 nt, Artificial Sequence
  Description of Artificial Sequence: Synthetic oligonucleotide
aaagcaauuccacuuccuc

SEQ ID NO: 2887469 - RNA, 19 nt, Artificial Sequence
  Description of Artificial Sequence: Synthetic oligonucleotide
aacgagaggggcaagaugg

SEQ ID NO: 2887470 - RNA, 19 nt, Artificial Sequence
  Description of Artificial Sequence: Synthetic oligonucleotide
aaucaaguguuccuucaac

SEQ ID NO: 2887471 - RNA, 19 nt, Artificial Sequence
  Description of Artificial Sequence: Synthetic oligonucleotide
guauuugccauuuucuggg

SEQ ID NO: 2887472 - RNA, 19 nt, Artificial Sequence
  Description of Artificial Sequence: Synthetic oligonucleotide
uggauauaugcaaacagug

SEQ ID NO: 2887473 - RNA, 19 nt, Artificial Sequence
  Description of Artificial Sequence: Synthetic oligonucleotide
caaucucugaauaaagagg

SEQ ID NO: 2887474 - RNA, 19 nt, Artificial Sequence
  Description of Artificial Sequence: Synthetic oligonucleotide
aaagcaugaucacugguug

SEQ ID NO: 2887475 - RNA, 19 nt, Artificial Sequence
  Description of Artificial Sequence: Synthetic oligonucleotide
gaaacuccuggauauaugc

SEQ ID NO: 2887476 - RNA, 19 nt, Artificial Sequence
  Description of Artificial Sequence: Synthetic oligonucleotide
ucucugaauaaagaggugg

SEQ ID NO: 2887477 - RNA, 19 nt, Artificial Sequence
  Description of Artificial Sequence: Synthetic oligonucleotide
  modified_base (14)..(14): a, c, u, g, unknown or other
acacuugagguucngcuac

SEQ ID NO: 2887478 - RNA, 19 nt, Artificial Sequence
  Description of Artificial Sequence: Synthetic oligonucleotide
aaucucugaauaaagaggu

SEQ ID NO: 2887479 - RNA, 19 nt, Artificial Sequence
  Description of Artificial Sequence: Synthetic oligonucleotide
uucgaaacccauaucaacu

SEQ ID NO: 2887480 - RNA, 19 nt, Artificial Sequence
  Description of Artificial Sequence: Synthetic oligonucleotide
ucuuucaaaaccaucgcaa

SEQ ID NO: 2887481 - RNA, 19 nt, Artificial Sequence
  Description of Artificial Sequence: Synthetic oligonucleotide
aagagguggaggcaagaac

SEQ ID NO: 2887482 - RNA, 19 nt, Artificial Sequence
  Description of Artificial Sequence: Synthetic oligonucleotide
aaaauaaagcaugaucacu

SEQ ID NO: 2887483 - RNA, 19 nt, Artificial Sequence
  Description of Artificial Sequence: Synthetic oligonucleotide
agagguggaggcaagaacc

SEQ ID NO: 2887484 - RNA, 19 nt, Artificial Sequence
  Description of Artificial Sequence: Synthetic oligonucleotide
aucaaguguuccuucaacg

SEQ ID NO: 2887485 - RNA, 19 nt, Artificial Sequence
  Description of Artificial Sequence: Synthetic oligonucleotide
guucaugcuacacugacug

SEQ ID NO: 2887486 - RNA, 19 nt, Artificial Sequence
  Description of Artificial Sequence: Synthetic oligonucleotide
uuucaaaaccaucgcaagc

SEQ ID NO: 2887487 - RNA, 19 nt, Artificial Sequence
  Description of Artificial Sequence: Synthetic oligonucleotide
gaagagcucuuucaaaacc

SEQ ID NO: 2887488 - RNA, 19 nt, Artificial Sequence
  Description of Artificial Sequence: Synthetic oligonucleotide
aaccaucgcaagcauuccc

SEQ ID NO: 2887489 - RNA, 19 nt, Artificial Sequence
  Description of Artificial Sequence: Synthetic oligonucleotide
uucaaaaccaucgcaagca

SEQ ID NO: 2887490 - RNA, 19 nt, Artificial Sequence
  Description of Artificial Sequence: Synthetic oligonucleotide
agcucuuucaaaaccaucg

SEQ ID NO: 2887491 - RNA, 19 nt, Artificial Sequence
  Description of Artificial Sequence: Synthetic oligonucleotide
uauaugcaaacaguggucc

SEQ ID NO: 2887492 - RNA, 19 nt, Artificial Sequence
  Description of Artificial Sequence: Synthetic oligonucleotide
  modified_base (16)..(16): a, c, u, g, unknown or other
ucacacuugagguucngcu

SEQ ID NO: 2887493 - RNA, 19 nt, Artificial Sequence
  Description of Artificial Sequence: Synthetic oligonucleotide
acugaucaggguuuggauc

SEQ ID NO: 2887494 - RNA, 19 nt, Artificial Sequence
  Description of Artificial Sequence: Synthetic oligonucleotide
gauauaugcaaacaguggu

SEQ ID NO: 2887495 - RNA, 19 nt, Artificial Sequence
  Description of Artificial Sequence: Synthetic oligonucleotide
  modified_base (17)..(17): a, c, u, g, unknown or other
acuuuaacuuaacaaanaa

SEQ ID NO: 2887496 - RNA, 19 nt, Artificial Sequence
  Description of Artificial Sequence: Synthetic oligonucleotide
aguuacuacuucugcauag

SEQ ID NO: 2887497 - RNA, 19 nt, Artificial Sequence
  Description of Artificial Sequence: Synthetic oligonucleotide
ucauguauuugccauuuuc

SEQ ID NO: 2887498 - RNA, 19 nt, Artificial Sequence
  Description of Artificial Sequence: Synthetic oligonucleotide
ucaacucgagucaaucaag

SEQ ID NO: 2887499 - RNA, 19 nt, Artificial Sequence
  Description of Artificial Sequence: Synthetic oligonucleotide
cugaauaaagagguggagg

SEQ ID NO: 2887500 - RNA, 19 nt, Artificial Sequence
  Description of Artificial Sequence: Synthetic oligonucleotide
uucauguucaugcuacacu

SEQ ID NO: 2887501 - RNA, 19 nt, Artificial Sequence
  Description of Artificial Sequence: Synthetic oligonucleotide
uguuucauguauuugccau

SEQ ID NO: 2887502 - RNA, 19 nt, Artificial Sequence
  Description of Artificial Sequence: Synthetic oligonucleotide
uacaguucgaaacccauau

SEQ ID NO: 2887503 - RNA, 19 nt, Artificial Sequence
  Description of Artificial Sequence: Synthetic oligonucleotide
uacuucucuguccucagcc

SEQ ID NO: 2887504 - RNA, 19 nt, Artificial Sequence
  Description of Artificial Sequence: Synthetic oligonucleotide
ugacugcucacacuugagg

SEQ ID NO: 2887505 - RNA, 19 nt, Artificial Sequence
  Description of Artificial Sequence: Synthetic oligonucleotide
aauaaagagguggaggcaa

SEQ ID NO: 2887506 - RNA, 19 nt, Artificial Sequence
  Description of Artificial Sequence: Synthetic oligonucleotide
  modified_base (16)..(16): a, c, u, g, unknown or other
cuuuaacuuaacaaanaaa

SEQ ID NO: 2887507 - RNA, 19 nt, Artificial Sequence
  Description of Artificial Sequence: Synthetic oligonucleotide
cuuucaaaaccaucgcaag

SEQ ID NO: 2887508 - RNA, 19 nt, Artificial Sequence
  Description of Artificial Sequence: Synthetic oligonucleotide
aacuccuggauauaugcaa

SEQ ID NO: 2887509 - RNA, 19 nt, Artificial Sequence
  Description of Artificial Sequence: Synthetic oligonucleotide
  modified_base (18)..(18): a, c, u, g, unknown or other
uacuuuaacuuaacaaana

SEQ ID NO: 2887510 - RNA, 19 nt, Artificial Sequence
  Description of Artificial Sequence: Synthetic oligonucleotide
ucaaguguuccuucaacga

SEQ ID NO: 2887511 - RNA, 19 nt, Artificial Sequence
  Description of Artificial Sequence: Synthetic oligonucleotide
uaaagcaugaucacugguu

SEQ ID NO: 2887512 - RNA, 19 nt, Artificial Sequence
  Description of Artificial Sequence: Synthetic oligonucleotide
auaugcaaacagugguccc

SEQ ID NO: 2887513 - RNA, 19 nt, Artificial Sequence
  Description of Artificial Sequence: Synthetic oligonucleotide
agcaauuccacuuccucug

SEQ ID NO: 2887514 - RNA, 19 nt, Artificial Sequence
  Description of Artificial Sequence: Synthetic oligonucleotide
auguauuugccauuuucug

SEQ ID NO: 2887515 - RNA, 19 nt, Artificial Sequence
  Description of Artificial Sequence: Synthetic oligonucleotide
ucaguuacuacuucugcau

SEQ ID NO: 2887516 - RNA, 19 nt, Artificial Sequence
  Description of Artificial Sequence: Synthetic oligonucleotide
gaucaaucucugaauaaag

SEQ ID NO: 2887517 - RNA, 19 nt, Artificial Sequence
  Description of Artificial Sequence: Synthetic oligonucleotide
uacuacuucugcauagcug

SEQ ID NO: 2887518 - RNA, 19 nt, Artificial Sequence
  Description of Artificial Sequence: Synthetic oligonucleotide
aaccgaaacuccuggauau

SEQ ID NO: 2887519 - RNA, 19 nt, Artificial Sequence
  Description of Artificial Sequence: Synthetic oligonucleotide
aucgcaagcauucccuggg

SEQ ID NO: 2887520 - RNA, 19 nt, Artificial Sequence
  Description of Artificial Sequence: Synthetic oligonucleotide
ucaaucaaguguuccuuca

SEQ ID NO: 2887521 - RNA, 19 nt, Artificial Sequence
  Description of Artificial Sequence: Synthetic oligonucleotide
auaucaacucgagucaauc

SEQ ID NO: 2887522 - RNA, 19 nt, Artificial Sequence
  Description of Artificial Sequence: Synthetic oligonucleotide
uuuggaucaaucucugaau

SEQ ID NO: 2887523 - RNA, 19 nt, Artificial Sequence
  Description of Artificial Sequence: Synthetic oligonucleotide
ucagccggaagagauacag

SEQ ID NO: 2887524 - RNA, 19 nt, Artificial Sequence
  Description of Artificial Sequence: Synthetic oligonucleotide
auauaugcaaacagugguc

SEQ ID NO: 2887525 - RNA, 19 nt, Artificial Sequence
  Description of Artificial Sequence: Synthetic oligonucleotide
aucacugguuguuucaugu

SEQ ID NO: 2887526 - RNA, 19 nt, Artificial Sequence
  Description of Artificial Sequence: Synthetic oligonucleotide
caagaaccgaaacuccugg

SEQ ID NO: 2887527 - RNA, 19 nt, Artificial Sequence
  Description of Artificial Sequence: Synthetic oligonucleotide
aacucgagucaaucaagug

SEQ ID NO: 2887528 - RNA, 19 nt, Artificial Sequence
  Description of Artificial Sequence: Synthetic oligonucleotide
ucugaauaaagagguggag

SEQ ID NO: 2887529 - RNA, 19 nt, Artificial Sequence
  Description of Artificial Sequence: Synthetic oligonucleotide
aaaccaucgcaagcauucc

SEQ ID NO: 2887530 - RNA, 19 nt, Artificial Sequence
  Description of Artificial Sequence: Synthetic oligonucleotide
uccaagauacuucucuguc

SEQ ID NO: 2887531 - RNA, 19 nt, Artificial Sequence
  Description of Artificial Sequence: Synthetic oligonucleotide
ugggcaaaagcaauuccac

SEQ ID NO: 2887532 - RNA, 19 nt, Artificial Sequence
  Description of Artificial Sequence: Synthetic oligonucleotide
caguucauguucaugcuac

SEQ ID NO: 2887533 - RNA, 19 nt, Artificial Sequence
  Description of Artificial Sequence: Synthetic oligonucleotide
gaggcaagaaccgaaacuc

SEQ ID NO: 2887534 - RNA, 19 nt, Artificial Sequence
  Description of Artificial Sequence: Synthetic oligonucleotide
ucuguccucagccggaaga

SEQ ID NO: 2887535 - RNA, 19 nt, Artificial Sequence
  Description of Artificial Sequence: Synthetic oligonucleotide
acaguggucccugaagagc

SEQ ID NO: 2887536 - RNA, 19 nt, Artificial Sequence
  Description of Artificial Sequence: Synthetic oligonucleotide
uaucaacucgagucaauca

SEQ ID NO: 2887537 - RNA, 19 nt, Artificial Sequence
  Description of Artificial Sequence: Synthetic oligonucleotide
aucaacucgagucaaucaa

SEQ ID NO: 2887538 - RNA, 19 nt, Artificial Sequence
  Description of Artificial Sequence: Synthetic oligonucleotide
gaagggcuagcuccgagcc

SEQ ID NO: 2887539 - RNA, 19 nt, Artificial Sequence
  Description of Artificial Sequence: Synthetic oligonucleotide
ucaggguuuggaucaaucu

SEQ ID NO: 2887540 - RNA, 19 nt, Artificial Sequence
  Description of Artificial Sequence: Synthetic oligonucleotide
uuggaucaaucucugaaua

SEQ ID NO: 2887541 - RNA, 19 nt, Artificial Sequence
  Description of Artificial Sequence: Synthetic oligonucleotide
aauuccacuuccucugaaa

SEQ ID NO: 2887542 - RNA, 19 nt, Artificial Sequence
  Description of Artificial Sequence: Synthetic oligonucleotide
gucuuuguuccucaguuac

SEQ ID NO: 2887543 - RNA, 19 nt, Artificial Sequence
  Description of Artificial Sequence: Synthetic oligonucleotide
uccucaguuacuacuucug

SEQ ID NO: 2887544 - RNA, 19 nt, Artificial Sequence
  Description of Artificial Sequence: Synthetic oligonucleotide
guuuggaucaaucucugaa

SEQ ID NO: 2887545 - RNA, 19 nt, Artificial Sequence
  Description of Artificial Sequence: Synthetic oligonucleotide
ucuccaagauacuucucug

SEQ ID NO: 2887546 - RNA, 19 nt, Artificial Sequence
  Description of Artificial Sequence: Synthetic oligonucleotide
aaaacgugucuccaagaua

SEQ ID NO: 2887547 - RNA, 19 nt, Artificial Sequence
  Description of Artificial Sequence: Synthetic oligonucleotide
aagagcucuuucaaaacca

SEQ ID NO: 2887548 - RNA, 19 nt, Artificial Sequence
  Description of Artificial Sequence: Synthetic oligonucleotide
caaaagcaauuccacuucc

SEQ ID NO: 2887549 - RNA, 19 nt, Artificial Sequence
  Description of Artificial Sequence: Synthetic oligonucleotide
ucaugcuacacugacugcu

SEQ ID NO: 2887550 - RNA, 19 nt, Artificial Sequence
  Description of Artificial Sequence: Synthetic oligonucleotide
caaacaguggucccugaag

SEQ ID NO: 2887551 - RNA, 19 nt, Artificial Sequence
  Description of Artificial Sequence: Synthetic oligonucleotide
caguucgaaacccauauca

SEQ ID NO: 2887552 - RNA, 19 nt, Artificial Sequence
  Description of Artificial Sequence: Synthetic oligonucleotide
guuguuucauguauuugcc

SEQ ID NO: 2887553 - RNA, 19 nt, Artificial Sequence
  Description of Artificial Sequence: Synthetic oligonucleotide
gauacuucucuguccucag

SEQ ID NO: 2887554 - RNA, 19 nt, Artificial Sequence
  Description of Artificial Sequence: Synthetic oligonucleotide
acuucugcauagcugggug

SEQ ID NO: 2887555 - RNA, 19 nt, Artificial Sequence
  Description of Artificial Sequence: Synthetic oligonucleotide
acuucucuguccucagccg

SEQ ID NO: 2887556 - RNA, 19 nt, Artificial Sequence
  Description of Artificial Sequence: Synthetic oligonucleotide
uuacuacuucugcauagcu

SEQ ID NO: 2887557 - RNA, 19 nt, Artificial Sequence
  Description of Artificial Sequence: Synthetic oligonucleotide
guucgaaacccauaucaac

SEQ ID NO: 2887558 - RNA, 19 nt, Artificial Sequence
  Description of Artificial Sequence: Synthetic oligonucleotide
ggauauaugcaaacagugg

SEQ ID NO: 2887559 - RNA, 19 nt, Artificial Sequence
  Description of Artificial Sequence: Synthetic oligonucleotide
ucgucuuuguuccucaguu

SEQ ID NO: 2887560 - RNA, 19 nt, Artificial Sequence
  Description of Artificial Sequence: Synthetic oligonucleotide
gaagagauacaguucgaaa

SEQ ID NO: 2887561 - RNA, 19 nt, Artificial Sequence
  Description of Artificial Sequence: Synthetic oligonucleotide
ggugcuucagguucuuucg

SEQ ID NO: 2887562 - RNA, 19 nt, Artificial Sequence
  Description of Artificial Sequence: Synthetic oligonucleotide
auaaagcaugaucacuggu

SEQ ID NO: 2887563 - RNA, 19 nt, Artificial Sequence
  Description of Artificial Sequence: Synthetic oligonucleotide
gauggucuguccucggaug

SEQ ID NO: 2887564 - RNA, 19 nt, Artificial Sequence
  Description of Artificial Sequence: Synthetic oligonucleotide
cucggaugacugaucaggg

SEQ ID NO: 2887565 - RNA, 19 nt, Artificial Sequence
  Description of Artificial Sequence: Synthetic oligonucleotide
aaacccauaucaacucgag

SEQ ID NO: 2887566 - RNA, 19 nt, Artificial Sequence
  Description of Artificial Sequence: Synthetic oligonucleotide
uguucaugcuacacugacu

SEQ ID NO: 2887567 - RNA, 19 nt, Artificial Sequence
  Description of Artificial Sequence: Synthetic oligonucleotide
gagauacaguucgaaaccc

SEQ ID NO: 2887568 - RNA, 19 nt, Artificial Sequence
  Description of Artificial Sequence: Synthetic oligonucleotide
ucgaaacccauaucaacuc

SEQ ID NO: 2887569 - RNA, 19 nt, Artificial Sequence
  Description of Artificial Sequence: Synthetic oligonucleotide
uggguggugcuucagguuc

SEQ ID NO: 2887570 - RNA, 19 nt, Artificial Sequence
  Description of Artificial Sequence: Synthetic oligonucleotide
uuguuucauguauuugcca

SEQ ID NO: 2887571 - RNA, 19 nt, Artificial Sequence
  Description of Artificial Sequence: Synthetic oligonucleotide
uucuuucgagggaagggcu

SEQ ID NO: 2887572 - RNA, 19 nt, Artificial Sequence
  Description of Artificial Sequence: Synthetic oligonucleotide
agaaccgaaacuccuggau

SEQ ID NO: 2887573 - RNA, 19 nt, Artificial Sequence
  Description of Artificial Sequence: Synthetic oligonucleotide
uggaucaaucucugaauaa

SEQ ID NO: 2887574 - RNA, 19 nt, Artificial Sequence
  Description of Artificial Sequence: Synthetic oligonucleotide
aagaaccgaaacuccugga

SEQ ID NO: 2887575 - RNA, 19 nt, Artificial Sequence
  Description of Artificial Sequence: Synthetic oligonucleotide
auuccacuuccucugaaaa

SEQ ID NO: 2887576 - RNA, 19 nt, Artificial Sequence
  Description of Artificial Sequence: Synthetic oligonucleotide
ccggaagagauacaguucg

SEQ ID NO: 2887577 - RNA, 19 nt, Artificial Sequence
  Description of Artificial Sequence: Synthetic oligonucleotide
acaguucgaaacccauauc

SEQ ID NO: 2887578 - RNA, 19 nt, Artificial Sequence
  Description of Artificial Sequence: Synthetic oligonucleotide
uucagguucuuucgaggga

SEQ ID NO: 2887579 - RNA, 19 nt, Artificial Sequence
  Description of Artificial Sequence: Synthetic oligonucleotide
agccggaagagauacaguu

SEQ ID NO: 2887580 - RNA, 19 nt, Artificial Sequence
  Description of Artificial Sequence: Synthetic oligonucleotide
cugaagagcucuuucaaaa

SEQ ID NO: 2887581 - RNA, 19 nt, Artificial Sequence
  Description of Artificial Sequence: Synthetic oligonucleotide
guucuuucgagggaagggc

SEQ ID NO: 2887582 - RNA, 19 nt, Artificial Sequence
  Description of Artificial Sequence: Synthetic oligonucleotide
acacugacugcucacacuu

SEQ ID NO: 2887583 - RNA, 19 nt, Artificial Sequence
  Description of Artificial Sequence: Synthetic oligonucleotide
aaaagcaauuccacuuccu

SEQ ID NO: 2887584 - RNA, 19 nt, Artificial Sequence
  Description of Artificial Sequence: Synthetic oligonucleotide
aagauggucuguccucgga

SEQ ID NO: 2887585 - RNA, 19 nt, Artificial Sequence
  Description of Artificial Sequence: Synthetic oligonucleotide
cuucugcauagcugggugg

SEQ ID NO: 2887586 - RNA, 19 nt, Artificial Sequence
  Description of Artificial Sequence: Synthetic oligonucleotide
uccuucaacgagaggggca

SEQ ID NO: 2887587 - RNA, 19 nt, Artificial Sequence
  Description of Artificial Sequence: Synthetic oligonucleotide
auuucgucuuuguuccuca

SEQ ID NO: 2887588 - RNA, 19 nt, Artificial Sequence
  Description of Artificial Sequence: Synthetic oligonucleotide
ucaaaaccaucgcaagcau

SEQ ID NO: 2887589 - RNA, 19 nt, Artificial Sequence
  Description of Artificial Sequence: Synthetic oligonucleotide
ucccugaagagcucuuuca

SEQ ID NO: 2887590 - RNA, 19 nt, Artificial Sequence
  Description of Artificial Sequence: Synthetic oligonucleotide
uggggcgagauuauuucgu

SEQ ID NO: 2887591 - RNA, 19 nt, Artificial Sequence
  Description of Artificial Sequence: Synthetic oligonucleotide
aucaaucucugaauaaaga

SEQ ID NO: 2887592 - RNA, 19 nt, Artificial Sequence
  Description of Artificial Sequence: Synthetic oligonucleotide
caggguuuggaucaaucuc

SEQ ID NO: 2887593 - RNA, 19 nt, Artificial Sequence
  Description of Artificial Sequence: Synthetic oligonucleotide
ccuggauauaugcaaacag

SEQ ID NO: 2887594 - RNA, 19 nt, Artificial Sequence
  Description of Artificial Sequence: Synthetic oligonucleotide
augaucacugguuguuuca

SEQ ID NO: 2887595 - RNA, 19 nt, Artificial Sequence
  Description of Artificial Sequence: Synthetic oligonucleotide
aggguuuggaucaaucucu

SEQ ID NO: 2887596 - RNA, 19 nt, Artificial Sequence
  Description of Artificial Sequence: Synthetic oligonucleotide
agauacuucucuguccuca

SEQ ID NO: 2887597 - RNA, 19 nt, Artificial Sequence
  Description of Artificial Sequence: Synthetic oligonucleotide
cuagcuccgagccaguuca

SEQ ID NO: 2887598 - RNA, 19 nt, Artificial Sequence
  Description of Artificial Sequence: Synthetic oligonucleotide
guuccuucaacgagagggg

SEQ ID NO: 2887599 - RNA, 19 nt, Artificial Sequence
  Description of Artificial Sequence: Synthetic oligonucleotide
uauuugccauuuucugggc

SEQ ID NO: 2887600 - RNA, 19 nt, Artificial Sequence
  Description of Artificial Sequence: Synthetic oligonucleotide
cugggcaaaagcaauucca

SEQ ID NO: 2887601 - RNA, 19 nt, Artificial Sequence
  Description of Artificial Sequence: Synthetic oligonucleotide
caucgcaagcauucccugg

SEQ ID NO: 2887602 - RNA, 19 nt, Artificial Sequence
  Description of Artificial Sequence: Synthetic oligonucleotide
guuacuacuucugcauagc

SEQ ID NO: 2887603 - RNA, 19 nt, Artificial Sequence
  Description of Artificial Sequence: Synthetic oligonucleotide
uuucauguauuugccauuu

SEQ ID NO: 2887604 - RNA, 19 nt, Artificial Sequence
  Description of Artificial Sequence: Synthetic oligonucleotide
cucaguuacuacuucugca

SEQ ID NO: 2887605 - RNA, 19 nt, Artificial Sequence
  Description of Artificial Sequence: Synthetic oligonucleotide
gagguggaggcaagaaccg

SEQ ID NO: 2887606 - RNA, 19 nt, Artificial Sequence
  Description of Artificial Sequence: Synthetic oligonucleotide
caugaucacugguuguuuc

SEQ ID NO: 2887607 - RNA, 19 nt, Artificial Sequence
  Description of Artificial Sequence: Synthetic oligonucleotide
agauuauuucgucuuuguu

SEQ ID NO: 2887608 - RNA, 19 nt, Artificial Sequence
  Description of Artificial Sequence: Synthetic oligonucleotide
uuuguuccucaguuacuac

SEQ ID NO: 2887609 - RNA, 19 nt, Artificial Sequence
  Description of Artificial Sequence: Synthetic oligonucleotide
gaucacugguuguuucaug

SEQ ID NO: 2887610 - RNA, 19 nt, Artificial Sequence
  Description of Artificial Sequence: Synthetic oligonucleotide
cucugaauaaagaggugga

SEQ ID NO: 2887611 - RNA, 19 nt, Artificial Sequence
  Description of Artificial Sequence: Synthetic oligonucleotide
uuucugggcaaaagcaauu

SEQ ID NO: 2887612 - RNA, 19 nt, Artificial Sequence
  Description of Artificial Sequence: Synthetic oligonucleotide
gcaagcauucccuggggcg

SEQ ID NO: 2887613 - RNA, 19 nt, Artificial Sequence
  Description of Artificial Sequence: Synthetic oligonucleotide
cuggggcgagauuauuucg

SEQ ID NO: 2887614 - RNA, 19 nt, Artificial Sequence
  Description of Artificial Sequence: Synthetic oligonucleotide
uucgucuuuguuccucagu

SEQ ID NO: 2887615 - RNA, 19 nt, Artificial Sequence
  Description of Artificial Sequence: Synthetic oligonucleotide
uccuggauauaugcaaaca

SEQ ID NO: 2887616 - RNA, 19 nt, Artificial Sequence
  Description of Artificial Sequence: Synthetic oligonucleotide
auuugccauuuucugggca

SEQ ID NO: 2887617 - RNA, 19 nt, Artificial Sequence
  Description of Artificial Sequence: Synthetic oligonucleotide
uacacugacugcucacacu

SEQ ID NO: 2887618 - RNA, 19 nt, Artificial Sequence
  Description of Artificial Sequence: Synthetic oligonucleotide
gaaacccauaucaacucga

SEQ ID NO: 2887619 - RNA, 19 nt, Artificial Sequence
  Description of Artificial Sequence: Synthetic oligonucleotide
agaggggcaagauggucug

SEQ ID NO: 2887620 - RNA, 19 nt, Artificial Sequence
  Description of Artificial Sequence: Synthetic oligonucleotide
aggcaagaaccgaaacucc

SEQ ID NO: 2887621 - RNA, 19 nt, Artificial Sequence
  Description of Artificial Sequence: Synthetic oligonucleotide
ucgcaagcauucccugggg

SEQ ID NO: 2887622 - RNA, 19 nt, Artificial Sequence
  Description of Artificial Sequence: Synthetic oligonucleotide
aaacuccuggauauaugca

SEQ ID NO: 2887623 - RNA, 19 nt, Artificial Sequence
  Description of Artificial Sequence: Synthetic oligonucleotide
uggaggcaagaaccgaaac

SEQ ID NO: 2887624 - RNA, 19 nt, Artificial Sequence
  Description of Artificial Sequence: Synthetic oligonucleotide
ccauuuucugggcaaaagc

SEQ ID NO: 2887625 - RNA, 19 nt, Artificial Sequence
  Description of Artificial Sequence: Synthetic oligonucleotide
gguucuuucgagggaaggg

SEQ ID NO: 2887626 - RNA, 19 nt, Artificial Sequence
  Description of Artificial Sequence: Synthetic oligonucleotide
uauuucgucuuuguuccuc

SEQ ID NO: 2887627 - RNA, 19 nt, Artificial Sequence
  Description of Artificial Sequence: Synthetic oligonucleotide
agcuggguggugcuucagg

SEQ ID NO: 2887628 - RNA, 19 nt, Artificial Sequence
  Description of Artificial Sequence: Synthetic oligonucleotide
uucucuguccucagccgga

SEQ ID NO: 2887629 - RNA, 19 nt, Artificial Sequence
  Description of Artificial Sequence: Synthetic oligonucleotide
gacugcucacacuugaggu

SEQ ID NO: 2887630 - RNA, 19 nt, Artificial Sequence
  Description of Artificial Sequence: Synthetic oligonucleotide
gaauaaagagguggaggca

SEQ ID NO: 2887631 - RNA, 19 nt, Artificial Sequence
  Description of Artificial Sequence: Synthetic oligonucleotide
cucuuucaaaaccaucgca

SEQ ID NO: 2887632 - RNA, 19 nt, Artificial Sequence
  Description of Artificial Sequence: Synthetic oligonucleotide
uucaugcuacacugacugc

SEQ ID NO: 2887633 - RNA, 19 nt, Artificial Sequence
  Description of Artificial Sequence: Synthetic oligonucleotide
aguguuccuucaacgagag

SEQ ID NO: 2887634 - RNA, 19 nt, Artificial Sequence
  Description of Artificial Sequence: Synthetic oligonucleotide
aucaggguuuggaucaauc

SEQ ID NO: 2887635 - RNA, 19 nt, Artificial Sequence
  Description of Artificial Sequence: Synthetic oligonucleotide
uuucgucuuuguuccucag

SEQ ID NO: 2887636 - RNA, 19 nt, Artificial Sequence
  Description of Artificial Sequence: Synthetic oligonucleotide
gaaccgaaacuccuggaua

SEQ ID NO: 2887637 - RNA, 19 nt, Artificial Sequence
  Description of Artificial Sequence: Synthetic oligonucleotide
ugguuguuucauguauuug

SEQ ID NO: 2887638 - RNA, 19 nt, Artificial Sequence
  Description of Artificial Sequence: Synthetic oligonucleotide
uucaacgagaggggcaaga

SEQ ID NO: 2887639 - RNA, 19 nt, Artificial Sequence
  Description of Artificial Sequence: Synthetic oligonucleotide
cuccuggauauaugcaaac

SEQ ID NO: 2887640 - RNA, 19 nt, Artificial Sequence
  Description of Artificial Sequence: Synthetic oligonucleotide
caugcuacacugacugcuc

SEQ ID NO: 2887641 - RNA, 19 nt, Artificial Sequence
  Description of Artificial Sequence: Synthetic oligonucleotide
gagggaagggcuagcuccg

SEQ ID NO: 2887642 - RNA, 19 nt, Artificial Sequence
  Description of Artificial Sequence: Synthetic oligonucleotide
gucaaucaaguguuccuuc

SEQ ID NO: 2887643 - RNA, 19 nt, Artificial Sequence
  Description of Artificial Sequence: Synthetic oligonucleotide
cuacuucugcauagcuggg

SEQ ID NO: 2887644 - RNA, 19 nt, Artificial Sequence
  Description of Artificial Sequence: Synthetic oligonucleotide
gagauuauuucgucuuugu

SEQ ID NO: 2887645 - RNA, 19 nt, Artificial Sequence
  Description of Artificial Sequence: Synthetic oligonucleotide
ccaagauacuucucugucc

SEQ ID NO: 2887646 - RNA, 19 nt, Artificial Sequence
  Description of Artificial Sequence: Synthetic oligonucleotide
gaugacugaucaggguuug

SEQ ID NO: 2887647 - RNA, 19 nt, Artificial Sequence
  Description of Artificial Sequence: Synthetic oligonucleotide
uucugcauagcuggguggu

SEQ ID NO: 2887648 - RNA, 19 nt, Artificial Sequence
  Description of Artificial Sequence: Synthetic oligonucleotide
cuggauauaugcaaacagu

SEQ ID NO: 2887649 - RNA, 19 nt, Artificial Sequence
  Description of Artificial Sequence: Synthetic oligonucleotide
uucugggcaaaagcaauuc

SEQ ID NO: 2887650 - RNA, 19 nt, Artificial Sequence
  Description of Artificial Sequence: Synthetic oligonucleotide
cuacacugacugcucacac

SEQ ID NO: 2887651 - RNA, 19 nt, Artificial Sequence
  Description of Artificial Sequence: Synthetic oligonucleotide
uaaagagguggaggcaaga

SEQ ID NO: 2887652 - RNA, 19 nt, Artificial Sequence
  Description of Artificial Sequence: Synthetic oligonucleotide
gagucaaucaaguguuccu

SEQ ID NO: 2887653 - RNA, 19 nt, Artificial Sequence
  Description of Artificial Sequence: Synthetic oligonucleotide
caagauacuucucuguccu

SEQ ID NO: 2887654 - RNA, 19 nt, Artificial Sequence
  Description of Artificial Sequence: Synthetic oligonucleotide
ucuuucgagggaagggcua

SEQ ID NO: 2887655 - RNA, 19 nt, Artificial Sequence
  Description of Artificial Sequence: Synthetic oligonucleotide
auggucuguccucggauga

SEQ ID NO: 2887656 - RNA, 19 nt, Artificial Sequence
  Description of Artificial Sequence: Synthetic oligonucleotide
aguucauguucaugcuaca

SEQ ID NO: 2887657 - RNA, 19 nt, Artificial Sequence
  Description of Artificial Sequence: Synthetic oligonucleotide
agguucuuucgagggaagg

SEQ ID NO: 2887658 - RNA, 19 nt, Artificial Sequence
  Description of Artificial Sequence: Synthetic oligonucleotide
cuuucgagggaagggcuag

SEQ ID NO: 2887659 - RNA, 19 nt, Artificial Sequence
  Description of Artificial Sequence: Synthetic oligonucleotide
gcaaaagcaauuccacuuc

SEQ ID NO: 2887660 - RNA, 19 nt, Artificial Sequence
  Description of Artificial Sequence: Synthetic oligonucleotide
auucccuggggcgagauua

SEQ ID NO: 2887661 - RNA, 19 nt, Artificial Sequence
  Description of Artificial Sequence: Synthetic oligonucleotide
ugcuacacugacugcucac

SEQ ID NO: 2887662 - RNA, 19 nt, Artificial Sequence
  Description of Artificial Sequence: Synthetic oligonucleotide
auaaagagguggaggcaag

SEQ ID NO: 2887663 - RNA, 19 nt, Artificial Sequence
  Description of Artificial Sequence: Synthetic oligonucleotide
caagauggucuguccucgg

SEQ ID NO: 2887664 - RNA, 19 nt, Artificial Sequence
  Description of Artificial Sequence: Synthetic oligonucleotide
guucauguucaugcuacac

SEQ ID NO: 2887665 - RNA, 19 nt, Artificial Sequence
  Description of Artificial Sequence: Synthetic oligonucleotide
aggggcaagauggucuguc

SEQ ID NO: 2887666 - RNA, 19 nt, Artificial Sequence
  Description of Artificial Sequence: Synthetic oligonucleotide
uuccuucaacgagaggggc

SEQ ID NO: 2887667 - RNA, 19 nt, Artificial Sequence
  Description of Artificial Sequence: Synthetic oligonucleotide
cgagggaagggcuagcucc

SEQ ID NO: 2887668 - RNA, 19 nt, Artificial Sequence
  Description of Artificial Sequence: Synthetic oligonucleotide
ccucggaugacugaucagg

SEQ ID NO: 2887669 - RNA, 19 nt, Artificial Sequence
  Description of Artificial Sequence: Synthetic oligonucleotide
agucaaucaaguguuccuu

SEQ ID NO: 2887670 - RNA, 19 nt, Artificial Sequence
  Description of Artificial Sequence: Synthetic oligonucleotide
caacgagaggggcaagaug

SEQ ID NO: 2887671 - RNA, 19 nt, Artificial Sequence
  Description of Artificial Sequence: Synthetic oligonucleotide
gcucuuucaaaaccaucgc

SEQ ID NO: 2887672 - RNA, 19 nt, Artificial Sequence
  Description of Artificial Sequence: Synthetic oligonucleotide
aguucgaaacccauaucaa

SEQ ID NO: 2887673 - RNA, 19 nt, Artificial Sequence
  Description of Artificial Sequence: Synthetic oligonucleotide
uccucggaugacugaucag

SEQ ID NO: 2887674 - RNA, 19 nt, Artificial Sequence
  Description of Artificial Sequence: Synthetic oligonucleotide
uuauuucgucuuuguuccu

SEQ ID NO: 2887675 - RNA, 19 nt, Artificial Sequence
  Description of Artificial Sequence: Synthetic oligonucleotide
gcaagauggucuguccucg

SEQ ID NO: 2887676 - RNA, 19 nt, Artificial Sequence
  Description of Artificial Sequence: Synthetic oligonucleotide
aagggcuagcuccgagcca

SEQ ID NO: 2887677 - RNA, 19 nt, Artificial Sequence
  Description of Artificial Sequence: Synthetic oligonucleotide
cugcucacacuugagguuc

SEQ ID NO: 2887678 - RNA, 19 nt, Artificial Sequence
  Description of Artificial Sequence: Synthetic oligonucleotide
agauacaguucgaaaccca

SEQ ID NO: 2887679 - RNA, 19 nt, Artificial Sequence
  Description of Artificial Sequence: Synthetic oligonucleotide
ugaucacugguuguuucau

SEQ ID NO: 2887680 - RNA, 19 nt, Artificial Sequence
  Description of Artificial Sequence: Synthetic oligonucleotide
ucaacgagaggggcaagau

SEQ ID NO: 2887681 - RNA, 19 nt, Artificial Sequence
  Description of Artificial Sequence: Synthetic oligonucleotide
accaucgcaagcauucccu

SEQ ID NO: 2887682 - RNA, 19 nt, Artificial Sequence
  Description of Artificial Sequence: Synthetic oligonucleotide
ucgagucaaucaaguguuc

SEQ ID NO: 2887683 - RNA, 19 nt, Artificial Sequence
  Description of Artificial Sequence: Synthetic oligonucleotide
cuuuguuccucaguuacua

SEQ ID NO: 2887684 - RNA, 19 nt, Artificial Sequence
  Description of Artificial Sequence: Synthetic oligonucleotide
ggaagggcuagcuccgagc

SEQ ID NO: 2887685 - RNA, 19 nt, Artificial Sequence
  Description of Artificial Sequence: Synthetic oligonucleotide
augcuacacugacugcuca

SEQ ID NO: 2887686 - RNA, 19 nt, Artificial Sequence
  Description of Artificial Sequence: Synthetic oligonucleotide
cauagcuggguggugcuuc

SEQ ID NO: 2887687 - RNA, 19 nt, Artificial Sequence
  Description of Artificial Sequence: Synthetic oligonucleotide
  modified_base (19)..(19): a, c, u, g, unknown or other
ugcucacacuugagguucn

SEQ ID NO: 2887688 - RNA, 19 nt, Artificial Sequence
  Description of Artificial Sequence: Synthetic oligonucleotide
ggaucaaucucugaauaaa

SEQ ID NO: 2887689 - RNA, 19 nt, Artificial Sequence
  Description of Artificial Sequence: Synthetic oligonucleotide
gugucuccaagauacuucu

SEQ ID NO: 2887690 - RNA, 19 nt, Artificial Sequence
  Description of Artificial Sequence: Synthetic oligonucleotide
agcaugaucacugguuguu

SEQ ID NO: 2887691 - RNA, 19 nt, Artificial Sequence
  Description of Artificial Sequence: Synthetic oligonucleotide
ucgagggaagggcuagcuc

SEQ ID NO: 2887692 - RNA, 19 nt, Artificial Sequence
  Description of Artificial Sequence: Synthetic oligonucleotide
uucgagggaagggcuagcu

SEQ ID NO: 2887693 - RNA, 19 nt, Artificial Sequence
  Description of Artificial Sequence: Synthetic oligonucleotide
ucacugguuguuucaugua

SEQ ID NO: 2887694 - RNA, 19 nt, Artificial Sequence
  Description of Artificial Sequence: Synthetic oligonucleotide
cucgagucaaucaaguguu

SEQ ID NO: 2887695 - RNA, 19 nt, Artificial Sequence
  Description of Artificial Sequence: Synthetic oligonucleotide
aagcauucccuggggcgag

SEQ ID NO: 2887696 - RNA, 19 nt, Artificial Sequence
  Description of Artificial Sequence: Synthetic oligonucleotide
auagcuggguggugcuuca

SEQ ID NO: 2887697 - RNA, 19 nt, Artificial Sequence
  Description of Artificial Sequence: Synthetic oligonucleotide
cuguccucagccggaagag

SEQ ID NO: 2887698 - RNA, 19 nt, Artificial Sequence
  Description of Artificial Sequence: Synthetic oligonucleotide
gauacaguucgaaacccau

SEQ ID NO: 2887699 - RNA, 19 nt, Artificial Sequence
  Description of Artificial Sequence: Synthetic oligonucleotide
  modified_base (17)..(17): a, c, u, g, unknown or other
cucacacuugagguucngc

SEQ ID NO: 2887700 - RNA, 19 nt, Artificial Sequence
  Description of Artificial Sequence: Synthetic oligonucleotide
uguccucggaugacugauc

SEQ ID NO: 2887701 - RNA, 19 nt, Artificial Sequence
  Description of Artificial Sequence: Synthetic oligonucleotide
uucauguauuugccauuuu

SEQ ID NO: 2887702 - RNA, 19 nt, Artificial Sequence
  Description of Artificial Sequence: Synthetic oligonucleotide
ccucaguuacuacuucugc

SEQ ID NO: 2887703 - RNA, 19 nt, Artificial Sequence
  Description of Artificial Sequence: Synthetic oligonucleotide
ugucuccaagauacuucuc

SEQ ID NO: 2887704 - RNA, 19 nt, Artificial Sequence
  Description of Artificial Sequence: Synthetic oligonucleotide
ggcaaaagcaauuccacuu

SEQ ID NO: 2887705 - RNA, 19 nt, Artificial Sequence
  Description of Artificial Sequence: Synthetic oligonucleotide
aucucugaauaaagaggug

SEQ ID NO: 2887706 - RNA, 19 nt, Artificial Sequence
  Description of Artificial Sequence: Synthetic oligonucleotide
ugcaaacaguggucccuga

SEQ ID NO: 2887707 - RNA, 19 nt, Artificial Sequence
  Description of Artificial Sequence: Synthetic oligonucleotide
augacugaucaggguuugg

SEQ ID NO: 2887708 - RNA, 19 nt, Artificial Sequence
  Description of Artificial Sequence: Synthetic oligonucleotide
cagguucuuucgagggaag

SEQ ID NO: 2887709 - RNA, 19 nt, Artificial Sequence
  Description of Artificial Sequence: Synthetic oligonucleotide
ucugcauagcuggguggug

SEQ ID NO: 2887710 - RNA, 19 nt, Artificial Sequence
  Description of Artificial Sequence: Synthetic oligonucleotide
gagccaguucauguucaug

SEQ ID NO: 2887711 - RNA, 19 nt, Artificial Sequence
  Description of Artificial Sequence: Synthetic oligonucleotide
gagcucuuucaaaaccauc

SEQ ID NO: 2887712 - RNA, 19 nt, Artificial Sequence
  Description of Artificial Sequence: Synthetic oligonucleotide
ggcaagauggucuguccuc

SEQ ID NO: 2887713 - RNA, 19 nt, Artificial Sequence
  Description of Artificial Sequence: Synthetic oligonucleotide
gucccugaagagcucuuuc

SEQ ID NO: 2887714 - RNA, 19 nt, Artificial Sequence
  Description of Artificial Sequence: Synthetic oligonucleotide
uuucgagggaagggcuagc

SEQ ID NO: 2887715 - RNA, 19 nt, Artificial Sequence
  Description of Artificial Sequence: Synthetic oligonucleotide
cgaaacccauaucaacucg

SEQ ID NO: 2887716 - RNA, 19 nt, Artificial Sequence
  Description of Artificial Sequence: Synthetic oligonucleotide
acuccuggauauaugcaaa

SEQ ID NO: 2887717 - RNA, 19 nt, Artificial Sequence
  Description of Artificial Sequence: Synthetic oligonucleotide
uccucagccggaagagaua

SEQ ID NO: 2887718 - RNA, 19 nt, Artificial Sequence
  Description of Artificial Sequence: Synthetic oligonucleotide
gcaagaaccgaaacuccug

SEQ ID NO: 2887719 - RNA, 19 nt, Artificial Sequence
  Description of Artificial Sequence: Synthetic oligonucleotide
  modified_base (15)..(15): a, c, u, g, unknown or other
cacacuugagguucngcua

SEQ ID NO: 2887720 - RNA, 19 nt, Artificial Sequence
  Description of Artificial Sequence: Synthetic oligonucleotide
caaucaaguguuccuucaa

SEQ ID NO: 2887721 - RNA, 19 nt, Artificial Sequence
  Description of Artificial Sequence: Synthetic oligonucleotide
acugguuguuucauguauu

SEQ ID NO: 2887722 - RNA, 19 nt, Artificial Sequence
  Description of Artificial Sequence: Synthetic oligonucleotide
ggaggcaagaaccgaaacu

SEQ ID NO: 2887723 - RNA, 19 nt, Artificial Sequence
  Description of Artificial Sequence: Synthetic oligonucleotide
agagcucuuucaaaaccau

SEQ ID NO: 2887724 - RNA, 19 nt, Artificial Sequence
  Description of Artificial Sequence: Synthetic oligonucleotide
caacucgagucaaucaagu

SEQ ID NO: 2887725 - RNA, 19 nt, Artificial Sequence
  Description of Artificial Sequence: Synthetic oligonucleotide
uguccucagccggaagaga

SEQ ID NO: 2887726 - RNA, 19 nt, Artificial Sequence
  Description of Artificial Sequence: Synthetic oligonucleotide
gccauuuucugggcaaaag

SEQ ID NO: 2887727 - RNA, 19 nt, Artificial Sequence
  Description of Artificial Sequence: Synthetic oligonucleotide
aacgugucuccaagauacu

SEQ ID NO: 2887728 - RNA, 19 nt, Artificial Sequence
  Description of Artificial Sequence: Synthetic oligonucleotide
guguuccuucaacgagagg

SEQ ID NO: 2887729 - RNA, 19 nt, Artificial Sequence
  Description of Artificial Sequence: Synthetic oligonucleotide
ccuggggcgagauuauuuc

SEQ ID NO: 2887730 - RNA, 19 nt, Artificial Sequence
  Description of Artificial Sequence: Synthetic oligonucleotide
caagcauucccuggggcga

SEQ ID NO: 2887731 - RNA, 19 nt, Artificial Sequence
  Description of Artificial Sequence: Synthetic oligonucleotide
cacugacugcucacacuug

SEQ ID NO: 2887732 - RNA, 19 nt, Artificial Sequence
  Description of Artificial Sequence: Synthetic oligonucleotide
caguggucccugaagagcu

SEQ ID NO: 2887733 - RNA, 19 nt, Artificial Sequence
  Description of Artificial Sequence: Synthetic oligonucleotide
ggaagagauacaguucgaa

SEQ ID NO: 2887734 - RNA, 19 nt, Artificial Sequence
  Description of Artificial Sequence: Synthetic oligonucleotide
gucuguccucggaugacug

SEQ ID NO: 2887735 - RNA, 19 nt, Artificial Sequence
  Description of Artificial Sequence: Synthetic oligonucleotide
ggggcaagauggucugucc

SEQ ID NO: 2887736 - RNA, 19 nt, Artificial Sequence
  Description of Artificial Sequence: Synthetic oligonucleotide
cccauaucaacucgaguca

SEQ ID NO: 2887737 - RNA, 19 nt, Artificial Sequence
  Description of Artificial Sequence: Synthetic oligonucleotide
cgugucuccaagauacuuc

SEQ ID NO: 2887738 - RNA, 19 nt, Artificial Sequence
  Description of Artificial Sequence: Synthetic oligonucleotide
cuccaagauacuucucugu

SEQ ID NO: 2887739 - RNA, 19 nt, Artificial Sequence
  Description of Artificial Sequence: Synthetic oligonucleotide
gugcuucagguucuuucga

SEQ ID NO: 2887740 - RNA, 19 nt, Artificial Sequence
  Description of Artificial Sequence: Synthetic oligonucleotide
auacaguucgaaacccaua

SEQ ID NO: 2887741 - RNA, 19 nt, Artificial Sequence
  Description of Artificial Sequence: Synthetic oligonucleotide
uucccuggggcgagauuau

SEQ ID NO: 2887742 - RNA, 19 nt, Artificial Sequence
  Description of Artificial Sequence: Synthetic oligonucleotide
uggucuguccucggaugac

SEQ ID NO: 2887743 - RNA, 19 nt, Artificial Sequence
  Description of Artificial Sequence: Synthetic oligonucleotide
acgugucuccaagauacuu

SEQ ID NO: 2887744 - RNA, 19 nt, Artificial Sequence
  Description of Artificial Sequence: Synthetic oligonucleotide
aguggucccugaagagcuc

SEQ ID NO: 2887745 - RNA, 19 nt, Artificial Sequence
  Description of Artificial Sequence: Synthetic oligonucleotide
ugaucaggguuuggaucaa

SEQ ID NO: 2887746 - RNA, 19 nt, Artificial Sequence
  Description of Artificial Sequence: Synthetic oligonucleotide
cgagucaaucaaguguucc

SEQ ID NO: 2887747 - RNA, 19 nt, Artificial Sequence
  Description of Artificial Sequence: Synthetic oligonucleotide
cacugguuguuucauguau

SEQ ID NO: 2887748 - RNA, 19 nt, Artificial Sequence
  Description of Artificial Sequence: Synthetic oligonucleotide
agcuccgagccaguucaug

SEQ ID NO: 2887749 - RNA, 19 nt, Artificial Sequence
  Description of Artificial Sequence: Synthetic oligonucleotide
ucucuguccucagccggaa

SEQ ID NO: 2887750 - RNA, 19 nt, Artificial Sequence
  Description of Artificial Sequence: Synthetic oligonucleotide
gguuuggaucaaucucuga

SEQ ID NO: 2887751 - RNA, 19 nt, Artificial Sequence
  Description of Artificial Sequence: Synthetic oligonucleotide
ggggcgagauuauuucguc

SEQ ID NO: 2887752 - RNA, 19 nt, Artificial Sequence
  Description of Artificial Sequence: Synthetic oligonucleotide
ccucagccggaagagauac

SEQ ID NO: 2887753 - RNA, 19 nt, Artificial Sequence
  Description of Artificial Sequence: Synthetic oligonucleotide
ggguuuggaucaaucucug

SEQ ID NO: 2887754 - RNA, 19 nt, Artificial Sequence
  Description of Artificial Sequence: Synthetic oligonucleotide
agguggaggcaagaaccga

SEQ ID NO: 2887755 - RNA, 19 nt, Artificial Sequence
  Description of Artificial Sequence: Synthetic oligonucleotide
caguuacuacuucugcaua

SEQ ID NO: 2887756 - RNA, 19 nt, Artificial Sequence
  Description of Artificial Sequence: Synthetic oligonucleotide
gggaagggcuagcuccgag

SEQ ID NO: 2887757 - RNA, 19 nt, Artificial Sequence
  Description of Artificial Sequence: Synthetic oligonucleotide
cgaaacuccuggauauaug

SEQ ID NO: 2887758 - RNA, 19 nt, Artificial Sequence
  Description of Artificial Sequence: Synthetic oligonucleotide
cugguuguuucauguauuu

SEQ ID NO: 2887759 - RNA, 19 nt, Artificial Sequence
  Description of Artificial Sequence: Synthetic oligonucleotide
cucuguccucagccggaag

SEQ ID NO: 2887760 - RNA, 19 nt, Artificial Sequence
  Description of Artificial Sequence: Synthetic oligonucleotide
ggcgagauuauuucgucuu

SEQ ID NO: 2887761 - RNA, 19 nt, Artificial Sequence
  Description of Artificial Sequence: Synthetic oligonucleotide
caauuccacuuccucugaa

SEQ ID NO: 2887762 - RNA, 19 nt, Artificial Sequence
  Description of Artificial Sequence: Synthetic oligonucleotide
gcuacacugacugcucaca

SEQ ID NO: 2887763 - RNA, 19 nt, Artificial Sequence
  Description of Artificial Sequence: Synthetic oligonucleotide
cauaucaacucgagucaau

SEQ ID NO: 2887764 - RNA, 19 nt, Artificial Sequence
  Description of Artificial Sequence: Synthetic oligonucleotide
gguggaggcaagaaccgaa

SEQ ID NO: 2887765 - RNA, 19 nt, Artificial Sequence
  Description of Artificial Sequence: Synthetic oligonucleotide
gcuagcuccgagccaguuc

SEQ ID NO: 2887766 - RNA, 19 nt, Artificial Sequence
  Description of Artificial Sequence: Synthetic oligonucleotide
cuucaacgagaggggcaag

SEQ ID NO: 2887767 - RNA, 19 nt, Artificial Sequence
  Description of Artificial Sequence: Synthetic oligonucleotide
ccaucgcaagcauucccug

SEQ ID NO: 2887768 - RNA, 19 nt, Artificial Sequence
  Description of Artificial Sequence: Synthetic oligonucleotide
guggaggcaagaaccgaaa

SEQ ID NO: 2887769 - RNA, 19 nt, Artificial Sequence
  Description of Artificial Sequence: Synthetic oligonucleotide
uggucccugaagagcucuu

SEQ ID NO: 2887770 - RNA, 19 nt, Artificial Sequence
  Description of Artificial Sequence: Synthetic oligonucleotide
gcaauuccacuuccucuga

SEQ ID NO: 2887771 - RNA, 19 nt, Artificial Sequence
  Description of Artificial Sequence: Synthetic oligonucleotide
ccugaagagcucuuucaaa

SEQ ID NO: 2887772 - RNA, 19 nt, Artificial Sequence
  Description of Artificial Sequence: Synthetic oligonucleotide
cgagauuauuucgucuuug

SEQ ID NO: 2887773 - RNA, 19 nt, Artificial Sequence
  Description of Artificial Sequence: Synthetic oligonucleotide
gcaaacaguggucccugaa

SEQ ID NO: 2887774 - RNA, 19 nt, Artificial Sequence
  Description of Artificial Sequence: Synthetic oligonucleotide
caaaaccaucgcaagcauu

SEQ ID NO: 2887775 - RNA, 19 nt, Artificial Sequence
  Description of Artificial Sequence: Synthetic oligonucleotide
uagcuggguggugcuucag

SEQ ID NO: 2887776 - RNA, 19 nt, Artificial Sequence
  Description of Artificial Sequence: Synthetic oligonucleotide
ggcaagaaccgaaacuccu

SEQ ID NO: 2887777 - RNA, 19 nt, Artificial Sequence
  Description of Artificial Sequence: Synthetic oligonucleotide
acgagaggggcaagauggu

SEQ ID NO: 2887778 - RNA, 19 nt, Artificial Sequence
  Description of Artificial Sequence: Synthetic oligonucleotide
gccggaagagauacaguuc

SEQ ID NO: 2887779 - RNA, 19 nt, Artificial Sequence
  Description of Artificial Sequence: Synthetic oligonucleotide
gcuccgagccaguucaugu

SEQ ID NO: 2887780 - RNA, 19 nt, Artificial Sequence
  Description of Artificial Sequence: Synthetic oligonucleotide
gcuggguggugcuucaggu

SEQ ID NO: 2887781 - RNA, 19 nt, Artificial Sequence
  Description of Artificial Sequence: Synthetic oligonucleotide
guccucagccggaagagau

SEQ ID NO: 2887782 - RNA, 19 nt, Artificial Sequence
  Description of Artificial Sequence: Synthetic oligonucleotide
cucagccggaagagauaca

SEQ ID NO: 2887783 - RNA, 19 nt, Artificial Sequence
  Description of Artificial Sequence: Synthetic oligonucleotide
accgaaacuccuggauaua

SEQ ID NO: 2887784 - RNA, 19 nt, Artificial Sequence
  Description of Artificial Sequence: Synthetic oligonucleotide
uagcuccgagccaguucau

SEQ ID NO: 2887785 - RNA, 19 nt, Artificial Sequence
  Description of Artificial Sequence: Synthetic oligonucleotide
cgcaagcauucccuggggc

SEQ ID NO: 2887786 - RNA, 19 nt, Artificial Sequence
  Description of Artificial Sequence: Synthetic oligonucleotide
gggcaagauggucuguccu

SEQ ID NO: 2887787 - RNA, 19 nt, Artificial Sequence
  Description of Artificial Sequence: Synthetic oligonucleotide
ccuucaacgagaggggcaa

SEQ ID NO: 2887788 - RNA, 19 nt, Artificial Sequence
  Description of Artificial Sequence: Synthetic oligonucleotide
gggcgagauuauuucgucu

SEQ ID NO: 2887789 - RNA, 19 nt, Artificial Sequence
  Description of Artificial Sequence: Synthetic oligonucleotide
gccaguucauguucaugcu

SEQ ID NO: 2887790 - RNA, 19 nt, Artificial Sequence
  Description of Artificial Sequence: Synthetic oligonucleotide
agggaagggcuagcuccga

SEQ ID NO: 2887791 - RNA, 19 nt, Artificial Sequence
  Description of Artificial Sequence: Synthetic oligonucleotide
ccaguucauguucaugcua

SEQ ID NO: 2887792 - RNA, 19 nt, Artificial Sequence
  Description of Artificial Sequence: Synthetic oligonucleotide
  modified_base (18)..(18): a, c, u, g, unknown or other
gcucacacuugagguucng

SEQ ID NO: 2887793 - RNA, 19 nt, Artificial Sequence
  Description of Artificial Sequence: Synthetic oligonucleotide
guggucccugaagagcucu

SEQ ID NO: 2887794 - RNA, 19 nt, Artificial Sequence
  Description of Artificial Sequence: Synthetic oligonucleotide
ggaugacugaucaggguuu

SEQ ID NO: 2887795 - RNA, 19 nt, Artificial Sequence
  Description of Artificial Sequence: Synthetic oligonucleotide
agcauucccuggggcgaga

SEQ ID NO: 2887796 - RNA, 19 nt, Artificial Sequence
  Description of Artificial Sequence: Synthetic oligonucleotide
ccauaucaacucgagucaa

SEQ ID NO: 2887797 - RNA, 19 nt, Artificial Sequence
  Description of Artificial Sequence: Synthetic oligonucleotide
ucccuggggcgagauuauu

SEQ ID NO: 2887798 - RNA, 19 nt, Artificial Sequence
  Description of Artificial Sequence: Synthetic oligonucleotide
gaucaggguuuggaucaau

SEQ ID NO: 2887799 - RNA, 19 nt, Artificial Sequence
  Description of Artificial Sequence: Synthetic oligonucleotide
cagccggaagagauacagu

SEQ ID NO: 2887800 - RNA, 19 nt, Artificial Sequence
  Description of Artificial Sequence: Synthetic oligonucleotide
cuccgagccaguucauguu

SEQ ID NO: 2887801 - RNA, 19 nt, Artificial Sequence
  Description of Artificial Sequence: Synthetic oligonucleotide
cuggguggugcuucagguu

SEQ ID NO: 2887802 - RNA, 19 nt, Artificial Sequence
  Description of Artificial Sequence: Synthetic oligonucleotide
ggucuguccucggaugacu

SEQ ID NO: 2887803 - RNA, 19 nt, Artificial Sequence
  Description of Artificial Sequence: Synthetic oligonucleotide
gcgagauuauuucgucuuu

SEQ ID NO: 2887804 - RNA, 19 nt, Artificial Sequence
  Description of Artificial Sequence: Synthetic oligonucleotide
cgagaggggcaagaugguc

SEQ ID NO: 2887805 - RNA, 19 nt, Artificial Sequence
  Description of Artificial Sequence: Synthetic oligonucleotide
cggaagagauacaguucga

SEQ ID NO: 2887806 - RNA, 19 nt, Artificial Sequence
  Description of Artificial Sequence: Synthetic oligonucleotide
cggaugacugaucaggguu

SEQ ID NO: 2887807 - RNA, 19 nt, Artificial Sequence
  Description of Artificial Sequence: Synthetic oligonucleotide
gcaugaucacugguuguuu

SEQ ID NO: 2887808 - RNA, 19 nt, Artificial Sequence
  Description of Artificial Sequence: Synthetic oligonucleotide
ccgaaacuccuggauauau

SEQ ID NO: 2887809 - RNA, 19 nt, Artificial Sequence
  Description of Artificial Sequence: Synthetic oligonucleotide
ggguggugcuucagguucu

SEQ ID NO: 2887810 - RNA, 19 nt, Artificial Sequence
  Description of Artificial Sequence: Synthetic oligonucleotide
cauucccuggggcgagauu

SEQ ID NO: 2887811 - RNA, 19 nt, Artificial Sequence
  Description of Artificial Sequence: Synthetic oligonucleotide
cccuggggcgagauuauuu

SEQ ID NO: 2887812 - RNA, 19 nt, Artificial Sequence
  Description of Artificial Sequence: Synthetic oligonucleotide
ggucccugaagagcucuuu

SEQ ID NO: 2887813 - RNA, 19 nt, Artificial Sequence
  Description of Artificial Sequence: Synthetic oligonucleotide
guggugcuucagguucuuu

SEQ ID NO: 2887814 - RNA, 19 nt, Artificial Sequence
  Description of Artificial Sequence: Synthetic oligonucleotide
gguggugcuucagguucuu

SEQ ID NO: 2887815 - RNA, 19 nt, Artificial Sequence
  Description of Artificial Sequence: Synthetic oligonucleotide
gcauucccuggggcgagau

SEQ ID NO: 2887816 - RNA, 19 nt, Artificial Sequence
  Description of Artificial Sequence: Synthetic oligonucleotide
ggcuagcuccgagccaguu

SEQ ID NO: 2887817 - RNA, 19 nt, Artificial Sequence
  Description of Artificial Sequence: Synthetic oligonucleotide
gcauagcuggguggugcuu

SEQ ID NO: 2887818 - RNA, 19 nt, Artificial Sequence
  Description of Artificial Sequence: Synthetic oligonucleotide
gggcuagcuccgagccagu

SEQ ID NO: 2887819 - RNA, 19 nt, Artificial Sequence
  Description of Artificial Sequence: Synthetic oligonucleotide
aaguucaucggccaaaucc

SEQ ID NO: 2887820 - RNA, 19 nt, Artificial Sequence
  Description of Artificial Sequence: Synthetic oligonucleotide
aacaacauuacgcuggacc

SEQ ID NO: 2887821 - RNA, 19 nt, Artificial Sequence
  Description of Artificial Sequence: Synthetic oligonucleotide
caugauaacaacauuacgc

SEQ ID NO: 2887822 - RNA, 19 nt, Artificial Sequence
  Description of Artificial Sequence: Synthetic oligonucleotide
ugcaucagcaucaauaggg

SEQ ID NO: 2887823 - RNA, 19 nt, Artificial Sequence
  Description of Artificial Sequence: Synthetic oligonucleotide
aauuagguaacggaaacgg

SEQ ID NO: 2887824 - RNA, 19 nt, Artificial Sequence
  Description of Artificial Sequence: Synthetic oligonucleotide
gauaacaacauuacgcugg

SEQ ID NO: 2887825 - RNA, 19 nt, Artificial Sequence
  Description of Artificial Sequence: Synthetic oligonucleotide
auacauuguaaucuuuucc

SEQ ID NO: 2887826 - RNA, 19 nt, Artificial Sequence
  Description of Artificial Sequence: Synthetic oligonucleotide
aacggaaacgggcagaguc

SEQ ID NO: 2887827 - RNA, 19 nt, Artificial Sequence
  Description of Artificial Sequence: Synthetic oligonucleotide
gaugauaacuaauuuggag

SEQ ID NO: 2887828 - RNA, 19 nt, Artificial Sequence
  Description of Artificial Sequence: Synthetic oligonucleotide
uauuuuacagucaggacug

SEQ ID NO: 2887829 - RNA, 19 nt, Artificial Sequence
  Description of Artificial Sequence: Synthetic oligonucleotide
aagacugccaugcagaaga

SEQ ID NO: 2887830 - RNA, 19 nt, Artificial Sequence
  Description of Artificial Sequence: Synthetic oligonucleotide
acuaauuuggaguuggcag

SEQ ID NO: 2887831 - RNA, 19 nt, Artificial Sequence
  Description of Artificial Sequence: Synthetic oligonucleotide
auuguaaucuuuuccagag

SEQ ID NO: 2887832 - RNA, 19 nt, Artificial Sequence
  Description of Artificial Sequence: Synthetic oligonucleotide
ugugaugauaacuaauuug

SEQ ID NO: 2887833 - RNA, 19 nt, Artificial Sequence
  Description of Artificial Sequence: Synthetic oligonucleotide
agucaaaauauccacuggg

SEQ ID NO: 2887834 - RNA, 19 nt, Artificial Sequence
  Description of Artificial Sequence: Synthetic oligonucleotide
uuagguaacggaaacgggc

SEQ ID NO: 2887835 - RNA, 19 nt, Artificial Sequence
  Description of Artificial Sequence: Synthetic oligonucleotide
uguaaucuuuuccagagac

SEQ ID NO: 2887836 - RNA, 19 nt, Artificial Sequence
  Description of Artificial Sequence: Synthetic oligonucleotide
gugaugauaacuaauuugg

SEQ ID NO: 2887837 - RNA, 19 nt, Artificial Sequence
  Description of Artificial Sequence: Synthetic oligonucleotide
uuucaugauaacaacauua

SEQ ID NO: 2887838 - RNA, 19 nt, Artificial Sequence
  Description of Artificial Sequence: Synthetic oligonucleotide
augauaacuaauuuggagu

SEQ ID NO: 2887839 - RNA, 19 nt, Artificial Sequence
  Description of Artificial Sequence: Synthetic oligonucleotide
aauagggcaaguucaucgg

SEQ ID NO: 2887840 - RNA, 19 nt, Artificial Sequence
  Description of Artificial Sequence: Synthetic oligonucleotide
uaagucaaaauauccacug

SEQ ID NO: 2887841 - RNA, 19 nt, Artificial Sequence
  Description of Artificial Sequence: Synthetic oligonucleotide
uacauuguaaucuuuucca

SEQ ID NO: 2887842 - RNA, 19 nt, Artificial Sequence
  Description of Artificial Sequence: Synthetic oligonucleotide
aauuacccgaguugcaggg

SEQ ID NO: 2887843 - RNA, 19 nt, Artificial Sequence
  Description of Artificial Sequence: Synthetic oligonucleotide
gaagaaaagacugccaugc

SEQ ID NO: 2887844 - RNA, 19 nt, Artificial Sequence
  Description of Artificial Sequence: Synthetic oligonucleotide
ucuccuuucaguuuugucu

SEQ ID NO: 2887845 - RNA, 19 nt, Artificial Sequence
  Description of Artificial Sequence: Synthetic oligonucleotide
ucaugauaacaacauuacg

SEQ ID NO: 2887846 - RNA, 19 nt, Artificial Sequence
  Description of Artificial Sequence: Synthetic oligonucleotide
auuuggaguuggcagauac

SEQ ID NO: 2887847 - RNA, 19 nt, Artificial Sequence
  Description of Artificial Sequence: Synthetic oligonucleotide
cacauaagucaaaauaucc

SEQ ID NO: 2887848 - RNA, 19 nt, Artificial Sequence
  Description of Artificial Sequence: Synthetic oligonucleotide
cauaagucaaaauauccac

SEQ ID NO: 2887849 - RNA, 19 nt, Artificial Sequence
  Description of Artificial Sequence: Synthetic oligonucleotide
caauagggcaaguucaucg

SEQ ID NO: 2887850 - RNA, 19 nt, Artificial Sequence
  Description of Artificial Sequence: Synthetic oligonucleotide
aaaauauccacuggguuug

SEQ ID NO: 2887851 - RNA, 19 nt, Artificial Sequence
  Description of Artificial Sequence: Synthetic oligonucleotide
ucuuccaugccacauaagu

SEQ ID NO: 2887852 - RNA, 19 nt, Artificial Sequence
  Description of Artificial Sequence: Synthetic oligonucleotide
augauaacaacauuacgcu

SEQ ID NO: 2887853 - RNA, 19 nt, Artificial Sequence
  Description of Artificial Sequence: Synthetic oligonucleotide
uucaugauaacaacauuac

SEQ ID NO: 2887854 - RNA, 19 nt, Artificial Sequence
  Description of Artificial Sequence: Synthetic oligonucleotide
aagucaaaauauccacugg

SEQ ID NO: 2887855 - RNA, 19 nt, Artificial Sequence
  Description of Artificial Sequence: Synthetic oligonucleotide
aguauuuuacagucaggac

SEQ ID NO: 2887856 - RNA, 19 nt, Artificial Sequence
  Description of Artificial Sequence: Synthetic oligonucleotide
uuuggaguguugaagaaaa

SEQ ID NO: 2887857 - RNA, 19 nt, Artificial Sequence
  Description of Artificial Sequence: Synthetic oligonucleotide
auaacuaauuuggaguugg

SEQ ID NO: 2887858 - RNA, 19 nt, Artificial Sequence
  Description of Artificial Sequence: Synthetic oligonucleotide
gacaaucaguauuuuacag

SEQ ID NO: 2887859 - RNA, 19 nt, Artificial Sequence
  Description of Artificial Sequence: Synthetic oligonucleotide
uuccaugccacauaaguca

SEQ ID NO: 2887860 - RNA, 19 nt, Artificial Sequence
  Description of Artificial Sequence: Synthetic oligonucleotide
uuugucugcaucagcauca

SEQ ID NO: 2887861 - RNA, 19 nt, Artificial Sequence
  Description of Artificial Sequence: Synthetic oligonucleotide
uuugagacaaucaguauuu

SEQ ID NO: 2887862 - RNA, 19 nt, Artificial Sequence
  Description of Artificial Sequence: Synthetic oligonucleotide
aguguugaagaaaagacug

SEQ ID NO: 2887863 - RNA, 19 nt, Artificial Sequence
  Description of Artificial Sequence: Synthetic oligonucleotide
uucaguuuugucugcauca

SEQ ID NO: 2887864 - RNA, 19 nt, Artificial Sequence
  Description of Artificial Sequence: Synthetic oligonucleotide
agaaaagacugccaugcag

SEQ ID NO: 2887865 - RNA, 19 nt, Artificial Sequence
  Description of Artificial Sequence: Synthetic oligonucleotide
uugaagaaaagacugccau

SEQ ID NO: 2887866 - RNA, 19 nt, Artificial Sequence
  Description of Artificial Sequence: Synthetic oligonucleotide
acuuguaggguggacaccc

SEQ ID NO: 2887867 - RNA, 19 nt, Artificial Sequence
  Description of Artificial Sequence: Synthetic oligonucleotide
ugccacauaagucaaaaua

SEQ ID NO: 2887868 - RNA, 19 nt, Artificial Sequence
  Description of Artificial Sequence: Synthetic oligonucleotide
uguugaagaaaagacugcc

SEQ ID NO: 2887869 - RNA, 19 nt, Artificial Sequence
  Description of Artificial Sequence: Synthetic oligonucleotide
cagagucuagguuacagcc

SEQ ID NO: 2887870 - RNA, 19 nt, Artificial Sequence
  Description of Artificial Sequence: Synthetic oligonucleotide
accauguucuccaagaauc

SEQ ID NO: 2887871 - RNA, 19 nt, Artificial Sequence
  Description of Artificial Sequence: Synthetic oligonucleotide
uaaucuuuuccagagacaa

SEQ ID NO: 2887872 - RNA, 19 nt, Artificial Sequence
  Description of Artificial Sequence: Synthetic oligonucleotide
ucuccaauuagguaacgga

SEQ ID NO: 2887873 - RNA, 19 nt, Artificial Sequence
  Description of Artificial Sequence: Synthetic oligonucleotide
ggaaugauggauuucauga

SEQ ID NO: 2887874 - RNA, 19 nt, Artificial Sequence
  Description of Artificial Sequence: Synthetic oligonucleotide
acaaucaguauuuuacagu

SEQ ID NO: 2887875 - RNA, 19 nt, Artificial Sequence
  Description of Artificial Sequence: Synthetic oligonucleotide
auuacgcuggaccagguca

SEQ ID NO: 2887876 - RNA, 19 nt, Artificial Sequence
  Description of Artificial Sequence: Synthetic oligonucleotide
acuagagucaccauguucu

SEQ ID NO: 2887877 - RNA, 19 nt, Artificial Sequence
  Description of Artificial Sequence: Synthetic oligonucleotide
aacauuacgcuggaccagg

SEQ ID NO: 2887878 - RNA, 19 nt, Artificial Sequence
  Description of Artificial Sequence: Synthetic oligonucleotide
acaacauuacgcuggacca

SEQ ID NO: 2887879 - RNA, 19 nt, Artificial Sequence
  Description of Artificial Sequence: Synthetic oligonucleotide
ucuccaagaauccagccau

SEQ ID NO: 2887880 - RNA, 19 nt, Artificial Sequence
  Description of Artificial Sequence: Synthetic oligonucleotide
ggaguuggcagauacauug

SEQ ID NO: 2887881 - RNA, 19 nt, Artificial Sequence
  Description of Artificial Sequence: Synthetic oligonucleotide
uccauaagggcacacuaga

SEQ ID NO: 2887882 - RNA, 19 nt, Artificial Sequence
  Description of Artificial Sequence: Synthetic oligonucleotide
ucaguauuuuacagucagg

SEQ ID NO: 2887883 - RNA, 19 nt, Artificial Sequence
  Description of Artificial Sequence: Synthetic oligonucleotide
guauuuuacagucaggacu

SEQ ID NO: 2887884 - RNA, 19 nt, Artificial Sequence
  Description of Artificial Sequence: Synthetic oligonucleotide
ugauaacuaauuuggaguu

SEQ ID NO: 2887885 - RNA, 19 nt, Artificial Sequence
  Description of Artificial Sequence: Synthetic oligonucleotide
gauacauuguaaucuuuuc

SEQ ID NO: 2887886 - RNA, 19 nt, Artificial Sequence
  Description of Artificial Sequence: Synthetic oligonucleotide
ugaagaaaagacugccaug

SEQ ID NO: 2887887 - RNA, 19 nt, Artificial Sequence
  Description of Artificial Sequence: Synthetic oligonucleotide
ucugccuugcaccagcugu

SEQ ID NO: 2887888 - RNA, 19 nt, Artificial Sequence
  Description of Artificial Sequence: Synthetic oligonucleotide
agaagauccauugucucuc

SEQ ID NO: 2887889 - RNA, 19 nt, Artificial Sequence
  Description of Artificial Sequence: Synthetic oligonucleotide
ugcagaagauccauugucu

SEQ ID NO: 2887890 - RNA, 19 nt, Artificial Sequence
  Description of Artificial Sequence: Synthetic oligonucleotide
uguucuccaagaauccagc

SEQ ID NO: 2887891 - RNA, 19 nt, Artificial Sequence
  Description of Artificial Sequence: Synthetic oligonucleotide
auagggcaaguucaucggc

SEQ ID NO: 2887892 - RNA, 19 nt, Artificial Sequence
  Description of Artificial Sequence: Synthetic oligonucleotide
acauuguaaucuuuuccag

SEQ ID NO: 2887893 - RNA, 19 nt, Artificial Sequence
  Description of Artificial Sequence: Synthetic oligonucleotide
ucaaaauauccacuggguu

SEQ ID NO: 2887894 - RNA, 19 nt, Artificial Sequence
  Description of Artificial Sequence: Synthetic oligonucleotide
ugauaacaacauuacgcug

SEQ ID NO: 2887895 - RNA, 19 nt, Artificial Sequence
  Description of Artificial Sequence: Synthetic oligonucleotide
acagucaggacuguuuugg

SEQ ID NO: 2887896 - RNA, 19 nt, Artificial Sequence
  Description of Artificial Sequence: Synthetic oligonucleotide
ugaugauaacuaauuugga

SEQ ID NO: 2887897 - RNA, 19 nt, Artificial Sequence
  Description of Artificial Sequence: Synthetic oligonucleotide
uucuccaagaauccagcca

SEQ ID NO: 2887898 - RNA, 19 nt, Artificial Sequence
  Description of Artificial Sequence: Synthetic oligonucleotide
uagguaacggaaacgggca

SEQ ID NO: 2887899 - RNA, 19 nt, Artificial Sequence
  Description of Artificial Sequence: Synthetic oligonucleotide
uuuacagucaggacuguuu

SEQ ID NO: 2887900 - RNA, 19 nt, Artificial Sequence
  Description of Artificial Sequence: Synthetic oligonucleotide
uccaauuagguaacggaaa

SEQ ID NO: 2887901 - RNA, 19 nt, Artificial Sequence
  Description of Artificial Sequence: Synthetic oligonucleotide
agucaggacuguuuuggac

SEQ ID NO: 2887902 - RNA, 19 nt, Artificial Sequence
  Description of Artificial Sequence: Synthetic oligonucleotide
aggguggacacccaacuuc

SEQ ID NO: 2887903 - RNA, 19 nt, Artificial Sequence
  Description of Artificial Sequence: Synthetic oligonucleotide
uuuugucugcaucagcauc

SEQ ID NO: 2887904 - RNA, 19 nt, Artificial Sequence
  Description of Artificial Sequence: Synthetic oligonucleotide
aagggcacacuagagucac

SEQ ID NO: 2887905 - RNA, 19 nt, Artificial Sequence
  Description of Artificial Sequence: Synthetic oligonucleotide
gauggauuucaugauaaca

SEQ ID NO: 2887906 - RNA, 19 nt, Artificial Sequence
  Description of Artificial Sequence: Synthetic oligonucleotide
gacuguuuuggacuaugcc

SEQ ID NO: 2887907 - RNA, 19 nt, Artificial Sequence
  Description of Artificial Sequence: Synthetic oligonucleotide
uuccaauuacccgaguugc

SEQ ID NO: 2887908 - RNA, 19 nt, Artificial Sequence
  Description of Artificial Sequence: Synthetic oligonucleotide
gaaaagacugccaugcaga

SEQ ID NO: 2887909 - RNA, 19 nt, Artificial Sequence
  Description of Artificial Sequence: Synthetic oligonucleotide
acuaugccgggaaugaugg

SEQ ID NO: 2887910 - RNA, 19 nt, Artificial Sequence
  Description of Artificial Sequence: Synthetic oligonucleotide
agagucaccauguucucca

SEQ ID NO: 2887911 - RNA, 19 nt, Artificial Sequence
  Description of Artificial Sequence: Synthetic oligonucleotide
cauggcaacuuguagggug

SEQ ID NO: 2887912 - RNA, 19 nt, Artificial Sequence
  Description of Artificial Sequence: Synthetic oligonucleotide
aacuaauuuggaguuggca

SEQ ID NO: 2887913 - RNA, 19 nt, Artificial Sequence
  Description of Artificial Sequence: Synthetic oligonucleotide
agacaaucaguauuuuaca

SEQ ID NO: 2887914 - RNA, 19 nt, Artificial Sequence
  Description of Artificial Sequence: Synthetic oligonucleotide
caucaauagggcaaguuca

SEQ ID NO: 2887915 - RNA, 19 nt, Artificial Sequence
  Description of Artificial Sequence: Synthetic oligonucleotide
uccauugucucuccuuuca

SEQ ID NO: 2887916 - RNA, 19 nt, Artificial Sequence
  Description of Artificial Sequence: Synthetic oligonucleotide
caacuucucuccaauuagg

SEQ ID NO: 2887917 - RNA, 19 nt, Artificial Sequence
  Description of Artificial Sequence: Synthetic oligonucleotide
agggagcccacuuaucuuc

SEQ ID NO: 2887918 - RNA, 19 nt, Artificial Sequence
  Description of Artificial Sequence: Synthetic oligonucleotide
acagccacuuccaauuacc

SEQ ID NO: 2887919 - RNA, 19 nt, Artificial Sequence
  Description of Artificial Sequence: Synthetic oligonucleotide
aaaagacugccaugcagaa

SEQ ID NO: 2887920 - RNA, 19 nt, Artificial Sequence
  Description of Artificial Sequence: Synthetic oligonucleotide
caagaauccagccauggca

SEQ ID NO: 2887921 - RNA, 19 nt, Artificial Sequence
  Description of Artificial Sequence: Synthetic oligonucleotide
uagguuacagccacuucca

SEQ ID NO: 2887922 - RNA, 19 nt, Artificial Sequence
  Description of Artificial Sequence: Synthetic oligonucleotide
uuggcagauacauuguaau

SEQ ID NO: 2887923 - RNA, 19 nt, Artificial Sequence
  Description of Artificial Sequence: Synthetic oligonucleotide
uaucuuccaugccacauaa

SEQ ID NO: 2887924 - RNA, 19 nt, Artificial Sequence
  Description of Artificial Sequence: Synthetic oligonucleotide
acauaagucaaaauaucca

SEQ ID NO: 2887925 - RNA, 19 nt, Artificial Sequence
  Description of Artificial Sequence: Synthetic oligonucleotide
uuacccgaguugcagggag

SEQ ID NO: 2887926 - RNA, 19 nt, Artificial Sequence
  Description of Artificial Sequence: Synthetic oligonucleotide
uggguuugagacaaucagu

SEQ ID NO: 2887927 - RNA, 19 nt, Artificial Sequence
  Description of Artificial Sequence: Synthetic oligonucleotide
uccaagaauccagccaugg

SEQ ID NO: 2887928 - RNA, 19 nt, Artificial Sequence
  Description of Artificial Sequence: Synthetic oligonucleotide
uuucaguuuugucugcauc

SEQ ID NO: 2887929 - RNA, 19 nt, Artificial Sequence
  Description of Artificial Sequence: Synthetic oligonucleotide
gaaacgggcagagucuagg

SEQ ID NO: 2887930 - RNA, 19 nt, Artificial Sequence
  Description of Artificial Sequence: Synthetic oligonucleotide
gagucuagguuacagccac

SEQ ID NO: 2887931 - RNA, 19 nt, Artificial Sequence
  Description of Artificial Sequence: Synthetic oligonucleotide
uagggcaaguucaucggcc

SEQ ID NO: 2887932 - RNA, 19 nt, Artificial Sequence
  Description of Artificial Sequence: Synthetic oligonucleotide
uuuuggacuaugccgggaa

SEQ ID NO: 2887933 - RNA, 19 nt, Artificial Sequence
  Description of Artificial Sequence: Synthetic oligonucleotide
cuccuuucaguuuugucug

SEQ ID NO: 2887934 - RNA, 19 nt, Artificial Sequence
  Description of Artificial Sequence: Synthetic oligonucleotide
caauuacccgaguugcagg

SEQ ID NO: 2887935 - RNA, 19 nt, Artificial Sequence
  Description of Artificial Sequence: Synthetic oligonucleotide
cuaauuuggaguuggcaga

SEQ ID NO: 2887936 - RNA, 19 nt, Artificial Sequence
  Description of Artificial Sequence: Synthetic oligonucleotide
auggauuucaugauaacaa

SEQ ID NO: 2887937 - RNA, 19 nt, Artificial Sequence
  Description of Artificial Sequence: Synthetic oligonucleotide
uguuuuggacuaugccggg

SEQ ID NO: 2887938 - RNA, 19 nt, Artificial Sequence
  Description of Artificial Sequence: Synthetic oligonucleotide
ucagcaucaauagggcaag

SEQ ID NO: 2887939 - RNA, 19 nt, Artificial Sequence
  Description of Artificial Sequence: Synthetic oligonucleotide
aagaaaagacugccaugca

SEQ ID NO: 2887940 - RNA, 19 nt, Artificial Sequence
  Description of Artificial Sequence: Synthetic oligonucleotide
aacuuguaggguggacacc

SEQ ID NO: 2887941 - RNA, 19 nt, Artificial Sequence
  Description of Artificial Sequence: Synthetic oligonucleotide
agccacuuccaauuacccg

SEQ ID NO: 2887942 - RNA, 19 nt, Artificial Sequence
  Description of Artificial Sequence: Synthetic oligonucleotide
auugucucuccuuucaguu

SEQ ID NO: 2887943 - RNA, 19 nt, Artificial Sequence
  Description of Artificial Sequence: Synthetic oligonucleotide
caauuagguaacggaaacg

SEQ ID NO: 2887944 - RNA, 19 nt, Artificial Sequence
  Description of Artificial Sequence: Synthetic oligonucleotide
gauaacuaauuuggaguug

SEQ ID NO: 2887945 - RNA, 19 nt, Artificial Sequence
  Description of Artificial Sequence: Synthetic oligonucleotide
auaacaacauuacgcugga

SEQ ID NO: 2887946 - RNA, 19 nt, Artificial Sequence
  Description of Artificial Sequence: Synthetic oligonucleotide
cuuccaugccacauaaguc

SEQ ID NO: 2887947 - RNA, 19 nt, Artificial Sequence
  Description of Artificial Sequence: Synthetic oligonucleotide
auaagucaaaauauccacu

SEQ ID NO: 2887948 - RNA, 19 nt, Artificial Sequence
  Description of Artificial Sequence: Synthetic oligonucleotide
ucaguuuugucugcaucag

SEQ ID NO: 2887949 - RNA, 19 nt, Artificial Sequence
  Description of Artificial Sequence: Synthetic oligonucleotide
ggaguguugaagaaaagac

SEQ ID NO: 2887950 - RNA, 19 nt, Artificial Sequence
  Description of Artificial Sequence: Synthetic oligonucleotide
auuagguaacggaaacggg

SEQ ID NO: 2887951 - RNA, 19 nt, Artificial Sequence
  Description of Artificial Sequence: Synthetic oligonucleotide
uuaucuuccaugccacaua

SEQ ID NO: 2887952 - RNA, 19 nt, Artificial Sequence
  Description of Artificial Sequence: Synthetic oligonucleotide
uaagggcacacuagaguca

SEQ ID NO: 2887953 - RNA, 19 nt, Artificial Sequence
  Description of Artificial Sequence: Synthetic oligonucleotide
aucuuuuccagagacaauu

SEQ ID NO: 2887954 - RNA, 19 nt, Artificial Sequence
  Description of Artificial Sequence: Synthetic oligonucleotide
caguauuuuacagucagga

SEQ ID NO: 2887955 - RNA, 19 nt, Artificial Sequence
  Description of Artificial Sequence: Synthetic oligonucleotide
ugagacaaucaguauuuua

SEQ ID NO: 2887956 - RNA, 19 nt, Artificial Sequence
  Description of Artificial Sequence: Synthetic oligonucleotide
ugucucuccuuucaguuuu

SEQ ID NO: 2887957 - RNA, 19 nt, Artificial Sequence
  Description of Artificial Sequence: Synthetic oligonucleotide
uaacuaauuuggaguuggc

SEQ ID NO: 2887958 - RNA, 19 nt, Artificial Sequence
  Description of Artificial Sequence: Synthetic oligonucleotide
aacuucucuccaauuaggu

SEQ ID NO: 2887959 - RNA, 19 nt, Artificial Sequence
  Description of Artificial Sequence: Synthetic oligonucleotide
aaacgggcagagucuaggu

SEQ ID NO: 2887960 - RNA, 19 nt, Artificial Sequence
  Description of Artificial Sequence: Synthetic oligonucleotide
uuguaaucuuuuccagaga

SEQ ID NO: 2887961 - RNA, 19 nt, Artificial Sequence
  Description of Artificial Sequence: Synthetic oligonucleotide
uguaggguggacacccaac

SEQ ID NO: 2887962 - RNA, 19 nt, Artificial Sequence
  Description of Artificial Sequence: Synthetic oligonucleotide
aagaauccagccauggcaa

SEQ ID NO: 2887963 - RNA, 19 nt, Artificial Sequence
  Description of Artificial Sequence: Synthetic oligonucleotide
uuuuggaguguugaagaaa

SEQ ID NO: 2887964 - RNA, 19 nt, Artificial Sequence
  Description of Artificial Sequence: Synthetic oligonucleotide
gauuucaugauaacaacau

SEQ ID NO: 2887965 - RNA, 19 nt, Artificial Sequence
  Description of Artificial Sequence: Synthetic oligonucleotide
cauuguaaucuuuuccaga

SEQ ID NO: 2887966 - RNA, 19 nt, Artificial Sequence
  Description of Artificial Sequence: Synthetic oligonucleotide
uuggaguguugaagaaaag

SEQ ID NO: 2887967 - RNA, 19 nt, Artificial Sequence
  Description of Artificial Sequence: Synthetic oligonucleotide
aaagacugccaugcagaag

SEQ ID NO: 2887968 - RNA, 19 nt, Artificial Sequence
  Description of Artificial Sequence: Synthetic oligonucleotide
cacuuaucuuccaugccac

SEQ ID NO: 2887969 - RNA, 19 nt, Artificial Sequence
  Description of Artificial Sequence: Synthetic oligonucleotide
aguucaucggccaaauccu

SEQ ID NO: 2887970 - RNA, 19 nt, Artificial Sequence
  Description of Artificial Sequence: Synthetic oligonucleotide
auuucaugauaacaacauu

SEQ ID NO: 2887971 - RNA, 19 nt, Artificial Sequence
  Description of Artificial Sequence: Synthetic oligonucleotide
gucaccauguucuccaaga

SEQ ID NO: 2887972 - RNA, 19 nt, Artificial Sequence
  Description of Artificial Sequence: Synthetic oligonucleotide
agaauccagccauggcaac

SEQ ID NO: 2887973 - RNA, 19 nt, Artificial Sequence
  Description of Artificial Sequence: Synthetic oligonucleotide
gccauggcaacuuguaggg

SEQ ID NO: 2887974 - RNA, 19 nt, Artificial Sequence
  Description of Artificial Sequence: Synthetic oligonucleotide
gacuaugccgggaaugaug

SEQ ID NO: 2887975 - RNA, 19 nt, Artificial Sequence
  Description of Artificial Sequence: Synthetic oligonucleotide
uccaauuacccgaguugca

SEQ ID NO: 2887976 - RNA, 19 nt, Artificial Sequence
  Description of Artificial Sequence: Synthetic oligonucleotide
ugauggauuucaugauaac

SEQ ID NO: 2887977 - RNA, 19 nt, Artificial Sequence
  Description of Artificial Sequence: Synthetic oligonucleotide
gaagauccauugucucucc

SEQ ID NO: 2887978 - RNA, 19 nt, Artificial Sequence
  Description of Artificial Sequence: Synthetic oligonucleotide
uaugccgggaaugauggau

SEQ ID NO: 2887979 - RNA, 19 nt, Artificial Sequence
  Description of Artificial Sequence: Synthetic oligonucleotide
auguucuccaagaauccag

SEQ ID NO: 2887980 - RNA, 19 nt, Artificial Sequence
  Description of Artificial Sequence: Synthetic oligonucleotide
uggacuaugccgggaauga

SEQ ID NO: 2887981 - RNA, 19 nt, Artificial Sequence
  Description of Artificial Sequence: Synthetic oligonucleotide
acuuccaauuacccgaguu

SEQ ID NO: 2887982 - RNA, 19 nt, Artificial Sequence
  Description of Artificial Sequence: Synthetic oligonucleotide
guaacggaaacgggcagag

SEQ ID NO: 2887983 - RNA, 19 nt, Artificial Sequence
  Description of Artificial Sequence: Synthetic oligonucleotide
uggcagauacauuguaauc

SEQ ID NO: 2887984 - RNA, 19 nt, Artificial Sequence
  Description of Artificial Sequence: Synthetic oligonucleotide
uuggacuaugccgggaaug

SEQ ID NO: 2887985 - RNA, 19 nt, Artificial Sequence
  Description of Artificial Sequence: Synthetic oligonucleotide
gucaaggcguguuucuccc

SEQ ID NO: 2887986 - RNA, 19 nt, Artificial Sequence
  Description of Artificial Sequence: Synthetic oligonucleotide
ucuuuuccagagacaauuu

SEQ ID NO: 2887987 - RNA, 19 nt, Artificial Sequence
  Description of Artificial Sequence: Synthetic oligonucleotide
aucagcaucaauagggcaa

SEQ ID NO: 2887988 - RNA, 19 nt, Artificial Sequence
  Description of Artificial Sequence: Synthetic oligonucleotide
uggacacccaacuucucuc

SEQ ID NO: 2887989 - RNA, 19 nt, Artificial Sequence
  Description of Artificial Sequence: Synthetic oligonucleotide
cucuccaauuagguaacgg

SEQ ID NO: 2887990 - RNA, 19 nt, Artificial Sequence
  Description of Artificial Sequence: Synthetic oligonucleotide
cuccaauuagguaacggaa

SEQ ID NO: 2887991 - RNA, 19 nt, Artificial Sequence
  Description of Artificial Sequence: Synthetic oligonucleotide
guucuccaagaauccagcc

SEQ ID NO: 2887992 - RNA, 19 nt, Artificial Sequence
  Description of Artificial Sequence: Synthetic oligonucleotide
auggcaacuuguagggugg

SEQ ID NO: 2887993 - RNA, 19 nt, Artificial Sequence
  Description of Artificial Sequence: Synthetic oligonucleotide
augauggauuucaugauaa

SEQ ID NO: 2887994 - RNA, 19 nt, Artificial Sequence
  Description of Artificial Sequence: Synthetic oligonucleotide
uccaugccacauaagucaa

SEQ ID NO: 2887995 - RNA, 19 nt, Artificial Sequence
  Description of Artificial Sequence: Synthetic oligonucleotide
gcaucaauagggcaaguuc

SEQ ID NO: 2887996 - RNA, 19 nt, Artificial Sequence
  Description of Artificial Sequence: Synthetic oligonucleotide
auccauugucucuccuuuc

SEQ ID NO: 2887997 - RNA, 19 nt, Artificial Sequence
  Description of Artificial Sequence: Synthetic oligonucleotide
aagauccauugucucuccu

SEQ ID NO: 2887998 - RNA, 19 nt, Artificial Sequence
  Description of Artificial Sequence: Synthetic oligonucleotide
uggaccaggucaaggcgug

SEQ ID NO: 2887999 - RNA, 19 nt, Artificial Sequence
  Description of Artificial Sequence: Synthetic oligonucleotide
uaauuuggaguuggcagau

SEQ ID NO: 2888000 - RNA, 19 nt, Artificial Sequence
  Description of Artificial Sequence: Synthetic oligonucleotide
gccacuuccaauuacccga

SEQ ID NO: 2888001 - RNA, 19 nt, Artificial Sequence
  Description of Artificial Sequence: Synthetic oligonucleotide
uuacgcuggaccaggucaa

SEQ ID NO: 2888002 - RNA, 19 nt, Artificial Sequence
  Description of Artificial Sequence: Synthetic oligonucleotide
guguugaagaaaagacugc

SEQ ID NO: 2888003 - RNA, 19 nt, Artificial Sequence
  Description of Artificial Sequence: Synthetic oligonucleotide
cuugcaccagcugugauga

SEQ ID NO: 2888004 - RNA, 19 nt, Artificial Sequence
  Description of Artificial Sequence: Synthetic oligonucleotide
acccgaguugcagggagcc

SEQ ID NO: 2888005 - RNA, 19 nt, Artificial Sequence
  Description of Artificial Sequence: Synthetic oligonucleotide
ucaggacuguuuuggacua

SEQ ID NO: 2888006 - RNA, 19 nt, Artificial Sequence
  Description of Artificial Sequence: Synthetic oligonucleotide
caaaauauccacuggguuu

SEQ ID NO: 2888007 - RNA, 19 nt, Artificial Sequence
  Description of Artificial Sequence: Synthetic oligonucleotide
cugcaucagcaucaauagg

SEQ ID NO: 2888008 - RNA, 19 nt, Artificial Sequence
  Description of Artificial Sequence: Synthetic oligonucleotide
acuucucuccaauuaggua

SEQ ID NO: 2888009 - RNA, 19 nt, Artificial Sequence
  Description of Artificial Sequence: Synthetic oligonucleotide
cagccacuuccaauuaccc

SEQ ID NO: 2888010 - RNA, 19 nt, Artificial Sequence
  Description of Artificial Sequence: Synthetic oligonucleotide
gggaaugauggauuucaug

SEQ ID NO: 2888011 - RNA, 19 nt, Artificial Sequence
  Description of Artificial Sequence: Synthetic oligonucleotide
ccaauuagguaacggaaac

SEQ ID NO: 2888012 - RNA, 19 nt, Artificial Sequence
  Description of Artificial Sequence: Synthetic oligonucleotide
cacuagagucaccauguuc

SEQ ID NO: 2888013 - RNA, 19 nt, Artificial Sequence
  Description of Artificial Sequence: Synthetic oligonucleotide
gucaggacuguuuuggacu

SEQ ID NO: 2888014 - RNA, 19 nt, Artificial Sequence
  Description of Artificial Sequence: Synthetic oligonucleotide
accagcugugaugauaacu

SEQ ID NO: 2888015 - RNA, 19 nt, Artificial Sequence
  Description of Artificial Sequence: Synthetic oligonucleotide
agguaacggaaacgggcag

SEQ ID NO: 2888016 - RNA, 19 nt, Artificial Sequence
  Description of Artificial Sequence: Synthetic oligonucleotide
uagagucaccauguucucc

SEQ ID NO: 2888017 - RNA, 19 nt, Artificial Sequence
  Description of Artificial Sequence: Synthetic oligonucleotide
agucaccauguucuccaag

SEQ ID NO: 2888018 - RNA, 19 nt, Artificial Sequence
  Description of Artificial Sequence: Synthetic oligonucleotide
guugaagaaaagacugcca

SEQ ID NO: 2888019 - RNA, 19 nt, Artificial Sequence
  Description of Artificial Sequence: Synthetic oligonucleotide
ccaacuucucuccaauuag

SEQ ID NO: 2888020 - RNA, 19 nt, Artificial Sequence
  Description of Artificial Sequence: Synthetic oligonucleotide
gaguguugaagaaaagacu

SEQ ID NO: 2888021 - RNA, 19 nt, Artificial Sequence
  Description of Artificial Sequence: Synthetic oligonucleotide
agauccauugucucuccuu

SEQ ID NO: 2888022 - RNA, 19 nt, Artificial Sequence
  Description of Artificial Sequence: Synthetic oligonucleotide
aacgggcagagucuagguu

SEQ ID NO: 2888023 - RNA, 19 nt, Artificial Sequence
  Description of Artificial Sequence: Synthetic oligonucleotide
uuuggacuaugccgggaau

SEQ ID NO: 2888024 - RNA, 19 nt, Artificial Sequence
  Description of Artificial Sequence: Synthetic oligonucleotide
ccaugcagaagauccauug

SEQ ID NO: 2888025 - RNA, 19 nt, Artificial Sequence
  Description of Artificial Sequence: Synthetic oligonucleotide
aauccagccauggcaacuu

SEQ ID NO: 2888026 - RNA, 19 nt, Artificial Sequence
  Description of Artificial Sequence: Synthetic oligonucleotide
cacacuagagucaccaugu

SEQ ID NO: 2888027 - RNA, 19 nt, Artificial Sequence
  Description of Artificial Sequence: Synthetic oligonucleotide
uugcagggagcccacuuau

SEQ ID NO: 2888028 - RNA, 19 nt, Artificial Sequence
  Description of Artificial Sequence: Synthetic oligonucleotide
uccagccauggcaacuugu

SEQ ID NO: 2888029 - RNA, 19 nt, Artificial Sequence
  Description of Artificial Sequence: Synthetic oligonucleotide
uccuuucaguuuugucugc

SEQ ID NO: 2888030 - RNA, 19 nt, Artificial Sequence
  Description of Artificial Sequence: Synthetic oligonucleotide
gaaugauggauuucaugau

SEQ ID NO: 2888031 - RNA, 19 nt, Artificial Sequence
  Description of Artificial Sequence: Synthetic oligonucleotide
caguuuugucugcaucagc

SEQ ID NO: 2888032 - RNA, 19 nt, Artificial Sequence
  Description of Artificial Sequence: Synthetic oligonucleotide
gcacacuagagucaccaug

SEQ ID NO: 2888033 - RNA, 19 nt, Artificial Sequence
  Description of Artificial Sequence: Synthetic oligonucleotide
ggauuucaugauaacaaca

SEQ ID NO: 2888034 - RNA, 19 nt, Artificial Sequence
  Description of Artificial Sequence: Synthetic oligonucleotide
ccacauaagucaaaauauc

SEQ ID NO: 2888035 - RNA, 19 nt, Artificial Sequence
  Description of Artificial Sequence: Synthetic oligonucleotide
uuguaggguggacacccaa

SEQ ID NO: 2888036 - RNA, 19 nt, Artificial Sequence
  Description of Artificial Sequence: Synthetic oligonucleotide
cauaagggcacacuagagu

SEQ ID NO: 2888037 - RNA, 19 nt, Artificial Sequence
  Description of Artificial Sequence: Synthetic oligonucleotide
acuuaucuuccaugccaca

SEQ ID NO: 2888038 - RNA, 19 nt, Artificial Sequence
  Description of Artificial Sequence: Synthetic oligonucleotide
ggucaaggcguguuucucc

SEQ ID NO: 2888039 - RNA, 19 nt, Artificial Sequence
  Description of Artificial Sequence: Synthetic oligonucleotide
ucaauagggcaaguucauc

SEQ ID NO: 2888040 - RNA, 19 nt, Artificial Sequence
  Description of Artificial Sequence: Synthetic oligonucleotide
ucucuccaauuagguaacg

SEQ ID NO: 2888041 - RNA, 19 nt, Artificial Sequence
  Description of Artificial Sequence: Synthetic oligonucleotide
uuacagccacuuccaauua

SEQ ID NO: 2888042 - RNA, 19 nt, Artificial Sequence
  Description of Artificial Sequence: Synthetic oligonucleotide
ccauguucuccaagaaucc

SEQ ID NO: 2888043 - RNA, 19 nt, Artificial Sequence
  Description of Artificial Sequence: Synthetic oligonucleotide
cuagagucaccauguucuc

SEQ ID NO: 2888044 - RNA, 19 nt, Artificial Sequence
  Description of Artificial Sequence: Synthetic oligonucleotide
gcagagucuagguuacagc

SEQ ID NO: 2888045 - RNA, 19 nt, Artificial Sequence
  Description of Artificial Sequence: Synthetic oligonucleotide
caacauuacgcuggaccag

SEQ ID NO: 2888046 - RNA, 19 nt, Artificial Sequence
  Description of Artificial Sequence: Synthetic oligonucleotide
guaaucuuuuccagagaca

SEQ ID NO: 2888047 - RNA, 19 nt, Artificial Sequence
  Description of Artificial Sequence: Synthetic oligonucleotide
aggucaaggcguguuucuc

SEQ ID NO: 2888048 - RNA, 19 nt, Artificial Sequence
  Description of Artificial Sequence: Synthetic oligonucleotide
ucaaggcguguuucucccc

SEQ ID NO: 2888049 - RNA, 19 nt, Artificial Sequence
  Description of Artificial Sequence: Synthetic oligonucleotide
aggacuguuuuggacuaug

SEQ ID NO: 2888050 - RNA, 19 nt, Artificial Sequence
  Description of Artificial Sequence: Synthetic oligonucleotide
cagccauggcaacuuguag

SEQ ID NO: 2888051 - RNA, 19 nt, Artificial Sequence
  Description of Artificial Sequence: Synthetic oligonucleotide
cucuccuuucaguuuuguc

SEQ ID NO: 2888052 - RNA, 19 nt, Artificial Sequence
  Description of Artificial Sequence: Synthetic oligonucleotide
ggcagauacauuguaaucu

SEQ ID NO: 2888053 - RNA, 19 nt, Artificial Sequence
  Description of Artificial Sequence: Synthetic oligonucleotide
aaucuuuuccagagacaau

SEQ ID NO: 2888054 - RNA, 19 nt, Artificial Sequence
  Description of Artificial Sequence: Synthetic oligonucleotide
gcccacuuaucuuccaugc

SEQ ID NO: 2888055 - RNA, 19 nt, Artificial Sequence
  Description of Artificial Sequence: Synthetic oligonucleotide
uacccgaguugcagggagc

SEQ ID NO: 2888056 - RNA, 19 nt, Artificial Sequence
  Description of Artificial Sequence: Synthetic oligonucleotide
agagucuagguuacagcca

SEQ ID NO: 2888057 - RNA, 19 nt, Artificial Sequence
  Description of Artificial Sequence: Synthetic oligonucleotide
cugccuugcaccagcugug

SEQ ID NO: 2888058 - RNA, 19 nt, Artificial Sequence
  Description of Artificial Sequence: Synthetic oligonucleotide
guuggcagauacauuguaa

SEQ ID NO: 2888059 - RNA, 19 nt, Artificial Sequence
  Description of Artificial Sequence: Synthetic oligonucleotide
caucagcaucaauagggca

SEQ ID NO: 2888060 - RNA, 19 nt, Artificial Sequence
  Description of Artificial Sequence: Synthetic oligonucleotide
uugucucuccuuucaguuu

SEQ ID NO: 2888061 - RNA, 19 nt, Artificial Sequence
  Description of Artificial Sequence: Synthetic oligonucleotide
caugccacauaagucaaaa

SEQ ID NO: 2888062 - RNA, 19 nt, Artificial Sequence
  Description of Artificial Sequence: Synthetic oligonucleotide
uucugccuugcaccagcug

SEQ ID NO: 2888063 - RNA, 19 nt, Artificial Sequence
  Description of Artificial Sequence: Synthetic oligonucleotide
uuuuacagucaggacuguu

SEQ ID NO: 2888064 - RNA, 19 nt, Artificial Sequence
  Description of Artificial Sequence: Synthetic oligonucleotide
aucaauagggcaaguucau

SEQ ID NO: 2888065 - RNA, 19 nt, Artificial Sequence
  Description of Artificial Sequence: Synthetic oligonucleotide
gucaaaauauccacugggu

SEQ ID NO: 2888066 - RNA, 19 nt, Artificial Sequence
  Description of Artificial Sequence: Synthetic oligonucleotide
ggcagagucuagguuacag

SEQ ID NO: 2888067 - RNA, 19 nt, Artificial Sequence
  Description of Artificial Sequence: Synthetic oligonucleotide
uggaguuggcagauacauu

SEQ ID NO: 2888068 - RNA, 19 nt, Artificial Sequence
  Description of Artificial Sequence: Synthetic oligonucleotide
aguugcagggagcccacuu

SEQ ID NO: 2888069 - RNA, 19 nt, Artificial Sequence
  Description of Artificial Sequence: Synthetic oligonucleotide
ccauaagggcacacuagag

SEQ ID NO: 2888070 - RNA, 19 nt, Artificial Sequence
  Description of Artificial Sequence: Synthetic oligonucleotide
ccaauuacccgaguugcag

SEQ ID NO: 2888071 - RNA, 19 nt, Artificial Sequence
  Description of Artificial Sequence: Synthetic oligonucleotide
gcagaagauccauugucuc

SEQ ID NO: 2888072 - RNA, 19 nt, Artificial Sequence
  Description of Artificial Sequence: Synthetic oligonucleotide
guaggguggacacccaacu

SEQ ID NO: 2888073 - RNA, 19 nt, Artificial Sequence
  Description of Artificial Sequence: Synthetic oligonucleotide
gacacccaacuucucucca

SEQ ID NO: 2888074 - RNA, 19 nt, Artificial Sequence
  Description of Artificial Sequence: Synthetic oligonucleotide
ggacacccaacuucucucc

SEQ ID NO: 2888075 - RNA, 19 nt, Artificial Sequence
  Description of Artificial Sequence: Synthetic oligonucleotide
cauuacgcuggaccagguc

SEQ ID NO: 2888076 - RNA, 19 nt, Artificial Sequence
  Description of Artificial Sequence: Synthetic oligonucleotide
agcugugaugauaacuaau

SEQ ID NO: 2888077 - RNA, 19 nt, Artificial Sequence
  Description of Artificial Sequence: Synthetic oligonucleotide
uaggguggacacccaacuu

SEQ ID NO: 2888078 - RNA, 19 nt, Artificial Sequence
  Description of Artificial Sequence: Synthetic oligonucleotide
ugccaugcagaagauccau

SEQ ID NO: 2888079 - RNA, 19 nt, Artificial Sequence
  Description of Artificial Sequence: Synthetic oligonucleotide
ggguuugagacaaucagua

SEQ ID NO: 2888080 - RNA, 19 nt, Artificial Sequence
  Description of Artificial Sequence: Synthetic oligonucleotide
ccacuuaucuuccaugcca

SEQ ID NO: 2888081 - RNA, 19 nt, Artificial Sequence
  Description of Artificial Sequence: Synthetic oligonucleotide
agcaucaauagggcaaguu

SEQ ID NO: 2888082 - RNA, 19 nt, Artificial Sequence
  Description of Artificial Sequence: Synthetic oligonucleotide
augccacauaagucaaaau

SEQ ID NO: 2888083 - RNA, 19 nt, Artificial Sequence
  Description of Artificial Sequence: Synthetic oligonucleotide
acacccaacuucucuccaa

SEQ ID NO: 2888084 - RNA, 19 nt, Artificial Sequence
  Description of Artificial Sequence: Synthetic oligonucleotide
acggaaacgggcagagucu

SEQ ID NO: 2888085 - RNA, 19 nt, Artificial Sequence
  Description of Artificial Sequence: Synthetic oligonucleotide
cuccaagaauccagccaug

SEQ ID NO: 2888086 - RNA, 19 nt, Artificial Sequence
  Description of Artificial Sequence: Synthetic oligonucleotide
cauguucuccaagaaucca

SEQ ID NO: 2888087 - RNA, 19 nt, Artificial Sequence
  Description of Artificial Sequence: Synthetic oligonucleotide
ugcagggagcccacuuauc

SEQ ID NO: 2888088 - RNA, 19 nt, Artificial Sequence
  Description of Artificial Sequence: Synthetic oligonucleotide
cagaagauccauugucucu

SEQ ID NO: 2888089 - RNA, 19 nt, Artificial Sequence
  Description of Artificial Sequence: Synthetic oligonucleotide
ccaagaauccagccauggc

SEQ ID NO: 2888090 - RNA, 19 nt, Artificial Sequence
  Description of Artificial Sequence: Synthetic oligonucleotide
gcaacuuguaggguggaca

SEQ ID NO: 2888091 - RNA, 19 nt, Artificial Sequence
  Description of Artificial Sequence: Synthetic oligonucleotide
guugcagggagcccacuua

SEQ ID NO: 2888092 - RNA, 19 nt, Artificial Sequence
  Description of Artificial Sequence: Synthetic oligonucleotide
aauuuggaguuggcagaua

SEQ ID NO: 2888093 - RNA, 19 nt, Artificial Sequence
  Description of Artificial Sequence: Synthetic oligonucleotide
acgcuggaccaggucaagg

SEQ ID NO: 2888094 - RNA, 19 nt, Artificial Sequence
  Description of Artificial Sequence: Synthetic oligonucleotide
cauugucucuccuuucagu

SEQ ID NO: 2888095 - RNA, 19 nt, Artificial Sequence
  Description of Artificial Sequence: Synthetic oligonucleotide
ucucuccuuucaguuuugu

SEQ ID NO: 2888096 - RNA, 19 nt, Artificial Sequence
  Description of Artificial Sequence: Synthetic oligonucleotide
ugccgggaaugauggauuu

SEQ ID NO: 2888097 - RNA, 19 nt, Artificial Sequence
  Description of Artificial Sequence: Synthetic oligonucleotide
guggacacccaacuucucu

SEQ ID NO: 2888098 - RNA, 19 nt, Artificial Sequence
  Description of Artificial Sequence: Synthetic oligonucleotide
caaguucaucggccaaauc

SEQ ID NO: 2888099 - RNA, 19 nt, Artificial Sequence
  Description of Artificial Sequence: Synthetic oligonucleotide
uacgcuggaccaggucaag

SEQ ID NO: 2888100 - RNA, 19 nt, Artificial Sequence
  Description of Artificial Sequence: Synthetic oligonucleotide
auccagccauggcaacuug

SEQ ID NO: 2888101 - RNA, 19 nt, Artificial Sequence
  Description of Artificial Sequence: Synthetic oligonucleotide
auuacccgaguugcaggga

SEQ ID NO: 2888102 - RNA, 19 nt, Artificial Sequence
  Description of Artificial Sequence: Synthetic oligonucleotide
caugcagaagauccauugu

SEQ ID NO: 2888103 - RNA, 19 nt, Artificial Sequence
  Description of Artificial Sequence: Synthetic oligonucleotide
accaggucaaggcguguuu

SEQ ID NO: 2888104 - RNA, 19 nt, Artificial Sequence
  Description of Artificial Sequence: Synthetic oligonucleotide
uaacaacauuacgcuggac

SEQ ID NO: 2888105 - RNA, 19 nt, Artificial Sequence
  Description of Artificial Sequence: Synthetic oligonucleotide
ggacuguuuuggacuaugc

SEQ ID NO: 2888106 - RNA, 19 nt, Artificial Sequence
  Description of Artificial Sequence: Synthetic oligonucleotide
agguuacagccacuuccaa

SEQ ID NO: 2888107 - RNA, 19 nt, Artificial Sequence
  Description of Artificial Sequence: Synthetic oligonucleotide
guuuugucugcaucagcau

SEQ ID NO: 2888108 - RNA, 19 nt, Artificial Sequence
  Description of Artificial Sequence: Synthetic oligonucleotide
ugccuugcaccagcuguga

SEQ ID NO: 2888109 - RNA, 19 nt, Artificial Sequence
  Description of Artificial Sequence: Synthetic oligonucleotide
acacuagagucaccauguu

SEQ ID NO: 2888110 - RNA, 19 nt, Artificial Sequence
  Description of Artificial Sequence: Synthetic oligonucleotide
guuuuggacuaugccggga

SEQ ID NO: 2888111 - RNA, 19 nt, Artificial Sequence
  Description of Artificial Sequence: Synthetic oligonucleotide
cuuaucuuccaugccacau

SEQ ID NO: 2888112 - RNA, 19 nt, Artificial Sequence
  Description of Artificial Sequence: Synthetic oligonucleotide
ccacuuccaauuacccgag

SEQ ID NO: 2888113 - RNA, 19 nt, Artificial Sequence
  Description of Artificial Sequence: Synthetic oligonucleotide
ccauugucucuccuuucag

SEQ ID NO: 2888114 - RNA, 19 nt, Artificial Sequence
  Description of Artificial Sequence: Synthetic oligonucleotide
gguaacggaaacgggcaga

SEQ ID NO: 2888115 - RNA, 19 nt, Artificial Sequence
  Description of Artificial Sequence: Synthetic oligonucleotide
gacugccaugcagaagauc

SEQ ID NO: 2888116 - RNA, 19 nt, Artificial Sequence
  Description of Artificial Sequence: Synthetic oligonucleotide
cuuuuccagagacaauuuu

SEQ ID NO: 2888117 - RNA, 19 nt, Artificial Sequence
  Description of Artificial Sequence: Synthetic oligonucleotide
cagucaggacuguuuugga

SEQ ID NO: 2888118 - RNA, 19 nt, Artificial Sequence
  Description of Artificial Sequence: Synthetic oligonucleotide
uaacggaaacgggcagagu

SEQ ID NO: 2888119 - RNA, 19 nt, Artificial Sequence
  Description of Artificial Sequence: Synthetic oligonucleotide
aucuuccaugccacauaag

SEQ ID NO: 2888120 - RNA, 19 nt, Artificial Sequence
  Description of Artificial Sequence: Synthetic oligonucleotide
acccaacuucucuccaauu

SEQ ID NO: 2888121 - RNA, 19 nt, Artificial Sequence
  Description of Artificial Sequence: Synthetic oligonucleotide
cuggaccaggucaaggcgu

SEQ ID NO: 2888122 - RNA, 19 nt, Artificial Sequence
  Description of Artificial Sequence: Synthetic oligonucleotide
cuuguaggguggacaccca

SEQ ID NO: 2888123 - RNA, 19 nt, Artificial Sequence
  Description of Artificial Sequence: Synthetic oligonucleotide
cagcugugaugauaacuaa

SEQ ID NO: 2888124 - RNA, 19 nt, Artificial Sequence
  Description of Artificial Sequence: Synthetic oligonucleotide
cugugaugauaacuaauuu

SEQ ID NO: 2888125 - RNA, 19 nt, Artificial Sequence
  Description of Artificial Sequence: Synthetic oligonucleotide
gcagggagcccacuuaucu

SEQ ID NO: 2888126 - RNA, 19 nt, Artificial Sequence
  Description of Artificial Sequence: Synthetic oligonucleotide
agggcacacuagagucacc

SEQ ID NO: 2888127 - RNA, 19 nt, Artificial Sequence
  Description of Artificial Sequence: Synthetic oligonucleotide
gcugugaugauaacuaauu

SEQ ID NO: 2888128 - RNA, 19 nt, Artificial Sequence
  Description of Artificial Sequence: Synthetic oligonucleotide
uggcaacuuguagggugga

SEQ ID NO: 2888129 - RNA, 19 nt, Artificial Sequence
  Description of Artificial Sequence: Synthetic oligonucleotide
gguuacagccacuuccaau

SEQ ID NO: 2888130 - RNA, 19 nt, Artificial Sequence
  Description of Artificial Sequence: Synthetic oligonucleotide
gaguuggcagauacauugu

SEQ ID NO: 2888131 - RNA, 19 nt, Artificial Sequence
  Description of Artificial Sequence: Synthetic oligonucleotide
gagucaccauguucuccaa

SEQ ID NO: 2888132 - RNA, 19 nt, Artificial Sequence
  Description of Artificial Sequence: Synthetic oligonucleotide
gcaccagcugugaugauaa

SEQ ID NO: 2888133 - RNA, 19 nt, Artificial Sequence
  Description of Artificial Sequence: Synthetic oligonucleotide
ccgggaaugauggauuuca

SEQ ID NO: 2888134 - RNA, 19 nt, Artificial Sequence
  Description of Artificial Sequence: Synthetic oligonucleotide
augccgggaaugauggauu

SEQ ID NO: 2888135 - RNA, 19 nt, Artificial Sequence
  Description of Artificial Sequence: Synthetic oligonucleotide
cuuucaguuuugucugcau

SEQ ID NO: 2888136 - RNA, 19 nt, Artificial Sequence
  Description of Artificial Sequence: Synthetic oligonucleotide
acauuacgcuggaccaggu

SEQ ID NO: 2888137 - RNA, 19 nt, Artificial Sequence
  Description of Artificial Sequence: Synthetic oligonucleotide
gguuugagacaaucaguau

SEQ ID NO: 2888138 - RNA, 19 nt, Artificial Sequence
  Description of Artificial Sequence: Synthetic oligonucleotide
gucucuccuuucaguuuug

SEQ ID NO: 2888139 - RNA, 19 nt, Artificial Sequence
  Description of Artificial Sequence: Synthetic oligonucleotide
ggaaacgggcagagucuag

SEQ ID NO: 2888140 - RNA, 19 nt, Artificial Sequence
  Description of Artificial Sequence: Synthetic oligonucleotide
cccaacuucucuccaauua

SEQ ID NO: 2888141 - RNA, 19 nt, Artificial Sequence
  Description of Artificial Sequence: Synthetic oligonucleotide
caccagcugugaugauaac

SEQ ID NO: 2888142 - RNA, 19 nt, Artificial Sequence
  Description of Artificial Sequence: Synthetic oligonucleotide
gagcccacuuaucuuccau

SEQ ID NO: 2888143 - RNA, 19 nt, Artificial Sequence
  Description of Artificial Sequence: Synthetic oligonucleotide
cuaugccgggaaugaugga

SEQ ID NO: 2888144 - RNA, 19 nt, Artificial Sequence
  Description of Artificial Sequence: Synthetic oligonucleotide
agucuagguuacagccacu

SEQ ID NO: 2888145 - RNA, 19 nt, Artificial Sequence
  Description of Artificial Sequence: Synthetic oligonucleotide
caggucaaggcguguuucu

SEQ ID NO: 2888146 - RNA, 19 nt, Artificial Sequence
  Description of Artificial Sequence: Synthetic oligonucleotide
ggcaaguucaucggccaaa

SEQ ID NO: 2888147 - RNA, 19 nt, Artificial Sequence
  Description of Artificial Sequence: Synthetic oligonucleotide
gucuagguuacagccacuu

SEQ ID NO: 2888148 - RNA, 19 nt, Artificial Sequence
  Description of Artificial Sequence: Synthetic oligonucleotide
ggcaacuuguaggguggac

SEQ ID NO: 2888149 - RNA, 19 nt, Artificial Sequence
  Description of Artificial Sequence: Synthetic oligonucleotide
ccagccauggcaacuugua

SEQ ID NO: 2888150 - RNA, 19 nt, Artificial Sequence
  Description of Artificial Sequence: Synthetic oligonucleotide
ccgaguugcagggagccca

SEQ ID NO: 2888151 - RNA, 19 nt, Artificial Sequence
  Description of Artificial Sequence: Synthetic oligonucleotide
ggguggacacccaacuucu

SEQ ID NO: 2888152 - RNA, 19 nt, Artificial Sequence
  Description of Artificial Sequence: Synthetic oligonucleotide
cgggcagagucuagguuac

SEQ ID NO: 2888153 - RNA, 19 nt, Artificial Sequence
  Description of Artificial Sequence: Synthetic oligonucleotide
agacugccaugcagaagau

SEQ ID NO: 2888154 - RNA, 19 nt, Artificial Sequence
  Description of Artificial Sequence: Synthetic oligonucleotide
cacccaacuucucuccaau

SEQ ID NO: 2888155 - RNA, 19 nt, Artificial Sequence
  Description of Artificial Sequence: Synthetic oligonucleotide
ccuuucaguuuugucugca

SEQ ID NO: 2888156 - RNA, 19 nt, Artificial Sequence
  Description of Artificial Sequence: Synthetic oligonucleotide
uugcaccagcugugaugau

SEQ ID NO: 2888157 - RNA, 19 nt, Artificial Sequence
  Description of Artificial Sequence: Synthetic oligonucleotide
gaccaggucaaggcguguu

SEQ ID NO: 2888158 - RNA, 19 nt, Artificial Sequence
  Description of Artificial Sequence: Synthetic oligonucleotide
gggcaaguucaucggccaa

SEQ ID NO: 2888159 - RNA, 19 nt, Artificial Sequence
  Description of Artificial Sequence: Synthetic oligonucleotide
cagggagcccacuuaucuu

SEQ ID NO: 2888160 - RNA, 19 nt, Artificial Sequence
  Description of Artificial Sequence: Synthetic oligonucleotide
cgaguugcagggagcccac

SEQ ID NO: 2888161 - RNA, 19 nt, Artificial Sequence
  Description of Artificial Sequence: Synthetic oligonucleotide
gguggacacccaacuucuc

SEQ ID NO: 2888162 - RNA, 19 nt, Artificial Sequence
  Description of Artificial Sequence: Synthetic oligonucleotide
gcaaguucaucggccaaau

SEQ ID NO: 2888163 - RNA, 19 nt, Artificial Sequence
  Description of Artificial Sequence: Synthetic oligonucleotide
ccccuucugccuugcacca

SEQ ID NO: 2888164 - RNA, 19 nt, Artificial Sequence
  Description of Artificial Sequence: Synthetic oligonucleotide
gccgggaaugauggauuuc

SEQ ID NO: 2888165 - RNA, 19 nt, Artificial Sequence
  Description of Artificial Sequence: Synthetic oligonucleotide
ggcacacuagagucaccau

SEQ ID NO: 2888166 - RNA, 19 nt, Artificial Sequence
  Description of Artificial Sequence: Synthetic oligonucleotide
ccaugccacauaagucaaa

SEQ ID NO: 2888167 - RNA, 19 nt, Artificial Sequence
  Description of Artificial Sequence: Synthetic oligonucleotide
cacuuccaauuacccgagu

SEQ ID NO: 2888168 - RNA, 19 nt, Artificial Sequence
  Description of Artificial Sequence: Synthetic oligonucleotide
cccgaguugcagggagccc

SEQ ID NO: 2888169 - RNA, 19 nt, Artificial Sequence
  Description of Artificial Sequence: Synthetic oligonucleotide
gaguugcagggagcccacu

SEQ ID NO: 2888170 - RNA, 19 nt, Artificial Sequence
  Description of Artificial Sequence: Synthetic oligonucleotide
ggacuaugccgggaaugau

SEQ ID NO: 2888171 - RNA, 19 nt, Artificial Sequence
  Description of Artificial Sequence: Synthetic oligonucleotide
cagcaucaauagggcaagu

SEQ ID NO: 2888172 - RNA, 19 nt, Artificial Sequence
  Description of Artificial Sequence: Synthetic oligonucleotide
gggcagagucuagguuaca

SEQ ID NO: 2888173 - RNA, 19 nt, Artificial Sequence
  Description of Artificial Sequence: Synthetic oligonucleotide
gccaugcagaagauccauu

SEQ ID NO: 2888174 - RNA, 19 nt, Artificial Sequence
  Description of Artificial Sequence: Synthetic oligonucleotide
gccuugcaccagcugugau

SEQ ID NO: 2888175 - RNA, 19 nt, Artificial Sequence
  Description of Artificial Sequence: Synthetic oligonucleotide
cggaaacgggcagagucua

SEQ ID NO: 2888176 - RNA, 19 nt, Artificial Sequence
  Description of Artificial Sequence: Synthetic oligonucleotide
ggaccaggucaaggcgugu

SEQ ID NO: 2888177 - RNA, 19 nt, Artificial Sequence
  Description of Artificial Sequence: Synthetic oligonucleotide
ccauggcaacuuguagggu

SEQ ID NO: 2888178 - RNA, 19 nt, Artificial Sequence
  Description of Artificial Sequence: Synthetic oligonucleotide
cgggaaugauggauuucau

SEQ ID NO: 2888179 - RNA, 19 nt, Artificial Sequence
  Description of Artificial Sequence: Synthetic oligonucleotide
aaugauuucaaucaagcgc

SEQ ID NO: 2888180 - RNA, 19 nt, Artificial Sequence
  Description of Artificial Sequence: Synthetic oligonucleotide
aaauuauuaaaauacauug

SEQ ID NO: 2888181 - RNA, 19 nt, Artificial Sequence
  Description of Artificial Sequence: Synthetic oligonucleotide
aauaaaguuucccagaaag

SEQ ID NO: 2888182 - RNA, 19 nt, Artificial Sequence
  Description of Artificial Sequence: Synthetic oligonucleotide
ugugaaauuauuaaaauac

SEQ ID NO: 2888183 - RNA, 19 nt, Artificial Sequence
  Description of Artificial Sequence: Synthetic oligonucleotide
aaugauauauaucauagaa

SEQ ID NO: 2888184 - RNA, 19 nt, Artificial Sequence
  Description of Artificial Sequence: Synthetic oligonucleotide
agcauauaaaaguaguugc

SEQ ID NO: 2888185 - RNA, 19 nt, Artificial Sequence
  Description of Artificial Sequence: Synthetic oligonucleotide
ugauauaacacuaaugacu

SEQ ID NO: 2888186 - RNA, 19 nt, Artificial Sequence
  Description of Artificial Sequence: Synthetic oligonucleotide
uauuguuucacaaaauacc

SEQ ID NO: 2888187 - RNA, 19 nt, Artificial Sequence
  Description of Artificial Sequence: Synthetic oligonucleotide
aaucauguuauucuuuagg

SEQ ID NO: 2888188 - RNA, 19 nt, Artificial Sequence
  Description of Artificial Sequence: Synthetic oligonucleotide
auauauaucauagaauuac

SEQ ID NO: 2888189 - RNA, 19 nt, Artificial Sequence
  Description of Artificial Sequence: Synthetic oligonucleotide
acuaaugacuuucauauuc

SEQ ID NO: 2888190 - RNA, 19 nt, Artificial Sequence
  Description of Artificial Sequence: Synthetic oligonucleotide
uucaaaauauccuugauau

SEQ ID NO: 2888191 - RNA, 19 nt, Artificial Sequence
  Description of Artificial Sequence: Synthetic oligonucleotide
aaaugauuucaaucaagcg

SEQ ID NO: 2888192 - RNA, 19 nt, Artificial Sequence
  Description of Artificial Sequence: Synthetic oligonucleotide
caaaugauauauaucauag

SEQ ID NO: 2888193 - RNA, 19 nt, Artificial Sequence
  Description of Artificial Sequence: Synthetic oligonucleotide
caaaauacccauacgaucc

SEQ ID NO: 2888194 - RNA, 19 nt, Artificial Sequence
  Description of Artificial Sequence: Synthetic oligonucleotide
ugauauauaucauagaauu

SEQ ID NO: 2888195 - RNA, 19 nt, Artificial Sequence
  Description of Artificial Sequence: Synthetic oligonucleotide
cuucaaaugauauauauca

SEQ ID NO: 2888196 - RNA, 19 nt, Artificial Sequence
  Description of Artificial Sequence: Synthetic oligonucleotide
aguacuuuagcauauaaaa

SEQ ID NO: 2888197 - RNA, 19 nt, Artificial Sequence
  Description of Artificial Sequence: Synthetic oligonucleotide
uagaauuacauuuucaaaa

SEQ ID NO: 2888198 - RNA, 19 nt, Artificial Sequence
  Description of Artificial Sequence: Synthetic oligonucleotide
cuugauauaacacuaauga

SEQ ID NO: 2888199 - RNA, 19 nt, Artificial Sequence
  Description of Artificial Sequence: Synthetic oligonucleotide
augauuucaaucaagcgcc

SEQ ID NO: 2888200 - RNA, 19 nt, Artificial Sequence
  Description of Artificial Sequence: Synthetic oligonucleotide
uacuuuagcauauaaaagu

SEQ ID NO: 2888201 - RNA, 19 nt, Artificial Sequence
  Description of Artificial Sequence: Synthetic oligonucleotide
uuuagcauauaaaaguagu

SEQ ID NO: 2888202 - RNA, 19 nt, Artificial Sequence
  Description of Artificial Sequence: Synthetic oligonucleotide
auuguuucacaaaauaccc

SEQ ID NO: 2888203 - RNA, 19 nt, Artificial Sequence
  Description of Artificial Sequence: Synthetic oligonucleotide
ucuaccuaaauaaaguuuc

SEQ ID NO: 2888204 - RNA, 19 nt, Artificial Sequence
  Description of Artificial Sequence: Synthetic oligonucleotide
aagaugaccauuucuaccu

SEQ ID NO: 2888205 - RNA, 19 nt, Artificial Sequence
  Description of Artificial Sequence: Synthetic oligonucleotide
auaucauagaauuacauuu

SEQ ID NO: 2888206 - RNA, 19 nt, Artificial Sequence
  Description of Artificial Sequence: Synthetic oligonucleotide
aaaauaauaagaugaccau

SEQ ID NO: 2888207 - RNA, 19 nt, Artificial Sequence
  Description of Artificial Sequence: Synthetic oligonucleotide
caaaugauuucaaucaagc

SEQ ID NO: 2888208 - RNA, 19 nt, Artificial Sequence
  Description of Artificial Sequence: Synthetic oligonucleotide
acaaaauacccauacgauc

SEQ ID NO: 2888209 - RNA, 19 nt, Artificial Sequence
  Description of Artificial Sequence: Synthetic oligonucleotide
acacuaaugacuuucauau

SEQ ID NO: 2888210 - RNA, 19 nt, Artificial Sequence
  Description of Artificial Sequence: Synthetic oligonucleotide
aauauccuugauauaacac

SEQ ID NO: 2888211 - RNA, 19 nt, Artificial Sequence
  Description of Artificial Sequence: Synthetic oligonucleotide
ugaaauuauuaaaauacau

SEQ ID NO: 2888212 - RNA, 19 nt, Artificial Sequence
  Description of Artificial Sequence: Synthetic oligonucleotide
ucauauucaugucacaaac

SEQ ID NO: 2888213 - RNA, 19 nt, Artificial Sequence
  Description of Artificial Sequence: Synthetic oligonucleotide
aaauugugaaauuauuaaa

SEQ ID NO: 2888214 - RNA, 19 nt, Artificial Sequence
  Description of Artificial Sequence: Synthetic oligonucleotide
aaaguugugaaguacuuua

SEQ ID NO: 2888215 - RNA, 19 nt, Artificial Sequence
  Description of Artificial Sequence: Synthetic oligonucleotide
aacuucaaaugauauauau

SEQ ID NO: 2888216 - RNA, 19 nt, Artificial Sequence
  Description of Artificial Sequence: Synthetic oligonucleotide
uuucacaaaauacccauac

SEQ ID NO: 2888217 - RNA, 19 nt, Artificial Sequence
  Description of Artificial Sequence: Synthetic oligonucleotide
aauuacauuuucaaaauau

SEQ ID NO: 2888218 - RNA, 19 nt, Artificial Sequence
  Description of Artificial Sequence: Synthetic oligonucleotide
auaagaugaccauuucuac

SEQ ID NO: 2888219 - RNA, 19 nt, Artificial Sequence
  Description of Artificial Sequence: Synthetic oligonucleotide
aaauauccuugauauaaca

SEQ ID NO: 2888220 - RNA, 19 nt, Artificial Sequence
  Description of Artificial Sequence: Synthetic oligonucleotide
aguugugaaguacuuuagc

SEQ ID NO: 2888221 - RNA, 19 nt, Artificial Sequence
  Description of Artificial Sequence: Synthetic oligonucleotide
ucaguauuguuucacaaaa

SEQ ID NO: 2888222 - RNA, 19 nt, Artificial Sequence
  Description of Artificial Sequence: Synthetic oligonucleotide
auacgauccacacaaauga

SEQ ID NO: 2888223 - RNA, 19 nt, Artificial Sequence
  Description of Artificial Sequence: Synthetic oligonucleotide
aaaaucauguuauucuuua

SEQ ID NO: 2888224 - RNA, 19 nt, Artificial Sequence
  Description of Artificial Sequence: Synthetic oligonucleotide
aauaauaagaugaccauuu

SEQ ID NO: 2888225 - RNA, 19 nt, Artificial Sequence
  Description of Artificial Sequence: Synthetic oligonucleotide
aauuauuaaaauacauugu

SEQ ID NO: 2888226 - RNA, 19 nt, Artificial Sequence
  Description of Artificial Sequence: Synthetic oligonucleotide
auauccuugauauaacacu

SEQ ID NO: 2888227 - RNA, 19 nt, Artificial Sequence
  Description of Artificial Sequence: Synthetic oligonucleotide
uauauaucauagaauuaca

SEQ ID NO: 2888228 - RNA, 19 nt, Artificial Sequence
  Description of Artificial Sequence: Synthetic oligonucleotide
uauucuuuaggugugaaaa

SEQ ID NO: 2888229 - RNA, 19 nt, Artificial Sequence
  Description of Artificial Sequence: Synthetic oligonucleotide
uaaauaaaguuucccagaa

SEQ ID NO: 2888230 - RNA, 19 nt, Artificial Sequence
  Description of Artificial Sequence: Synthetic oligonucleotide
uuaaaauacauuguuuuaa

SEQ ID NO: 2888231 - RNA, 19 nt, Artificial Sequence
  Description of Artificial Sequence: Synthetic oligonucleotide
aaaauauccuugauauaac

SEQ ID NO: 2888232 - RNA, 19 nt, Artificial Sequence
  Description of Artificial Sequence: Synthetic oligonucleotide
uaauaagaugaccauuucu

SEQ ID NO: 2888233 - RNA, 19 nt, Artificial Sequence
  Description of Artificial Sequence: Synthetic oligonucleotide
cauuucuaccuaaauaaag

SEQ ID NO: 2888234 - RNA, 19 nt, Artificial Sequence
  Description of Artificial Sequence: Synthetic oligonucleotide
aauaagaugaccauuucua

SEQ ID NO: 2888235 - RNA, 19 nt, Artificial Sequence
  Description of Artificial Sequence: Synthetic oligonucleotide
uucacaaaauacccauacg

SEQ ID NO: 2888236 - RNA, 19 nt, Artificial Sequence
  Description of Artificial Sequence: Synthetic oligonucleotide
ucacaaaccguauauaaau

SEQ ID NO: 2888237 - RNA, 19 nt, Artificial Sequence
  Description of Artificial Sequence: Synthetic oligonucleotide
acaaaccguauauaaauug

SEQ ID NO: 2888238 - RNA, 19 nt, Artificial Sequence
  Description of Artificial Sequence: Synthetic oligonucleotide
aaaugauauauaucauaga

SEQ ID NO: 2888239 - RNA, 19 nt, Artificial Sequence
  Description of Artificial Sequence: Synthetic oligonucleotide
ugaaaggucaguauuguuu

SEQ ID NO: 2888240 - RNA, 19 nt, Artificial Sequence
  Description of Artificial Sequence: Synthetic oligonucleotide
uaagaugaccauuucuacc

SEQ ID NO: 2888241 - RNA, 19 nt, Artificial Sequence
  Description of Artificial Sequence: Synthetic oligonucleotide
ggaucucuaaguuucaggg

SEQ ID NO: 2888242 - RNA, 19 nt, Artificial Sequence
  Description of Artificial Sequence: Synthetic oligonucleotide
uauaacacuaaugacuuuc

SEQ ID NO: 2888243 - RNA, 19 nt, Artificial Sequence
  Description of Artificial Sequence: Synthetic oligonucleotide
uauaaauugugaaauuauu

SEQ ID NO: 2888244 - RNA, 19 nt, Artificial Sequence
  Description of Artificial Sequence: Synthetic oligonucleotide
uuucaaaauauccuugaua

SEQ ID NO: 2888245 - RNA, 19 nt, Artificial Sequence
  Description of Artificial Sequence: Synthetic oligonucleotide
aucauagaauuacauuuuc

SEQ ID NO: 2888246 - RNA, 19 nt, Artificial Sequence
  Description of Artificial Sequence: Synthetic oligonucleotide
aaaucauguuauucuuuag

SEQ ID NO: 2888247 - RNA, 19 nt, Artificial Sequence
  Description of Artificial Sequence: Synthetic oligonucleotide
uauauaaauugugaaauua

SEQ ID NO: 2888248 - RNA, 19 nt, Artificial Sequence
  Description of Artificial Sequence: Synthetic oligonucleotide
uaaguuucagggcagccug

SEQ ID NO: 2888249 - RNA, 19 nt, Artificial Sequence
  Description of Artificial Sequence: Synthetic oligonucleotide
cauucucuuucuaugacag

SEQ ID NO: 2888250 - RNA, 19 nt, Artificial Sequence
  Description of Artificial Sequence: Synthetic oligonucleotide
aucauguuauucuuuaggu

SEQ ID NO: 2888251 - RNA, 19 nt, Artificial Sequence
  Description of Artificial Sequence: Synthetic oligonucleotide
aaaauaaacuucaaaugau

SEQ ID NO: 2888252 - RNA, 19 nt, Artificial Sequence
  Description of Artificial Sequence: Synthetic oligonucleotide
uagcauauaaaaguaguug

SEQ ID NO: 2888253 - RNA, 19 nt, Artificial Sequence
  Description of Artificial Sequence: Synthetic oligonucleotide
uucugaaaggucaguauug

SEQ ID NO: 2888254 - RNA, 19 nt, Artificial Sequence
  Description of Artificial Sequence: Synthetic oligonucleotide
aauaaacuucaaaugauau

SEQ ID NO: 2888255 - RNA, 19 nt, Artificial Sequence
  Description of Artificial Sequence: Synthetic oligonucleotide
aucucuaaguuucagggca

SEQ ID NO: 2888256 - RNA, 19 nt, Artificial Sequence
  Description of Artificial Sequence: Synthetic oligonucleotide
aguuggaucucuaaguuuc

SEQ ID NO: 2888257 - RNA, 19 nt, Artificial Sequence
  Description of Artificial Sequence: Synthetic oligonucleotide
ucucuuucuaugacagugg

SEQ ID NO: 2888258 - RNA, 19 nt, Artificial Sequence
  Description of Artificial Sequence: Synthetic oligonucleotide
cauauaaaaguaguugccc

SEQ ID NO: 2888259 - RNA, 19 nt, Artificial Sequence
  Description of Artificial Sequence: Synthetic oligonucleotide
uguuucacaaaauacccau

SEQ ID NO: 2888260 - RNA, 19 nt, Artificial Sequence
  Description of Artificial Sequence: Synthetic oligonucleotide
auauaaaaguaguugcccu

SEQ ID NO: 2888261 - RNA, 19 nt, Artificial Sequence
  Description of Artificial Sequence: Synthetic oligonucleotide
uucucuuucuaugacagug

SEQ ID NO: 2888262 - RNA, 19 nt, Artificial Sequence
  Description of Artificial Sequence: Synthetic oligonucleotide
agaauuacauuuucaaaau

SEQ ID NO: 2888263 - RNA, 19 nt, Artificial Sequence
  Description of Artificial Sequence: Synthetic oligonucleotide
cacacaaaugauuucaauc

SEQ ID NO: 2888264 - RNA, 19 nt, Artificial Sequence
  Description of Artificial Sequence: Synthetic oligonucleotide
ucauagaauuacauuuuca

SEQ ID NO: 2888265 - RNA, 19 nt, Artificial Sequence
  Description of Artificial Sequence: Synthetic oligonucleotide
cuuuagcauauaaaaguag

SEQ ID NO: 2888266 - RNA, 19 nt, Artificial Sequence
  Description of Artificial Sequence: Synthetic oligonucleotide
agugguaugcuucaagaga

SEQ ID NO: 2888267 - RNA, 19 nt, Artificial Sequence
  Description of Artificial Sequence: Synthetic oligonucleotide
gaaaggucaguauuguuuc

SEQ ID NO: 2888268 - RNA, 19 nt, Artificial Sequence
  Description of Artificial Sequence: Synthetic oligonucleotide
aguauuguuucacaaaaua

SEQ ID NO: 2888269 - RNA, 19 nt, Artificial Sequence
  Description of Artificial Sequence: Synthetic oligonucleotide
uugauauaacacuaaugac

SEQ ID NO: 2888270 - RNA, 19 nt, Artificial Sequence
  Description of Artificial Sequence: Synthetic oligonucleotide
auaauaagaugaccauuuc

SEQ ID NO: 2888271 - RNA, 19 nt, Artificial Sequence
  Description of Artificial Sequence: Synthetic oligonucleotide
ucauguuauucuuuaggug

SEQ ID NO: 2888272 - RNA, 19 nt, Artificial Sequence
  Description of Artificial Sequence: Synthetic oligonucleotide
accuaaauaaaguuuccca

SEQ ID NO: 2888273 - RNA, 19 nt, Artificial Sequence
  Description of Artificial Sequence: Synthetic oligonucleotide
acuuucauauucaugucac

SEQ ID NO: 2888274 - RNA, 19 nt, Artificial Sequence
  Description of Artificial Sequence: Synthetic oligonucleotide
auacccauacgauccacac

SEQ ID NO: 2888275 - RNA, 19 nt, Artificial Sequence
  Description of Artificial Sequence: Synthetic oligonucleotide
cauacgauccacacaaaug

SEQ ID NO: 2888276 - RNA, 19 nt, Artificial Sequence
  Description of Artificial Sequence: Synthetic oligonucleotide
ugucacaaaccguauauaa

SEQ ID NO: 2888277 - RNA, 19 nt, Artificial Sequence
  Description of Artificial Sequence: Synthetic oligonucleotide
uggaucucuaaguuucagg

SEQ ID NO: 2888278 - RNA, 19 nt, Artificial Sequence
  Description of Artificial Sequence: Synthetic oligonucleotide
aaaguuucccagaaaguug

SEQ ID NO: 2888279 - RNA, 19 nt, Artificial Sequence
  Description of Artificial Sequence: Synthetic oligonucleotide
aaggucaguauuguuucac

SEQ ID NO: 2888280 - RNA, 19 nt, Artificial Sequence
  Description of Artificial Sequence: Synthetic oligonucleotide
uuucagggcagccuggucu

SEQ ID NO: 2888281 - RNA, 19 nt, Artificial Sequence
  Description of Artificial Sequence: Synthetic oligonucleotide
uauccuugauauaacacua

SEQ ID NO: 2888282 - RNA, 19 nt, Artificial Sequence
  Description of Artificial Sequence: Synthetic oligonucleotide
guugugaaguacuuuagca

SEQ ID NO: 2888283 - RNA, 19 nt, Artificial Sequence
  Description of Artificial Sequence: Synthetic oligonucleotide
auagaauuacauuuucaaa

SEQ ID NO: 2888284 - RNA, 19 nt, Artificial Sequence
  Description of Artificial Sequence: Synthetic oligonucleotide
auuucuaccuaaauaaagu

SEQ ID NO: 2888285 - RNA, 19 nt, Artificial Sequence
  Description of Artificial Sequence: Synthetic oligonucleotide
cauagaauuacauuuucaa

SEQ ID NO: 2888286 - RNA, 19 nt, Artificial Sequence
  Description of Artificial Sequence: Synthetic oligonucleotide
uuagcauauaaaaguaguu

SEQ ID NO: 2888287 - RNA, 19 nt, Artificial Sequence
  Description of Artificial Sequence: Synthetic oligonucleotide
uaaaguuucccagaaaguu

SEQ ID NO: 2888288 - RNA, 19 nt, Artificial Sequence
  Description of Artificial Sequence: Synthetic oligonucleotide
uuucauauucaugucacaa

SEQ ID NO: 2888289 - RNA, 19 nt, Artificial Sequence
  Description of Artificial Sequence: Synthetic oligonucleotide
uucuaugacagugguaugc

SEQ ID NO: 2888290 - RNA, 19 nt, Artificial Sequence
  Description of Artificial Sequence: Synthetic oligonucleotide
uaucauagaauuacauuuu

SEQ ID NO: 2888291 - RNA, 19 nt, Artificial Sequence
  Description of Artificial Sequence: Synthetic oligonucleotide
uuucugaaaggucaguauu

SEQ ID NO: 2888292 - RNA, 19 nt, Artificial Sequence
  Description of Artificial Sequence: Synthetic oligonucleotide
acccauacgauccacacaa

SEQ ID NO: 2888293 - RNA, 19 nt, Artificial Sequence
  Description of Artificial Sequence: Synthetic oligonucleotide
aaaccguauauaaauugug

SEQ ID NO: 2888294 - RNA, 19 nt, Artificial Sequence
  Description of Artificial Sequence: Synthetic oligonucleotide
aaugacuuucauauucaug

SEQ ID NO: 2888295 - RNA, 19 nt, Artificial Sequence
  Description of Artificial Sequence: Synthetic oligonucleotide
aaauaauaagaugaccauu

SEQ ID NO: 2888296 - RNA, 19 nt, Artificial Sequence
  Description of Artificial Sequence: Synthetic oligonucleotide
aaaauacccauacgaucca

SEQ ID NO: 2888297 - RNA, 19 nt, Artificial Sequence
  Description of Artificial Sequence: Synthetic oligonucleotide
cuaaauaaaguuucccaga

SEQ ID NO: 2888298 - RNA, 19 nt, Artificial Sequence
  Description of Artificial Sequence: Synthetic oligonucleotide
acuucaaaugauauauauc

SEQ ID NO: 2888299 - RNA, 19 nt, Artificial Sequence
  Description of Artificial Sequence: Synthetic oligonucleotide
ugcuucaagagacuguauc

SEQ ID NO: 2888300 - RNA, 19 nt, Artificial Sequence
  Description of Artificial Sequence: Synthetic oligonucleotide
guacuuuagcauauaaaag

SEQ ID NO: 2888301 - RNA, 19 nt, Artificial Sequence
  Description of Artificial Sequence: Synthetic oligonucleotide
uuguuucacaaaauaccca

SEQ ID NO: 2888302 - RNA, 19 nt, Artificial Sequence
  Description of Artificial Sequence: Synthetic oligonucleotide
uucuaccuaaauaaaguuu

SEQ ID NO: 2888303 - RNA, 19 nt, Artificial Sequence
  Description of Artificial Sequence: Synthetic oligonucleotide
ucaagcgccauucucuuuc

SEQ ID NO: 2888304 - RNA, 19 nt, Artificial Sequence
  Description of Artificial Sequence: Synthetic oligonucleotide
guauuguuucacaaaauac

SEQ ID NO: 2888305 - RNA, 19 nt, Artificial Sequence
  Description of Artificial Sequence: Synthetic oligonucleotide
aaauaaacuucaaaugaua

SEQ ID NO: 2888306 - RNA, 19 nt, Artificial Sequence
  Description of Artificial Sequence: Synthetic oligonucleotide
uuucccagaaaguugugaa

SEQ ID NO: 2888307 - RNA, 19 nt, Artificial Sequence
  Description of Artificial Sequence: Synthetic oligonucleotide
ccuaaauaaaguuucccag

SEQ ID NO: 2888308 - RNA, 19 nt, Artificial Sequence
  Description of Artificial Sequence: Synthetic oligonucleotide
uuucuaccuaaauaaaguu

SEQ ID NO: 2888309 - RNA, 19 nt, Artificial Sequence
  Description of Artificial Sequence: Synthetic oligonucleotide
uucauauucaugucacaaa

SEQ ID NO: 2888310 - RNA, 19 nt, Artificial Sequence
  Description of Artificial Sequence: Synthetic oligonucleotide
cauguuauucuuuaggugu

SEQ ID NO: 2888311 - RNA, 19 nt, Artificial Sequence
  Description of Artificial Sequence: Synthetic oligonucleotide
ucaaucaagcgccauucuc

SEQ ID NO: 2888312 - RNA, 19 nt, Artificial Sequence
  Description of Artificial Sequence: Synthetic oligonucleotide
aaauaaaguuucccagaaa

SEQ ID NO: 2888313 - RNA, 19 nt, Artificial Sequence
  Description of Artificial Sequence: Synthetic oligonucleotide
auaaacuucaaaugauaua

SEQ ID NO: 2888314 - RNA, 19 nt, Artificial Sequence
  Description of Artificial Sequence: Synthetic oligonucleotide
gaucucuaaguuucagggc

SEQ ID NO: 2888315 - RNA, 19 nt, Artificial Sequence
  Description of Artificial Sequence: Synthetic oligonucleotide
uuuucugaaaggucaguau

SEQ ID NO: 2888316 - RNA, 19 nt, Artificial Sequence
  Description of Artificial Sequence: Synthetic oligonucleotide
aaguuucccagaaaguugu

SEQ ID NO: 2888317 - RNA, 19 nt, Artificial Sequence
  Description of Artificial Sequence: Synthetic oligonucleotide
acagugguaugcuucaaga

SEQ ID NO: 2888318 - RNA, 19 nt, Artificial Sequence
  Description of Artificial Sequence: Synthetic oligonucleotide
auaaauugugaaauuauua

SEQ ID NO: 2888319 - RNA, 19 nt, Artificial Sequence
  Description of Artificial Sequence: Synthetic oligonucleotide
cuaccuaaauaaaguuucc

SEQ ID NO: 2888320 - RNA, 19 nt, Artificial Sequence
  Description of Artificial Sequence: Synthetic oligonucleotide
aaauacccauacgauccac

SEQ ID NO: 2888321 - RNA, 19 nt, Artificial Sequence
  Description of Artificial Sequence: Synthetic oligonucleotide
aaccguauauaaauuguga

SEQ ID NO: 2888322 - RNA, 19 nt, Artificial Sequence
  Description of Artificial Sequence: Synthetic oligonucleotide
uauaaaaguaguugcccuu

SEQ ID NO: 2888323 - RNA, 19 nt, Artificial Sequence
  Description of Artificial Sequence: Synthetic oligonucleotide
accguauauaaauugugaa

SEQ ID NO: 2888324 - RNA, 19 nt, Artificial Sequence
  Description of Artificial Sequence: Synthetic oligonucleotide
acaaaugauuucaaucaag

SEQ ID NO: 2888325 - RNA, 19 nt, Artificial Sequence
  Description of Artificial Sequence: Synthetic oligonucleotide
uuucaaucaagcgccauuc

SEQ ID NO: 2888326 - RNA, 19 nt, Artificial Sequence
  Description of Artificial Sequence: Synthetic oligonucleotide
auauaaauugugaaauuau

SEQ ID NO: 2888327 - RNA, 19 nt, Artificial Sequence
  Description of Artificial Sequence: Synthetic oligonucleotide
ucucuaaguuucagggcag

SEQ ID NO: 2888328 - RNA, 19 nt, Artificial Sequence
  Description of Artificial Sequence: Synthetic oligonucleotide
uaccuaaauaaaguuuccc

SEQ ID NO: 2888329 - RNA, 19 nt, Artificial Sequence
  Description of Artificial Sequence: Synthetic oligonucleotide
uaugcuucaagagacugua

SEQ ID NO: 2888330 - RNA, 19 nt, Artificial Sequence
  Description of Artificial Sequence: Synthetic oligonucleotide
cuaaugacuuucauauuca

SEQ ID NO: 2888331 - RNA, 19 nt, Artificial Sequence
  Description of Artificial Sequence: Synthetic oligonucleotide
uccuugauauaacacuaau

SEQ ID NO: 2888332 - RNA, 19 nt, Artificial Sequence
  Description of Artificial Sequence: Synthetic oligonucleotide
aaguugugaaguacuuuag

SEQ ID NO: 2888333 - RNA, 19 nt, Artificial Sequence
  Description of Artificial Sequence: Synthetic oligonucleotide
gauauaacacuaaugacuu

SEQ ID NO: 2888334 - RNA, 19 nt, Artificial Sequence
  Description of Artificial Sequence: Synthetic oligonucleotide
aaaggucaguauuguuuca

SEQ ID NO: 2888335 - RNA, 19 nt, Artificial Sequence
  Description of Artificial Sequence: Synthetic oligonucleotide
gcuucaagagacuguaucc

SEQ ID NO: 2888336 - RNA, 19 nt, Artificial Sequence
  Description of Artificial Sequence: Synthetic oligonucleotide
uuauucuuuaggugugaaa

SEQ ID NO: 2888337 - RNA, 19 nt, Artificial Sequence
  Description of Artificial Sequence: Synthetic oligonucleotide
aaguacuuuagcauauaaa

SEQ ID NO: 2888338 - RNA, 19 nt, Artificial Sequence
  Description of Artificial Sequence: Synthetic oligonucleotide
uuccaggguagccagggcu

SEQ ID NO: 2888339 - RNA, 19 nt, Artificial Sequence
  Description of Artificial Sequence: Synthetic oligonucleotide
ucugaaaggucaguauugu

SEQ ID NO: 2888340 - RNA, 19 nt, Artificial Sequence
  Description of Artificial Sequence: Synthetic oligonucleotide
gcacuuugcaggcagaggc

SEQ ID NO: 2888341 - RNA, 19 nt, Artificial Sequence
  Description of Artificial Sequence: Synthetic oligonucleotide
aaucaagcgccauucucuu

SEQ ID NO: 2888342 - RNA, 19 nt, Artificial Sequence
  Description of Artificial Sequence: Synthetic oligonucleotide
gugguaugcuucaagagac

SEQ ID NO: 2888343 - RNA, 19 nt, Artificial Sequence
  Description of Artificial Sequence: Synthetic oligonucleotide
gugaaauuauuaaaauaca

SEQ ID NO: 2888344 - RNA, 19 nt, Artificial Sequence
  Description of Artificial Sequence: Synthetic oligonucleotide
gaaguacuuuagcauauaa

SEQ ID NO: 2888345 - RNA, 19 nt, Artificial Sequence
  Description of Artificial Sequence: Synthetic oligonucleotide
ucuaugacagugguaugcu

SEQ ID NO: 2888346 - RNA, 19 nt, Artificial Sequence
  Description of Artificial Sequence: Synthetic oligonucleotide
auucaugucacaaaccgua

SEQ ID NO: 2888347 - RNA, 19 nt, Artificial Sequence
  Description of Artificial Sequence: Synthetic oligonucleotide
auuucaaucaagcgccauu

SEQ ID NO: 2888348 - RNA, 19 nt, Artificial Sequence
  Description of Artificial Sequence: Synthetic oligonucleotide
aggcaguuggaucucuaag

SEQ ID NO: 2888349 - RNA, 19 nt, Artificial Sequence
  Description of Artificial Sequence: Synthetic oligonucleotide
augacagugguaugcuuca

SEQ ID NO: 2888350 - RNA, 19 nt, Artificial Sequence
  Description of Artificial Sequence: Synthetic oligonucleotide
augauauauaucauagaau

SEQ ID NO: 2888351 - RNA, 19 nt, Artificial Sequence
  Description of Artificial Sequence: Synthetic oligonucleotide
cuuucuaugacagugguau

SEQ ID NO: 2888352 - RNA, 19 nt, Artificial Sequence
  Description of Artificial Sequence: Synthetic oligonucleotide
gaauuacauuuucaaaaua

SEQ ID NO: 2888353 - RNA, 19 nt, Artificial Sequence
  Description of Artificial Sequence: Synthetic oligonucleotide
cagugguaugcuucaagag

SEQ ID NO: 2888354 - RNA, 19 nt, Artificial Sequence
  Description of Artificial Sequence: Synthetic oligonucleotide
uucaagagacuguauccau

SEQ ID NO: 2888355 - RNA, 19 nt, Artificial Sequence
  Description of Artificial Sequence: Synthetic oligonucleotide
ucuaaguuucagggcagcc

SEQ ID NO: 2888356 - RNA, 19 nt, Artificial Sequence
  Description of Artificial Sequence: Synthetic oligonucleotide
aauacccauacgauccaca

SEQ ID NO: 2888357 - RNA, 19 nt, Artificial Sequence
  Description of Artificial Sequence: Synthetic oligonucleotide
auaaaguuucccagaaagu

SEQ ID NO: 2888358 - RNA, 19 nt, Artificial Sequence
  Description of Artificial Sequence: Synthetic oligonucleotide
gauauauaucauagaauua

SEQ ID NO: 2888359 - RNA, 19 nt, Artificial Sequence
  Description of Artificial Sequence: Synthetic oligonucleotide
uaaugacuuucauauucau

SEQ ID NO: 2888360 - RNA, 19 nt, Artificial Sequence
  Description of Artificial Sequence: Synthetic oligonucleotide
acuuuagcauauaaaagua

SEQ ID NO: 2888361 - RNA, 19 nt, Artificial Sequence
  Description of Artificial Sequence: Synthetic oligonucleotide
gguagccagggcuacacag

SEQ ID NO: 2888362 - RNA, 19 nt, Artificial Sequence
  Description of Artificial Sequence: Synthetic oligonucleotide
ugaccauuucuaccuaaau

SEQ ID NO: 2888363 - RNA, 19 nt, Artificial Sequence
  Description of Artificial Sequence: Synthetic oligonucleotide
uucaaucaagcgccauucu

SEQ ID NO: 2888364 - RNA, 19 nt, Artificial Sequence
  Description of Artificial Sequence: Synthetic oligonucleotide
uuucuaugacagugguaug

SEQ ID NO: 2888365 - RNA, 19 nt, Artificial Sequence
  Description of Artificial Sequence: Synthetic oligonucleotide
gcauauaaaaguaguugcc

SEQ ID NO: 2888366 - RNA, 19 nt, Artificial Sequence
  Description of Artificial Sequence: Synthetic oligonucleotide
ugauuucaaucaagcgcca

SEQ ID NO: 2888367 - RNA, 19 nt, Artificial Sequence
  Description of Artificial Sequence: Synthetic oligonucleotide
uaacacuaaugacuuucau

SEQ ID NO: 2888368 - RNA, 19 nt, Artificial Sequence
  Description of Artificial Sequence: Synthetic oligonucleotide
ucaugucacaaaccguaua

SEQ ID NO: 2888369 - RNA, 19 nt, Artificial Sequence
  Description of Artificial Sequence: Synthetic oligonucleotide
ugacuuucauauucauguc

SEQ ID NO: 2888370 - RNA, 19 nt, Artificial Sequence
  Description of Artificial Sequence: Synthetic oligonucleotide
ccuugauauaacacuaaug

SEQ ID NO: 2888371 - RNA, 19 nt, Artificial Sequence
  Description of Artificial Sequence: Synthetic oligonucleotide
uacccauacgauccacaca

SEQ ID NO: 2888372 - RNA, 19 nt, Artificial Sequence
  Description of Artificial Sequence: Synthetic oligonucleotide
gucaguauuguuucacaaa

SEQ ID NO: 2888373 - RNA, 19 nt, Artificial Sequence
  Description of Artificial Sequence: Synthetic oligonucleotide
acuuugcaggcagaggcag

SEQ ID NO: 2888374 - RNA, 19 nt, Artificial Sequence
  Description of Artificial Sequence: Synthetic oligonucleotide
auaacacuaaugacuuuca

SEQ ID NO: 2888375 - RNA, 19 nt, Artificial Sequence
  Description of Artificial Sequence: Synthetic oligonucleotide
uacgauccacacaaaugau

SEQ ID NO: 2888376 - RNA, 19 nt, Artificial Sequence
  Description of Artificial Sequence: Synthetic oligonucleotide
ucuuucuaugacaguggua

SEQ ID NO: 2888377 - RNA, 19 nt, Artificial Sequence
  Description of Artificial Sequence: Synthetic oligonucleotide
caaaccguauauaaauugu

SEQ ID NO: 2888378 - RNA, 19 nt, Artificial Sequence
  Description of Artificial Sequence: Synthetic oligonucleotide
gauccacacaaaugauuuc

SEQ ID NO: 2888379 - RNA, 19 nt, Artificial Sequence
  Description of Artificial Sequence: Synthetic oligonucleotide
aggucaguauuguuucaca

SEQ ID NO: 2888380 - RNA, 19 nt, Artificial Sequence
  Description of Artificial Sequence: Synthetic oligonucleotide
agcgccauucucuuucuau

SEQ ID NO: 2888381 - RNA, 19 nt, Artificial Sequence
  Description of Artificial Sequence: Synthetic oligonucleotide
gaugaccauuucuaccuaa

SEQ ID NO: 2888382 - RNA, 19 nt, Artificial Sequence
  Description of Artificial Sequence: Synthetic oligonucleotide
caaucaagcgccauucucu

SEQ ID NO: 2888383 - RNA, 19 nt, Artificial Sequence
  Description of Artificial Sequence: Synthetic oligonucleotide
cuucaagagacuguaucca

SEQ ID NO: 2888384 - RNA, 19 nt, Artificial Sequence
  Description of Artificial Sequence: Synthetic oligonucleotide
aggguagccagggcuacac

SEQ ID NO: 2888385 - RNA, 19 nt, Artificial Sequence
  Description of Artificial Sequence: Synthetic oligonucleotide
ugguaugcuucaagagacu

SEQ ID NO: 2888386 - RNA, 19 nt, Artificial Sequence
  Description of Artificial Sequence: Synthetic oligonucleotide
agcacuuugcaggcagagg

SEQ ID NO: 2888387 - RNA, 19 nt, Artificial Sequence
  Description of Artificial Sequence: Synthetic oligonucleotide
aaacuucaaaugauauaua

SEQ ID NO: 2888388 - RNA, 19 nt, Artificial Sequence
  Description of Artificial Sequence: Synthetic oligonucleotide
gguaugcuucaagagacug

SEQ ID NO: 2888389 - RNA, 19 nt, Artificial Sequence
  Description of Artificial Sequence: Synthetic oligonucleotide
uccaggguagccagggcua

SEQ ID NO: 2888390 - RNA, 19 nt, Artificial Sequence
  Description of Artificial Sequence: Synthetic oligonucleotide
cacaaaugauuucaaucaa

SEQ ID NO: 2888391 - RNA, 19 nt, Artificial Sequence
  Description of Artificial Sequence: Synthetic oligonucleotide
auucucuuucuaugacagu

SEQ ID NO: 2888392 - RNA, 19 nt, Artificial Sequence
  Description of Artificial Sequence: Synthetic oligonucleotide
cacaaaauacccauacgau

SEQ ID NO: 2888393 - RNA, 19 nt, Artificial Sequence
  Description of Artificial Sequence: Synthetic oligonucleotide
uuugcaggcagaggcaguu

SEQ ID NO: 2888394 - RNA, 19 nt, Artificial Sequence
  Description of Artificial Sequence: Synthetic oligonucleotide
caugucacaaaccguauau

SEQ ID NO: 2888395 - RNA, 19 nt, Artificial Sequence
  Description of Artificial Sequence: Synthetic oligonucleotide
gucacaaaccguauauaaa

SEQ ID NO: 2888396 - RNA, 19 nt, Artificial Sequence
  Description of Artificial Sequence: Synthetic oligonucleotide
guuucccagaaaguuguga

SEQ ID NO: 2888397 - RNA, 19 nt, Artificial Sequence
  Description of Artificial Sequence: Synthetic oligonucleotide
ugaaguacuuuagcauaua

SEQ ID NO: 2888398 - RNA, 19 nt, Artificial Sequence
  Description of Artificial Sequence: Synthetic oligonucleotide
uucagggcagccuggucua

SEQ ID NO: 2888399 - RNA, 19 nt, Artificial Sequence
  Description of Artificial Sequence: Synthetic oligonucleotide
auauaacacuaaugacuuu

SEQ ID NO: 2888400 - RNA, 19 nt, Artificial Sequence
  Description of Artificial Sequence: Synthetic oligonucleotide
cucuaaguuucagggcagc

SEQ ID NO: 2888401 - RNA, 19 nt, Artificial Sequence
  Description of Artificial Sequence: Synthetic oligonucleotide
gaggcaguuggaucucuaa

SEQ ID NO: 2888402 - RNA, 19 nt, Artificial Sequence
  Description of Artificial Sequence: Synthetic oligonucleotide
ggucaguauuguuucacaa

SEQ ID NO: 2888403 - RNA, 19 nt, Artificial Sequence
  Description of Artificial Sequence: Synthetic oligonucleotide
ccguauauaaauugugaaa

SEQ ID NO: 2888404 - RNA, 19 nt, Artificial Sequence
  Description of Artificial Sequence: Synthetic oligonucleotide
ggcaguuggaucucuaagu

SEQ ID NO: 2888405 - RNA, 19 nt, Artificial Sequence
  Description of Artificial Sequence: Synthetic oligonucleotide
aguuucagggcagccuggu

SEQ ID NO: 2888406 - RNA, 19 nt, Artificial Sequence
  Description of Artificial Sequence: Synthetic oligonucleotide
guuauucuuuaggugugaa

SEQ ID NO: 2888407 - RNA, 19 nt, Artificial Sequence
  Description of Artificial Sequence: Synthetic oligonucleotide
gcgccauucucuuucuaug

SEQ ID NO: 2888408 - RNA, 19 nt, Artificial Sequence
  Description of Artificial Sequence: Synthetic oligonucleotide
agaugaccauuucuaccua

SEQ ID NO: 2888409 - RNA, 19 nt, Artificial Sequence
  Description of Artificial Sequence: Synthetic oligonucleotide
ccagaaaguugugaaguac

SEQ ID NO: 2888410 - RNA, 19 nt, Artificial Sequence
  Description of Artificial Sequence: Synthetic oligonucleotide
cacuuugcaggcagaggca

SEQ ID NO: 2888411 - RNA, 19 nt, Artificial Sequence
  Description of Artificial Sequence: Synthetic oligonucleotide
augaccauuucuaccuaaa

SEQ ID NO: 2888412 - RNA, 19 nt, Artificial Sequence
  Description of Artificial Sequence: Synthetic oligonucleotide
acgauccacacaaaugauu

SEQ ID NO: 2888413 - RNA, 19 nt, Artificial Sequence
  Description of Artificial Sequence: Synthetic oligonucleotide
gccauucucuuucuaugac

SEQ ID NO: 2888414 - RNA, 19 nt, Artificial Sequence
  Description of Artificial Sequence: Synthetic oligonucleotide
gaaaguugugaaguacuuu

SEQ ID NO: 2888415 - RNA, 19 nt, Artificial Sequence
  Description of Artificial Sequence: Synthetic oligonucleotide
auccuugauauaacacuaa

SEQ ID NO: 2888416 - RNA, 19 nt, Artificial Sequence
  Description of Artificial Sequence: Synthetic oligonucleotide
cuaaguuucagggcagccu

SEQ ID NO: 2888417 - RNA, 19 nt, Artificial Sequence
  Description of Artificial Sequence: Synthetic oligonucleotide
augucacaaaccguauaua

SEQ ID NO: 2888418 - RNA, 19 nt, Artificial Sequence
  Description of Artificial Sequence: Synthetic oligonucleotide
guuggaucucuaaguuuca

SEQ ID NO: 2888419 - RNA, 19 nt, Artificial Sequence
  Description of Artificial Sequence: Synthetic oligonucleotide
cucuuucuaugacaguggu

SEQ ID NO: 2888420 - RNA, 19 nt, Artificial Sequence
  Description of Artificial Sequence: Synthetic oligonucleotide
guuucacaaaauacccaua

SEQ ID NO: 2888421 - RNA, 19 nt, Artificial Sequence
  Description of Artificial Sequence: Synthetic oligonucleotide
cguauauaaauugugaaau

SEQ ID NO: 2888422 - RNA, 19 nt, Artificial Sequence
  Description of Artificial Sequence: Synthetic oligonucleotide
cacaaaccguauauaaauu

SEQ ID NO: 2888423 - RNA, 19 nt, Artificial Sequence
  Description of Artificial Sequence: Synthetic oligonucleotide
guuucagggcagccugguc

SEQ ID NO: 2888424 - RNA, 19 nt, Artificial Sequence
  Description of Artificial Sequence: Synthetic oligonucleotide
uugcaggcagaggcaguug

SEQ ID NO: 2888425 - RNA, 19 nt, Artificial Sequence
  Description of Artificial Sequence: Synthetic oligonucleotide
aguuucccagaaaguugug

SEQ ID NO: 2888426 - RNA, 19 nt, Artificial Sequence
  Description of Artificial Sequence: Synthetic oligonucleotide
guaugcuucaagagacugu

SEQ ID NO: 2888427 - RNA, 19 nt, Artificial Sequence
  Description of Artificial Sequence: Synthetic oligonucleotide
gugaaguacuuuagcauau

SEQ ID NO: 2888428 - RNA, 19 nt, Artificial Sequence
  Description of Artificial Sequence: Synthetic oligonucleotide
aucaagcgccauucucuuu

SEQ ID NO: 2888429 - RNA, 19 nt, Artificial Sequence
  Description of Artificial Sequence: Synthetic oligonucleotide
aagcgccauucucuuucua

SEQ ID NO: 2888430 - RNA, 19 nt, Artificial Sequence
  Description of Artificial Sequence: Synthetic oligonucleotide
caguauuguuucacaaaau

SEQ ID NO: 2888431 - RNA, 19 nt, Artificial Sequence
  Description of Artificial Sequence: Synthetic oligonucleotide
gauuucaaucaagcgccau

SEQ ID NO: 2888432 - RNA, 19 nt, Artificial Sequence
  Description of Artificial Sequence: Synthetic oligonucleotide
gcaguuggaucucuaaguu

SEQ ID NO: 2888433 - RNA, 19 nt, Artificial Sequence
  Description of Artificial Sequence: Synthetic oligonucleotide
caguuggaucucuaaguuu

SEQ ID NO: 2888434 - RNA, 19 nt, Artificial Sequence
  Description of Artificial Sequence: Synthetic oligonucleotide
cugaaaggucaguauuguu

SEQ ID NO: 2888435 - RNA, 19 nt, Artificial Sequence
  Description of Artificial Sequence: Synthetic oligonucleotide
cuuugcaggcagaggcagu

SEQ ID NO: 2888436 - RNA, 19 nt, Artificial Sequence
  Description of Artificial Sequence: Synthetic oligonucleotide
augcuucaagagacuguau

SEQ ID NO: 2888437 - RNA, 19 nt, Artificial Sequence
  Description of Artificial Sequence: Synthetic oligonucleotide
cgauccacacaaaugauuu

SEQ ID NO: 2888438 - RNA, 19 nt, Artificial Sequence
  Description of Artificial Sequence: Synthetic oligonucleotide
caagcgccauucucuuucu

SEQ ID NO: 2888439 - RNA, 19 nt, Artificial Sequence
  Description of Artificial Sequence: Synthetic oligonucleotide
cccagaaaguugugaagua

SEQ ID NO: 2888440 - RNA, 19 nt, Artificial Sequence
  Description of Artificial Sequence: Synthetic oligonucleotide
cgccauucucuuucuauga

SEQ ID NO: 2888441 - RNA, 19 nt, Artificial Sequence
  Description of Artificial Sequence: Synthetic oligonucleotide
ccauacgauccacacaaau

SEQ ID NO: 2888442 - RNA, 19 nt, Artificial Sequence
  Description of Artificial Sequence: Synthetic oligonucleotide
ggguagccagggcuacaca

SEQ ID NO: 2888443 - RNA, 19 nt, Artificial Sequence
  Description of Artificial Sequence: Synthetic oligonucleotide
gcaggcagaggcaguugga

SEQ ID NO: 2888444 - RNA, 19 nt, Artificial Sequence
  Description of Artificial Sequence: Synthetic oligonucleotide
ccacacaaaugauuucaau

SEQ ID NO: 2888445 - RNA, 19 nt, Artificial Sequence
  Description of Artificial Sequence: Synthetic oligonucleotide
ccaggguagccagggcuac

SEQ ID NO: 2888446 - RNA, 19 nt, Artificial Sequence
  Description of Artificial Sequence: Synthetic oligonucleotide
caggguagccagggcuaca

SEQ ID NO: 2888447 - RNA, 19 nt, Artificial Sequence
  Description of Artificial Sequence: Synthetic oligonucleotide
cccauacgauccacacaaa

SEQ ID NO: 2888448 - RNA, 19 nt, Artificial Sequence
  Description of Artificial Sequence: Synthetic oligonucleotide
aaagucuuagauuuacucc

SEQ ID NO: 2888449 - RNA, 19 nt, Artificial Sequence
  Description of Artificial Sequence: Synthetic oligonucleotide
uuagagaccaagaagauuc

SEQ ID NO: 2888450 - RNA, 19 nt, Artificial Sequence
  Description of Artificial Sequence: Synthetic oligonucleotide
gucaaagucggacacaucg

SEQ ID NO: 2888451 - RNA, 19 nt, Artificial Sequence
  Description of Artificial Sequence: Synthetic oligonucleotide
acacaucgaaguuagagac

SEQ ID NO: 2888452 - RNA, 19 nt, Artificial Sequence
  Description of Artificial Sequence: Synthetic oligonucleotide
aagucuuagauuuacuccu

SEQ ID NO: 2888453 - RNA, 19 nt, Artificial Sequence
  Description of Artificial Sequence: Synthetic oligonucleotide
gaaguuagagaccaagaag

SEQ ID NO: 2888454 - RNA, 19 nt, Artificial Sequence
  Description of Artificial Sequence: Synthetic oligonucleotide
uguugaaagucuuagauuu

SEQ ID NO: 2888455 - RNA, 19 nt, Artificial Sequence
  Description of Artificial Sequence: Synthetic oligonucleotide
cuuuaagacacuaugucug

SEQ ID NO: 2888456 - RNA, 19 nt, Artificial Sequence
  Description of Artificial Sequence: Synthetic oligonucleotide
ugcaaggacagcaugaaga

SEQ ID NO: 2888457 - RNA, 19 nt, Artificial Sequence
  Description of Artificial Sequence: Synthetic oligonucleotide
gaagauguggcgcuugugg

SEQ ID NO: 2888458 - RNA, 19 nt, Artificial Sequence
  Description of Artificial Sequence: Synthetic oligonucleotide
ucugggaagucaaagucgg

SEQ ID NO: 2888459 - RNA, 19 nt, Artificial Sequence
  Description of Artificial Sequence: Synthetic oligonucleotide
aguaacacugugcaaggac

SEQ ID NO: 2888460 - RNA, 19 nt, Artificial Sequence
  Description of Artificial Sequence: Synthetic oligonucleotide
ucuguugaaagucuuagau

SEQ ID NO: 2888461 - RNA, 19 nt, Artificial Sequence
  Description of Artificial Sequence: Synthetic oligonucleotide
gaagauucgaggcucacug

SEQ ID NO: 2888462 - RNA, 19 nt, Artificial Sequence
  Description of Artificial Sequence: Synthetic oligonucleotide
aauaggguggucuccagcu

SEQ ID NO: 2888463 - RNA, 19 nt, Artificial Sequence
  Description of Artificial Sequence: Synthetic oligonucleotide
uuucuuuaagacacuaugu

SEQ ID NO: 2888464 - RNA, 19 nt, Artificial Sequence
  Description of Artificial Sequence: Synthetic oligonucleotide
agaccaagaagauucgagg

SEQ ID NO: 2888465 - RNA, 19 nt, Artificial Sequence
  Description of Artificial Sequence: Synthetic oligonucleotide
ucuuuaagacacuaugucu

SEQ ID NO: 2888466 - RNA, 19 nt, Artificial Sequence
  Description of Artificial Sequence: Synthetic oligonucleotide
ugaacagucaucucgaauu

SEQ ID NO: 2888467 - RNA, 19 nt, Artificial Sequence
  Description of Artificial Sequence: Synthetic oligonucleotide
aaggacagcaugaagaugu

SEQ ID NO: 2888468 - RNA, 19 nt, Artificial Sequence
  Description of Artificial Sequence: Synthetic oligonucleotide
ucgaauuuucuuuaagaca

SEQ ID NO: 2888469 - RNA, 19 nt, Artificial Sequence
  Description of Artificial Sequence: Synthetic oligonucleotide
uucuuuaagacacuauguc

SEQ ID NO: 2888470 - RNA, 19 nt, Artificial Sequence
  Description of Artificial Sequence: Synthetic oligonucleotide
gaaagucuuagauuuacuc

SEQ ID NO: 2888471 - RNA, 19 nt, Artificial Sequence
  Description of Artificial Sequence: Synthetic oligonucleotide
aagucggacacaucgaagu

SEQ ID NO: 2888472 - RNA, 19 nt, Artificial Sequence
  Description of Artificial Sequence: Synthetic oligonucleotide
ucucgaauuuucuuuaaga

SEQ ID NO: 2888473 - RNA, 19 nt, Artificial Sequence
  Description of Artificial Sequence: Synthetic oligonucleotide
cucgaauuuucuuuaagac

SEQ ID NO: 2888474 - RNA, 19 nt, Artificial Sequence
  Description of Artificial Sequence: Synthetic oligonucleotide
ucuuagauuuacuccuccg

SEQ ID NO: 2888475 - RNA, 19 nt, Artificial Sequence
  Description of Artificial Sequence: Synthetic oligonucleotide
acuaugucuguugaaaguc

SEQ ID NO: 2888476 - RNA, 19 nt, Artificial Sequence
  Description of Artificial Sequence: Synthetic oligonucleotide
cuugagaugcuuugaacag

SEQ ID NO: 2888477 - RNA, 19 nt, Artificial Sequence
  Description of Artificial Sequence: Synthetic oligonucleotide
ucaguaacacugugcaagg

SEQ ID NO: 2888478 - RNA, 19 nt, Artificial Sequence
  Description of Artificial Sequence: Synthetic oligonucleotide
gcuuugaacagucaucucg

SEQ ID NO: 2888479 - RNA, 19 nt, Artificial Sequence
  Description of Artificial Sequence: Synthetic oligonucleotide
ucggacacaucgaaguuag

SEQ ID NO: 2888480 - RNA, 19 nt, Artificial Sequence
  Description of Artificial Sequence: Synthetic oligonucleotide
uaagacacuaugucuguug

SEQ ID NO: 2888481 - RNA, 19 nt, Artificial Sequence
  Description of Artificial Sequence: Synthetic oligonucleotide
gaccaagaagauucgaggc

SEQ ID NO: 2888482 - RNA, 19 nt, Artificial Sequence
  Description of Artificial Sequence: Synthetic oligonucleotide
gacagcaugaagauguggc

SEQ ID NO: 2888483 - RNA, 19 nt, Artificial Sequence
  Description of Artificial Sequence: Synthetic oligonucleotide
gacucaguaacacugugca

SEQ ID NO: 2888484 - RNA, 19 nt, Artificial Sequence
  Description of Artificial Sequence: Synthetic oligonucleotide
aagacacuaugucuguuga

SEQ ID NO: 2888485 - RNA, 19 nt, Artificial Sequence
  Description of Artificial Sequence: Synthetic oligonucleotide
acagcaugaagauguggcg

SEQ ID NO: 2888486 - RNA, 19 nt, Artificial Sequence
  Description of Artificial Sequence: Synthetic oligonucleotide
agauguggcgcuugugggc

SEQ ID NO: 2888487 - RNA, 19 nt, Artificial Sequence
  Description of Artificial Sequence: Synthetic oligonucleotide
uaacacugugcaaggacag

SEQ ID NO: 2888488 - RNA, 19 nt, Artificial Sequence
  Description of Artificial Sequence: Synthetic oligonucleotide
aagauucgaggcucacugg

SEQ ID NO: 2888489 - RNA, 19 nt, Artificial Sequence
  Description of Artificial Sequence: Synthetic oligonucleotide
cgaauuuucuuuaagacac

SEQ ID NO: 2888490 - RNA, 19 nt, Artificial Sequence
  Description of Artificial Sequence: Synthetic oligonucleotide
ugucuguugaaagucuuag

SEQ ID NO: 2888491 - RNA, 19 nt, Artificial Sequence
  Description of Artificial Sequence: Synthetic oligonucleotide
ugagaugcuuugaacaguc

SEQ ID NO: 2888492 - RNA, 19 nt, Artificial Sequence
  Description of Artificial Sequence: Synthetic oligonucleotide
gacacaucgaaguuagaga

SEQ ID NO: 2888493 - RNA, 19 nt, Artificial Sequence
  Description of Artificial Sequence: Synthetic oligonucleotide
uuuaagacacuaugucugu

SEQ ID NO: 2888494 - RNA, 19 nt, Artificial Sequence
  Description of Artificial Sequence: Synthetic oligonucleotide
uuagauuuacuccuccguu

SEQ ID NO: 2888495 - RNA, 19 nt, Artificial Sequence
  Description of Artificial Sequence: Synthetic oligonucleotide
ucgaaguuagagaccaaga

SEQ ID NO: 2888496 - RNA, 19 nt, Artificial Sequence
  Description of Artificial Sequence: Synthetic oligonucleotide
gagggcuuccuugagaugc

SEQ ID NO: 2888497 - RNA, 19 nt, Artificial Sequence
  Description of Artificial Sequence: Synthetic oligonucleotide
acacuaugucuguugaaag

SEQ ID NO: 2888498 - RNA, 19 nt, Artificial Sequence
  Description of Artificial Sequence: Synthetic oligonucleotide
gagaccaagaagauucgag

SEQ ID NO: 2888499 - RNA, 19 nt, Artificial Sequence
  Description of Artificial Sequence: Synthetic oligonucleotide
uagagaccaagaagauucg

SEQ ID NO: 2888500 - RNA, 19 nt, Artificial Sequence
  Description of Artificial Sequence: Synthetic oligonucleotide
agauuuacuccuccguuca

SEQ ID NO: 2888501 - RNA, 19 nt, Artificial Sequence
  Description of Artificial Sequence: Synthetic oligonucleotide
aacacugugcaaggacagc

SEQ ID NO: 2888502 - RNA, 19 nt, Artificial Sequence
  Description of Artificial Sequence: Synthetic oligonucleotide
uugaaagucuuagauuuac

SEQ ID NO: 2888503 - RNA, 19 nt, Artificial Sequence
  Description of Artificial Sequence: Synthetic oligonucleotide
acaucgaaguuagagacca

SEQ ID NO: 2888504 - RNA, 19 nt, Artificial Sequence
  Description of Artificial Sequence: Synthetic oligonucleotide
gagcucacccaauagggug

SEQ ID NO: 2888505 - RNA, 19 nt, Artificial Sequence
  Description of Artificial Sequence: Synthetic oligonucleotide
ucaaagucggacacaucga

SEQ ID NO: 2888506 - RNA, 19 nt, Artificial Sequence
  Description of Artificial Sequence: Synthetic oligonucleotide
acagucaucucgaauuuuc

SEQ ID NO: 2888507 - RNA, 19 nt, Artificial Sequence
  Description of Artificial Sequence: Synthetic oligonucleotide
ugaaagucuuagauuuacu

SEQ ID NO: 2888508 - RNA, 19 nt, Artificial Sequence
  Description of Artificial Sequence: Synthetic oligonucleotide
uagauuuacuccuccguuc

SEQ ID NO: 2888509 - RNA, 19 nt, Artificial Sequence
  Description of Artificial Sequence: Synthetic oligonucleotide
accaagaagauucgaggcu

SEQ ID NO: 2888510 - RNA, 19 nt, Artificial Sequence
  Description of Artificial Sequence: Synthetic oligonucleotide
agacucaguaacacugugc

SEQ ID NO: 2888511 - RNA, 19 nt, Artificial Sequence
  Description of Artificial Sequence: Synthetic oligonucleotide
aauuuucuuuaagacacua

SEQ ID NO: 2888512 - RNA, 19 nt, Artificial Sequence
  Description of Artificial Sequence: Synthetic oligonucleotide
aucgaaguuagagaccaag

SEQ ID NO: 2888513 - RNA, 19 nt, Artificial Sequence
  Description of Artificial Sequence: Synthetic oligonucleotide
agaugcuuugaacagucau

SEQ ID NO: 2888514 - RNA, 19 nt, Artificial Sequence
  Description of Artificial Sequence: Synthetic oligonucleotide
agauucgaggcucacugga

SEQ ID NO: 2888515 - RNA, 19 nt, Artificial Sequence
  Description of Artificial Sequence: Synthetic oligonucleotide
cuuugaacagucaucucga

SEQ ID NO: 2888516 - RNA, 19 nt, Artificial Sequence
  Description of Artificial Sequence: Synthetic oligonucleotide
gaugcuuugaacagucauc

SEQ ID NO: 2888517 - RNA, 19 nt, Artificial Sequence
  Description of Artificial Sequence: Synthetic oligonucleotide
uuuacuccuccguucauua

SEQ ID NO: 2888518 - RNA, 19 nt, Artificial Sequence
  Description of Artificial Sequence: Synthetic oligonucleotide
aagucaaagucggacacau

SEQ ID NO: 2888519 - RNA, 19 nt, Artificial Sequence
  Description of Artificial Sequence: Synthetic oligonucleotide
augcuuugaacagucaucu

SEQ ID NO: 2888520 - RNA, 19 nt, Artificial Sequence
  Description of Artificial Sequence: Synthetic oligonucleotide
auggcagacucaguaacac

SEQ ID NO: 2888521 - RNA, 19 nt, Artificial Sequence
  Description of Artificial Sequence: Synthetic oligonucleotide
ucaucucgaauuuucuuua

SEQ ID NO: 2888522 - RNA, 19 nt, Artificial Sequence
  Description of Artificial Sequence: Synthetic oligonucleotide
caauggcagacucaguaac

SEQ ID NO: 2888523 - RNA, 19 nt, Artificial Sequence
  Description of Artificial Sequence: Synthetic oligonucleotide
aaagucggacacaucgaag

SEQ ID NO: 2888524 - RNA, 19 nt, Artificial Sequence
  Description of Artificial Sequence: Synthetic oligonucleotide
uucgaggcucacuggagag

SEQ ID NO: 2888525 - RNA, 19 nt, Artificial Sequence
  Description of Artificial Sequence: Synthetic oligonucleotide
agcaugaagauguggcgcu

SEQ ID NO: 2888526 - RNA, 19 nt, Artificial Sequence
  Description of Artificial Sequence: Synthetic oligonucleotide
ugggaagucaaagucggac

SEQ ID NO: 2888527 - RNA, 19 nt, Artificial Sequence
  Description of Artificial Sequence: Synthetic oligonucleotide
aagaagauucgaggcucac

SEQ ID NO: 2888528 - RNA, 19 nt, Artificial Sequence
  Description of Artificial Sequence: Synthetic oligonucleotide
uugaacagucaucucgaau

SEQ ID NO: 2888529 - RNA, 19 nt, Artificial Sequence
  Description of Artificial Sequence: Synthetic oligonucleotide
ucccucuuccggucaaugg

SEQ ID NO: 2888530 - RNA, 19 nt, Artificial Sequence
  Description of Artificial Sequence: Synthetic oligonucleotide
gacacuaugucuguugaaa

SEQ ID NO: 2888531 - RNA, 19 nt, Artificial Sequence
  Description of Artificial Sequence: Synthetic oligonucleotide
ggacacaucgaaguuagag

SEQ ID NO: 2888532 - RNA, 19 nt, Artificial Sequence
  Description of Artificial Sequence: Synthetic oligonucleotide
uuccuugagaugcuuugaa

SEQ ID NO: 2888533 - RNA, 19 nt, Artificial Sequence
  Description of Artificial Sequence: Synthetic oligonucleotide
aauggcagacucaguaaca

SEQ ID NO: 2888534 - RNA, 19 nt, Artificial Sequence
  Description of Artificial Sequence: Synthetic oligonucleotide
uaugucuguugaaagucuu

SEQ ID NO: 2888535 - RNA, 19 nt, Artificial Sequence
  Description of Artificial Sequence: Synthetic oligonucleotide
cacaucgaaguuagagacc

SEQ ID NO: 2888536 - RNA, 19 nt, Artificial Sequence
  Description of Artificial Sequence: Synthetic oligonucleotide
uccuugagaugcuuugaac

SEQ ID NO: 2888537 - RNA, 19 nt, Artificial Sequence
  Description of Artificial Sequence: Synthetic oligonucleotide
acugugcaaggacagcaug

SEQ ID NO: 2888538 - RNA, 19 nt, Artificial Sequence
  Description of Artificial Sequence: Synthetic oligonucleotide
uaggguggucuccagcucu

SEQ ID NO: 2888539 - RNA, 19 nt, Artificial Sequence
  Description of Artificial Sequence: Synthetic oligonucleotide
ucacccaauaggguggucu

SEQ ID NO: 2888540 - RNA, 19 nt, Artificial Sequence
  Description of Artificial Sequence: Synthetic oligonucleotide
uccguucauuaucuaaguc

SEQ ID NO: 2888541 - RNA, 19 nt, Artificial Sequence
  Description of Artificial Sequence: Synthetic oligonucleotide
gucuuagauuuacuccucc

SEQ ID NO: 2888542 - RNA, 19 nt, Artificial Sequence
  Description of Artificial Sequence: Synthetic oligonucleotide
auucgaggcucacuggaga

SEQ ID NO: 2888543 - RNA, 19 nt, Artificial Sequence
  Description of Artificial Sequence: Synthetic oligonucleotide
guaacacugugcaaggaca

SEQ ID NO: 2888544 - RNA, 19 nt, Artificial Sequence
  Description of Artificial Sequence: Synthetic oligonucleotide
uccuccguucauuaucuaa

SEQ ID NO: 2888545 - RNA, 19 nt, Artificial Sequence
  Description of Artificial Sequence: Synthetic oligonucleotide
gauucgaggcucacuggag

SEQ ID NO: 2888546 - RNA, 19 nt, Artificial Sequence
  Description of Artificial Sequence: Synthetic oligonucleotide
auaggguggucuccagcuc

SEQ ID NO: 2888547 - RNA, 19 nt, Artificial Sequence
  Description of Artificial Sequence: Synthetic oligonucleotide
ggcagacucaguaacacug

SEQ ID NO: 2888548 - RNA, 19 nt, Artificial Sequence
  Description of Artificial Sequence: Synthetic oligonucleotide
cagcaugaagauguggcgc

SEQ ID NO: 2888549 - RNA, 19 nt, Artificial Sequence
  Description of Artificial Sequence: Synthetic oligonucleotide
uugagaugcuuugaacagu

SEQ ID NO: 2888550 - RNA, 19 nt, Artificial Sequence
  Description of Artificial Sequence: Synthetic oligonucleotide
gggagcucacccaauaggg

SEQ ID NO: 2888551 - RNA, 19 nt, Artificial Sequence
  Description of Artificial Sequence: Synthetic oligonucleotide
caauaggguggucuccagc

SEQ ID NO: 2888552 - RNA, 19 nt, Artificial Sequence
  Description of Artificial Sequence: Synthetic oligonucleotide
acacugugcaaggacagca

SEQ ID NO: 2888553 - RNA, 19 nt, Artificial Sequence
  Description of Artificial Sequence: Synthetic oligonucleotide
ccuccguucauuaucuaag

SEQ ID NO: 2888554 - RNA, 19 nt, Artificial Sequence
  Description of Artificial Sequence: Synthetic oligonucleotide
agcucacccaauagggugg

SEQ ID NO: 2888555 - RNA, 19 nt, Artificial Sequence
  Description of Artificial Sequence: Synthetic oligonucleotide
agucaucucgaauuuucuu

SEQ ID NO: 2888556 - RNA, 19 nt, Artificial Sequence
  Description of Artificial Sequence: Synthetic oligonucleotide
agucuuagauuuacuccuc

SEQ ID NO: 2888557 - RNA, 19 nt, Artificial Sequence
  Description of Artificial Sequence: Synthetic oligonucleotide
uuugaacagucaucucgaa

SEQ ID NO: 2888558 - RNA, 19 nt, Artificial Sequence
  Description of Artificial Sequence: Synthetic oligonucleotide
uccggucaauggcagacuc

SEQ ID NO: 2888559 - RNA, 19 nt, Artificial Sequence
  Description of Artificial Sequence: Synthetic oligonucleotide
cuuccggucaauggcagac

SEQ ID NO: 2888560 - RNA, 19 nt, Artificial Sequence
  Description of Artificial Sequence: Synthetic oligonucleotide
ccuugagaugcuuugaaca

SEQ ID NO: 2888561 - RNA, 19 nt, Artificial Sequence
  Description of Artificial Sequence: Synthetic oligonucleotide
aaaucccucuuccggucaa

SEQ ID NO: 2888562 - RNA, 19 nt, Artificial Sequence
  Description of Artificial Sequence: Synthetic oligonucleotide
ccguucauuaucuaaguca

SEQ ID NO: 2888563 - RNA, 19 nt, Artificial Sequence
  Description of Artificial Sequence: Synthetic oligonucleotide
augaagauguggcgcuugu

SEQ ID NO: 2888564 - RNA, 19 nt, Artificial Sequence
  Description of Artificial Sequence: Synthetic oligonucleotide
gaaaucccucuuccgguca

SEQ ID NO: 2888565 - RNA, 19 nt, Artificial Sequence
  Description of Artificial Sequence: Synthetic oligonucleotide
acccaauaggguggucucc

SEQ ID NO: 2888566 - RNA, 19 nt, Artificial Sequence
  Description of Artificial Sequence: Synthetic oligonucleotide
cugugcaaggacagcauga

SEQ ID NO: 2888567 - RNA, 19 nt, Artificial Sequence
  Description of Artificial Sequence: Synthetic oligonucleotide
auuuucuuuaagacacuau

SEQ ID NO: 2888568 - RNA, 19 nt, Artificial Sequence
  Description of Artificial Sequence: Synthetic oligonucleotide
gcuuccuugagaugcuuug

SEQ ID NO: 2888569 - RNA, 19 nt, Artificial Sequence
  Description of Artificial Sequence: Synthetic oligonucleotide
cagacucaguaacacugug

SEQ ID NO: 2888570 - RNA, 19 nt, Artificial Sequence
  Description of Artificial Sequence: Synthetic oligonucleotide
ugggcugggagcucaccca

SEQ ID NO: 2888571 - RNA, 19 nt, Artificial Sequence
  Description of Artificial Sequence: Synthetic oligonucleotide
ugaagauguggcgcuugug

SEQ ID NO: 2888572 - RNA, 19 nt, Artificial Sequence
  Description of Artificial Sequence: Synthetic oligonucleotide
cucuuccggucaauggcag

SEQ ID NO: 2888573 - RNA, 19 nt, Artificial Sequence
  Description of Artificial Sequence: Synthetic oligonucleotide
agaagauucgaggcucacu

SEQ ID NO: 2888574 - RNA, 19 nt, Artificial Sequence
  Description of Artificial Sequence: Synthetic oligonucleotide
uggcagacucaguaacacu

SEQ ID NO: 2888575 - RNA, 19 nt, Artificial Sequence
  Description of Artificial Sequence: Synthetic oligonucleotide
cugggagcucacccaauag

SEQ ID NO: 2888576 - RNA, 19 nt, Artificial Sequence
  Description of Artificial Sequence: Synthetic oligonucleotide
caaagucggacacaucgaa

SEQ ID NO: 2888577 - RNA, 19 nt, Artificial Sequence
  Description of Artificial Sequence: Synthetic oligonucleotide
gucaucucgaauuuucuuu

SEQ ID NO: 2888578 - RNA, 19 nt, Artificial Sequence
  Description of Artificial Sequence: Synthetic oligonucleotide
gaagucaaagucggacaca

SEQ ID NO: 2888579 - RNA, 19 nt, Artificial Sequence
  Description of Artificial Sequence: Synthetic oligonucleotide
gugcaaggacagcaugaag

SEQ ID NO: 2888580 - RNA, 19 nt, Artificial Sequence
  Description of Artificial Sequence: Synthetic oligonucleotide
gagagggcuuccuugagau

SEQ ID NO: 2888581 - RNA, 19 nt, Artificial Sequence
  Description of Artificial Sequence: Synthetic oligonucleotide
gucuguugaaagucuuaga

SEQ ID NO: 2888582 - RNA, 19 nt, Artificial Sequence
  Description of Artificial Sequence: Synthetic oligonucleotide
acuccuccguucauuaucu

SEQ ID NO: 2888583 - RNA, 19 nt, Artificial Sequence
  Description of Artificial Sequence: Synthetic oligonucleotide
aguuagagaccaagaagau

SEQ ID NO: 2888584 - RNA, 19 nt, Artificial Sequence
  Description of Artificial Sequence: Synthetic oligonucleotide
ucuuccggucaauggcaga

SEQ ID NO: 2888585 - RNA, 19 nt, Artificial Sequence
  Description of Artificial Sequence: Synthetic oligonucleotide
caugaagauguggcgcuug

SEQ ID NO: 2888586 - RNA, 19 nt, Artificial Sequence
  Description of Artificial Sequence: Synthetic oligonucleotide
uguggcgcuugugggcugg

SEQ ID NO: 2888587 - RNA, 19 nt, Artificial Sequence
  Description of Artificial Sequence: Synthetic oligonucleotide
aacagucaucucgaauuuu

SEQ ID NO: 2888588 - RNA, 19 nt, Artificial Sequence
  Description of Artificial Sequence: Synthetic oligonucleotide
uuaagacacuaugucuguu

SEQ ID NO: 2888589 - RNA, 19 nt, Artificial Sequence
  Description of Artificial Sequence: Synthetic oligonucleotide
cacccaauaggguggucuc

SEQ ID NO: 2888590 - RNA, 19 nt, Artificial Sequence
  Description of Artificial Sequence: Synthetic oligonucleotide
caagaagauucgaggcuca

SEQ ID NO: 2888591 - RNA, 19 nt, Artificial Sequence
  Description of Artificial Sequence: Synthetic oligonucleotide
auuuacuccuccguucauu

SEQ ID NO: 2888592 - RNA, 19 nt, Artificial Sequence
  Description of Artificial Sequence: Synthetic oligonucleotide
agacacuaugucuguugaa

SEQ ID NO: 2888593 - RNA, 19 nt, Artificial Sequence
  Description of Artificial Sequence: Synthetic oligonucleotide
agagaccaagaagauucga

SEQ ID NO: 2888594 - RNA, 19 nt, Artificial Sequence
  Description of Artificial Sequence: Synthetic oligonucleotide
agucggacacaucgaaguu

SEQ ID NO: 2888595 - RNA, 19 nt, Artificial Sequence
  Description of Artificial Sequence: Synthetic oligonucleotide
cagcucugggaagucaaag

SEQ ID NO: 2888596 - RNA, 19 nt, Artificial Sequence
  Description of Artificial Sequence: Synthetic oligonucleotide
acucaguaacacugugcaa

SEQ ID NO: 2888597 - RNA, 19 nt, Artificial Sequence
  Description of Artificial Sequence: Synthetic oligonucleotide
ugcuuugaacagucaucuc

SEQ ID NO: 2888598 - RNA, 19 nt, Artificial Sequence
  Description of Artificial Sequence: Synthetic oligonucleotide
cccucuuccggucaauggc

SEQ ID NO: 2888599 - RNA, 19 nt, Artificial Sequence
  Description of Artificial Sequence: Synthetic oligonucleotide
caaggacagcaugaagaug

SEQ ID NO: 2888600 - RNA, 19 nt, Artificial Sequence
  Description of Artificial Sequence: Synthetic oligonucleotide
cuaugucuguugaaagucu

SEQ ID NO: 2888601 - RNA, 19 nt, Artificial Sequence
  Description of Artificial Sequence: Synthetic oligonucleotide
cacuaugucuguugaaagu

SEQ ID NO: 2888602 - RNA, 19 nt, Artificial Sequence
  Description of Artificial Sequence: Synthetic oligonucleotide
aggcucacuggagagggcu

SEQ ID NO: 2888603 - RNA, 19 nt, Artificial Sequence
  Description of Artificial Sequence: Synthetic oligonucleotide
uuacuccuccguucauuau

SEQ ID NO: 2888604 - RNA, 19 nt, Artificial Sequence
  Description of Artificial Sequence: Synthetic oligonucleotide
agagggcuuccuugagaug

SEQ ID NO: 2888605 - RNA, 19 nt, Artificial Sequence
  Description of Artificial Sequence: Synthetic oligonucleotide
ggcgcuugugggcugggag

SEQ ID NO: 2888606 - RNA, 19 nt, Artificial Sequence
  Description of Artificial Sequence: Synthetic oligonucleotide
ccaagaagauucgaggcuc

SEQ ID NO: 2888607 - RNA, 19 nt, Artificial Sequence
  Description of Artificial Sequence: Synthetic oligonucleotide
cucacuggagagggcuucc

SEQ ID NO: 2888608 - RNA, 19 nt, Artificial Sequence
  Description of Artificial Sequence: Synthetic oligonucleotide
agucaaagucggacacauc

SEQ ID NO: 2888609 - RNA, 19 nt, Artificial Sequence
  Description of Artificial Sequence: Synthetic oligonucleotide
gaauuuucuuuaagacacu

SEQ ID NO: 2888610 - RNA, 19 nt, Artificial Sequence
  Description of Artificial Sequence: Synthetic oligonucleotide
cuuccuugagaugcuuuga

SEQ ID NO: 2888611 - RNA, 19 nt, Artificial Sequence
  Description of Artificial Sequence: Synthetic oligonucleotide
caucucgaauuuucuuuaa

SEQ ID NO: 2888612 - RNA, 19 nt, Artificial Sequence
  Description of Artificial Sequence: Synthetic oligonucleotide
guugaaagucuuagauuua

SEQ ID NO: 2888613 - RNA, 19 nt, Artificial Sequence
  Description of Artificial Sequence: Synthetic oligonucleotide
aucccucuuccggucaaug

SEQ ID NO: 2888614 - RNA, 19 nt, Artificial Sequence
  Description of Artificial Sequence: Synthetic oligonucleotide
uuccggucaauggcagacu

SEQ ID NO: 2888615 - RNA, 19 nt, Artificial Sequence
  Description of Artificial Sequence: Synthetic oligonucleotide
ugugggcugggagcucacc

SEQ ID NO: 2888616 - RNA, 19 nt, Artificial Sequence
  Description of Artificial Sequence: Synthetic oligonucleotide
gagaugcuuugaacaguca

SEQ ID NO: 2888617 - RNA, 19 nt, Artificial Sequence
  Description of Artificial Sequence: Synthetic oligonucleotide
ggagagggcuuccuugaga

SEQ ID NO: 2888618 - RNA, 19 nt, Artificial Sequence
  Description of Artificial Sequence: Synthetic oligonucleotide
cuugugggcugggagcuca

SEQ ID NO: 2888619 - RNA, 19 nt, Artificial Sequence
  Description of Artificial Sequence: Synthetic oligonucleotide
gucggacacaucgaaguua

SEQ ID NO: 2888620 - RNA, 19 nt, Artificial Sequence
  Description of Artificial Sequence: Synthetic oligonucleotide
gcgcuugugggcugggagc

SEQ ID NO: 2888621 - RNA, 19 nt, Artificial Sequence
  Description of Artificial Sequence: Synthetic oligonucleotide
aggacagcaugaagaugug

SEQ ID NO: 2888622 - RNA, 19 nt, Artificial Sequence
  Description of Artificial Sequence: Synthetic oligonucleotide
aaucccucuuccggucaau

SEQ ID NO: 2888623 - RNA, 19 nt, Artificial Sequence
  Description of Artificial Sequence: Synthetic oligonucleotide
ucacuggagagggcuuccu

SEQ ID NO: 2888624 - RNA, 19 nt, Artificial Sequence
  Description of Artificial Sequence: Synthetic oligonucleotide
cuccguucauuaucuaagu

SEQ ID NO: 2888625 - RNA, 19 nt, Artificial Sequence
  Description of Artificial Sequence: Synthetic oligonucleotide
guuagagaccaagaagauu

SEQ ID NO: 2888626 - RNA, 19 nt, Artificial Sequence
  Description of Artificial Sequence: Synthetic oligonucleotide
cgaaguuagagaccaagaa

SEQ ID NO: 2888627 - RNA, 19 nt, Artificial Sequence
  Description of Artificial Sequence: Synthetic oligonucleotide
augucuguugaaagucuua

SEQ ID NO: 2888628 - RNA, 19 nt, Artificial Sequence
  Description of Artificial Sequence: Synthetic oligonucleotide
gcaaggacagcaugaagau

SEQ ID NO: 2888629 - RNA, 19 nt, Artificial Sequence
  Description of Artificial Sequence: Synthetic oligonucleotide
cagucaucucgaauuuucu

SEQ ID NO: 2888630 - RNA, 19 nt, Artificial Sequence
  Description of Artificial Sequence: Synthetic oligonucleotide
cgaggcucacuggagaggg

SEQ ID NO: 2888631 - RNA, 19 nt, Artificial Sequence
  Description of Artificial Sequence: Synthetic oligonucleotide
cggucaauggcagacucag

SEQ ID NO: 2888632 - RNA, 19 nt, Artificial Sequence
  Description of Artificial Sequence: Synthetic oligonucleotide
uugugggcugggagcucac

SEQ ID NO: 2888633 - RNA, 19 nt, Artificial Sequence
  Description of Artificial Sequence: Synthetic oligonucleotide
ggucuccagcucugggaag

SEQ ID NO: 2888634 - RNA, 19 nt, Artificial Sequence
  Description of Artificial Sequence: Synthetic oligonucleotide
gauuuacuccuccguucau

SEQ ID NO: 2888635 - RNA, 19 nt, Artificial Sequence
  Description of Artificial Sequence: Synthetic oligonucleotide
ccucuuccggucaauggca

SEQ ID NO: 2888636 - RNA, 19 nt, Artificial Sequence
  Description of Artificial Sequence: Synthetic oligonucleotide
ccaauaggguggucuccag

SEQ ID NO: 2888637 - RNA, 19 nt, Artificial Sequence
  Description of Artificial Sequence: Synthetic oligonucleotide
gaggcucacuggagagggc

SEQ ID NO: 2888638 - RNA, 19 nt, Artificial Sequence
  Description of Artificial Sequence: Synthetic oligonucleotide
auguggcgcuugugggcug

SEQ ID NO: 2888639 - RNA, 19 nt, Artificial Sequence
  Description of Artificial Sequence: Synthetic oligonucleotide
aggguggucuccagcucug

SEQ ID NO: 2888640 - RNA, 19 nt, Artificial Sequence
  Description of Artificial Sequence: Synthetic oligonucleotide
caguaacacugugcaagga

SEQ ID NO: 2888641 - RNA, 19 nt, Artificial Sequence
  Description of Artificial Sequence: Synthetic oligonucleotide
caucgaaguuagagaccaa

SEQ ID NO: 2888642 - RNA, 19 nt, Artificial Sequence
  Description of Artificial Sequence: Synthetic oligonucleotide
gcugggagcucacccaaua

SEQ ID NO: 2888643 - RNA, 19 nt, Artificial Sequence
  Description of Artificial Sequence: Synthetic oligonucleotide
cacugugcaaggacagcau

SEQ ID NO: 2888644 - RNA, 19 nt, Artificial Sequence
  Description of Artificial Sequence: Synthetic oligonucleotide
uggcgcuugugggcuggga

SEQ ID NO: 2888645 - RNA, 19 nt, Artificial Sequence
  Description of Artificial Sequence: Synthetic oligonucleotide
ggguggucuccagcucugg

SEQ ID NO: 2888646 - RNA, 19 nt, Artificial Sequence
  Description of Artificial Sequence: Synthetic oligonucleotide
gcucacuggagagggcuuc

SEQ ID NO: 2888647 - RNA, 19 nt, Artificial Sequence
  Description of Artificial Sequence: Synthetic oligonucleotide
cccaauaggguggucucca

SEQ ID NO: 2888648 - RNA, 19 nt, Artificial Sequence
  Description of Artificial Sequence: Synthetic oligonucleotide
guggcgcuugugggcuggg

SEQ ID NO: 2888649 - RNA, 19 nt, Artificial Sequence
  Description of Artificial Sequence: Synthetic oligonucleotide
ggagcucacccaauagggu

SEQ ID NO: 2888650 - RNA, 19 nt, Artificial Sequence
  Description of Artificial Sequence: Synthetic oligonucleotide
gggcugggagcucacccaa

SEQ ID NO: 2888651 - RNA, 19 nt, Artificial Sequence
  Description of Artificial Sequence: Synthetic oligonucleotide
cucacccaauagggugguc

SEQ ID NO: 2888652 - RNA, 19 nt, Artificial Sequence
  Description of Artificial Sequence: Synthetic oligonucleotide
ccggucaauggcagacuca

SEQ ID NO: 2888653 - RNA, 19 nt, Artificial Sequence
  Description of Artificial Sequence: Synthetic oligonucleotide
cuccuccguucauuaucua

SEQ ID NO: 2888654 - RNA, 19 nt, Artificial Sequence
  Description of Artificial Sequence: Synthetic oligonucleotide
ccagcucugggaagucaaa

SEQ ID NO: 2888655 - RNA, 19 nt, Artificial Sequence
  Description of Artificial Sequence: Synthetic oligonucleotide
gcuugugggcugggagcuc

SEQ ID NO: 2888656 - RNA, 19 nt, Artificial Sequence
  Description of Artificial Sequence: Synthetic oligonucleotide
ggcuuccuugagaugcuuu

SEQ ID NO: 2888657 - RNA, 19 nt, Artificial Sequence
  Description of Artificial Sequence: Synthetic oligonucleotide
gcucacccaauaggguggu

SEQ ID NO: 2888658 - RNA, 19 nt, Artificial Sequence
  Description of Artificial Sequence: Synthetic oligonucleotide
ggcucacuggagagggcuu

SEQ ID NO: 2888659 - RNA, 19 nt, Artificial Sequence
  Description of Artificial Sequence: Synthetic oligonucleotide
cggacacaucgaaguuaga

SEQ ID NO: 2888660 - RNA, 19 nt, Artificial Sequence
  Description of Artificial Sequence: Synthetic oligonucleotide
cgcuugugggcugggagcu

SEQ ID NO: 2888661 - RNA, 19 nt, Artificial Sequence
  Description of Artificial Sequence: Synthetic oligonucleotide
ggcugggagcucacccaau

SEQ ID NO: 2888662 - RNA, 19 nt, Artificial Sequence
  Description of Artificial Sequence: Synthetic oligonucleotide
gggcuuccuugagaugcuu

SEQ ID NO: 2888663 - RNA, 19 nt, Artificial Sequence
  Description of Artificial Sequence: Synthetic oligonucleotide
auauaaagagaacauaucc

SEQ ID NO: 2888664 - RNA, 19 nt, Artificial Sequence
  Description of Artificial Sequence: Synthetic oligonucleotide
aaagagaacauaucccugc

SEQ ID NO: 2888665 - RNA, 19 nt, Artificial Sequence
  Description of Artificial Sequence: Synthetic oligonucleotide
uauagaggcaccaagaggc

SEQ ID NO: 2888666 - RNA, 19 nt, Artificial Sequence
  Description of Artificial Sequence: Synthetic oligonucleotide
aguaguaguagucaccacc

SEQ ID NO: 2888667 - RNA, 19 nt, Artificial Sequence
  Description of Artificial Sequence: Synthetic oligonucleotide
ucuccuuagauauaaagag

SEQ ID NO: 2888668 - RNA, 19 nt, Artificial Sequence
  Description of Artificial Sequence: Synthetic oligonucleotide
uauaaagagaacauauccc

SEQ ID NO: 2888669 - RNA, 19 nt, Artificial Sequence
  Description of Artificial Sequence: Synthetic oligonucleotide
aauggucucucucuggagc

SEQ ID NO: 2888670 - RNA, 19 nt, Artificial Sequence
  Description of Artificial Sequence: Synthetic oligonucleotide
auaaagagaacauaucccu

SEQ ID NO: 2888671 - RNA, 19 nt, Artificial Sequence
  Description of Artificial Sequence: Synthetic oligonucleotide
ucuacugcaagucuggagu

SEQ ID NO: 2888672 - RNA, 19 nt, Artificial Sequence
  Description of Artificial Sequence: Synthetic oligonucleotide
uuagauauaaagagaacau

SEQ ID NO: 2888673 - RNA, 19 nt, Artificial Sequence
  Description of Artificial Sequence: Synthetic oligonucleotide
aguggaugcgcccagguac

SEQ ID NO: 2888674 - RNA, 19 nt, Artificial Sequence
  Description of Artificial Sequence: Synthetic oligonucleotide
aaggaguaguaguagucac

SEQ ID NO: 2888675 - RNA, 19 nt, Artificial Sequence
  Description of Artificial Sequence: Synthetic oligonucleotide
uccuuagauauaaagagaa

SEQ ID NO: 2888676 - RNA, 19 nt, Artificial Sequence
  Description of Artificial Sequence: Synthetic oligonucleotide
auccagaggacaucgaugg

SEQ ID NO: 2888677 - RNA, 19 nt, Artificial Sequence
  Description of Artificial Sequence: Synthetic oligonucleotide
aguauagaggcaccaagag

SEQ ID NO: 2888678 - RNA, 19 nt, Artificial Sequence
  Description of Artificial Sequence: Synthetic oligonucleotide
aagaggcagaccucucucc

SEQ ID NO: 2888679 - RNA, 19 nt, Artificial Sequence
  Description of Artificial Sequence: Synthetic oligonucleotide
ucucuccuuagauauaaag

SEQ ID NO: 2888680 - RNA, 19 nt, Artificial Sequence
  Description of Artificial Sequence: Synthetic oligonucleotide
gagaacauaucccugcuac

SEQ ID NO: 2888681 - RNA, 19 nt, Artificial Sequence
  Description of Artificial Sequence: Synthetic oligonucleotide
ucaggguccuccaggaucg

SEQ ID NO: 2888682 - RNA, 19 nt, Artificial Sequence
  Description of Artificial Sequence: Synthetic oligonucleotide
ugaaaggguggacugcacg

SEQ ID NO: 2888683 - RNA, 19 nt, Artificial Sequence
  Description of Artificial Sequence: Synthetic oligonucleotide
cuuagauauaaagagaaca

SEQ ID NO: 2888684 - RNA, 19 nt, Artificial Sequence
  Description of Artificial Sequence: Synthetic oligonucleotide
uaaagagaacauaucccug

SEQ ID NO: 2888685 - RNA, 19 nt, Artificial Sequence
  Description of Artificial Sequence: Synthetic oligonucleotide
ucugucaggguccuccagg

SEQ ID NO: 2888686 - RNA, 19 nt, Artificial Sequence
  Description of Artificial Sequence: Synthetic oligonucleotide
aguaguagucaccacccuc

SEQ ID NO: 2888687 - RNA, 19 nt, Artificial Sequence
  Description of Artificial Sequence: Synthetic oligonucleotide
guauagaggcaccaagagg

SEQ ID NO: 2888688 - RNA, 19 nt, Artificial Sequence
  Description of Artificial Sequence: Synthetic oligonucleotide
uaguauagaggcaccaaga

SEQ ID NO: 2888689 - RNA, 19 nt, Artificial Sequence
  Description of Artificial Sequence: Synthetic oligonucleotide
agauauaaagagaacauau

SEQ ID NO: 2888690 - RNA, 19 nt, Artificial Sequence
  Description of Artificial Sequence: Synthetic oligonucleotide
aaggguggacugcacgagc

SEQ ID NO: 2888691 - RNA, 19 nt, Artificial Sequence
  Description of Artificial Sequence: Synthetic oligonucleotide
guagucaccacccucgggc

SEQ ID NO: 2888692 - RNA, 19 nt, Artificial Sequence
  Description of Artificial Sequence: Synthetic oligonucleotide
gaugacacuggugugcagg

SEQ ID NO: 2888693 - RNA, 19 nt, Artificial Sequence
  Description of Artificial Sequence: Synthetic oligonucleotide
gaacauaucccugcuacag

SEQ ID NO: 2888694 - RNA, 19 nt, Artificial Sequence
  Description of Artificial Sequence: Synthetic oligonucleotide
acacccucaggucugaaag

SEQ ID NO: 2888695 - RNA, 19 nt, Artificial Sequence
  Description of Artificial Sequence: Synthetic oligonucleotide
cuaguauagaggcaccaag

SEQ ID NO: 2888696 - RNA, 19 nt, Artificial Sequence
  Description of Artificial Sequence: Synthetic oligonucleotide
gauauaaagagaacauauc

SEQ ID NO: 2888697 - RNA, 19 nt, Artificial Sequence
  Description of Artificial Sequence: Synthetic oligonucleotide
aagucuggaguggaugcgc

SEQ ID NO: 2888698 - RNA, 19 nt, Artificial Sequence
  Description of Artificial Sequence: Synthetic oligonucleotide
gacaccaugccaugacugg

SEQ ID NO: 2888699 - RNA, 19 nt, Artificial Sequence
  Description of Artificial Sequence: Synthetic oligonucleotide
gaugcgcccagguacaccc

SEQ ID NO: 2888700 - RNA, 19 nt, Artificial Sequence
  Description of Artificial Sequence: Synthetic oligonucleotide
auaucccugcuacaguuuc

SEQ ID NO: 2888701 - RNA, 19 nt, Artificial Sequence
  Description of Artificial Sequence: Synthetic oligonucleotide
aggcucugcaccuuggccg

SEQ ID NO: 2888702 - RNA, 19 nt, Artificial Sequence
  Description of Artificial Sequence: Synthetic oligonucleotide
gaagaugacacuggugugc

SEQ ID NO: 2888703 - RNA, 19 nt, Artificial Sequence
  Description of Artificial Sequence: Synthetic oligonucleotide
uuggauccagaggacaucg

SEQ ID NO: 2888704 - RNA, 19 nt, Artificial Sequence
  Description of Artificial Sequence: Synthetic oligonucleotide
aagagaacauaucccugcu

SEQ ID NO: 2888705 - RNA, 19 nt, Artificial Sequence
  Description of Artificial Sequence: Synthetic oligonucleotide
ucuuggagacaccaugcca

SEQ ID NO: 2888706 - RNA, 19 nt, Artificial Sequence
  Description of Artificial Sequence: Synthetic oligonucleotide
ucugggcucuggaagauga

SEQ ID NO: 2888707 - RNA, 19 nt, Artificial Sequence
  Description of Artificial Sequence: Synthetic oligonucleotide
aacauaucccugcuacagu

SEQ ID NO: 2888708 - RNA, 19 nt, Artificial Sequence
  Description of Artificial Sequence: Synthetic oligonucleotide
aggaucguguccacgaggc

SEQ ID NO: 2888709 - RNA, 19 nt, Artificial Sequence
  Description of Artificial Sequence: Synthetic oligonucleotide
cucuccuuagauauaaaga

SEQ ID NO: 2888710 - RNA, 19 nt, Artificial Sequence
  Description of Artificial Sequence: Synthetic oligonucleotide
uucuacugcaagucuggag

SEQ ID NO: 2888711 - RNA, 19 nt, Artificial Sequence
  Description of Artificial Sequence: Synthetic oligonucleotide
guaguaguagucaccaccc

SEQ ID NO: 2888712 - RNA, 19 nt, Artificial Sequence
  Description of Artificial Sequence: Synthetic oligonucleotide
guuucuacugcaagucugg

SEQ ID NO: 2888713 - RNA, 19 nt, Artificial Sequence
  Description of Artificial Sequence: Synthetic oligonucleotide
agcucuuggagacaccaug

SEQ ID NO: 2888714 - RNA, 19 nt, Artificial Sequence
  Description of Artificial Sequence: Synthetic oligonucleotide
uggagcugcugguaggcgg

SEQ ID NO: 2888715 - RNA, 19 nt, Artificial Sequence
  Description of Artificial Sequence: Synthetic oligonucleotide
augugugucuucugggcuc

SEQ ID NO: 2888716 - RNA, 19 nt, Artificial Sequence
  Description of Artificial Sequence: Synthetic oligonucleotide
gaaaggguggacugcacga

SEQ ID NO: 2888717 - RNA, 19 nt, Artificial Sequence
  Description of Artificial Sequence: Synthetic oligonucleotide
uccaggaucguguccacga

SEQ ID NO: 2888718 - RNA, 19 nt, Artificial Sequence
  Description of Artificial Sequence: Synthetic oligonucleotide
augacacuggugugcaggg

SEQ ID NO: 2888719 - RNA, 19 nt, Artificial Sequence
  Description of Artificial Sequence: Synthetic oligonucleotide
ugcuacaguuucacugggg

SEQ ID NO: 2888720 - RNA, 19 nt, Artificial Sequence
  Description of Artificial Sequence: Synthetic oligonucleotide
uagauauaaagagaacaua

SEQ ID NO: 2888721 - RNA, 19 nt, Artificial Sequence
  Description of Artificial Sequence: Synthetic oligonucleotide
ucucuggagcugcugguag

SEQ ID NO: 2888722 - RNA, 19 nt, Artificial Sequence
  Description of Artificial Sequence: Synthetic oligonucleotide
aggaguaguaguagucacc

SEQ ID NO: 2888723 - RNA, 19 nt, Artificial Sequence
  Description of Artificial Sequence: Synthetic oligonucleotide
gucuucugggcucuggaag

SEQ ID NO: 2888724 - RNA, 19 nt, Artificial Sequence
  Description of Artificial Sequence: Synthetic oligonucleotide
cucuggaagaugacacugg

SEQ ID NO: 2888725 - RNA, 19 nt, Artificial Sequence
  Description of Artificial Sequence: Synthetic oligonucleotide
gauggcagaggccggauga

SEQ ID NO: 2888726 - RNA, 19 nt, Artificial Sequence
  Description of Artificial Sequence: Synthetic oligonucleotide
cucaggucugaaagggugg

SEQ ID NO: 2888727 - RNA, 19 nt, Artificial Sequence
  Description of Artificial Sequence: Synthetic oligonucleotide
cugauuggcacguugugca

SEQ ID NO: 2888728 - RNA, 19 nt, Artificial Sequence
  Description of Artificial Sequence: Synthetic oligonucleotide
ugguaggcggcauagcggu

SEQ ID NO: 2888729 - RNA, 19 nt, Artificial Sequence
  Description of Artificial Sequence: Synthetic oligonucleotide
aggaauggucucucucugg

SEQ ID NO: 2888730 - RNA, 19 nt, Artificial Sequence
  Description of Artificial Sequence: Synthetic oligonucleotide
gauccagaggacaucgaug

SEQ ID NO: 2888731 - RNA, 19 nt, Artificial Sequence
  Description of Artificial Sequence: Synthetic oligonucleotide
aagaugacacuggugugca

SEQ ID NO: 2888732 - RNA, 19 nt, Artificial Sequence
  Description of Artificial Sequence: Synthetic oligonucleotide
cugguaggcggcauagcgg

SEQ ID NO: 2888733 - RNA, 19 nt, Artificial Sequence
  Description of Artificial Sequence: Synthetic oligonucleotide
cucucucuggagcugcugg

SEQ ID NO: 2888734 - RNA, 19 nt, Artificial Sequence
  Description of Artificial Sequence: Synthetic oligonucleotide
uaguagucaccacccucgg

SEQ ID NO: 2888735 - RNA, 19 nt, Artificial Sequence
  Description of Artificial Sequence: Synthetic oligonucleotide
acauaucccugcuacaguu

SEQ ID NO: 2888736 - RNA, 19 nt, Artificial Sequence
  Description of Artificial Sequence: Synthetic oligonucleotide
gaauggucucucucuggag

SEQ ID NO: 2888737 - RNA, 19 nt, Artificial Sequence
  Description of Artificial Sequence: Synthetic oligonucleotide
acccggagguuucuacugc

SEQ ID NO: 2888738 - RNA, 19 nt, Artificial Sequence
  Description of Artificial Sequence: Synthetic oligonucleotide
gcugguaggcggcauagcg

SEQ ID NO: 2888739 - RNA, 19 nt, Artificial Sequence
  Description of Artificial Sequence: Synthetic oligonucleotide
ugcaagucuggaguggaug

SEQ ID NO: 2888740 - RNA, 19 nt, Artificial Sequence
  Description of Artificial Sequence: Synthetic oligonucleotide
ccugcuacaguuucacugg

SEQ ID NO: 2888741 - RNA, 19 nt, Artificial Sequence
  Description of Artificial Sequence: Synthetic oligonucleotide
gaugagcacgcugauuggc

SEQ ID NO: 2888742 - RNA, 19 nt, Artificial Sequence
  Description of Artificial Sequence: Synthetic oligonucleotide
acugcacgagcuuggcagg

SEQ ID NO: 2888743 - RNA, 19 nt, Artificial Sequence
  Description of Artificial Sequence: Synthetic oligonucleotide
gagguuucuacugcaaguc

SEQ ID NO: 2888744 - RNA, 19 nt, Artificial Sequence
  Description of Artificial Sequence: Synthetic oligonucleotide
agaacauaucccugcuaca

SEQ ID NO: 2888745 - RNA, 19 nt, Artificial Sequence
  Description of Artificial Sequence: Synthetic oligonucleotide
acgagcuuggcaggaaugg

SEQ ID NO: 2888746 - RNA, 19 nt, Artificial Sequence
  Description of Artificial Sequence: Synthetic oligonucleotide
guacccagcucuuggagac

SEQ ID NO: 2888747 - RNA, 19 nt, Artificial Sequence
  Description of Artificial Sequence: Synthetic oligonucleotide
aguagucaccacccucggg

SEQ ID NO: 2888748 - RNA, 19 nt, Artificial Sequence
  Description of Artificial Sequence: Synthetic oligonucleotide
cuccuuagauauaaagaga

SEQ ID NO: 2888749 - RNA, 19 nt, Artificial Sequence
  Description of Artificial Sequence: Synthetic oligonucleotide
caccaugccaugacugggg

SEQ ID NO: 2888750 - RNA, 19 nt, Artificial Sequence
  Description of Artificial Sequence: Synthetic oligonucleotide
uccagcacggauggcagag

SEQ ID NO: 2888751 - RNA, 19 nt, Artificial Sequence
  Description of Artificial Sequence: Synthetic oligonucleotide
uccagaggacaucgauggg

SEQ ID NO: 2888752 - RNA, 19 nt, Artificial Sequence
  Description of Artificial Sequence: Synthetic oligonucleotide
uacugcaagucuggagugg

SEQ ID NO: 2888753 - RNA, 19 nt, Artificial Sequence
  Description of Artificial Sequence: Synthetic oligonucleotide
aucccugcuacaguuucac

SEQ ID NO: 2888754 - RNA, 19 nt, Artificial Sequence
  Description of Artificial Sequence: Synthetic oligonucleotide
gagcacgcugauuggcacg

SEQ ID NO: 2888755 - RNA, 19 nt, Artificial Sequence
  Description of Artificial Sequence: Synthetic oligonucleotide
gaggcucugcaccuuggcc

SEQ ID NO: 2888756 - RNA, 19 nt, Artificial Sequence
  Description of Artificial Sequence: Synthetic oligonucleotide
cuuggccggguccagcacg

SEQ ID NO: 2888757 - RNA, 19 nt, Artificial Sequence
  Description of Artificial Sequence: Synthetic oligonucleotide
gaucguguccacgaggcuc

SEQ ID NO: 2888758 - RNA, 19 nt, Artificial Sequence
  Description of Artificial Sequence: Synthetic oligonucleotide
agucaccacccucgggccc

SEQ ID NO: 2888759 - RNA, 19 nt, Artificial Sequence
  Description of Artificial Sequence: Synthetic oligonucleotide
cacucugucaggguccucc

SEQ ID NO: 2888760 - RNA, 19 nt, Artificial Sequence
  Description of Artificial Sequence: Synthetic oligonucleotide
gacccggagguuucuacug

SEQ ID NO: 2888761 - RNA, 19 nt, Artificial Sequence
  Description of Artificial Sequence: Synthetic oligonucleotide
auggucucucucuggagcu

SEQ ID NO: 2888762 - RNA, 19 nt, Artificial Sequence
  Description of Artificial Sequence: Synthetic oligonucleotide
ugagcacgcugauuggcac

SEQ ID NO: 2888763 - RNA, 19 nt, Artificial Sequence
  Description of Artificial Sequence: Synthetic oligonucleotide
agaggcagaccucucuccu

SEQ ID NO: 2888764 - RNA, 19 nt, Artificial Sequence
  Description of Artificial Sequence: Synthetic oligonucleotide
agguuucuacugcaagucu

SEQ ID NO: 2888765 - RNA, 19 nt, Artificial Sequence
  Description of Artificial Sequence: Synthetic oligonucleotide
cuacugcaagucuggagug

SEQ ID NO: 2888766 - RNA, 19 nt, Artificial Sequence
  Description of Artificial Sequence: Synthetic oligonucleotide
ucuggaguggaugcgccca

SEQ ID NO: 2888767 - RNA, 19 nt, Artificial Sequence
  Description of Artificial Sequence: Synthetic oligonucleotide
ugugucuucugggcucugg

SEQ ID NO: 2888768 - RNA, 19 nt, Artificial Sequence
  Description of Artificial Sequence: Synthetic oligonucleotide
uuggagacaccaugccaug

SEQ ID NO: 2888769 - RNA, 19 nt, Artificial Sequence
  Description of Artificial Sequence: Synthetic oligonucleotide
gcaagucuggaguggaugc

SEQ ID NO: 2888770 - RNA, 19 nt, Artificial Sequence
  Description of Artificial Sequence: Synthetic oligonucleotide
acaccaugccaugacuggg

SEQ ID NO: 2888771 - RNA, 19 nt, Artificial Sequence
  Description of Artificial Sequence: Synthetic oligonucleotide
uaucccugcuacaguuuca

SEQ ID NO: 2888772 - RNA, 19 nt, Artificial Sequence
  Description of Artificial Sequence: Synthetic oligonucleotide
agucuggaguggaugcgcc

SEQ ID NO: 2888773 - RNA, 19 nt, Artificial Sequence
  Description of Artificial Sequence: Synthetic oligonucleotide
caggaucguguccacgagg

SEQ ID NO: 2888774 - RNA, 19 nt, Artificial Sequence
  Description of Artificial Sequence: Synthetic oligonucleotide
gaccucucuccuuagauau

SEQ ID NO: 2888775 - RNA, 19 nt, Artificial Sequence
  Description of Artificial Sequence: Synthetic oligonucleotide
ggccaugugugucuucugg

SEQ ID NO: 2888776 - RNA, 19 nt, Artificial Sequence
  Description of Artificial Sequence: Synthetic oligonucleotide
aggucugaaaggguggacu

SEQ ID NO: 2888777 - RNA, 19 nt, Artificial Sequence
  Description of Artificial Sequence: Synthetic oligonucleotide
uagucaccacccucgggcc

SEQ ID NO: 2888778 - RNA, 19 nt, Artificial Sequence
  Description of Artificial Sequence: Synthetic oligonucleotide
ugacccggagguuucuacu

SEQ ID NO: 2888779 - RNA, 19 nt, Artificial Sequence
  Description of Artificial Sequence: Synthetic oligonucleotide
uaguaguagucaccacccu

SEQ ID NO: 2888780 - RNA, 19 nt, Artificial Sequence
  Description of Artificial Sequence: Synthetic oligonucleotide
cacccucaggucugaaagg

SEQ ID NO: 2888781 - RNA, 19 nt, Artificial Sequence
  Description of Artificial Sequence: Synthetic oligonucleotide
gguuucuacugcaagucug

SEQ ID NO: 2888782 - RNA, 19 nt, Artificial Sequence
  Description of Artificial Sequence: Synthetic oligonucleotide
caagaggcagaccucucuc

SEQ ID NO: 2888783 - RNA, 19 nt, Artificial Sequence
  Description of Artificial Sequence: Synthetic oligonucleotide
ucaggucugaaagggugga

SEQ ID NO: 2888784 - RNA, 19 nt, Artificial Sequence
  Description of Artificial Sequence: Synthetic oligonucleotide
uagaggcaccaagaggcag

SEQ ID NO: 2888785 - RNA, 19 nt, Artificial Sequence
  Description of Artificial Sequence: Synthetic oligonucleotide
caagucuggaguggaugcg

SEQ ID NO: 2888786 - RNA, 19 nt, Artificial Sequence
  Description of Artificial Sequence: Synthetic oligonucleotide
ggucugaaaggguggacug

SEQ ID NO: 2888787 - RNA, 19 nt, Artificial Sequence
  Description of Artificial Sequence: Synthetic oligonucleotide
gcacggauggcagaggccg

SEQ ID NO: 2888788 - RNA, 19 nt, Artificial Sequence
  Description of Artificial Sequence: Synthetic oligonucleotide
uuuggauccagaggacauc

SEQ ID NO: 2888789 - RNA, 19 nt, Artificial Sequence
  Description of Artificial Sequence: Synthetic oligonucleotide
cuuggagacaccaugccau

SEQ ID NO: 2888790 - RNA, 19 nt, Artificial Sequence
  Description of Artificial Sequence: Synthetic oligonucleotide
ggaguaguaguagucacca

SEQ ID NO: 2888791 - RNA, 19 nt, Artificial Sequence
  Description of Artificial Sequence: Synthetic oligonucleotide
caggaauggucucucucug

SEQ ID NO: 2888792 - RNA, 19 nt, Artificial Sequence
  Description of Artificial Sequence: Synthetic oligonucleotide
cugcuacaguuucacuggg

SEQ ID NO: 2888793 - RNA, 19 nt, Artificial Sequence
  Description of Artificial Sequence: Synthetic oligonucleotide
ggcaccaagaggcagaccu

SEQ ID NO: 2888794 - RNA, 19 nt, Artificial Sequence
  Description of Artificial Sequence: Synthetic oligonucleotide
ugucuucugggcucuggaa

SEQ ID NO: 2888795 - RNA, 19 nt, Artificial Sequence
  Description of Artificial Sequence: Synthetic oligonucleotide
cccugcuacaguuucacug

SEQ ID NO: 2888796 - RNA, 19 nt, Artificial Sequence
  Description of Artificial Sequence: Synthetic oligonucleotide
cagcacggauggcagaggc

SEQ ID NO: 2888797 - RNA, 19 nt, Artificial Sequence
  Description of Artificial Sequence: Synthetic oligonucleotide
ucucucuggagcugcuggu

SEQ ID NO: 2888798 - RNA, 19 nt, Artificial Sequence
  Description of Artificial Sequence: Synthetic oligonucleotide
acccagcucuuggagacac

SEQ ID NO: 2888799 - RNA, 19 nt, Artificial Sequence
  Description of Artificial Sequence: Synthetic oligonucleotide
gccaugugugucuucuggg

SEQ ID NO: 2888800 - RNA, 19 nt, Artificial Sequence
  Description of Artificial Sequence: Synthetic oligonucleotide
ggaagaugacacuggugug

SEQ ID NO: 2888801 - RNA, 19 nt, Artificial Sequence
  Description of Artificial Sequence: Synthetic oligonucleotide
uacacccucaggucugaaa

SEQ ID NO: 2888802 - RNA, 19 nt, Artificial Sequence
  Description of Artificial Sequence: Synthetic oligonucleotide
cucgggccccuuuggaucc

SEQ ID NO: 2888803 - RNA, 19 nt, Artificial Sequence
  Description of Artificial Sequence: Synthetic oligonucleotide
auagcgguggcagccccgg

SEQ ID NO: 2888804 - RNA, 19 nt, Artificial Sequence
  Description of Artificial Sequence: Synthetic oligonucleotide
cauagcgguggcagccccg

SEQ ID NO: 2888805 - RNA, 19 nt, Artificial Sequence
  Description of Artificial Sequence: Synthetic oligonucleotide
uuucuacugcaagucugga

SEQ ID NO: 2888806 - RNA, 19 nt, Artificial Sequence
  Description of Artificial Sequence: Synthetic oligonucleotide
agaccucucuccuuagaua

SEQ ID NO: 2888807 - RNA, 19 nt, Artificial Sequence
  Description of Artificial Sequence: Synthetic oligonucleotide
ggaauggucucucucugga

SEQ ID NO: 2888808 - RNA, 19 nt, Artificial Sequence
  Description of Artificial Sequence: Synthetic oligonucleotide
acugcaagucuggagugga

SEQ ID NO: 2888809 - RNA, 19 nt, Artificial Sequence
  Description of Artificial Sequence: Synthetic oligonucleotide
cacgagcuuggcaggaaug

SEQ ID NO: 2888810 - RNA, 19 nt, Artificial Sequence
  Description of Artificial Sequence: Synthetic oligonucleotide
ggggcuaguauagaggcac

SEQ ID NO: 2888811 - RNA, 19 nt, Artificial Sequence
  Description of Artificial Sequence: Synthetic oligonucleotide
cggaugagcacgcugauug

SEQ ID NO: 2888812 - RNA, 19 nt, Artificial Sequence
  Description of Artificial Sequence: Synthetic oligonucleotide
agcacggauggcagaggcc

SEQ ID NO: 2888813 - RNA, 19 nt, Artificial Sequence
  Description of Artificial Sequence: Synthetic oligonucleotide
cacgcugauuggcacguug

SEQ ID NO: 2888814 - RNA, 19 nt, Artificial Sequence
  Description of Artificial Sequence: Synthetic oligonucleotide
gaguaguaguagucaccac

SEQ ID NO: 2888815 - RNA, 19 nt, Artificial Sequence
  Description of Artificial Sequence: Synthetic oligonucleotide
cagaggccggaugagcacg

SEQ ID NO: 2888816 - RNA, 19 nt, Artificial Sequence
  Description of Artificial Sequence: Synthetic oligonucleotide
ugugugucuucugggcucu

SEQ ID NO: 2888817 - RNA, 19 nt, Artificial Sequence
  Description of Artificial Sequence: Synthetic oligonucleotide
agagaacauaucccugcua

SEQ ID NO: 2888818 - RNA, 19 nt, Artificial Sequence
  Description of Artificial Sequence: Synthetic oligonucleotide
ggaugagcacgcugauugg

SEQ ID NO: 2888819 - RNA, 19 nt, Artificial Sequence
  Description of Artificial Sequence: Synthetic oligonucleotide
guguccacgaggcucugca

SEQ ID NO: 2888820 - RNA, 19 nt, Artificial Sequence
  Description of Artificial Sequence: Synthetic oligonucleotide
guggacugcacgagcuugg

SEQ ID NO: 2888821 - RNA, 19 nt, Artificial Sequence
  Description of Artificial Sequence: Synthetic oligonucleotide
ggagacaccaugccaugac

SEQ ID NO: 2888822 - RNA, 19 nt, Artificial Sequence
  Description of Artificial Sequence: Synthetic oligonucleotide
uggauccagaggacaucga

SEQ ID NO: 2888823 - RNA, 19 nt, Artificial Sequence
  Description of Artificial Sequence: Synthetic oligonucleotide
agaggccggaugagcacgc

SEQ ID NO: 2888824 - RNA, 19 nt, Artificial Sequence
  Description of Artificial Sequence: Synthetic oligonucleotide
ggaaggaguaguaguaguc

SEQ ID NO: 2888825 - RNA, 19 nt, Artificial Sequence
  Description of Artificial Sequence: Synthetic oligonucleotide
ggcucugcaccuuggccgg

SEQ ID NO: 2888826 - RNA, 19 nt, Artificial Sequence
  Description of Artificial Sequence: Synthetic oligonucleotide
agaggcaccaagaggcaga

SEQ ID NO: 2888827 - RNA, 19 nt, Artificial Sequence
  Description of Artificial Sequence: Synthetic oligonucleotide
gucugaaaggguggacugc

SEQ ID NO: 2888828 - RNA, 19 nt, Artificial Sequence
  Description of Artificial Sequence: Synthetic oligonucleotide
uggagacaccaugccauga

SEQ ID NO: 2888829 - RNA, 19 nt, Artificial Sequence
  Description of Artificial Sequence: Synthetic oligonucleotide
agaugacacuggugugcag

SEQ ID NO: 2888830 - RNA, 19 nt, Artificial Sequence
  Description of Artificial Sequence: Synthetic oligonucleotide
accuuggccggguccagca

SEQ ID NO: 2888831 - RNA, 19 nt, Artificial Sequence
  Description of Artificial Sequence: Synthetic oligonucleotide
gcugauuggcacguugugc

SEQ ID NO: 2888832 - RNA, 19 nt, Artificial Sequence
  Description of Artificial Sequence: Synthetic oligonucleotide
cugaaaggguggacugcac

SEQ ID NO: 2888833 - RNA, 19 nt, Artificial Sequence
  Description of Artificial Sequence: Synthetic oligonucleotide
gcucuggaagaugacacug

SEQ ID NO: 2888834 - RNA, 19 nt, Artificial Sequence
  Description of Artificial Sequence: Synthetic oligonucleotide
aucguguccacgaggcucu

SEQ ID NO: 2888835 - RNA, 19 nt, Artificial Sequence
  Description of Artificial Sequence: Synthetic oligonucleotide
augagcacgcugauuggca

SEQ ID NO: 2888836 - RNA, 19 nt, Artificial Sequence
  Description of Artificial Sequence: Synthetic oligonucleotide
gugacccggagguuucuac

SEQ ID NO: 2888837 - RNA, 19 nt, Artificial Sequence
  Description of Artificial Sequence: Synthetic oligonucleotide
aggcagaccucucuccuua

SEQ ID NO: 2888838 - RNA, 19 nt, Artificial Sequence
  Description of Artificial Sequence: Synthetic oligonucleotide
uuggcaggaauggucucuc

SEQ ID NO: 2888839 - RNA, 19 nt, Artificial Sequence
  Description of Artificial Sequence: Synthetic oligonucleotide
uggaguggaugcgcccagg

SEQ ID NO: 2888840 - RNA, 19 nt, Artificial Sequence
  Description of Artificial Sequence: Synthetic oligonucleotide
uaggcggcauagcgguggc

SEQ ID NO: 2888841 - RNA, 19 nt, Artificial Sequence
  Description of Artificial Sequence: Synthetic oligonucleotide
gguacccagcucuuggaga

SEQ ID NO: 2888842 - RNA, 19 nt, Artificial Sequence
  Description of Artificial Sequence: Synthetic oligonucleotide
gucuggaguggaugcgccc

SEQ ID NO: 2888843 - RNA, 19 nt, Artificial Sequence
  Description of Artificial Sequence: Synthetic oligonucleotide
ggccccuuuggauccagag

SEQ ID NO: 2888844 - RNA, 19 nt, Artificial Sequence
  Description of Artificial Sequence: Synthetic oligonucleotide
agcacgcugauuggcacgu

SEQ ID NO: 2888845 - RNA, 19 nt, Artificial Sequence
  Description of Artificial Sequence: Synthetic oligonucleotide
gcucuuggagacaccaugc

SEQ ID NO: 2888846 - RNA, 19 nt, Artificial Sequence
  Description of Artificial Sequence: Synthetic oligonucleotide
gagacaccaugccaugacu

SEQ ID NO: 2888847 - RNA, 19 nt, Artificial Sequence
  Description of Artificial Sequence: Synthetic oligonucleotide
acucugucaggguccucca

SEQ ID NO: 2888848 - RNA, 19 nt, Artificial Sequence
  Description of Artificial Sequence: Synthetic oligonucleotide
uguccacgaggcucugcac

SEQ ID NO: 2888849 - RNA, 19 nt, Artificial Sequence
  Description of Artificial Sequence: Synthetic oligonucleotide
uggacugcacgagcuuggc

SEQ ID NO: 2888850 - RNA, 19 nt, Artificial Sequence
  Description of Artificial Sequence: Synthetic oligonucleotide
cuuuggauccagaggacau

SEQ ID NO: 2888851 - RNA, 19 nt, Artificial Sequence
  Description of Artificial Sequence: Synthetic oligonucleotide
cacggauggcagaggccgg

SEQ ID NO: 2888852 - RNA, 19 nt, Artificial Sequence
  Description of Artificial Sequence: Synthetic oligonucleotide
ggagguuucuacugcaagu

SEQ ID NO: 2888853 - RNA, 19 nt, Artificial Sequence
  Description of Artificial Sequence: Synthetic oligonucleotide
uggcagaggccggaugagc

SEQ ID NO: 2888854 - RNA, 19 nt, Artificial Sequence
  Description of Artificial Sequence: Synthetic oligonucleotide
gugucuucugggcucugga

SEQ ID NO: 2888855 - RNA, 19 nt, Artificial Sequence
  Description of Artificial Sequence: Synthetic oligonucleotide
gaggcaccaagaggcagac

SEQ ID NO: 2888856 - RNA, 19 nt, Artificial Sequence
  Description of Artificial Sequence: Synthetic oligonucleotide
ggguacccagcucuuggag

SEQ ID NO: 2888857 - RNA, 19 nt, Artificial Sequence
  Description of Artificial Sequence: Synthetic oligonucleotide
ggcggcauagcgguggcag

SEQ ID NO: 2888858 - RNA, 19 nt, Artificial Sequence
  Description of Artificial Sequence: Synthetic oligonucleotide
cugcugguaggcggcauag

SEQ ID NO: 2888859 - RNA, 19 nt, Artificial Sequence
  Description of Artificial Sequence: Synthetic oligonucleotide
ucucucucuggagcugcug

SEQ ID NO: 2888860 - RNA, 19 nt, Artificial Sequence
  Description of Artificial Sequence: Synthetic oligonucleotide
uucugggcucuggaagaug

SEQ ID NO: 2888861 - RNA, 19 nt, Artificial Sequence
  Description of Artificial Sequence: Synthetic oligonucleotide
auagaggcaccaagaggca

SEQ ID NO: 2888862 - RNA, 19 nt, Artificial Sequence
  Description of Artificial Sequence: Synthetic oligonucleotide
gguggacugcacgagcuug

SEQ ID NO: 2888863 - RNA, 19 nt, Artificial Sequence
  Description of Artificial Sequence: Synthetic oligonucleotide
aggccggaugagcacgcug

SEQ ID NO: 2888864 - RNA, 19 nt, Artificial Sequence
  Description of Artificial Sequence: Synthetic oligonucleotide
cuggaguggaugcgcccag

SEQ ID NO: 2888865 - RNA, 19 nt, Artificial Sequence
  Description of Artificial Sequence: Synthetic oligonucleotide
auggcagaggccggaugag

SEQ ID NO: 2888866 - RNA, 19 nt, Artificial Sequence
  Description of Artificial Sequence: Synthetic oligonucleotide
agguacacccucaggucug

SEQ ID NO: 2888867 - RNA, 19 nt, Artificial Sequence
  Description of Artificial Sequence: Synthetic oligonucleotide
aggguggacugcacgagcu

SEQ ID NO: 2888868 - RNA, 19 nt, Artificial Sequence
  Description of Artificial Sequence: Synthetic oligonucleotide
uggggugacccggagguuu

SEQ ID NO: 2888869 - RNA, 19 nt, Artificial Sequence
  Description of Artificial Sequence: Synthetic oligonucleotide
guggcagccccggaaggag

SEQ ID NO: 2888870 - RNA, 19 nt, Artificial Sequence
  Description of Artificial Sequence: Synthetic oligonucleotide
agcgguggcagccccggaa

SEQ ID NO: 2888871 - RNA, 19 nt, Artificial Sequence
  Description of Artificial Sequence: Synthetic oligonucleotide
cacgaggcucugcaccuug

SEQ ID NO: 2888872 - RNA, 19 nt, Artificial Sequence
  Description of Artificial Sequence: Synthetic oligonucleotide
cucugucaggguccuccag

SEQ ID NO: 2888873 - RNA, 19 nt, Artificial Sequence
  Description of Artificial Sequence: Synthetic oligonucleotide
ggcaggaauggucucucuc

SEQ ID NO: 2888874 - RNA, 19 nt, Artificial Sequence
  Description of Artificial Sequence: Synthetic oligonucleotide
gguggggugacccggaggu

SEQ ID NO: 2888875 - RNA, 19 nt, Artificial Sequence
  Description of Artificial Sequence: Synthetic oligonucleotide
caugugugucuucugggcu

SEQ ID NO: 2888876 - RNA, 19 nt, Artificial Sequence
  Description of Artificial Sequence: Synthetic oligonucleotide
uggcagccccggaaggagu

SEQ ID NO: 2888877 - RNA, 19 nt, Artificial Sequence
  Description of Artificial Sequence: Synthetic oligonucleotide
gucaccacccucgggcccc

SEQ ID NO: 2888878 - RNA, 19 nt, Artificial Sequence
  Description of Artificial Sequence: Synthetic oligonucleotide
accaagaggcagaccucuc

SEQ ID NO: 2888879 - RNA, 19 nt, Artificial Sequence
  Description of Artificial Sequence: Synthetic oligonucleotide
uggucucucucuggagcug

SEQ ID NO: 2888880 - RNA, 19 nt, Artificial Sequence
  Description of Artificial Sequence: Synthetic oligonucleotide
acgcugauuggcacguugu

SEQ ID NO: 2888881 - RNA, 19 nt, Artificial Sequence
  Description of Artificial Sequence: Synthetic oligonucleotide
ucccugcuacaguuucacu

SEQ ID NO: 2888882 - RNA, 19 nt, Artificial Sequence
  Description of Artificial Sequence: Synthetic oligonucleotide
gcaggaauggucucucucu

SEQ ID NO: 2888883 - RNA, 19 nt, Artificial Sequence
  Description of Artificial Sequence: Synthetic oligonucleotide
cugggcucuggaagaugac

SEQ ID NO: 2888884 - RNA, 19 nt, Artificial Sequence
  Description of Artificial Sequence: Synthetic oligonucleotide
ggggcacucugucaggguc

SEQ ID NO: 2888885 - RNA, 19 nt, Artificial Sequence
  Description of Artificial Sequence: Synthetic oligonucleotide
gguccagcacggauggcag

SEQ ID NO: 2888886 - RNA, 19 nt, Artificial Sequence
  Description of Artificial Sequence: Synthetic oligonucleotide
uggcaggaauggucucucu

SEQ ID NO: 2888887 - RNA, 19 nt, Artificial Sequence
  Description of Artificial Sequence: Synthetic oligonucleotide
gaguggaugcgcccaggua

SEQ ID NO: 2888888 - RNA, 19 nt, Artificial Sequence
  Description of Artificial Sequence: Synthetic oligonucleotide
ugcugguaggcggcauagc

SEQ ID NO: 2888889 - RNA, 19 nt, Artificial Sequence
  Description of Artificial Sequence: Synthetic oligonucleotide
cagguacacccucaggucu

SEQ ID NO: 2888890 - RNA, 19 nt, Artificial Sequence
  Description of Artificial Sequence: Synthetic oligonucleotide
cacccucgggccccuuugg

SEQ ID NO: 2888891 - RNA, 19 nt, Artificial Sequence
  Description of Artificial Sequence: Synthetic oligonucleotide
ggucucucucuggagcugc

SEQ ID NO: 2888892 - RNA, 19 nt, Artificial Sequence
  Description of Artificial Sequence: Synthetic oligonucleotide
acgaggcucugcaccuugg

SEQ ID NO: 2888893 - RNA, 19 nt, Artificial Sequence
  Description of Artificial Sequence: Synthetic oligonucleotide
ccggguccagcacggaugg

SEQ ID NO: 2888894 - RNA, 19 nt, Artificial Sequence
  Description of Artificial Sequence: Synthetic oligonucleotide
guggaugcgcccagguaca

SEQ ID NO: 2888895 - RNA, 19 nt, Artificial Sequence
  Description of Artificial Sequence: Synthetic oligonucleotide
ggauggcagaggccggaug

SEQ ID NO: 2888896 - RNA, 19 nt, Artificial Sequence
  Description of Artificial Sequence: Synthetic oligonucleotide
ugcacgagcuuggcaggaa

SEQ ID NO: 2888897 - RNA, 19 nt, Artificial Sequence
  Description of Artificial Sequence: Synthetic oligonucleotide
ggguccagcacggauggca

SEQ ID NO: 2888898 - RNA, 19 nt, Artificial Sequence
  Description of Artificial Sequence: Synthetic oligonucleotide
acccucgggccccuuugga

SEQ ID NO: 2888899 - RNA, 19 nt, Artificial Sequence
  Description of Artificial Sequence: Synthetic oligonucleotide
cagaccucucuccuuagau

SEQ ID NO: 2888900 - RNA, 19 nt, Artificial Sequence
  Description of Artificial Sequence: Synthetic oligonucleotide
ggcuaguauagaggcacca

SEQ ID NO: 2888901 - RNA, 19 nt, Artificial Sequence
  Description of Artificial Sequence: Synthetic oligonucleotide
uacccagcucuuggagaca

SEQ ID NO: 2888902 - RNA, 19 nt, Artificial Sequence
  Description of Artificial Sequence: Synthetic oligonucleotide
ggcagaccucucuccuuag

SEQ ID NO: 2888903 - RNA, 19 nt, Artificial Sequence
  Description of Artificial Sequence: Synthetic oligonucleotide
ccggaaggaguaguaguag

SEQ ID NO: 2888904 - RNA, 19 nt, Artificial Sequence
  Description of Artificial Sequence: Synthetic oligonucleotide
acggauggcagaggccgga

SEQ ID NO: 2888905 - RNA, 19 nt, Artificial Sequence
  Description of Artificial Sequence: Synthetic oligonucleotide
ggauccagaggacaucgau

SEQ ID NO: 2888906 - RNA, 19 nt, Artificial Sequence
  Description of Artificial Sequence: Synthetic oligonucleotide
gcagaggccggaugagcac

SEQ ID NO: 2888907 - RNA, 19 nt, Artificial Sequence
  Description of Artificial Sequence: Synthetic oligonucleotide
gcuaguauagaggcaccaa

SEQ ID NO: 2888908 - RNA, 19 nt, Artificial Sequence
  Description of Artificial Sequence: Synthetic oligonucleotide
ccucgggccccuuuggauc

SEQ ID NO: 2888909 - RNA, 19 nt, Artificial Sequence
  Description of Artificial Sequence: Synthetic oligonucleotide
cggagguuucuacugcaag

SEQ ID NO: 2888910 - RNA, 19 nt, Artificial Sequence
  Description of Artificial Sequence: Synthetic oligonucleotide
ggccggaugagcacgcuga

SEQ ID NO: 2888911 - RNA, 19 nt, Artificial Sequence
  Description of Artificial Sequence: Synthetic oligonucleotide
gggcacucugucagggucc

SEQ ID NO: 2888912 - RNA, 19 nt, Artificial Sequence
  Description of Artificial Sequence: Synthetic oligonucleotide
gcauagcgguggcagcccc

SEQ ID NO: 2888913 - RNA, 19 nt, Artificial Sequence
  Description of Artificial Sequence: Synthetic oligonucleotide
uggaugcgcccagguacac

SEQ ID NO: 2888914 - RNA, 19 nt, Artificial Sequence
  Description of Artificial Sequence: Synthetic oligonucleotide
ccaggaucguguccacgag

SEQ ID NO: 2888915 - RNA, 19 nt, Artificial Sequence
  Description of Artificial Sequence: Synthetic oligonucleotide
aggguccuccaggaucgug

SEQ ID NO: 2888916 - RNA, 19 nt, Artificial Sequence
  Description of Artificial Sequence: Synthetic oligonucleotide
gcccagguacacccucagg

SEQ ID NO: 2888917 - RNA, 19 nt, Artificial Sequence
  Description of Artificial Sequence: Synthetic oligonucleotide
cucucuccuuagauauaaa

SEQ ID NO: 2888918 - RNA, 19 nt, Artificial Sequence
  Description of Artificial Sequence: Synthetic oligonucleotide
gccggguccagcacggaug

SEQ ID NO: 2888919 - RNA, 19 nt, Artificial Sequence
  Description of Artificial Sequence: Synthetic oligonucleotide
ggcauagcgguggcagccc

SEQ ID NO: 2888920 - RNA, 19 nt, Artificial Sequence
  Description of Artificial Sequence: Synthetic oligonucleotide
ccagcucuuggagacacca

SEQ ID NO: 2888921 - RNA, 19 nt, Artificial Sequence
  Description of Artificial Sequence: Synthetic oligonucleotide
cauaucccugcuacaguuu

SEQ ID NO: 2888922 - RNA, 19 nt, Artificial Sequence
  Description of Artificial Sequence: Synthetic oligonucleotide
caccaagaggcagaccucu

SEQ ID NO: 2888923 - RNA, 19 nt, Artificial Sequence
  Description of Artificial Sequence: Synthetic oligonucleotide
guccagcacggauggcaga

SEQ ID NO: 2888924 - RNA, 19 nt, Artificial Sequence
  Description of Artificial Sequence: Synthetic oligonucleotide
gggcuaguauagaggcacc

SEQ ID NO: 2888925 - RNA, 19 nt, Artificial Sequence
  Description of Artificial Sequence: Synthetic oligonucleotide
uagcgguggcagccccgga

SEQ ID NO: 2888926 - RNA, 19 nt, Artificial Sequence
  Description of Artificial Sequence: Synthetic oligonucleotide
ccucucuccuuagauauaa

SEQ ID NO: 2888927 - RNA, 19 nt, Artificial Sequence
  Description of Artificial Sequence: Synthetic oligonucleotide
cccggaaggaguaguagua

SEQ ID NO: 2888928 - RNA, 19 nt, Artificial Sequence
  Description of Artificial Sequence: Synthetic oligonucleotide
ggacugcacgagcuuggca

SEQ ID NO: 2888929 - RNA, 19 nt, Artificial Sequence
  Description of Artificial Sequence: Synthetic oligonucleotide
ggaugcgcccagguacacc

SEQ ID NO: 2888930 - RNA, 19 nt, Artificial Sequence
  Description of Artificial Sequence: Synthetic oligonucleotide
gcggcauagcgguggcagc

SEQ ID NO: 2888931 - RNA, 19 nt, Artificial Sequence
  Description of Artificial Sequence: Synthetic oligonucleotide
gccccggaaggaguaguag

SEQ ID NO: 2888932 - RNA, 19 nt, Artificial Sequence
  Description of Artificial Sequence: Synthetic oligonucleotide
ggcucuggaagaugacacu

SEQ ID NO: 2888933 - RNA, 19 nt, Artificial Sequence
  Description of Artificial Sequence: Synthetic oligonucleotide
gcagaccucucuccuuaga

SEQ ID NO: 2888934 - RNA, 19 nt, Artificial Sequence
  Description of Artificial Sequence: Synthetic oligonucleotide
gcuuggcaggaauggucuc

SEQ ID NO: 2888935 - RNA, 19 nt, Artificial Sequence
  Description of Artificial Sequence: Synthetic oligonucleotide
accacccucgggccccuuu

SEQ ID NO: 2888936 - RNA, 19 nt, Artificial Sequence
  Description of Artificial Sequence: Synthetic oligonucleotide
gggccaugugugucuucug

SEQ ID NO: 2888937 - RNA, 19 nt, Artificial Sequence
  Description of Artificial Sequence: Synthetic oligonucleotide
cucucuggagcugcuggua

SEQ ID NO: 2888938 - RNA, 19 nt, Artificial Sequence
  Description of Artificial Sequence: Synthetic oligonucleotide
ggaguggaugcgcccaggu

SEQ ID NO: 2888939 - RNA, 19 nt, Artificial Sequence
  Description of Artificial Sequence: Synthetic oligonucleotide
ucguguccacgaggcucug

SEQ ID NO: 2888940 - RNA, 19 nt, Artificial Sequence
  Description of Artificial Sequence: Synthetic oligonucleotide
gggguggggugacccggag

SEQ ID NO: 2888941 - RNA, 19 nt, Artificial Sequence
  Description of Artificial Sequence: Synthetic oligonucleotide
cugcacgagcuuggcagga

SEQ ID NO: 2888942 - RNA, 19 nt, Artificial Sequence
  Description of Artificial Sequence: Synthetic oligonucleotide
cggcauagcgguggcagcc

SEQ ID NO: 2888943 - RNA, 19 nt, Artificial Sequence
  Description of Artificial Sequence: Synthetic oligonucleotide
accucucuccuuagauaua

SEQ ID NO: 2888944 - RNA, 19 nt, Artificial Sequence
  Description of Artificial Sequence: Synthetic oligonucleotide
gguacacccucaggucuga

SEQ ID NO: 2888945 - RNA, 19 nt, Artificial Sequence
  Description of Artificial Sequence: Synthetic oligonucleotide
ggggccaugugugucuucu

SEQ ID NO: 2888946 - RNA, 19 nt, Artificial Sequence
  Description of Artificial Sequence: Synthetic oligonucleotide
gagcugcugguaggcggca

SEQ ID NO: 2888947 - RNA, 19 nt, Artificial Sequence
  Description of Artificial Sequence: Synthetic oligonucleotide
cccggagguuucuacugca

SEQ ID NO: 2888948 - RNA, 19 nt, Artificial Sequence
  Description of Artificial Sequence: Synthetic oligonucleotide
ccacccucgggccccuuug

SEQ ID NO: 2888949 - RNA, 19 nt, Artificial Sequence
  Description of Artificial Sequence: Synthetic oligonucleotide
agccccggaaggaguagua

SEQ ID NO: 2888950 - RNA, 19 nt, Artificial Sequence
  Description of Artificial Sequence: Synthetic oligonucleotide
gcaccaagaggcagaccuc

SEQ ID NO: 2888951 - RNA, 19 nt, Artificial Sequence
  Description of Artificial Sequence: Synthetic oligonucleotide
agcugcugguaggcggcau

SEQ ID NO: 2888952 - RNA, 19 nt, Artificial Sequence
  Description of Artificial Sequence: Synthetic oligonucleotide
gcugcugguaggcggcaua

SEQ ID NO: 2888953 - RNA, 19 nt, Artificial Sequence
  Description of Artificial Sequence: Synthetic oligonucleotide
cccagcucuuggagacacc

SEQ ID NO: 2888954 - RNA, 19 nt, Artificial Sequence
  Description of Artificial Sequence: Synthetic oligonucleotide
ucgggccccuuuggaucca

SEQ ID NO: 2888955 - RNA, 19 nt, Artificial Sequence
  Description of Artificial Sequence: Synthetic oligonucleotide
gcagccccggaaggaguag

SEQ ID NO: 2888956 - RNA, 19 nt, Artificial Sequence
  Description of Artificial Sequence: Synthetic oligonucleotide
ucaccacccucgggccccu

SEQ ID NO: 2888957 - RNA, 19 nt, Artificial Sequence
  Description of Artificial Sequence: Synthetic oligonucleotide
ggggugacccggagguuuc

SEQ ID NO: 2888958 - RNA, 19 nt, Artificial Sequence
  Description of Artificial Sequence: Synthetic oligonucleotide
gugugucuucugggcucug

SEQ ID NO: 2888959 - RNA, 19 nt, Artificial Sequence
  Description of Artificial Sequence: Synthetic oligonucleotide
cugcaagucuggaguggau

SEQ ID NO: 2888960 - RNA, 19 nt, Artificial Sequence
  Description of Artificial Sequence: Synthetic oligonucleotide
ccuuggccggguccagcac

SEQ ID NO: 2888961 - RNA, 19 nt, Artificial Sequence
  Description of Artificial Sequence: Synthetic oligonucleotide
ggaucguguccacgaggcu

SEQ ID NO: 2888962 - RNA, 19 nt, Artificial Sequence
  Description of Artificial Sequence: Synthetic oligonucleotide
ccccggaaggaguaguagu

SEQ ID NO: 2888963 - RNA, 19 nt, Artificial Sequence
  Description of Artificial Sequence: Synthetic oligonucleotide
augcgcccagguacacccu

SEQ ID NO: 2888964 - RNA, 19 nt, Artificial Sequence
  Description of Artificial Sequence: Synthetic oligonucleotide
cuucugggcucuggaagau

SEQ ID NO: 2888965 - RNA, 19 nt, Artificial Sequence
  Description of Artificial Sequence: Synthetic oligonucleotide
cagcucuuggagacaccau

SEQ ID NO: 2888966 - RNA, 19 nt, Artificial Sequence
  Description of Artificial Sequence: Synthetic oligonucleotide
aggcggcauagcgguggca

SEQ ID NO: 2888967 - RNA, 19 nt, Artificial Sequence
  Description of Artificial Sequence: Synthetic oligonucleotide
uggccggguccagcacgga

SEQ ID NO: 2888968 - RNA, 19 nt, Artificial Sequence
  Description of Artificial Sequence: Synthetic oligonucleotide
cggaaggaguaguaguagu

SEQ ID NO: 2888969 - RNA, 19 nt, Artificial Sequence
  Description of Artificial Sequence: Synthetic oligonucleotide
ccggagguuucuacugcaa

SEQ ID NO: 2888970 - RNA, 19 nt, Artificial Sequence
  Description of Artificial Sequence: Synthetic oligonucleotide
gcacgagcuuggcaggaau

SEQ ID NO: 2888971 - RNA, 19 nt, Artificial Sequence
  Description of Artificial Sequence: Synthetic oligonucleotide
guacacccucaggucugaa

SEQ ID NO: 2888972 - RNA, 19 nt, Artificial Sequence
  Description of Artificial Sequence: Synthetic oligonucleotide
cgcccagguacacccucag

SEQ ID NO: 2888973 - RNA, 19 nt, Artificial Sequence
  Description of Artificial Sequence: Synthetic oligonucleotide
ggcagccccggaaggagua

SEQ ID NO: 2888974 - RNA, 19 nt, Artificial Sequence
  Description of Artificial Sequence: Synthetic oligonucleotide
gucucucucuggagcugcu

SEQ ID NO: 2888975 - RNA, 19 nt, Artificial Sequence
  Description of Artificial Sequence: Synthetic oligonucleotide
gaggccggaugagcacgcu

SEQ ID NO: 2888976 - RNA, 19 nt, Artificial Sequence
  Description of Artificial Sequence: Synthetic oligonucleotide
ggugacccggagguuucua

SEQ ID NO: 2888977 - RNA, 19 nt, Artificial Sequence
  Description of Artificial Sequence: Synthetic oligonucleotide
ggcacucugucaggguccu

SEQ ID NO: 2888978 - RNA, 19 nt, Artificial Sequence
  Description of Artificial Sequence: Synthetic oligonucleotide
cucugcaccuuggccgggu

SEQ ID NO: 2888979 - RNA, 19 nt, Artificial Sequence
  Description of Artificial Sequence: Synthetic oligonucleotide
cagccccggaaggaguagu

SEQ ID NO: 2888980 - RNA, 19 nt, Artificial Sequence
  Description of Artificial Sequence: Synthetic oligonucleotide
gcgcccagguacacccuca

SEQ ID NO: 2888981 - RNA, 19 nt, Artificial Sequence
  Description of Artificial Sequence: Synthetic oligonucleotide
cguguccacgaggcucugc

SEQ ID NO: 2888982 - RNA, 19 nt, Artificial Sequence
  Description of Artificial Sequence: Synthetic oligonucleotide
ggccggguccagcacggau

SEQ ID NO: 2888983 - RNA, 19 nt, Artificial Sequence
  Description of Artificial Sequence: Synthetic oligonucleotide
ggguggacugcacgagcuu

SEQ ID NO: 2888984 - RNA, 19 nt, Artificial Sequence
  Description of Artificial Sequence: Synthetic oligonucleotide
gccggaugagcacgcugau

SEQ ID NO: 2888985 - RNA, 19 nt, Artificial Sequence
  Description of Artificial Sequence: Synthetic oligonucleotide
cccucgggccccuuuggau

SEQ ID NO: 2888986 - RNA, 19 nt, Artificial Sequence
  Description of Artificial Sequence: Synthetic oligonucleotide
gggccccuuuggauccaga

SEQ ID NO: 2888987 - RNA, 19 nt, Artificial Sequence
  Description of Artificial Sequence: Synthetic oligonucleotide
guggggugacccggagguu

SEQ ID NO: 2888988 - RNA, 19 nt, Artificial Sequence
  Description of Artificial Sequence: Synthetic oligonucleotide
gggugacccggagguuucu

SEQ ID NO: 2888989 - RNA, 19 nt, Artificial Sequence
  Description of Artificial Sequence: Synthetic oligonucleotide
gcacucugucaggguccuc

SEQ ID NO: 2888990 - RNA, 19 nt, Artificial Sequence
  Description of Artificial Sequence: Synthetic oligonucleotide
cgggccccuuuggauccag

SEQ ID NO: 2888991 - RNA, 19 nt, Artificial Sequence
  Description of Artificial Sequence: Synthetic oligonucleotide
cggguccagcacggauggc

SEQ ID NO: 2888992 - RNA, 19 nt, Artificial Sequence
  Description of Artificial Sequence: Synthetic oligonucleotide
ccggaugagcacgcugauu

SEQ ID NO: 2888993 - RNA, 19 nt, Artificial Sequence
  Description of Artificial Sequence: Synthetic oligonucleotide
gcacgcugauuggcacguu

SEQ ID NO: 2888994 - RNA, 19 nt, Artificial Sequence
  Description of Artificial Sequence: Synthetic oligonucleotide
ccacgaggcucugcaccuu

SEQ ID NO: 2888995 - RNA, 19 nt, Artificial Sequence
  Description of Artificial Sequence: Synthetic oligonucleotide
caccacccucgggccccuu

SEQ ID NO: 2888996 - RNA, 19 nt, Artificial Sequence
  Description of Artificial Sequence: Synthetic oligonucleotide
aacgagcuccagcagaaug

SEQ ID NO: 2888997 - RNA, 19 nt, Artificial Sequence
  Description of Artificial Sequence: Synthetic oligonucleotide
acgugggugaacgagcucc

SEQ ID NO: 2888998 - RNA, 19 nt, Artificial Sequence
  Description of Artificial Sequence: Synthetic oligonucleotide
ugaacgagcuccagcagaa

SEQ ID NO: 2888999 - RNA, 19 nt, Artificial Sequence
  Description of Artificial Sequence: Synthetic oligonucleotide
ugggugaacgagcuccagc

SEQ ID NO: 2889000 - RNA, 19 nt, Artificial Sequence
  Description of Artificial Sequence: Synthetic oligonucleotide
gugaacgagcuccagcaga

SEQ ID NO: 2889001 - RNA, 19 nt, Artificial Sequence
  Description of Artificial Sequence: Synthetic oligonucleotide
gggugaacgagcuccagca

SEQ ID NO: 2889002 - RNA, 19 nt, Artificial Sequence
  Description of Artificial Sequence: Synthetic oligonucleotide
ggugaacgagcuccagcag

SEQ ID NO: 2889003 - RNA, 19 nt, Artificial Sequence
  Description of Artificial Sequence: Synthetic oligonucleotide
gggacgugggugaacgagc

SEQ ID NO: 2889004 - RNA, 19 nt, Artificial Sequence
  Description of Artificial Sequence: Synthetic oligonucleotide
gacgugggugaacgagcuc

SEQ ID NO: 2889005 - RNA, 19 nt, Artificial Sequence
  Description of Artificial Sequence: Synthetic oligonucleotide
gugggugaacgagcuccag

SEQ ID NO: 2889006 - RNA, 19 nt, Artificial Sequence
  Description of Artificial Sequence: Synthetic oligonucleotide
ggacgugggugaacgagcu

SEQ ID NO: 2889007 - RNA, 19 nt, Artificial Sequence
  Description of Artificial Sequence: Synthetic oligonucleotide
gaacgagcuccagcagaau

SEQ ID NO: 2889008 - RNA, 19 nt, Artificial Sequence
  Description of Artificial Sequence: Synthetic oligonucleotide
uuuggaaccgagaagauga

SEQ ID NO: 2889009 - RNA, 19 nt, Artificial Sequence
  Description of Artificial Sequence: Synthetic oligonucleotide
aagguugugugccagcugc

SEQ ID NO: 2889010 - RNA, 19 nt, Artificial Sequence
  Description of Artificial Sequence: Synthetic oligonucleotide
agagaucuuaaacugaggg

SEQ ID NO: 2889011 - RNA, 19 nt, Artificial Sequence
  Description of Artificial Sequence: Synthetic oligonucleotide
aaugugucgugguuguucc

SEQ ID NO: 2889012 - RNA, 19 nt, Artificial Sequence
  Description of Artificial Sequence: Synthetic oligonucleotide
aagaugacgaagccuaugg

SEQ ID NO: 2889013 - RNA, 19 nt, Artificial Sequence
  Description of Artificial Sequence: Synthetic oligonucleotide
ucauaggacauccagaacu

SEQ ID NO: 2889014 - RNA, 19 nt, Artificial Sequence
  Description of Artificial Sequence: Synthetic oligonucleotide
ugugaaguugcucaugaag

SEQ ID NO: 2889015 - RNA, 19 nt, Artificial Sequence
  Description of Artificial Sequence: Synthetic oligonucleotide
ugaggguugcuccagaaug

SEQ ID NO: 2889016 - RNA, 19 nt, Artificial Sequence
  Description of Artificial Sequence: Synthetic oligonucleotide
uuaaacugaggguugcucc

SEQ ID NO: 2889017 - RNA, 19 nt, Artificial Sequence
  Description of Artificial Sequence: Synthetic oligonucleotide
aguucuucugcaucagggc

SEQ ID NO: 2889018 - RNA, 19 nt, Artificial Sequence
  Description of Artificial Sequence: Synthetic oligonucleotide
gaugacgaagccuauggug

SEQ ID NO: 2889019 - RNA, 19 nt, Artificial Sequence
  Description of Artificial Sequence: Synthetic oligonucleotide
aagucgucauaggacaucc

SEQ ID NO: 2889020 - RNA, 19 nt, Artificial Sequence
  Description of Artificial Sequence: Synthetic oligonucleotide
ucaugaagucgucauagga

SEQ ID NO: 2889021 - RNA, 19 nt, Artificial Sequence
  Description of Artificial Sequence: Synthetic oligonucleotide
auggugagcagcuggcucc

SEQ ID NO: 2889022 - RNA, 19 nt, Artificial Sequence
  Description of Artificial Sequence: Synthetic oligonucleotide
agggccaccaggcagguac

SEQ ID NO: 2889023 - RNA, 19 nt, Artificial Sequence
  Description of Artificial Sequence: Synthetic oligonucleotide
caugaagucgucauaggac

SEQ ID NO: 2889024 - RNA, 19 nt, Artificial Sequence
  Description of Artificial Sequence: Synthetic oligonucleotide
acucacgucaucccacucc

SEQ ID NO: 2889025 - RNA, 19 nt, Artificial Sequence
  Description of Artificial Sequence: Synthetic oligonucleotide
uccuuuggaaccgagaaga

SEQ ID NO: 2889026 - RNA, 19 nt, Artificial Sequence
  Description of Artificial Sequence: Synthetic oligonucleotide
gaaguugcucaugaagucg

SEQ ID NO: 2889027 - RNA, 19 nt, Artificial Sequence
  Description of Artificial Sequence: Synthetic oligonucleotide
aggagugugaaguugcuca

SEQ ID NO: 2889028 - RNA, 19 nt, Artificial Sequence
  Description of Artificial Sequence: Synthetic oligonucleotide
ucugaacuccuuuggaacc

SEQ ID NO: 2889029 - RNA, 19 nt, Artificial Sequence
  Description of Artificial Sequence: Synthetic oligonucleotide
ucuggagucagguugcaga

SEQ ID NO: 2889030 - RNA, 19 nt, Artificial Sequence
  Description of Artificial Sequence: Synthetic oligonucleotide
augaagucgucauaggaca

SEQ ID NO: 2889031 - RNA, 19 nt, Artificial Sequence
  Description of Artificial Sequence: Synthetic oligonucleotide
uggacauccgcacucacgu

SEQ ID NO: 2889032 - RNA, 19 nt, Artificial Sequence
  Description of Artificial Sequence: Synthetic oligonucleotide
accgagaagaugacgaagc

SEQ ID NO: 2889033 - RNA, 19 nt, Artificial Sequence
  Description of Artificial Sequence: Synthetic oligonucleotide
uucugaacuccuuuggaac

SEQ ID NO: 2889034 - RNA, 19 nt, Artificial Sequence
  Description of Artificial Sequence: Synthetic oligonucleotide
uccaggagugugaaguugc

SEQ ID NO: 2889035 - RNA, 19 nt, Artificial Sequence
  Description of Artificial Sequence: Synthetic oligonucleotide
agugugaaguugcucauga

SEQ ID NO: 2889036 - RNA, 19 nt, Artificial Sequence
  Description of Artificial Sequence: Synthetic oligonucleotide
agagagaucuuaaacugag

SEQ ID NO: 2889037 - RNA, 19 nt, Artificial Sequence
  Description of Artificial Sequence: Synthetic oligonucleotide
aucuuccuucuuccgaagc

SEQ ID NO: 2889038 - RNA, 19 nt, Artificial Sequence
  Description of Artificial Sequence: Synthetic oligonucleotide
uaaacugaggguugcucca

SEQ ID NO: 2889039 - RNA, 19 nt, Artificial Sequence
  Description of Artificial Sequence: Synthetic oligonucleotide
gucgucauaggacauccag

SEQ ID NO: 2889040 - RNA, 19 nt, Artificial Sequence
  Description of Artificial Sequence: Synthetic oligonucleotide
guucuucugcaucagggcc

SEQ ID NO: 2889041 - RNA, 19 nt, Artificial Sequence
  Description of Artificial Sequence: Synthetic oligonucleotide
gcagguacagaccaccucg

SEQ ID NO: 2889042 - RNA, 19 nt, Artificial Sequence
  Description of Artificial Sequence: Synthetic oligonucleotide
agguucugaacuccuuugg

SEQ ID NO: 2889043 - RNA, 19 nt, Artificial Sequence
  Description of Artificial Sequence: Synthetic oligonucleotide
uucuucugcaucagggcca

SEQ ID NO: 2889044 - RNA, 19 nt, Artificial Sequence
  Description of Artificial Sequence: Synthetic oligonucleotide
ugacagugcaucuggaguc

SEQ ID NO: 2889045 - RNA, 19 nt, Artificial Sequence
  Description of Artificial Sequence: Synthetic oligonucleotide
ugaaguugcucaugaaguc

SEQ ID NO: 2889046 - RNA, 19 nt, Artificial Sequence
  Description of Artificial Sequence: Synthetic oligonucleotide
aagcaggugugucuggaca

SEQ ID NO: 2889047 - RNA, 19 nt, Artificial Sequence
  Description of Artificial Sequence: Synthetic oligonucleotide
aucuuaaacugaggguugc

SEQ ID NO: 2889048 - RNA, 19 nt, Artificial Sequence
  Description of Artificial Sequence: Synthetic oligonucleotide
acuccuuuggaaccgagaa

SEQ ID NO: 2889049 - RNA, 19 nt, Artificial Sequence
  Description of Artificial Sequence: Synthetic oligonucleotide
ucguagaagguugugugcc

SEQ ID NO: 2889050 - RNA, 19 nt, Artificial Sequence
  Description of Artificial Sequence: Synthetic oligonucleotide
uuggcucugucacuccagg

SEQ ID NO: 2889051 - RNA, 19 nt, Artificial Sequence
  Description of Artificial Sequence: Synthetic oligonucleotide
ucgucauaggacauccaga

SEQ ID NO: 2889052 - RNA, 19 nt, Artificial Sequence
  Description of Artificial Sequence: Synthetic oligonucleotide
aaccgagaagaugacgaag

SEQ ID NO: 2889053 - RNA, 19 nt, Artificial Sequence
  Description of Artificial Sequence: Synthetic oligonucleotide
guugcuccagaaugugucg

SEQ ID NO: 2889054 - RNA, 19 nt, Artificial Sequence
  Description of Artificial Sequence: Synthetic oligonucleotide
gagguucugaacuccuuug

SEQ ID NO: 2889055 - RNA, 19 nt, Artificial Sequence
  Description of Artificial Sequence: Synthetic oligonucleotide
gagaagaugacgaagccua

SEQ ID NO: 2889056 - RNA, 19 nt, Artificial Sequence
  Description of Artificial Sequence: Synthetic oligonucleotide
cauaggacauccagaacuc

SEQ ID NO: 2889057 - RNA, 19 nt, Artificial Sequence
  Description of Artificial Sequence: Synthetic oligonucleotide
ucgugguuguuccugcagc

SEQ ID NO: 2889058 - RNA, 19 nt, Artificial Sequence
  Description of Artificial Sequence: Synthetic oligonucleotide
ugugucuggacauccgcac

SEQ ID NO: 2889059 - RNA, 19 nt, Artificial Sequence
  Description of Artificial Sequence: Synthetic oligonucleotide
uauggugagcagcuggcuc

SEQ ID NO: 2889060 - RNA, 19 nt, Artificial Sequence
  Description of Artificial Sequence: Synthetic oligonucleotide
ugcucagacccguucuccg

SEQ ID NO: 2889061 - RNA, 19 nt, Artificial Sequence
  Description of Artificial Sequence: Synthetic oligonucleotide
gaucuuaaacugaggguug

SEQ ID NO: 2889062 - RNA, 19 nt, Artificial Sequence
  Description of Artificial Sequence: Synthetic oligonucleotide
gacauccgcacucacguca

SEQ ID NO: 2889063 - RNA, 19 nt, Artificial Sequence
  Description of Artificial Sequence: Synthetic oligonucleotide
auaggacauccagaacucc

SEQ ID NO: 2889064 - RNA, 19 nt, Artificial Sequence
  Description of Artificial Sequence: Synthetic oligonucleotide
cucguagaagguugugugc

SEQ ID NO: 2889065 - RNA, 19 nt, Artificial Sequence
  Description of Artificial Sequence: Synthetic oligonucleotide
augacgaagccuaugguga

SEQ ID NO: 2889066 - RNA, 19 nt, Artificial Sequence
  Description of Artificial Sequence: Synthetic oligonucleotide
caugccuccaguucuucug

SEQ ID NO: 2889067 - RNA, 19 nt, Artificial Sequence
  Description of Artificial Sequence: Synthetic oligonucleotide
aaguugcucaugaagucgu

SEQ ID NO: 2889068 - RNA, 19 nt, Artificial Sequence
  Description of Artificial Sequence: Synthetic oligonucleotide
ugacgaagccuauggugag

SEQ ID NO: 2889069 - RNA, 19 nt, Artificial Sequence
  Description of Artificial Sequence: Synthetic oligonucleotide
accaggcagguacagacca

SEQ ID NO: 2889070 - RNA, 19 nt, Artificial Sequence
  Description of Artificial Sequence: Synthetic oligonucleotide
cuggacauccgcacucacg

SEQ ID NO: 2889071 - RNA, 19 nt, Artificial Sequence
  Description of Artificial Sequence: Synthetic oligonucleotide
ugugucgugguuguuccug

SEQ ID NO: 2889072 - RNA, 19 nt, Artificial Sequence
  Description of Artificial Sequence: Synthetic oligonucleotide
ugucuggacauccgcacuc

SEQ ID NO: 2889073 - RNA, 19 nt, Artificial Sequence
  Description of Artificial Sequence: Synthetic oligonucleotide
ucugcaucagggccaccag

SEQ ID NO: 2889074 - RNA, 19 nt, Artificial Sequence
  Description of Artificial Sequence: Synthetic oligonucleotide
uccccaucuuccuucuucc

SEQ ID NO: 2889075 - RNA, 19 nt, Artificial Sequence
  Description of Artificial Sequence: Synthetic oligonucleotide
gaaugugucgugguuguuc

SEQ ID NO: 2889076 - RNA, 19 nt, Artificial Sequence
  Description of Artificial Sequence: Synthetic oligonucleotide
uggaaccgagaagaugacg

SEQ ID NO: 2889077 - RNA, 19 nt, Artificial Sequence
  Description of Artificial Sequence: Synthetic oligonucleotide
uucugcaucagggccacca

SEQ ID NO: 2889078 - RNA, 19 nt, Artificial Sequence
  Description of Artificial Sequence: Synthetic oligonucleotide
cucgcuuugcucagacccg

SEQ ID NO: 2889079 - RNA, 19 nt, Artificial Sequence
  Description of Artificial Sequence: Synthetic oligonucleotide
aagccuauggugagcagcu

SEQ ID NO: 2889080 - RNA, 19 nt, Artificial Sequence
  Description of Artificial Sequence: Synthetic oligonucleotide
gagaucuuaaacugagggu

SEQ ID NO: 2889081 - RNA, 19 nt, Artificial Sequence
  Description of Artificial Sequence: Synthetic oligonucleotide
agugcaucuggagucaggu

SEQ ID NO: 2889082 - RNA, 19 nt, Artificial Sequence
  Description of Artificial Sequence: Synthetic oligonucleotide
ccucgcuuugcucagaccc

SEQ ID NO: 2889083 - RNA, 19 nt, Artificial Sequence
  Description of Artificial Sequence: Synthetic oligonucleotide
gaagaugacgaagccuaug

SEQ ID NO: 2889084 - RNA, 19 nt, Artificial Sequence
  Description of Artificial Sequence: Synthetic oligonucleotide
aaacugaggguugcuccag

SEQ ID NO: 2889085 - RNA, 19 nt, Artificial Sequence
  Description of Artificial Sequence: Synthetic oligonucleotide
cugaacuccuuuggaaccg

SEQ ID NO: 2889086 - RNA, 19 nt, Artificial Sequence
  Description of Artificial Sequence: Synthetic oligonucleotide
uccuucuuccgaagcaggu

SEQ ID NO: 2889087 - RNA, 19 nt, Artificial Sequence
  Description of Artificial Sequence: Synthetic oligonucleotide
cuuaaacugaggguugcuc

SEQ ID NO: 2889088 - RNA, 19 nt, Artificial Sequence
  Description of Artificial Sequence: Synthetic oligonucleotide
gaacuccccaucuuccuuc

SEQ ID NO: 2889089 - RNA, 19 nt, Artificial Sequence
  Description of Artificial Sequence: Synthetic oligonucleotide
agacccguucuccgggucg

SEQ ID NO: 2889090 - RNA, 19 nt, Artificial Sequence
  Description of Artificial Sequence: Synthetic oligonucleotide
gaccaccucgcuuugcuca

SEQ ID NO: 2889091 - RNA, 19 nt, Artificial Sequence
  Description of Artificial Sequence: Synthetic oligonucleotide
cuuuggaaccgagaagaug

SEQ ID NO: 2889092 - RNA, 19 nt, Artificial Sequence
  Description of Artificial Sequence: Synthetic oligonucleotide
uccgaagcaggugugucug

SEQ ID NO: 2889093 - RNA, 19 nt, Artificial Sequence
  Description of Artificial Sequence: Synthetic oligonucleotide
caucagggccaccaggcag

SEQ ID NO: 2889094 - RNA, 19 nt, Artificial Sequence
  Description of Artificial Sequence: Synthetic oligonucleotide
guucugaacuccuuuggaa

SEQ ID NO: 2889095 - RNA, 19 nt, Artificial Sequence
  Description of Artificial Sequence: Synthetic oligonucleotide
agaugacgaagccuauggu

SEQ ID NO: 2889096 - RNA, 19 nt, Artificial Sequence
  Description of Artificial Sequence: Synthetic oligonucleotide
gcucaugaagucgucauag

SEQ ID NO: 2889097 - RNA, 19 nt, Artificial Sequence
  Description of Artificial Sequence: Synthetic oligonucleotide
cucagacccguucuccggg

SEQ ID NO: 2889098 - RNA, 19 nt, Artificial Sequence
  Description of Artificial Sequence: Synthetic oligonucleotide
ugaagucgucauaggacau

SEQ ID NO: 2889099 - RNA, 19 nt, Artificial Sequence
  Description of Artificial Sequence: Synthetic oligonucleotide
cagcugcccucguagaagg

SEQ ID NO: 2889100 - RNA, 19 nt, Artificial Sequence
  Description of Artificial Sequence: Synthetic oligonucleotide
uagaagguugugugccagc

SEQ ID NO: 2889101 - RNA, 19 nt, Artificial Sequence
  Description of Artificial Sequence: Synthetic oligonucleotide
ggaaccgagaagaugacga

SEQ ID NO: 2889102 - RNA, 19 nt, Artificial Sequence
  Description of Artificial Sequence: Synthetic oligonucleotide
uuccgaagcaggugugucu

SEQ ID NO: 2889103 - RNA, 19 nt, Artificial Sequence
  Description of Artificial Sequence: Synthetic oligonucleotide
ugcuccagaaugugucgug

SEQ ID NO: 2889104 - RNA, 19 nt, Artificial Sequence
  Description of Artificial Sequence: Synthetic oligonucleotide
uguucccggggugacagug

SEQ ID NO: 2889105 - RNA, 19 nt, Artificial Sequence
  Description of Artificial Sequence: Synthetic oligonucleotide
gagagagaucuuaaacuga

SEQ ID NO: 2889106 - RNA, 19 nt, Artificial Sequence
  Description of Artificial Sequence: Synthetic oligonucleotide
ggggugacagugcaucugg

SEQ ID NO: 2889107 - RNA, 19 nt, Artificial Sequence
  Description of Artificial Sequence: Synthetic oligonucleotide
gaagguugugugccagcug

SEQ ID NO: 2889108 - RNA, 19 nt, Artificial Sequence
  Description of Artificial Sequence: Synthetic oligonucleotide
uucuuccgaagcaggugug

SEQ ID NO: 2889109 - RNA, 19 nt, Artificial Sequence
  Description of Artificial Sequence: Synthetic oligonucleotide
agaagguugugugccagcu

SEQ ID NO: 2889110 - RNA, 19 nt, Artificial Sequence
  Description of Artificial Sequence: Synthetic oligonucleotide
cuccuuuggaaccgagaag

SEQ ID NO: 2889111 - RNA, 19 nt, Artificial Sequence
  Description of Artificial Sequence: Synthetic oligonucleotide
gcugcuucuguguucccgg

SEQ ID NO: 2889112 - RNA, 19 nt, Artificial Sequence
  Description of Artificial Sequence: Synthetic oligonucleotide
guagaagguugugugccag

SEQ ID NO: 2889113 - RNA, 19 nt, Artificial Sequence
  Description of Artificial Sequence: Synthetic oligonucleotide
gugaaguugcucaugaagu

SEQ ID NO: 2889114 - RNA, 19 nt, Artificial Sequence
  Description of Artificial Sequence: Synthetic oligonucleotide
uuggaaccgagaagaugac

SEQ ID NO: 2889115 - RNA, 19 nt, Artificial Sequence
  Description of Artificial Sequence: Synthetic oligonucleotide
gaagcaggugugucuggac

SEQ ID NO: 2889116 - RNA, 19 nt, Artificial Sequence
  Description of Artificial Sequence: Synthetic oligonucleotide
ugucacuccaggcuccauu

SEQ ID NO: 2889117 - RNA, 19 nt, Artificial Sequence
  Description of Artificial Sequence: Synthetic oligonucleotide
cugcccucguagaagguug

SEQ ID NO: 2889118 - RNA, 19 nt, Artificial Sequence
  Description of Artificial Sequence: Synthetic oligonucleotide
uccgggagagagaucuuaa

SEQ ID NO: 2889119 - RNA, 19 nt, Artificial Sequence
  Description of Artificial Sequence: Synthetic oligonucleotide
gggagagagaucuuaaacu

SEQ ID NO: 2889120 - RNA, 19 nt, Artificial Sequence
  Description of Artificial Sequence: Synthetic oligonucleotide
accucgcuuugcucagacc

SEQ ID NO: 2889121 - RNA, 19 nt, Artificial Sequence
  Description of Artificial Sequence: Synthetic oligonucleotide
agcugcuucuguguucccg

SEQ ID NO: 2889122 - RNA, 19 nt, Artificial Sequence
  Description of Artificial Sequence: Synthetic oligonucleotide
gccuauggugagcagcugg

SEQ ID NO: 2889123 - RNA, 19 nt, Artificial Sequence
  Description of Artificial Sequence: Synthetic oligonucleotide
ucuuaaacugaggguugcu

SEQ ID NO: 2889124 - RNA, 19 nt, Artificial Sequence
  Description of Artificial Sequence: Synthetic oligonucleotide
cugcaucagggccaccagg

SEQ ID NO: 2889125 - RNA, 19 nt, Artificial Sequence
  Description of Artificial Sequence: Synthetic oligonucleotide
uucccggggugacagugca

SEQ ID NO: 2889126 - RNA, 19 nt, Artificial Sequence
  Description of Artificial Sequence: Synthetic oligonucleotide
agcaggugugucuggacau

SEQ ID NO: 2889127 - RNA, 19 nt, Artificial Sequence
  Description of Artificial Sequence: Synthetic oligonucleotide
agaccaccucgcuuugcuc

SEQ ID NO: 2889128 - RNA, 19 nt, Artificial Sequence
  Description of Artificial Sequence: Synthetic oligonucleotide
aacuccuuuggaaccgaga

SEQ ID NO: 2889129 - RNA, 19 nt, Artificial Sequence
  Description of Artificial Sequence: Synthetic oligonucleotide
cagguacagaccaccucgc

SEQ ID NO: 2889130 - RNA, 19 nt, Artificial Sequence
  Description of Artificial Sequence: Synthetic oligonucleotide
gucgugguuguuccugcag

SEQ ID NO: 2889131 - RNA, 19 nt, Artificial Sequence
  Description of Artificial Sequence: Synthetic oligonucleotide
cucugucacuccaggcucc

SEQ ID NO: 2889132 - RNA, 19 nt, Artificial Sequence
  Description of Artificial Sequence: Synthetic oligonucleotide
uccaguucuucugcaucag

SEQ ID NO: 2889133 - RNA, 19 nt, Artificial Sequence
  Description of Artificial Sequence: Synthetic oligonucleotide
ugcucaugaagucgucaua

SEQ ID NO: 2889134 - RNA, 19 nt, Artificial Sequence
  Description of Artificial Sequence: Synthetic oligonucleotide
guugcagaucuccaggagu

SEQ ID NO: 2889135 - RNA, 19 nt, Artificial Sequence
  Description of Artificial Sequence: Synthetic oligonucleotide
uccagcugcccucguagaa

SEQ ID NO: 2889136 - RNA, 19 nt, Artificial Sequence
  Description of Artificial Sequence: Synthetic oligonucleotide
guugugugccagcugcuuc

SEQ ID NO: 2889137 - RNA, 19 nt, Artificial Sequence
  Description of Artificial Sequence: Synthetic oligonucleotide
ggugugucuggacauccgc

SEQ ID NO: 2889138 - RNA, 19 nt, Artificial Sequence
  Description of Artificial Sequence: Synthetic oligonucleotide
ccucguagaagguugugug

SEQ ID NO: 2889139 - RNA, 19 nt, Artificial Sequence
  Description of Artificial Sequence: Synthetic oligonucleotide
uacagaccaccucgcuuug

SEQ ID NO: 2889140 - RNA, 19 nt, Artificial Sequence
  Description of Artificial Sequence: Synthetic oligonucleotide
gaagucgucauaggacauc

SEQ ID NO: 2889141 - RNA, 19 nt, Artificial Sequence
  Description of Artificial Sequence: Synthetic oligonucleotide
uugcucagacccguucucc

SEQ ID NO: 2889142 - RNA, 19 nt, Artificial Sequence
  Description of Artificial Sequence: Synthetic oligonucleotide
gugacagugcaucuggagu

SEQ ID NO: 2889143 - RNA, 19 nt, Artificial Sequence
  Description of Artificial Sequence: Synthetic oligonucleotide
gaaccgagaagaugacgaa

SEQ ID NO: 2889144 - RNA, 19 nt, Artificial Sequence
  Description of Artificial Sequence: Synthetic oligonucleotide
uucuguguucccgggguga

SEQ ID NO: 2889145 - RNA, 19 nt, Artificial Sequence
  Description of Artificial Sequence: Synthetic oligonucleotide
accaccucgcuuugcucag

SEQ ID NO: 2889146 - RNA, 19 nt, Artificial Sequence
  Description of Artificial Sequence: Synthetic oligonucleotide
caucuuccuucuuccgaag

SEQ ID NO: 2889147 - RNA, 19 nt, Artificial Sequence
  Description of Artificial Sequence: Synthetic oligonucleotide
acgaagccuauggugagca

SEQ ID NO: 2889148 - RNA, 19 nt, Artificial Sequence
  Description of Artificial Sequence: Synthetic oligonucleotide
gucauaggacauccagaac

SEQ ID NO: 2889149 - RNA, 19 nt, Artificial Sequence
  Description of Artificial Sequence: Synthetic oligonucleotide
ccuauggugagcagcuggc

SEQ ID NO: 2889150 - RNA, 19 nt, Artificial Sequence
  Description of Artificial Sequence: Synthetic oligonucleotide
ucuggacauccgcacucac

SEQ ID NO: 2889151 - RNA, 19 nt, Artificial Sequence
  Description of Artificial Sequence: Synthetic oligonucleotide
uccuggagguucugaacuc

SEQ ID NO: 2889152 - RNA, 19 nt, Artificial Sequence
  Description of Artificial Sequence: Synthetic oligonucleotide
cagugcaucuggagucagg

SEQ ID NO: 2889153 - RNA, 19 nt, Artificial Sequence
  Description of Artificial Sequence: Synthetic oligonucleotide
agaacuccccaucuuccuu

SEQ ID NO: 2889154 - RNA, 19 nt, Artificial Sequence
  Description of Artificial Sequence: Synthetic oligonucleotide
caccaggcagguacagacc

SEQ ID NO: 2889155 - RNA, 19 nt, Artificial Sequence
  Description of Artificial Sequence: Synthetic oligonucleotide
gguugcuccagaauguguc

SEQ ID NO: 2889156 - RNA, 19 nt, Artificial Sequence
  Description of Artificial Sequence: Synthetic oligonucleotide
gugucgugguuguuccugc

SEQ ID NO: 2889157 - RNA, 19 nt, Artificial Sequence
  Description of Artificial Sequence: Synthetic oligonucleotide
ggagucagguugcagaucu

SEQ ID NO: 2889158 - RNA, 19 nt, Artificial Sequence
  Description of Artificial Sequence: Synthetic oligonucleotide
ccaccaggcagguacagac

SEQ ID NO: 2889159 - RNA, 19 nt, Artificial Sequence
  Description of Artificial Sequence: Synthetic oligonucleotide
caggugugucuggacaucc

SEQ ID NO: 2889160 - RNA, 19 nt, Artificial Sequence
  Description of Artificial Sequence: Synthetic oligonucleotide
uuguuccugcagccuccgg

SEQ ID NO: 2889161 - RNA, 19 nt, Artificial Sequence
  Description of Artificial Sequence: Synthetic oligonucleotide
ugucgugguuguuccugca

SEQ ID NO: 2889162 - RNA, 19 nt, Artificial Sequence
  Description of Artificial Sequence: Synthetic oligonucleotide
gguucugaacuccuuugga

SEQ ID NO: 2889163 - RNA, 19 nt, Artificial Sequence
  Description of Artificial Sequence: Synthetic oligonucleotide
ugaacuccuuuggaaccga

SEQ ID NO: 2889164 - RNA, 19 nt, Artificial Sequence
  Description of Artificial Sequence: Synthetic oligonucleotide
gacgaagccuauggugagc

SEQ ID NO: 2889165 - RNA, 19 nt, Artificial Sequence
  Description of Artificial Sequence: Synthetic oligonucleotide
acagaccaccucgcuuugc

SEQ ID NO: 2889166 - RNA, 19 nt, Artificial Sequence
  Description of Artificial Sequence: Synthetic oligonucleotide
uugcuccagaaugugucgu

SEQ ID NO: 2889167 - RNA, 19 nt, Artificial Sequence
  Description of Artificial Sequence: Synthetic oligonucleotide
cugcuucuguguucccggg

SEQ ID NO: 2889168 - RNA, 19 nt, Artificial Sequence
  Description of Artificial Sequence: Synthetic oligonucleotide
guacagaccaccucgcuuu

SEQ ID NO: 2889169 - RNA, 19 nt, Artificial Sequence
  Description of Artificial Sequence: Synthetic oligonucleotide
cuucuuccgaagcaggugu

SEQ ID NO: 2889170 - RNA, 19 nt, Artificial Sequence
  Description of Artificial Sequence: Synthetic oligonucleotide
cagaucuccaggaguguga

SEQ ID NO: 2889171 - RNA, 19 nt, Artificial Sequence
  Description of Artificial Sequence: Synthetic oligonucleotide
guuguuccugcagccuccg

SEQ ID NO: 2889172 - RNA, 19 nt, Artificial Sequence
  Description of Artificial Sequence: Synthetic oligonucleotide
agguacagaccaccucgcu

SEQ ID NO: 2889173 - RNA, 19 nt, Artificial Sequence
  Description of Artificial Sequence: Synthetic oligonucleotide
gacagugcaucuggaguca

SEQ ID NO: 2889174 - RNA, 19 nt, Artificial Sequence
  Description of Artificial Sequence: Synthetic oligonucleotide
gaacuccuuuggaaccgag

SEQ ID NO: 2889175 - RNA, 19 nt, Artificial Sequence
  Description of Artificial Sequence: Synthetic oligonucleotide
uccgggucgucgcccuccg

SEQ ID NO: 2889176 - RNA, 19 nt, Artificial Sequence
  Description of Artificial Sequence: Synthetic oligonucleotide
aggguugcuccagaaugug

SEQ ID NO: 2889177 - RNA, 19 nt, Artificial Sequence
  Description of Artificial Sequence: Synthetic oligonucleotide
ucuguguucccggggugac

SEQ ID NO: 2889178 - RNA, 19 nt, Artificial Sequence
  Description of Artificial Sequence: Synthetic oligonucleotide
aguugcucaugaagucguc

SEQ ID NO: 2889179 - RNA, 19 nt, Artificial Sequence
  Description of Artificial Sequence: Synthetic oligonucleotide
ucagacccguucuccgggu

SEQ ID NO: 2889180 - RNA, 19 nt, Artificial Sequence
  Description of Artificial Sequence: Synthetic oligonucleotide
cuucuguguucccggggug

SEQ ID NO: 2889181 - RNA, 19 nt, Artificial Sequence
  Description of Artificial Sequence: Synthetic oligonucleotide
agaucuccaggagugugaa

SEQ ID NO: 2889182 - RNA, 19 nt, Artificial Sequence
  Description of Artificial Sequence: Synthetic oligonucleotide
ugcccucguagaagguugu

SEQ ID NO: 2889183 - RNA, 19 nt, Artificial Sequence
  Description of Artificial Sequence: Synthetic oligonucleotide
cuccaggagugugaaguug

SEQ ID NO: 2889184 - RNA, 19 nt, Artificial Sequence
  Description of Artificial Sequence: Synthetic oligonucleotide
uggagguucugaacuccuu

SEQ ID NO: 2889185 - RNA, 19 nt, Artificial Sequence
  Description of Artificial Sequence: Synthetic oligonucleotide
gcucagacccguucuccgg

SEQ ID NO: 2889186 - RNA, 19 nt, Artificial Sequence
  Description of Artificial Sequence: Synthetic oligonucleotide
gcuccagaaugugucgugg

SEQ ID NO: 2889187 - RNA, 19 nt, Artificial Sequence
  Description of Artificial Sequence: Synthetic oligonucleotide
gucgcccuccgggagagag

SEQ ID NO: 2889188 - RNA, 19 nt, Artificial Sequence
  Description of Artificial Sequence: Synthetic oligonucleotide
cuuccgaagcagguguguc

SEQ ID NO: 2889189 - RNA, 19 nt, Artificial Sequence
  Description of Artificial Sequence: Synthetic oligonucleotide
ucugucacuccaggcucca

SEQ ID NO: 2889190 - RNA, 19 nt, Artificial Sequence
  Description of Artificial Sequence: Synthetic oligonucleotide
ucgcuuugcucagacccgu

SEQ ID NO: 2889191 - RNA, 19 nt, Artificial Sequence
  Description of Artificial Sequence: Synthetic oligonucleotide
uucuccagcugcccucgua

SEQ ID NO: 2889192 - RNA, 19 nt, Artificial Sequence
  Description of Artificial Sequence: Synthetic oligonucleotide
aggugugucuggacauccg

SEQ ID NO: 2889193 - RNA, 19 nt, Artificial Sequence
  Description of Artificial Sequence: Synthetic oligonucleotide
ccagcugcuucuguguucc

SEQ ID NO: 2889194 - RNA, 19 nt, Artificial Sequence
  Description of Artificial Sequence: Synthetic oligonucleotide
ugugugccagcugcuucug

SEQ ID NO: 2889195 - RNA, 19 nt, Artificial Sequence
  Description of Artificial Sequence: Synthetic oligonucleotide
cugggaccgggcaugccuc

SEQ ID NO: 2889196 - RNA, 19 nt, Artificial Sequence
  Description of Artificial Sequence: Synthetic oligonucleotide
aucuggagucagguugcag

SEQ ID NO: 2889197 - RNA, 19 nt, Artificial Sequence
  Description of Artificial Sequence: Synthetic oligonucleotide
uucuccgggucgucgcccu

SEQ ID NO: 2889198 - RNA, 19 nt, Artificial Sequence
  Description of Artificial Sequence: Synthetic oligonucleotide
cagaaugugucgugguugu

SEQ ID NO: 2889199 - RNA, 19 nt, Artificial Sequence
  Description of Artificial Sequence: Synthetic oligonucleotide
gcaucuggagucagguugc

SEQ ID NO: 2889200 - RNA, 19 nt, Artificial Sequence
  Description of Artificial Sequence: Synthetic oligonucleotide
caccucgcuuugcucagac

SEQ ID NO: 2889201 - RNA, 19 nt, Artificial Sequence
  Description of Artificial Sequence: Synthetic oligonucleotide
acagugcaucuggagucag

SEQ ID NO: 2889202 - RNA, 19 nt, Artificial Sequence
  Description of Artificial Sequence: Synthetic oligonucleotide
ccgagaagaugacgaagcc

SEQ ID NO: 2889203 - RNA, 19 nt, Artificial Sequence
  Description of Artificial Sequence: Synthetic oligonucleotide
uccccugggaccgggcaug

SEQ ID NO: 2889204 - RNA, 19 nt, Artificial Sequence
  Description of Artificial Sequence: Synthetic oligonucleotide
gcucugucacuccaggcuc

SEQ ID NO: 2889205 - RNA, 19 nt, Artificial Sequence
  Description of Artificial Sequence: Synthetic oligonucleotide
gcuggcuccccugggaccg

SEQ ID NO: 2889206 - RNA, 19 nt, Artificial Sequence
  Description of Artificial Sequence: Synthetic oligonucleotide
ugggaccgggcaugccucc

SEQ ID NO: 2889207 - RNA, 19 nt, Artificial Sequence
  Description of Artificial Sequence: Synthetic oligonucleotide
ccaguucuucugcaucagg

SEQ ID NO: 2889208 - RNA, 19 nt, Artificial Sequence
  Description of Artificial Sequence: Synthetic oligonucleotide
cagccuccggccgugcucc

SEQ ID NO: 2889209 - RNA, 19 nt, Artificial Sequence
  Description of Artificial Sequence: Synthetic oligonucleotide
ucgucgcccuccgggagag

SEQ ID NO: 2889210 - RNA, 19 nt, Artificial Sequence
  Description of Artificial Sequence: Synthetic oligonucleotide
cgugguuguuccugcagcc

SEQ ID NO: 2889211 - RNA, 19 nt, Artificial Sequence
  Description of Artificial Sequence: Synthetic oligonucleotide
cgucauaggacauccagaa

SEQ ID NO: 2889212 - RNA, 19 nt, Artificial Sequence
  Description of Artificial Sequence: Synthetic oligonucleotide
cucacgucaucccacuccu

SEQ ID NO: 2889213 - RNA, 19 nt, Artificial Sequence
  Description of Artificial Sequence: Synthetic oligonucleotide
gaggguugcuccagaaugu

SEQ ID NO: 2889214 - RNA, 19 nt, Artificial Sequence
  Description of Artificial Sequence: Synthetic oligonucleotide
uggagucagguugcagauc

SEQ ID NO: 2889215 - RNA, 19 nt, Artificial Sequence
  Description of Artificial Sequence: Synthetic oligonucleotide
caggagugugaaguugcuc

SEQ ID NO: 2889216 - RNA, 19 nt, Artificial Sequence
  Description of Artificial Sequence: Synthetic oligonucleotide
augugucgugguuguuccu

SEQ ID NO: 2889217 - RNA, 19 nt, Artificial Sequence
  Description of Artificial Sequence: Synthetic oligonucleotide
agaagaugacgaagccuau

SEQ ID NO: 2889218 - RNA, 19 nt, Artificial Sequence
  Description of Artificial Sequence: Synthetic oligonucleotide
gcuuugcucagacccguuc

SEQ ID NO: 2889219 - RNA, 19 nt, Artificial Sequence
  Description of Artificial Sequence: Synthetic oligonucleotide
ucgcccuccgggagagaga

SEQ ID NO: 2889220 - RNA, 19 nt, Artificial Sequence
  Description of Artificial Sequence: Synthetic oligonucleotide
gugugaaguugcucaugaa

SEQ ID NO: 2889221 - RNA, 19 nt, Artificial Sequence
  Description of Artificial Sequence: Synthetic oligonucleotide
ccuggagguucugaacucc

SEQ ID NO: 2889222 - RNA, 19 nt, Artificial Sequence
  Description of Artificial Sequence: Synthetic oligonucleotide
guucccggggugacagugc

SEQ ID NO: 2889223 - RNA, 19 nt, Artificial Sequence
  Description of Artificial Sequence: Synthetic oligonucleotide
ggcagguacagaccaccuc

SEQ ID NO: 2889224 - RNA, 19 nt, Artificial Sequence
  Description of Artificial Sequence: Synthetic oligonucleotide
guucuccgggucgucgccc

SEQ ID NO: 2889225 - RNA, 19 nt, Artificial Sequence
  Description of Artificial Sequence: Synthetic oligonucleotide
ccaucuuccuucuuccgaa

SEQ ID NO: 2889226 - RNA, 19 nt, Artificial Sequence
  Description of Artificial Sequence: Synthetic oligonucleotide
cuggagucagguugcagau

SEQ ID NO: 2889227 - RNA, 19 nt, Artificial Sequence
  Description of Artificial Sequence: Synthetic oligonucleotide
ccuucuuccgaagcaggug

SEQ ID NO: 2889228 - RNA, 19 nt, Artificial Sequence
  Description of Artificial Sequence: Synthetic oligonucleotide
cacucacgucaucccacuc

SEQ ID NO: 2889229 - RNA, 19 nt, Artificial Sequence
  Description of Artificial Sequence: Synthetic oligonucleotide
ccagcugcccucguagaag

SEQ ID NO: 2889230 - RNA, 19 nt, Artificial Sequence
  Description of Artificial Sequence: Synthetic oligonucleotide
cuccgggucgucgcccucc

SEQ ID NO: 2889231 - RNA, 19 nt, Artificial Sequence
  Description of Artificial Sequence: Synthetic oligonucleotide
acauccgcacucacgucau

SEQ ID NO: 2889232 - RNA, 19 nt, Artificial Sequence
  Description of Artificial Sequence: Synthetic oligonucleotide
gucuggacauccgcacuca

SEQ ID NO: 2889233 - RNA, 19 nt, Artificial Sequence
  Description of Artificial Sequence: Synthetic oligonucleotide
gucgucgcccuccgggaga

SEQ ID NO: 2889234 - RNA, 19 nt, Artificial Sequence
  Description of Artificial Sequence: Synthetic oligonucleotide
aggcagguacagaccaccu

SEQ ID NO: 2889235 - RNA, 19 nt, Artificial Sequence
  Description of Artificial Sequence: Synthetic oligonucleotide
ggucgucgcccuccgggag

SEQ ID NO: 2889236 - RNA, 19 nt, Artificial Sequence
  Description of Artificial Sequence: Synthetic oligonucleotide
cagaccaccucgcuuugcu

SEQ ID NO: 2889237 - RNA, 19 nt, Artificial Sequence
  Description of Artificial Sequence: Synthetic oligonucleotide
accgggcaugccuccaguu

SEQ ID NO: 2889238 - RNA, 19 nt, Artificial Sequence
  Description of Artificial Sequence: Synthetic oligonucleotide
gugucuggacauccgcacu

SEQ ID NO: 2889239 - RNA, 19 nt, Artificial Sequence
  Description of Artificial Sequence: Synthetic oligonucleotide
cuggagguucugaacuccu

SEQ ID NO: 2889240 - RNA, 19 nt, Artificial Sequence
  Description of Artificial Sequence: Synthetic oligonucleotide
agucgucauaggacaucca

SEQ ID NO: 2889241 - RNA, 19 nt, Artificial Sequence
  Description of Artificial Sequence: Synthetic oligonucleotide
gguacagaccaccucgcuu

SEQ ID NO: 2889242 - RNA, 19 nt, Artificial Sequence
  Description of Artificial Sequence: Synthetic oligonucleotide
ggaccgggcaugccuccag

SEQ ID NO: 2889243 - RNA, 19 nt, Artificial Sequence
  Description of Artificial Sequence: Synthetic oligonucleotide
caggcuccauuccacucaa

SEQ ID NO: 2889244 - RNA, 19 nt, Artificial Sequence
  Description of Artificial Sequence: Synthetic oligonucleotide
cagacccguucuccggguc

SEQ ID NO: 2889245 - RNA, 19 nt, Artificial Sequence
  Description of Artificial Sequence: Synthetic oligonucleotide
ccaggcuccauuccacuca

SEQ ID NO: 2889246 - RNA, 19 nt, Artificial Sequence
  Description of Artificial Sequence: Synthetic oligonucleotide
cuccagcugcccucguaga

SEQ ID NO: 2889247 - RNA, 19 nt, Artificial Sequence
  Description of Artificial Sequence: Synthetic oligonucleotide
agccuccggccgugcuccc

SEQ ID NO: 2889248 - RNA, 19 nt, Artificial Sequence
  Description of Artificial Sequence: Synthetic oligonucleotide
ccccaucuuccuucuuccg

SEQ ID NO: 2889249 - RNA, 19 nt, Artificial Sequence
  Description of Artificial Sequence: Synthetic oligonucleotide
agccuauggugagcagcug

SEQ ID NO: 2889250 - RNA, 19 nt, Artificial Sequence
  Description of Artificial Sequence: Synthetic oligonucleotide
agguugugugccagcugcu

SEQ ID NO: 2889251 - RNA, 19 nt, Artificial Sequence
  Description of Artificial Sequence: Synthetic oligonucleotide
ggagguucugaacuccuuu

SEQ ID NO: 2889252 - RNA, 19 nt, Artificial Sequence
  Description of Artificial Sequence: Synthetic oligonucleotide
uggcuccccugggaccggg

SEQ ID NO: 2889253 - RNA, 19 nt, Artificial Sequence
  Description of Artificial Sequence: Synthetic oligonucleotide
ccguucuccgggucgucgc

SEQ ID NO: 2889254 - RNA, 19 nt, Artificial Sequence
  Description of Artificial Sequence: Synthetic oligonucleotide
gagucagguugcagaucuc

SEQ ID NO: 2889255 - RNA, 19 nt, Artificial Sequence
  Description of Artificial Sequence: Synthetic oligonucleotide
cgggucgucgcccuccggg

SEQ ID NO: 2889256 - RNA, 19 nt, Artificial Sequence
  Description of Artificial Sequence: Synthetic oligonucleotide
cgcacucacgucaucccac

SEQ ID NO: 2889257 - RNA, 19 nt, Artificial Sequence
  Description of Artificial Sequence: Synthetic oligonucleotide
agaaugugucgugguuguu

SEQ ID NO: 2889258 - RNA, 19 nt, Artificial Sequence
  Description of Artificial Sequence: Synthetic oligonucleotide
ccgaagcaggugugucugg

SEQ ID NO: 2889259 - RNA, 19 nt, Artificial Sequence
  Description of Artificial Sequence: Synthetic oligonucleotide
ucccggggugacagugcau

SEQ ID NO: 2889260 - RNA, 19 nt, Artificial Sequence
  Description of Artificial Sequence: Synthetic oligonucleotide
ucuccgggucgucgcccuc

SEQ ID NO: 2889261 - RNA, 19 nt, Artificial Sequence
  Description of Artificial Sequence: Synthetic oligonucleotide
ggagugugaaguugcucau

SEQ ID NO: 2889262 - RNA, 19 nt, Artificial Sequence
  Description of Artificial Sequence: Synthetic oligonucleotide
cagcugcuucuguguuccc

SEQ ID NO: 2889263 - RNA, 19 nt, Artificial Sequence
  Description of Artificial Sequence: Synthetic oligonucleotide
cccggggugacagugcauc

SEQ ID NO: 2889264 - RNA, 19 nt, Artificial Sequence
  Description of Artificial Sequence: Synthetic oligonucleotide
cuccgggagagagaucuua

SEQ ID NO: 2889265 - RNA, 19 nt, Artificial Sequence
  Description of Artificial Sequence: Synthetic oligonucleotide
ggacauccgcacucacguc

SEQ ID NO: 2889266 - RNA, 19 nt, Artificial Sequence
  Description of Artificial Sequence: Synthetic oligonucleotide
ccaggcagguacagaccac

SEQ ID NO: 2889267 - RNA, 19 nt, Artificial Sequence
  Description of Artificial Sequence: Synthetic oligonucleotide
cugaggguugcuccagaau

SEQ ID NO: 2889268 - RNA, 19 nt, Artificial Sequence
  Description of Artificial Sequence: Synthetic oligonucleotide
ccgggcaugccuccaguuc

SEQ ID NO: 2889269 - RNA, 19 nt, Artificial Sequence
  Description of Artificial Sequence: Synthetic oligonucleotide
cuauggugagcagcuggcu

SEQ ID NO: 2889270 - RNA, 19 nt, Artificial Sequence
  Description of Artificial Sequence: Synthetic oligonucleotide
cuccaggcuccauuccacu

SEQ ID NO: 2889271 - RNA, 19 nt, Artificial Sequence
  Description of Artificial Sequence: Synthetic oligonucleotide
gggucgucgcccuccggga

SEQ ID NO: 2889272 - RNA, 19 nt, Artificial Sequence
  Description of Artificial Sequence: Synthetic oligonucleotide
gaccgggcaugccuccagu

SEQ ID NO: 2889273 - RNA, 19 nt, Artificial Sequence
  Description of Artificial Sequence: Synthetic oligonucleotide
caucuggagucagguugca

SEQ ID NO: 2889274 - RNA, 19 nt, Artificial Sequence
  Description of Artificial Sequence: Synthetic oligonucleotide
cccguucuccgggucgucg

SEQ ID NO: 2889275 - RNA, 19 nt, Artificial Sequence
  Description of Artificial Sequence: Synthetic oligonucleotide
acccguucuccgggucguc

SEQ ID NO: 2889276 - RNA, 19 nt, Artificial Sequence
  Description of Artificial Sequence: Synthetic oligonucleotide
cguagaagguugugugcca

SEQ ID NO: 2889277 - RNA, 19 nt, Artificial Sequence
  Description of Artificial Sequence: Synthetic oligonucleotide
gcaggugugucuggacauc

SEQ ID NO: 2889278 - RNA, 19 nt, Artificial Sequence
  Description of Artificial Sequence: Synthetic oligonucleotide
acuccccaucuuccuucuu

SEQ ID NO: 2889279 - RNA, 19 nt, Artificial Sequence
  Description of Artificial Sequence: Synthetic oligonucleotide
gacccguucuccgggucgu

SEQ ID NO: 2889280 - RNA, 19 nt, Artificial Sequence
  Description of Artificial Sequence: Synthetic oligonucleotide
agcugcccucguagaaggu

SEQ ID NO: 2889281 - RNA, 19 nt, Artificial Sequence
  Description of Artificial Sequence: Synthetic oligonucleotide
cccuccgggagagagaucu

SEQ ID NO: 2889282 - RNA, 19 nt, Artificial Sequence
  Description of Artificial Sequence: Synthetic oligonucleotide
ggccaccaggcagguacag

SEQ ID NO: 2889283 - RNA, 19 nt, Artificial Sequence
  Description of Artificial Sequence: Synthetic oligonucleotide
cguucuccgggucgucgcc

SEQ ID NO: 2889284 - RNA, 19 nt, Artificial Sequence
  Description of Artificial Sequence: Synthetic oligonucleotide
cuggcuccccugggaccgg

SEQ ID NO: 2889285 - RNA, 19 nt, Artificial Sequence
  Description of Artificial Sequence: Synthetic oligonucleotide
gcuccccugggaccgggca

SEQ ID NO: 2889286 - RNA, 19 nt, Artificial Sequence
  Description of Artificial Sequence: Synthetic oligonucleotide
cuucugcaucagggccacc

SEQ ID NO: 2889287 - RNA, 19 nt, Artificial Sequence
  Description of Artificial Sequence: Synthetic oligonucleotide
cuguguucccggggugaca

SEQ ID NO: 2889288 - RNA, 19 nt, Artificial Sequence
  Description of Artificial Sequence: Synthetic oligonucleotide
gcacucacgucaucccacu

SEQ ID NO: 2889289 - RNA, 19 nt, Artificial Sequence
  Description of Artificial Sequence: Synthetic oligonucleotide
ccgggagagagaucuuaaa

SEQ ID NO: 2889290 - RNA, 19 nt, Artificial Sequence
  Description of Artificial Sequence: Synthetic oligonucleotide
gcaugccuccaguucuucu

SEQ ID NO: 2889291 - RNA, 19 nt, Artificial Sequence
  Description of Artificial Sequence: Synthetic oligonucleotide
gugcaucuggagucagguu

SEQ ID NO: 2889292 - RNA, 19 nt, Artificial Sequence
  Description of Artificial Sequence: Synthetic oligonucleotide
ccugggaccgggcaugccu

SEQ ID NO: 2889293 - RNA, 19 nt, Artificial Sequence
  Description of Artificial Sequence: Synthetic oligonucleotide
ccacuccuuggcucuguca

SEQ ID NO: 2889294 - RNA, 19 nt, Artificial Sequence
  Description of Artificial Sequence: Synthetic oligonucleotide
gggugacagugcaucugga

SEQ ID NO: 2889295 - RNA, 19 nt, Artificial Sequence
  Description of Artificial Sequence: Synthetic oligonucleotide
ggcaugccuccaguucuuc

SEQ ID NO: 2889296 - RNA, 19 nt, Artificial Sequence
  Description of Artificial Sequence: Synthetic oligonucleotide
ccgcacucacgucauccca

SEQ ID NO: 2889297 - RNA, 19 nt, Artificial Sequence
  Description of Artificial Sequence: Synthetic oligonucleotide
gcccucguagaagguugug

SEQ ID NO: 2889298 - RNA, 19 nt, Artificial Sequence
  Description of Artificial Sequence: Synthetic oligonucleotide
ggugagcagcuggcucccc

SEQ ID NO: 2889299 - RNA, 19 nt, Artificial Sequence
  Description of Artificial Sequence: Synthetic oligonucleotide
ggguugcuccagaaugugu

SEQ ID NO: 2889300 - RNA, 19 nt, Artificial Sequence
  Description of Artificial Sequence: Synthetic oligonucleotide
cugcagccuccggccgugc

SEQ ID NO: 2889301 - RNA, 19 nt, Artificial Sequence
  Description of Artificial Sequence: Synthetic oligonucleotide
cggggugacagugcaucug

SEQ ID NO: 2889302 - RNA, 19 nt, Artificial Sequence
  Description of Artificial Sequence: Synthetic oligonucleotide
cgaagcaggugugucugga

SEQ ID NO: 2889303 - RNA, 19 nt, Artificial Sequence
  Description of Artificial Sequence: Synthetic oligonucleotide
cccacuccuuggcucuguc

SEQ ID NO: 2889304 - RNA, 19 nt, Artificial Sequence
  Description of Artificial Sequence: Synthetic oligonucleotide
ccaggagugugaaguugcu

SEQ ID NO: 2889305 - RNA, 19 nt, Artificial Sequence
  Description of Artificial Sequence: Synthetic oligonucleotide
gccuccaguucuucugcau

SEQ ID NO: 2889306 - RNA, 19 nt, Artificial Sequence
  Description of Artificial Sequence: Synthetic oligonucleotide
ccuuuggaaccgagaagau

SEQ ID NO: 2889307 - RNA, 19 nt, Artificial Sequence
  Description of Artificial Sequence: Synthetic oligonucleotide
gguugugugccagcugcuu

SEQ ID NO: 2889308 - RNA, 19 nt, Artificial Sequence
  Description of Artificial Sequence: Synthetic oligonucleotide
cccucguagaagguugugu

SEQ ID NO: 2889309 - RNA, 19 nt, Artificial Sequence
  Description of Artificial Sequence: Synthetic oligonucleotide
cuccccugggaccgggcau

SEQ ID NO: 2889310 - RNA, 19 nt, Artificial Sequence
  Description of Artificial Sequence: Synthetic oligonucleotide
cgggcaugccuccaguucu

SEQ ID NO: 2889311 - RNA, 19 nt, Artificial Sequence
  Description of Artificial Sequence: Synthetic oligonucleotide
gcugcccucguagaagguu

SEQ ID NO: 2889312 - RNA, 19 nt, Artificial Sequence
  Description of Artificial Sequence: Synthetic oligonucleotide
gggccaccaggcagguaca

SEQ ID NO: 2889313 - RNA, 19 nt, Artificial Sequence
  Description of Artificial Sequence: Synthetic oligonucleotide
gggaccgggcaugccucca

SEQ ID NO: 2889314 - RNA, 19 nt, Artificial Sequence
  Description of Artificial Sequence: Synthetic oligonucleotide
ggcuccccugggaccgggc

SEQ ID NO: 2889315 - RNA, 19 nt, Artificial Sequence
  Description of Artificial Sequence: Synthetic oligonucleotide
gccuccggccgugcucccc

SEQ ID NO: 2889316 - RNA, 19 nt, Artificial Sequence
  Description of Artificial Sequence: Synthetic oligonucleotide
cuucuccagcugcccucgu

SEQ ID NO: 2889317 - RNA, 19 nt, Artificial Sequence
  Description of Artificial Sequence: Synthetic oligonucleotide
ccccugggaccgggcaugc

SEQ ID NO: 2889318 - RNA, 19 nt, Artificial Sequence
  Description of Artificial Sequence: Synthetic oligonucleotide
ccgggucgucgcccuccgg

SEQ ID NO: 2889319 - RNA, 19 nt, Artificial Sequence
  Description of Artificial Sequence: Synthetic oligonucleotide
ccggggugacagugcaucu

SEQ ID NO: 2889320 - RNA, 19 nt, Artificial Sequence
  Description of Artificial Sequence: Synthetic oligonucleotide
cccugggaccgggcaugcc

SEQ ID NO: 2889321 - RNA, 19 nt, Artificial Sequence
  Description of Artificial Sequence: Synthetic oligonucleotide
cugucacuccaggcuccau

SEQ ID NO: 2889322 - RNA, 19 nt, Artificial Sequence
  Description of Artificial Sequence: Synthetic oligonucleotide
gggcaugccuccaguucuu

SEQ ID NO: 2889323 - RNA, 19 nt, Artificial Sequence
  Description of Artificial Sequence: Synthetic oligonucleotide
cagggccaccaggcaggua

SEQ ID NO: 2889324 - RNA, 19 nt, Artificial Sequence
  Description of Artificial Sequence: Synthetic oligonucleotide
cgcccuccgggagagagau

SEQ ID NO: 2889325 - RNA, 19 nt, Artificial Sequence
  Description of Artificial Sequence: Synthetic oligonucleotide
gcccuccgggagagagauc

SEQ ID NO: 2889326 - RNA, 19 nt, Artificial Sequence
  Description of Artificial Sequence: Synthetic oligonucleotide
ccuccgggagagagaucuu

SEQ ID NO: 2889327 - RNA, 19 nt, Artificial Sequence
  Description of Artificial Sequence: Synthetic oligonucleotide
cgcuuugcucagacccguu

SEQ ID NO: 2889328 - RNA, 19 nt, Artificial Sequence
  Description of Artificial Sequence: Synthetic oligonucleotide
cgucgcccuccgggagaga

SEQ ID NO: 2889329 - RNA, 19 nt, Artificial Sequence
  Description of Artificial Sequence: Synthetic oligonucleotide
uggguuuuaaucaucauca

SEQ ID NO: 2889330 - RNA, 19 nt, Artificial Sequence
  Description of Artificial Sequence: Synthetic oligonucleotide
uuaaucaucaucagcaccu

SEQ ID NO: 2889331 - RNA, 19 nt, Artificial Sequence
  Description of Artificial Sequence: Synthetic oligonucleotide
uuuaaucaucaucagcacc

SEQ ID NO: 2889332 - RNA, 19 nt, Artificial Sequence
  Description of Artificial Sequence: Synthetic oligonucleotide
guuuuaaucaucaucagca

SEQ ID NO: 2889333 - RNA, 19 nt, Artificial Sequence
  Description of Artificial Sequence: Synthetic oligonucleotide
aacgaacucugucagagca

SEQ ID NO: 2889334 - RNA, 19 nt, Artificial Sequence
  Description of Artificial Sequence: Synthetic oligonucleotide
aagccauugacagccaggc

SEQ ID NO: 2889335 - RNA, 19 nt, Artificial Sequence
  Description of Artificial Sequence: Synthetic oligonucleotide
uugcagaagccauugacag

SEQ ID NO: 2889336 - RNA, 19 nt, Artificial Sequence
  Description of Artificial Sequence: Synthetic oligonucleotide
ucuaccacggcccuggcga

SEQ ID NO: 2889337 - RNA, 19 nt, Artificial Sequence
  Description of Artificial Sequence: Synthetic oligonucleotide
aaucaccucagcaacuucg

SEQ ID NO: 2889338 - RNA, 19 nt, Artificial Sequence
  Description of Artificial Sequence: Synthetic oligonucleotide
aaggcaaucaccucagcaa

SEQ ID NO: 2889339 - RNA, 19 nt, Artificial Sequence
  Description of Artificial Sequence: Synthetic oligonucleotide
uuccauucguagauggagg

SEQ ID NO: 2889340 - RNA, 19 nt, Artificial Sequence
  Description of Artificial Sequence: Synthetic oligonucleotide
uuuccauucguagauggag

SEQ ID NO: 2889341 - RNA, 19 nt, Artificial Sequence
  Description of Artificial Sequence: Synthetic oligonucleotide
gaaucugaaacugacucug

SEQ ID NO: 2889342 - RNA, 19 nt, Artificial Sequence
  Description of Artificial Sequence: Synthetic oligonucleotide
uucguaagggugcacagac

SEQ ID NO: 2889343 - RNA, 19 nt, Artificial Sequence
  Description of Artificial Sequence: Synthetic oligonucleotide
uuucccgugcuccacaggc

SEQ ID NO: 2889344 - RNA, 19 nt, Artificial Sequence
  Description of Artificial Sequence: Synthetic oligonucleotide
cagaaucugaaacugacuc

SEQ ID NO: 2889345 - RNA, 19 nt, Artificial Sequence
  Description of Artificial Sequence: Synthetic oligonucleotide
gaucuuuccuuuccauucg

SEQ ID NO: 2889346 - RNA, 19 nt, Artificial Sequence
  Description of Artificial Sequence: Synthetic oligonucleotide
uucucguugggacaaguga

SEQ ID NO: 2889347 - RNA, 19 nt, Artificial Sequence
  Description of Artificial Sequence: Synthetic oligonucleotide
agaaacugacccugggacg

SEQ ID NO: 2889348 - RNA, 19 nt, Artificial Sequence
  Description of Artificial Sequence: Synthetic oligonucleotide
cuuuccuuuccauucguag

SEQ ID NO: 2889349 - RNA, 19 nt, Artificial Sequence
  Description of Artificial Sequence: Synthetic oligonucleotide
ugcgggacgagguugacgc

SEQ ID NO: 2889350 - RNA, 19 nt, Artificial Sequence
  Description of Artificial Sequence: Synthetic oligonucleotide
ucguagauggaggagaucu

SEQ ID NO: 2889351 - RNA, 19 nt, Artificial Sequence
  Description of Artificial Sequence: Synthetic oligonucleotide
uagauggaggagaucugcg

SEQ ID NO: 2889352 - RNA, 19 nt, Artificial Sequence
  Description of Artificial Sequence: Synthetic oligonucleotide
ugacucuguaaccuggcgc

SEQ ID NO: 2889353 - RNA, 19 nt, Artificial Sequence
  Description of Artificial Sequence: Synthetic oligonucleotide
uuuccuuuccauucguaga

SEQ ID NO: 2889354 - RNA, 19 nt, Artificial Sequence
  Description of Artificial Sequence: Synthetic oligonucleotide
aaccuggcgcacccaaugc

SEQ ID NO: 2889355 - RNA, 19 nt, Artificial Sequence
  Description of Artificial Sequence: Synthetic oligonucleotide
ucucguugggacaagugac

SEQ ID NO: 2889356 - RNA, 19 nt, Artificial Sequence
  Description of Artificial Sequence: Synthetic oligonucleotide
aggcaaucaccucagcaac

SEQ ID NO: 2889357 - RNA, 19 nt, Artificial Sequence
  Description of Artificial Sequence: Synthetic oligonucleotide
agcaacuucguaagggugc

SEQ ID NO: 2889358 - RNA, 19 nt, Artificial Sequence
  Description of Artificial Sequence: Synthetic oligonucleotide
aggccgcagaaacugaccc

SEQ ID NO: 2889359 - RNA, 19 nt, Artificial Sequence
  Description of Artificial Sequence: Synthetic oligonucleotide
agauggaggagaucugcgg

SEQ ID NO: 2889360 - RNA, 19 nt, Artificial Sequence
  Description of Artificial Sequence: Synthetic oligonucleotide
ucugaaacugacucuguaa

SEQ ID NO: 2889361 - RNA, 19 nt, Artificial Sequence
  Description of Artificial Sequence: Synthetic oligonucleotide
ugacgaaggccgcagaaac

SEQ ID NO: 2889362 - RNA, 19 nt, Artificial Sequence
  Description of Artificial Sequence: Synthetic oligonucleotide
acccaaugcagguaugggg

SEQ ID NO: 2889363 - RNA, 19 nt, Artificial Sequence
  Description of Artificial Sequence: Synthetic oligonucleotide
acgagguugacgcaggcug

SEQ ID NO: 2889364 - RNA, 19 nt, Artificial Sequence
  Description of Artificial Sequence: Synthetic oligonucleotide
accucagcaacuucguaag

SEQ ID NO: 2889365 - RNA, 19 nt, Artificial Sequence
  Description of Artificial Sequence: Synthetic oligonucleotide
guugggacaagugacgaag

SEQ ID NO: 2889366 - RNA, 19 nt, Artificial Sequence
  Description of Artificial Sequence: Synthetic oligonucleotide
agaaucugaaacugacucu

SEQ ID NO: 2889367 - RNA, 19 nt, Artificial Sequence
  Description of Artificial Sequence: Synthetic oligonucleotide
ucagcaacuucguaagggu

SEQ ID NO: 2889368 - RNA, 19 nt, Artificial Sequence
  Description of Artificial Sequence: Synthetic oligonucleotide
aucaucagcaccucacugu

SEQ ID NO: 2889369 - RNA, 19 nt, Artificial Sequence
  Description of Artificial Sequence: Synthetic oligonucleotide
uugacagccaggcccgggg

SEQ ID NO: 2889370 - RNA, 19 nt, Artificial Sequence
  Description of Artificial Sequence: Synthetic oligonucleotide
agaccgaacgaacucuguc

SEQ ID NO: 2889371 - RNA, 19 nt, Artificial Sequence
  Description of Artificial Sequence: Synthetic oligonucleotide
ucuguaaccuggcgcaccc

SEQ ID NO: 2889372 - RNA, 19 nt, Artificial Sequence
  Description of Artificial Sequence: Synthetic oligonucleotide
cucagcaacuucguaaggg

SEQ ID NO: 2889373 - RNA, 19 nt, Artificial Sequence
  Description of Artificial Sequence: Synthetic oligonucleotide
gacucuguaaccuggcgca

SEQ ID NO: 2889374 - RNA, 19 nt, Artificial Sequence
  Description of Artificial Sequence: Synthetic oligonucleotide
cuggguuuuaaucaucauc

SEQ ID NO: 2889375 - RNA, 19 nt, Artificial Sequence
  Description of Artificial Sequence: Synthetic oligonucleotide
gguuuuaaucaucaucagc

SEQ ID NO: 2889376 - RNA, 19 nt, Artificial Sequence
  Description of Artificial Sequence: Synthetic oligonucleotide
ggacaagugacgaaggccg

SEQ ID NO: 2889377 - RNA, 19 nt, Artificial Sequence
  Description of Artificial Sequence: Synthetic oligonucleotide
aacugacucuguaaccugg

SEQ ID NO: 2889378 - RNA, 19 nt, Artificial Sequence
  Description of Artificial Sequence: Synthetic oligonucleotide
ugcacagaccgaacgaacu

SEQ ID NO: 2889379 - RNA, 19 nt, Artificial Sequence
  Description of Artificial Sequence: Synthetic oligonucleotide
uucucuaccacggcccugg

SEQ ID NO: 2889380 - RNA, 19 nt, Artificial Sequence
  Description of Artificial Sequence: Synthetic oligonucleotide
uccucgaucuuuccuuucc

SEQ ID NO: 2889381 - RNA, 19 nt, Artificial Sequence
  Description of Artificial Sequence: Synthetic oligonucleotide
uaaccuggcgcacccaaug

SEQ ID NO: 2889382 - RNA, 19 nt, Artificial Sequence
  Description of Artificial Sequence: Synthetic oligonucleotide
ugucagagcagggaccagg

SEQ ID NO: 2889383 - RNA, 19 nt, Artificial Sequence
  Description of Artificial Sequence: Synthetic oligonucleotide
cucguugggacaagugacg

SEQ ID NO: 2889384 - RNA, 19 nt, Artificial Sequence
  Description of Artificial Sequence: Synthetic oligonucleotide
accgaacgaacucugucag

SEQ ID NO: 2889385 - RNA, 19 nt, Artificial Sequence
  Description of Artificial Sequence: Synthetic oligonucleotide
uuucucguugggacaagug

SEQ ID NO: 2889386 - RNA, 19 nt, Artificial Sequence
  Description of Artificial Sequence: Synthetic oligonucleotide
ucaucagcaccucacuguc

SEQ ID NO: 2889387 - RNA, 19 nt, Artificial Sequence
  Description of Artificial Sequence: Synthetic oligonucleotide
uccauucguagauggagga

SEQ ID NO: 2889388 - RNA, 19 nt, Artificial Sequence
  Description of Artificial Sequence: Synthetic oligonucleotide
gccauugacagccaggccc

SEQ ID NO: 2889389 - RNA, 19 nt, Artificial Sequence
  Description of Artificial Sequence: Synthetic oligonucleotide
aaggcgggaagccgccggc

SEQ ID NO: 2889390 - RNA, 19 nt, Artificial Sequence
  Description of Artificial Sequence: Synthetic oligonucleotide
aaucaucaucagcaccuca

SEQ ID NO: 2889391 - RNA, 19 nt, Artificial Sequence
  Description of Artificial Sequence: Synthetic oligonucleotide
cuugcagaagccauugaca

SEQ ID NO: 2889392 - RNA, 19 nt, Artificial Sequence
  Description of Artificial Sequence: Synthetic oligonucleotide
aacuucguaagggugcaca

SEQ ID NO: 2889393 - RNA, 19 nt, Artificial Sequence
  Description of Artificial Sequence: Synthetic oligonucleotide
gagcucuggguuuuaauca

SEQ ID NO: 2889394 - RNA, 19 nt, Artificial Sequence
  Description of Artificial Sequence: Synthetic oligonucleotide
agggugcacagaccgaacg

SEQ ID NO: 2889395 - RNA, 19 nt, Artificial Sequence
  Description of Artificial Sequence: Synthetic oligonucleotide
ucaucaucagcaccucacu

SEQ ID NO: 2889396 - RNA, 19 nt, Artificial Sequence
  Description of Artificial Sequence: Synthetic oligonucleotide
ucuuccucgaucuuuccuu

SEQ ID NO: 2889397 - RNA, 19 nt, Artificial Sequence
  Description of Artificial Sequence: Synthetic oligonucleotide
acuucguaagggugcacag

SEQ ID NO: 2889398 - RNA, 19 nt, Artificial Sequence
  Description of Artificial Sequence: Synthetic oligonucleotide
aaggccgcagaaacugacc

SEQ ID NO: 2889399 - RNA, 19 nt, Artificial Sequence
  Description of Artificial Sequence: Synthetic oligonucleotide
gcagaagccauugacagcc

SEQ ID NO: 2889400 - RNA, 19 nt, Artificial Sequence
  Description of Artificial Sequence: Synthetic oligonucleotide
caccucacugucuuccucg

SEQ ID NO: 2889401 - RNA, 19 nt, Artificial Sequence
  Description of Artificial Sequence: Synthetic oligonucleotide
agcgcgggcauccacagca

SEQ ID NO: 2889402 - RNA, 19 nt, Artificial Sequence
  Description of Artificial Sequence: Synthetic oligonucleotide
ugggacaagugacgaaggc

SEQ ID NO: 2889403 - RNA, 19 nt, Artificial Sequence
  Description of Artificial Sequence: Synthetic oligonucleotide
cucccuggcgacuuucucg

SEQ ID NO: 2889404 - RNA, 19 nt, Artificial Sequence
  Description of Artificial Sequence: Synthetic oligonucleotide
ucugucagagcagggacca

SEQ ID NO: 2889405 - RNA, 19 nt, Artificial Sequence
  Description of Artificial Sequence: Synthetic oligonucleotide
aacucugucagagcaggga

SEQ ID NO: 2889406 - RNA, 19 nt, Artificial Sequence
  Description of Artificial Sequence: Synthetic oligonucleotide
gaccgaacgaacucuguca

SEQ ID NO: 2889407 - RNA, 19 nt, Artificial Sequence
  Description of Artificial Sequence: Synthetic oligonucleotide
aggcaaggcaaucaccuca

SEQ ID NO: 2889408 - RNA, 19 nt, Artificial Sequence
  Description of Artificial Sequence: Synthetic oligonucleotide
guagauggaggagaucugc

SEQ ID NO: 2889409 - RNA, 19 nt, Artificial Sequence
  Description of Artificial Sequence: Synthetic oligonucleotide
uguaaccuggcgcacccaa

SEQ ID NO: 2889410 - RNA, 19 nt, Artificial Sequence
  Description of Artificial Sequence: Synthetic oligonucleotide
acaggcaaggcaaucaccu

SEQ ID NO: 2889411 - RNA, 19 nt, Artificial Sequence
  Description of Artificial Sequence: Synthetic oligonucleotide
cuggcgacuuucucguugg

SEQ ID NO: 2889412 - RNA, 19 nt, Artificial Sequence
  Description of Artificial Sequence: Synthetic oligonucleotide
gacgcaggcugccaggcgc

SEQ ID NO: 2889413 - RNA, 19 nt, Artificial Sequence
  Description of Artificial Sequence: Synthetic oligonucleotide
gaagccgccggcagcagcg

SEQ ID NO: 2889414 - RNA, 19 nt, Artificial Sequence
  Description of Artificial Sequence: Synthetic oligonucleotide
auccacagcagcgacagga

SEQ ID NO: 2889415 - RNA, 19 nt, Artificial Sequence
  Description of Artificial Sequence: Synthetic oligonucleotide
ugcagaagccauugacagc

SEQ ID NO: 2889416 - RNA, 19 nt, Artificial Sequence
  Description of Artificial Sequence: Synthetic oligonucleotide
acgaaggccgcagaaacug

SEQ ID NO: 2889417 - RNA, 19 nt, Artificial Sequence
  Description of Artificial Sequence: Synthetic oligonucleotide
gaaggcgggaagccgccgg

SEQ ID NO: 2889418 - RNA, 19 nt, Artificial Sequence
  Description of Artificial Sequence: Synthetic oligonucleotide
acugacucuguaaccuggc

SEQ ID NO: 2889419 - RNA, 19 nt, Artificial Sequence
  Description of Artificial Sequence: Synthetic oligonucleotide
guugacgcaggcugccagg

SEQ ID NO: 2889420 - RNA, 19 nt, Artificial Sequence
  Description of Artificial Sequence: Synthetic oligonucleotide
ugccagaaucugaaacuga

SEQ ID NO: 2889421 - RNA, 19 nt, Artificial Sequence
  Description of Artificial Sequence: Synthetic oligonucleotide
cucugucagagcagggacc

SEQ ID NO: 2889422 - RNA, 19 nt, Artificial Sequence
  Description of Artificial Sequence: Synthetic oligonucleotide
cguaagggugcacagaccg

SEQ ID NO: 2889423 - RNA, 19 nt, Artificial Sequence
  Description of Artificial Sequence: Synthetic oligonucleotide
uaagggugcacagaccgaa

SEQ ID NO: 2889424 - RNA, 19 nt, Artificial Sequence
  Description of Artificial Sequence: Synthetic oligonucleotide
caucaucagcaccucacug

SEQ ID NO: 2889425 - RNA, 19 nt, Artificial Sequence
  Description of Artificial Sequence: Synthetic oligonucleotide
ugacccugggacguagccg

SEQ ID NO: 2889426 - RNA, 19 nt, Artificial Sequence
  Description of Artificial Sequence: Synthetic oligonucleotide
agccauugacagccaggcc

SEQ ID NO: 2889427 - RNA, 19 nt, Artificial Sequence
  Description of Artificial Sequence: Synthetic oligonucleotide
ccuuuccauucguagaugg

SEQ ID NO: 2889428 - RNA, 19 nt, Artificial Sequence
  Description of Artificial Sequence: Synthetic oligonucleotide
gaacgaacucugucagagc

SEQ ID NO: 2889429 - RNA, 19 nt, Artificial Sequence
  Description of Artificial Sequence: Synthetic oligonucleotide
ggagcucuggguuuuaauc

SEQ ID NO: 2889430 - RNA, 19 nt, Artificial Sequence
  Description of Artificial Sequence: Synthetic oligonucleotide
cugacucuguaaccuggcg

SEQ ID NO: 2889431 - RNA, 19 nt, Artificial Sequence
  Description of Artificial Sequence: Synthetic oligonucleotide
cucuggguuuuaaucauca

SEQ ID NO: 2889432 - RNA, 19 nt, Artificial Sequence
  Description of Artificial Sequence: Synthetic oligonucleotide
cauucguagauggaggaga

SEQ ID NO: 2889433 - RNA, 19 nt, Artificial Sequence
  Description of Artificial Sequence: Synthetic oligonucleotide
caaggcaaucaccucagca

SEQ ID NO: 2889434 - RNA, 19 nt, Artificial Sequence
  Description of Artificial Sequence: Synthetic oligonucleotide
aucagcaccucacugucuu

SEQ ID NO: 2889435 - RNA, 19 nt, Artificial Sequence
  Description of Artificial Sequence: Synthetic oligonucleotide
ucccuggcgacuuucucgu

SEQ ID NO: 2889436 - RNA, 19 nt, Artificial Sequence
  Description of Artificial Sequence: Synthetic oligonucleotide
ucguaagggugcacagacc

SEQ ID NO: 2889437 - RNA, 19 nt, Artificial Sequence
  Description of Artificial Sequence: Synthetic oligonucleotide
cugucuuccucgaucuuuc

SEQ ID NO: 2889438 - RNA, 19 nt, Artificial Sequence
  Description of Artificial Sequence: Synthetic oligonucleotide
ucgaucuuuccuuuccauu

SEQ ID NO: 2889439 - RNA, 19 nt, Artificial Sequence
  Description of Artificial Sequence: Synthetic oligonucleotide
agugacgaaggccgcagaa

SEQ ID NO: 2889440 - RNA, 19 nt, Artificial Sequence
  Description of Artificial Sequence: Synthetic oligonucleotide
agcucuggguuuuaaucau

SEQ ID NO: 2889441 - RNA, 19 nt, Artificial Sequence
  Description of Artificial Sequence: Synthetic oligonucleotide
agcgacaggagcagcgugg

SEQ ID NO: 2889442 - RNA, 19 nt, Artificial Sequence
  Description of Artificial Sequence: Synthetic oligonucleotide
gcuugcagaagccauugac

SEQ ID NO: 2889443 - RNA, 19 nt, Artificial Sequence
  Description of Artificial Sequence: Synthetic oligonucleotide
gcgacuuucucguugggac

SEQ ID NO: 2889444 - RNA, 19 nt, Artificial Sequence
  Description of Artificial Sequence: Synthetic oligonucleotide
gucagagcagggaccaggg

SEQ ID NO: 2889445 - RNA, 19 nt, Artificial Sequence
  Description of Artificial Sequence: Synthetic oligonucleotide
cagcaacuucguaagggug

SEQ ID NO: 2889446 - RNA, 19 nt, Artificial Sequence
  Description of Artificial Sequence: Synthetic oligonucleotide
aggagaaggcgggaagccg

SEQ ID NO: 2889447 - RNA, 19 nt, Artificial Sequence
  Description of Artificial Sequence: Synthetic oligonucleotide
ucuuuccuuuccauucgua

SEQ ID NO: 2889448 - RNA, 19 nt, Artificial Sequence
  Description of Artificial Sequence: Synthetic oligonucleotide
aaucugaaacugacucugu

SEQ ID NO: 2889449 - RNA, 19 nt, Artificial Sequence
  Description of Artificial Sequence: Synthetic oligonucleotide
gugccagaaucugaaacug

SEQ ID NO: 2889450 - RNA, 19 nt, Artificial Sequence
  Description of Artificial Sequence: Synthetic oligonucleotide
aucugaaacugacucugua

SEQ ID NO: 2889451 - RNA, 19 nt, Artificial Sequence
  Description of Artificial Sequence: Synthetic oligonucleotide
agcagcgacaggagcagcg

SEQ ID NO: 2889452 - RNA, 19 nt, Artificial Sequence
  Description of Artificial Sequence: Synthetic oligonucleotide
aagggugcacagaccgaac

SEQ ID NO: 2889453 - RNA, 19 nt, Artificial Sequence
  Description of Artificial Sequence: Synthetic oligonucleotide
ugacgcaggcugccaggcg

SEQ ID NO: 2889454 - RNA, 19 nt, Artificial Sequence
  Description of Artificial Sequence: Synthetic oligonucleotide
gaucugcgggacgagguug

SEQ ID NO: 2889455 - RNA, 19 nt, Artificial Sequence
  Description of Artificial Sequence: Synthetic oligonucleotide
aucuuuccuuuccauucgu

SEQ ID NO: 2889456 - RNA, 19 nt, Artificial Sequence
  Description of Artificial Sequence: Synthetic oligonucleotide
ucguugggacaagugacga

SEQ ID NO: 2889457 - RNA, 19 nt, Artificial Sequence
  Description of Artificial Sequence: Synthetic oligonucleotide
cuggcgaucucccuggcga

SEQ ID NO: 2889458 - RNA, 19 nt, Artificial Sequence
  Description of Artificial Sequence: Synthetic oligonucleotide
aacugacccugggacguag

SEQ ID NO: 2889459 - RNA, 19 nt, Artificial Sequence
  Description of Artificial Sequence: Synthetic oligonucleotide
cuggcgcacccaaugcagg

SEQ ID NO: 2889460 - RNA, 19 nt, Artificial Sequence
  Description of Artificial Sequence: Synthetic oligonucleotide
ccauugacagccaggcccg

SEQ ID NO: 2889461 - RNA, 19 nt, Artificial Sequence
  Description of Artificial Sequence: Synthetic oligonucleotide
ggguuuuaaucaucaucag

SEQ ID NO: 2889462 - RNA, 19 nt, Artificial Sequence
  Description of Artificial Sequence: Synthetic oligonucleotide
caccucagcaacuucguaa

SEQ ID NO: 2889463 - RNA, 19 nt, Artificial Sequence
  Description of Artificial Sequence: Synthetic oligonucleotide
gaaacugacccugggacgu

SEQ ID NO: 2889464 - RNA, 19 nt, Artificial Sequence
  Description of Artificial Sequence: Synthetic oligonucleotide
ucuggguuuuaaucaucau

SEQ ID NO: 2889465 - RNA, 19 nt, Artificial Sequence
  Description of Artificial Sequence: Synthetic oligonucleotide
caagugacgaaggccgcag

SEQ ID NO: 2889466 - RNA, 19 nt, Artificial Sequence
  Description of Artificial Sequence: Synthetic oligonucleotide
caggcgcuucucuaccacg

SEQ ID NO: 2889467 - RNA, 19 nt, Artificial Sequence
  Description of Artificial Sequence: Synthetic oligonucleotide
gaggagaucugcgggacga

SEQ ID NO: 2889468 - RNA, 19 nt, Artificial Sequence
  Description of Artificial Sequence: Synthetic oligonucleotide
cugacccugggacguagcc

SEQ ID NO: 2889469 - RNA, 19 nt, Artificial Sequence
  Description of Artificial Sequence: Synthetic oligonucleotide
aagugacgaaggccgcaga

SEQ ID NO: 2889470 - RNA, 19 nt, Artificial Sequence
  Description of Artificial Sequence: Synthetic oligonucleotide
gaaggccgcagaaacugac

SEQ ID NO: 2889471 - RNA, 19 nt, Artificial Sequence
  Description of Artificial Sequence: Synthetic oligonucleotide
ugucuuccucgaucuuucc

SEQ ID NO: 2889472 - RNA, 19 nt, Artificial Sequence
  Description of Artificial Sequence: Synthetic oligonucleotide
gaacucugucagagcaggg

SEQ ID NO: 2889473 - RNA, 19 nt, Artificial Sequence
  Description of Artificial Sequence: Synthetic oligonucleotide
cuuuccauucguagaugga

SEQ ID NO: 2889474 - RNA, 19 nt, Artificial Sequence
  Description of Artificial Sequence: Synthetic oligonucleotide
gggacaagugacgaaggcc

SEQ ID NO: 2889475 - RNA, 19 nt, Artificial Sequence
  Description of Artificial Sequence: Synthetic oligonucleotide
uugacgcaggcugccaggc

SEQ ID NO: 2889476 - RNA, 19 nt, Artificial Sequence
  Description of Artificial Sequence: Synthetic oligonucleotide
uaaucaucaucagcaccuc

SEQ ID NO: 2889477 - RNA, 19 nt, Artificial Sequence
  Description of Artificial Sequence: Synthetic oligonucleotide
aggacuggggcggagggcu

SEQ ID NO: 2889478 - RNA, 19 nt, Artificial Sequence
  Description of Artificial Sequence: Synthetic oligonucleotide
cacccaaugcagguauggg

SEQ ID NO: 2889479 - RNA, 19 nt, Artificial Sequence
  Description of Artificial Sequence: Synthetic oligonucleotide
gacaagugacgaaggccgc

SEQ ID NO: 2889480 - RNA, 19 nt, Artificial Sequence
  Description of Artificial Sequence: Synthetic oligonucleotide
acugucuuccucgaucuuu

SEQ ID NO: 2889481 - RNA, 19 nt, Artificial Sequence
  Description of Artificial Sequence: Synthetic oligonucleotide
uccuuuccauucguagaug

SEQ ID NO: 2889482 - RNA, 19 nt, Artificial Sequence
  Description of Artificial Sequence: Synthetic oligonucleotide
aggcgcuucucuaccacgg

SEQ ID NO: 2889483 - RNA, 19 nt, Artificial Sequence
  Description of Artificial Sequence: Synthetic oligonucleotide
cgaucuuuccuuuccauuc

SEQ ID NO: 2889484 - RNA, 19 nt, Artificial Sequence
  Description of Artificial Sequence: Synthetic oligonucleotide
gggaccagggagcucuggg

SEQ ID NO: 2889485 - RNA, 19 nt, Artificial Sequence
  Description of Artificial Sequence: Synthetic oligonucleotide
gacuuucucguugggacaa

SEQ ID NO: 2889486 - RNA, 19 nt, Artificial Sequence
  Description of Artificial Sequence: Synthetic oligonucleotide
uucccgugcuccacaggca

SEQ ID NO: 2889487 - RNA, 19 nt, Artificial Sequence
  Description of Artificial Sequence: Synthetic oligonucleotide
uggaggagaucugcgggac

SEQ ID NO: 2889488 - RNA, 19 nt, Artificial Sequence
  Description of Artificial Sequence: Synthetic oligonucleotide
uggggcggagggcuugcag

SEQ ID NO: 2889489 - RNA, 19 nt, Artificial Sequence
  Description of Artificial Sequence: Synthetic oligonucleotide
guuucccgugcuccacagg

SEQ ID NO: 2889490 - RNA, 19 nt, Artificial Sequence
  Description of Artificial Sequence: Synthetic oligonucleotide
ggaggacuggggcggaggg

SEQ ID NO: 2889491 - RNA, 19 nt, Artificial Sequence
  Description of Artificial Sequence: Synthetic oligonucleotide
gagguugacgcaggcugcc

SEQ ID NO: 2889492 - RNA, 19 nt, Artificial Sequence
  Description of Artificial Sequence: Synthetic oligonucleotide
cucuguaaccuggcgcacc

SEQ ID NO: 2889493 - RNA, 19 nt, Artificial Sequence
  Description of Artificial Sequence: Synthetic oligonucleotide
acucuguaaccuggcgcac

SEQ ID NO: 2889494 - RNA, 19 nt, Artificial Sequence
  Description of Artificial Sequence: Synthetic oligonucleotide
accuggcgcacccaaugca

SEQ ID NO: 2889495 - RNA, 19 nt, Artificial Sequence
  Description of Artificial Sequence: Synthetic oligonucleotide
guagccggagcccgaggcc

SEQ ID NO: 2889496 - RNA, 19 nt, Artificial Sequence
  Description of Artificial Sequence: Synthetic oligonucleotide
cgaacgaacucugucagag

SEQ ID NO: 2889497 - RNA, 19 nt, Artificial Sequence
  Description of Artificial Sequence: Synthetic oligonucleotide
cucuaccacggcccuggcg

SEQ ID NO: 2889498 - RNA, 19 nt, Artificial Sequence
  Description of Artificial Sequence: Synthetic oligonucleotide
gccagaaucugaaacugac

SEQ ID NO: 2889499 - RNA, 19 nt, Artificial Sequence
  Description of Artificial Sequence: Synthetic oligonucleotide
acagaccgaacgaacucug

SEQ ID NO: 2889500 - RNA, 19 nt, Artificial Sequence
  Description of Artificial Sequence: Synthetic oligonucleotide
uggcgcacccaaugcaggu

SEQ ID NO: 2889501 - RNA, 19 nt, Artificial Sequence
  Description of Artificial Sequence: Synthetic oligonucleotide
ucucccuggcgacuuucuc

SEQ ID NO: 2889502 - RNA, 19 nt, Artificial Sequence
  Description of Artificial Sequence: Synthetic oligonucleotide
ggagaaggcgggaagccgc

SEQ ID NO: 2889503 - RNA, 19 nt, Artificial Sequence
  Description of Artificial Sequence: Synthetic oligonucleotide
uggcgacuuucucguuggg

SEQ ID NO: 2889504 - RNA, 19 nt, Artificial Sequence
  Description of Artificial Sequence: Synthetic oligonucleotide
auucguagauggaggagau

SEQ ID NO: 2889505 - RNA, 19 nt, Artificial Sequence
  Description of Artificial Sequence: Synthetic oligonucleotide
ugggacguagccggagccc

SEQ ID NO: 2889506 - RNA, 19 nt, Artificial Sequence
  Description of Artificial Sequence: Synthetic oligonucleotide
acaagugacgaaggccgca

SEQ ID NO: 2889507 - RNA, 19 nt, Artificial Sequence
  Description of Artificial Sequence: Synthetic oligonucleotide
cugccaggcgcuucucuac

SEQ ID NO: 2889508 - RNA, 19 nt, Artificial Sequence
  Description of Artificial Sequence: Synthetic oligonucleotide
gagaaggcgggaagccgcc

SEQ ID NO: 2889509 - RNA, 19 nt, Artificial Sequence
  Description of Artificial Sequence: Synthetic oligonucleotide
acgaacucugucagagcag

SEQ ID NO: 2889510 - RNA, 19 nt, Artificial Sequence
  Description of Artificial Sequence: Synthetic oligonucleotide
gaggccggggaggacuggg

SEQ ID NO: 2889511 - RNA, 19 nt, Artificial Sequence
  Description of Artificial Sequence: Synthetic oligonucleotide
ucaccucagcaacuucgua

SEQ ID NO: 2889512 - RNA, 19 nt, Artificial Sequence
  Description of Artificial Sequence: Synthetic oligonucleotide
agaucugcgggacgagguu

SEQ ID NO: 2889513 - RNA, 19 nt, Artificial Sequence
  Description of Artificial Sequence: Synthetic oligonucleotide
agcaccucacugucuuccu

SEQ ID NO: 2889514 - RNA, 19 nt, Artificial Sequence
  Description of Artificial Sequence: Synthetic oligonucleotide
acugacccugggacguagc

SEQ ID NO: 2889515 - RNA, 19 nt, Artificial Sequence
  Description of Artificial Sequence: Synthetic oligonucleotide
aucaccucagcaacuucgu

SEQ ID NO: 2889516 - RNA, 19 nt, Artificial Sequence
  Description of Artificial Sequence: Synthetic oligonucleotide
caaucaccucagcaacuuc

SEQ ID NO: 2889517 - RNA, 19 nt, Artificial Sequence
  Description of Artificial Sequence: Synthetic oligonucleotide
ggcaaggcaaucaccucag

SEQ ID NO: 2889518 - RNA, 19 nt, Artificial Sequence
  Description of Artificial Sequence: Synthetic oligonucleotide
ggagaucugcgggacgagg

SEQ ID NO: 2889519 - RNA, 19 nt, Artificial Sequence
  Description of Artificial Sequence: Synthetic oligonucleotide
gguuucccgugcuccacag

SEQ ID NO: 2889520 - RNA, 19 nt, Artificial Sequence
  Description of Artificial Sequence: Synthetic oligonucleotide
gacguagccggagcccgag

SEQ ID NO: 2889521 - RNA, 19 nt, Artificial Sequence
  Description of Artificial Sequence: Synthetic oligonucleotide
aagccgccggcagcagcgc

SEQ ID NO: 2889522 - RNA, 19 nt, Artificial Sequence
  Description of Artificial Sequence: Synthetic oligonucleotide
caggcaaggcaaucaccuc

SEQ ID NO: 2889523 - RNA, 19 nt, Artificial Sequence
  Description of Artificial Sequence: Synthetic oligonucleotide
gcggagggcuugcagaagc

SEQ ID NO: 2889524 - RNA, 19 nt, Artificial Sequence
  Description of Artificial Sequence: Synthetic oligonucleotide
ggaggagaucugcgggacg

SEQ ID NO: 2889525 - RNA, 19 nt, Artificial Sequence
  Description of Artificial Sequence: Synthetic oligonucleotide
acuggggcggagggcuugc

SEQ ID NO: 2889526 - RNA, 19 nt, Artificial Sequence
  Description of Artificial Sequence: Synthetic oligonucleotide
uuccucgaucuuuccuuuc

SEQ ID NO: 2889527 - RNA, 19 nt, Artificial Sequence
  Description of Artificial Sequence: Synthetic oligonucleotide
acggcccuggcgaucuccc

SEQ ID NO: 2889528 - RNA, 19 nt, Artificial Sequence
  Description of Artificial Sequence: Synthetic oligonucleotide
ccuggcgcacccaaugcag

SEQ ID NO: 2889529 - RNA, 19 nt, Artificial Sequence
  Description of Artificial Sequence: Synthetic oligonucleotide
gggacguagccggagcccg

SEQ ID NO: 2889530 - RNA, 19 nt, Artificial Sequence
  Description of Artificial Sequence: Synthetic oligonucleotide
cgaacucugucagagcagg

SEQ ID NO: 2889531 - RNA, 19 nt, Artificial Sequence
  Description of Artificial Sequence: Synthetic oligonucleotide
gccgcagaaacugacccug

SEQ ID NO: 2889532 - RNA, 19 nt, Artificial Sequence
  Description of Artificial Sequence: Synthetic oligonucleotide
accagggagcucuggguuu

SEQ ID NO: 2889533 - RNA, 19 nt, Artificial Sequence
  Description of Artificial Sequence: Synthetic oligonucleotide
uggcgaucucccuggcgac

SEQ ID NO: 2889534 - RNA, 19 nt, Artificial Sequence
  Description of Artificial Sequence: Synthetic oligonucleotide
agaaggcgggaagccgccg

SEQ ID NO: 2889535 - RNA, 19 nt, Artificial Sequence
  Description of Artificial Sequence: Synthetic oligonucleotide
gugcacagaccgaacgaac

SEQ ID NO: 2889536 - RNA, 19 nt, Artificial Sequence
  Description of Artificial Sequence: Synthetic oligonucleotide
acguagccggagcccgagg

SEQ ID NO: 2889537 - RNA, 19 nt, Artificial Sequence
  Description of Artificial Sequence: Synthetic oligonucleotide
gagaucugcgggacgaggu

SEQ ID NO: 2889538 - RNA, 19 nt, Artificial Sequence
  Description of Artificial Sequence: Synthetic oligonucleotide
uucguagauggaggagauc

SEQ ID NO: 2889539 - RNA, 19 nt, Artificial Sequence
  Description of Artificial Sequence: Synthetic oligonucleotide
cuucguaagggugcacaga

SEQ ID NO: 2889540 - RNA, 19 nt, Artificial Sequence
  Description of Artificial Sequence: Synthetic oligonucleotide
gcgggcauccacagcagcg

SEQ ID NO: 2889541 - RNA, 19 nt, Artificial Sequence
  Description of Artificial Sequence: Synthetic oligonucleotide
gcacagaccgaacgaacuc

SEQ ID NO: 2889542 - RNA, 19 nt, Artificial Sequence
  Description of Artificial Sequence: Synthetic oligonucleotide
ucucuaccacggcccuggc

SEQ ID NO: 2889543 - RNA, 19 nt, Artificial Sequence
  Description of Artificial Sequence: Synthetic oligonucleotide
ggggagcaggagaaggcgg

SEQ ID NO: 2889544 - RNA, 19 nt, Artificial Sequence
  Description of Artificial Sequence: Synthetic oligonucleotide
acuuucucguugggacaag

SEQ ID NO: 2889545 - RNA, 19 nt, Artificial Sequence
  Description of Artificial Sequence: Synthetic oligonucleotide
cugcgggacgagguugacg

SEQ ID NO: 2889546 - RNA, 19 nt, Artificial Sequence
  Description of Artificial Sequence: Synthetic oligonucleotide
accacggcccuggcgaucu

SEQ ID NO: 2889547 - RNA, 19 nt, Artificial Sequence
  Description of Artificial Sequence: Synthetic oligonucleotide
gaucucccuggcgacuuuc

SEQ ID NO: 2889548 - RNA, 19 nt, Artificial Sequence
  Description of Artificial Sequence: Synthetic oligonucleotide
cgcuucucuaccacggccc

SEQ ID NO: 2889549 - RNA, 19 nt, Artificial Sequence
  Description of Artificial Sequence: Synthetic oligonucleotide
gcccuggcgaucucccugg

SEQ ID NO: 2889550 - RNA, 19 nt, Artificial Sequence
  Description of Artificial Sequence: Synthetic oligonucleotide
ccuggcgacuuucucguug

SEQ ID NO: 2889551 - RNA, 19 nt, Artificial Sequence
  Description of Artificial Sequence: Synthetic oligonucleotide
cagcgacaggagcagcgug

SEQ ID NO: 2889552 - RNA, 19 nt, Artificial Sequence
  Description of Artificial Sequence: Synthetic oligonucleotide
gccggggaggacuggggcg

SEQ ID NO: 2889553 - RNA, 19 nt, Artificial Sequence
  Description of Artificial Sequence: Synthetic oligonucleotide
gaggacuggggcggagggc

SEQ ID NO: 2889554 - RNA, 19 nt, Artificial Sequence
  Description of Artificial Sequence: Synthetic oligonucleotide
gugcuccacaggcaaggca

SEQ ID NO: 2889555 - RNA, 19 nt, Artificial Sequence
  Description of Artificial Sequence: Synthetic oligonucleotide
agcagcgcgggcauccaca

SEQ ID NO: 2889556 - RNA, 19 nt, Artificial Sequence
  Description of Artificial Sequence: Synthetic oligonucleotide
gcgcuucucuaccacggcc

SEQ ID NO: 2889557 - RNA, 19 nt, Artificial Sequence
  Description of Artificial Sequence: Synthetic oligonucleotide
aggagaucugcgggacgag

SEQ ID NO: 2889558 - RNA, 19 nt, Artificial Sequence
  Description of Artificial Sequence: Synthetic oligonucleotide
gucuuccucgaucuuuccu

SEQ ID NO: 2889559 - RNA, 19 nt, Artificial Sequence
  Description of Artificial Sequence: Synthetic oligonucleotide
guaagggugcacagaccga

SEQ ID NO: 2889560 - RNA, 19 nt, Artificial Sequence
  Description of Artificial Sequence: Synthetic oligonucleotide
gggugcacagaccgaacga

SEQ ID NO: 2889561 - RNA, 19 nt, Artificial Sequence
  Description of Artificial Sequence: Synthetic oligonucleotide
gugacgaaggccgcagaaa

SEQ ID NO: 2889562 - RNA, 19 nt, Artificial Sequence
  Description of Artificial Sequence: Synthetic oligonucleotide
aucugcgggacgagguuga

SEQ ID NO: 2889563 - RNA, 19 nt, Artificial Sequence
  Description of Artificial Sequence: Synthetic oligonucleotide
agccgccggcagcagcgcg

SEQ ID NO: 2889564 - RNA, 19 nt, Artificial Sequence
  Description of Artificial Sequence: Synthetic oligonucleotide
gggcuugcagaagccauug

SEQ ID NO: 2889565 - RNA, 19 nt, Artificial Sequence
  Description of Artificial Sequence: Synthetic oligonucleotide
gaccagggagcucuggguu

SEQ ID NO: 2889566 - RNA, 19 nt, Artificial Sequence
  Description of Artificial Sequence: Synthetic oligonucleotide
gcagcgcgggcauccacag

SEQ ID NO: 2889567 - RNA, 19 nt, Artificial Sequence
  Description of Artificial Sequence: Synthetic oligonucleotide
cauugacagccaggcccgg

SEQ ID NO: 2889568 - RNA, 19 nt, Artificial Sequence
  Description of Artificial Sequence: Synthetic oligonucleotide
ggugcacagaccgaacgaa

SEQ ID NO: 2889569 - RNA, 19 nt, Artificial Sequence
  Description of Artificial Sequence: Synthetic oligonucleotide
agggaccagggagcucugg

SEQ ID NO: 2889570 - RNA, 19 nt, Artificial Sequence
  Description of Artificial Sequence: Synthetic oligonucleotide
ggcccuggcgaucucccug

SEQ ID NO: 2889571 - RNA, 19 nt, Artificial Sequence
  Description of Artificial Sequence: Synthetic oligonucleotide
gacuggggcggagggcuug

SEQ ID NO: 2889572 - RNA, 19 nt, Artificial Sequence
  Description of Artificial Sequence: Synthetic oligonucleotide
ggggcggagggcuugcaga

SEQ ID NO: 2889573 - RNA, 19 nt, Artificial Sequence
  Description of Artificial Sequence: Synthetic oligonucleotide
ggcagcagcgcgggcaucc

SEQ ID NO: 2889574 - RNA, 19 nt, Artificial Sequence
  Description of Artificial Sequence: Synthetic oligonucleotide
aaacugacccugggacgua

SEQ ID NO: 2889575 - RNA, 19 nt, Artificial Sequence
  Description of Artificial Sequence: Synthetic oligonucleotide
ccauucguagauggaggag

SEQ ID NO: 2889576 - RNA, 19 nt, Artificial Sequence
  Description of Artificial Sequence: Synthetic oligonucleotide
ccucagcaacuucguaagg

SEQ ID NO: 2889577 - RNA, 19 nt, Artificial Sequence
  Description of Artificial Sequence: Synthetic oligonucleotide
cguagccggagcccgaggc

SEQ ID NO: 2889578 - RNA, 19 nt, Artificial Sequence
  Description of Artificial Sequence: Synthetic oligonucleotide
gacgaaggccgcagaaacu

SEQ ID NO: 2889579 - RNA, 19 nt, Artificial Sequence
  Description of Artificial Sequence: Synthetic oligonucleotide
ggcgcuucucuaccacggc

SEQ ID NO: 2889580 - RNA, 19 nt, Artificial Sequence
  Description of Artificial Sequence: Synthetic oligonucleotide
ggaagccgccggcagcagc

SEQ ID NO: 2889581 - RNA, 19 nt, Artificial Sequence
  Description of Artificial Sequence: Synthetic oligonucleotide
gcaacuucguaagggugca

SEQ ID NO: 2889582 - RNA, 19 nt, Artificial Sequence
  Description of Artificial Sequence: Synthetic oligonucleotide
cuucucuaccacggcccug

SEQ ID NO: 2889583 - RNA, 19 nt, Artificial Sequence
  Description of Artificial Sequence: Synthetic oligonucleotide
ccgugcuccacaggcaagg

SEQ ID NO: 2889584 - RNA, 19 nt, Artificial Sequence
  Description of Artificial Sequence: Synthetic oligonucleotide
cacggcccuggcgaucucc

SEQ ID NO: 2889585 - RNA, 19 nt, Artificial Sequence
  Description of Artificial Sequence: Synthetic oligonucleotide
cacagaccgaacgaacucu

SEQ ID NO: 2889586 - RNA, 19 nt, Artificial Sequence
  Description of Artificial Sequence: Synthetic oligonucleotide
gggaggacuggggcggagg

SEQ ID NO: 2889587 - RNA, 19 nt, Artificial Sequence
  Description of Artificial Sequence: Synthetic oligonucleotide
cuccacaggcaaggcaauc

SEQ ID NO: 2889588 - RNA, 19 nt, Artificial Sequence
  Description of Artificial Sequence: Synthetic oligonucleotide
ccacagcagcgacaggagc

SEQ ID NO: 2889589 - RNA, 19 nt, Artificial Sequence
  Description of Artificial Sequence: Synthetic oligonucleotide
ggcgggaagccgccggcag

SEQ ID NO: 2889590 - RNA, 19 nt, Artificial Sequence
  Description of Artificial Sequence: Synthetic oligonucleotide
ggacgagguugacgcaggc

SEQ ID NO: 2889591 - RNA, 19 nt, Artificial Sequence
  Description of Artificial Sequence: Synthetic oligonucleotide
cgagguugacgcaggcugc

SEQ ID NO: 2889592 - RNA, 19 nt, Artificial Sequence
  Description of Artificial Sequence: Synthetic oligonucleotide
cucgaucuuuccuuuccau

SEQ ID NO: 2889593 - RNA, 19 nt, Artificial Sequence
  Description of Artificial Sequence: Synthetic oligonucleotide
gagggcuugcagaagccau

SEQ ID NO: 2889594 - RNA, 19 nt, Artificial Sequence
  Description of Artificial Sequence: Synthetic oligonucleotide
ggccggggaggacuggggc

SEQ ID NO: 2889595 - RNA, 19 nt, Artificial Sequence
  Description of Artificial Sequence: Synthetic oligonucleotide
aucucccuggcgacuuucu

SEQ ID NO: 2889596 - RNA, 19 nt, Artificial Sequence
  Description of Artificial Sequence: Synthetic oligonucleotide
ucugcgggacgagguugac

SEQ ID NO: 2889597 - RNA, 19 nt, Artificial Sequence
  Description of Artificial Sequence: Synthetic oligonucleotide
gacgagguugacgcaggcu

SEQ ID NO: 2889598 - RNA, 19 nt, Artificial Sequence
  Description of Artificial Sequence: Synthetic oligonucleotide
gcaaggcaaucaccucagc

SEQ ID NO: 2889599 - RNA, 19 nt, Artificial Sequence
  Description of Artificial Sequence: Synthetic oligonucleotide
agguugacgcaggcugcca

SEQ ID NO: 2889600 - RNA, 19 nt, Artificial Sequence
  Description of Artificial Sequence: Synthetic oligonucleotide
aggccggggaggacugggg

SEQ ID NO: 2889601 - RNA, 19 nt, Artificial Sequence
  Description of Artificial Sequence: Synthetic oligonucleotide
agggcuugcagaagccauu

SEQ ID NO: 2889602 - RNA, 19 nt, Artificial Sequence
  Description of Artificial Sequence: Synthetic oligonucleotide
caacuucguaagggugcac

SEQ ID NO: 2889603 - RNA, 19 nt, Artificial Sequence
  Description of Artificial Sequence: Synthetic oligonucleotide
ccgcagaaacugacccugg

SEQ ID NO: 2889604 - RNA, 19 nt, Artificial Sequence
  Description of Artificial Sequence: Synthetic oligonucleotide
ccuggcgaucucccuggcg

SEQ ID NO: 2889605 - RNA, 19 nt, Artificial Sequence
  Description of Artificial Sequence: Synthetic oligonucleotide
cagaagccauugacagcca

SEQ ID NO: 2889606 - RNA, 19 nt, Artificial Sequence
  Description of Artificial Sequence: Synthetic oligonucleotide
ggcgacuuucucguuggga

SEQ ID NO: 2889607 - RNA, 19 nt, Artificial Sequence
  Description of Artificial Sequence: Synthetic oligonucleotide
gggcauccacagcagcgac

SEQ ID NO: 2889608 - RNA, 19 nt, Artificial Sequence
  Description of Artificial Sequence: Synthetic oligonucleotide
gcgacaggagcagcguggc

SEQ ID NO: 2889609 - RNA, 19 nt, Artificial Sequence
  Description of Artificial Sequence: Synthetic oligonucleotide
ggagggcuugcagaagcca

SEQ ID NO: 2889610 - RNA, 19 nt, Artificial Sequence
  Description of Artificial Sequence: Synthetic oligonucleotide
ccggggaggacuggggcgg

SEQ ID NO: 2889611 - RNA, 19 nt, Artificial Sequence
  Description of Artificial Sequence: Synthetic oligonucleotide
cuuccucgaucuuuccuuu

SEQ ID NO: 2889612 - RNA, 19 nt, Artificial Sequence
  Description of Artificial Sequence: Synthetic oligonucleotide
ccaggcgcuucucuaccac

SEQ ID NO: 2889613 - RNA, 19 nt, Artificial Sequence
  Description of Artificial Sequence: Synthetic oligonucleotide
ggguuucccgugcuccaca

SEQ ID NO: 2889614 - RNA, 19 nt, Artificial Sequence
  Description of Artificial Sequence: Synthetic oligonucleotide
cuuucucguugggacaagu

SEQ ID NO: 2889615 - RNA, 19 nt, Artificial Sequence
  Description of Artificial Sequence: Synthetic oligonucleotide
ggaccagggagcucugggu

SEQ ID NO: 2889616 - RNA, 19 nt, Artificial Sequence
  Description of Artificial Sequence: Synthetic oligonucleotide
ccagaaucugaaacugacu

SEQ ID NO: 2889617 - RNA, 19 nt, Artificial Sequence
  Description of Artificial Sequence: Synthetic oligonucleotide
cagcagcgcgggcauccac

SEQ ID NO: 2889618 - RNA, 19 nt, Artificial Sequence
  Description of Artificial Sequence: Synthetic oligonucleotide
cagaccgaacgaacucugu

SEQ ID NO: 2889619 - RNA, 19 nt, Artificial Sequence
  Description of Artificial Sequence: Synthetic oligonucleotide
gggcggagggcuugcagaa

SEQ ID NO: 2889620 - RNA, 19 nt, Artificial Sequence
  Description of Artificial Sequence: Synthetic oligonucleotide
cagcgcgggcauccacagc

SEQ ID NO: 2889621 - RNA, 19 nt, Artificial Sequence
  Description of Artificial Sequence: Synthetic oligonucleotide
gcaccucacugucuuccuc

SEQ ID NO: 2889622 - RNA, 19 nt, Artificial Sequence
  Description of Artificial Sequence: Synthetic oligonucleotide
caucagcaccucacugucu

SEQ ID NO: 2889623 - RNA, 19 nt, Artificial Sequence
  Description of Artificial Sequence: Synthetic oligonucleotide
agggagcucuggguuuuaa

SEQ ID NO: 2889624 - RNA, 19 nt, Artificial Sequence
  Description of Artificial Sequence: Synthetic oligonucleotide
gcgggaagccgccggcagc

SEQ ID NO: 2889625 - RNA, 19 nt, Artificial Sequence
  Description of Artificial Sequence: Synthetic oligonucleotide
ggcuugcagaagccauuga

SEQ ID NO: 2889626 - RNA, 19 nt, Artificial Sequence
  Description of Artificial Sequence: Synthetic oligonucleotide
gcucuggguuuuaaucauc

SEQ ID NO: 2889627 - RNA, 19 nt, Artificial Sequence
  Description of Artificial Sequence: Synthetic oligonucleotide
ccucgaucuuuccuuucca

SEQ ID NO: 2889628 - RNA, 19 nt, Artificial Sequence
  Description of Artificial Sequence: Synthetic oligonucleotide
acgcaggcugccaggcgcu

SEQ ID NO: 2889629 - RNA, 19 nt, Artificial Sequence
  Description of Artificial Sequence: Synthetic oligonucleotide
uaccacggcccuggcgauc

SEQ ID NO: 2889630 - RNA, 19 nt, Artificial Sequence
  Description of Artificial Sequence: Synthetic oligonucleotide
gagcagggaccagggagcu

SEQ ID NO: 2889631 - RNA, 19 nt, Artificial Sequence
  Description of Artificial Sequence: Synthetic oligonucleotide
cgggacgagguugacgcag

SEQ ID NO: 2889632 - RNA, 19 nt, Artificial Sequence
  Description of Artificial Sequence: Synthetic oligonucleotide
cggagggcuugcagaagcc

SEQ ID NO: 2889633 - RNA, 19 nt, Artificial Sequence
  Description of Artificial Sequence: Synthetic oligonucleotide
aggcgggaagccgccggca

SEQ ID NO: 2889634 - RNA, 19 nt, Artificial Sequence
  Description of Artificial Sequence: Synthetic oligonucleotide
gccgccggcagcagcgcgg

SEQ ID NO: 2889635 - RNA, 19 nt, Artificial Sequence
  Description of Artificial Sequence: Synthetic oligonucleotide
ggcaaucaccucagcaacu

SEQ ID NO: 2889636 - RNA, 19 nt, Artificial Sequence
  Description of Artificial Sequence: Synthetic oligonucleotide
ggcggagggcuugcagaag

SEQ ID NO: 2889637 - RNA, 19 nt, Artificial Sequence
  Description of Artificial Sequence: Synthetic oligonucleotide
cccgugcuccacaggcaag

SEQ ID NO: 2889638 - RNA, 19 nt, Artificial Sequence
  Description of Artificial Sequence: Synthetic oligonucleotide
gggguuucccgugcuccac

SEQ ID NO: 2889639 - RNA, 19 nt, Artificial Sequence
  Description of Artificial Sequence: Synthetic oligonucleotide
cgacuuucucguugggaca

SEQ ID NO: 2889640 - RNA, 19 nt, Artificial Sequence
  Description of Artificial Sequence: Synthetic oligonucleotide
gcaaucaccucagcaacuu

SEQ ID NO: 2889641 - RNA, 19 nt, Artificial Sequence
  Description of Artificial Sequence: Synthetic oligonucleotide
gcuucucuaccacggcccu

SEQ ID NO: 2889642 - RNA, 19 nt, Artificial Sequence
  Description of Artificial Sequence: Synthetic oligonucleotide
gccggcagcagcgcgggca

SEQ ID NO: 2889643 - RNA, 19 nt, Artificial Sequence
  Description of Artificial Sequence: Synthetic oligonucleotide
guaaccuggcgcacccaau

SEQ ID NO: 2889644 - RNA, 19 nt, Artificial Sequence
  Description of Artificial Sequence: Synthetic oligonucleotide
ggccgcagaaacugacccu

SEQ ID NO: 2889645 - RNA, 19 nt, Artificial Sequence
  Description of Artificial Sequence: Synthetic oligonucleotide
ccgaacgaacucugucaga

SEQ ID NO: 2889646 - RNA, 19 nt, Artificial Sequence
  Description of Artificial Sequence: Synthetic oligonucleotide
gggagcucuggguuuuaau

SEQ ID NO: 2889647 - RNA, 19 nt, Artificial Sequence
  Description of Artificial Sequence: Synthetic oligonucleotide
cuguaaccuggcgcaccca

SEQ ID NO: 2889648 - RNA, 19 nt, Artificial Sequence
  Description of Artificial Sequence: Synthetic oligonucleotide
ccgaggccggggaggacug

SEQ ID NO: 2889649 - RNA, 19 nt, Artificial Sequence
  Description of Artificial Sequence: Synthetic oligonucleotide
gcgcacccaaugcagguau

SEQ ID NO: 2889650 - RNA, 19 nt, Artificial Sequence
  Description of Artificial Sequence: Synthetic oligonucleotide
cccugggacguagccggag

SEQ ID NO: 2889651 - RNA, 19 nt, Artificial Sequence
  Description of Artificial Sequence: Synthetic oligonucleotide
ggggaggacuggggcggag

SEQ ID NO: 2889652 - RNA, 19 nt, Artificial Sequence
  Description of Artificial Sequence: Synthetic oligonucleotide
cgcacccaaugcagguaug

SEQ ID NO: 2889653 - RNA, 19 nt, Artificial Sequence
  Description of Artificial Sequence: Synthetic oligonucleotide
cguugggacaagugacgaa

SEQ ID NO: 2889654 - RNA, 19 nt, Artificial Sequence
  Description of Artificial Sequence: Synthetic oligonucleotide
ggcgcacccaaugcaggua

SEQ ID NO: 2889655 - RNA, 19 nt, Artificial Sequence
  Description of Artificial Sequence: Synthetic oligonucleotide
acccugggacguagccgga

SEQ ID NO: 2889656 - RNA, 19 nt, Artificial Sequence
  Description of Artificial Sequence: Synthetic oligonucleotide
cuaccacggcccuggcgau

SEQ ID NO: 2889657 - RNA, 19 nt, Artificial Sequence
  Description of Artificial Sequence: Synthetic oligonucleotide
gcagcgacaggagcagcgu

SEQ ID NO: 2889658 - RNA, 19 nt, Artificial Sequence
  Description of Artificial Sequence: Synthetic oligonucleotide
gcgcgggcauccacagcag

SEQ ID NO: 2889659 - RNA, 19 nt, Artificial Sequence
  Description of Artificial Sequence: Synthetic oligonucleotide
gcgggacgagguugacgca

SEQ ID NO: 2889660 - RNA, 19 nt, Artificial Sequence
  Description of Artificial Sequence: Synthetic oligonucleotide
ggacguagccggagcccga

SEQ ID NO: 2889661 - RNA, 19 nt, Artificial Sequence
  Description of Artificial Sequence: Synthetic oligonucleotide
ggcugccaggcgcuucucu

SEQ ID NO: 2889662 - RNA, 19 nt, Artificial Sequence
  Description of Artificial Sequence: Synthetic oligonucleotide
ccgccggcagcagcgcggg

SEQ ID NO: 2889663 - RNA, 19 nt, Artificial Sequence
  Description of Artificial Sequence: Synthetic oligonucleotide
cccuggcgaucucccuggc

SEQ ID NO: 2889664 - RNA, 19 nt, Artificial Sequence
  Description of Artificial Sequence: Synthetic oligonucleotide
cgggcauccacagcagcga

SEQ ID NO: 2889665 - RNA, 19 nt, Artificial Sequence
  Description of Artificial Sequence: Synthetic oligonucleotide
ggcgaucucccuggcgacu

SEQ ID NO: 2889666 - RNA, 19 nt, Artificial Sequence
  Description of Artificial Sequence: Synthetic oligonucleotide
gcagcagcgcgggcaucca

SEQ ID NO: 2889667 - RNA, 19 nt, Artificial Sequence
  Description of Artificial Sequence: Synthetic oligonucleotide
cacugucuuccucgaucuu

SEQ ID NO: 2889668 - RNA, 19 nt, Artificial Sequence
  Description of Artificial Sequence: Synthetic oligonucleotide
cuggggcggagggcuugca

SEQ ID NO: 2889669 - RNA, 19 nt, Artificial Sequence
  Description of Artificial Sequence: Synthetic oligonucleotide
ccggagcccgaggccgggg

SEQ ID NO: 2889670 - RNA, 19 nt, Artificial Sequence
  Description of Artificial Sequence: Synthetic oligonucleotide
gcgaucucccuggcgacuu

SEQ ID NO: 2889671 - RNA, 19 nt, Artificial Sequence
  Description of Artificial Sequence: Synthetic oligonucleotide
cccgaggccggggaggacu

SEQ ID NO: 2889672 - RNA, 19 nt, Artificial Sequence
  Description of Artificial Sequence: Synthetic oligonucleotide
cgaggccggggaggacugg

SEQ ID NO: 2889673 - RNA, 19 nt, Artificial Sequence
  Description of Artificial Sequence: Synthetic oligonucleotide
ccucacugucuuccucgau

SEQ ID NO: 2889674 - RNA, 19 nt, Artificial Sequence
  Description of Artificial Sequence: Synthetic oligonucleotide
ccagggagcucuggguuuu

SEQ ID NO: 2889675 - RNA, 19 nt, Artificial Sequence
  Description of Artificial Sequence: Synthetic oligonucleotide
ccggcagcagcgcgggcau

SEQ ID NO: 2889676 - RNA, 19 nt, Artificial Sequence
  Description of Artificial Sequence: Synthetic oligonucleotide
gcccgaggccggggaggac

SEQ ID NO: 2889677 - RNA, 19 nt, Artificial Sequence
  Description of Artificial Sequence: Synthetic oligonucleotide
ccacggcccuggcgaucuc

SEQ ID NO: 2889678 - RNA, 19 nt, Artificial Sequence
  Description of Artificial Sequence: Synthetic oligonucleotide
ggacuggggcggagggcuu

SEQ ID NO: 2889679 - RNA, 19 nt, Artificial Sequence
  Description of Artificial Sequence: Synthetic oligonucleotide
cggggaggacuggggcgga

SEQ ID NO: 2889680 - RNA, 19 nt, Artificial Sequence
  Description of Artificial Sequence: Synthetic oligonucleotide
cccuggcgacuuucucguu

SEQ ID NO: 2889681 - RNA, 19 nt, Artificial Sequence
  Description of Artificial Sequence: Synthetic oligonucleotide
cggcccuggcgaucucccu

SEQ ID NO: 2889682 - RNA, 19 nt, Artificial Sequence
  Description of Artificial Sequence: Synthetic oligonucleotide
cgaucucccuggcgacuuu

SEQ ID NO: 2889683 - RNA, 19 nt, Artificial Sequence
  Description of Artificial Sequence: Synthetic oligonucleotide
cgcaggcugccaggcgcuu

SEQ ID NO: 2889684 - RNA, 19 nt, Artificial Sequence
  Description of Artificial Sequence: Synthetic oligonucleotide
aauaauaccauuuacagag

SEQ ID NO: 2889685 - RNA, 19 nt, Artificial Sequence
  Description of Artificial Sequence: Synthetic oligonucleotide
aaaauaauaccauuuacag

SEQ ID NO: 2889686 - RNA, 19 nt, Artificial Sequence
  Description of Artificial Sequence: Synthetic oligonucleotide
cuaauugaaaacuucaugg

SEQ ID NO: 2889687 - RNA, 19 nt, Artificial Sequence
  Description of Artificial Sequence: Synthetic oligonucleotide
aauucuauauaguaggucu

SEQ ID NO: 2889688 - RNA, 19 nt, Artificial Sequence
  Description of Artificial Sequence: Synthetic oligonucleotide
aauugaaaacuucauggcg

SEQ ID NO: 2889689 - RNA, 19 nt, Artificial Sequence
  Description of Artificial Sequence: Synthetic oligonucleotide
cauaauucuauauaguagg

SEQ ID NO: 2889690 - RNA, 19 nt, Artificial Sequence
  Description of Artificial Sequence: Synthetic oligonucleotide
uugauuaucagcaaauugu

SEQ ID NO: 2889691 - RNA, 19 nt, Artificial Sequence
  Description of Artificial Sequence: Synthetic oligonucleotide
uugauuguggcauagaaga

SEQ ID NO: 2889692 - RNA, 19 nt, Artificial Sequence
  Description of Artificial Sequence: Synthetic oligonucleotide
ucauguacuaaaauaauac

SEQ ID NO: 2889693 - RNA, 19 nt, Artificial Sequence
  Description of Artificial Sequence: Synthetic oligonucleotide
uauuuguuaagucauguac

SEQ ID NO: 2889694 - RNA, 19 nt, Artificial Sequence
  Description of Artificial Sequence: Synthetic oligonucleotide
ugggauuugauuaucagca

SEQ ID NO: 2889695 - RNA, 19 nt, Artificial Sequence
  Description of Artificial Sequence: Synthetic oligonucleotide
auuaucagcaaauuguucu

SEQ ID NO: 2889696 - RNA, 19 nt, Artificial Sequence
  Description of Artificial Sequence: Synthetic oligonucleotide
uugaagcucagccagaaag

SEQ ID NO: 2889697 - RNA, 19 nt, Artificial Sequence
  Description of Artificial Sequence: Synthetic oligonucleotide
uucuuuguagucaugaacu

SEQ ID NO: 2889698 - RNA, 19 nt, Artificial Sequence
  Description of Artificial Sequence: Synthetic oligonucleotide
uuugauuaucagcaaauug

SEQ ID NO: 2889699 - RNA, 19 nt, Artificial Sequence
  Description of Artificial Sequence: Synthetic oligonucleotide
ugaacucugauauccaccg

SEQ ID NO: 2889700 - RNA, 19 nt, Artificial Sequence
  Description of Artificial Sequence: Synthetic oligonucleotide
uacucuucagcauugaagc

SEQ ID NO: 2889701 - RNA, 19 nt, Artificial Sequence
  Description of Artificial Sequence: Synthetic oligonucleotide
auugaaaacuucauggcgc

SEQ ID NO: 2889702 - RNA, 19 nt, Artificial Sequence
  Description of Artificial Sequence: Synthetic oligonucleotide
auuguucucggucauaauc

SEQ ID NO: 2889703 - RNA, 19 nt, Artificial Sequence
  Description of Artificial Sequence: Synthetic oligonucleotide
aucgauauaaguuuugaga

SEQ ID NO: 2889704 - RNA, 19 nt, Artificial Sequence
  Description of Artificial Sequence: Synthetic oligonucleotide
uguacuaaaauaauaccau

SEQ ID NO: 2889705 - RNA, 19 nt, Artificial Sequence
  Description of Artificial Sequence: Synthetic oligonucleotide
uccaguuggaaccaaaucu

SEQ ID NO: 2889706 - RNA, 19 nt, Artificial Sequence
  Description of Artificial Sequence: Synthetic oligonucleotide
uuuguagucaugaacucug

SEQ ID NO: 2889707 - RNA, 19 nt, Artificial Sequence
  Description of Artificial Sequence: Synthetic oligonucleotide
uauauaguaggucuucucu

SEQ ID NO: 2889708 - RNA, 19 nt, Artificial Sequence
  Description of Artificial Sequence: Synthetic oligonucleotide
aaauaauaccauuuacaga

SEQ ID NO: 2889709 - RNA, 19 nt, Artificial Sequence
  Description of Artificial Sequence: Synthetic oligonucleotide
aacucugauauccaccgag

SEQ ID NO: 2889710 - RNA, 19 nt, Artificial Sequence
  Description of Artificial Sequence: Synthetic oligonucleotide
uaauugaaaacuucauggc

SEQ ID NO: 2889711 - RNA, 19 nt, Artificial Sequence
  Description of Artificial Sequence: Synthetic oligonucleotide
uagucaugaacucugauau

SEQ ID NO: 2889712 - RNA, 19 nt, Artificial Sequence
  Description of Artificial Sequence: Synthetic oligonucleotide
aguuguagaacacugcucu

SEQ ID NO: 2889713 - RNA, 19 nt, Artificial Sequence
  Description of Artificial Sequence: Synthetic oligonucleotide
gguuucaugaaucuggucc

SEQ ID NO: 2889714 - RNA, 19 nt, Artificial Sequence
  Description of Artificial Sequence: Synthetic oligonucleotide
ucgauauaaguuuugagau

SEQ ID NO: 2889715 - RNA, 19 nt, Artificial Sequence
  Description of Artificial Sequence: Synthetic oligonucleotide
cauguacuaaaauaauacc

SEQ ID NO: 2889716 - RNA, 19 nt, Artificial Sequence
  Description of Artificial Sequence: Synthetic oligonucleotide
uuguucucggucauaaucc

SEQ ID NO: 2889717 - RNA, 19 nt, Artificial Sequence
  Description of Artificial Sequence: Synthetic oligonucleotide
gauauaaguuuugagauga

SEQ ID NO: 2889718 - RNA, 19 nt, Artificial Sequence
  Description of Artificial Sequence: Synthetic oligonucleotide
uaagucauguacuaaaaua

SEQ ID NO: 2889719 - RNA, 19 nt, Artificial Sequence
  Description of Artificial Sequence: Synthetic oligonucleotide
uugagaacuuccaaugacc

SEQ ID NO: 2889720 - RNA, 19 nt, Artificial Sequence
  Description of Artificial Sequence: Synthetic oligonucleotide
uagaacacugcucuugugc

SEQ ID NO: 2889721 - RNA, 19 nt, Artificial Sequence
  Description of Artificial Sequence: Synthetic oligonucleotide
cuaaaauaauaccauuuac

SEQ ID NO: 2889722 - RNA, 19 nt, Artificial Sequence
  Description of Artificial Sequence: Synthetic oligonucleotide
acuucuuauuuguuaaguc

SEQ ID NO: 2889723 - RNA, 19 nt, Artificial Sequence
  Description of Artificial Sequence: Synthetic oligonucleotide
aucccauaauucuauauag

SEQ ID NO: 2889724 - RNA, 19 nt, Artificial Sequence
  Description of Artificial Sequence: Synthetic oligonucleotide
agaacuuccaaugaccauc

SEQ ID NO: 2889725 - RNA, 19 nt, Artificial Sequence
  Description of Artificial Sequence: Synthetic oligonucleotide
agcauugaagcucagccag

SEQ ID NO: 2889726 - RNA, 19 nt, Artificial Sequence
  Description of Artificial Sequence: Synthetic oligonucleotide
uccaugauggauuucccag

SEQ ID NO: 2889727 - RNA, 19 nt, Artificial Sequence
  Description of Artificial Sequence: Synthetic oligonucleotide
uagaagauggacgagagaa

SEQ ID NO: 2889728 - RNA, 19 nt, Artificial Sequence
  Description of Artificial Sequence: Synthetic oligonucleotide
aaaacuucauggcgcuugg

SEQ ID NO: 2889729 - RNA, 19 nt, Artificial Sequence
  Description of Artificial Sequence: Synthetic oligonucleotide
ucuugugcuuuucacacug

SEQ ID NO: 2889730 - RNA, 19 nt, Artificial Sequence
  Description of Artificial Sequence: Synthetic oligonucleotide
uacuaaaauaauaccauuu

SEQ ID NO: 2889731 - RNA, 19 nt, Artificial Sequence
  Description of Artificial Sequence: Synthetic oligonucleotide
uccaacaucccauaauucu

SEQ ID NO: 2889732 - RNA, 19 nt, Artificial Sequence
  Description of Artificial Sequence: Synthetic oligonucleotide
uuaauacucuucagcauug

SEQ ID NO: 2889733 - RNA, 19 nt, Artificial Sequence
  Description of Artificial Sequence: Synthetic oligonucleotide
uucuuauuuguuaagucau

SEQ ID NO: 2889734 - RNA, 19 nt, Artificial Sequence
  Description of Artificial Sequence: Synthetic oligonucleotide
ucugauauccaccgagcag

SEQ ID NO: 2889735 - RNA, 19 nt, Artificial Sequence
  Description of Artificial Sequence: Synthetic oligonucleotide
ugagaacuuccaaugacca

SEQ ID NO: 2889736 - RNA, 19 nt, Artificial Sequence
  Description of Artificial Sequence: Synthetic oligonucleotide
auaauccccauuugucacc

SEQ ID NO: 2889737 - RNA, 19 nt, Artificial Sequence
  Description of Artificial Sequence: Synthetic oligonucleotide
ugagaugacuucuuauuug

SEQ ID NO: 2889738 - RNA, 19 nt, Artificial Sequence
  Description of Artificial Sequence: Synthetic oligonucleotide
aagucauguacuaaaauaa

SEQ ID NO: 2889739 - RNA, 19 nt, Artificial Sequence
  Description of Artificial Sequence: Synthetic oligonucleotide
cacagagccuccaacaucc

SEQ ID NO: 2889740 - RNA, 19 nt, Artificial Sequence
  Description of Artificial Sequence: Synthetic oligonucleotide
auuuacagaguuguagaac

SEQ ID NO: 2889741 - RNA, 19 nt, Artificial Sequence
  Description of Artificial Sequence: Synthetic oligonucleotide
aaugaccaucgauauaagu

SEQ ID NO: 2889742 - RNA, 19 nt, Artificial Sequence
  Description of Artificial Sequence: Synthetic oligonucleotide
ugauggauuucccagcacu

SEQ ID NO: 2889743 - RNA, 19 nt, Artificial Sequence
  Description of Artificial Sequence: Synthetic oligonucleotide
gucccuauuaccaacagug

SEQ ID NO: 2889744 - RNA, 19 nt, Artificial Sequence
  Description of Artificial Sequence: Synthetic oligonucleotide
ugaagcucagccagaaagc

SEQ ID NO: 2889745 - RNA, 19 nt, Artificial Sequence
  Description of Artificial Sequence: Synthetic oligonucleotide
ucagccagaaagcaguccu

SEQ ID NO: 2889746 - RNA, 19 nt, Artificial Sequence
  Description of Artificial Sequence: Synthetic oligonucleotide
ucuucagcauugaagcuca

SEQ ID NO: 2889747 - RNA, 19 nt, Artificial Sequence
  Description of Artificial Sequence: Synthetic oligonucleotide
agaguuguagaacacugcu

SEQ ID NO: 2889748 - RNA, 19 nt, Artificial Sequence
  Description of Artificial Sequence: Synthetic oligonucleotide
auguacuaaaauaauacca

SEQ ID NO: 2889749 - RNA, 19 nt, Artificial Sequence
  Description of Artificial Sequence: Synthetic oligonucleotide
gucaugaacucugauaucc

SEQ ID NO: 2889750 - RNA, 19 nt, Artificial Sequence
  Description of Artificial Sequence: Synthetic oligonucleotide
cuugauuguggcauagaag

SEQ ID NO: 2889751 - RNA, 19 nt, Artificial Sequence
  Description of Artificial Sequence: Synthetic oligonucleotide
uuugagaugacuucuuauu

SEQ ID NO: 2889752 - RNA, 19 nt, Artificial Sequence
  Description of Artificial Sequence: Synthetic oligonucleotide
uaaguuuugagaugacuuc

SEQ ID NO: 2889753 - RNA, 19 nt, Artificial Sequence
  Description of Artificial Sequence: Synthetic oligonucleotide
ucaccaggacuccaguugg

SEQ ID NO: 2889754 - RNA, 19 nt, Artificial Sequence
  Description of Artificial Sequence: Synthetic oligonucleotide
ucugguccaguuuaguccc

SEQ ID NO: 2889755 - RNA, 19 nt, Artificial Sequence
  Description of Artificial Sequence: Synthetic oligonucleotide
aguaggucuucucuucugg

SEQ ID NO: 2889756 - RNA, 19 nt, Artificial Sequence
  Description of Artificial Sequence: Synthetic oligonucleotide
auuucccagcacuugauug

SEQ ID NO: 2889757 - RNA, 19 nt, Artificial Sequence
  Description of Artificial Sequence: Synthetic oligonucleotide
cauagaagauggacgagag

SEQ ID NO: 2889758 - RNA, 19 nt, Artificial Sequence
  Description of Artificial Sequence: Synthetic oligonucleotide
cuucuuauuuguuaaguca

SEQ ID NO: 2889759 - RNA, 19 nt, Artificial Sequence
  Description of Artificial Sequence: Synthetic oligonucleotide
ucuuauuuguuaagucaug

SEQ ID NO: 2889760 - RNA, 19 nt, Artificial Sequence
  Description of Artificial Sequence: Synthetic oligonucleotide
uuuguuaagucauguacua

SEQ ID NO: 2889761 - RNA, 19 nt, Artificial Sequence
  Description of Artificial Sequence: Synthetic oligonucleotide
cugauauccaccgagcagc

SEQ ID NO: 2889762 - RNA, 19 nt, Artificial Sequence
  Description of Artificial Sequence: Synthetic oligonucleotide
agcaaauuguucucgguca

SEQ ID NO: 2889763 - RNA, 19 nt, Artificial Sequence
  Description of Artificial Sequence: Synthetic oligonucleotide
cagaaagcaguccuaauug

SEQ ID NO: 2889764 - RNA, 19 nt, Artificial Sequence
  Description of Artificial Sequence: Synthetic oligonucleotide
ucuguugagaacuuccaau

SEQ ID NO: 2889765 - RNA, 19 nt, Artificial Sequence
  Description of Artificial Sequence: Synthetic oligonucleotide
aagcaguccuaauugaaaa

SEQ ID NO: 2889766 - RNA, 19 nt, Artificial Sequence
  Description of Artificial Sequence: Synthetic oligonucleotide
agcaguccuaauugaaaac

SEQ ID NO: 2889767 - RNA, 19 nt, Artificial Sequence
  Description of Artificial Sequence: Synthetic oligonucleotide
accauuuacagaguuguag

SEQ ID NO: 2889768 - RNA, 19 nt, Artificial Sequence
  Description of Artificial Sequence: Synthetic oligonucleotide
uguugagaacuuccaauga

SEQ ID NO: 2889769 - RNA, 19 nt, Artificial Sequence
  Description of Artificial Sequence: Synthetic oligonucleotide
uuaagucauguacuaaaau

SEQ ID NO: 2889770 - RNA, 19 nt, Artificial Sequence
  Description of Artificial Sequence: Synthetic oligonucleotide
caggacuccaguuggaacc

SEQ ID NO: 2889771 - RNA, 19 nt, Artificial Sequence
  Description of Artificial Sequence: Synthetic oligonucleotide
uggcauagaagauggacga

SEQ ID NO: 2889772 - RNA, 19 nt, Artificial Sequence
  Description of Artificial Sequence: Synthetic oligonucleotide
ugauuaucagcaaauuguu

SEQ ID NO: 2889773 - RNA, 19 nt, Artificial Sequence
  Description of Artificial Sequence: Synthetic oligonucleotide
uucucggucauaaucccca

SEQ ID NO: 2889774 - RNA, 19 nt, Artificial Sequence
  Description of Artificial Sequence: Synthetic oligonucleotide
auaccauuuacagaguugu

SEQ ID NO: 2889775 - RNA, 19 nt, Artificial Sequence
  Description of Artificial Sequence: Synthetic oligonucleotide
cuucuuuguagucaugaac

SEQ ID NO: 2889776 - RNA, 19 nt, Artificial Sequence
  Description of Artificial Sequence: Synthetic oligonucleotide
gaaaacuucauggcgcuug

SEQ ID NO: 2889777 - RNA, 19 nt, Artificial Sequence
  Description of Artificial Sequence: Synthetic oligonucleotide
aucucuguugagaacuucc

SEQ ID NO: 2889778 - RNA, 19 nt, Artificial Sequence
  Description of Artificial Sequence: Synthetic oligonucleotide
gauuguggcauagaagaug

SEQ ID NO: 2889779 - RNA, 19 nt, Artificial Sequence
  Description of Artificial Sequence: Synthetic oligonucleotide
uguagaacacugcucuugu

SEQ ID NO: 2889780 - RNA, 19 nt, Artificial Sequence
  Description of Artificial Sequence: Synthetic oligonucleotide
uuuagucccuauuaccaac

SEQ ID NO: 2889781 - RNA, 19 nt, Artificial Sequence
  Description of Artificial Sequence: Synthetic oligonucleotide
cuguugagaacuuccaaug

SEQ ID NO: 2889782 - RNA, 19 nt, Artificial Sequence
  Description of Artificial Sequence: Synthetic oligonucleotide
uccaguuuagucccuauua

SEQ ID NO: 2889783 - RNA, 19 nt, Artificial Sequence
  Description of Artificial Sequence: Synthetic oligonucleotide
aaguuuugagaugacuucu

SEQ ID NO: 2889784 - RNA, 19 nt, Artificial Sequence
  Description of Artificial Sequence: Synthetic oligonucleotide
ugaccaucgauauaaguuu

SEQ ID NO: 2889785 - RNA, 19 nt, Artificial Sequence
  Description of Artificial Sequence: Synthetic oligonucleotide
uauaaguuuugagaugacu

SEQ ID NO: 2889786 - RNA, 19 nt, Artificial Sequence
  Description of Artificial Sequence: Synthetic oligonucleotide
uauaguaggucuucucuuc

SEQ ID NO: 2889787 - RNA, 19 nt, Artificial Sequence
  Description of Artificial Sequence: Synthetic oligonucleotide
uaggucuucucuucugggg

SEQ ID NO: 2889788 - RNA, 19 nt, Artificial Sequence
  Description of Artificial Sequence: Synthetic oligonucleotide
cauaauccccauuugucac

SEQ ID NO: 2889789 - RNA, 19 nt, Artificial Sequence
  Description of Artificial Sequence: Synthetic oligonucleotide
ugggguuccuucuuuguag

SEQ ID NO: 2889790 - RNA, 19 nt, Artificial Sequence
  Description of Artificial Sequence: Synthetic oligonucleotide
guggcauagaagauggacg

SEQ ID NO: 2889791 - RNA, 19 nt, Artificial Sequence
  Description of Artificial Sequence: Synthetic oligonucleotide
ucccuauuaccaacagugg

SEQ ID NO: 2889792 - RNA, 19 nt, Artificial Sequence
  Description of Artificial Sequence: Synthetic oligonucleotide
agugggauuugauuaucag

SEQ ID NO: 2889793 - RNA, 19 nt, Artificial Sequence
  Description of Artificial Sequence: Synthetic oligonucleotide
aaauuguucucggucauaa

SEQ ID NO: 2889794 - RNA, 19 nt, Artificial Sequence
  Description of Artificial Sequence: Synthetic oligonucleotide
uuagucccuauuaccaaca

SEQ ID NO: 2889795 - RNA, 19 nt, Artificial Sequence
  Description of Artificial Sequence: Synthetic oligonucleotide
auuuguuaagucauguacu

SEQ ID NO: 2889796 - RNA, 19 nt, Artificial Sequence
  Description of Artificial Sequence: Synthetic oligonucleotide
auauccaccgagcagccca

SEQ ID NO: 2889797 - RNA, 19 nt, Artificial Sequence
  Description of Artificial Sequence: Synthetic oligonucleotide
augacuucuuauuuguuaa

SEQ ID NO: 2889798 - RNA, 19 nt, Artificial Sequence
  Description of Artificial Sequence: Synthetic oligonucleotide
caguuuagucccuauuacc

SEQ ID NO: 2889799 - RNA, 19 nt, Artificial Sequence
  Description of Artificial Sequence: Synthetic oligonucleotide
ugugcuuuucacacugcug

SEQ ID NO: 2889800 - RNA, 19 nt, Artificial Sequence
  Description of Artificial Sequence: Synthetic oligonucleotide
gugggauuugauuaucagc

SEQ ID NO: 2889801 - RNA, 19 nt, Artificial Sequence
  Description of Artificial Sequence: Synthetic oligonucleotide
uguggcauagaagauggac

SEQ ID NO: 2889802 - RNA, 19 nt, Artificial Sequence
  Description of Artificial Sequence: Synthetic oligonucleotide
auacucuucagcauugaag

SEQ ID NO: 2889803 - RNA, 19 nt, Artificial Sequence
  Description of Artificial Sequence: Synthetic oligonucleotide
uuuugagaugacuucuuau

SEQ ID NO: 2889804 - RNA, 19 nt, Artificial Sequence
  Description of Artificial Sequence: Synthetic oligonucleotide
aguuuagucccuauuacca

SEQ ID NO: 2889805 - RNA, 19 nt, Artificial Sequence
  Description of Artificial Sequence: Synthetic oligonucleotide
aaccaaaucucuguugaga

SEQ ID NO: 2889806 - RNA, 19 nt, Artificial Sequence
  Description of Artificial Sequence: Synthetic oligonucleotide
gaacuuccaaugaccaucg

SEQ ID NO: 2889807 - RNA, 19 nt, Artificial Sequence
  Description of Artificial Sequence: Synthetic oligonucleotide
ucggucauaauccccauuu

SEQ ID NO: 2889808 - RNA, 19 nt, Artificial Sequence
  Description of Artificial Sequence: Synthetic oligonucleotide
uugagaugacuucuuauuu

SEQ ID NO: 2889809 - RNA, 19 nt, Artificial Sequence
  Description of Artificial Sequence: Synthetic oligonucleotide
auuaccaacagugggauuu

SEQ ID NO: 2889810 - RNA, 19 nt, Artificial Sequence
  Description of Artificial Sequence: Synthetic oligonucleotide
caucgauauaaguuuugag

SEQ ID NO: 2889811 - RNA, 19 nt, Artificial Sequence
  Description of Artificial Sequence: Synthetic oligonucleotide
uggcacugcccacagagcc

SEQ ID NO: 2889812 - RNA, 19 nt, Artificial Sequence
  Description of Artificial Sequence: Synthetic oligonucleotide
gaugacuucuuauuuguua

SEQ ID NO: 2889813 - RNA, 19 nt, Artificial Sequence
  Description of Artificial Sequence: Synthetic oligonucleotide
uugaaaacuucauggcgcu

SEQ ID NO: 2889814 - RNA, 19 nt, Artificial Sequence
  Description of Artificial Sequence: Synthetic oligonucleotide
uggauuucccagcacuuga

SEQ ID NO: 2889815 - RNA, 19 nt, Artificial Sequence
  Description of Artificial Sequence: Synthetic oligonucleotide
uuaucagcaaauuguucuc

SEQ ID NO: 2889816 - RNA, 19 nt, Artificial Sequence
  Description of Artificial Sequence: Synthetic oligonucleotide
ugaaucugguccaguuuag

SEQ ID NO: 2889817 - RNA, 19 nt, Artificial Sequence
  Description of Artificial Sequence: Synthetic oligonucleotide
agaacacugcucuugugcu

SEQ ID NO: 2889818 - RNA, 19 nt, Artificial Sequence
  Description of Artificial Sequence: Synthetic oligonucleotide
acuugauuguggcauagaa

SEQ ID NO: 2889819 - RNA, 19 nt, Artificial Sequence
  Description of Artificial Sequence: Synthetic oligonucleotide
auaaguuuugagaugacuu

SEQ ID NO: 2889820 - RNA, 19 nt, Artificial Sequence
  Description of Artificial Sequence: Synthetic oligonucleotide
uccuaauugaaaacuucau

SEQ ID NO: 2889821 - RNA, 19 nt, Artificial Sequence
  Description of Artificial Sequence: Synthetic oligonucleotide
aacuucauggcgcuugguu

SEQ ID NO: 2889822 - RNA, 19 nt, Artificial Sequence
  Description of Artificial Sequence: Synthetic oligonucleotide
ccauaauucuauauaguag

SEQ ID NO: 2889823 - RNA, 19 nt, Artificial Sequence
  Description of Artificial Sequence: Synthetic oligonucleotide
uaauaccauuuacagaguu

SEQ ID NO: 2889824 - RNA, 19 nt, Artificial Sequence
  Description of Artificial Sequence: Synthetic oligonucleotide
ucucuguugagaacuucca

SEQ ID NO: 2889825 - RNA, 19 nt, Artificial Sequence
  Description of Artificial Sequence: Synthetic oligonucleotide
ucccauaauucuauauagu

SEQ ID NO: 2889826 - RNA, 19 nt, Artificial Sequence
  Description of Artificial Sequence: Synthetic oligonucleotide
gacgagagaagauuuccca

SEQ ID NO: 2889827 - RNA, 19 nt, Artificial Sequence
  Description of Artificial Sequence: Synthetic oligonucleotide
uuauuuguuaagucaugua

SEQ ID NO: 2889828 - RNA, 19 nt, Artificial Sequence
  Description of Artificial Sequence: Synthetic oligonucleotide
gaagauggacgagagaaga

SEQ ID NO: 2889829 - RNA, 19 nt, Artificial Sequence
  Description of Artificial Sequence: Synthetic oligonucleotide
augaaucugguccaguuua

SEQ ID NO: 2889830 - RNA, 19 nt, Artificial Sequence
  Description of Artificial Sequence: Synthetic oligonucleotide
uguucucggucauaauccc

SEQ ID NO: 2889831 - RNA, 19 nt, Artificial Sequence
  Description of Artificial Sequence: Synthetic oligonucleotide
accaaaucucuguugagaa

SEQ ID NO: 2889832 - RNA, 19 nt, Artificial Sequence
  Description of Artificial Sequence: Synthetic oligonucleotide
ugacuucuuauuuguuaag

SEQ ID NO: 2889833 - RNA, 19 nt, Artificial Sequence
  Description of Artificial Sequence: Synthetic oligonucleotide
agaaagcaguccuaauuga

SEQ ID NO: 2889834 - RNA, 19 nt, Artificial Sequence
  Description of Artificial Sequence: Synthetic oligonucleotide
auccccauuugucaccagg

SEQ ID NO: 2889835 - RNA, 19 nt, Artificial Sequence
  Description of Artificial Sequence: Synthetic oligonucleotide
aguccuaauugaaaacuuc

SEQ ID NO: 2889836 - RNA, 19 nt, Artificial Sequence
  Description of Artificial Sequence: Synthetic oligonucleotide
uaauucuauauaguagguc

SEQ ID NO: 2889837 - RNA, 19 nt, Artificial Sequence
  Description of Artificial Sequence: Synthetic oligonucleotide
ugcucuugugcuuuucaca

SEQ ID NO: 2889838 - RNA, 19 nt, Artificial Sequence
  Description of Artificial Sequence: Synthetic oligonucleotide
ucaugaacucugauaucca

SEQ ID NO: 2889839 - RNA, 19 nt, Artificial Sequence
  Description of Artificial Sequence: Synthetic oligonucleotide
cuuccaaugaccaucgaua

SEQ ID NO: 2889840 - RNA, 19 nt, Artificial Sequence
  Description of Artificial Sequence: Synthetic oligonucleotide
uggacgagagaagauuucc

SEQ ID NO: 2889841 - RNA, 19 nt, Artificial Sequence
  Description of Artificial Sequence: Synthetic oligonucleotide
guuucaugaaucuggucca

SEQ ID NO: 2889842 - RNA, 19 nt, Artificial Sequence
  Description of Artificial Sequence: Synthetic oligonucleotide
cuuuucacacugcuggcac

SEQ ID NO: 2889843 - RNA, 19 nt, Artificial Sequence
  Description of Artificial Sequence: Synthetic oligonucleotide
uggaaccaaaucucuguug

SEQ ID NO: 2889844 - RNA, 19 nt, Artificial Sequence
  Description of Artificial Sequence: Synthetic oligonucleotide
caguccaugauggauuucc

SEQ ID NO: 2889845 - RNA, 19 nt, Artificial Sequence
  Description of Artificial Sequence: Synthetic oligonucleotide
aaucucuguugagaacuuc

SEQ ID NO: 2889846 - RNA, 19 nt, Artificial Sequence
  Description of Artificial Sequence: Synthetic oligonucleotide
caugaacucugauauccac

SEQ ID NO: 2889847 - RNA, 19 nt, Artificial Sequence
  Description of Artificial Sequence: Synthetic oligonucleotide
aaagcaguccuaauugaaa

SEQ ID NO: 2889848 - RNA, 19 nt, Artificial Sequence
  Description of Artificial Sequence: Synthetic oligonucleotide
cuauauaguaggucuucuc

SEQ ID NO: 2889849 - RNA, 19 nt, Artificial Sequence
  Description of Artificial Sequence: Synthetic oligonucleotide
gucaccaggacuccaguug

SEQ ID NO: 2889850 - RNA, 19 nt, Artificial Sequence
  Description of Artificial Sequence: Synthetic oligonucleotide
ucuauauaguaggucuucu

SEQ ID NO: 2889851 - RNA, 19 nt, Artificial Sequence
  Description of Artificial Sequence: Synthetic oligonucleotide
gaaccaaaucucuguugag

SEQ ID NO: 2889852 - RNA, 19 nt, Artificial Sequence
  Description of Artificial Sequence: Synthetic oligonucleotide
augaccaucgauauaaguu

SEQ ID NO: 2889853 - RNA, 19 nt, Artificial Sequence
  Description of Artificial Sequence: Synthetic oligonucleotide
ucuuuguagucaugaacuc

SEQ ID NO: 2889854 - RNA, 19 nt, Artificial Sequence
  Description of Artificial Sequence: Synthetic oligonucleotide
acagaguuguagaacacug

SEQ ID NO: 2889855 - RNA, 19 nt, Artificial Sequence
  Description of Artificial Sequence: Synthetic oligonucleotide
auauaguaggucuucucuu

SEQ ID NO: 2889856 - RNA, 19 nt, Artificial Sequence
  Description of Artificial Sequence: Synthetic oligonucleotide
acuuccaaugaccaucgau

SEQ ID NO: 2889857 - RNA, 19 nt, Artificial Sequence
  Description of Artificial Sequence: Synthetic oligonucleotide
guaggucuucucuucuggg

SEQ ID NO: 2889858 - RNA, 19 nt, Artificial Sequence
  Description of Artificial Sequence: Synthetic oligonucleotide
uuacagaguuguagaacac

SEQ ID NO: 2889859 - RNA, 19 nt, Artificial Sequence
  Description of Artificial Sequence: Synthetic oligonucleotide
acucugauauccaccgagc

SEQ ID NO: 2889860 - RNA, 19 nt, Artificial Sequence
  Description of Artificial Sequence: Synthetic oligonucleotide
cagaguuguagaacacugc

SEQ ID NO: 2889861 - RNA, 19 nt, Artificial Sequence
  Description of Artificial Sequence: Synthetic oligonucleotide
agucaugaacucugauauc

SEQ ID NO: 2889862 - RNA, 19 nt, Artificial Sequence
  Description of Artificial Sequence: Synthetic oligonucleotide
uccccauuugucaccagga

SEQ ID NO: 2889863 - RNA, 19 nt, Artificial Sequence
  Description of Artificial Sequence: Synthetic oligonucleotide
uuccaaugaccaucgauau

SEQ ID NO: 2889864 - RNA, 19 nt, Artificial Sequence
  Description of Artificial Sequence: Synthetic oligonucleotide
ugauauccaccgagcagcc

SEQ ID NO: 2889865 - RNA, 19 nt, Artificial Sequence
  Description of Artificial Sequence: Synthetic oligonucleotide
ggaaccaaaucucuguuga

SEQ ID NO: 2889866 - RNA, 19 nt, Artificial Sequence
  Description of Artificial Sequence: Synthetic oligonucleotide
auaguaggucuucucuucu

SEQ ID NO: 2889867 - RNA, 19 nt, Artificial Sequence
  Description of Artificial Sequence: Synthetic oligonucleotide
ccuaauugaaaacuucaug

SEQ ID NO: 2889868 - RNA, 19 nt, Artificial Sequence
  Description of Artificial Sequence: Synthetic oligonucleotide
guagucaugaacucugaua

SEQ ID NO: 2889869 - RNA, 19 nt, Artificial Sequence
  Description of Artificial Sequence: Synthetic oligonucleotide
ucaugaaucugguccaguu

SEQ ID NO: 2889870 - RNA, 19 nt, Artificial Sequence
  Description of Artificial Sequence: Synthetic oligonucleotide
auaauucuauauaguaggu

SEQ ID NO: 2889871 - RNA, 19 nt, Artificial Sequence
  Description of Artificial Sequence: Synthetic oligonucleotide
uacagaguuguagaacacu

SEQ ID NO: 2889872 - RNA, 19 nt, Artificial Sequence
  Description of Artificial Sequence: Synthetic oligonucleotide
uucuauauaguaggucuuc

SEQ ID NO: 2889873 - RNA, 19 nt, Artificial Sequence
  Description of Artificial Sequence: Synthetic oligonucleotide
gauuaucagcaaauuguuc

SEQ ID NO: 2889874 - RNA, 19 nt, Artificial Sequence
  Description of Artificial Sequence: Synthetic oligonucleotide
uguagucaugaacucugau

SEQ ID NO: 2889875 - RNA, 19 nt, Artificial Sequence
  Description of Artificial Sequence: Synthetic oligonucleotide
acuucauggcgcuugguuu

SEQ ID NO: 2889876 - RNA, 19 nt, Artificial Sequence
  Description of Artificial Sequence: Synthetic oligonucleotide
aggucuucucuucuggggu

SEQ ID NO: 2889877 - RNA, 19 nt, Artificial Sequence
  Description of Artificial Sequence: Synthetic oligonucleotide
augauggauuucccagcac

SEQ ID NO: 2889878 - RNA, 19 nt, Artificial Sequence
  Description of Artificial Sequence: Synthetic oligonucleotide
cuucauggcgcuugguuuc

SEQ ID NO: 2889879 - RNA, 19 nt, Artificial Sequence
  Description of Artificial Sequence: Synthetic oligonucleotide
caacagugggauuugauua

SEQ ID NO: 2889880 - RNA, 19 nt, Artificial Sequence
  Description of Artificial Sequence: Synthetic oligonucleotide
acaucccauaauucuauau

SEQ ID NO: 2889881 - RNA, 19 nt, Artificial Sequence
  Description of Artificial Sequence: Synthetic oligonucleotide
uagucccuauuaccaacag

SEQ ID NO: 2889882 - RNA, 19 nt, Artificial Sequence
  Description of Artificial Sequence: Synthetic oligonucleotide
cagcaaauuguucucgguc

SEQ ID NO: 2889883 - RNA, 19 nt, Artificial Sequence
  Description of Artificial Sequence: Synthetic oligonucleotide
auggcgcuugguuucauga

SEQ ID NO: 2889884 - RNA, 19 nt, Artificial Sequence
  Description of Artificial Sequence: Synthetic oligonucleotide
ugauuguggcauagaagau

SEQ ID NO: 2889885 - RNA, 19 nt, Artificial Sequence
  Description of Artificial Sequence: Synthetic oligonucleotide
aauuguucucggucauaau

SEQ ID NO: 2889886 - RNA, 19 nt, Artificial Sequence
  Description of Artificial Sequence: Synthetic oligonucleotide
cucuucagcauugaagcuc

SEQ ID NO: 2889887 - RNA, 19 nt, Artificial Sequence
  Description of Artificial Sequence: Synthetic oligonucleotide
ugcuuuucacacugcuggc

SEQ ID NO: 2889888 - RNA, 19 nt, Artificial Sequence
  Description of Artificial Sequence: Synthetic oligonucleotide
uuguagucaugaacucuga

SEQ ID NO: 2889889 - RNA, 19 nt, Artificial Sequence
  Description of Artificial Sequence: Synthetic oligonucleotide
uuggaaccaaaucucuguu

SEQ ID NO: 2889890 - RNA, 19 nt, Artificial Sequence
  Description of Artificial Sequence: Synthetic oligonucleotide
uaguaggucuucucuucug

SEQ ID NO: 2889891 - RNA, 19 nt, Artificial Sequence
  Description of Artificial Sequence: Synthetic oligonucleotide
gauuugauuaucagcaaau

SEQ ID NO: 2889892 - RNA, 19 nt, Artificial Sequence
  Description of Artificial Sequence: Synthetic oligonucleotide
guuggaaccaaaucucugu

SEQ ID NO: 2889893 - RNA, 19 nt, Artificial Sequence
  Description of Artificial Sequence: Synthetic oligonucleotide
auagaagauggacgagaga

SEQ ID NO: 2889894 - RNA, 19 nt, Artificial Sequence
  Description of Artificial Sequence: Synthetic oligonucleotide
auauaaguuuugagaugac

SEQ ID NO: 2889895 - RNA, 19 nt, Artificial Sequence
  Description of Artificial Sequence: Synthetic oligonucleotide
guccuaauugaaaacuuca

SEQ ID NO: 2889896 - RNA, 19 nt, Artificial Sequence
  Description of Artificial Sequence: Synthetic oligonucleotide
uuucaugaaucugguccag

SEQ ID NO: 2889897 - RNA, 19 nt, Artificial Sequence
  Description of Artificial Sequence: Synthetic oligonucleotide
gaagcucagccagaaagca

SEQ ID NO: 2889898 - RNA, 19 nt, Artificial Sequence
  Description of Artificial Sequence: Synthetic oligonucleotide
ucacacugcuggcacugcc

SEQ ID NO: 2889899 - RNA, 19 nt, Artificial Sequence
  Description of Artificial Sequence: Synthetic oligonucleotide
acgagagaagauuucccaa

SEQ ID NO: 2889900 - RNA, 19 nt, Artificial Sequence
  Description of Artificial Sequence: Synthetic oligonucleotide
agaagauggacgagagaag

SEQ ID NO: 2889901 - RNA, 19 nt, Artificial Sequence
  Description of Artificial Sequence: Synthetic oligonucleotide
gcucuugugcuuuucacac

SEQ ID NO: 2889902 - RNA, 19 nt, Artificial Sequence
  Description of Artificial Sequence: Synthetic oligonucleotide
acugcucuugugcuuuuca

SEQ ID NO: 2889903 - RNA, 19 nt, Artificial Sequence
  Description of Artificial Sequence: Synthetic oligonucleotide
aguccaugauggauuuccc

SEQ ID NO: 2889904 - RNA, 19 nt, Artificial Sequence
  Description of Artificial Sequence: Synthetic oligonucleotide
cccuauuaccaacaguggg

SEQ ID NO: 2889905 - RNA, 19 nt, Artificial Sequence
  Description of Artificial Sequence: Synthetic oligonucleotide
agcucagccagaaagcagu

SEQ ID NO: 2889906 - RNA, 19 nt, Artificial Sequence
  Description of Artificial Sequence: Synthetic oligonucleotide
uaauccccauuugucacca

SEQ ID NO: 2889907 - RNA, 19 nt, Artificial Sequence
  Description of Artificial Sequence: Synthetic oligonucleotide
aacacugcucuugugcuuu

SEQ ID NO: 2889908 - RNA, 19 nt, Artificial Sequence
  Description of Artificial Sequence: Synthetic oligonucleotide
uuuucacacugcuggcacu

SEQ ID NO: 2889909 - RNA, 19 nt, Artificial Sequence
  Description of Artificial Sequence: Synthetic oligonucleotide
agcccacaguccaugaugg

SEQ ID NO: 2889910 - RNA, 19 nt, Artificial Sequence
  Description of Artificial Sequence: Synthetic oligonucleotide
cacacugcuggcacugccc

SEQ ID NO: 2889911 - RNA, 19 nt, Artificial Sequence
  Description of Artificial Sequence: Synthetic oligonucleotide
caucccauaauucuauaua

SEQ ID NO: 2889912 - RNA, 19 nt, Artificial Sequence
  Description of Artificial Sequence: Synthetic oligonucleotide
gaaagcaguccuaauugaa

SEQ ID NO: 2889913 - RNA, 19 nt, Artificial Sequence
  Description of Artificial Sequence: Synthetic oligonucleotide
cauuuacagaguuguagaa

SEQ ID NO: 2889914 - RNA, 19 nt, Artificial Sequence
  Description of Artificial Sequence: Synthetic oligonucleotide
agucccuauuaccaacagu

SEQ ID NO: 2889915 - RNA, 19 nt, Artificial Sequence
  Description of Artificial Sequence: Synthetic oligonucleotide
caugauggauuucccagca

SEQ ID NO: 2889916 - RNA, 19 nt, Artificial Sequence
  Description of Artificial Sequence: Synthetic oligonucleotide
aacaucccauaauucuaua

SEQ ID NO: 2889917 - RNA, 19 nt, Artificial Sequence
  Description of Artificial Sequence: Synthetic oligonucleotide
auuugauuaucagcaaauu

SEQ ID NO: 2889918 - RNA, 19 nt, Artificial Sequence
  Description of Artificial Sequence: Synthetic oligonucleotide
acagugggauuugauuauc

SEQ ID NO: 2889919 - RNA, 19 nt, Artificial Sequence
  Description of Artificial Sequence: Synthetic oligonucleotide
ucugggguuccuucuuugu

SEQ ID NO: 2889920 - RNA, 19 nt, Artificial Sequence
  Description of Artificial Sequence: Synthetic oligonucleotide
aguuggaaccaaaucucug

SEQ ID NO: 2889921 - RNA, 19 nt, Artificial Sequence
  Description of Artificial Sequence: Synthetic oligonucleotide
guuaagucauguacuaaaa

SEQ ID NO: 2889922 - RNA, 19 nt, Artificial Sequence
  Description of Artificial Sequence: Synthetic oligonucleotide
guuuagucccuauuaccaa

SEQ ID NO: 2889923 - RNA, 19 nt, Artificial Sequence
  Description of Artificial Sequence: Synthetic oligonucleotide
agucauguacuaaaauaau

SEQ ID NO: 2889924 - RNA, 19 nt, Artificial Sequence
  Description of Artificial Sequence: Synthetic oligonucleotide
cagcccacaguccaugaug

SEQ ID NO: 2889925 - RNA, 19 nt, Artificial Sequence
  Description of Artificial Sequence: Synthetic oligonucleotide
agauggacgagagaagauu

SEQ ID NO: 2889926 - RNA, 19 nt, Artificial Sequence
  Description of Artificial Sequence: Synthetic oligonucleotide
caaugaccaucgauauaag

SEQ ID NO: 2889927 - RNA, 19 nt, Artificial Sequence
  Description of Artificial Sequence: Synthetic oligonucleotide
uuguuaagucauguacuaa

SEQ ID NO: 2889928 - RNA, 19 nt, Artificial Sequence
  Description of Artificial Sequence: Synthetic oligonucleotide
uuaccaacagugggauuug

SEQ ID NO: 2889929 - RNA, 19 nt, Artificial Sequence
  Description of Artificial Sequence: Synthetic oligonucleotide
ccaguuggaaccaaaucuc

SEQ ID NO: 2889930 - RNA, 19 nt, Artificial Sequence
  Description of Artificial Sequence: Synthetic oligonucleotide
ccuauuaccaacaguggga

SEQ ID NO: 2889931 - RNA, 19 nt, Artificial Sequence
  Description of Artificial Sequence: Synthetic oligonucleotide
caccgagcagcccacaguc

SEQ ID NO: 2889932 - RNA, 19 nt, Artificial Sequence
  Description of Artificial Sequence: Synthetic oligonucleotide
gaguuguagaacacugcuc

SEQ ID NO: 2889933 - RNA, 19 nt, Artificial Sequence
  Description of Artificial Sequence: Synthetic oligonucleotide
uccaaugaccaucgauaua

SEQ ID NO: 2889934 - RNA, 19 nt, Artificial Sequence
  Description of Artificial Sequence: Synthetic oligonucleotide
cugcucuugugcuuuucac

SEQ ID NO: 2889935 - RNA, 19 nt, Artificial Sequence
  Description of Artificial Sequence: Synthetic oligonucleotide
gacuucuuauuuguuaagu

SEQ ID NO: 2889936 - RNA, 19 nt, Artificial Sequence
  Description of Artificial Sequence: Synthetic oligonucleotide
auggauuucccagcacuug

SEQ ID NO: 2889937 - RNA, 19 nt, Artificial Sequence
  Description of Artificial Sequence: Synthetic oligonucleotide
cuuauuuguuaagucaugu

SEQ ID NO: 2889938 - RNA, 19 nt, Artificial Sequence
  Description of Artificial Sequence: Synthetic oligonucleotide
ggauuugauuaucagcaaa

SEQ ID NO: 2889939 - RNA, 19 nt, Artificial Sequence
  Description of Artificial Sequence: Synthetic oligonucleotide
aagauggacgagagaagau

SEQ ID NO: 2889940 - RNA, 19 nt, Artificial Sequence
  Description of Artificial Sequence: Synthetic oligonucleotide
ccaaugaccaucgauauaa

SEQ ID NO: 2889941 - RNA, 19 nt, Artificial Sequence
  Description of Artificial Sequence: Synthetic oligonucleotide
guagaacacugcucuugug

SEQ ID NO: 2889942 - RNA, 19 nt, Artificial Sequence
  Description of Artificial Sequence: Synthetic oligonucleotide
uucccagcacuugauugug

SEQ ID NO: 2889943 - RNA, 19 nt, Artificial Sequence
  Description of Artificial Sequence: Synthetic oligonucleotide
ccauuuacagaguuguaga

SEQ ID NO: 2889944 - RNA, 19 nt, Artificial Sequence
  Description of Artificial Sequence: Synthetic oligonucleotide
guuuugagaugacuucuua

SEQ ID NO: 2889945 - RNA, 19 nt, Artificial Sequence
  Description of Artificial Sequence: Synthetic oligonucleotide
cucugauauccaccgagca

SEQ ID NO: 2889946 - RNA, 19 nt, Artificial Sequence
  Description of Artificial Sequence: Synthetic oligonucleotide
aauccccauuugucaccag

SEQ ID NO: 2889947 - RNA, 19 nt, Artificial Sequence
  Description of Artificial Sequence: Synthetic oligonucleotide
agagccuccaacaucccau

SEQ ID NO: 2889948 - RNA, 19 nt, Artificial Sequence
  Description of Artificial Sequence: Synthetic oligonucleotide
ccaguuuagucccuauuac

SEQ ID NO: 2889949 - RNA, 19 nt, Artificial Sequence
  Description of Artificial Sequence: Synthetic oligonucleotide
uucaugaaucugguccagu

SEQ ID NO: 2889950 - RNA, 19 nt, Artificial Sequence
  Description of Artificial Sequence: Synthetic oligonucleotide
uauccaccgagcagcccac

SEQ ID NO: 2889951 - RNA, 19 nt, Artificial Sequence
  Description of Artificial Sequence: Synthetic oligonucleotide
ugcccacagagccuccaac

SEQ ID NO: 2889952 - RNA, 19 nt, Artificial Sequence
  Description of Artificial Sequence: Synthetic oligonucleotide
ccaugauggauuucccagc

SEQ ID NO: 2889953 - RNA, 19 nt, Artificial Sequence
  Description of Artificial Sequence: Synthetic oligonucleotide
guccaugauggauuuccca

SEQ ID NO: 2889954 - RNA, 19 nt, Artificial Sequence
  Description of Artificial Sequence: Synthetic oligonucleotide
auaauaccauuuacagagu

SEQ ID NO: 2889955 - RNA, 19 nt, Artificial Sequence
  Description of Artificial Sequence: Synthetic oligonucleotide
guacuaaaauaauaccauu

SEQ ID NO: 2889956 - RNA, 19 nt, Artificial Sequence
  Description of Artificial Sequence: Synthetic oligonucleotide
cccauaauucuauauagua

SEQ ID NO: 2889957 - RNA, 19 nt, Artificial Sequence
  Description of Artificial Sequence: Synthetic oligonucleotide
cauuugucaccaggacucc

SEQ ID NO: 2889958 - RNA, 19 nt, Artificial Sequence
  Description of Artificial Sequence: Synthetic oligonucleotide
cagcauugaagcucagcca

SEQ ID NO: 2889959 - RNA, 19 nt, Artificial Sequence
  Description of Artificial Sequence: Synthetic oligonucleotide
uaccauuuacagaguugua

SEQ ID NO: 2889960 - RNA, 19 nt, Artificial Sequence
  Description of Artificial Sequence: Synthetic oligonucleotide
auucuauauaguaggucuu

SEQ ID NO: 2889961 - RNA, 19 nt, Artificial Sequence
  Description of Artificial Sequence: Synthetic oligonucleotide
accaucgauauaaguuuug

SEQ ID NO: 2889962 - RNA, 19 nt, Artificial Sequence
  Description of Artificial Sequence: Synthetic oligonucleotide
acugcuggcacugcccaca

SEQ ID NO: 2889963 - RNA, 19 nt, Artificial Sequence
  Description of Artificial Sequence: Synthetic oligonucleotide
ugguuucaugaaucugguc

SEQ ID NO: 2889964 - RNA, 19 nt, Artificial Sequence
  Description of Artificial Sequence: Synthetic oligonucleotide
aacuuccaaugaccaucga

SEQ ID NO: 2889965 - RNA, 19 nt, Artificial Sequence
  Description of Artificial Sequence: Synthetic oligonucleotide
guucucggucauaaucccc

SEQ ID NO: 2889966 - RNA, 19 nt, Artificial Sequence
  Description of Artificial Sequence: Synthetic oligonucleotide
gguuccuucuuuguaguca

SEQ ID NO: 2889967 - RNA, 19 nt, Artificial Sequence
  Description of Artificial Sequence: Synthetic oligonucleotide
cagugggauuugauuauca

SEQ ID NO: 2889968 - RNA, 19 nt, Artificial Sequence
  Description of Artificial Sequence: Synthetic oligonucleotide
cgauauaaguuuugagaug

SEQ ID NO: 2889969 - RNA, 19 nt, Artificial Sequence
  Description of Artificial Sequence: Synthetic oligonucleotide
gcauagaagauggacgaga

SEQ ID NO: 2889970 - RNA, 19 nt, Artificial Sequence
  Description of Artificial Sequence: Synthetic oligonucleotide
ggucauaauccccauuugu

SEQ ID NO: 2889971 - RNA, 19 nt, Artificial Sequence
  Description of Artificial Sequence: Synthetic oligonucleotide
gauauccaccgagcagccc

SEQ ID NO: 2889972 - RNA, 19 nt, Artificial Sequence
  Description of Artificial Sequence: Synthetic oligonucleotide
cauggcgcuugguuucaug

SEQ ID NO: 2889973 - RNA, 19 nt, Artificial Sequence
  Description of Artificial Sequence: Synthetic oligonucleotide
uggcgcuugguuucaugaa

SEQ ID NO: 2889974 - RNA, 19 nt, Artificial Sequence
  Description of Artificial Sequence: Synthetic oligonucleotide
cccagcacuugauuguggc

SEQ ID NO: 2889975 - RNA, 19 nt, Artificial Sequence
  Description of Artificial Sequence: Synthetic oligonucleotide
gaacucugauauccaccga

SEQ ID NO: 2889976 - RNA, 19 nt, Artificial Sequence
  Description of Artificial Sequence: Synthetic oligonucleotide
uucauggcgcuugguuuca

SEQ ID NO: 2889977 - RNA, 19 nt, Artificial Sequence
  Description of Artificial Sequence: Synthetic oligonucleotide
uauuaccaacagugggauu

SEQ ID NO: 2889978 - RNA, 19 nt, Artificial Sequence
  Description of Artificial Sequence: Synthetic oligonucleotide
ggacgagagaagauuuccc

SEQ ID NO: 2889979 - RNA, 19 nt, Artificial Sequence
  Description of Artificial Sequence: Synthetic oligonucleotide
aguuuugagaugacuucuu

SEQ ID NO: 2889980 - RNA, 19 nt, Artificial Sequence
  Description of Artificial Sequence: Synthetic oligonucleotide
aaacuucauggcgcuuggu

SEQ ID NO: 2889981 - RNA, 19 nt, Artificial Sequence
  Description of Artificial Sequence: Synthetic oligonucleotide
auuugucaccaggacucca

SEQ ID NO: 2889982 - RNA, 19 nt, Artificial Sequence
  Description of Artificial Sequence: Synthetic oligonucleotide
agcacuugauuguggcaua

SEQ ID NO: 2889983 - RNA, 19 nt, Artificial Sequence
  Description of Artificial Sequence: Synthetic oligonucleotide
cuuuguagucaugaacucu

SEQ ID NO: 2889984 - RNA, 19 nt, Artificial Sequence
  Description of Artificial Sequence: Synthetic oligonucleotide
ccaaaucucuguugagaac

SEQ ID NO: 2889985 - RNA, 19 nt, Artificial Sequence
  Description of Artificial Sequence: Synthetic oligonucleotide
agccagaaagcaguccuaa

SEQ ID NO: 2889986 - RNA, 19 nt, Artificial Sequence
  Description of Artificial Sequence: Synthetic oligonucleotide
cucuguugagaacuuccaa

SEQ ID NO: 2889987 - RNA, 19 nt, Artificial Sequence
  Description of Artificial Sequence: Synthetic oligonucleotide
guuccuucuuuguagucau

SEQ ID NO: 2889988 - RNA, 19 nt, Artificial Sequence
  Description of Artificial Sequence: Synthetic oligonucleotide
acuccaguuggaaccaaau

SEQ ID NO: 2889989 - RNA, 19 nt, Artificial Sequence
  Description of Artificial Sequence: Synthetic oligonucleotide
aggacuccaguuggaacca

SEQ ID NO: 2889990 - RNA, 19 nt, Artificial Sequence
  Description of Artificial Sequence: Synthetic oligonucleotide
accgagcagcccacagucc

SEQ ID NO: 2889991 - RNA, 19 nt, Artificial Sequence
  Description of Artificial Sequence: Synthetic oligonucleotide
acagagccuccaacauccc

SEQ ID NO: 2889992 - RNA, 19 nt, Artificial Sequence
  Description of Artificial Sequence: Synthetic oligonucleotide
cauugaagcucagccagaa

SEQ ID NO: 2889993 - RNA, 19 nt, Artificial Sequence
  Description of Artificial Sequence: Synthetic oligonucleotide
agcagcccacaguccauga

SEQ ID NO: 2889994 - RNA, 19 nt, Artificial Sequence
  Description of Artificial Sequence: Synthetic oligonucleotide
ucucggucauaauccccau

SEQ ID NO: 2889995 - RNA, 19 nt, Artificial Sequence
  Description of Artificial Sequence: Synthetic oligonucleotide
acaguccaugauggauuuc

SEQ ID NO: 2889996 - RNA, 19 nt, Artificial Sequence
  Description of Artificial Sequence: Synthetic oligonucleotide
gagaacuuccaaugaccau

SEQ ID NO: 2889997 - RNA, 19 nt, Artificial Sequence
  Description of Artificial Sequence: Synthetic oligonucleotide
gauuucccagcacuugauu

SEQ ID NO: 2889998 - RNA, 19 nt, Artificial Sequence
  Description of Artificial Sequence: Synthetic oligonucleotide
ggcauagaagauggacgag

SEQ ID NO: 2889999 - RNA, 19 nt, Artificial Sequence
  Description of Artificial Sequence: Synthetic oligonucleotide
caguuggaaccaaaucucu

SEQ ID NO: 2890000 - RNA, 19 nt, Artificial Sequence
  Description of Artificial Sequence: Synthetic oligonucleotide
cuauuaccaacagugggau

SEQ ID NO: 2890001 - RNA, 19 nt, Artificial Sequence
  Description of Artificial Sequence: Synthetic oligonucleotide
ugaaaacuucauggcgcuu

SEQ ID NO: 2890002 - RNA, 19 nt, Artificial Sequence
  Description of Artificial Sequence: Synthetic oligonucleotide
gcaguccuaauugaaaacu

SEQ ID NO: 2890003 - RNA, 19 nt, Artificial Sequence
  Description of Artificial Sequence: Synthetic oligonucleotide
gauggauuucccagcacuu

SEQ ID NO: 2890004 - RNA, 19 nt, Artificial Sequence
  Description of Artificial Sequence: Synthetic oligonucleotide
accaggacuccaguuggaa

SEQ ID NO: 2890005 - RNA, 19 nt, Artificial Sequence
  Description of Artificial Sequence: Synthetic oligonucleotide
ccaacaucccauaauucua

SEQ ID NO: 2890006 - RNA, 19 nt, Artificial Sequence
  Description of Artificial Sequence: Synthetic oligonucleotide
ccaggacuccaguuggaac

SEQ ID NO: 2890007 - RNA, 19 nt, Artificial Sequence
  Description of Artificial Sequence: Synthetic oligonucleotide
gggauuugauuaucagcaa

SEQ ID NO: 2890008 - RNA, 19 nt, Artificial Sequence
  Description of Artificial Sequence: Synthetic oligonucleotide
gaaucugguccaguuuagu

SEQ ID NO: 2890009 - RNA, 19 nt, Artificial Sequence
  Description of Artificial Sequence: Synthetic oligonucleotide
gcacuugauuguggcauag

SEQ ID NO: 2890010 - RNA, 19 nt, Artificial Sequence
  Description of Artificial Sequence: Synthetic oligonucleotide
cagagccuccaacauccca

SEQ ID NO: 2890011 - RNA, 19 nt, Artificial Sequence
  Description of Artificial Sequence: Synthetic oligonucleotide
agccuccaacaucccauaa

SEQ ID NO: 2890012 - RNA, 19 nt, Artificial Sequence
  Description of Artificial Sequence: Synthetic oligonucleotide
gcccacagagccuccaaca

SEQ ID NO: 2890013 - RNA, 19 nt, Artificial Sequence
  Description of Artificial Sequence: Synthetic oligonucleotide
gagccuccaacaucccaua

SEQ ID NO: 2890014 - RNA, 19 nt, Artificial Sequence
  Description of Artificial Sequence: Synthetic oligonucleotide
gacuccaguuggaaccaaa

SEQ ID NO: 2890015 - RNA, 19 nt, Artificial Sequence
  Description of Artificial Sequence: Synthetic oligonucleotide
caguccuaauugaaaacuu

SEQ ID NO: 2890016 - RNA, 19 nt, Artificial Sequence
  Description of Artificial Sequence: Synthetic oligonucleotide
cugggguuccuucuuugua

SEQ ID NO: 2890017 - RNA, 19 nt, Artificial Sequence
  Description of Artificial Sequence: Synthetic oligonucleotide
caugaaucugguccaguuu

SEQ ID NO: 2890018 - RNA, 19 nt, Artificial Sequence
  Description of Artificial Sequence: Synthetic oligonucleotide
cagcacuugauuguggcau

SEQ ID NO: 2890019 - RNA, 19 nt, Artificial Sequence
  Description of Artificial Sequence: Synthetic oligonucleotide
ccaucgauauaaguuuuga

SEQ ID NO: 2890020 - RNA, 19 nt, Artificial Sequence
  Description of Artificial Sequence: Synthetic oligonucleotide
ugguccaguuuagucccua

SEQ ID NO: 2890021 - RNA, 19 nt, Artificial Sequence
  Description of Artificial Sequence: Synthetic oligonucleotide
gaccaucgauauaaguuuu

SEQ ID NO: 2890022 - RNA, 19 nt, Artificial Sequence
  Description of Artificial Sequence: Synthetic oligonucleotide
ccccauuugucaccaggac

SEQ ID NO: 2890023 - RNA, 19 nt, Artificial Sequence
  Description of Artificial Sequence: Synthetic oligonucleotide
caaauuguucucggucaua

SEQ ID NO: 2890024 - RNA, 19 nt, Artificial Sequence
  Description of Artificial Sequence: Synthetic oligonucleotide
gcgcuugguuucaugaauc

SEQ ID NO: 2890025 - RNA, 19 nt, Artificial Sequence
  Description of Artificial Sequence: Synthetic oligonucleotide
cacuugauuguggcauaga

SEQ ID NO: 2890026 - RNA, 19 nt, Artificial Sequence
  Description of Artificial Sequence: Synthetic oligonucleotide
cucuugugcuuuucacacu

SEQ ID NO: 2890027 - RNA, 19 nt, Artificial Sequence
  Description of Artificial Sequence: Synthetic oligonucleotide
ccuucuuuguagucaugaa

SEQ ID NO: 2890028 - RNA, 19 nt, Artificial Sequence
  Description of Artificial Sequence: Synthetic oligonucleotide
cacugcccacagagccucc

SEQ ID NO: 2890029 - RNA, 19 nt, Artificial Sequence
  Description of Artificial Sequence: Synthetic oligonucleotide
ggcgcuugguuucaugaau

SEQ ID NO: 2890030 - RNA, 19 nt, Artificial Sequence
  Description of Artificial Sequence: Synthetic oligonucleotide
cagccagaaagcaguccua

SEQ ID NO: 2890031 - RNA, 19 nt, Artificial Sequence
  Description of Artificial Sequence: Synthetic oligonucleotide
ccgagcagcccacagucca

SEQ ID NO: 2890032 - RNA, 19 nt, Artificial Sequence
  Description of Artificial Sequence: Synthetic oligonucleotide
gcaaauuguucucggucau

SEQ ID NO: 2890033 - RNA, 19 nt, Artificial Sequence
  Description of Artificial Sequence: Synthetic oligonucleotide
ccuccaacaucccauaauu

SEQ ID NO: 2890034 - RNA, 19 nt, Artificial Sequence
  Description of Artificial Sequence: Synthetic oligonucleotide
acacugcucuugugcuuuu

SEQ ID NO: 2890035 - RNA, 19 nt, Artificial Sequence
  Description of Artificial Sequence: Synthetic oligonucleotide
cacugcucuugugcuuuuc

SEQ ID NO: 2890036 - RNA, 19 nt, Artificial Sequence
  Description of Artificial Sequence: Synthetic oligonucleotide
guccaguuuagucccuauu

SEQ ID NO: 2890037 - RNA, 19 nt, Artificial Sequence
  Description of Artificial Sequence: Synthetic oligonucleotide
gggguuccuucuuuguagu

SEQ ID NO: 2890038 - RNA, 19 nt, Artificial Sequence
  Description of Artificial Sequence: Synthetic oligonucleotide
ccagcacuugauuguggca

SEQ ID NO: 2890039 - RNA, 19 nt, Artificial Sequence
  Description of Artificial Sequence: Synthetic oligonucleotide
gcacugcccacagagccuc

SEQ ID NO: 2890040 - RNA, 19 nt, Artificial Sequence
  Description of Artificial Sequence: Synthetic oligonucleotide
gcauugaagcucagccaga

SEQ ID NO: 2890041 - RNA, 19 nt, Artificial Sequence
  Description of Artificial Sequence: Synthetic oligonucleotide
cggucauaauccccauuug

SEQ ID NO: 2890042 - RNA, 19 nt, Artificial Sequence
  Description of Artificial Sequence: Synthetic oligonucleotide
ucauggcgcuugguuucau

SEQ ID NO: 2890043 - RNA, 19 nt, Artificial Sequence
  Description of Artificial Sequence: Synthetic oligonucleotide
gccuccaacaucccauaau

SEQ ID NO: 2890044 - RNA, 19 nt, Artificial Sequence
  Description of Artificial Sequence: Synthetic oligonucleotide
ccacaguccaugauggauu

SEQ ID NO: 2890045 - RNA, 19 nt, Artificial Sequence
  Description of Artificial Sequence: Synthetic oligonucleotide
cugcccacagagccuccaa

SEQ ID NO: 2890046 - RNA, 19 nt, Artificial Sequence
  Description of Artificial Sequence: Synthetic oligonucleotide
cuucugggguuccuucuuu

SEQ ID NO: 2890047 - RNA, 19 nt, Artificial Sequence
  Description of Artificial Sequence: Synthetic oligonucleotide
ggucuucucuucugggguu

SEQ ID NO: 2890048 - RNA, 19 nt, Artificial Sequence
  Description of Artificial Sequence: Synthetic oligonucleotide
auccaccgagcagcccaca

SEQ ID NO: 2890049 - RNA, 19 nt, Artificial Sequence
  Description of Artificial Sequence: Synthetic oligonucleotide
ggauuucccagcacuugau

SEQ ID NO: 2890050 - RNA, 19 nt, Artificial Sequence
  Description of Artificial Sequence: Synthetic oligonucleotide
gguccaguuuagucccuau

SEQ ID NO: 2890051 - RNA, 19 nt, Artificial Sequence
  Description of Artificial Sequence: Synthetic oligonucleotide
gcccacaguccaugaugga

SEQ ID NO: 2890052 - RNA, 19 nt, Artificial Sequence
  Description of Artificial Sequence: Synthetic oligonucleotide
cucggucauaauccccauu

SEQ ID NO: 2890053 - RNA, 19 nt, Artificial Sequence
  Description of Artificial Sequence: Synthetic oligonucleotide
cugguccaguuuagucccu

SEQ ID NO: 2890054 - RNA, 19 nt, Artificial Sequence
  Description of Artificial Sequence: Synthetic oligonucleotide
ggcacugcccacagagccu

SEQ ID NO: 2890055 - RNA, 19 nt, Artificial Sequence
  Description of Artificial Sequence: Synthetic oligonucleotide
cuucucuucugggguuccu

SEQ ID NO: 2890056 - RNA, 19 nt, Artificial Sequence
  Description of Artificial Sequence: Synthetic oligonucleotide
cccacaguccaugauggau

SEQ ID NO: 2890057 - RNA, 19 nt, Artificial Sequence
  Description of Artificial Sequence: Synthetic oligonucleotide
cgcuugguuucaugaaucu

SEQ ID NO: 2890058 - RNA, 19 nt, Artificial Sequence
  Description of Artificial Sequence: Synthetic oligonucleotide
cccacagagccuccaacau

SEQ ID NO: 2890059 - RNA, 19 nt, Artificial Sequence
  Description of Artificial Sequence: Synthetic oligonucleotide
gcagcccacaguccaugau

SEQ ID NO: 2890060 - RNA, 19 nt, Artificial Sequence
  Description of Artificial Sequence: Synthetic oligonucleotide
ggacuccaguuggaaccaa

SEQ ID NO: 2890061 - RNA, 19 nt, Artificial Sequence
  Description of Artificial Sequence: Synthetic oligonucleotide
ccaccgagcagcccacagu

SEQ ID NO: 2890062 - RNA, 19 nt, Artificial Sequence
  Description of Artificial Sequence: Synthetic oligonucleotide
cgagcagcccacaguccau

SEQ ID NO: 2890063 - RNA, 19 nt, Artificial Sequence
  Description of Artificial Sequence: Synthetic oligonucleotide
aaaauaaucaugcuaaaag

SEQ ID NO: 2890064 - RNA, 19 nt, Artificial Sequence
  Description of Artificial Sequence: Synthetic oligonucleotide
uuuauauagauuuucaaag

SEQ ID NO: 2890065 - RNA, 19 nt, Artificial Sequence
  Description of Artificial Sequence: Synthetic oligonucleotide
aaaaccuuuugcuucaugc

SEQ ID NO: 2890066 - RNA, 19 nt, Artificial Sequence
  Description of Artificial Sequence: Synthetic oligonucleotide
aaaguuguacuuuauauag

SEQ ID NO: 2890067 - RNA, 19 nt, Artificial Sequence
  Description of Artificial Sequence: Synthetic oligonucleotide
aaucucaccgacuuaaacc

SEQ ID NO: 2890068 - RNA, 19 nt, Artificial Sequence
  Description of Artificial Sequence: Synthetic oligonucleotide
aaaauaaguaauuauuugu

SEQ ID NO: 2890069 - RNA, 19 nt, Artificial Sequence
  Description of Artificial Sequence: Synthetic oligonucleotide
ucaaaggaaagacugauug

SEQ ID NO: 2890070 - RNA, 19 nt, Artificial Sequence
  Description of Artificial Sequence: Synthetic oligonucleotide
uuuuacaccacacagcuga

SEQ ID NO: 2890071 - RNA, 19 nt, Artificial Sequence
  Description of Artificial Sequence: Synthetic oligonucleotide
aaauaaucaugcuaaaagu

SEQ ID NO: 2890072 - RNA, 19 nt, Artificial Sequence
  Description of Artificial Sequence: Synthetic oligonucleotide
uuauauagauuuucaaagg

SEQ ID NO: 2890073 - RNA, 19 nt, Artificial Sequence
  Description of Artificial Sequence: Synthetic oligonucleotide
aaauaaguaauuauuuguc

SEQ ID NO: 2890074 - RNA, 19 nt, Artificial Sequence
  Description of Artificial Sequence: Synthetic oligonucleotide
agaaaguuaguccaguggg

SEQ ID NO: 2890075 - RNA, 19 nt, Artificial Sequence
  Description of Artificial Sequence: Synthetic oligonucleotide
aaaccuuuugcuucaugcc

SEQ ID NO: 2890076 - RNA, 19 nt, Artificial Sequence
  Description of Artificial Sequence: Synthetic oligonucleotide
aaccuuuugcuucaugccc

SEQ ID NO: 2890077 - RNA, 19 nt, Artificial Sequence
  Description of Artificial Sequence: Synthetic oligonucleotide
uaaaauaaguaauuauuug

SEQ ID NO: 2890078 - RNA, 19 nt, Artificial Sequence
  Description of Artificial Sequence: Synthetic oligonucleotide
aauaaguaauuauuugucu

SEQ ID NO: 2890079 - RNA, 19 nt, Artificial Sequence
  Description of Artificial Sequence: Synthetic oligonucleotide
aagaaaguuaguccagugg

SEQ ID NO: 2890080 - RNA, 19 nt, Artificial Sequence
  Description of Artificial Sequence: Synthetic oligonucleotide
ucaacauaaaauaaguaau

SEQ ID NO: 2890081 - RNA, 19 nt, Artificial Sequence
  Description of Artificial Sequence: Synthetic oligonucleotide
aucucaccgacuuaaaccc

SEQ ID NO: 2890082 - RNA, 19 nt, Artificial Sequence
  Description of Artificial Sequence: Synthetic oligonucleotide
uaaucaacauaaaauaagu

SEQ ID NO: 2890083 - RNA, 19 nt, Artificial Sequence
  Description of Artificial Sequence: Synthetic oligonucleotide
uauauagauuuucaaagga

SEQ ID NO: 2890084 - RNA, 19 nt, Artificial Sequence
  Description of Artificial Sequence: Synthetic oligonucleotide
ucuacacuaaauacguacg

SEQ ID NO: 2890085 - RNA, 19 nt, Artificial Sequence
  Description of Artificial Sequence: Synthetic oligonucleotide
aguacaaugaaccgagcac

SEQ ID NO: 2890086 - RNA, 19 nt, Artificial Sequence
  Description of Artificial Sequence: Synthetic oligonucleotide
aucaacauaaaauaaguaa

SEQ ID NO: 2890087 - RNA, 19 nt, Artificial Sequence
  Description of Artificial Sequence: Synthetic oligonucleotide
agauuuucaaaggaaagac

SEQ ID NO: 2890088 - RNA, 19 nt, Artificial Sequence
  Description of Artificial Sequence: Synthetic oligonucleotide
aagaauacagagcugcugu

SEQ ID NO: 2890089 - RNA, 19 nt, Artificial Sequence
  Description of Artificial Sequence: Synthetic oligonucleotide
aaagagagaucucccaauc

SEQ ID NO: 2890090 - RNA, 19 nt, Artificial Sequence
  Description of Artificial Sequence: Synthetic oligonucleotide
aaaggaaagacugauugug

SEQ ID NO: 2890091 - RNA, 19 nt, Artificial Sequence
  Description of Artificial Sequence: Synthetic oligonucleotide
ucagguuucggccaaaaga

SEQ ID NO: 2890092 - RNA, 19 nt, Artificial Sequence
  Description of Artificial Sequence: Synthetic oligonucleotide
uaaaaguuguacuuuauau

SEQ ID NO: 2890093 - RNA, 19 nt, Artificial Sequence
  Description of Artificial Sequence: Synthetic oligonucleotide
uuguacuuuauauagauuu

SEQ ID NO: 2890094 - RNA, 19 nt, Artificial Sequence
  Description of Artificial Sequence: Synthetic oligonucleotide
agaucucccaaucucaccg

SEQ ID NO: 2890095 - RNA, 19 nt, Artificial Sequence
  Description of Artificial Sequence: Synthetic oligonucleotide
ucaaauguguucuucagaa

SEQ ID NO: 2890096 - RNA, 19 nt, Artificial Sequence
  Description of Artificial Sequence: Synthetic oligonucleotide
aacccuguggaauacagca

SEQ ID NO: 2890097 - RNA, 19 nt, Artificial Sequence
  Description of Artificial Sequence: Synthetic oligonucleotide
ucuucagaaggucuuauga

SEQ ID NO: 2890098 - RNA, 19 nt, Artificial Sequence
  Description of Artificial Sequence: Synthetic oligonucleotide
gaauacagcacuucuacac

SEQ ID NO: 2890099 - RNA, 19 nt, Artificial Sequence
  Description of Artificial Sequence: Synthetic oligonucleotide
aaaguuaguccagugggac

SEQ ID NO: 2890100 - RNA, 19 nt, Artificial Sequence
  Description of Artificial Sequence: Synthetic oligonucleotide
caaaagaauacagagcugc

SEQ ID NO: 2890101 - RNA, 19 nt, Artificial Sequence
  Description of Artificial Sequence: Synthetic oligonucleotide
guaaucaacauaaaauaag

SEQ ID NO: 2890102 - RNA, 19 nt, Artificial Sequence
  Description of Artificial Sequence: Synthetic oligonucleotide
uucuacacuaaauacguac

SEQ ID NO: 2890103 - RNA, 19 nt, Artificial Sequence
  Description of Artificial Sequence: Synthetic oligonucleotide
ucagaaggucuuaugauug

SEQ ID NO: 2890104 - RNA, 19 nt, Artificial Sequence
  Description of Artificial Sequence: Synthetic oligonucleotide
auuuuccccaaagaaaacc

SEQ ID NO: 2890105 - RNA, 19 nt, Artificial Sequence
  Description of Artificial Sequence: Synthetic oligonucleotide
auuuucaaaggaaagacug

SEQ ID NO: 2890106 - RNA, 19 nt, Artificial Sequence
  Description of Artificial Sequence: Synthetic oligonucleotide
cacuucuacacuaaauacg

SEQ ID NO: 2890107 - RNA, 19 nt, Artificial Sequence
  Description of Artificial Sequence: Synthetic oligonucleotide
ugugcuuucugaauuaaaa

SEQ ID NO: 2890108 - RNA, 19 nt, Artificial Sequence
  Description of Artificial Sequence: Synthetic oligonucleotide
uaaucaugcuaaaaguugu

SEQ ID NO: 2890109 - RNA, 19 nt, Artificial Sequence
  Description of Artificial Sequence: Synthetic oligonucleotide
agagagaucucccaaucuc

SEQ ID NO: 2890110 - RNA, 19 nt, Artificial Sequence
  Description of Artificial Sequence: Synthetic oligonucleotide
aauacagcacuucuacacu

SEQ ID NO: 2890111 - RNA, 19 nt, Artificial Sequence
  Description of Artificial Sequence: Synthetic oligonucleotide
uggaauacagcacuucuac

SEQ ID NO: 2890112 - RNA, 19 nt, Artificial Sequence
  Description of Artificial Sequence: Synthetic oligonucleotide
uacuuuauauagauuuuca

SEQ ID NO: 2890113 - RNA, 19 nt, Artificial Sequence
  Description of Artificial Sequence: Synthetic oligonucleotide
caaugaaccgagcacagcc

SEQ ID NO: 2890114 - RNA, 19 nt, Artificial Sequence
  Description of Artificial Sequence: Synthetic oligonucleotide
acauaaaauaaguaauuau

SEQ ID NO: 2890115 - RNA, 19 nt, Artificial Sequence
  Description of Artificial Sequence: Synthetic oligonucleotide
uaggaaaauaaucaugcua

SEQ ID NO: 2890116 - RNA, 19 nt, Artificial Sequence
  Description of Artificial Sequence: Synthetic oligonucleotide
aaggaaagacugauugugc

SEQ ID NO: 2890117 - RNA, 19 nt, Artificial Sequence
  Description of Artificial Sequence: Synthetic oligonucleotide
aagaaaaccuuuugcuuca

SEQ ID NO: 2890118 - RNA, 19 nt, Artificial Sequence
  Description of Artificial Sequence: Synthetic oligonucleotide
aguuguacuuuauauagau

SEQ ID NO: 2890119 - RNA, 19 nt, Artificial Sequence
  Description of Artificial Sequence: Synthetic oligonucleotide
gaagccaccuuccaacagg

SEQ ID NO: 2890120 - RNA, 19 nt, Artificial Sequence
  Description of Artificial Sequence: Synthetic oligonucleotide
cacaguacaaugaaccgag

SEQ ID NO: 2890121 - RNA, 19 nt, Artificial Sequence
  Description of Artificial Sequence: Synthetic oligonucleotide
ugcauuuuccccaaagaaa

SEQ ID NO: 2890122 - RNA, 19 nt, Artificial Sequence
  Description of Artificial Sequence: Synthetic oligonucleotide
uuuuccccaaagaaaaccu

SEQ ID NO: 2890123 - RNA, 19 nt, Artificial Sequence
  Description of Artificial Sequence: Synthetic oligonucleotide
uuuucaaaggaaagacuga

SEQ ID NO: 2890124 - RNA, 19 nt, Artificial Sequence
  Description of Artificial Sequence: Synthetic oligonucleotide
uaaacccuguggaauacag

SEQ ID NO: 2890125 - RNA, 19 nt, Artificial Sequence
  Description of Artificial Sequence: Synthetic oligonucleotide
aauaaucaugcuaaaaguu

SEQ ID NO: 2890126 - RNA, 19 nt, Artificial Sequence
  Description of Artificial Sequence: Synthetic oligonucleotide
cuuuauauagauuuucaaa

SEQ ID NO: 2890127 - RNA, 19 nt, Artificial Sequence
  Description of Artificial Sequence: Synthetic oligonucleotide
auaaucaugcuaaaaguug

SEQ ID NO: 2890128 - RNA, 19 nt, Artificial Sequence
  Description of Artificial Sequence: Synthetic oligonucleotide
aaaagagagaucucccaau

SEQ ID NO: 2890129 - RNA, 19 nt, Artificial Sequence
  Description of Artificial Sequence: Synthetic oligonucleotide
aaugaaccgagcacagccc

SEQ ID NO: 2890130 - RNA, 19 nt, Artificial Sequence
  Description of Artificial Sequence: Synthetic oligonucleotide
uguggaauacagcacuucu

SEQ ID NO: 2890131 - RNA, 19 nt, Artificial Sequence
  Description of Artificial Sequence: Synthetic oligonucleotide
aacauaaaauaaguaauua

SEQ ID NO: 2890132 - RNA, 19 nt, Artificial Sequence
  Description of Artificial Sequence: Synthetic oligonucleotide
acuucuacuguucagguuu

SEQ ID NO: 2890133 - RNA, 19 nt, Artificial Sequence
  Description of Artificial Sequence: Synthetic oligonucleotide
uagauuuucaaaggaaaga

SEQ ID NO: 2890134 - RNA, 19 nt, Artificial Sequence
  Description of Artificial Sequence: Synthetic oligonucleotide
auaaguaauuauuugucuu

SEQ ID NO: 2890135 - RNA, 19 nt, Artificial Sequence
  Description of Artificial Sequence: Synthetic oligonucleotide
ucaugcuaaaaguuguacu

SEQ ID NO: 2890136 - RNA, 19 nt, Artificial Sequence
  Description of Artificial Sequence: Synthetic oligonucleotide
agcacaguacaaugaaccg

SEQ ID NO: 2890137 - RNA, 19 nt, Artificial Sequence
  Description of Artificial Sequence: Synthetic oligonucleotide
uacuguucagguuucggcc

SEQ ID NO: 2890138 - RNA, 19 nt, Artificial Sequence
  Description of Artificial Sequence: Synthetic oligonucleotide
accgacuuaaacccugugg

SEQ ID NO: 2890139 - RNA, 19 nt, Artificial Sequence
  Description of Artificial Sequence: Synthetic oligonucleotide
gagcacaguacaaugaacc

SEQ ID NO: 2890140 - RNA, 19 nt, Artificial Sequence
  Description of Artificial Sequence: Synthetic oligonucleotide
auucaaauguguucuucag

SEQ ID NO: 2890141 - RNA, 19 nt, Artificial Sequence
  Description of Artificial Sequence: Synthetic oligonucleotide
aaagaauacagagcugcug

SEQ ID NO: 2890142 - RNA, 19 nt, Artificial Sequence
  Description of Artificial Sequence: Synthetic oligonucleotide
uaugauuggcuacuucuac

SEQ ID NO: 2890143 - RNA, 19 nt, Artificial Sequence
  Description of Artificial Sequence: Synthetic oligonucleotide
auuuaggaaaauaaucaug

SEQ ID NO: 2890144 - RNA, 19 nt, Artificial Sequence
  Description of Artificial Sequence: Synthetic oligonucleotide
uaaguaauuauuugucuuu

SEQ ID NO: 2890145 - RNA, 19 nt, Artificial Sequence
  Description of Artificial Sequence: Synthetic oligonucleotide
uucggccaaaagaauacag

SEQ ID NO: 2890146 - RNA, 19 nt, Artificial Sequence
  Description of Artificial Sequence: Synthetic oligonucleotide
augaaccgagcacagcccc

SEQ ID NO: 2890147 - RNA, 19 nt, Artificial Sequence
  Description of Artificial Sequence: Synthetic oligonucleotide
auagauuuucaaaggaaag

SEQ ID NO: 2890148 - RNA, 19 nt, Artificial Sequence
  Description of Artificial Sequence: Synthetic oligonucleotide
aggucuuaugauuggcuac

SEQ ID NO: 2890149 - RNA, 19 nt, Artificial Sequence
  Description of Artificial Sequence: Synthetic oligonucleotide
agcacagccccacagacug

SEQ ID NO: 2890150 - RNA, 19 nt, Artificial Sequence
  Description of Artificial Sequence: Synthetic oligonucleotide
acaccacacagcugaagcc

SEQ ID NO: 2890151 - RNA, 19 nt, Artificial Sequence
  Description of Artificial Sequence: Synthetic oligonucleotide
uacaaugaaccgagcacag

SEQ ID NO: 2890152 - RNA, 19 nt, Artificial Sequence
  Description of Artificial Sequence: Synthetic oligonucleotide
uccagugggacauucaaau

SEQ ID NO: 2890153 - RNA, 19 nt, Artificial Sequence
  Description of Artificial Sequence: Synthetic oligonucleotide
uguguucuucagaaggucu

SEQ ID NO: 2890154 - RNA, 19 nt, Artificial Sequence
  Description of Artificial Sequence: Synthetic oligonucleotide
agcacuucuacacuaaaua

SEQ ID NO: 2890155 - RNA, 19 nt, Artificial Sequence
  Description of Artificial Sequence: Synthetic oligonucleotide
aaagacugauugugcuuuc

SEQ ID NO: 2890156 - RNA, 19 nt, Artificial Sequence
  Description of Artificial Sequence: Synthetic oligonucleotide
aucaugcuaaaaguuguac

SEQ ID NO: 2890157 - RNA, 19 nt, Artificial Sequence
  Description of Artificial Sequence: Synthetic oligonucleotide
acuuuauauagauuuucaa

SEQ ID NO: 2890158 - RNA, 19 nt, Artificial Sequence
  Description of Artificial Sequence: Synthetic oligonucleotide
aagagagaucucccaaucu

SEQ ID NO: 2890159 - RNA, 19 nt, Artificial Sequence
  Description of Artificial Sequence: Synthetic oligonucleotide
uucaugcccguaaucaaca

SEQ ID NO: 2890160 - RNA, 19 nt, Artificial Sequence
  Description of Artificial Sequence: Synthetic oligonucleotide
cuacuguucagguuucggc

SEQ ID NO: 2890161 - RNA, 19 nt, Artificial Sequence
  Description of Artificial Sequence: Synthetic oligonucleotide
uuaggaaaauaaucaugcu

SEQ ID NO: 2890162 - RNA, 19 nt, Artificial Sequence
  Description of Artificial Sequence: Synthetic oligonucleotide
acacuaaauacguacgaaa

SEQ ID NO: 2890163 - RNA, 19 nt, Artificial Sequence
  Description of Artificial Sequence: Synthetic oligonucleotide
ucggccaaaagaauacaga

SEQ ID NO: 2890164 - RNA, 19 nt, Artificial Sequence
  Description of Artificial Sequence: Synthetic oligonucleotide
cuuccaacaggcagggugc

SEQ ID NO: 2890165 - RNA, 19 nt, Artificial Sequence
  Description of Artificial Sequence: Synthetic oligonucleotide
ugauugugcuuucugaauu

SEQ ID NO: 2890166 - RNA, 19 nt, Artificial Sequence
  Description of Artificial Sequence: Synthetic oligonucleotide
agaaggucuuaugauuggc

SEQ ID NO: 2890167 - RNA, 19 nt, Artificial Sequence
  Description of Artificial Sequence: Synthetic oligonucleotide
acagacugcauuuucccca

SEQ ID NO: 2890168 - RNA, 19 nt, Artificial Sequence
  Description of Artificial Sequence: Synthetic oligonucleotide
uguacuuuauauagauuuu

SEQ ID NO: 2890169 - RNA, 19 nt, Artificial Sequence
  Description of Artificial Sequence: Synthetic oligonucleotide
uuuugcuucaugcccguaa

SEQ ID NO: 2890170 - RNA, 19 nt, Artificial Sequence
  Description of Artificial Sequence: Synthetic oligonucleotide
aauacagagcugcugucua

SEQ ID NO: 2890171 - RNA, 19 nt, Artificial Sequence
  Description of Artificial Sequence: Synthetic oligonucleotide
aaggucuuaugauuggcua

SEQ ID NO: 2890172 - RNA, 19 nt, Artificial Sequence
  Description of Artificial Sequence: Synthetic oligonucleotide
uucagaaggucuuaugauu

SEQ ID NO: 2890173 - RNA, 19 nt, Artificial Sequence
  Description of Artificial Sequence: Synthetic oligonucleotide
ugcuucaugcccguaauca

SEQ ID NO: 2890174 - RNA, 19 nt, Artificial Sequence
  Description of Artificial Sequence: Synthetic oligonucleotide
agaauacagagcugcuguc

SEQ ID NO: 2890175 - RNA, 19 nt, Artificial Sequence
  Description of Artificial Sequence: Synthetic oligonucleotide
uuucaaaggaaagacugau

SEQ ID NO: 2890176 - RNA, 19 nt, Artificial Sequence
  Description of Artificial Sequence: Synthetic oligonucleotide
aggaaagacugauugugcu

SEQ ID NO: 2890177 - RNA, 19 nt, Artificial Sequence
  Description of Artificial Sequence: Synthetic oligonucleotide
aaacccuguggaauacagc

SEQ ID NO: 2890178 - RNA, 19 nt, Artificial Sequence
  Description of Artificial Sequence: Synthetic oligonucleotide
ucuacuguucagguuucgg

SEQ ID NO: 2890179 - RNA, 19 nt, Artificial Sequence
  Description of Artificial Sequence: Synthetic oligonucleotide
uuaugauuggcuacuucua

SEQ ID NO: 2890180 - RNA, 19 nt, Artificial Sequence
  Description of Artificial Sequence: Synthetic oligonucleotide
aagccaccuuccaacaggc

SEQ ID NO: 2890181 - RNA, 19 nt, Artificial Sequence
  Description of Artificial Sequence: Synthetic oligonucleotide
acugcauuuuccccaaaga

SEQ ID NO: 2890182 - RNA, 19 nt, Artificial Sequence
  Description of Artificial Sequence: Synthetic oligonucleotide
aaguuaguccagugggaca

SEQ ID NO: 2890183 - RNA, 19 nt, Artificial Sequence
  Description of Artificial Sequence: Synthetic oligonucleotide
acugauugugcuuucugaa

SEQ ID NO: 2890184 - RNA, 19 nt, Artificial Sequence
  Description of Artificial Sequence: Synthetic oligonucleotide
acagcugaagccaccuucc

SEQ ID NO: 2890185 - RNA, 19 nt, Artificial Sequence
  Description of Artificial Sequence: Synthetic oligonucleotide
cuuaugauuggcuacuucu

SEQ ID NO: 2890186 - RNA, 19 nt, Artificial Sequence
  Description of Artificial Sequence: Synthetic oligonucleotide
aaucaacauaaaauaagua

SEQ ID NO: 2890187 - RNA, 19 nt, Artificial Sequence
  Description of Artificial Sequence: Synthetic oligonucleotide
cuucaugcccguaaucaac

SEQ ID NO: 2890188 - RNA, 19 nt, Artificial Sequence
  Description of Artificial Sequence: Synthetic oligonucleotide
ugcuaaaaguuguacuuua

SEQ ID NO: 2890189 - RNA, 19 nt, Artificial Sequence
  Description of Artificial Sequence: Synthetic oligonucleotide
cauucaaauguguucuuca

SEQ ID NO: 2890190 - RNA, 19 nt, Artificial Sequence
  Description of Artificial Sequence: Synthetic oligonucleotide
uucagguuucggccaaaag

SEQ ID NO: 2890191 - RNA, 19 nt, Artificial Sequence
  Description of Artificial Sequence: Synthetic oligonucleotide
augauuggcuacuucuacu

SEQ ID NO: 2890192 - RNA, 19 nt, Artificial Sequence
  Description of Artificial Sequence: Synthetic oligonucleotide
ugcugucuaaacugucucc

SEQ ID NO: 2890193 - RNA, 19 nt, Artificial Sequence
  Description of Artificial Sequence: Synthetic oligonucleotide
auauagauuuucaaaggaa

SEQ ID NO: 2890194 - RNA, 19 nt, Artificial Sequence
  Description of Artificial Sequence: Synthetic oligonucleotide
ugcccgagagcacaguaca

SEQ ID NO: 2890195 - RNA, 19 nt, Artificial Sequence
  Description of Artificial Sequence: Synthetic oligonucleotide
uuugcuucaugcccguaau

SEQ ID NO: 2890196 - RNA, 19 nt, Artificial Sequence
  Description of Artificial Sequence: Synthetic oligonucleotide
gcuacuucuacuguucagg

SEQ ID NO: 2890197 - RNA, 19 nt, Artificial Sequence
  Description of Artificial Sequence: Synthetic oligonucleotide
gccaaaagaauacagagcu

SEQ ID NO: 2890198 - RNA, 19 nt, Artificial Sequence
  Description of Artificial Sequence: Synthetic oligonucleotide
acuuaaacccuguggaaua

SEQ ID NO: 2890199 - RNA, 19 nt, Artificial Sequence
  Description of Artificial Sequence: Synthetic oligonucleotide
uuggcuacuucuacuguuc

SEQ ID NO: 2890200 - RNA, 19 nt, Artificial Sequence
  Description of Artificial Sequence: Synthetic oligonucleotide
aaguaauuauuugucuuuu

SEQ ID NO: 2890201 - RNA, 19 nt, Artificial Sequence
  Description of Artificial Sequence: Synthetic oligonucleotide
cagaaggucuuaugauugg

SEQ ID NO: 2890202 - RNA, 19 nt, Artificial Sequence
  Description of Artificial Sequence: Synthetic oligonucleotide
cacuaaauacguacgaaaa

SEQ ID NO: 2890203 - RNA, 19 nt, Artificial Sequence
  Description of Artificial Sequence: Synthetic oligonucleotide
uucuucagaaggucuuaug

SEQ ID NO: 2890204 - RNA, 19 nt, Artificial Sequence
  Description of Artificial Sequence: Synthetic oligonucleotide
ucuuaugauuggcuacuuc

SEQ ID NO: 2890205 - RNA, 19 nt, Artificial Sequence
  Description of Artificial Sequence: Synthetic oligonucleotide
uacacuaaauacguacgaa

SEQ ID NO: 2890206 - RNA, 19 nt, Artificial Sequence
  Description of Artificial Sequence: Synthetic oligonucleotide
acagagcugcugucuaaac

SEQ ID NO: 2890207 - RNA, 19 nt, Artificial Sequence
  Description of Artificial Sequence: Synthetic oligonucleotide
cagguuucggccaaaagaa

SEQ ID NO: 2890208 - RNA, 19 nt, Artificial Sequence
  Description of Artificial Sequence: Synthetic oligonucleotide
guacuuuauauagauuuuc

SEQ ID NO: 2890209 - RNA, 19 nt, Artificial Sequence
  Description of Artificial Sequence: Synthetic oligonucleotide
guacaaugaaccgagcaca

SEQ ID NO: 2890210 - RNA, 19 nt, Artificial Sequence
  Description of Artificial Sequence: Synthetic oligonucleotide
acaaugaaccgagcacagc

SEQ ID NO: 2890211 - RNA, 19 nt, Artificial Sequence
  Description of Artificial Sequence: Synthetic oligonucleotide
acuguucagguuucggcca

SEQ ID NO: 2890212 - RNA, 19 nt, Artificial Sequence
  Description of Artificial Sequence: Synthetic oligonucleotide
aucucccaaucucaccgac

SEQ ID NO: 2890213 - RNA, 19 nt, Artificial Sequence
  Description of Artificial Sequence: Synthetic oligonucleotide
uuccccaaagaaaaccuuu

SEQ ID NO: 2890214 - RNA, 19 nt, Artificial Sequence
  Description of Artificial Sequence: Synthetic oligonucleotide
agagaucucccaaucucac

SEQ ID NO: 2890215 - RNA, 19 nt, Artificial Sequence
  Description of Artificial Sequence: Synthetic oligonucleotide
agacugauugugcuuucug

SEQ ID NO: 2890216 - RNA, 19 nt, Artificial Sequence
  Description of Artificial Sequence: Synthetic oligonucleotide
guuucggccaaaagaauac

SEQ ID NO: 2890217 - RNA, 19 nt, Artificial Sequence
  Description of Artificial Sequence: Synthetic oligonucleotide
agagcacaguacaaugaac

SEQ ID NO: 2890218 - RNA, 19 nt, Artificial Sequence
  Description of Artificial Sequence: Synthetic oligonucleotide
accuuuugcuucaugcccg

SEQ ID NO: 2890219 - RNA, 19 nt, Artificial Sequence
  Description of Artificial Sequence: Synthetic oligonucleotide
ugggacauucaaauguguu

SEQ ID NO: 2890220 - RNA, 19 nt, Artificial Sequence
  Description of Artificial Sequence: Synthetic oligonucleotide
caaucucaccgacuuaaac

SEQ ID NO: 2890221 - RNA, 19 nt, Artificial Sequence
  Description of Artificial Sequence: Synthetic oligonucleotide
gagagcacaguacaaugaa

SEQ ID NO: 2890222 - RNA, 19 nt, Artificial Sequence
  Description of Artificial Sequence: Synthetic oligonucleotide
uucaaaggaaagacugauu

SEQ ID NO: 2890223 - RNA, 19 nt, Artificial Sequence
  Description of Artificial Sequence: Synthetic oligonucleotide
aaguuguacuuuauauaga

SEQ ID NO: 2890224 - RNA, 19 nt, Artificial Sequence
  Description of Artificial Sequence: Synthetic oligonucleotide
gagaucucccaaucucacc

SEQ ID NO: 2890225 - RNA, 19 nt, Artificial Sequence
  Description of Artificial Sequence: Synthetic oligonucleotide
gaaaaccuuuugcuucaug

SEQ ID NO: 2890226 - RNA, 19 nt, Artificial Sequence
  Description of Artificial Sequence: Synthetic oligonucleotide
cccaaagaaaaccuuuugc

SEQ ID NO: 2890227 - RNA, 19 nt, Artificial Sequence
  Description of Artificial Sequence: Synthetic oligonucleotide
auuggcuacuucuacuguu

SEQ ID NO: 2890228 - RNA, 19 nt, Artificial Sequence
  Description of Artificial Sequence: Synthetic oligonucleotide
cacagacugcauuuucccc

SEQ ID NO: 2890229 - RNA, 19 nt, Artificial Sequence
  Description of Artificial Sequence: Synthetic oligonucleotide
augcccguaaucaacauaa

SEQ ID NO: 2890230 - RNA, 19 nt, Artificial Sequence
  Description of Artificial Sequence: Synthetic oligonucleotide
aguuaguccagugggacau

SEQ ID NO: 2890231 - RNA, 19 nt, Artificial Sequence
  Description of Artificial Sequence: Synthetic oligonucleotide
agugggacauucaaaugug

SEQ ID NO: 2890232 - RNA, 19 nt, Artificial Sequence
  Description of Artificial Sequence: Synthetic oligonucleotide
cauuuuccccaaagaaaac

SEQ ID NO: 2890233 - RNA, 19 nt, Artificial Sequence
  Description of Artificial Sequence: Synthetic oligonucleotide
cucaccgacuuaaacccug

SEQ ID NO: 2890234 - RNA, 19 nt, Artificial Sequence
  Description of Artificial Sequence: Synthetic oligonucleotide
uacagcacuucuacacuaa

SEQ ID NO: 2890235 - RNA, 19 nt, Artificial Sequence
  Description of Artificial Sequence: Synthetic oligonucleotide
aguccagugggacauucaa

SEQ ID NO: 2890236 - RNA, 19 nt, Artificial Sequence
  Description of Artificial Sequence: Synthetic oligonucleotide
cacagcugaagccaccuuc

SEQ ID NO: 2890237 - RNA, 19 nt, Artificial Sequence
  Description of Artificial Sequence: Synthetic oligonucleotide
cuacacuaaauacguacga

SEQ ID NO: 2890238 - RNA, 19 nt, Artificial Sequence
  Description of Artificial Sequence: Synthetic oligonucleotide
gauugugcuuucugaauua

SEQ ID NO: 2890239 - RNA, 19 nt, Artificial Sequence
  Description of Artificial Sequence: Synthetic oligonucleotide
gaaaguuaguccaguggga

SEQ ID NO: 2890240 - RNA, 19 nt, Artificial Sequence
  Description of Artificial Sequence: Synthetic oligonucleotide
gggacauucaaauguguuc

SEQ ID NO: 2890241 - RNA, 19 nt, Artificial Sequence
  Description of Artificial Sequence: Synthetic oligonucleotide
gcacuucuacacuaaauac

SEQ ID NO: 2890242 - RNA, 19 nt, Artificial Sequence
  Description of Artificial Sequence: Synthetic oligonucleotide
uccccaaagaaaaccuuuu

SEQ ID NO: 2890243 - RNA, 19 nt, Artificial Sequence
  Description of Artificial Sequence: Synthetic oligonucleotide
caguacaaugaaccgagca

SEQ ID NO: 2890244 - RNA, 19 nt, Artificial Sequence
  Description of Artificial Sequence: Synthetic oligonucleotide
gagagaucucccaaucuca

SEQ ID NO: 2890245 - RNA, 19 nt, Artificial Sequence
  Description of Artificial Sequence: Synthetic oligonucleotide
uugugcuuucugaauuaaa

SEQ ID NO: 2890246 - RNA, 19 nt, Artificial Sequence
  Description of Artificial Sequence: Synthetic oligonucleotide
auacagcacuucuacacua

SEQ ID NO: 2890247 - RNA, 19 nt, Artificial Sequence
  Description of Artificial Sequence: Synthetic oligonucleotide
caugcuaaaaguuguacuu

SEQ ID NO: 2890248 - RNA, 19 nt, Artificial Sequence
  Description of Artificial Sequence: Synthetic oligonucleotide
gccaccuuccaacaggcag

SEQ ID NO: 2890249 - RNA, 19 nt, Artificial Sequence
  Description of Artificial Sequence: Synthetic oligonucleotide
ccuuccaacaggcagggug

SEQ ID NO: 2890250 - RNA, 19 nt, Artificial Sequence
  Description of Artificial Sequence: Synthetic oligonucleotide
cugcauuuuccccaaagaa

SEQ ID NO: 2890251 - RNA, 19 nt, Artificial Sequence
  Description of Artificial Sequence: Synthetic oligonucleotide
cuuaaacccuguggaauac

SEQ ID NO: 2890252 - RNA, 19 nt, Artificial Sequence
  Description of Artificial Sequence: Synthetic oligonucleotide
uuaaacccuguggaauaca

SEQ ID NO: 2890253 - RNA, 19 nt, Artificial Sequence
  Description of Artificial Sequence: Synthetic oligonucleotide
uggcuacuucuacuguuca

SEQ ID NO: 2890254 - RNA, 19 nt, Artificial Sequence
  Description of Artificial Sequence: Synthetic oligonucleotide
uuacaccacacagcugaag

SEQ ID NO: 2890255 - RNA, 19 nt, Artificial Sequence
  Description of Artificial Sequence: Synthetic oligonucleotide
ucucccaaucucaccgacu

SEQ ID NO: 2890256 - RNA, 19 nt, Artificial Sequence
  Description of Artificial Sequence: Synthetic oligonucleotide
uuucggccaaaagaauaca

SEQ ID NO: 2890257 - RNA, 19 nt, Artificial Sequence
  Description of Artificial Sequence: Synthetic oligonucleotide
ugaaccgagcacagcccca

SEQ ID NO: 2890258 - RNA, 19 nt, Artificial Sequence
  Description of Artificial Sequence: Synthetic oligonucleotide
accgagcacagccccacag

SEQ ID NO: 2890259 - RNA, 19 nt, Artificial Sequence
  Description of Artificial Sequence: Synthetic oligonucleotide
aaucaugcuaaaaguugua

SEQ ID NO: 2890260 - RNA, 19 nt, Artificial Sequence
  Description of Artificial Sequence: Synthetic oligonucleotide
caacauaaaauaaguaauu

SEQ ID NO: 2890261 - RNA, 19 nt, Artificial Sequence
  Description of Artificial Sequence: Synthetic oligonucleotide
uucuacuguucagguuucg

SEQ ID NO: 2890262 - RNA, 19 nt, Artificial Sequence
  Description of Artificial Sequence: Synthetic oligonucleotide
cugcugucuaaacugucuc

SEQ ID NO: 2890263 - RNA, 19 nt, Artificial Sequence
  Description of Artificial Sequence: Synthetic oligonucleotide
ucucaccgacuuaaacccu

SEQ ID NO: 2890264 - RNA, 19 nt, Artificial Sequence
  Description of Artificial Sequence: Synthetic oligonucleotide
acaguacaaugaaccgagc

SEQ ID NO: 2890265 - RNA, 19 nt, Artificial Sequence
  Description of Artificial Sequence: Synthetic oligonucleotide
ucaccgacuuaaacccugu

SEQ ID NO: 2890266 - RNA, 19 nt, Artificial Sequence
  Description of Artificial Sequence: Synthetic oligonucleotide
cggccaaaagaauacagag

SEQ ID NO: 2890267 - RNA, 19 nt, Artificial Sequence
  Description of Artificial Sequence: Synthetic oligonucleotide
cagugggacauucaaaugu

SEQ ID NO: 2890268 - RNA, 19 nt, Artificial Sequence
  Description of Artificial Sequence: Synthetic oligonucleotide
ccaccuuccaacaggcagg

SEQ ID NO: 2890269 - RNA, 19 nt, Artificial Sequence
  Description of Artificial Sequence: Synthetic oligonucleotide
uaguccagugggacauuca

SEQ ID NO: 2890270 - RNA, 19 nt, Artificial Sequence
  Description of Artificial Sequence: Synthetic oligonucleotide
ggccaaaagaauacagagc

SEQ ID NO: 2890271 - RNA, 19 nt, Artificial Sequence
  Description of Artificial Sequence: Synthetic oligonucleotide
cuucuacuguucagguuuc

SEQ ID NO: 2890272 - RNA, 19 nt, Artificial Sequence
  Description of Artificial Sequence: Synthetic oligonucleotide
uacagagcugcugucuaaa

SEQ ID NO: 2890273 - RNA, 19 nt, Artificial Sequence
  Description of Artificial Sequence: Synthetic oligonucleotide
gaaagacugauugugcuuu

SEQ ID NO: 2890274 - RNA, 19 nt, Artificial Sequence
  Description of Artificial Sequence: Synthetic oligonucleotide
ccguaaucaacauaaaaua

SEQ ID NO: 2890275 - RNA, 19 nt, Artificial Sequence
  Description of Artificial Sequence: Synthetic oligonucleotide
uuaguccagugggacauuc

SEQ ID NO: 2890276 - RNA, 19 nt, Artificial Sequence
  Description of Artificial Sequence: Synthetic oligonucleotide
uguucuucagaaggucuua

SEQ ID NO: 2890277 - RNA, 19 nt, Artificial Sequence
  Description of Artificial Sequence: Synthetic oligonucleotide
ccaaagaaaaccuuuugcu

SEQ ID NO: 2890278 - RNA, 19 nt, Artificial Sequence
  Description of Artificial Sequence: Synthetic oligonucleotide
ccacagacugcauuuuccc

SEQ ID NO: 2890279 - RNA, 19 nt, Artificial Sequence
  Description of Artificial Sequence: Synthetic oligonucleotide
gucuaaacugucuccaaau

SEQ ID NO: 2890280 - RNA, 19 nt, Artificial Sequence
  Description of Artificial Sequence: Synthetic oligonucleotide
acagcacuucuacacuaaa

SEQ ID NO: 2890281 - RNA, 19 nt, Artificial Sequence
  Description of Artificial Sequence: Synthetic oligonucleotide
gaauacagagcugcugucu

SEQ ID NO: 2890282 - RNA, 19 nt, Artificial Sequence
  Description of Artificial Sequence: Synthetic oligonucleotide
uacuucuacuguucagguu

SEQ ID NO: 2890283 - RNA, 19 nt, Artificial Sequence
  Description of Artificial Sequence: Synthetic oligonucleotide
caggcagggugcccgagag

SEQ ID NO: 2890284 - RNA, 19 nt, Artificial Sequence
  Description of Artificial Sequence: Synthetic oligonucleotide
uugcuucaugcccguaauc

SEQ ID NO: 2890285 - RNA, 19 nt, Artificial Sequence
  Description of Artificial Sequence: Synthetic oligonucleotide
gaucucccaaucucaccga

SEQ ID NO: 2890286 - RNA, 19 nt, Artificial Sequence
  Description of Artificial Sequence: Synthetic oligonucleotide
gacuuaaacccuguggaau

SEQ ID NO: 2890287 - RNA, 19 nt, Artificial Sequence
  Description of Artificial Sequence: Synthetic oligonucleotide
augcuaaaaguuguacuuu

SEQ ID NO: 2890288 - RNA, 19 nt, Artificial Sequence
  Description of Artificial Sequence: Synthetic oligonucleotide
auacagagcugcugucuaa

SEQ ID NO: 2890289 - RNA, 19 nt, Artificial Sequence
  Description of Artificial Sequence: Synthetic oligonucleotide
agcugaagccaccuuccaa

SEQ ID NO: 2890290 - RNA, 19 nt, Artificial Sequence
  Description of Artificial Sequence: Synthetic oligonucleotide
cccacagacugcauuuucc

SEQ ID NO: 2890291 - RNA, 19 nt, Artificial Sequence
  Description of Artificial Sequence: Synthetic oligonucleotide
ccgacuuaaacccugugga

SEQ ID NO: 2890292 - RNA, 19 nt, Artificial Sequence
  Description of Artificial Sequence: Synthetic oligonucleotide
caaaggaaagacugauugu

SEQ ID NO: 2890293 - RNA, 19 nt, Artificial Sequence
  Description of Artificial Sequence: Synthetic oligonucleotide
agccccacagacugcauuu

SEQ ID NO: 2890294 - RNA, 19 nt, Artificial Sequence
  Description of Artificial Sequence: Synthetic oligonucleotide
gaaggucuuaugauuggcu

SEQ ID NO: 2890295 - RNA, 19 nt, Artificial Sequence
  Description of Artificial Sequence: Synthetic oligonucleotide
ggacauucaaauguguucu

SEQ ID NO: 2890296 - RNA, 19 nt, Artificial Sequence
  Description of Artificial Sequence: Synthetic oligonucleotide
auugugcuuucugaauuaa

SEQ ID NO: 2890297 - RNA, 19 nt, Artificial Sequence
  Description of Artificial Sequence: Synthetic oligonucleotide
caccuuccaacaggcaggg

SEQ ID NO: 2890298 - RNA, 19 nt, Artificial Sequence
  Description of Artificial Sequence: Synthetic oligonucleotide
ggaaaauaaucaugcuaaa

SEQ ID NO: 2890299 - RNA, 19 nt, Artificial Sequence
  Description of Artificial Sequence: Synthetic oligonucleotide
aggcagggugcccgagagc

SEQ ID NO: 2890300 - RNA, 19 nt, Artificial Sequence
  Description of Artificial Sequence: Synthetic oligonucleotide
ggcuacuucuacuguucag

SEQ ID NO: 2890301 - RNA, 19 nt, Artificial Sequence
  Description of Artificial Sequence: Synthetic oligonucleotide
ggaauacagcacuucuaca

SEQ ID NO: 2890302 - RNA, 19 nt, Artificial Sequence
  Description of Artificial Sequence: Synthetic oligonucleotide
gaaccgagcacagccccac

SEQ ID NO: 2890303 - RNA, 19 nt, Artificial Sequence
  Description of Artificial Sequence: Synthetic oligonucleotide
ucaugcccguaaucaacau

SEQ ID NO: 2890304 - RNA, 19 nt, Artificial Sequence
  Description of Artificial Sequence: Synthetic oligonucleotide
gauuggcuacuucuacugu

SEQ ID NO: 2890305 - RNA, 19 nt, Artificial Sequence
  Description of Artificial Sequence: Synthetic oligonucleotide
ccaaaagaauacagagcug

SEQ ID NO: 2890306 - RNA, 19 nt, Artificial Sequence
  Description of Artificial Sequence: Synthetic oligonucleotide
cguaaucaacauaaaauaa

SEQ ID NO: 2890307 - RNA, 19 nt, Artificial Sequence
  Description of Artificial Sequence: Synthetic oligonucleotide
cccguaaucaacauaaaau

SEQ ID NO: 2890308 - RNA, 19 nt, Artificial Sequence
  Description of Artificial Sequence: Synthetic oligonucleotide
cugaagccaccuuccaaca

SEQ ID NO: 2890309 - RNA, 19 nt, Artificial Sequence
  Description of Artificial Sequence: Synthetic oligonucleotide
agcugcugucuaaacuguc

SEQ ID NO: 2890310 - RNA, 19 nt, Artificial Sequence
  Description of Artificial Sequence: Synthetic oligonucleotide
ccgagagcacaguacaaug

SEQ ID NO: 2890311 - RNA, 19 nt, Artificial Sequence
  Description of Artificial Sequence: Synthetic oligonucleotide
cuguggaauacagcacuuc

SEQ ID NO: 2890312 - RNA, 19 nt, Artificial Sequence
  Description of Artificial Sequence: Synthetic oligonucleotide
ccaacaggcagggugcccg

SEQ ID NO: 2890313 - RNA, 19 nt, Artificial Sequence
  Description of Artificial Sequence: Synthetic oligonucleotide
ugcccguaaucaacauaaa

SEQ ID NO: 2890314 - RNA, 19 nt, Artificial Sequence
  Description of Artificial Sequence: Synthetic oligonucleotide
aacaggcagggugcccgag

SEQ ID NO: 2890315 - RNA, 19 nt, Artificial Sequence
  Description of Artificial Sequence: Synthetic oligonucleotide
acaggcagggugcccgaga

SEQ ID NO: 2890316 - RNA, 19 nt, Artificial Sequence
  Description of Artificial Sequence: Synthetic oligonucleotide
cuacuucuacuguucaggu

SEQ ID NO: 2890317 - RNA, 19 nt, Artificial Sequence
  Description of Artificial Sequence: Synthetic oligonucleotide
uuccaacaggcagggugcc

SEQ ID NO: 2890318 - RNA, 19 nt, Artificial Sequence
  Description of Artificial Sequence: Synthetic oligonucleotide
aaccgagcacagccccaca

SEQ ID NO: 2890319 - RNA, 19 nt, Artificial Sequence
  Description of Artificial Sequence: Synthetic oligonucleotide
ggcagggugcccgagagca

SEQ ID NO: 2890320 - RNA, 19 nt, Artificial Sequence
  Description of Artificial Sequence: Synthetic oligonucleotide
gguuucggccaaaagaaua

SEQ ID NO: 2890321 - RNA, 19 nt, Artificial Sequence
  Description of Artificial Sequence: Synthetic oligonucleotide
uccaacaggcagggugccc

SEQ ID NO: 2890322 - RNA, 19 nt, Artificial Sequence
  Description of Artificial Sequence: Synthetic oligonucleotide
gcacaguacaaugaaccga

SEQ ID NO: 2890323 - RNA, 19 nt, Artificial Sequence
  Description of Artificial Sequence: Synthetic oligonucleotide
cugauugugcuuucugaau

SEQ ID NO: 2890324 - RNA, 19 nt, Artificial Sequence
  Description of Artificial Sequence: Synthetic oligonucleotide
guggaauacagcacuucua

SEQ ID NO: 2890325 - RNA, 19 nt, Artificial Sequence
  Description of Artificial Sequence: Synthetic oligonucleotide
ccagugggacauucaaaug

SEQ ID NO: 2890326 - RNA, 19 nt, Artificial Sequence
  Description of Artificial Sequence: Synthetic oligonucleotide
cagacugcauuuuccccaa

SEQ ID NO: 2890327 - RNA, 19 nt, Artificial Sequence
  Description of Artificial Sequence: Synthetic oligonucleotide
gcccguaaucaacauaaaa

SEQ ID NO: 2890328 - RNA, 19 nt, Artificial Sequence
  Description of Artificial Sequence: Synthetic oligonucleotide
ccccaaagaaaaccuuuug

SEQ ID NO: 2890329 - RNA, 19 nt, Artificial Sequence
  Description of Artificial Sequence: Synthetic oligonucleotide
ucccaaucucaccgacuua

SEQ ID NO: 2890330 - RNA, 19 nt, Artificial Sequence
  Description of Artificial Sequence: Synthetic oligonucleotide
cagagcugcugucuaaacu

SEQ ID NO: 2890331 - RNA, 19 nt, Artificial Sequence
  Description of Artificial Sequence: Synthetic oligonucleotide
cuucuacacuaaauacgua

SEQ ID NO: 2890332 - RNA, 19 nt, Artificial Sequence
  Description of Artificial Sequence: Synthetic oligonucleotide
caccgacuuaaacccugug

SEQ ID NO: 2890333 - RNA, 19 nt, Artificial Sequence
  Description of Artificial Sequence: Synthetic oligonucleotide
caugcccguaaucaacaua

SEQ ID NO: 2890334 - RNA, 19 nt, Artificial Sequence
  Description of Artificial Sequence: Synthetic oligonucleotide
gcuucaugcccguaaucaa

SEQ ID NO: 2890335 - RNA, 19 nt, Artificial Sequence
  Description of Artificial Sequence: Synthetic oligonucleotide
gugcccgagagcacaguac

SEQ ID NO: 2890336 - RNA, 19 nt, Artificial Sequence
  Description of Artificial Sequence: Synthetic oligonucleotide
ggucuuaugauuggcuacu

SEQ ID NO: 2890337 - RNA, 19 nt, Artificial Sequence
  Description of Artificial Sequence: Synthetic oligonucleotide
cacagccccacagacugca

SEQ ID NO: 2890338 - RNA, 19 nt, Artificial Sequence
  Description of Artificial Sequence: Synthetic oligonucleotide
cucccaaucucaccgacuu

SEQ ID NO: 2890339 - RNA, 19 nt, Artificial Sequence
  Description of Artificial Sequence: Synthetic oligonucleotide
uguucagguuucggccaaa

SEQ ID NO: 2890340 - RNA, 19 nt, Artificial Sequence
  Description of Artificial Sequence: Synthetic oligonucleotide
agguuucggccaaaagaau

SEQ ID NO: 2890341 - RNA, 19 nt, Artificial Sequence
  Description of Artificial Sequence: Synthetic oligonucleotide
ggaaagacugauugugcuu

SEQ ID NO: 2890342 - RNA, 19 nt, Artificial Sequence
  Description of Artificial Sequence: Synthetic oligonucleotide
acacagcugaagccaccuu

SEQ ID NO: 2890343 - RNA, 19 nt, Artificial Sequence
  Description of Artificial Sequence: Synthetic oligonucleotide
cagggugcccgagagcaca

SEQ ID NO: 2890344 - RNA, 19 nt, Artificial Sequence
  Description of Artificial Sequence: Synthetic oligonucleotide
cagcacuucuacacuaaau

SEQ ID NO: 2890345 - RNA, 19 nt, Artificial Sequence
  Description of Artificial Sequence: Synthetic oligonucleotide
guuguacuuuauauagauu

SEQ ID NO: 2890346 - RNA, 19 nt, Artificial Sequence
  Description of Artificial Sequence: Synthetic oligonucleotide
cuguucagguuucggccaa

SEQ ID NO: 2890347 - RNA, 19 nt, Artificial Sequence
  Description of Artificial Sequence: Synthetic oligonucleotide
cccaaucucaccgacuuaa

SEQ ID NO: 2890348 - RNA, 19 nt, Artificial Sequence
  Description of Artificial Sequence: Synthetic oligonucleotide
cgagagcacaguacaauga

SEQ ID NO: 2890349 - RNA, 19 nt, Artificial Sequence
  Description of Artificial Sequence: Synthetic oligonucleotide
guccagugggacauucaaa

SEQ ID NO: 2890350 - RNA, 19 nt, Artificial Sequence
  Description of Artificial Sequence: Synthetic oligonucleotide
guucagguuucggccaaaa

SEQ ID NO: 2890351 - RNA, 19 nt, Artificial Sequence
  Description of Artificial Sequence: Synthetic oligonucleotide
gagcugcugucuaaacugu

SEQ ID NO: 2890352 - RNA, 19 nt, Artificial Sequence
  Description of Artificial Sequence: Synthetic oligonucleotide
cagcugaagccaccuucca

SEQ ID NO: 2890353 - RNA, 19 nt, Artificial Sequence
  Description of Artificial Sequence: Synthetic oligonucleotide
agggugcccgagagcacag

SEQ ID NO: 2890354 - RNA, 19 nt, Artificial Sequence
  Description of Artificial Sequence: Synthetic oligonucleotide
guucuucagaaggucuuau

SEQ ID NO: 2890355 - RNA, 19 nt, Artificial Sequence
  Description of Artificial Sequence: Synthetic oligonucleotide
agacugcauuuuccccaaa

SEQ ID NO: 2890356 - RNA, 19 nt, Artificial Sequence
  Description of Artificial Sequence: Synthetic oligonucleotide
guguucuucagaaggucuu

SEQ ID NO: 2890357 - RNA, 19 nt, Artificial Sequence
  Description of Artificial Sequence: Synthetic oligonucleotide
ggugcccgagagcacagua

SEQ ID NO: 2890358 - RNA, 19 nt, Artificial Sequence
  Description of Artificial Sequence: Synthetic oligonucleotide
gcugcugucuaaacugucu

SEQ ID NO: 2890359 - RNA, 19 nt, Artificial Sequence
  Description of Artificial Sequence: Synthetic oligonucleotide
gugggacauucaaaugugu

SEQ ID NO: 2890360 - RNA, 19 nt, Artificial Sequence
  Description of Artificial Sequence: Synthetic oligonucleotide
caacaggcagggugcccga

SEQ ID NO: 2890361 - RNA, 19 nt, Artificial Sequence
  Description of Artificial Sequence: Synthetic oligonucleotide
cccuguggaauacagcacu

SEQ ID NO: 2890362 - RNA, 19 nt, Artificial Sequence
  Description of Artificial Sequence: Synthetic oligonucleotide
gagcacagccccacagacu

SEQ ID NO: 2890363 - RNA, 19 nt, Artificial Sequence
  Description of Artificial Sequence: Synthetic oligonucleotide
gcuaaaaguuguacuuuau

SEQ ID NO: 2890364 - RNA, 19 nt, Artificial Sequence
  Description of Artificial Sequence: Synthetic oligonucleotide
ccccacagacugcauuuuc

SEQ ID NO: 2890365 - RNA, 19 nt, Artificial Sequence
  Description of Artificial Sequence: Synthetic oligonucleotide
cgacuuaaacccuguggaa

SEQ ID NO: 2890366 - RNA, 19 nt, Artificial Sequence
  Description of Artificial Sequence: Synthetic oligonucleotide
ccaaucucaccgacuuaaa

SEQ ID NO: 2890367 - RNA, 19 nt, Artificial Sequence
  Description of Artificial Sequence: Synthetic oligonucleotide
ccgagcacagccccacaga

SEQ ID NO: 2890368 - RNA, 19 nt, Artificial Sequence
  Description of Artificial Sequence: Synthetic oligonucleotide
gucuuaugauuggcuacuu

SEQ ID NO: 2890369 - RNA, 19 nt, Artificial Sequence
  Description of Artificial Sequence: Synthetic oligonucleotide
accuuccaacaggcagggu

SEQ ID NO: 2890370 - RNA, 19 nt, Artificial Sequence
  Description of Artificial Sequence: Synthetic oligonucleotide
acagccccacagacugcau

SEQ ID NO: 2890371 - RNA, 19 nt, Artificial Sequence
  Description of Artificial Sequence: Synthetic oligonucleotide
gcacagccccacagacugc

SEQ ID NO: 2890372 - RNA, 19 nt, Artificial Sequence
  Description of Artificial Sequence: Synthetic oligonucleotide
cagccccacagacugcauu

SEQ ID NO: 2890373 - RNA, 19 nt, Artificial Sequence
  Description of Artificial Sequence: Synthetic oligonucleotide
ccuuuugcuucaugcccgu

SEQ ID NO: 2890374 - RNA, 19 nt, Artificial Sequence
  Description of Artificial Sequence: Synthetic oligonucleotide
guuaguccagugggacauu

SEQ ID NO: 2890375 - RNA, 19 nt, Artificial Sequence
  Description of Artificial Sequence: Synthetic oligonucleotide
ccuguggaauacagcacuu

SEQ ID NO: 2890376 - RNA, 19 nt, Artificial Sequence
  Description of Artificial Sequence: Synthetic oligonucleotide
gcccgagagcacaguacaa

SEQ ID NO: 2890377 - RNA, 19 nt, Artificial Sequence
  Description of Artificial Sequence: Synthetic oligonucleotide
cccgagagcacaguacaau

SEQ ID NO: 2890378 - RNA, 19 nt, Artificial Sequence
  Description of Artificial Sequence: Synthetic oligonucleotide
gggugcccgagagcacagu

SEQ ID NO: 2890379 - RNA, 19 nt, Artificial Sequence
  Description of Artificial Sequence: Synthetic oligonucleotide
aaaggugaugcauaccucc

SEQ ID NO: 2890380 - RNA, 19 nt, Artificial Sequence
  Description of Artificial Sequence: Synthetic oligonucleotide
uuuauugaggccuaggggc

SEQ ID NO: 2890381 - RNA, 19 nt, Artificial Sequence
  Description of Artificial Sequence: Synthetic oligonucleotide
guugacuucacucaaaggc

SEQ ID NO: 2890382 - RNA, 19 nt, Artificial Sequence
  Description of Artificial Sequence: Synthetic oligonucleotide
aaggccacacacuugaucu

SEQ ID NO: 2890383 - RNA, 19 nt, Artificial Sequence
  Description of Artificial Sequence: Synthetic oligonucleotide
uucagcacaaagcucuugg

SEQ ID NO: 2890384 - RNA, 19 nt, Artificial Sequence
  Description of Artificial Sequence: Synthetic oligonucleotide
acacacuugaucuugaagu

SEQ ID NO: 2890385 - RNA, 19 nt, Artificial Sequence
  Description of Artificial Sequence: Synthetic oligonucleotide
uugagauucagguugcuug

SEQ ID NO: 2890386 - RNA, 19 nt, Artificial Sequence
  Description of Artificial Sequence: Synthetic oligonucleotide
ucaaaggccacacacuuga

SEQ ID NO: 2890387 - RNA, 19 nt, Artificial Sequence
  Description of Artificial Sequence: Synthetic oligonucleotide
agguuugagauucagguug

SEQ ID NO: 2890388 - RNA, 19 nt, Artificial Sequence
  Description of Artificial Sequence: Synthetic oligonucleotide
gaugcauaccuccacagug

SEQ ID NO: 2890389 - RNA, 19 nt, Artificial Sequence
  Description of Artificial Sequence: Synthetic oligonucleotide
ugaacucaugcccaucugg

SEQ ID NO: 2890390 - RNA, 19 nt, Artificial Sequence
  Description of Artificial Sequence: Synthetic oligonucleotide
uugacuucacucaaaggcc

SEQ ID NO: 2890391 - RNA, 19 nt, Artificial Sequence
  Description of Artificial Sequence: Synthetic oligonucleotide
aaaggccacacacuugauc

SEQ ID NO: 2890392 - RNA, 19 nt, Artificial Sequence
  Description of Artificial Sequence: Synthetic oligonucleotide
agggaacuugaacucaugc

SEQ ID NO: 2890393 - RNA, 19 nt, Artificial Sequence
  Description of Artificial Sequence: Synthetic oligonucleotide
agugcuuccaggcuggaag

SEQ ID NO: 2890394 - RNA, 19 nt, Artificial Sequence
  Description of Artificial Sequence: Synthetic oligonucleotide
aacuuugagacacucccca

SEQ ID NO: 2890395 - RNA, 19 nt, Artificial Sequence
  Description of Artificial Sequence: Synthetic oligonucleotide
cuuuauugaggccuagggg

SEQ ID NO: 2890396 - RNA, 19 nt, Artificial Sequence
  Description of Artificial Sequence: Synthetic oligonucleotide
uuguugacuucacucaaag

SEQ ID NO: 2890397 - RNA, 19 nt, Artificial Sequence
  Description of Artificial Sequence: Synthetic oligonucleotide
aaagcucuuggcgucaggg

SEQ ID NO: 2890398 - RNA, 19 nt, Artificial Sequence
  Description of Artificial Sequence: Synthetic oligonucleotide
uugaagugcaggcacaggu

SEQ ID NO: 2890399 - RNA, 19 nt, Artificial Sequence
  Description of Artificial Sequence: Synthetic oligonucleotide
ggaacuugaacucaugccc

SEQ ID NO: 2890400 - RNA, 19 nt, Artificial Sequence
  Description of Artificial Sequence: Synthetic oligonucleotide
ucacucaaaggccacacac

SEQ ID NO: 2890401 - RNA, 19 nt, Artificial Sequence
  Description of Artificial Sequence: Synthetic oligonucleotide
uccauguugagacgguuag

SEQ ID NO: 2890402 - RNA, 19 nt, Artificial Sequence
  Description of Artificial Sequence: Synthetic oligonucleotide
agcucuuggcgucaggggc

SEQ ID NO: 2890403 - RNA, 19 nt, Artificial Sequence
  Description of Artificial Sequence: Synthetic oligonucleotide
cauguugagacgguuaggg

SEQ ID NO: 2890404 - RNA, 19 nt, Artificial Sequence
  Description of Artificial Sequence: Synthetic oligonucleotide
uguugagacgguuagggaa

SEQ ID NO: 2890405 - RNA, 19 nt, Artificial Sequence
  Description of Artificial Sequence: Synthetic oligonucleotide
aguguuggcguccccaugg

SEQ ID NO: 2890406 - RNA, 19 nt, Artificial Sequence
  Description of Artificial Sequence: Synthetic oligonucleotide
guugcuugcgaccagacca

SEQ ID NO: 2890407 - RNA, 19 nt, Artificial Sequence
  Description of Artificial Sequence: Synthetic oligonucleotide
uugcacacgauaguguugg

SEQ ID NO: 2890408 - RNA, 19 nt, Artificial Sequence
  Description of Artificial Sequence: Synthetic oligonucleotide
auucagguugcuugcgacc

SEQ ID NO: 2890409 - RNA, 19 nt, Artificial Sequence
  Description of Artificial Sequence: Synthetic oligonucleotide
uuuuggggaacagaggcag

SEQ ID NO: 2890410 - RNA, 19 nt, Artificial Sequence
  Description of Artificial Sequence: Synthetic oligonucleotide
ucugccgccauguaguuga

SEQ ID NO: 2890411 - RNA, 19 nt, Artificial Sequence
  Description of Artificial Sequence: Synthetic oligonucleotide
uaguugauggccuccaugu

SEQ ID NO: 2890412 - RNA, 19 nt, Artificial Sequence
  Description of Artificial Sequence: Synthetic oligonucleotide
acgguuagggaacuugaac

SEQ ID NO: 2890413 - RNA, 19 nt, Artificial Sequence
  Description of Artificial Sequence: Synthetic oligonucleotide
gaggcagcugccuuuauug

SEQ ID NO: 2890414 - RNA, 19 nt, Artificial Sequence
  Description of Artificial Sequence: Synthetic oligonucleotide
uugcuguugcacacgauag

SEQ ID NO: 2890415 - RNA, 19 nt, Artificial Sequence
  Description of Artificial Sequence: Synthetic oligonucleotide
ucagccuggucaaagguga

SEQ ID NO: 2890416 - RNA, 19 nt, Artificial Sequence
  Description of Artificial Sequence: Synthetic oligonucleotide
uuugagacacuccccaggu

SEQ ID NO: 2890417 - RNA, 19 nt, Artificial Sequence
  Description of Artificial Sequence: Synthetic oligonucleotide
ugagauucagguugcuugc

SEQ ID NO: 2890418 - RNA, 19 nt, Artificial Sequence
  Description of Artificial Sequence: Synthetic oligonucleotide
agcacaaagcucuuggcgu

SEQ ID NO: 2890419 - RNA, 19 nt, Artificial Sequence
  Description of Artificial Sequence: Synthetic oligonucleotide
uuauccuugcuguugcaca

SEQ ID NO: 2890420 - RNA, 19 nt, Artificial Sequence
  Description of Artificial Sequence: Synthetic oligonucleotide
uguugacuucacucaaagg

SEQ ID NO: 2890421 - RNA, 19 nt, Artificial Sequence
  Description of Artificial Sequence: Synthetic oligonucleotide
uugauggccuccauguuga

SEQ ID NO: 2890422 - RNA, 19 nt, Artificial Sequence
  Description of Artificial Sequence: Synthetic oligonucleotide
cacuugaucuugaagucgc

SEQ ID NO: 2890423 - RNA, 19 nt, Artificial Sequence
  Description of Artificial Sequence: Synthetic oligonucleotide
gaagugcaggcacagguug

SEQ ID NO: 2890424 - RNA, 19 nt, Artificial Sequence
  Description of Artificial Sequence: Synthetic oligonucleotide
cuuugagacacuccccagg

SEQ ID NO: 2890425 - RNA, 19 nt, Artificial Sequence
  Description of Artificial Sequence: Synthetic oligonucleotide
guuguugcugucuuucccc

SEQ ID NO: 2890426 - RNA, 19 nt, Artificial Sequence
  Description of Artificial Sequence: Synthetic oligonucleotide
ugacuucacucaaaggcca

SEQ ID NO: 2890427 - RNA, 19 nt, Artificial Sequence
  Description of Artificial Sequence: Synthetic oligonucleotide
guugauggccuccauguug

SEQ ID NO: 2890428 - RNA, 19 nt, Artificial Sequence
  Description of Artificial Sequence: Synthetic oligonucleotide
ugagacacuccccagguuu

SEQ ID NO: 2890429 - RNA, 19 nt, Artificial Sequence
  Description of Artificial Sequence: Synthetic oligonucleotide
aagcucuuggcgucagggg

SEQ ID NO: 2890430 - RNA, 19 nt, Artificial Sequence
  Description of Artificial Sequence: Synthetic oligonucleotide
ucuuuccccagguucagca

SEQ ID NO: 2890431 - RNA, 19 nt, Artificial Sequence
  Description of Artificial Sequence: Synthetic oligonucleotide
uuauugaggccuaggggcu

SEQ ID NO: 2890432 - RNA, 19 nt, Artificial Sequence
  Description of Artificial Sequence: Synthetic oligonucleotide
cagcacaaagcucuuggcg

SEQ ID NO: 2890433 - RNA, 19 nt, Artificial Sequence
  Description of Artificial Sequence: Synthetic oligonucleotide
cuugaagucgccgucugcc

SEQ ID NO: 2890434 - RNA, 19 nt, Artificial Sequence
  Description of Artificial Sequence: Synthetic oligonucleotide
cuugcgaccagaccacagg

SEQ ID NO: 2890435 - RNA, 19 nt, Artificial Sequence
  Description of Artificial Sequence: Synthetic oligonucleotide
guugcugucuuuccccagg

SEQ ID NO: 2890436 - RNA, 19 nt, Artificial Sequence
  Description of Artificial Sequence: Synthetic oligonucleotide
cauaccuccacagugcuuc

SEQ ID NO: 2890437 - RNA, 19 nt, Artificial Sequence
  Description of Artificial Sequence: Synthetic oligonucleotide
gauucagguugcuugcgac

SEQ ID NO: 2890438 - RNA, 19 nt, Artificial Sequence
  Description of Artificial Sequence: Synthetic oligonucleotide
gccgccauguaguugaugg

SEQ ID NO: 2890439 - RNA, 19 nt, Artificial Sequence
  Description of Artificial Sequence: Synthetic oligonucleotide
agguuguugcugucuuucc

SEQ ID NO: 2890440 - RNA, 19 nt, Artificial Sequence
  Description of Artificial Sequence: Synthetic oligonucleotide
uuuccccagguucagcaca

SEQ ID NO: 2890441 - RNA, 19 nt, Artificial Sequence
  Description of Artificial Sequence: Synthetic oligonucleotide
guuggcguccccaugggcg

SEQ ID NO: 2890442 - RNA, 19 nt, Artificial Sequence
  Description of Artificial Sequence: Synthetic oligonucleotide
acacuugaucuugaagucg

SEQ ID NO: 2890443 - RNA, 19 nt, Artificial Sequence
  Description of Artificial Sequence: Synthetic oligonucleotide
uugaagucgccgucugccg

SEQ ID NO: 2890444 - RNA, 19 nt, Artificial Sequence
  Description of Artificial Sequence: Synthetic oligonucleotide
augcauaccuccacagugc

SEQ ID NO: 2890445 - RNA, 19 nt, Artificial Sequence
  Description of Artificial Sequence: Synthetic oligonucleotide
cuugaucuugaagucgccg

SEQ ID NO: 2890446 - RNA, 19 nt, Artificial Sequence
  Description of Artificial Sequence: Synthetic oligonucleotide
gacugaagcgaagugaaga

SEQ ID NO: 2890447 - RNA, 19 nt, Artificial Sequence
  Description of Artificial Sequence: Synthetic oligonucleotide
aacucaugcccaucuggca

SEQ ID NO: 2890448 - RNA, 19 nt, Artificial Sequence
  Description of Artificial Sequence: Synthetic oligonucleotide
agguucagcacaaagcucu

SEQ ID NO: 2890449 - RNA, 19 nt, Artificial Sequence
  Description of Artificial Sequence: Synthetic oligonucleotide
uguugcacacgauaguguu

SEQ ID NO: 2890450 - RNA, 19 nt, Artificial Sequence
  Description of Artificial Sequence: Synthetic oligonucleotide
uuagggaacuugaacucau

SEQ ID NO: 2890451 - RNA, 19 nt, Artificial Sequence
  Description of Artificial Sequence: Synthetic oligonucleotide
uugcgaccagaccacaggc

SEQ ID NO: 2890452 - RNA, 19 nt, Artificial Sequence
  Description of Artificial Sequence: Synthetic oligonucleotide
gaacucaugcccaucuggc

SEQ ID NO: 2890453 - RNA, 19 nt, Artificial Sequence
  Description of Artificial Sequence: Synthetic oligonucleotide
ucaggggccaccucgcccc

SEQ ID NO: 2890454 - RNA, 19 nt, Artificial Sequence
  Description of Artificial Sequence: Synthetic oligonucleotide
ucagcacaaagcucuuggc

SEQ ID NO: 2890455 - RNA, 19 nt, Artificial Sequence
  Description of Artificial Sequence: Synthetic oligonucleotide
ugaugcauaccuccacagu

SEQ ID NO: 2890456 - RNA, 19 nt, Artificial Sequence
  Description of Artificial Sequence: Synthetic oligonucleotide
uauccuugcuguugcacac

SEQ ID NO: 2890457 - RNA, 19 nt, Artificial Sequence
  Description of Artificial Sequence: Synthetic oligonucleotide
uccccaugggcguugaaac

SEQ ID NO: 2890458 - RNA, 19 nt, Artificial Sequence
  Description of Artificial Sequence: Synthetic oligonucleotide
aggugaugcauaccuccac

SEQ ID NO: 2890459 - RNA, 19 nt, Artificial Sequence
  Description of Artificial Sequence: Synthetic oligonucleotide
uugauggucaggucagccu

SEQ ID NO: 2890460 - RNA, 19 nt, Artificial Sequence
  Description of Artificial Sequence: Synthetic oligonucleotide
acucaaaggccacacacuu

SEQ ID NO: 2890461 - RNA, 19 nt, Artificial Sequence
  Description of Artificial Sequence: Synthetic oligonucleotide
uggucaaaggugaugcaua

SEQ ID NO: 2890462 - RNA, 19 nt, Artificial Sequence
  Description of Artificial Sequence: Synthetic oligonucleotide
ugaagucgccgucugccgc

SEQ ID NO: 2890463 - RNA, 19 nt, Artificial Sequence
  Description of Artificial Sequence: Synthetic oligonucleotide
cacacuugaucuugaaguc

SEQ ID NO: 2890464 - RNA, 19 nt, Artificial Sequence
  Description of Artificial Sequence: Synthetic oligonucleotide
uucagguugcuugcgacca

SEQ ID NO: 2890465 - RNA, 19 nt, Artificial Sequence
  Description of Artificial Sequence: Synthetic oligonucleotide
ccuuuauugaggccuaggg

SEQ ID NO: 2890466 - RNA, 19 nt, Artificial Sequence
  Description of Artificial Sequence: Synthetic oligonucleotide
gugaugcauaccuccacag

SEQ ID NO: 2890467 - RNA, 19 nt, Artificial Sequence
  Description of Artificial Sequence: Synthetic oligonucleotide
guaguugauggccuccaug

SEQ ID NO: 2890468 - RNA, 19 nt, Artificial Sequence
  Description of Artificial Sequence: Synthetic oligonucleotide
aaggggaaggcaggcuccc

SEQ ID NO: 2890469 - RNA, 19 nt, Artificial Sequence
  Description of Artificial Sequence: Synthetic oligonucleotide
gaaggcaggcucccggugc

SEQ ID NO: 2890470 - RNA, 19 nt, Artificial Sequence
  Description of Artificial Sequence: Synthetic oligonucleotide
cgaacuuugagacacuccc

SEQ ID NO: 2890471 - RNA, 19 nt, Artificial Sequence
  Description of Artificial Sequence: Synthetic oligonucleotide
gggaacuugaacucaugcc

SEQ ID NO: 2890472 - RNA, 19 nt, Artificial Sequence
  Description of Artificial Sequence: Synthetic oligonucleotide
aggccuaggggcuuguuga

SEQ ID NO: 2890473 - RNA, 19 nt, Artificial Sequence
  Description of Artificial Sequence: Synthetic oligonucleotide
uccguuauccuugcuguug

SEQ ID NO: 2890474 - RNA, 19 nt, Artificial Sequence
  Description of Artificial Sequence: Synthetic oligonucleotide
ugacugaagcgaagugaag

SEQ ID NO: 2890475 - RNA, 19 nt, Artificial Sequence
  Description of Artificial Sequence: Synthetic oligonucleotide
acuuugagacacuccccag

SEQ ID NO: 2890476 - RNA, 19 nt, Artificial Sequence
  Description of Artificial Sequence: Synthetic oligonucleotide
ugcauaccuccacagugcu

SEQ ID NO: 2890477 - RNA, 19 nt, Artificial Sequence
  Description of Artificial Sequence: Synthetic oligonucleotide
ucgccccgaacuuugagac

SEQ ID NO: 2890478 - RNA, 19 nt, Artificial Sequence
  Description of Artificial Sequence: Synthetic oligonucleotide
augcccaucuggcagcuug

SEQ ID NO: 2890479 - RNA, 19 nt, Artificial Sequence
  Description of Artificial Sequence: Synthetic oligonucleotide
uugaacucaugcccaucug

SEQ ID NO: 2890480 - RNA, 19 nt, Artificial Sequence
  Description of Artificial Sequence: Synthetic oligonucleotide
uccacagugcuuccaggcu

SEQ ID NO: 2890481 - RNA, 19 nt, Artificial Sequence
  Description of Artificial Sequence: Synthetic oligonucleotide
cacagugcuuccaggcugg

SEQ ID NO: 2890482 - RNA, 19 nt, Artificial Sequence
  Description of Artificial Sequence: Synthetic oligonucleotide
acaggccaugacugaagcg

SEQ ID NO: 2890483 - RNA, 19 nt, Artificial Sequence
  Description of Artificial Sequence: Synthetic oligonucleotide
acacgauaguguuggcguc

SEQ ID NO: 2890484 - RNA, 19 nt, Artificial Sequence
  Description of Artificial Sequence: Synthetic oligonucleotide
aacuugaacucaugcccau

SEQ ID NO: 2890485 - RNA, 19 nt, Artificial Sequence
  Description of Artificial Sequence: Synthetic oligonucleotide
gagacgguuagggaacuug

SEQ ID NO: 2890486 - RNA, 19 nt, Artificial Sequence
  Description of Artificial Sequence: Synthetic oligonucleotide
ucuugaagucgccgucugc

SEQ ID NO: 2890487 - RNA, 19 nt, Artificial Sequence
  Description of Artificial Sequence: Synthetic oligonucleotide
guugagacgguuagggaac

SEQ ID NO: 2890488 - RNA, 19 nt, Artificial Sequence
  Description of Artificial Sequence: Synthetic oligonucleotide
gaacuuugagacacucccc

SEQ ID NO: 2890489 - RNA, 19 nt, Artificial Sequence
  Description of Artificial Sequence: Synthetic oligonucleotide
ugaagugcaggcacagguu

SEQ ID NO: 2890490 - RNA, 19 nt, Artificial Sequence
  Description of Artificial Sequence: Synthetic oligonucleotide
ugcuguugcacacgauagu

SEQ ID NO: 2890491 - RNA, 19 nt, Artificial Sequence
  Description of Artificial Sequence: Synthetic oligonucleotide
gaagucgccgucugccgcc

SEQ ID NO: 2890492 - RNA, 19 nt, Artificial Sequence
  Description of Artificial Sequence: Synthetic oligonucleotide
ugcgaccagaccacaggcc

SEQ ID NO: 2890493 - RNA, 19 nt, Artificial Sequence
  Description of Artificial Sequence: Synthetic oligonucleotide
uccuugcuguugcacacga

SEQ ID NO: 2890494 - RNA, 19 nt, Artificial Sequence
  Description of Artificial Sequence: Synthetic oligonucleotide
agauucagguugcuugcga

SEQ ID NO: 2890495 - RNA, 19 nt, Artificial Sequence
  Description of Artificial Sequence: Synthetic oligonucleotide
ggucaggucagccugguca

SEQ ID NO: 2890496 - RNA, 19 nt, Artificial Sequence
  Description of Artificial Sequence: Synthetic oligonucleotide
auaccuccacagugcuucc

SEQ ID NO: 2890497 - RNA, 19 nt, Artificial Sequence
  Description of Artificial Sequence: Synthetic oligonucleotide
gugcuuccaggcuggaagg

SEQ ID NO: 2890498 - RNA, 19 nt, Artificial Sequence
  Description of Artificial Sequence: Synthetic oligonucleotide
cucaugcccaucuggcagc

SEQ ID NO: 2890499 - RNA, 19 nt, Artificial Sequence
  Description of Artificial Sequence: Synthetic oligonucleotide
accuccacagugcuuccag

SEQ ID NO: 2890500 - RNA, 19 nt, Artificial Sequence
  Description of Artificial Sequence: Synthetic oligonucleotide
uuuggggaacagaggcagc

SEQ ID NO: 2890501 - RNA, 19 nt, Artificial Sequence
  Description of Artificial Sequence: Synthetic oligonucleotide
caugacugaagcgaaguga

SEQ ID NO: 2890502 - RNA, 19 nt, Artificial Sequence
  Description of Artificial Sequence: Synthetic oligonucleotide
acgauaguguuggcguccc

SEQ ID NO: 2890503 - RNA, 19 nt, Artificial Sequence
  Description of Artificial Sequence: Synthetic oligonucleotide
uuguugcugucuuucccca

SEQ ID NO: 2890504 - RNA, 19 nt, Artificial Sequence
  Description of Artificial Sequence: Synthetic oligonucleotide
gaggccuaggggcuuguug

SEQ ID NO: 2890505 - RNA, 19 nt, Artificial Sequence
  Description of Artificial Sequence: Synthetic oligonucleotide
cacaggccaugacugaagc

SEQ ID NO: 2890506 - RNA, 19 nt, Artificial Sequence
  Description of Artificial Sequence: Synthetic oligonucleotide
gauggucaggucagccugg

SEQ ID NO: 2890507 - RNA, 19 nt, Artificial Sequence
  Description of Artificial Sequence: Synthetic oligonucleotide
uugcuugcgaccagaccac

SEQ ID NO: 2890508 - RNA, 19 nt, Artificial Sequence
  Description of Artificial Sequence: Synthetic oligonucleotide
uagggaacuugaacucaug

SEQ ID NO: 2890509 - RNA, 19 nt, Artificial Sequence
  Description of Artificial Sequence: Synthetic oligonucleotide
agaccacaggccaugacug

SEQ ID NO: 2890510 - RNA, 19 nt, Artificial Sequence
  Description of Artificial Sequence: Synthetic oligonucleotide
cauguaguugauggccucc

SEQ ID NO: 2890511 - RNA, 19 nt, Artificial Sequence
  Description of Artificial Sequence: Synthetic oligonucleotide
gguuagggaacuugaacuc

SEQ ID NO: 2890512 - RNA, 19 nt, Artificial Sequence
  Description of Artificial Sequence: Synthetic oligonucleotide
agcugccuuuauugaggcc

SEQ ID NO: 2890513 - RNA, 19 nt, Artificial Sequence
  Description of Artificial Sequence: Synthetic oligonucleotide
cuugcuguugcacacgaua

SEQ ID NO: 2890514 - RNA, 19 nt, Artificial Sequence
  Description of Artificial Sequence: Synthetic oligonucleotide
caaaggugaugcauaccuc

SEQ ID NO: 2890515 - RNA, 19 nt, Artificial Sequence
  Description of Artificial Sequence: Synthetic oligonucleotide
uguugcugucuuuccccag

SEQ ID NO: 2890516 - RNA, 19 nt, Artificial Sequence
  Description of Artificial Sequence: Synthetic oligonucleotide
aucuugaagucgccgucug

SEQ ID NO: 2890517 - RNA, 19 nt, Artificial Sequence
  Description of Artificial Sequence: Synthetic oligonucleotide
aaggugaugcauaccucca

SEQ ID NO: 2890518 - RNA, 19 nt, Artificial Sequence
  Description of Artificial Sequence: Synthetic oligonucleotide
cucaaaggccacacacuug

SEQ ID NO: 2890519 - RNA, 19 nt, Artificial Sequence
  Description of Artificial Sequence: Synthetic oligonucleotide
gaaggggaaggcaggcucc

SEQ ID NO: 2890520 - RNA, 19 nt, Artificial Sequence
  Description of Artificial Sequence: Synthetic oligonucleotide
agcuugauggucaggucag

SEQ ID NO: 2890521 - RNA, 19 nt, Artificial Sequence
  Description of Artificial Sequence: Synthetic oligonucleotide
gguuguugcugucuuuccc

SEQ ID NO: 2890522 - RNA, 19 nt, Artificial Sequence
  Description of Artificial Sequence: Synthetic oligonucleotide
auguugagacgguuaggga

SEQ ID NO: 2890523 - RNA, 19 nt, Artificial Sequence
  Description of Artificial Sequence: Synthetic oligonucleotide
cuccccagguuugagauuc

SEQ ID NO: 2890524 - RNA, 19 nt, Artificial Sequence
  Description of Artificial Sequence: Synthetic oligonucleotide
uguuggcguccccaugggc

SEQ ID NO: 2890525 - RNA, 19 nt, Artificial Sequence
  Description of Artificial Sequence: Synthetic oligonucleotide
cuucacucaaaggccacac

SEQ ID NO: 2890526 - RNA, 19 nt, Artificial Sequence
  Description of Artificial Sequence: Synthetic oligonucleotide
ucagguugcuugcgaccag

SEQ ID NO: 2890527 - RNA, 19 nt, Artificial Sequence
  Description of Artificial Sequence: Synthetic oligonucleotide
caggccaugacugaagcga

SEQ ID NO: 2890528 - RNA, 19 nt, Artificial Sequence
  Description of Artificial Sequence: Synthetic oligonucleotide
uuugagauucagguugcuu

SEQ ID NO: 2890529 - RNA, 19 nt, Artificial Sequence
  Description of Artificial Sequence: Synthetic oligonucleotide
guuauccuugcuguugcac

SEQ ID NO: 2890530 - RNA, 19 nt, Artificial Sequence
  Description of Artificial Sequence: Synthetic oligonucleotide
ggcgucaggggccaccucg

SEQ ID NO: 2890531 - RNA, 19 nt, Artificial Sequence
  Description of Artificial Sequence: Synthetic oligonucleotide
cagcuugauggucagguca

SEQ ID NO: 2890532 - RNA, 19 nt, Artificial Sequence
  Description of Artificial Sequence: Synthetic oligonucleotide
guuagggaacuugaacuca

SEQ ID NO: 2890533 - RNA, 19 nt, Artificial Sequence
  Description of Artificial Sequence: Synthetic oligonucleotide
auaguguuggcguccccau

SEQ ID NO: 2890534 - RNA, 19 nt, Artificial Sequence
  Description of Artificial Sequence: Synthetic oligonucleotide
cagcugccuuuauugaggc

SEQ ID NO: 2890535 - RNA, 19 nt, Artificial Sequence
  Description of Artificial Sequence: Synthetic oligonucleotide
ggucaaaggugaugcauac

SEQ ID NO: 2890536 - RNA, 19 nt, Artificial Sequence
  Description of Artificial Sequence: Synthetic oligonucleotide
cacgauaguguuggcgucc

SEQ ID NO: 2890537 - RNA, 19 nt, Artificial Sequence
  Description of Artificial Sequence: Synthetic oligonucleotide
gcagcugccuuuauugagg

SEQ ID NO: 2890538 - RNA, 19 nt, Artificial Sequence
  Description of Artificial Sequence: Synthetic oligonucleotide
cacacgauaguguuggcgu

SEQ ID NO: 2890539 - RNA, 19 nt, Artificial Sequence
  Description of Artificial Sequence: Synthetic oligonucleotide
ggcagcugccuuuauugag

SEQ ID NO: 2890540 - RNA, 19 nt, Artificial Sequence
  Description of Artificial Sequence: Synthetic oligonucleotide
caugggcguugaaacgggg

SEQ ID NO: 2890541 - RNA, 19 nt, Artificial Sequence
  Description of Artificial Sequence: Synthetic oligonucleotide
acuugaacucaugcccauc

SEQ ID NO: 2890542 - RNA, 19 nt, Artificial Sequence
  Description of Artificial Sequence: Synthetic oligonucleotide
gcuguugcacacgauagug

SEQ ID NO: 2890543 - RNA, 19 nt, Artificial Sequence
  Description of Artificial Sequence: Synthetic oligonucleotide
guugaagugcaggcacagg

SEQ ID NO: 2890544 - RNA, 19 nt, Artificial Sequence
  Description of Artificial Sequence: Synthetic oligonucleotide
aggcacagguuguugcugu

SEQ ID NO: 2890545 - RNA, 19 nt, Artificial Sequence
  Description of Artificial Sequence: Synthetic oligonucleotide
auuuuggggaacagaggca

SEQ ID NO: 2890546 - RNA, 19 nt, Artificial Sequence
  Description of Artificial Sequence: Synthetic oligonucleotide
ugcuuccaggcuggaaggg

SEQ ID NO: 2890547 - RNA, 19 nt, Artificial Sequence
  Description of Artificial Sequence: Synthetic oligonucleotide
uaguguuggcguccccaug

SEQ ID NO: 2890548 - RNA, 19 nt, Artificial Sequence
  Description of Artificial Sequence: Synthetic oligonucleotide
uguaguugauggccuccau

SEQ ID NO: 2890549 - RNA, 19 nt, Artificial Sequence
  Description of Artificial Sequence: Synthetic oligonucleotide
gucagccuggucaaaggug

SEQ ID NO: 2890550 - RNA, 19 nt, Artificial Sequence
  Description of Artificial Sequence: Synthetic oligonucleotide
gagacacuccccagguuug

SEQ ID NO: 2890551 - RNA, 19 nt, Artificial Sequence
  Description of Artificial Sequence: Synthetic oligonucleotide
ggcuccguuauccuugcug

SEQ ID NO: 2890552 - RNA, 19 nt, Artificial Sequence
  Description of Artificial Sequence: Synthetic oligonucleotide
cagguuguugcugucuuuc

SEQ ID NO: 2890553 - RNA, 19 nt, Artificial Sequence
  Description of Artificial Sequence: Synthetic oligonucleotide
ugucuuuccccagguucag

SEQ ID NO: 2890554 - RNA, 19 nt, Artificial Sequence
  Description of Artificial Sequence: Synthetic oligonucleotide
cuugaacucaugcccaucu

SEQ ID NO: 2890555 - RNA, 19 nt, Artificial Sequence
  Description of Artificial Sequence: Synthetic oligonucleotide
cagguucagcacaaagcuc

SEQ ID NO: 2890556 - RNA, 19 nt, Artificial Sequence
  Description of Artificial Sequence: Synthetic oligonucleotide
cuuuccccagguucagcac

SEQ ID NO: 2890557 - RNA, 19 nt, Artificial Sequence
  Description of Artificial Sequence: Synthetic oligonucleotide
guugcacacgauaguguug

SEQ ID NO: 2890558 - RNA, 19 nt, Artificial Sequence
  Description of Artificial Sequence: Synthetic oligonucleotide
uuccccagguucagcacaa

SEQ ID NO: 2890559 - RNA, 19 nt, Artificial Sequence
  Description of Artificial Sequence: Synthetic oligonucleotide
ggggaacagaggcagcugc

SEQ ID NO: 2890560 - RNA, 19 nt, Artificial Sequence
  Description of Artificial Sequence: Synthetic oligonucleotide
uuggcguccccaugggcgu

SEQ ID NO: 2890561 - RNA, 19 nt, Artificial Sequence
  Description of Artificial Sequence: Synthetic oligonucleotide
ggugaugcauaccuccaca

SEQ ID NO: 2890562 - RNA, 19 nt, Artificial Sequence
  Description of Artificial Sequence: Synthetic oligonucleotide
ggaaggggaaggcaggcuc

SEQ ID NO: 2890563 - RNA, 19 nt, Artificial Sequence
  Description of Artificial Sequence: Synthetic oligonucleotide
acacuccccagguuugaga

SEQ ID NO: 2890564 - RNA, 19 nt, Artificial Sequence
  Description of Artificial Sequence: Synthetic oligonucleotide
cuuccaggcuggaagggga

SEQ ID NO: 2890565 - RNA, 19 nt, Artificial Sequence
  Description of Artificial Sequence: Synthetic oligonucleotide
gccuggucaaaggugaugc

SEQ ID NO: 2890566 - RNA, 19 nt, Artificial Sequence
  Description of Artificial Sequence: Synthetic oligonucleotide
uggccuccauguugagacg

SEQ ID NO: 2890567 - RNA, 19 nt, Artificial Sequence
  Description of Artificial Sequence: Synthetic oligonucleotide
cuuguugacuucacucaaa

SEQ ID NO: 2890568 - RNA, 19 nt, Artificial Sequence
  Description of Artificial Sequence: Synthetic oligonucleotide
aagugcaggcacagguugu

SEQ ID NO: 2890569 - RNA, 19 nt, Artificial Sequence
  Description of Artificial Sequence: Synthetic oligonucleotide
agacgguuagggaacuuga

SEQ ID NO: 2890570 - RNA, 19 nt, Artificial Sequence
  Description of Artificial Sequence: Synthetic oligonucleotide
ccagguuugagauucaggu

SEQ ID NO: 2890571 - RNA, 19 nt, Artificial Sequence
  Description of Artificial Sequence: Synthetic oligonucleotide
gguuugagauucagguugc

SEQ ID NO: 2890572 - RNA, 19 nt, Artificial Sequence
  Description of Artificial Sequence: Synthetic oligonucleotide
gcacacgauaguguuggcg

SEQ ID NO: 2890573 - RNA, 19 nt, Artificial Sequence
  Description of Artificial Sequence: Synthetic oligonucleotide
uaggggcuuguugacuuca

SEQ ID NO: 2890574 - RNA, 19 nt, Artificial Sequence
  Description of Artificial Sequence: Synthetic oligonucleotide
auccuugcuguugcacacg

SEQ ID NO: 2890575 - RNA, 19 nt, Artificial Sequence
  Description of Artificial Sequence: Synthetic oligonucleotide
ugcccaucuggcagcuuga

SEQ ID NO: 2890576 - RNA, 19 nt, Artificial Sequence
  Description of Artificial Sequence: Synthetic oligonucleotide
guguuggcguccccauggg

SEQ ID NO: 2890577 - RNA, 19 nt, Artificial Sequence
  Description of Artificial Sequence: Synthetic oligonucleotide
gguugaagugcaggcacag

SEQ ID NO: 2890578 - RNA, 19 nt, Artificial Sequence
  Description of Artificial Sequence: Synthetic oligonucleotide
caggucagccuggucaaag

SEQ ID NO: 2890579 - RNA, 19 nt, Artificial Sequence
  Description of Artificial Sequence: Synthetic oligonucleotide
agaggcagcugccuuuauu

SEQ ID NO: 2890580 - RNA, 19 nt, Artificial Sequence
  Description of Artificial Sequence: Synthetic oligonucleotide
aggcagcugccuuuauuga

SEQ ID NO: 2890581 - RNA, 19 nt, Artificial Sequence
  Description of Artificial Sequence: Synthetic oligonucleotide
cuggcagcuugauggucag

SEQ ID NO: 2890582 - RNA, 19 nt, Artificial Sequence
  Description of Artificial Sequence: Synthetic oligonucleotide
cuggaaggggaaggcaggc

SEQ ID NO: 2890583 - RNA, 19 nt, Artificial Sequence
  Description of Artificial Sequence: Synthetic oligonucleotide
aggcucccggugcucaguc

SEQ ID NO: 2890584 - RNA, 19 nt, Artificial Sequence
  Description of Artificial Sequence: Synthetic oligonucleotide
caaagcucuuggcgucagg

SEQ ID NO: 2890585 - RNA, 19 nt, Artificial Sequence
  Description of Artificial Sequence: Synthetic oligonucleotide
gacacuccccagguuugag

SEQ ID NO: 2890586 - RNA, 19 nt, Artificial Sequence
  Description of Artificial Sequence: Synthetic oligonucleotide
ggggaaggcaggcucccgg

SEQ ID NO: 2890587 - RNA, 19 nt, Artificial Sequence
  Description of Artificial Sequence: Synthetic oligonucleotide
acuucacucaaaggccaca

SEQ ID NO: 2890588 - RNA, 19 nt, Artificial Sequence
  Description of Artificial Sequence: Synthetic oligonucleotide
cccagguuugagauucagg

SEQ ID NO: 2890589 - RNA, 19 nt, Artificial Sequence
  Description of Artificial Sequence: Synthetic oligonucleotide
uuccaggcuggaaggggaa

SEQ ID NO: 2890590 - RNA, 19 nt, Artificial Sequence
  Description of Artificial Sequence: Synthetic oligonucleotide
gacuucacucaaaggccac

SEQ ID NO: 2890591 - RNA, 19 nt, Artificial Sequence
  Description of Artificial Sequence: Synthetic oligonucleotide
aucuggcagcuugaugguc

SEQ ID NO: 2890592 - RNA, 19 nt, Artificial Sequence
  Description of Artificial Sequence: Synthetic oligonucleotide
cucgccccgaacuuugaga

SEQ ID NO: 2890593 - RNA, 19 nt, Artificial Sequence
  Description of Artificial Sequence: Synthetic oligonucleotide
cccaugggcguugaaacgg

SEQ ID NO: 2890594 - RNA, 19 nt, Artificial Sequence
  Description of Artificial Sequence: Synthetic oligonucleotide
uccaggcuggaaggggaag

SEQ ID NO: 2890595 - RNA, 19 nt, Artificial Sequence
  Description of Artificial Sequence: Synthetic oligonucleotide
gguugcuugcgaccagacc

SEQ ID NO: 2890596 - RNA, 19 nt, Artificial Sequence
  Description of Artificial Sequence: Synthetic oligonucleotide
aguugauggccuccauguu

SEQ ID NO: 2890597 - RNA, 19 nt, Artificial Sequence
  Description of Artificial Sequence: Synthetic oligonucleotide
uugagacgguuagggaacu

SEQ ID NO: 2890598 - RNA, 19 nt, Artificial Sequence
  Description of Artificial Sequence: Synthetic oligonucleotide
caggcuccguuauccuugc

SEQ ID NO: 2890599 - RNA, 19 nt, Artificial Sequence
  Description of Artificial Sequence: Synthetic oligonucleotide
acaaagcucuuggcgucag

SEQ ID NO: 2890600 - RNA, 19 nt, Artificial Sequence
  Description of Artificial Sequence: Synthetic oligonucleotide
agguugcuugcgaccagac

SEQ ID NO: 2890601 - RNA, 19 nt, Artificial Sequence
  Description of Artificial Sequence: Synthetic oligonucleotide
ccaggcuccguuauccuug

SEQ ID NO: 2890602 - RNA, 19 nt, Artificial Sequence
  Description of Artificial Sequence: Synthetic oligonucleotide
gucaggucagccuggucaa

SEQ ID NO: 2890603 - RNA, 19 nt, Artificial Sequence
  Description of Artificial Sequence: Synthetic oligonucleotide
auugaggccuaggggcuug

SEQ ID NO: 2890604 - RNA, 19 nt, Artificial Sequence
  Description of Artificial Sequence: Synthetic oligonucleotide
cuuggcgucaggggccacc

SEQ ID NO: 2890605 - RNA, 19 nt, Artificial Sequence
  Description of Artificial Sequence: Synthetic oligonucleotide
uugagacacuccccagguu

SEQ ID NO: 2890606 - RNA, 19 nt, Artificial Sequence
  Description of Artificial Sequence: Synthetic oligonucleotide
ugcacacgauaguguuggc

SEQ ID NO: 2890607 - RNA, 19 nt, Artificial Sequence
  Description of Artificial Sequence: Synthetic oligonucleotide
caccucgccccgaacuuug

SEQ ID NO: 2890608 - RNA, 19 nt, Artificial Sequence
  Description of Artificial Sequence: Synthetic oligonucleotide
ggccuccauguugagacgg

SEQ ID NO: 2890609 - RNA, 19 nt, Artificial Sequence
  Description of Artificial Sequence: Synthetic oligonucleotide
gaccacaggccaugacuga

SEQ ID NO: 2890610 - RNA, 19 nt, Artificial Sequence
  Description of Artificial Sequence: Synthetic oligonucleotide
ccguuauccuugcuguugc

SEQ ID NO: 2890611 - RNA, 19 nt, Artificial Sequence
  Description of Artificial Sequence: Synthetic oligonucleotide
gaucuugaagucgccgucu

SEQ ID NO: 2890612 - RNA, 19 nt, Artificial Sequence
  Description of Artificial Sequence: Synthetic oligonucleotide
ccgaacuuugagacacucc

SEQ ID NO: 2890613 - RNA, 19 nt, Artificial Sequence
  Description of Artificial Sequence: Synthetic oligonucleotide
ugccuuuauugaggccuag

SEQ ID NO: 2890614 - RNA, 19 nt, Artificial Sequence
  Description of Artificial Sequence: Synthetic oligonucleotide
gcgaccagaccacaggcca

SEQ ID NO: 2890615 - RNA, 19 nt, Artificial Sequence
  Description of Artificial Sequence: Synthetic oligonucleotide
cuaggggcuuguugacuuc

SEQ ID NO: 2890616 - RNA, 19 nt, Artificial Sequence
  Description of Artificial Sequence: Synthetic oligonucleotide
gcuuccaggcuggaagggg

SEQ ID NO: 2890617 - RNA, 19 nt, Artificial Sequence
  Description of Artificial Sequence: Synthetic oligonucleotide
gcugccuuuauugaggccu

SEQ ID NO: 2890618 - RNA, 19 nt, Artificial Sequence
  Description of Artificial Sequence: Synthetic oligonucleotide
agccuggucaaaggugaug

SEQ ID NO: 2890619 - RNA, 19 nt, Artificial Sequence
  Description of Artificial Sequence: Synthetic oligonucleotide
uuggcgucaggggccaccu

SEQ ID NO: 2890620 - RNA, 19 nt, Artificial Sequence
  Description of Artificial Sequence: Synthetic oligonucleotide
acagguuguugcugucuuu

SEQ ID NO: 2890621 - RNA, 19 nt, Artificial Sequence
  Description of Artificial Sequence: Synthetic oligonucleotide
gccccgaacuuugagacac

SEQ ID NO: 2890622 - RNA, 19 nt, Artificial Sequence
  Description of Artificial Sequence: Synthetic oligonucleotide
cuccauguugagacgguua

SEQ ID NO: 2890623 - RNA, 19 nt, Artificial Sequence
  Description of Artificial Sequence: Synthetic oligonucleotide
gacgguuagggaacuugaa

SEQ ID NO: 2890624 - RNA, 19 nt, Artificial Sequence
  Description of Artificial Sequence: Synthetic oligonucleotide
gccgucugccgccauguag

SEQ ID NO: 2890625 - RNA, 19 nt, Artificial Sequence
  Description of Artificial Sequence: Synthetic oligonucleotide
cacucaaaggccacacacu

SEQ ID NO: 2890626 - RNA, 19 nt, Artificial Sequence
  Description of Artificial Sequence: Synthetic oligonucleotide
ccaugggcguugaaacggg

SEQ ID NO: 2890627 - RNA, 19 nt, Artificial Sequence
  Description of Artificial Sequence: Synthetic oligonucleotide
gcuuguugacuucacucaa

SEQ ID NO: 2890628 - RNA, 19 nt, Artificial Sequence
  Description of Artificial Sequence: Synthetic oligonucleotide
accacaggccaugacugaa

SEQ ID NO: 2890629 - RNA, 19 nt, Artificial Sequence
  Description of Artificial Sequence: Synthetic oligonucleotide
gcacaaagcucuuggcguc

SEQ ID NO: 2890630 - RNA, 19 nt, Artificial Sequence
  Description of Artificial Sequence: Synthetic oligonucleotide
ccagguucagcacaaagcu

SEQ ID NO: 2890631 - RNA, 19 nt, Artificial Sequence
  Description of Artificial Sequence: Synthetic oligonucleotide
aggggcuuguugacuucac

SEQ ID NO: 2890632 - RNA, 19 nt, Artificial Sequence
  Description of Artificial Sequence: Synthetic oligonucleotide
ccacagugcuuccaggcug

SEQ ID NO: 2890633 - RNA, 19 nt, Artificial Sequence
  Description of Artificial Sequence: Synthetic oligonucleotide
caggcacagguuguugcug

SEQ ID NO: 2890634 - RNA, 19 nt, Artificial Sequence
  Description of Artificial Sequence: Synthetic oligonucleotide
cucccggugcucagucccc

SEQ ID NO: 2890635 - RNA, 19 nt, Artificial Sequence
  Description of Artificial Sequence: Synthetic oligonucleotide
ggccacacacuugaucuug

SEQ ID NO: 2890636 - RNA, 19 nt, Artificial Sequence
  Description of Artificial Sequence: Synthetic oligonucleotide
ccaugacugaagcgaagug

SEQ ID NO: 2890637 - RNA, 19 nt, Artificial Sequence
  Description of Artificial Sequence: Synthetic oligonucleotide
uauugaggccuaggggcuu

SEQ ID NO: 2890638 - RNA, 19 nt, Artificial Sequence
  Description of Artificial Sequence: Synthetic oligonucleotide
ucgccgucugccgccaugu

SEQ ID NO: 2890639 - RNA, 19 nt, Artificial Sequence
  Description of Artificial Sequence: Synthetic oligonucleotide
gcuccguuauccuugcugu

SEQ ID NO: 2890640 - RNA, 19 nt, Artificial Sequence
  Description of Artificial Sequence: Synthetic oligonucleotide
agugcaggcacagguuguu

SEQ ID NO: 2890641 - RNA, 19 nt, Artificial Sequence
  Description of Artificial Sequence: Synthetic oligonucleotide
cuguugcacacgauagugu

SEQ ID NO: 2890642 - RNA, 19 nt, Artificial Sequence
  Description of Artificial Sequence: Synthetic oligonucleotide
uccccagguuugagauuca

SEQ ID NO: 2890643 - RNA, 19 nt, Artificial Sequence
  Description of Artificial Sequence: Synthetic oligonucleotide
ccccaugggcguugaaacg

SEQ ID NO: 2890644 - RNA, 19 nt, Artificial Sequence
  Description of Artificial Sequence: Synthetic oligonucleotide
cgccauguaguugauggcc

SEQ ID NO: 2890645 - RNA, 19 nt, Artificial Sequence
  Description of Artificial Sequence: Synthetic oligonucleotide
ccacaggccaugacugaag

SEQ ID NO: 2890646 - RNA, 19 nt, Artificial Sequence
  Description of Artificial Sequence: Synthetic oligonucleotide
gggaacagaggcagcugcc

SEQ ID NO: 2890647 - RNA, 19 nt, Artificial Sequence
  Description of Artificial Sequence: Synthetic oligonucleotide
ugcuugcgaccagaccaca

SEQ ID NO: 2890648 - RNA, 19 nt, Artificial Sequence
  Description of Artificial Sequence: Synthetic oligonucleotide
uaccuccacagugcuucca

SEQ ID NO: 2890649 - RNA, 19 nt, Artificial Sequence
  Description of Artificial Sequence: Synthetic oligonucleotide
cacuccccagguuugagau

SEQ ID NO: 2890650 - RNA, 19 nt, Artificial Sequence
  Description of Artificial Sequence: Synthetic oligonucleotide
acagaggcagcugccuuua

SEQ ID NO: 2890651 - RNA, 19 nt, Artificial Sequence
  Description of Artificial Sequence: Synthetic oligonucleotide
guccccaugggcguugaaa

SEQ ID NO: 2890652 - RNA, 19 nt, Artificial Sequence
  Description of Artificial Sequence: Synthetic oligonucleotide
gcucuuggcgucaggggcc

SEQ ID NO: 2890653 - RNA, 19 nt, Artificial Sequence
  Description of Artificial Sequence: Synthetic oligonucleotide
aggggaaggcaggcucccg

SEQ ID NO: 2890654 - RNA, 19 nt, Artificial Sequence
  Description of Artificial Sequence: Synthetic oligonucleotide
agacacuccccagguuuga

SEQ ID NO: 2890655 - RNA, 19 nt, Artificial Sequence
  Description of Artificial Sequence: Synthetic oligonucleotide
uggucaggucagccugguc

SEQ ID NO: 2890656 - RNA, 19 nt, Artificial Sequence
  Description of Artificial Sequence: Synthetic oligonucleotide
gucgccgucugccgccaug

SEQ ID NO: 2890657 - RNA, 19 nt, Artificial Sequence
  Description of Artificial Sequence: Synthetic oligonucleotide
ggcagcuugauggucaggu

SEQ ID NO: 2890658 - RNA, 19 nt, Artificial Sequence
  Description of Artificial Sequence: Synthetic oligonucleotide
gaacagaggcagcugccuu

SEQ ID NO: 2890659 - RNA, 19 nt, Artificial Sequence
  Description of Artificial Sequence: Synthetic oligonucleotide
gucuuuccccagguucagc

SEQ ID NO: 2890660 - RNA, 19 nt, Artificial Sequence
  Description of Artificial Sequence: Synthetic oligonucleotide
ccccagguucagcacaaag

SEQ ID NO: 2890661 - RNA, 19 nt, Artificial Sequence
  Description of Artificial Sequence: Synthetic oligonucleotide
ccauguugagacgguuagg

SEQ ID NO: 2890662 - RNA, 19 nt, Artificial Sequence
  Description of Artificial Sequence: Synthetic oligonucleotide
auggucaggucagccuggu

SEQ ID NO: 2890663 - RNA, 19 nt, Artificial Sequence
  Description of Artificial Sequence: Synthetic oligonucleotide
ccauguaguugauggccuc

SEQ ID NO: 2890664 - RNA, 19 nt, Artificial Sequence
  Description of Artificial Sequence: Synthetic oligonucleotide
aagucgccgucugccgcca

SEQ ID NO: 2890665 - RNA, 19 nt, Artificial Sequence
  Description of Artificial Sequence: Synthetic oligonucleotide
cacaaagcucuuggcguca

SEQ ID NO: 2890666 - RNA, 19 nt, Artificial Sequence
  Description of Artificial Sequence: Synthetic oligonucleotide
gugcaggcacagguuguug

SEQ ID NO: 2890667 - RNA, 19 nt, Artificial Sequence
  Description of Artificial Sequence: Synthetic oligonucleotide
acuccccagguuugagauu

SEQ ID NO: 2890668 - RNA, 19 nt, Artificial Sequence
  Description of Artificial Sequence: Synthetic oligonucleotide
cgguuagggaacuugaacu

SEQ ID NO: 2890669 - RNA, 19 nt, Artificial Sequence
  Description of Artificial Sequence: Synthetic oligonucleotide
ugccgccauguaguugaug

SEQ ID NO: 2890670 - RNA, 19 nt, Artificial Sequence
  Description of Artificial Sequence: Synthetic oligonucleotide
aggccaugacugaagcgaa

SEQ ID NO: 2890671 - RNA, 19 nt, Artificial Sequence
  Description of Artificial Sequence: Synthetic oligonucleotide
cuggucaaaggugaugcau

SEQ ID NO: 2890672 - RNA, 19 nt, Artificial Sequence
  Description of Artificial Sequence: Synthetic oligonucleotide
gcuugcgaccagaccacag

SEQ ID NO: 2890673 - RNA, 19 nt, Artificial Sequence
  Description of Artificial Sequence: Synthetic oligonucleotide
gcagcuugauggucagguc

SEQ ID NO: 2890674 - RNA, 19 nt, Artificial Sequence
  Description of Artificial Sequence: Synthetic oligonucleotide
accagaccacaggccauga

SEQ ID NO: 2890675 - RNA, 19 nt, Artificial Sequence
  Description of Artificial Sequence: Synthetic oligonucleotide
gucugccgccauguaguug

SEQ ID NO: 2890676 - RNA, 19 nt, Artificial Sequence
  Description of Artificial Sequence: Synthetic oligonucleotide
cagguuugagauucagguu

SEQ ID NO: 2890677 - RNA, 19 nt, Artificial Sequence
  Description of Artificial Sequence: Synthetic oligonucleotide
cagguugcuugcgaccaga

SEQ ID NO: 2890678 - RNA, 19 nt, Artificial Sequence
  Description of Artificial Sequence: Synthetic oligonucleotide
ggucagccuggucaaaggu

SEQ ID NO: 2890679 - RNA, 19 nt, Artificial Sequence
  Description of Artificial Sequence: Synthetic oligonucleotide
cugccuuuauugaggccua

SEQ ID NO: 2890680 - RNA, 19 nt, Artificial Sequence
  Description of Artificial Sequence: Synthetic oligonucleotide
ccgccauguaguugauggc

SEQ ID NO: 2890681 - RNA, 19 nt, Artificial Sequence
  Description of Artificial Sequence: Synthetic oligonucleotide
ugagacgguuagggaacuu

SEQ ID NO: 2890682 - RNA, 19 nt, Artificial Sequence
  Description of Artificial Sequence: Synthetic oligonucleotide
ggccaugacugaagcgaag

SEQ ID NO: 2890683 - RNA, 19 nt, Artificial Sequence
  Description of Artificial Sequence: Synthetic oligonucleotide
ggccuaggggcuuguugac

SEQ ID NO: 2890684 - RNA, 19 nt, Artificial Sequence
  Description of Artificial Sequence: Synthetic oligonucleotide
uugaggccuaggggcuugu

SEQ ID NO: 2890685 - RNA, 19 nt, Artificial Sequence
  Description of Artificial Sequence: Synthetic oligonucleotide
ggcacagguuguugcuguc

SEQ ID NO: 2890686 - RNA, 19 nt, Artificial Sequence
  Description of Artificial Sequence: Synthetic oligonucleotide
ggguugaagugcaggcaca

SEQ ID NO: 2890687 - RNA, 19 nt, Artificial Sequence
  Description of Artificial Sequence: Synthetic oligonucleotide
gccaugacugaagcgaagu

SEQ ID NO: 2890688 - RNA, 19 nt, Artificial Sequence
  Description of Artificial Sequence: Synthetic oligonucleotide
cacagguuguugcugucuu

SEQ ID NO: 2890689 - RNA, 19 nt, Artificial Sequence
  Description of Artificial Sequence: Synthetic oligonucleotide
gcuugauggucaggucagc

SEQ ID NO: 2890690 - RNA, 19 nt, Artificial Sequence
  Description of Artificial Sequence: Synthetic oligonucleotide
caggggccaccucgccccg

SEQ ID NO: 2890691 - RNA, 19 nt, Artificial Sequence
  Description of Artificial Sequence: Synthetic oligonucleotide
cccgaacuuugagacacuc

SEQ ID NO: 2890692 - RNA, 19 nt, Artificial Sequence
  Description of Artificial Sequence: Synthetic oligonucleotide
guuugagauucagguugcu

SEQ ID NO: 2890693 - RNA, 19 nt, Artificial Sequence
  Description of Artificial Sequence: Synthetic oligonucleotide
cucuuggcgucaggggcca

SEQ ID NO: 2890694 - RNA, 19 nt, Artificial Sequence
  Description of Artificial Sequence: Synthetic oligonucleotide
aggcaggcucccggugcuc

SEQ ID NO: 2890695 - RNA, 19 nt, Artificial Sequence
  Description of Artificial Sequence: Synthetic oligonucleotide
ggcucccggugcucagucc

SEQ ID NO: 2890696 - RNA, 19 nt, Artificial Sequence
  Description of Artificial Sequence: Synthetic oligonucleotide
ccucgccccgaacuuugag

SEQ ID NO: 2890697 - RNA, 19 nt, Artificial Sequence
  Description of Artificial Sequence: Synthetic oligonucleotide
gcaggcucccggugcucag

SEQ ID NO: 2890698 - RNA, 19 nt, Artificial Sequence
  Description of Artificial Sequence: Synthetic oligonucleotide
acagugcuuccaggcugga

SEQ ID NO: 2890699 - RNA, 19 nt, Artificial Sequence
  Description of Artificial Sequence: Synthetic oligonucleotide
ccagaccacaggccaugac

SEQ ID NO: 2890700 - RNA, 19 nt, Artificial Sequence
  Description of Artificial Sequence: Synthetic oligonucleotide
aggcuccguuauccuugcu

SEQ ID NO: 2890701 - RNA, 19 nt, Artificial Sequence
  Description of Artificial Sequence: Synthetic oligonucleotide
uggcgucaggggccaccuc

SEQ ID NO: 2890702 - RNA, 19 nt, Artificial Sequence
  Description of Artificial Sequence: Synthetic oligonucleotide
gccauguaguugauggccu

SEQ ID NO: 2890703 - RNA, 19 nt, Artificial Sequence
  Description of Artificial Sequence: Synthetic oligonucleotide
ccgucugccgccauguagu

SEQ ID NO: 2890704 - RNA, 19 nt, Artificial Sequence
  Description of Artificial Sequence: Synthetic oligonucleotide
ccuggucaaaggugaugca

SEQ ID NO: 2890705 - RNA, 19 nt, Artificial Sequence
  Description of Artificial Sequence: Synthetic oligonucleotide
ugaggccuaggggcuuguu

SEQ ID NO: 2890706 - RNA, 19 nt, Artificial Sequence
  Description of Artificial Sequence: Synthetic oligonucleotide
uccccagguucagcacaaa

SEQ ID NO: 2890707 - RNA, 19 nt, Artificial Sequence
  Description of Artificial Sequence: Synthetic oligonucleotide
ggggcuuguugacuucacu

SEQ ID NO: 2890708 - RNA, 19 nt, Artificial Sequence
  Description of Artificial Sequence: Synthetic oligonucleotide
gccacacacuugaucuuga

SEQ ID NO: 2890709 - RNA, 19 nt, Artificial Sequence
  Description of Artificial Sequence: Synthetic oligonucleotide
ccccagguuugagauucag

SEQ ID NO: 2890710 - RNA, 19 nt, Artificial Sequence
  Description of Artificial Sequence: Synthetic oligonucleotide
gcgucaggggccaccucgc

SEQ ID NO: 2890711 - RNA, 19 nt, Artificial Sequence
  Description of Artificial Sequence: Synthetic oligonucleotide
caaaggccacacacuugau

SEQ ID NO: 2890712 - RNA, 19 nt, Artificial Sequence
  Description of Artificial Sequence: Synthetic oligonucleotide
ccuaggggcuuguugacuu

SEQ ID NO: 2890713 - RNA, 19 nt, Artificial Sequence
  Description of Artificial Sequence: Synthetic oligonucleotide
ggcaggcucccggugcuca

SEQ ID NO: 2890714 - RNA, 19 nt, Artificial Sequence
  Description of Artificial Sequence: Synthetic oligonucleotide
ucuuggcgucaggggccac

SEQ ID NO: 2890715 - RNA, 19 nt, Artificial Sequence
  Description of Artificial Sequence: Synthetic oligonucleotide
accucgccccgaacuuuga

SEQ ID NO: 2890716 - RNA, 19 nt, Artificial Sequence
  Description of Artificial Sequence: Synthetic oligonucleotide
cagugcuuccaggcuggaa

SEQ ID NO: 2890717 - RNA, 19 nt, Artificial Sequence
  Description of Artificial Sequence: Synthetic oligonucleotide
cuccguuauccuugcuguu

SEQ ID NO: 2890718 - RNA, 19 nt, Artificial Sequence
  Description of Artificial Sequence: Synthetic oligonucleotide
gcacagguuguugcugucu

SEQ ID NO: 2890719 - RNA, 19 nt, Artificial Sequence
  Description of Artificial Sequence: Synthetic oligonucleotide
agucgccgucugccgccau

SEQ ID NO: 2890720 - RNA, 19 nt, Artificial Sequence
  Description of Artificial Sequence: Synthetic oligonucleotide
ggcguccccaugggcguug

SEQ ID NO: 2890721 - RNA, 19 nt, Artificial Sequence
  Description of Artificial Sequence: Synthetic oligonucleotide
cguuauccuugcuguugca

SEQ ID NO: 2890722 - RNA, 19 nt, Artificial Sequence
  Description of Artificial Sequence: Synthetic oligonucleotide
uggcguccccaugggcguu

SEQ ID NO: 2890723 - RNA, 19 nt, Artificial Sequence
  Description of Artificial Sequence: Synthetic oligonucleotide
cagccuggucaaaggugau

SEQ ID NO: 2890724 - RNA, 19 nt, Artificial Sequence
  Description of Artificial Sequence: Synthetic oligonucleotide
gccaccucgccccgaacuu

SEQ ID NO: 2890725 - RNA, 19 nt, Artificial Sequence
  Description of Artificial Sequence: Synthetic oligonucleotide
aggggccaccucgccccga

SEQ ID NO: 2890726 - RNA, 19 nt, Artificial Sequence
  Description of Artificial Sequence: Synthetic oligonucleotide
gccuaggggcuuguugacu

SEQ ID NO: 2890727 - RNA, 19 nt, Artificial Sequence
  Description of Artificial Sequence: Synthetic oligonucleotide
gccuccauguugagacggu

SEQ ID NO: 2890728 - RNA, 19 nt, Artificial Sequence
  Description of Artificial Sequence: Synthetic oligonucleotide
caggcucccggugcucagu

SEQ ID NO: 2890729 - RNA, 19 nt, Artificial Sequence
  Description of Artificial Sequence: Synthetic oligonucleotide
cgccccgaacuuugagaca

SEQ ID NO: 2890730 - RNA, 19 nt, Artificial Sequence
  Description of Artificial Sequence: Synthetic oligonucleotide
cagaggcagcugccuuuau

SEQ ID NO: 2890731 - RNA, 19 nt, Artificial Sequence
  Description of Artificial Sequence: Synthetic oligonucleotide
cccaggcuccguuauccuu

SEQ ID NO: 2890732 - RNA, 19 nt, Artificial Sequence
  Description of Artificial Sequence: Synthetic oligonucleotide
cugccgccauguaguugau

SEQ ID NO: 2890733 - RNA, 19 nt, Artificial Sequence
  Description of Artificial Sequence: Synthetic oligonucleotide
gcauaccuccacagugcuu

SEQ ID NO: 2890734 - RNA, 19 nt, Artificial Sequence
  Description of Artificial Sequence: Synthetic oligonucleotide
ccuugcuguugcacacgau

SEQ ID NO: 2890735 - RNA, 19 nt, Artificial Sequence
  Description of Artificial Sequence: Synthetic oligonucleotide
ccccaggcuccguuauccu

SEQ ID NO: 2890736 - RNA, 19 nt, Artificial Sequence
  Description of Artificial Sequence: Synthetic oligonucleotide
ccuccauguugagacgguu

SEQ ID NO: 2890737 - RNA, 19 nt, Artificial Sequence
  Description of Artificial Sequence: Synthetic oligonucleotide
gcguccccaugggcguuga

SEQ ID NO: 2890738 - RNA, 19 nt, Artificial Sequence
  Description of Artificial Sequence: Synthetic oligonucleotide
ccccgaacuuugagacacu

SEQ ID NO: 2890739 - RNA, 19 nt, Artificial Sequence
  Description of Artificial Sequence: Synthetic oligonucleotide
gcccaucuggcagcuugau

SEQ ID NO: 2890740 - RNA, 19 nt, Artificial Sequence
  Description of Artificial Sequence: Synthetic oligonucleotide
cgaccagaccacaggccau

SEQ ID NO: 2890741 - RNA, 19 nt, Artificial Sequence
  Description of Artificial Sequence: Synthetic oligonucleotide
caugcccaucuggcagcuu

SEQ ID NO: 2890742 - RNA, 19 nt, Artificial Sequence
  Description of Artificial Sequence: Synthetic oligonucleotide
ccaccucgccccgaacuuu

SEQ ID NO: 2890743 - RNA, 19 nt, Artificial Sequence
  Description of Artificial Sequence: Synthetic oligonucleotide
cgucugccgccauguaguu

SEQ ID NO: 2890744 - RNA, 19 nt, Artificial Sequence
  Description of Artificial Sequence: Synthetic oligonucleotide
cguccccaugggcguugaa

SEQ ID NO: 2890745 - RNA, 19 nt, Artificial Sequence
  Description of Artificial Sequence: Synthetic oligonucleotide
cgccgucugccgccaugua

SEQ ID NO: 2890746 - RNA, 19 nt, Artificial Sequence
  Description of Artificial Sequence: Synthetic oligonucleotide
aagaagugguccuagacgg

SEQ ID NO: 2890747 - RNA, 19 nt, Artificial Sequence
  Description of Artificial Sequence: Synthetic oligonucleotide
uuugucacuagacaggaug

SEQ ID NO: 2890748 - RNA, 19 nt, Artificial Sequence
  Description of Artificial Sequence: Synthetic oligonucleotide
caugccaagaagcugagcc

SEQ ID NO: 2890749 - RNA, 19 nt, Artificial Sequence
  Description of Artificial Sequence: Synthetic oligonucleotide
acagguuccccugagagcc

SEQ ID NO: 2890750 - RNA, 19 nt, Artificial Sequence
  Description of Artificial Sequence: Synthetic oligonucleotide
aagaagcugagccaggaca

SEQ ID NO: 2890751 - RNA, 19 nt, Artificial Sequence
  Description of Artificial Sequence: Synthetic oligonucleotide
cuugcugugaaacuccugc

SEQ ID NO: 2890752 - RNA, 19 nt, Artificial Sequence
  Description of Artificial Sequence: Synthetic oligonucleotide
ucgaaggcgaccaagguuc

SEQ ID NO: 2890753 - RNA, 19 nt, Artificial Sequence
  Description of Artificial Sequence: Synthetic oligonucleotide
ucuaggacaugucucuaag

SEQ ID NO: 2890754 - RNA, 19 nt, Artificial Sequence
  Description of Artificial Sequence: Synthetic oligonucleotide
uaggacaugucucuaagaa

SEQ ID NO: 2890755 - RNA, 19 nt, Artificial Sequence
  Description of Artificial Sequence: Synthetic oligonucleotide
gauacccugggacugacug

SEQ ID NO: 2890756 - RNA, 19 nt, Artificial Sequence
  Description of Artificial Sequence: Synthetic oligonucleotide
uugucacuagacaggaugc

SEQ ID NO: 2890757 - RNA, 19 nt, Artificial Sequence
  Description of Artificial Sequence: Synthetic oligonucleotide
acagaccaugccaagaagc

SEQ ID NO: 2890758 - RNA, 19 nt, Artificial Sequence
  Description of Artificial Sequence: Synthetic oligonucleotide
uggaccugacgucuggugg

SEQ ID NO: 2890759 - RNA, 19 nt, Artificial Sequence
  Description of Artificial Sequence: Synthetic oligonucleotide
acggugacccgauaguugg

SEQ ID NO: 2890760 - RNA, 19 nt, Artificial Sequence
  Description of Artificial Sequence: Synthetic oligonucleotide
cuccauuugagccuccucc

SEQ ID NO: 2890761 - RNA, 19 nt, Artificial Sequence
  Description of Artificial Sequence: Synthetic oligonucleotide
agacagguuccccugagag

SEQ ID NO: 2890762 - RNA, 19 nt, Artificial Sequence
  Description of Artificial Sequence: Synthetic oligonucleotide
ucacuagacaggaugcugu

SEQ ID NO: 2890763 - RNA, 19 nt, Artificial Sequence
  Description of Artificial Sequence: Synthetic oligonucleotide
uccacuucagcagacaggu

SEQ ID NO: 2890764 - RNA, 19 nt, Artificial Sequence
  Description of Artificial Sequence: Synthetic oligonucleotide
ugucucuaagaaguggucc

SEQ ID NO: 2890765 - RNA, 19 nt, Artificial Sequence
  Description of Artificial Sequence: Synthetic oligonucleotide
cuaagaagugguccuagac

SEQ ID NO: 2890766 - RNA, 19 nt, Artificial Sequence
  Description of Artificial Sequence: Synthetic oligonucleotide
acgucugguggccugcucc

SEQ ID NO: 2890767 - RNA, 19 nt, Artificial Sequence
  Description of Artificial Sequence: Synthetic oligonucleotide
cuagacaggaugcuguuuc

SEQ ID NO: 2890768 - RNA, 19 nt, Artificial Sequence
  Description of Artificial Sequence: Synthetic oligonucleotide
aggacaugucucuaagaag

SEQ ID NO: 2890769 - RNA, 19 nt, Artificial Sequence
  Description of Artificial Sequence: Synthetic oligonucleotide
aagcugagccaggacacgc

SEQ ID NO: 2890770 - RNA, 19 nt, Artificial Sequence
  Description of Artificial Sequence: Synthetic oligonucleotide
cacuucagcagacagguuc

SEQ ID NO: 2890771 - RNA, 19 nt, Artificial Sequence
  Description of Artificial Sequence: Synthetic oligonucleotide
acuucagcagacagguucc

SEQ ID NO: 2890772 - RNA, 19 nt, Artificial Sequence
  Description of Artificial Sequence: Synthetic oligonucleotide
ugguccuagacggugaccc

SEQ ID NO: 2890773 - RNA, 19 nt, Artificial Sequence
  Description of Artificial Sequence: Synthetic oligonucleotide
caagguuccagacggcugc

SEQ ID NO: 2890774 - RNA, 19 nt, Artificial Sequence
  Description of Artificial Sequence: Synthetic oligonucleotide
guuucgaaggcgaccaagg

SEQ ID NO: 2890775 - RNA, 19 nt, Artificial Sequence
  Description of Artificial Sequence: Synthetic oligonucleotide
ucacagaccaugccaagaa

SEQ ID NO: 2890776 - RNA, 19 nt, Artificial Sequence
  Description of Artificial Sequence: Synthetic oligonucleotide
ugugaaacuccugcucacg

SEQ ID NO: 2890777 - RNA, 19 nt, Artificial Sequence
  Description of Artificial Sequence: Synthetic oligonucleotide
cuagacggugacccgauag

SEQ ID NO: 2890778 - RNA, 19 nt, Artificial Sequence
  Description of Artificial Sequence: Synthetic oligonucleotide
ucagcagacagguuccccu

SEQ ID NO: 2890779 - RNA, 19 nt, Artificial Sequence
  Description of Artificial Sequence: Synthetic oligonucleotide
gaaacuccugcucacgcuc

SEQ ID NO: 2890780 - RNA, 19 nt, Artificial Sequence
  Description of Artificial Sequence: Synthetic oligonucleotide
gacgucacagaccaugcca

SEQ ID NO: 2890781 - RNA, 19 nt, Artificial Sequence
  Description of Artificial Sequence: Synthetic oligonucleotide
uagacaggaugcuguuucg

SEQ ID NO: 2890782 - RNA, 19 nt, Artificial Sequence
  Description of Artificial Sequence: Synthetic oligonucleotide
acaugucucuaagaagugg

SEQ ID NO: 2890783 - RNA, 19 nt, Artificial Sequence
  Description of Artificial Sequence: Synthetic oligonucleotide
aaggcgaccaagguuccag

SEQ ID NO: 2890784 - RNA, 19 nt, Artificial Sequence
  Description of Artificial Sequence: Synthetic oligonucleotide
uguuucgaaggcgaccaag

SEQ ID NO: 2890785 - RNA, 19 nt, Artificial Sequence
  Description of Artificial Sequence: Synthetic oligonucleotide
ucuaagaagugguccuaga

SEQ ID NO: 2890786 - RNA, 19 nt, Artificial Sequence
  Description of Artificial Sequence: Synthetic oligonucleotide
gaugcuguuucgaaggcga

SEQ ID NO: 2890787 - RNA, 19 nt, Artificial Sequence
  Description of Artificial Sequence: Synthetic oligonucleotide
aggagucagccucuaggac

SEQ ID NO: 2890788 - RNA, 19 nt, Artificial Sequence
  Description of Artificial Sequence: Synthetic oligonucleotide
ugccaagaagcugagccag

SEQ ID NO: 2890789 - RNA, 19 nt, Artificial Sequence
  Description of Artificial Sequence: Synthetic oligonucleotide
auuugagccuccuccuuug

SEQ ID NO: 2890790 - RNA, 19 nt, Artificial Sequence
  Description of Artificial Sequence: Synthetic oligonucleotide
uccaccuccauuugagccu

SEQ ID NO: 2890791 - RNA, 19 nt, Artificial Sequence
  Description of Artificial Sequence: Synthetic oligonucleotide
uuccccugagagcccaugg

SEQ ID NO: 2890792 - RNA, 19 nt, Artificial Sequence
  Description of Artificial Sequence: Synthetic oligonucleotide
uuucgaaggcgaccaaggu

SEQ ID NO: 2890793 - RNA, 19 nt, Artificial Sequence
  Description of Artificial Sequence: Synthetic oligonucleotide
agugguccuagacggugac

SEQ ID NO: 2890794 - RNA, 19 nt, Artificial Sequence
  Description of Artificial Sequence: Synthetic oligonucleotide
uacugcuccaccuccauuu

SEQ ID NO: 2890795 - RNA, 19 nt, Artificial Sequence
  Description of Artificial Sequence: Synthetic oligonucleotide
gacccgauaguuggggugg

SEQ ID NO: 2890796 - RNA, 19 nt, Artificial Sequence
  Description of Artificial Sequence: Synthetic oligonucleotide
uccauuugagccuccuccu

SEQ ID NO: 2890797 - RNA, 19 nt, Artificial Sequence
  Description of Artificial Sequence: Synthetic oligonucleotide
ugcugugaaacuccugcuc

SEQ ID NO: 2890798 - RNA, 19 nt, Artificial Sequence
  Description of Artificial Sequence: Synthetic oligonucleotide
uccucuuccuggcaucggc

SEQ ID NO: 2890799 - RNA, 19 nt, Artificial Sequence
  Description of Artificial Sequence: Synthetic oligonucleotide
gaggagucagccucuagga

SEQ ID NO: 2890800 - RNA, 19 nt, Artificial Sequence
  Description of Artificial Sequence: Synthetic oligonucleotide
ugaaacuccugcucacgcu

SEQ ID NO: 2890801 - RNA, 19 nt, Artificial Sequence
  Description of Artificial Sequence: Synthetic oligonucleotide
uagacggugacccgauagu

SEQ ID NO: 2890802 - RNA, 19 nt, Artificial Sequence
  Description of Artificial Sequence: Synthetic oligonucleotide
guuggcagaggagucagcc

SEQ ID NO: 2890803 - RNA, 19 nt, Artificial Sequence
  Description of Artificial Sequence: Synthetic oligonucleotide
cuccacuucagcagacagg

SEQ ID NO: 2890804 - RNA, 19 nt, Artificial Sequence
  Description of Artificial Sequence: Synthetic oligonucleotide
gacagguuccccugagagc

SEQ ID NO: 2890805 - RNA, 19 nt, Artificial Sequence
  Description of Artificial Sequence: Synthetic oligonucleotide
uucgaaggcgaccaagguu

SEQ ID NO: 2890806 - RNA, 19 nt, Artificial Sequence
  Description of Artificial Sequence: Synthetic oligonucleotide
ugacccgauaguuggggug

SEQ ID NO: 2890807 - RNA, 19 nt, Artificial Sequence
  Description of Artificial Sequence: Synthetic oligonucleotide
gaccaugccaagaagcuga

SEQ ID NO: 2890808 - RNA, 19 nt, Artificial Sequence
  Description of Artificial Sequence: Synthetic oligonucleotide
gaagugguccuagacggug

SEQ ID NO: 2890809 - RNA, 19 nt, Artificial Sequence
  Description of Artificial Sequence: Synthetic oligonucleotide
auacccugggacugacugg

SEQ ID NO: 2890810 - RNA, 19 nt, Artificial Sequence
  Description of Artificial Sequence: Synthetic oligonucleotide
gugaaacuccugcucacgc

SEQ ID NO: 2890811 - RNA, 19 nt, Artificial Sequence
  Description of Artificial Sequence: Synthetic oligonucleotide
cugacgucacagaccaugc

SEQ ID NO: 2890812 - RNA, 19 nt, Artificial Sequence
  Description of Artificial Sequence: Synthetic oligonucleotide
gcaucggccaccuucuccg

SEQ ID NO: 2890813 - RNA, 19 nt, Artificial Sequence
  Description of Artificial Sequence: Synthetic oligonucleotide
cugcuugcugugaaacucc

SEQ ID NO: 2890814 - RNA, 19 nt, Artificial Sequence
  Description of Artificial Sequence: Synthetic oligonucleotide
ugcuggauacccugggacu

SEQ ID NO: 2890815 - RNA, 19 nt, Artificial Sequence
  Description of Artificial Sequence: Synthetic oligonucleotide
ucggccaccuucuccgcgg

SEQ ID NO: 2890816 - RNA, 19 nt, Artificial Sequence
  Description of Artificial Sequence: Synthetic oligonucleotide
aagguuccagacggcugcc

SEQ ID NO: 2890817 - RNA, 19 nt, Artificial Sequence
  Description of Artificial Sequence: Synthetic oligonucleotide
ucugcugggagcucugcau

SEQ ID NO: 2890818 - RNA, 19 nt, Artificial Sequence
  Description of Artificial Sequence: Synthetic oligonucleotide
uuccagacggcugccagcc

SEQ ID NO: 2890819 - RNA, 19 nt, Artificial Sequence
  Description of Artificial Sequence: Synthetic oligonucleotide
agcucugcaugcccuggac

SEQ ID NO: 2890820 - RNA, 19 nt, Artificial Sequence
  Description of Artificial Sequence: Synthetic oligonucleotide
cucccgguuucucugcugg

SEQ ID NO: 2890821 - RNA, 19 nt, Artificial Sequence
  Description of Artificial Sequence: Synthetic oligonucleotide
ugacgucacagaccaugcc

SEQ ID NO: 2890822 - RNA, 19 nt, Artificial Sequence
  Description of Artificial Sequence: Synthetic oligonucleotide
agccaggacacgcucccgg

SEQ ID NO: 2890823 - RNA, 19 nt, Artificial Sequence
  Description of Artificial Sequence: Synthetic oligonucleotide
augccaagaagcugagcca

SEQ ID NO: 2890824 - RNA, 19 nt, Artificial Sequence
  Description of Artificial Sequence: Synthetic oligonucleotide
uuugagccuccuccuuugc

SEQ ID NO: 2890825 - RNA, 19 nt, Artificial Sequence
  Description of Artificial Sequence: Synthetic oligonucleotide
uucuccgcuugcaggagcu

SEQ ID NO: 2890826 - RNA, 19 nt, Artificial Sequence
  Description of Artificial Sequence: Synthetic oligonucleotide
uccuccuuugccugcuuca

SEQ ID NO: 2890827 - RNA, 19 nt, Artificial Sequence
  Description of Artificial Sequence: Synthetic oligonucleotide
cugcuggauacccugggac

SEQ ID NO: 2890828 - RNA, 19 nt, Artificial Sequence
  Description of Artificial Sequence: Synthetic oligonucleotide
ggagucagccucuaggaca

SEQ ID NO: 2890829 - RNA, 19 nt, Artificial Sequence
  Description of Artificial Sequence: Synthetic oligonucleotide
uccccugagagcccauggc

SEQ ID NO: 2890830 - RNA, 19 nt, Artificial Sequence
  Description of Artificial Sequence: Synthetic oligonucleotide
gaguuggcagaggagucag

SEQ ID NO: 2890831 - RNA, 19 nt, Artificial Sequence
  Description of Artificial Sequence: Synthetic oligonucleotide
gaagcugagccaggacacg

SEQ ID NO: 2890832 - RNA, 19 nt, Artificial Sequence
  Description of Artificial Sequence: Synthetic oligonucleotide
gacaugucucuaagaagug

SEQ ID NO: 2890833 - RNA, 19 nt, Artificial Sequence
  Description of Artificial Sequence: Synthetic oligonucleotide
gacaggaugcuguuucgaa

SEQ ID NO: 2890834 - RNA, 19 nt, Artificial Sequence
  Description of Artificial Sequence: Synthetic oligonucleotide
uugcugugaaacuccugcu

SEQ ID NO: 2890835 - RNA, 19 nt, Artificial Sequence
  Description of Artificial Sequence: Synthetic oligonucleotide
ugcuguuucgaaggcgacc

SEQ ID NO: 2890836 - RNA, 19 nt, Artificial Sequence
  Description of Artificial Sequence: Synthetic oligonucleotide
uccgcggcccgcuucuccg

SEQ ID NO: 2890837 - RNA, 19 nt, Artificial Sequence
  Description of Artificial Sequence: Synthetic oligonucleotide
gucacuagacaggaugcug

SEQ ID NO: 2890838 - RNA, 19 nt, Artificial Sequence
  Description of Artificial Sequence: Synthetic oligonucleotide
caugucucuaagaaguggu

SEQ ID NO: 2890839 - RNA, 19 nt, Artificial Sequence
  Description of Artificial Sequence: Synthetic oligonucleotide
augucucuaagaagugguc

SEQ ID NO: 2890840 - RNA, 19 nt, Artificial Sequence
  Description of Artificial Sequence: Synthetic oligonucleotide
cucuaagaagugguccuag

SEQ ID NO: 2890841 - RNA, 19 nt, Artificial Sequence
  Description of Artificial Sequence: Synthetic oligonucleotide
cugugaaacuccugcucac

SEQ ID NO: 2890842 - RNA, 19 nt, Artificial Sequence
  Description of Artificial Sequence: Synthetic oligonucleotide
cacagaccaugccaagaag

SEQ ID NO: 2890843 - RNA, 19 nt, Artificial Sequence
  Description of Artificial Sequence: Synthetic oligonucleotide
agccucuaggacaugucuc

SEQ ID NO: 2890844 - RNA, 19 nt, Artificial Sequence
  Description of Artificial Sequence: Synthetic oligonucleotide
gacggugacccgauaguug

SEQ ID NO: 2890845 - RNA, 19 nt, Artificial Sequence
  Description of Artificial Sequence: Synthetic oligonucleotide
ugcuugcugugaaacuccu

SEQ ID NO: 2890846 - RNA, 19 nt, Artificial Sequence
  Description of Artificial Sequence: Synthetic oligonucleotide
augcccuggaccugacguc

SEQ ID NO: 2890847 - RNA, 19 nt, Artificial Sequence
  Description of Artificial Sequence: Synthetic oligonucleotide
gauaguuggggugggaccu

SEQ ID NO: 2890848 - RNA, 19 nt, Artificial Sequence
  Description of Artificial Sequence: Synthetic oligonucleotide
ucuuccuggcaucggccac

SEQ ID NO: 2890849 - RNA, 19 nt, Artificial Sequence
  Description of Artificial Sequence: Synthetic oligonucleotide
cgaccaagguuccagacgg

SEQ ID NO: 2890850 - RNA, 19 nt, Artificial Sequence
  Description of Artificial Sequence: Synthetic oligonucleotide
cuuccucuuccuggcaucg

SEQ ID NO: 2890851 - RNA, 19 nt, Artificial Sequence
  Description of Artificial Sequence: Synthetic oligonucleotide
ugcugcuugcugugaaacu

SEQ ID NO: 2890852 - RNA, 19 nt, Artificial Sequence
  Description of Artificial Sequence: Synthetic oligonucleotide
ugggagcucugcaugcccu

SEQ ID NO: 2890853 - RNA, 19 nt, Artificial Sequence
  Description of Artificial Sequence: Synthetic oligonucleotide
ugucacuagacaggaugcu

SEQ ID NO: 2890854 - RNA, 19 nt, Artificial Sequence
  Description of Artificial Sequence: Synthetic oligonucleotide
ucagccucuaggacauguc

SEQ ID NO: 2890855 - RNA, 19 nt, Artificial Sequence
  Description of Artificial Sequence: Synthetic oligonucleotide
ugcgguacugcuccaccuc

SEQ ID NO: 2890856 - RNA, 19 nt, Artificial Sequence
  Description of Artificial Sequence: Synthetic oligonucleotide
uuggcagaggagucagccu

SEQ ID NO: 2890857 - RNA, 19 nt, Artificial Sequence
  Description of Artificial Sequence: Synthetic oligonucleotide
cugagccaggacacgcucc

SEQ ID NO: 2890858 - RNA, 19 nt, Artificial Sequence
  Description of Artificial Sequence: Synthetic oligonucleotide
ggacaugucucuaagaagu

SEQ ID NO: 2890859 - RNA, 19 nt, Artificial Sequence
  Description of Artificial Sequence: Synthetic oligonucleotide
gcgaccaagguuccagacg

SEQ ID NO: 2890860 - RNA, 19 nt, Artificial Sequence
  Description of Artificial Sequence: Synthetic oligonucleotide
uuuugucacuagacaggau

SEQ ID NO: 2890861 - RNA, 19 nt, Artificial Sequence
  Description of Artificial Sequence: Synthetic oligonucleotide
acugcuccaccuccauuug

SEQ ID NO: 2890862 - RNA, 19 nt, Artificial Sequence
  Description of Artificial Sequence: Synthetic oligonucleotide
uucagcagacagguucccc

SEQ ID NO: 2890863 - RNA, 19 nt, Artificial Sequence
  Description of Artificial Sequence: Synthetic oligonucleotide
uggccugcuccacuucagc

SEQ ID NO: 2890864 - RNA, 19 nt, Artificial Sequence
  Description of Artificial Sequence: Synthetic oligonucleotide
agagcccauggccgccugc

SEQ ID NO: 2890865 - RNA, 19 nt, Artificial Sequence
  Description of Artificial Sequence: Synthetic oligonucleotide
gucucuaagaagugguccu

SEQ ID NO: 2890866 - RNA, 19 nt, Artificial Sequence
  Description of Artificial Sequence: Synthetic oligonucleotide
guuccagacggcugccagc

SEQ ID NO: 2890867 - RNA, 19 nt, Artificial Sequence
  Description of Artificial Sequence: Synthetic oligonucleotide
ucagucuccgggccuuccu

SEQ ID NO: 2890868 - RNA, 19 nt, Artificial Sequence
  Description of Artificial Sequence: Synthetic oligonucleotide
cuaggacaugucucuaaga

SEQ ID NO: 2890869 - RNA, 19 nt, Artificial Sequence
  Description of Artificial Sequence: Synthetic oligonucleotide
ugggaccuggggccugacg

SEQ ID NO: 2890870 - RNA, 19 nt, Artificial Sequence
  Description of Artificial Sequence: Synthetic oligonucleotide
agaccaugccaagaagcug

SEQ ID NO: 2890871 - RNA, 19 nt, Artificial Sequence
  Description of Artificial Sequence: Synthetic oligonucleotide
aggacacgcucccgguuuc

SEQ ID NO: 2890872 - RNA, 19 nt, Artificial Sequence
  Description of Artificial Sequence: Synthetic oligonucleotide
ggugacccgauaguugggg

SEQ ID NO: 2890873 - RNA, 19 nt, Artificial Sequence
  Description of Artificial Sequence: Synthetic oligonucleotide
accaagguuccagacggcu

SEQ ID NO: 2890874 - RNA, 19 nt, Artificial Sequence
  Description of Artificial Sequence: Synthetic oligonucleotide
acgcucccgguuucucugc

SEQ ID NO: 2890875 - RNA, 19 nt, Artificial Sequence
  Description of Artificial Sequence: Synthetic oligonucleotide
ggccugacgucacagacca

SEQ ID NO: 2890876 - RNA, 19 nt, Artificial Sequence
  Description of Artificial Sequence: Synthetic oligonucleotide
uucuccgcggcccgcuucu

SEQ ID NO: 2890877 - RNA, 19 nt, Artificial Sequence
  Description of Artificial Sequence: Synthetic oligonucleotide
ugcucacgcucccugcggu

SEQ ID NO: 2890878 - RNA, 19 nt, Artificial Sequence
  Description of Artificial Sequence: Synthetic oligonucleotide
cuggaccugacgucuggug

SEQ ID NO: 2890879 - RNA, 19 nt, Artificial Sequence
  Description of Artificial Sequence: Synthetic oligonucleotide
cacgcucccgguuucucug

SEQ ID NO: 2890880 - RNA, 19 nt, Artificial Sequence
  Description of Artificial Sequence: Synthetic oligonucleotide
aagugguccuagacgguga

SEQ ID NO: 2890881 - RNA, 19 nt, Artificial Sequence
  Description of Artificial Sequence: Synthetic oligonucleotide
ucccgguuucucugcuggg

SEQ ID NO: 2890882 - RNA, 19 nt, Artificial Sequence
  Description of Artificial Sequence: Synthetic oligonucleotide
cagacggcugccagccucc

SEQ ID NO: 2890883 - RNA, 19 nt, Artificial Sequence
  Description of Artificial Sequence: Synthetic oligonucleotide
gcuccacuucagcagacag

SEQ ID NO: 2890884 - RNA, 19 nt, Artificial Sequence
  Description of Artificial Sequence: Synthetic oligonucleotide
ggaccugacgucugguggc

SEQ ID NO: 2890885 - RNA, 19 nt, Artificial Sequence
  Description of Artificial Sequence: Synthetic oligonucleotide
agucuccgggccuuccucu

SEQ ID NO: 2890886 - RNA, 19 nt, Artificial Sequence
  Description of Artificial Sequence: Synthetic oligonucleotide
cugggagcucugcaugccc

SEQ ID NO: 2890887 - RNA, 19 nt, Artificial Sequence
  Description of Artificial Sequence: Synthetic oligonucleotide
gguuccagacggcugccag

SEQ ID NO: 2890888 - RNA, 19 nt, Artificial Sequence
  Description of Artificial Sequence: Synthetic oligonucleotide
cugcugcuugcugugaaac

SEQ ID NO: 2890889 - RNA, 19 nt, Artificial Sequence
  Description of Artificial Sequence: Synthetic oligonucleotide
uccuagacggugacccgau

SEQ ID NO: 2890890 - RNA, 19 nt, Artificial Sequence
  Description of Artificial Sequence: Synthetic oligonucleotide
ucucuaagaagugguccua

SEQ ID NO: 2890891 - RNA, 19 nt, Artificial Sequence
  Description of Artificial Sequence: Synthetic oligonucleotide
ggaugcuguuucgaaggcg

SEQ ID NO: 2890892 - RNA, 19 nt, Artificial Sequence
  Description of Artificial Sequence: Synthetic oligonucleotide
cuuccuggcaucggccacc

SEQ ID NO: 2890893 - RNA, 19 nt, Artificial Sequence
  Description of Artificial Sequence: Synthetic oligonucleotide
ugcccuggaccugacgucu

SEQ ID NO: 2890894 - RNA, 19 nt, Artificial Sequence
  Description of Artificial Sequence: Synthetic oligonucleotide
cccugagagcccauggccg

SEQ ID NO: 2890895 - RNA, 19 nt, Artificial Sequence
  Description of Artificial Sequence: Synthetic oligonucleotide
cugcuucagucuccgggcc

SEQ ID NO: 2890896 - RNA, 19 nt, Artificial Sequence
  Description of Artificial Sequence: Synthetic oligonucleotide
cagcagacagguuccccug

SEQ ID NO: 2890897 - RNA, 19 nt, Artificial Sequence
  Description of Artificial Sequence: Synthetic oligonucleotide
aguuggcagaggagucagc

SEQ ID NO: 2890898 - RNA, 19 nt, Artificial Sequence
  Description of Artificial Sequence: Synthetic oligonucleotide
gcuguuucgaaggcgacca

SEQ ID NO: 2890899 - RNA, 19 nt, Artificial Sequence
  Description of Artificial Sequence: Synthetic oligonucleotide
agcagacagguuccccuga

SEQ ID NO: 2890900 - RNA, 19 nt, Artificial Sequence
  Description of Artificial Sequence: Synthetic oligonucleotide
acacgcucccgguuucucu

SEQ ID NO: 2890901 - RNA, 19 nt, Artificial Sequence
  Description of Artificial Sequence: Synthetic oligonucleotide
ccugacgucacagaccaug

SEQ ID NO: 2890902 - RNA, 19 nt, Artificial Sequence
  Description of Artificial Sequence: Synthetic oligonucleotide
cugcucacgcucccugcgg

SEQ ID NO: 2890903 - RNA, 19 nt, Artificial Sequence
  Description of Artificial Sequence: Synthetic oligonucleotide
ucugcaugcccuggaccug

SEQ ID NO: 2890904 - RNA, 19 nt, Artificial Sequence
  Description of Artificial Sequence: Synthetic oligonucleotide
ccuggcaucggccaccuuc

SEQ ID NO: 2890905 - RNA, 19 nt, Artificial Sequence
  Description of Artificial Sequence: Synthetic oligonucleotide
cuccgcuugcaggagcugc

SEQ ID NO: 2890906 - RNA, 19 nt, Artificial Sequence
  Description of Artificial Sequence: Synthetic oligonucleotide
agacaggaugcuguuucga

SEQ ID NO: 2890907 - RNA, 19 nt, Artificial Sequence
  Description of Artificial Sequence: Synthetic oligonucleotide
cagaccaugccaagaagcu

SEQ ID NO: 2890908 - RNA, 19 nt, Artificial Sequence
  Description of Artificial Sequence: Synthetic oligonucleotide
caugcccuggaccugacgu

SEQ ID NO: 2890909 - RNA, 19 nt, Artificial Sequence
  Description of Artificial Sequence: Synthetic oligonucleotide
uuccucuuccuggcaucgg

SEQ ID NO: 2890910 - RNA, 19 nt, Artificial Sequence
  Description of Artificial Sequence: Synthetic oligonucleotide
cuccgggccuuccucuucc

SEQ ID NO: 2890911 - RNA, 19 nt, Artificial Sequence
  Description of Artificial Sequence: Synthetic oligonucleotide
cucuaggacaugucucuaa

SEQ ID NO: 2890912 - RNA, 19 nt, Artificial Sequence
  Description of Artificial Sequence: Synthetic oligonucleotide
augcuguuucgaaggcgac

SEQ ID NO: 2890913 - RNA, 19 nt, Artificial Sequence
  Description of Artificial Sequence: Synthetic oligonucleotide
cucuuccuggcaucggcca

SEQ ID NO: 2890914 - RNA, 19 nt, Artificial Sequence
  Description of Artificial Sequence: Synthetic oligonucleotide
ugcuccacuucagcagaca

SEQ ID NO: 2890915 - RNA, 19 nt, Artificial Sequence
  Description of Artificial Sequence: Synthetic oligonucleotide
ggcaucggccaccuucucc

SEQ ID NO: 2890916 - RNA, 19 nt, Artificial Sequence
  Description of Artificial Sequence: Synthetic oligonucleotide
gguccuagacggugacccg

SEQ ID NO: 2890917 - RNA, 19 nt, Artificial Sequence
  Description of Artificial Sequence: Synthetic oligonucleotide
ggggccugacgucacagac

SEQ ID NO: 2890918 - RNA, 19 nt, Artificial Sequence
  Description of Artificial Sequence: Synthetic oligonucleotide
gaccugacgucugguggcc

SEQ ID NO: 2890919 - RNA, 19 nt, Artificial Sequence
  Description of Artificial Sequence: Synthetic oligonucleotide
cuucagcagacagguuccc

SEQ ID NO: 2890920 - RNA, 19 nt, Artificial Sequence
  Description of Artificial Sequence: Synthetic oligonucleotide
acgucacagaccaugccaa

SEQ ID NO: 2890921 - RNA, 19 nt, Artificial Sequence
  Description of Artificial Sequence: Synthetic oligonucleotide
uggggccugacgucacaga

SEQ ID NO: 2890922 - RNA, 19 nt, Artificial Sequence
  Description of Artificial Sequence: Synthetic oligonucleotide
uucagucuccgggccuucc

SEQ ID NO: 2890923 - RNA, 19 nt, Artificial Sequence
  Description of Artificial Sequence: Synthetic oligonucleotide
ucacgcucccugcgguacu

SEQ ID NO: 2890924 - RNA, 19 nt, Artificial Sequence
  Description of Artificial Sequence: Synthetic oligonucleotide
gacggcugccagccuccgg

SEQ ID NO: 2890925 - RNA, 19 nt, Artificial Sequence
  Description of Artificial Sequence: Synthetic oligonucleotide
cgauaguuggggugggacc

SEQ ID NO: 2890926 - RNA, 19 nt, Artificial Sequence
  Description of Artificial Sequence: Synthetic oligonucleotide
agacggugacccgauaguu

SEQ ID NO: 2890927 - RNA, 19 nt, Artificial Sequence
  Description of Artificial Sequence: Synthetic oligonucleotide
ucuccgggccuuccucuuc

SEQ ID NO: 2890928 - RNA, 19 nt, Artificial Sequence
  Description of Artificial Sequence: Synthetic oligonucleotide
ccugagagcccauggccgc

SEQ ID NO: 2890929 - RNA, 19 nt, Artificial Sequence
  Description of Artificial Sequence: Synthetic oligonucleotide
gcagacagguuccccugag

SEQ ID NO: 2890930 - RNA, 19 nt, Artificial Sequence
  Description of Artificial Sequence: Synthetic oligonucleotide
cucacgcucccugcgguac

SEQ ID NO: 2890931 - RNA, 19 nt, Artificial Sequence
  Description of Artificial Sequence: Synthetic oligonucleotide
cagaggagucagccucuag

SEQ ID NO: 2890932 - RNA, 19 nt, Artificial Sequence
  Description of Artificial Sequence: Synthetic oligonucleotide
aggcgaccaagguuccaga

SEQ ID NO: 2890933 - RNA, 19 nt, Artificial Sequence
  Description of Artificial Sequence: Synthetic oligonucleotide
cugacgucugguggccugc

SEQ ID NO: 2890934 - RNA, 19 nt, Artificial Sequence
  Description of Artificial Sequence: Synthetic oligonucleotide
ccccugagagcccauggcc

SEQ ID NO: 2890935 - RNA, 19 nt, Artificial Sequence
  Description of Artificial Sequence: Synthetic oligonucleotide
auaguuggggugggaccug

SEQ ID NO: 2890936 - RNA, 19 nt, Artificial Sequence
  Description of Artificial Sequence: Synthetic oligonucleotide
ucucugcugggagcucugc

SEQ ID NO: 2890937 - RNA, 19 nt, Artificial Sequence
  Description of Artificial Sequence: Synthetic oligonucleotide
gcucugcaugcccuggacc

SEQ ID NO: 2890938 - RNA, 19 nt, Artificial Sequence
  Description of Artificial Sequence: Synthetic oligonucleotide
ccaagguuccagacggcug

SEQ ID NO: 2890939 - RNA, 19 nt, Artificial Sequence
  Description of Artificial Sequence: Synthetic oligonucleotide
uggauacccugggacugac

SEQ ID NO: 2890940 - RNA, 19 nt, Artificial Sequence
  Description of Artificial Sequence: Synthetic oligonucleotide
agaagugguccuagacggu

SEQ ID NO: 2890941 - RNA, 19 nt, Artificial Sequence
  Description of Artificial Sequence: Synthetic oligonucleotide
accaugccaagaagcugag

SEQ ID NO: 2890942 - RNA, 19 nt, Artificial Sequence
  Description of Artificial Sequence: Synthetic oligonucleotide
gcgguacugcuccaccucc

SEQ ID NO: 2890943 - RNA, 19 nt, Artificial Sequence
  Description of Artificial Sequence: Synthetic oligonucleotide
cugcuccacuucagcagac

SEQ ID NO: 2890944 - RNA, 19 nt, Artificial Sequence
  Description of Artificial Sequence: Synthetic oligonucleotide
gagcucugcaugcccugga

SEQ ID NO: 2890945 - RNA, 19 nt, Artificial Sequence
  Description of Artificial Sequence: Synthetic oligonucleotide
ggcgaccaagguuccagac

SEQ ID NO: 2890946 - RNA, 19 nt, Artificial Sequence
  Description of Artificial Sequence: Synthetic oligonucleotide
ccucuuccuggcaucggcc

SEQ ID NO: 2890947 - RNA, 19 nt, Artificial Sequence
  Description of Artificial Sequence: Synthetic oligonucleotide
caucggccaccuucuccgc

SEQ ID NO: 2890948 - RNA, 19 nt, Artificial Sequence
  Description of Artificial Sequence: Synthetic oligonucleotide
ccugcucacgcucccugcg

SEQ ID NO: 2890949 - RNA, 19 nt, Artificial Sequence
  Description of Artificial Sequence: Synthetic oligonucleotide
cugagagcccauggccgcc

SEQ ID NO: 2890950 - RNA, 19 nt, Artificial Sequence
  Description of Artificial Sequence: Synthetic oligonucleotide
ugccugcuucagucuccgg

SEQ ID NO: 2890951 - RNA, 19 nt, Artificial Sequence
  Description of Artificial Sequence: Synthetic oligonucleotide
cuggggccugacgucacag

SEQ ID NO: 2890952 - RNA, 19 nt, Artificial Sequence
  Description of Artificial Sequence: Synthetic oligonucleotide
cagucuccgggccuuccuc

SEQ ID NO: 2890953 - RNA, 19 nt, Artificial Sequence
  Description of Artificial Sequence: Synthetic oligonucleotide
gaccuggggccugacguca

SEQ ID NO: 2890954 - RNA, 19 nt, Artificial Sequence
  Description of Artificial Sequence: Synthetic oligonucleotide
gagucagccucuaggacau

SEQ ID NO: 2890955 - RNA, 19 nt, Artificial Sequence
  Description of Artificial Sequence: Synthetic oligonucleotide
gaccaagguuccagacggc

SEQ ID NO: 2890956 - RNA, 19 nt, Artificial Sequence
  Description of Artificial Sequence: Synthetic oligonucleotide
guccuagacggugacccga

SEQ ID NO: 2890957 - RNA, 19 nt, Artificial Sequence
  Description of Artificial Sequence: Synthetic oligonucleotide
cagguuccccugagagccc

SEQ ID NO: 2890958 - RNA, 19 nt, Artificial Sequence
  Description of Artificial Sequence: Synthetic oligonucleotide
cgggccuuccucuuccugg

SEQ ID NO: 2890959 - RNA, 19 nt, Artificial Sequence
  Description of Artificial Sequence: Synthetic oligonucleotide
gagccaggacacgcucccg

SEQ ID NO: 2890960 - RNA, 19 nt, Artificial Sequence
  Description of Artificial Sequence: Synthetic oligonucleotide
gguggccugcuccacuuca

SEQ ID NO: 2890961 - RNA, 19 nt, Artificial Sequence
  Description of Artificial Sequence: Synthetic oligonucleotide
ccgcuucuccgcuugcagg

SEQ ID NO: 2890962 - RNA, 19 nt, Artificial Sequence
  Description of Artificial Sequence: Synthetic oligonucleotide
ccgguuucucugcugggag

SEQ ID NO: 2890963 - RNA, 19 nt, Artificial Sequence
  Description of Artificial Sequence: Synthetic oligonucleotide
aguuggggugggaccuggg

SEQ ID NO: 2890964 - RNA, 19 nt, Artificial Sequence
  Description of Artificial Sequence: Synthetic oligonucleotide
ggaguuggcagaggaguca

SEQ ID NO: 2890965 - RNA, 19 nt, Artificial Sequence
  Description of Artificial Sequence: Synthetic oligonucleotide
guggccugcuccacuucag

SEQ ID NO: 2890966 - RNA, 19 nt, Artificial Sequence
  Description of Artificial Sequence: Synthetic oligonucleotide
ugcaugcccuggaccugac

SEQ ID NO: 2890967 - RNA, 19 nt, Artificial Sequence
  Description of Artificial Sequence: Synthetic oligonucleotide
gggaccuggggccugacgu

SEQ ID NO: 2890968 - RNA, 19 nt, Artificial Sequence
  Description of Artificial Sequence: Synthetic oligonucleotide
acccgauaguugggguggg

SEQ ID NO: 2890969 - RNA, 19 nt, Artificial Sequence
  Description of Artificial Sequence: Synthetic oligonucleotide
ccugcgguacugcuccacc

SEQ ID NO: 2890970 - RNA, 19 nt, Artificial Sequence
  Description of Artificial Sequence: Synthetic oligonucleotide
gcugccagccuccggcgcc

SEQ ID NO: 2890971 - RNA, 19 nt, Artificial Sequence
  Description of Artificial Sequence: Synthetic oligonucleotide
cuggcaucggccaccuucu

SEQ ID NO: 2890972 - RNA, 19 nt, Artificial Sequence
  Description of Artificial Sequence: Synthetic oligonucleotide
agcugagccaggacacgcu

SEQ ID NO: 2890973 - RNA, 19 nt, Artificial Sequence
  Description of Artificial Sequence: Synthetic oligonucleotide
cucugcugggagcucugca

SEQ ID NO: 2890974 - RNA, 19 nt, Artificial Sequence
  Description of Artificial Sequence: Synthetic oligonucleotide
ggccugcuccacuucagca

SEQ ID NO: 2890975 - RNA, 19 nt, Artificial Sequence
  Description of Artificial Sequence: Synthetic oligonucleotide
ucuccgcuugcaggagcug

SEQ ID NO: 2890976 - RNA, 19 nt, Artificial Sequence
  Description of Artificial Sequence: Synthetic oligonucleotide
gagagcccauggccgccug

SEQ ID NO: 2890977 - RNA, 19 nt, Artificial Sequence
  Description of Artificial Sequence: Synthetic oligonucleotide
acgcucccugcgguacugc

SEQ ID NO: 2890978 - RNA, 19 nt, Artificial Sequence
  Description of Artificial Sequence: Synthetic oligonucleotide
accuccauuugagccuccu

SEQ ID NO: 2890979 - RNA, 19 nt, Artificial Sequence
  Description of Artificial Sequence: Synthetic oligonucleotide
gccucuaggacaugucucu

SEQ ID NO: 2890980 - RNA, 19 nt, Artificial Sequence
  Description of Artificial Sequence: Synthetic oligonucleotide
uccagacggcugccagccu

SEQ ID NO: 2890981 - RNA, 19 nt, Artificial Sequence
  Description of Artificial Sequence: Synthetic oligonucleotide
cagacagguuccccugaga

SEQ ID NO: 2890982 - RNA, 19 nt, Artificial Sequence
  Description of Artificial Sequence: Synthetic oligonucleotide
gugguccuagacggugacc

SEQ ID NO: 2890983 - RNA, 19 nt, Artificial Sequence
  Description of Artificial Sequence: Synthetic oligonucleotide
cuucuccgcggcccgcuuc

SEQ ID NO: 2890984 - RNA, 19 nt, Artificial Sequence
  Description of Artificial Sequence: Synthetic oligonucleotide
agcccauggccgccugcug

SEQ ID NO: 2890985 - RNA, 19 nt, Artificial Sequence
  Description of Artificial Sequence: Synthetic oligonucleotide
gacgucugguggccugcuc

SEQ ID NO: 2890986 - RNA, 19 nt, Artificial Sequence
  Description of Artificial Sequence: Synthetic oligonucleotide
cagccucuaggacaugucu

SEQ ID NO: 2890987 - RNA, 19 nt, Artificial Sequence
  Description of Artificial Sequence: Synthetic oligonucleotide
gcugagccaggacacgcuc

SEQ ID NO: 2890988 - RNA, 19 nt, Artificial Sequence
  Description of Artificial Sequence: Synthetic oligonucleotide
cauuugagccuccuccuuu

SEQ ID NO: 2890989 - RNA, 19 nt, Artificial Sequence
  Description of Artificial Sequence: Synthetic oligonucleotide
gaaggcgaccaagguucca

SEQ ID NO: 2890990 - RNA, 19 nt, Artificial Sequence
  Description of Artificial Sequence: Synthetic oligonucleotide
acccugggacugacuggcc

SEQ ID NO: 2890991 - RNA, 19 nt, Artificial Sequence
  Description of Artificial Sequence: Synthetic oligonucleotide
gccaagaagcugagccagg

SEQ ID NO: 2890992 - RNA, 19 nt, Artificial Sequence
  Description of Artificial Sequence: Synthetic oligonucleotide
gacacgcucccgguuucuc

SEQ ID NO: 2890993 - RNA, 19 nt, Artificial Sequence
  Description of Artificial Sequence: Synthetic oligonucleotide
ccgauaguuggggugggac

SEQ ID NO: 2890994 - RNA, 19 nt, Artificial Sequence
  Description of Artificial Sequence: Synthetic oligonucleotide
gguuucucugcugggagcu

SEQ ID NO: 2890995 - RNA, 19 nt, Artificial Sequence
  Description of Artificial Sequence: Synthetic oligonucleotide
ugacgucugguggccugcu

SEQ ID NO: 2890996 - RNA, 19 nt, Artificial Sequence
  Description of Artificial Sequence: Synthetic oligonucleotide
gucagccucuaggacaugu

SEQ ID NO: 2890997 - RNA, 19 nt, Artificial Sequence
  Description of Artificial Sequence: Synthetic oligonucleotide
ugggacugacuggccauuu

SEQ ID NO: 2890998 - RNA, 19 nt, Artificial Sequence
  Description of Artificial Sequence: Synthetic oligonucleotide
gggccugacgucacagacc

SEQ ID NO: 2890999 - RNA, 19 nt, Artificial Sequence
  Description of Artificial Sequence: Synthetic oligonucleotide
gcugcuggauacccuggga

SEQ ID NO: 2891000 - RNA, 19 nt, Artificial Sequence
  Description of Artificial Sequence: Synthetic oligonucleotide
ccuuccucuuccuggcauc

SEQ ID NO: 2891001 - RNA, 19 nt, Artificial Sequence
  Description of Artificial Sequence: Synthetic oligonucleotide
cugcuccaccuccauuuga

SEQ ID NO: 2891002 - RNA, 19 nt, Artificial Sequence
  Description of Artificial Sequence: Synthetic oligonucleotide
ccagacggcugccagccuc

SEQ ID NO: 2891003 - RNA, 19 nt, Artificial Sequence
  Description of Artificial Sequence: Synthetic oligonucleotide
gcaugcccuggaccugacg

SEQ ID NO: 2891004 - RNA, 19 nt, Artificial Sequence
  Description of Artificial Sequence: Synthetic oligonucleotide
accuggggccugacgucac

SEQ ID NO: 2891005 - RNA, 19 nt, Artificial Sequence
  Description of Artificial Sequence: Synthetic oligonucleotide
ccugacgucugguggccug

SEQ ID NO: 2891006 - RNA, 19 nt, Artificial Sequence
  Description of Artificial Sequence: Synthetic oligonucleotide
agacggcugccagccuccg

SEQ ID NO: 2891007 - RNA, 19 nt, Artificial Sequence
  Description of Artificial Sequence: Synthetic oligonucleotide
gugacccgauaguuggggu

SEQ ID NO: 2891008 - RNA, 19 nt, Artificial Sequence
  Description of Artificial Sequence: Synthetic oligonucleotide
cuggauacccugggacuga

SEQ ID NO: 2891009 - RNA, 19 nt, Artificial Sequence
  Description of Artificial Sequence: Synthetic oligonucleotide
uccgggccuuccucuuccu

SEQ ID NO: 2891010 - RNA, 19 nt, Artificial Sequence
  Description of Artificial Sequence: Synthetic oligonucleotide
ccuccuuugccugcuucag

SEQ ID NO: 2891011 - RNA, 19 nt, Artificial Sequence
  Description of Artificial Sequence: Synthetic oligonucleotide
cugcaugcccuggaccuga

SEQ ID NO: 2891012 - RNA, 19 nt, Artificial Sequence
  Description of Artificial Sequence: Synthetic oligonucleotide
ggaccuggggccugacguc

SEQ ID NO: 2891013 - RNA, 19 nt, Artificial Sequence
  Description of Artificial Sequence: Synthetic oligonucleotide
cacgcucccugcgguacug

SEQ ID NO: 2891014 - RNA, 19 nt, Artificial Sequence
  Description of Artificial Sequence: Synthetic oligonucleotide
guuucucugcugggagcuc

SEQ ID NO: 2891015 - RNA, 19 nt, Artificial Sequence
  Description of Artificial Sequence: Synthetic oligonucleotide
agguuccagacggcugcca

SEQ ID NO: 2891016 - RNA, 19 nt, Artificial Sequence
  Description of Artificial Sequence: Synthetic oligonucleotide
cugccagccuccggcgccc

SEQ ID NO: 2891017 - RNA, 19 nt, Artificial Sequence
  Description of Artificial Sequence: Synthetic oligonucleotide
caccuccauuugagccucc

SEQ ID NO: 2891018 - RNA, 19 nt, Artificial Sequence
  Description of Artificial Sequence: Synthetic oligonucleotide
cgguuucucugcugggagc

SEQ ID NO: 2891019 - RNA, 19 nt, Artificial Sequence
  Description of Artificial Sequence: Synthetic oligonucleotide
cccuggaccugacgucugg

SEQ ID NO: 2891020 - RNA, 19 nt, Artificial Sequence
  Description of Artificial Sequence: Synthetic oligonucleotide
accuucuccgcggcccgcu

SEQ ID NO: 2891021 - RNA, 19 nt, Artificial Sequence
  Description of Artificial Sequence: Synthetic oligonucleotide
gcuugcugugaaacuccug

SEQ ID NO: 2891022 - RNA, 19 nt, Artificial Sequence
  Description of Artificial Sequence: Synthetic oligonucleotide
gcuucuccgcuugcaggag

SEQ ID NO: 2891023 - RNA, 19 nt, Artificial Sequence
  Description of Artificial Sequence: Synthetic oligonucleotide
ccaagaagcugagccagga

SEQ ID NO: 2891024 - RNA, 19 nt, Artificial Sequence
  Description of Artificial Sequence: Synthetic oligonucleotide
cugcgguacugcuccaccu

SEQ ID NO: 2891025 - RNA, 19 nt, Artificial Sequence
  Description of Artificial Sequence: Synthetic oligonucleotide
gagcccauggccgccugcu

SEQ ID NO: 2891026 - RNA, 19 nt, Artificial Sequence
  Description of Artificial Sequence: Synthetic oligonucleotide
cuucagucuccgggccuuc

SEQ ID NO: 2891027 - RNA, 19 nt, Artificial Sequence
  Description of Artificial Sequence: Synthetic oligonucleotide
gcucccgguuucucugcug

SEQ ID NO: 2891028 - RNA, 19 nt, Artificial Sequence
  Description of Artificial Sequence: Synthetic oligonucleotide
cacuagacaggaugcuguu

SEQ ID NO: 2891029 - RNA, 19 nt, Artificial Sequence
  Description of Artificial Sequence: Synthetic oligonucleotide
ccuccauuugagccuccuc

SEQ ID NO: 2891030 - RNA, 19 nt, Artificial Sequence
  Description of Artificial Sequence: Synthetic oligonucleotide
cgaaggcgaccaagguucc

SEQ ID NO: 2891031 - RNA, 19 nt, Artificial Sequence
  Description of Artificial Sequence: Synthetic oligonucleotide
cuugcaggagcugcuggau

SEQ ID NO: 2891032 - RNA, 19 nt, Artificial Sequence
  Description of Artificial Sequence: Synthetic oligonucleotide
accugacgucugguggccu

SEQ ID NO: 2891033 - RNA, 19 nt, Artificial Sequence
  Description of Artificial Sequence: Synthetic oligonucleotide
gucugguggccugcuccac

SEQ ID NO: 2891034 - RNA, 19 nt, Artificial Sequence
  Description of Artificial Sequence: Synthetic oligonucleotide
cgcuucuccgcuugcagga

SEQ ID NO: 2891035 - RNA, 19 nt, Artificial Sequence
  Description of Artificial Sequence: Synthetic oligonucleotide
caggacacgcucccgguuu

SEQ ID NO: 2891036 - RNA, 19 nt, Artificial Sequence
  Description of Artificial Sequence: Synthetic oligonucleotide
cuguuucgaaggcgaccaa

SEQ ID NO: 2891037 - RNA, 19 nt, Artificial Sequence
  Description of Artificial Sequence: Synthetic oligonucleotide
ccaccuccauuugagccuc

SEQ ID NO: 2891038 - RNA, 19 nt, Artificial Sequence
  Description of Artificial Sequence: Synthetic oligonucleotide
gguacugcuccaccuccau

SEQ ID NO: 2891039 - RNA, 19 nt, Artificial Sequence
  Description of Artificial Sequence: Synthetic oligonucleotide
agucagccucuaggacaug

SEQ ID NO: 2891040 - RNA, 19 nt, Artificial Sequence
  Description of Artificial Sequence: Synthetic oligonucleotide
guacugcuccaccuccauu

SEQ ID NO: 2891041 - RNA, 19 nt, Artificial Sequence
  Description of Artificial Sequence: Synthetic oligonucleotide
cggugacccgauaguuggg

SEQ ID NO: 2891042 - RNA, 19 nt, Artificial Sequence
  Description of Artificial Sequence: Synthetic oligonucleotide
ccaugccaagaagcugagc

SEQ ID NO: 2891043 - RNA, 19 nt, Artificial Sequence
  Description of Artificial Sequence: Synthetic oligonucleotide
ccgccugcugcuugcugug

SEQ ID NO: 2891044 - RNA, 19 nt, Artificial Sequence
  Description of Artificial Sequence: Synthetic oligonucleotide
cccugggacugacuggcca

SEQ ID NO: 2891045 - RNA, 19 nt, Artificial Sequence
  Description of Artificial Sequence: Synthetic oligonucleotide
uggccgccugcugcuugcu

SEQ ID NO: 2891046 - RNA, 19 nt, Artificial Sequence
  Description of Artificial Sequence: Synthetic oligonucleotide
gcucccugcgguacugcuc

SEQ ID NO: 2891047 - RNA, 19 nt, Artificial Sequence
  Description of Artificial Sequence: Synthetic oligonucleotide
ggccaccuucuccgcggcc

SEQ ID NO: 2891048 - RNA, 19 nt, Artificial Sequence
  Description of Artificial Sequence: Synthetic oligonucleotide
cccgguuucucugcuggga

SEQ ID NO: 2891049 - RNA, 19 nt, Artificial Sequence
  Description of Artificial Sequence: Synthetic oligonucleotide
ggcagaggagucagccucu

SEQ ID NO: 2891050 - RNA, 19 nt, Artificial Sequence
  Description of Artificial Sequence: Synthetic oligonucleotide
ucuccgcggcccgcuucuc

SEQ ID NO: 2891051 - RNA, 19 nt, Artificial Sequence
  Description of Artificial Sequence: Synthetic oligonucleotide
ggugggaccuggggccuga

SEQ ID NO: 2891052 - RNA, 19 nt, Artificial Sequence
  Description of Artificial Sequence: Synthetic oligonucleotide
cgucugguggccugcucca

SEQ ID NO: 2891053 - RNA, 19 nt, Artificial Sequence
  Description of Artificial Sequence: Synthetic oligonucleotide
ugccagccuccggcgccca

SEQ ID NO: 2891054 - RNA, 19 nt, Artificial Sequence
  Description of Artificial Sequence: Synthetic oligonucleotide
ccgggccuuccucuuccug

SEQ ID NO: 2891055 - RNA, 19 nt, Artificial Sequence
  Description of Artificial Sequence: Synthetic oligonucleotide
gucuccgggccuuccucuu

SEQ ID NO: 2891056 - RNA, 19 nt, Artificial Sequence
  Description of Artificial Sequence: Synthetic oligonucleotide
gcucacgcucccugcggua

SEQ ID NO: 2891057 - RNA, 19 nt, Artificial Sequence
  Description of Artificial Sequence: Synthetic oligonucleotide
ccugggacugacuggccau

SEQ ID NO: 2891058 - RNA, 19 nt, Artificial Sequence
  Description of Artificial Sequence: Synthetic oligonucleotide
gggacugacuggccauuuu

SEQ ID NO: 2891059 - RNA, 19 nt, Artificial Sequence
  Description of Artificial Sequence: Synthetic oligonucleotide
cccugcgguacugcuccac

SEQ ID NO: 2891060 - RNA, 19 nt, Artificial Sequence
  Description of Artificial Sequence: Synthetic oligonucleotide
gcccuggaccugacgucug

SEQ ID NO: 2891061 - RNA, 19 nt, Artificial Sequence
  Description of Artificial Sequence: Synthetic oligonucleotide
ccgcggcccgcuucuccgc

SEQ ID NO: 2891062 - RNA, 19 nt, Artificial Sequence
  Description of Artificial Sequence: Synthetic oligonucleotide
cgguacugcuccaccucca

SEQ ID NO: 2891063 - RNA, 19 nt, Artificial Sequence
  Description of Artificial Sequence: Synthetic oligonucleotide
gcagaggagucagccucua

SEQ ID NO: 2891064 - RNA, 19 nt, Artificial Sequence
  Description of Artificial Sequence: Synthetic oligonucleotide
gggugggaccuggggccug

SEQ ID NO: 2891065 - RNA, 19 nt, Artificial Sequence
  Description of Artificial Sequence: Synthetic oligonucleotide
cccauggccgccugcugcu

SEQ ID NO: 2891066 - RNA, 19 nt, Artificial Sequence
  Description of Artificial Sequence: Synthetic oligonucleotide
cugggacugacuggccauu

SEQ ID NO: 2891067 - RNA, 19 nt, Artificial Sequence
  Description of Artificial Sequence: Synthetic oligonucleotide
ccucuaggacaugucucua

SEQ ID NO: 2891068 - RNA, 19 nt, Artificial Sequence
  Description of Artificial Sequence: Synthetic oligonucleotide
ggauacccugggacugacu

SEQ ID NO: 2891069 - RNA, 19 nt, Artificial Sequence
  Description of Artificial Sequence: Synthetic oligonucleotide
ccauuugagccuccuccuu

SEQ ID NO: 2891070 - RNA, 19 nt, Artificial Sequence
  Description of Artificial Sequence: Synthetic oligonucleotide
cggcccgcuucuccgcuug

SEQ ID NO: 2891071 - RNA, 19 nt, Artificial Sequence
  Description of Artificial Sequence: Synthetic oligonucleotide
cggccaccuucuccgcggc

SEQ ID NO: 2891072 - RNA, 19 nt, Artificial Sequence
  Description of Artificial Sequence: Synthetic oligonucleotide
ccuagacggugacccgaua

SEQ ID NO: 2891073 - RNA, 19 nt, Artificial Sequence
  Description of Artificial Sequence: Synthetic oligonucleotide
ggacacgcucccgguuucu

SEQ ID NO: 2891074 - RNA, 19 nt, Artificial Sequence
  Description of Artificial Sequence: Synthetic oligonucleotide
cccgauaguugggguggga

SEQ ID NO: 2891075 - RNA, 19 nt, Artificial Sequence
  Description of Artificial Sequence: Synthetic oligonucleotide
gccagccuccggcgcccac

SEQ ID NO: 2891076 - RNA, 19 nt, Artificial Sequence
  Description of Artificial Sequence: Synthetic oligonucleotide
ccuggaccugacgucuggu

SEQ ID NO: 2891077 - RNA, 19 nt, Artificial Sequence
  Description of Artificial Sequence: Synthetic oligonucleotide
ccaggacacgcucccgguu

SEQ ID NO: 2891078 - RNA, 19 nt, Artificial Sequence
  Description of Artificial Sequence: Synthetic oligonucleotide
ccagccuccggcgcccacu

SEQ ID NO: 2891079 - RNA, 19 nt, Artificial Sequence
  Description of Artificial Sequence: Synthetic oligonucleotide
cgcucccugcgguacugcu

SEQ ID NO: 2891080 - RNA, 19 nt, Artificial Sequence
  Description of Artificial Sequence: Synthetic oligonucleotide
ccacuucagcagacagguu

SEQ ID NO: 2891081 - RNA, 19 nt, Artificial Sequence
  Description of Artificial Sequence: Synthetic oligonucleotide
cgcucccgguuucucugcu

SEQ ID NO: 2891082 - RNA, 19 nt, Artificial Sequence
  Description of Artificial Sequence: Synthetic oligonucleotide
cgccugcugcuugcuguga

SEQ ID NO: 2891083 - RNA, 19 nt, Artificial Sequence
  Description of Artificial Sequence: Synthetic oligonucleotide
gcggcccgcuucuccgcuu

SEQ ID NO: 2891084 - RNA, 19 nt, Artificial Sequence
  Description of Artificial Sequence: Synthetic oligonucleotide
ccuucuccgcggcccgcuu

SEQ ID NO: 2891085 - RNA, 19 nt, Artificial Sequence
  Description of Artificial Sequence: Synthetic oligonucleotide
cgcggcccgcuucuccgcu

SEQ ID NO: 2891086 - RNA, 19 nt, Artificial Sequence
  Description of Artificial Sequence: Synthetic oligonucleotide
gccugacgucacagaccau

SEQ ID NO: 2891087 - RNA, 19 nt, Artificial Sequence
  Description of Artificial Sequence: Synthetic oligonucleotide
ccauggccgccugcugcuu

SEQ ID NO: 2891088 - RNA, 19 nt, Artificial Sequence
  Description of Artificial Sequence: Synthetic oligonucleotide
uauccaacaaaauaaaagg

SEQ ID NO: 2891089 - RNA, 19 nt, Artificial Sequence
  Description of Artificial Sequence: Synthetic oligonucleotide
aaaaggaaguaacauauag

SEQ ID NO: 2891090 - RNA, 19 nt, Artificial Sequence
  Description of Artificial Sequence: Synthetic oligonucleotide
gauguaauuucauauaccc

SEQ ID NO: 2891091 - RNA, 19 nt, Artificial Sequence
  Description of Artificial Sequence: Synthetic oligonucleotide
uacuucaagaauuucaccg

SEQ ID NO: 2891092 - RNA, 19 nt, Artificial Sequence
  Description of Artificial Sequence: Synthetic oligonucleotide
aauuuaaagggcucccggc

SEQ ID NO: 2891093 - RNA, 19 nt, Artificial Sequence
  Description of Artificial Sequence: Synthetic oligonucleotide
aaggaaguaacauauagaa

SEQ ID NO: 2891094 - RNA, 19 nt, Artificial Sequence
  Description of Artificial Sequence: Synthetic oligonucleotide
aauacuucaagaauuucac

SEQ ID NO: 2891095 - RNA, 19 nt, Artificial Sequence
  Description of Artificial Sequence: Synthetic oligonucleotide
aaaauauccaacaaaauaa

SEQ ID NO: 2891096 - RNA, 19 nt, Artificial Sequence
  Description of Artificial Sequence: Synthetic oligonucleotide
caaaauaaaaggaaguaac

SEQ ID NO: 2891097 - RNA, 19 nt, Artificial Sequence
  Description of Artificial Sequence: Synthetic oligonucleotide
auauagaaguugucgaugc

SEQ ID NO: 2891098 - RNA, 19 nt, Artificial Sequence
  Description of Artificial Sequence: Synthetic oligonucleotide
uguaauuucauauacccaa

SEQ ID NO: 2891099 - RNA, 19 nt, Artificial Sequence
  Description of Artificial Sequence: Synthetic oligonucleotide
aaaaccaccacgacgaccg

SEQ ID NO: 2891100 - RNA, 19 nt, Artificial Sequence
  Description of Artificial Sequence: Synthetic oligonucleotide
aauaaaaggaaguaacaua

SEQ ID NO: 2891101 - RNA, 19 nt, Artificial Sequence
  Description of Artificial Sequence: Synthetic oligonucleotide
uaacauauagaaguugucg

SEQ ID NO: 2891102 - RNA, 19 nt, Artificial Sequence
  Description of Artificial Sequence: Synthetic oligonucleotide
uuucaggaaaaucuucugg

SEQ ID NO: 2891103 - RNA, 19 nt, Artificial Sequence
  Description of Artificial Sequence: Synthetic oligonucleotide
uuucauauacccaaacaug

SEQ ID NO: 2891104 - RNA, 19 nt, Artificial Sequence
  Description of Artificial Sequence: Synthetic oligonucleotide
aacauauagaaguugucga

SEQ ID NO: 2891105 - RNA, 19 nt, Artificial Sequence
  Description of Artificial Sequence: Synthetic oligonucleotide
aauuucauauacccaaaca

SEQ ID NO: 2891106 - RNA, 19 nt, Artificial Sequence
  Description of Artificial Sequence: Synthetic oligonucleotide
uucauauacccaaacaugu

SEQ ID NO: 2891107 - RNA, 19 nt, Artificial Sequence
  Description of Artificial Sequence: Synthetic oligonucleotide
auuuaaagggcucccggcc

SEQ ID NO: 2891108 - RNA, 19 nt, Artificial Sequence
  Description of Artificial Sequence: Synthetic oligonucleotide
acuucaacguacuggaugg

SEQ ID NO: 2891109 - RNA, 19 nt, Artificial Sequence
  Description of Artificial Sequence: Synthetic oligonucleotide
aagacuucaacguacugga

SEQ ID NO: 2891110 - RNA, 19 nt, Artificial Sequence
  Description of Artificial Sequence: Synthetic oligonucleotide
uccggcaggaauuuaaagg

SEQ ID NO: 2891111 - RNA, 19 nt, Artificial Sequence
  Description of Artificial Sequence: Synthetic oligonucleotide
auuucauauacccaaacau

SEQ ID NO: 2891112 - RNA, 19 nt, Artificial Sequence
  Description of Artificial Sequence: Synthetic oligonucleotide
uccaacaaaauaaaaggaa

SEQ ID NO: 2891113 - RNA, 19 nt, Artificial Sequence
  Description of Artificial Sequence: Synthetic oligonucleotide
aagaauuucaccguaaguu

SEQ ID NO: 2891114 - RNA, 19 nt, Artificial Sequence
  Description of Artificial Sequence: Synthetic oligonucleotide
aucauauugaugccgguuc

SEQ ID NO: 2891115 - RNA, 19 nt, Artificial Sequence
  Description of Artificial Sequence: Synthetic oligonucleotide
gaagacuucaacguacugg

SEQ ID NO: 2891116 - RNA, 19 nt, Artificial Sequence
  Description of Artificial Sequence: Synthetic oligonucleotide
uuugaagacuucaacguac

SEQ ID NO: 2891117 - RNA, 19 nt, Artificial Sequence
  Description of Artificial Sequence: Synthetic oligonucleotide
aaauaaaaggaaguaacau

SEQ ID NO: 2891118 - RNA, 19 nt, Artificial Sequence
  Description of Artificial Sequence: Synthetic oligonucleotide
gaauuuaaagggcucccgg

SEQ ID NO: 2891119 - RNA, 19 nt, Artificial Sequence
  Description of Artificial Sequence: Synthetic oligonucleotide
aaguugucgaugcaaaccu

SEQ ID NO: 2891120 - RNA, 19 nt, Artificial Sequence
  Description of Artificial Sequence: Synthetic oligonucleotide
aaaauaaaaggaaguaaca

SEQ ID NO: 2891121 - RNA, 19 nt, Artificial Sequence
  Description of Artificial Sequence: Synthetic oligonucleotide
uggauguaauuucauauac

SEQ ID NO: 2891122 - RNA, 19 nt, Artificial Sequence
  Description of Artificial Sequence: Synthetic oligonucleotide
aggaaaaucuucuggaugu

SEQ ID NO: 2891123 - RNA, 19 nt, Artificial Sequence
  Description of Artificial Sequence: Synthetic oligonucleotide
ucaagaauuucaccguaag

SEQ ID NO: 2891124 - RNA, 19 nt, Artificial Sequence
  Description of Artificial Sequence: Synthetic oligonucleotide
auaccaauacuccugacgu

SEQ ID NO: 2891125 - RNA, 19 nt, Artificial Sequence
  Description of Artificial Sequence: Synthetic oligonucleotide
cauaccaauacuccugacg

SEQ ID NO: 2891126 - RNA, 19 nt, Artificial Sequence
  Description of Artificial Sequence: Synthetic oligonucleotide
uucaggaaaaucuucugga

SEQ ID NO: 2891127 - RNA, 19 nt, Artificial Sequence
  Description of Artificial Sequence: Synthetic oligonucleotide
auaaaaggaaguaacauau

SEQ ID NO: 2891128 - RNA, 19 nt, Artificial Sequence
  Description of Artificial Sequence: Synthetic oligonucleotide
uauucagcaggccagcgca

SEQ ID NO: 2891129 - RNA, 19 nt, Artificial Sequence
  Description of Artificial Sequence: Synthetic oligonucleotide
cucaagaccccaauuauac

SEQ ID NO: 2891130 - RNA, 19 nt, Artificial Sequence
  Description of Artificial Sequence: Synthetic oligonucleotide
ggaaguaacauauagaagu

SEQ ID NO: 2891131 - RNA, 19 nt, Artificial Sequence
  Description of Artificial Sequence: Synthetic oligonucleotide
aacaaaauaaaaggaagua

SEQ ID NO: 2891132 - RNA, 19 nt, Artificial Sequence
  Description of Artificial Sequence: Synthetic oligonucleotide
accgacaccguucuccucc

SEQ ID NO: 2891133 - RNA, 19 nt, Artificial Sequence
  Description of Artificial Sequence: Synthetic oligonucleotide
uacuggauggaauacuuca

SEQ ID NO: 2891134 - RNA, 19 nt, Artificial Sequence
  Description of Artificial Sequence: Synthetic oligonucleotide
cucaucauauugaugccgg

SEQ ID NO: 2891135 - RNA, 19 nt, Artificial Sequence
  Description of Artificial Sequence: Synthetic oligonucleotide
aggucugaccucaagaccc

SEQ ID NO: 2891136 - RNA, 19 nt, Artificial Sequence
  Description of Artificial Sequence: Synthetic oligonucleotide
gaauacuucaagaauuuca

SEQ ID NO: 2891137 - RNA, 19 nt, Artificial Sequence
  Description of Artificial Sequence: Synthetic oligonucleotide
gacuucaacguacuggaug

SEQ ID NO: 2891138 - RNA, 19 nt, Artificial Sequence
  Description of Artificial Sequence: Synthetic oligonucleotide
agcgcaguagcccaggaag

SEQ ID NO: 2891139 - RNA, 19 nt, Artificial Sequence
  Description of Artificial Sequence: Synthetic oligonucleotide
uucaccguaaguuuucuuc

SEQ ID NO: 2891140 - RNA, 19 nt, Artificial Sequence
  Description of Artificial Sequence: Synthetic oligonucleotide
uucaacgcguuauucagca

SEQ ID NO: 2891141 - RNA, 19 nt, Artificial Sequence
  Description of Artificial Sequence: Synthetic oligonucleotide
gaaguugucgaugcaaacc

SEQ ID NO: 2891142 - RNA, 19 nt, Artificial Sequence
  Description of Artificial Sequence: Synthetic oligonucleotide
uuuaaagggcucccggccc

SEQ ID NO: 2891143 - RNA, 19 nt, Artificial Sequence
  Description of Artificial Sequence: Synthetic oligonucleotide
aaaccugcuuucaacacag

SEQ ID NO: 2891144 - RNA, 19 nt, Artificial Sequence
  Description of Artificial Sequence: Synthetic oligonucleotide
aauuucaccguaaguuuuc

SEQ ID NO: 2891145 - RNA, 19 nt, Artificial Sequence
  Description of Artificial Sequence: Synthetic oligonucleotide
uuuucaggaaaaucuucug

SEQ ID NO: 2891146 - RNA, 19 nt, Artificial Sequence
  Description of Artificial Sequence: Synthetic oligonucleotide
aguaacauauagaaguugu

SEQ ID NO: 2891147 - RNA, 19 nt, Artificial Sequence
  Description of Artificial Sequence: Synthetic oligonucleotide
aacgcguuauucagcaggc

SEQ ID NO: 2891148 - RNA, 19 nt, Artificial Sequence
  Description of Artificial Sequence: Synthetic oligonucleotide
auacccaaacaugucaugg

SEQ ID NO: 2891149 - RNA, 19 nt, Artificial Sequence
  Description of Artificial Sequence: Synthetic oligonucleotide
agaaguugucgaugcaaac

SEQ ID NO: 2891150 - RNA, 19 nt, Artificial Sequence
  Description of Artificial Sequence: Synthetic oligonucleotide
caacgcguuauucagcagg

SEQ ID NO: 2891151 - RNA, 19 nt, Artificial Sequence
  Description of Artificial Sequence: Synthetic oligonucleotide
uccacgugaggucugaccu

SEQ ID NO: 2891152 - RNA, 19 nt, Artificial Sequence
  Description of Artificial Sequence: Synthetic oligonucleotide
auugaugccgguuccacgu

SEQ ID NO: 2891153 - RNA, 19 nt, Artificial Sequence
  Description of Artificial Sequence: Synthetic oligonucleotide
cacagcauaccaauacucc

SEQ ID NO: 2891154 - RNA, 19 nt, Artificial Sequence
  Description of Artificial Sequence: Synthetic oligonucleotide
aaaucuucuggauguaauu

SEQ ID NO: 2891155 - RNA, 19 nt, Artificial Sequence
  Description of Artificial Sequence: Synthetic oligonucleotide
ccaacaaaauaaaaggaag

SEQ ID NO: 2891156 - RNA, 19 nt, Artificial Sequence
  Description of Artificial Sequence: Synthetic oligonucleotide
augcaaaccugcuuucaac

SEQ ID NO: 2891157 - RNA, 19 nt, Artificial Sequence
  Description of Artificial Sequence: Synthetic oligonucleotide
ucauauugaugccgguucc

SEQ ID NO: 2891158 - RNA, 19 nt, Artificial Sequence
  Description of Artificial Sequence: Synthetic oligonucleotide
ugaggucugaccucaagac

SEQ ID NO: 2891159 - RNA, 19 nt, Artificial Sequence
  Description of Artificial Sequence: Synthetic oligonucleotide
aaauauccaacaaaauaaa

SEQ ID NO: 2891160 - RNA, 19 nt, Artificial Sequence
  Description of Artificial Sequence: Synthetic oligonucleotide
ucaagaccccaauuauacg

SEQ ID NO: 2891161 - RNA, 19 nt, Artificial Sequence
  Description of Artificial Sequence: Synthetic oligonucleotide
uuaaagggcucccggcccg

SEQ ID NO: 2891162 - RNA, 19 nt, Artificial Sequence
  Description of Artificial Sequence: Synthetic oligonucleotide
uggauggaauacuucaaga

SEQ ID NO: 2891163 - RNA, 19 nt, Artificial Sequence
  Description of Artificial Sequence: Synthetic oligonucleotide
aacguacuggauggaauac

SEQ ID NO: 2891164 - RNA, 19 nt, Artificial Sequence
  Description of Artificial Sequence: Synthetic oligonucleotide
aaguaacauauagaaguug

SEQ ID NO: 2891165 - RNA, 19 nt, Artificial Sequence
  Description of Artificial Sequence: Synthetic oligonucleotide
uauugaugccgguuccacg

SEQ ID NO: 2891166 - RNA, 19 nt, Artificial Sequence
  Description of Artificial Sequence: Synthetic oligonucleotide
acaaaauaaaaggaaguaa

SEQ ID NO: 2891167 - RNA, 19 nt, Artificial Sequence
  Description of Artificial Sequence: Synthetic oligonucleotide
acuucaagaauuucaccgu

SEQ ID NO: 2891168 - RNA, 19 nt, Artificial Sequence
  Description of Artificial Sequence: Synthetic oligonucleotide
agccuuugaagacuucaac

SEQ ID NO: 2891169 - RNA, 19 nt, Artificial Sequence
  Description of Artificial Sequence: Synthetic oligonucleotide
uucaacacaggccuccccu

SEQ ID NO: 2891170 - RNA, 19 nt, Artificial Sequence
  Description of Artificial Sequence: Synthetic oligonucleotide
aggaauuuaaagggcuccc

SEQ ID NO: 2891171 - RNA, 19 nt, Artificial Sequence
  Description of Artificial Sequence: Synthetic oligonucleotide
uuauucagcaggccagcgc

SEQ ID NO: 2891172 - RNA, 19 nt, Artificial Sequence
  Description of Artificial Sequence: Synthetic oligonucleotide
acccaaacaugucaugguc

SEQ ID NO: 2891173 - RNA, 19 nt, Artificial Sequence
  Description of Artificial Sequence: Synthetic oligonucleotide
agaauuucaccguaaguuu

SEQ ID NO: 2891174 - RNA, 19 nt, Artificial Sequence
  Description of Artificial Sequence: Synthetic oligonucleotide
augucauggucccucacag

SEQ ID NO: 2891175 - RNA, 19 nt, Artificial Sequence
  Description of Artificial Sequence: Synthetic oligonucleotide
gccuuugaagacuucaacg

SEQ ID NO: 2891176 - RNA, 19 nt, Artificial Sequence
  Description of Artificial Sequence: Synthetic oligonucleotide
acaggccuccccuucaacg

SEQ ID NO: 2891177 - RNA, 19 nt, Artificial Sequence
  Description of Artificial Sequence: Synthetic oligonucleotide
ucacagcauaccaauacuc

SEQ ID NO: 2891178 - RNA, 19 nt, Artificial Sequence
  Description of Artificial Sequence: Synthetic oligonucleotide
ccgcucaucauauugaugc

SEQ ID NO: 2891179 - RNA, 19 nt, Artificial Sequence
  Description of Artificial Sequence: Synthetic oligonucleotide
aauauccaacaaaauaaaa

SEQ ID NO: 2891180 - RNA, 19 nt, Artificial Sequence
  Description of Artificial Sequence: Synthetic oligonucleotide
cauauacccaaacauguca

SEQ ID NO: 2891181 - RNA, 19 nt, Artificial Sequence
  Description of Artificial Sequence: Synthetic oligonucleotide
uagaaguugucgaugcaaa

SEQ ID NO: 2891182 - RNA, 19 nt, Artificial Sequence
  Description of Artificial Sequence: Synthetic oligonucleotide
acagcauaccaauacuccu

SEQ ID NO: 2891183 - RNA, 19 nt, Artificial Sequence
  Description of Artificial Sequence: Synthetic oligonucleotide
ucauauacccaaacauguc

SEQ ID NO: 2891184 - RNA, 19 nt, Artificial Sequence
  Description of Artificial Sequence: Synthetic oligonucleotide
acauauagaaguugucgau

SEQ ID NO: 2891185 - RNA, 19 nt, Artificial Sequence
  Description of Artificial Sequence: Synthetic oligonucleotide
acaccguucuccuccgagc

SEQ ID NO: 2891186 - RNA, 19 nt, Artificial Sequence
  Description of Artificial Sequence: Synthetic oligonucleotide
uggaauacuucaagaauuu

SEQ ID NO: 2891187 - RNA, 19 nt, Artificial Sequence
  Description of Artificial Sequence: Synthetic oligonucleotide
aaaaucuucuggauguaau

SEQ ID NO: 2891188 - RNA, 19 nt, Artificial Sequence
  Description of Artificial Sequence: Synthetic oligonucleotide
aaucuucuggauguaauuu

SEQ ID NO: 2891189 - RNA, 19 nt, Artificial Sequence
  Description of Artificial Sequence: Synthetic oligonucleotide
uauacccaaacaugucaug

SEQ ID NO: 2891190 - RNA, 19 nt, Artificial Sequence
  Description of Artificial Sequence: Synthetic oligonucleotide
cauauagaaguugucgaug

SEQ ID NO: 2891191 - RNA, 19 nt, Artificial Sequence
  Description of Artificial Sequence: Synthetic oligonucleotide
uauagaaguugucgaugca

SEQ ID NO: 2891192 - RNA, 19 nt, Artificial Sequence
  Description of Artificial Sequence: Synthetic oligonucleotide
cuggauggaauacuucaag

SEQ ID NO: 2891193 - RNA, 19 nt, Artificial Sequence
  Description of Artificial Sequence: Synthetic oligonucleotide
agaccccaauuauacguac

SEQ ID NO: 2891194 - RNA, 19 nt, Artificial Sequence
  Description of Artificial Sequence: Synthetic oligonucleotide
uucaagaauuucaccguaa

SEQ ID NO: 2891195 - RNA, 19 nt, Artificial Sequence
  Description of Artificial Sequence: Synthetic oligonucleotide
guagacaagccgcgggucg

SEQ ID NO: 2891196 - RNA, 19 nt, Artificial Sequence
  Description of Artificial Sequence: Synthetic oligonucleotide
caggaaaaucuucuggaug

SEQ ID NO: 2891197 - RNA, 19 nt, Artificial Sequence
  Description of Artificial Sequence: Synthetic oligonucleotide
auauugaugccgguuccac

SEQ ID NO: 2891198 - RNA, 19 nt, Artificial Sequence
  Description of Artificial Sequence: Synthetic oligonucleotide
gaggucugaccucaagacc

SEQ ID NO: 2891199 - RNA, 19 nt, Artificial Sequence
  Description of Artificial Sequence: Synthetic oligonucleotide
gauggaauacuucaagaau

SEQ ID NO: 2891200 - RNA, 19 nt, Artificial Sequence
  Description of Artificial Sequence: Synthetic oligonucleotide
ccggcaggaauuuaaaggg

SEQ ID NO: 2891201 - RNA, 19 nt, Artificial Sequence
  Description of Artificial Sequence: Synthetic oligonucleotide
uaaaaggaaguaacauaua

SEQ ID NO: 2891202 - RNA, 19 nt, Artificial Sequence
  Description of Artificial Sequence: Synthetic oligonucleotide
ugaagacuucaacguacug

SEQ ID NO: 2891203 - RNA, 19 nt, Artificial Sequence
  Description of Artificial Sequence: Synthetic oligonucleotide
gaccccgggacucauccgg

SEQ ID NO: 2891204 - RNA, 19 nt, Artificial Sequence
  Description of Artificial Sequence: Synthetic oligonucleotide
auccaacaaaauaaaagga

SEQ ID NO: 2891205 - RNA, 19 nt, Artificial Sequence
  Description of Artificial Sequence: Synthetic oligonucleotide
uacuccugacguuuuaaaa

SEQ ID NO: 2891206 - RNA, 19 nt, Artificial Sequence
  Description of Artificial Sequence: Synthetic oligonucleotide
agcauaccaauacuccuga

SEQ ID NO: 2891207 - RNA, 19 nt, Artificial Sequence
  Description of Artificial Sequence: Synthetic oligonucleotide
accccaauuauacguacga

SEQ ID NO: 2891208 - RNA, 19 nt, Artificial Sequence
  Description of Artificial Sequence: Synthetic oligonucleotide
cagcauaccaauacuccug

SEQ ID NO: 2891209 - RNA, 19 nt, Artificial Sequence
  Description of Artificial Sequence: Synthetic oligonucleotide
auggaauacuucaagaauu

SEQ ID NO: 2891210 - RNA, 19 nt, Artificial Sequence
  Description of Artificial Sequence: Synthetic oligonucleotide
agcccguguagacaagccg

SEQ ID NO: 2891211 - RNA, 19 nt, Artificial Sequence
  Description of Artificial Sequence: Synthetic oligonucleotide
aaccaccacgacgaccgcc

SEQ ID NO: 2891212 - RNA, 19 nt, Artificial Sequence
  Description of Artificial Sequence: Synthetic oligonucleotide
accgccggaaccgacaccg

SEQ ID NO: 2891213 - RNA, 19 nt, Artificial Sequence
  Description of Artificial Sequence: Synthetic oligonucleotide
aauacuccugacguuuuaa

SEQ ID NO: 2891214 - RNA, 19 nt, Artificial Sequence
  Description of Artificial Sequence: Synthetic oligonucleotide
caggaauuuaaagggcucc

SEQ ID NO: 2891215 - RNA, 19 nt, Artificial Sequence
  Description of Artificial Sequence: Synthetic oligonucleotide
aacaugucauggucccuca

SEQ ID NO: 2891216 - RNA, 19 nt, Artificial Sequence
  Description of Artificial Sequence: Synthetic oligonucleotide
aagcccguguagacaagcc

SEQ ID NO: 2891217 - RNA, 19 nt, Artificial Sequence
  Description of Artificial Sequence: Synthetic oligonucleotide
cuucaacgcguuauucagc

SEQ ID NO: 2891218 - RNA, 19 nt, Artificial Sequence
  Description of Artificial Sequence: Synthetic oligonucleotide
guugucgaugcaaaccugc

SEQ ID NO: 2891219 - RNA, 19 nt, Artificial Sequence
  Description of Artificial Sequence: Synthetic oligonucleotide
aggaaguaacauauagaag

SEQ ID NO: 2891220 - RNA, 19 nt, Artificial Sequence
  Description of Artificial Sequence: Synthetic oligonucleotide
caacaaaauaaaaggaagu

SEQ ID NO: 2891221 - RNA, 19 nt, Artificial Sequence
  Description of Artificial Sequence: Synthetic oligonucleotide
gacaccguucuccuccgag

SEQ ID NO: 2891222 - RNA, 19 nt, Artificial Sequence
  Description of Artificial Sequence: Synthetic oligonucleotide
auagaaguugucgaugcaa

SEQ ID NO: 2891223 - RNA, 19 nt, Artificial Sequence
  Description of Artificial Sequence: Synthetic oligonucleotide
uucuggauguaauuucaua

SEQ ID NO: 2891224 - RNA, 19 nt, Artificial Sequence
  Description of Artificial Sequence: Synthetic oligonucleotide
caguagcccaggaagcccg

SEQ ID NO: 2891225 - RNA, 19 nt, Artificial Sequence
  Description of Artificial Sequence: Synthetic oligonucleotide
uacccaaacaugucauggu

SEQ ID NO: 2891226 - RNA, 19 nt, Artificial Sequence
  Description of Artificial Sequence: Synthetic oligonucleotide
aacacaggccuccccuuca

SEQ ID NO: 2891227 - RNA, 19 nt, Artificial Sequence
  Description of Artificial Sequence: Synthetic oligonucleotide
aaaccaccacgacgaccgc

SEQ ID NO: 2891228 - RNA, 19 nt, Artificial Sequence
  Description of Artificial Sequence: Synthetic oligonucleotide
uuccacgugaggucugacc

SEQ ID NO: 2891229 - RNA, 19 nt, Artificial Sequence
  Description of Artificial Sequence: Synthetic oligonucleotide
uugucgaugcaaaccugcu

SEQ ID NO: 2891230 - RNA, 19 nt, Artificial Sequence
  Description of Artificial Sequence: Synthetic oligonucleotide
uuucaacacaggccucccc

SEQ ID NO: 2891231 - RNA, 19 nt, Artificial Sequence
  Description of Artificial Sequence: Synthetic oligonucleotide
accguaaguuuucuucucu

SEQ ID NO: 2891232 - RNA, 19 nt, Artificial Sequence
  Description of Artificial Sequence: Synthetic oligonucleotide
aggaagcccguguagacaa

SEQ ID NO: 2891233 - RNA, 19 nt, Artificial Sequence
  Description of Artificial Sequence: Synthetic oligonucleotide
auccggcaggaauuuaaag

SEQ ID NO: 2891234 - RNA, 19 nt, Artificial Sequence
  Description of Artificial Sequence: Synthetic oligonucleotide
gaugcaaaccugcuuucaa

SEQ ID NO: 2891235 - RNA, 19 nt, Artificial Sequence
  Description of Artificial Sequence: Synthetic oligonucleotide
gaccucaagaccccaauua

SEQ ID NO: 2891236 - RNA, 19 nt, Artificial Sequence
  Description of Artificial Sequence: Synthetic oligonucleotide
ccaaacaugucaugguccc

SEQ ID NO: 2891237 - RNA, 19 nt, Artificial Sequence
  Description of Artificial Sequence: Synthetic oligonucleotide
aagggcucccggcccggcc

SEQ ID NO: 2891238 - RNA, 19 nt, Artificial Sequence
  Description of Artificial Sequence: Synthetic oligonucleotide
accucaagaccccaauuau

SEQ ID NO: 2891239 - RNA, 19 nt, Artificial Sequence
  Description of Artificial Sequence: Synthetic oligonucleotide
gaccccaauuauacguacg

SEQ ID NO: 2891240 - RNA, 19 nt, Artificial Sequence
  Description of Artificial Sequence: Synthetic oligonucleotide
uccgcucaucauauugaug

SEQ ID NO: 2891241 - RNA, 19 nt, Artificial Sequence
  Description of Artificial Sequence: Synthetic oligonucleotide
ggaauuuaaagggcucccg

SEQ ID NO: 2891242 - RNA, 19 nt, Artificial Sequence
  Description of Artificial Sequence: Synthetic oligonucleotide
caagaccccaauuauacgu

SEQ ID NO: 2891243 - RNA, 19 nt, Artificial Sequence
  Description of Artificial Sequence: Synthetic oligonucleotide
guuauucagcaggccagcg

SEQ ID NO: 2891244 - RNA, 19 nt, Artificial Sequence
  Description of Artificial Sequence: Synthetic oligonucleotide
ccuucaacgcguuauucag

SEQ ID NO: 2891245 - RNA, 19 nt, Artificial Sequence
  Description of Artificial Sequence: Synthetic oligonucleotide
ggauggaauacuucaagaa

SEQ ID NO: 2891246 - RNA, 19 nt, Artificial Sequence
  Description of Artificial Sequence: Synthetic oligonucleotide
ucccucacagcauaccaau

SEQ ID NO: 2891247 - RNA, 19 nt, Artificial Sequence
  Description of Artificial Sequence: Synthetic oligonucleotide
acgacgaccgccggaaccg

SEQ ID NO: 2891248 - RNA, 19 nt, Artificial Sequence
  Description of Artificial Sequence: Synthetic oligonucleotide
ggauguaauuucauauacc

SEQ ID NO: 2891249 - RNA, 19 nt, Artificial Sequence
  Description of Artificial Sequence: Synthetic oligonucleotide
auguaauuucauauaccca

SEQ ID NO: 2891250 - RNA, 19 nt, Artificial Sequence
  Description of Artificial Sequence: Synthetic oligonucleotide
cagaccccgggacucaucc

SEQ ID NO: 2891251 - RNA, 19 nt, Artificial Sequence
  Description of Artificial Sequence: Synthetic oligonucleotide
ccaauuauacguacgaaaa

SEQ ID NO: 2891252 - RNA, 19 nt, Artificial Sequence
  Description of Artificial Sequence: Synthetic oligonucleotide
guaacauauagaaguuguc

SEQ ID NO: 2891253 - RNA, 19 nt, Artificial Sequence
  Description of Artificial Sequence: Synthetic oligonucleotide
caggccuccccuucaacgc

SEQ ID NO: 2891254 - RNA, 19 nt, Artificial Sequence
  Description of Artificial Sequence: Synthetic oligonucleotide
ggaaccgacaccguucucc

SEQ ID NO: 2891255 - RNA, 19 nt, Artificial Sequence
  Description of Artificial Sequence: Synthetic oligonucleotide
acaugucauggucccucac

SEQ ID NO: 2891256 - RNA, 19 nt, Artificial Sequence
  Description of Artificial Sequence: Synthetic oligonucleotide
caaaccugcuuucaacaca

SEQ ID NO: 2891257 - RNA, 19 nt, Artificial Sequence
  Description of Artificial Sequence: Synthetic oligonucleotide
uucaacguacuggauggaa

SEQ ID NO: 2891258 - RNA, 19 nt, Artificial Sequence
  Description of Artificial Sequence: Synthetic oligonucleotide
gaagcccguguagacaagc

SEQ ID NO: 2891259 - RNA, 19 nt, Artificial Sequence
  Description of Artificial Sequence: Synthetic oligonucleotide
ugaugccgguuccacguga

SEQ ID NO: 2891260 - RNA, 19 nt, Artificial Sequence
  Description of Artificial Sequence: Synthetic oligonucleotide
auauacccaaacaugucau

SEQ ID NO: 2891261 - RNA, 19 nt, Artificial Sequence
  Description of Artificial Sequence: Synthetic oligonucleotide
accaauacuccugacguuu

SEQ ID NO: 2891262 - RNA, 19 nt, Artificial Sequence
  Description of Artificial Sequence: Synthetic oligonucleotide
auacuccugacguuuuaaa

SEQ ID NO: 2891263 - RNA, 19 nt, Artificial Sequence
  Description of Artificial Sequence: Synthetic oligonucleotide
ucaucauauugaugccggu

SEQ ID NO: 2891264 - RNA, 19 nt, Artificial Sequence
  Description of Artificial Sequence: Synthetic oligonucleotide
ugucauggucccucacagc

SEQ ID NO: 2891265 - RNA, 19 nt, Artificial Sequence
  Description of Artificial Sequence: Synthetic oligonucleotide
accaccacgacgaccgccg

SEQ ID NO: 2891266 - RNA, 19 nt, Artificial Sequence
  Description of Artificial Sequence: Synthetic oligonucleotide
gaaaaucuucuggauguaa

SEQ ID NO: 2891267 - RNA, 19 nt, Artificial Sequence
  Description of Artificial Sequence: Synthetic oligonucleotide
ucaacgcguuauucagcag

SEQ ID NO: 2891268 - RNA, 19 nt, Artificial Sequence
  Description of Artificial Sequence: Synthetic oligonucleotide
cuggauguaauuucauaua

SEQ ID NO: 2891269 - RNA, 19 nt, Artificial Sequence
  Description of Artificial Sequence: Synthetic oligonucleotide
ugucgaugcaaaccugcuu

SEQ ID NO: 2891270 - RNA, 19 nt, Artificial Sequence
  Description of Artificial Sequence: Synthetic oligonucleotide
cccaaacaugucauggucc

SEQ ID NO: 2891271 - RNA, 19 nt, Artificial Sequence
  Description of Artificial Sequence: Synthetic oligonucleotide
gcucaucauauugaugccg

SEQ ID NO: 2891272 - RNA, 19 nt, Artificial Sequence
  Description of Artificial Sequence: Synthetic oligonucleotide
caugucauggucccucaca

SEQ ID NO: 2891273 - RNA, 19 nt, Artificial Sequence
  Description of Artificial Sequence: Synthetic oligonucleotide
cuuugaagacuucaacgua

SEQ ID NO: 2891274 - RNA, 19 nt, Artificial Sequence
  Description of Artificial Sequence: Synthetic oligonucleotide
aggccuccccuucaacgcg

SEQ ID NO: 2891275 - RNA, 19 nt, Artificial Sequence
  Description of Artificial Sequence: Synthetic oligonucleotide
cacgacgaccgccggaacc

SEQ ID NO: 2891276 - RNA, 19 nt, Artificial Sequence
  Description of Artificial Sequence: Synthetic oligonucleotide
ugccgguuccacgugaggu

SEQ ID NO: 2891277 - RNA, 19 nt, Artificial Sequence
  Description of Artificial Sequence: Synthetic oligonucleotide
aaccgacaccguucuccuc

SEQ ID NO: 2891278 - RNA, 19 nt, Artificial Sequence
  Description of Artificial Sequence: Synthetic oligonucleotide
uugaugccgguuccacgug

SEQ ID NO: 2891279 - RNA, 19 nt, Artificial Sequence
  Description of Artificial Sequence: Synthetic oligonucleotide
aagaccccaauuauacgua

SEQ ID NO: 2891280 - RNA, 19 nt, Artificial Sequence
  Description of Artificial Sequence: Synthetic oligonucleotide
aagccgcgggucguugagc

SEQ ID NO: 2891281 - RNA, 19 nt, Artificial Sequence
  Description of Artificial Sequence: Synthetic oligonucleotide
ccucacagcauaccaauac

SEQ ID NO: 2891282 - RNA, 19 nt, Artificial Sequence
  Description of Artificial Sequence: Synthetic oligonucleotide
gaugccgguuccacgugag

SEQ ID NO: 2891283 - RNA, 19 nt, Artificial Sequence
  Description of Artificial Sequence: Synthetic oligonucleotide
cuuucaacacaggccuccc

SEQ ID NO: 2891284 - RNA, 19 nt, Artificial Sequence
  Description of Artificial Sequence: Synthetic oligonucleotide
ugaccucaagaccccaauu

SEQ ID NO: 2891285 - RNA, 19 nt, Artificial Sequence
  Description of Artificial Sequence: Synthetic oligonucleotide
guaauuucauauacccaaa

SEQ ID NO: 2891286 - RNA, 19 nt, Artificial Sequence
  Description of Artificial Sequence: Synthetic oligonucleotide
uagcccaggaagcccgugu

SEQ ID NO: 2891287 - RNA, 19 nt, Artificial Sequence
  Description of Artificial Sequence: Synthetic oligonucleotide
uguagacaagccgcggguc

SEQ ID NO: 2891288 - RNA, 19 nt, Artificial Sequence
  Description of Artificial Sequence: Synthetic oligonucleotide
auuucaccguaaguuuucu

SEQ ID NO: 2891289 - RNA, 19 nt, Artificial Sequence
  Description of Artificial Sequence: Synthetic oligonucleotide
ucauggucccucacagcau

SEQ ID NO: 2891290 - RNA, 19 nt, Artificial Sequence
  Description of Artificial Sequence: Synthetic oligonucleotide
gaaguaacauauagaaguu

SEQ ID NO: 2891291 - RNA, 19 nt, Artificial Sequence
  Description of Artificial Sequence: Synthetic oligonucleotide
aaagggcucccggcccggc

SEQ ID NO: 2891292 - RNA, 19 nt, Artificial Sequence
  Description of Artificial Sequence: Synthetic oligonucleotide
cuucaagaauuucaccgua

SEQ ID NO: 2891293 - RNA, 19 nt, Artificial Sequence
  Description of Artificial Sequence: Synthetic oligonucleotide
caggccagcgcaguagccc

SEQ ID NO: 2891294 - RNA, 19 nt, Artificial Sequence
  Description of Artificial Sequence: Synthetic oligonucleotide
acguacuggauggaauacu

SEQ ID NO: 2891295 - RNA, 19 nt, Artificial Sequence
  Description of Artificial Sequence: Synthetic oligonucleotide
accguucuccuccgagcuc

SEQ ID NO: 2891296 - RNA, 19 nt, Artificial Sequence
  Description of Artificial Sequence: Synthetic oligonucleotide
gcaaaccugcuuucaacac

SEQ ID NO: 2891297 - RNA, 19 nt, Artificial Sequence
  Description of Artificial Sequence: Synthetic oligonucleotide
acgcguuauucagcaggcc

SEQ ID NO: 2891298 - RNA, 19 nt, Artificial Sequence
  Description of Artificial Sequence: Synthetic oligonucleotide
ucaacacaggccuccccuu

SEQ ID NO: 2891299 - RNA, 19 nt, Artificial Sequence
  Description of Artificial Sequence: Synthetic oligonucleotide
gcuuucaacacaggccucc

SEQ ID NO: 2891300 - RNA, 19 nt, Artificial Sequence
  Description of Artificial Sequence: Synthetic oligonucleotide
cccaauuauacguacgaaa

SEQ ID NO: 2891301 - RNA, 19 nt, Artificial Sequence
  Description of Artificial Sequence: Synthetic oligonucleotide
agccgcgggucguugagcu

SEQ ID NO: 2891302 - RNA, 19 nt, Artificial Sequence
  Description of Artificial Sequence: Synthetic oligonucleotide
acuggauggaauacuucaa

SEQ ID NO: 2891303 - RNA, 19 nt, Artificial Sequence
  Description of Artificial Sequence: Synthetic oligonucleotide
uuucaccguaaguuuucuu

SEQ ID NO: 2891304 - RNA, 19 nt, Artificial Sequence
  Description of Artificial Sequence: Synthetic oligonucleotide
aggccagcgcaguagccca

SEQ ID NO: 2891305 - RNA, 19 nt, Artificial Sequence
  Description of Artificial Sequence: Synthetic oligonucleotide
uaaagggcucccggcccgg

SEQ ID NO: 2891306 - RNA, 19 nt, Artificial Sequence
  Description of Artificial Sequence: Synthetic oligonucleotide
caagaauuucaccguaagu

SEQ ID NO: 2891307 - RNA, 19 nt, Artificial Sequence
  Description of Artificial Sequence: Synthetic oligonucleotide
gcguuauucagcaggccag

SEQ ID NO: 2891308 - RNA, 19 nt, Artificial Sequence
  Description of Artificial Sequence: Synthetic oligonucleotide
augccgguuccacgugagg

SEQ ID NO: 2891309 - RNA, 19 nt, Artificial Sequence
  Description of Artificial Sequence: Synthetic oligonucleotide
aguugucgaugcaaaccug

SEQ ID NO: 2891310 - RNA, 19 nt, Artificial Sequence
  Description of Artificial Sequence: Synthetic oligonucleotide
agaccccgggacucauccg

SEQ ID NO: 2891311 - RNA, 19 nt, Artificial Sequence
  Description of Artificial Sequence: Synthetic oligonucleotide
gaauuucaccguaaguuuu

SEQ ID NO: 2891312 - RNA, 19 nt, Artificial Sequence
  Description of Artificial Sequence: Synthetic oligonucleotide
uaccaauacuccugacguu

SEQ ID NO: 2891313 - RNA, 19 nt, Artificial Sequence
  Description of Artificial Sequence: Synthetic oligonucleotide
uagacaagccgcgggucgu

SEQ ID NO: 2891314 - RNA, 19 nt, Artificial Sequence
  Description of Artificial Sequence: Synthetic oligonucleotide
uggucccucacagcauacc

SEQ ID NO: 2891315 - RNA, 19 nt, Artificial Sequence
  Description of Artificial Sequence: Synthetic oligonucleotide
caagccgcgggucguugag

SEQ ID NO: 2891316 - RNA, 19 nt, Artificial Sequence
  Description of Artificial Sequence: Synthetic oligonucleotide
ucagcaggccagcgcagua

SEQ ID NO: 2891317 - RNA, 19 nt, Artificial Sequence
  Description of Artificial Sequence: Synthetic oligonucleotide
ccuuugaagacuucaacgu

SEQ ID NO: 2891318 - RNA, 19 nt, Artificial Sequence
  Description of Artificial Sequence: Synthetic oligonucleotide
uucagcaggccagcgcagu

SEQ ID NO: 2891319 - RNA, 19 nt, Artificial Sequence
  Description of Artificial Sequence: Synthetic oligonucleotide
gaaccgacaccguucuccu

SEQ ID NO: 2891320 - RNA, 19 nt, Artificial Sequence
  Description of Artificial Sequence: Synthetic oligonucleotide
cauauugaugccgguucca

SEQ ID NO: 2891321 - RNA, 19 nt, Artificial Sequence
  Description of Artificial Sequence: Synthetic oligonucleotide
ggucccucacagcauacca

SEQ ID NO: 2891322 - RNA, 19 nt, Artificial Sequence
  Description of Artificial Sequence: Synthetic oligonucleotide
caacacaggccuccccuuc

SEQ ID NO: 2891323 - RNA, 19 nt, Artificial Sequence
  Description of Artificial Sequence: Synthetic oligonucleotide
uccccuucaacgcguuauu

SEQ ID NO: 2891324 - RNA, 19 nt, Artificial Sequence
  Description of Artificial Sequence: Synthetic oligonucleotide
guacuggauggaauacuuc

SEQ ID NO: 2891325 - RNA, 19 nt, Artificial Sequence
  Description of Artificial Sequence: Synthetic oligonucleotide
accacgacgaccgccggaa

SEQ ID NO: 2891326 - RNA, 19 nt, Artificial Sequence
  Description of Artificial Sequence: Synthetic oligonucleotide
cguguagacaagccgcggg

SEQ ID NO: 2891327 - RNA, 19 nt, Artificial Sequence
  Description of Artificial Sequence: Synthetic oligonucleotide
acaagccgcgggucguuga

SEQ ID NO: 2891328 - RNA, 19 nt, Artificial Sequence
  Description of Artificial Sequence: Synthetic oligonucleotide
ggaauacuucaagaauuuc

SEQ ID NO: 2891329 - RNA, 19 nt, Artificial Sequence
  Description of Artificial Sequence: Synthetic oligonucleotide
auggucccucacagcauac

SEQ ID NO: 2891330 - RNA, 19 nt, Artificial Sequence
  Description of Artificial Sequence: Synthetic oligonucleotide
gcccguguagacaagccgc

SEQ ID NO: 2891331 - RNA, 19 nt, Artificial Sequence
  Description of Artificial Sequence: Synthetic oligonucleotide
cccguguagacaagccgcg

SEQ ID NO: 2891332 - RNA, 19 nt, Artificial Sequence
  Description of Artificial Sequence: Synthetic oligonucleotide
cauccggcaggaauuuaaa

SEQ ID NO: 2891333 - RNA, 19 nt, Artificial Sequence
  Description of Artificial Sequence: Synthetic oligonucleotide
cauggucccucacagcaua

SEQ ID NO: 2891334 - RNA, 19 nt, Artificial Sequence
  Description of Artificial Sequence: Synthetic oligonucleotide
guguagacaagccgcgggu

SEQ ID NO: 2891335 - RNA, 19 nt, Artificial Sequence
  Description of Artificial Sequence: Synthetic oligonucleotide
cacgugaggucugaccuca

SEQ ID NO: 2891336 - RNA, 19 nt, Artificial Sequence
  Description of Artificial Sequence: Synthetic oligonucleotide
auucagcaggccagcgcag

SEQ ID NO: 2891337 - RNA, 19 nt, Artificial Sequence
  Description of Artificial Sequence: Synthetic oligonucleotide
ccguccgcucaucauauug

SEQ ID NO: 2891338 - RNA, 19 nt, Artificial Sequence
  Description of Artificial Sequence: Synthetic oligonucleotide
accccgggacucauccggc

SEQ ID NO: 2891339 - RNA, 19 nt, Artificial Sequence
  Description of Artificial Sequence: Synthetic oligonucleotide
ccaggaagcccguguagac

SEQ ID NO: 2891340 - RNA, 19 nt, Artificial Sequence
  Description of Artificial Sequence: Synthetic oligonucleotide
agcccaggaagcccgugua

SEQ ID NO: 2891341 - RNA, 19 nt, Artificial Sequence
  Description of Artificial Sequence: Synthetic oligonucleotide
gacucauccggcaggaauu

SEQ ID NO: 2891342 - RNA, 19 nt, Artificial Sequence
  Description of Artificial Sequence: Synthetic oligonucleotide
gacaagccgcgggucguug

SEQ ID NO: 2891343 - RNA, 19 nt, Artificial Sequence
  Description of Artificial Sequence: Synthetic oligonucleotide
gcaggaauuuaaagggcuc

SEQ ID NO: 2891344 - RNA, 19 nt, Artificial Sequence
  Description of Artificial Sequence: Synthetic oligonucleotide
cccuucaacgcguuauuca

SEQ ID NO: 2891345 - RNA, 19 nt, Artificial Sequence
  Description of Artificial Sequence: Synthetic oligonucleotide
ggcaggaauuuaaagggcu

SEQ ID NO: 2891346 - RNA, 19 nt, Artificial Sequence
  Description of Artificial Sequence: Synthetic oligonucleotide
gcaguagcccaggaagccc

SEQ ID NO: 2891347 - RNA, 19 nt, Artificial Sequence
  Description of Artificial Sequence: Synthetic oligonucleotide
acucauccggcaggaauuu

SEQ ID NO: 2891348 - RNA, 19 nt, Artificial Sequence
  Description of Artificial Sequence: Synthetic oligonucleotide
caggaagcccguguagaca

SEQ ID NO: 2891349 - RNA, 19 nt, Artificial Sequence
  Description of Artificial Sequence: Synthetic oligonucleotide
gaccgccggaaccgacacc

SEQ ID NO: 2891350 - RNA, 19 nt, Artificial Sequence
  Description of Artificial Sequence: Synthetic oligonucleotide
cggcaggaauuuaaagggc

SEQ ID NO: 2891351 - RNA, 19 nt, Artificial Sequence
  Description of Artificial Sequence: Synthetic oligonucleotide
caauacuccugacguuuua

SEQ ID NO: 2891352 - RNA, 19 nt, Artificial Sequence
  Description of Artificial Sequence: Synthetic oligonucleotide
cuucuggauguaauuucau

SEQ ID NO: 2891353 - RNA, 19 nt, Artificial Sequence
  Description of Artificial Sequence: Synthetic oligonucleotide
ggucugaccucaagacccc

SEQ ID NO: 2891354 - RNA, 19 nt, Artificial Sequence
  Description of Artificial Sequence: Synthetic oligonucleotide
ccgggacucauccggcagg

SEQ ID NO: 2891355 - RNA, 19 nt, Artificial Sequence
  Description of Artificial Sequence: Synthetic oligonucleotide
gccgguuccacgugagguc

SEQ ID NO: 2891356 - RNA, 19 nt, Artificial Sequence
  Description of Artificial Sequence: Synthetic oligonucleotide
cgcucaucauauugaugcc

SEQ ID NO: 2891357 - RNA, 19 nt, Artificial Sequence
  Description of Artificial Sequence: Synthetic oligonucleotide
acgaccgccggaaccgaca

SEQ ID NO: 2891358 - RNA, 19 nt, Artificial Sequence
  Description of Artificial Sequence: Synthetic oligonucleotide
ggacucauccggcaggaau

SEQ ID NO: 2891359 - RNA, 19 nt, Artificial Sequence
  Description of Artificial Sequence: Synthetic oligonucleotide
gcauaccaauacuccugac

SEQ ID NO: 2891360 - RNA, 19 nt, Artificial Sequence
  Description of Artificial Sequence: Synthetic oligonucleotide
gucccucacagcauaccaa

SEQ ID NO: 2891361 - RNA, 19 nt, Artificial Sequence
  Description of Artificial Sequence: Synthetic oligonucleotide
gcccaggaagcccguguag

SEQ ID NO: 2891362 - RNA, 19 nt, Artificial Sequence
  Description of Artificial Sequence: Synthetic oligonucleotide
guccgcucaucauauugau

SEQ ID NO: 2891363 - RNA, 19 nt, Artificial Sequence
  Description of Artificial Sequence: Synthetic oligonucleotide
caucauauugaugccgguu

SEQ ID NO: 2891364 - RNA, 19 nt, Artificial Sequence
  Description of Artificial Sequence: Synthetic oligonucleotide
caccguucuccuccgagcu

SEQ ID NO: 2891365 - RNA, 19 nt, Artificial Sequence
  Description of Artificial Sequence: Synthetic oligonucleotide
cgcguuauucagcaggcca

SEQ ID NO: 2891366 - RNA, 19 nt, Artificial Sequence
  Description of Artificial Sequence: Synthetic oligonucleotide
cguuauucagcaggccagc

SEQ ID NO: 2891367 - RNA, 19 nt, Artificial Sequence
  Description of Artificial Sequence: Synthetic oligonucleotide
agacuucaacguacuggau

SEQ ID NO: 2891368 - RNA, 19 nt, Artificial Sequence
  Description of Artificial Sequence: Synthetic oligonucleotide
gcgcaguagcccaggaagc

SEQ ID NO: 2891369 - RNA, 19 nt, Artificial Sequence
  Description of Artificial Sequence: Synthetic oligonucleotide
guagcccaggaagcccgug

SEQ ID NO: 2891370 - RNA, 19 nt, Artificial Sequence
  Description of Artificial Sequence: Synthetic oligonucleotide
cuucaacguacuggaugga

SEQ ID NO: 2891371 - RNA, 19 nt, Artificial Sequence
  Description of Artificial Sequence: Synthetic oligonucleotide
cucccggcccggccguccg

SEQ ID NO: 2891372 - RNA, 19 nt, Artificial Sequence
  Description of Artificial Sequence: Synthetic oligonucleotide
gacgaccgccggaaccgac

SEQ ID NO: 2891373 - RNA, 19 nt, Artificial Sequence
  Description of Artificial Sequence: Synthetic oligonucleotide
ccucaagaccccaauuaua

SEQ ID NO: 2891374 - RNA, 19 nt, Artificial Sequence
  Description of Artificial Sequence: Synthetic oligonucleotide
ccgacaccguucuccuccg

SEQ ID NO: 2891375 - RNA, 19 nt, Artificial Sequence
  Description of Artificial Sequence: Synthetic oligonucleotide
aguagcccaggaagcccgu

SEQ ID NO: 2891376 - RNA, 19 nt, Artificial Sequence
  Description of Artificial Sequence: Synthetic oligonucleotide
cugaccucaagaccccaau

SEQ ID NO: 2891377 - RNA, 19 nt, Artificial Sequence
  Description of Artificial Sequence: Synthetic oligonucleotide
cgggucguugagcuugggg

SEQ ID NO: 2891378 - RNA, 19 nt, Artificial Sequence
  Description of Artificial Sequence: Synthetic oligonucleotide
gccggaaccgacaccguuc

SEQ ID NO: 2891379 - RNA, 19 nt, Artificial Sequence
  Description of Artificial Sequence: Synthetic oligonucleotide
guuccacgugaggucugac

SEQ ID NO: 2891380 - RNA, 19 nt, Artificial Sequence
  Description of Artificial Sequence: Synthetic oligonucleotide
cgcaguagcccaggaagcc

SEQ ID NO: 2891381 - RNA, 19 nt, Artificial Sequence
  Description of Artificial Sequence: Synthetic oligonucleotide
cgugaggucugaccucaag

SEQ ID NO: 2891382 - RNA, 19 nt, Artificial Sequence
  Description of Artificial Sequence: Synthetic oligonucleotide
cguccgcucaucauauuga

SEQ ID NO: 2891383 - RNA, 19 nt, Artificial Sequence
  Description of Artificial Sequence: Synthetic oligonucleotide
cccgggacucauccggcag

SEQ ID NO: 2891384 - RNA, 19 nt, Artificial Sequence
  Description of Artificial Sequence: Synthetic oligonucleotide
ccgcgggucguugagcuug

SEQ ID NO: 2891385 - RNA, 19 nt, Artificial Sequence
  Description of Artificial Sequence: Synthetic oligonucleotide
gucugaccucaagacccca

SEQ ID NO: 2891386 - RNA, 19 nt, Artificial Sequence
  Description of Artificial Sequence: Synthetic oligonucleotide
cagcgcaguagcccaggaa

SEQ ID NO: 2891387 - RNA, 19 nt, Artificial Sequence
  Description of Artificial Sequence: Synthetic oligonucleotide
gguuccacgugaggucuga

SEQ ID NO: 2891388 - RNA, 19 nt, Artificial Sequence
  Description of Artificial Sequence: Synthetic oligonucleotide
ggaagcccguguagacaag

SEQ ID NO: 2891389 - RNA, 19 nt, Artificial Sequence
  Description of Artificial Sequence: Synthetic oligonucleotide
cuccccuucaacgcguuau

SEQ ID NO: 2891390 - RNA, 19 nt, Artificial Sequence
  Description of Artificial Sequence: Synthetic oligonucleotide
ccacgugaggucugaccuc

SEQ ID NO: 2891391 - RNA, 19 nt, Artificial Sequence
  Description of Artificial Sequence: Synthetic oligonucleotide
gccagcgcaguagcccagg

SEQ ID NO: 2891392 - RNA, 19 nt, Artificial Sequence
  Description of Artificial Sequence: Synthetic oligonucleotide
ccguguagacaagccgcgg

SEQ ID NO: 2891393 - RNA, 19 nt, Artificial Sequence
  Description of Artificial Sequence: Synthetic oligonucleotide
caccacgacgaccgccgga

SEQ ID NO: 2891394 - RNA, 19 nt, Artificial Sequence
  Description of Artificial Sequence: Synthetic oligonucleotide
ggggcagaccccgggacuc

SEQ ID NO: 2891395 - RNA, 19 nt, Artificial Sequence
  Description of Artificial Sequence: Synthetic oligonucleotide
agacaagccgcgggucguu

SEQ ID NO: 2891396 - RNA, 19 nt, Artificial Sequence
  Description of Artificial Sequence: Synthetic oligonucleotide
gcaggccagcgcaguagcc

SEQ ID NO: 2891397 - RNA, 19 nt, Artificial Sequence
  Description of Artificial Sequence: Synthetic oligonucleotide
ccccuucaacgcguuauuc

SEQ ID NO: 2891398 - RNA, 19 nt, Artificial Sequence
  Description of Artificial Sequence: Synthetic oligonucleotide
cguacuggauggaauacuu

SEQ ID NO: 2891399 - RNA, 19 nt, Artificial Sequence
  Description of Artificial Sequence: Synthetic oligonucleotide
ccaccacgacgaccgccgg

SEQ ID NO: 2891400 - RNA, 19 nt, Artificial Sequence
  Description of Artificial Sequence: Synthetic oligonucleotide
cgaccgccggaaccgacac

SEQ ID NO: 2891401 - RNA, 19 nt, Artificial Sequence
  Description of Artificial Sequence: Synthetic oligonucleotide
cguaaguuuucuucucuuu

SEQ ID NO: 2891402 - RNA, 19 nt, Artificial Sequence
  Description of Artificial Sequence: Synthetic oligonucleotide
ccccaauuauacguacgaa

SEQ ID NO: 2891403 - RNA, 19 nt, Artificial Sequence
  Description of Artificial Sequence: Synthetic oligonucleotide
ggccagcgcaguagcccag

SEQ ID NO: 2891404 - RNA, 19 nt, Artificial Sequence
  Description of Artificial Sequence: Synthetic oligonucleotide
cgcgggucguugagcuugg

SEQ ID NO: 2891405 - RNA, 19 nt, Artificial Sequence
  Description of Artificial Sequence: Synthetic oligonucleotide
cgaugcaaaccugcuuuca

SEQ ID NO: 2891406 - RNA, 19 nt, Artificial Sequence
  Description of Artificial Sequence: Synthetic oligonucleotide
cccucacagcauaccaaua

SEQ ID NO: 2891407 - RNA, 19 nt, Artificial Sequence
  Description of Artificial Sequence: Synthetic oligonucleotide
ccggaaccgacaccguucu

SEQ ID NO: 2891408 - RNA, 19 nt, Artificial Sequence
  Description of Artificial Sequence: Synthetic oligonucleotide
acgugaggucugaccucaa

SEQ ID NO: 2891409 - RNA, 19 nt, Artificial Sequence
  Description of Artificial Sequence: Synthetic oligonucleotide
ccaauacuccugacguuuu

SEQ ID NO: 2891410 - RNA, 19 nt, Artificial Sequence
  Description of Artificial Sequence: Synthetic oligonucleotide
ccacgacgaccgccggaac

SEQ ID NO: 2891411 - RNA, 19 nt, Artificial Sequence
  Description of Artificial Sequence: Synthetic oligonucleotide
ccagcgcaguagcccagga

SEQ ID NO: 2891412 - RNA, 19 nt, Artificial Sequence
  Description of Artificial Sequence: Synthetic oligonucleotide
ggccguccgcucaucauau

SEQ ID NO: 2891413 - RNA, 19 nt, Artificial Sequence
  Description of Artificial Sequence: Synthetic oligonucleotide
gcgggucguugagcuuggg

SEQ ID NO: 2891414 - RNA, 19 nt, Artificial Sequence
  Description of Artificial Sequence: Synthetic oligonucleotide
gcagaccccgggacucauc

SEQ ID NO: 2891415 - RNA, 19 nt, Artificial Sequence
  Description of Artificial Sequence: Synthetic oligonucleotide
gggcagaccccgggacuca

SEQ ID NO: 2891416 - RNA, 19 nt, Artificial Sequence
  Description of Artificial Sequence: Synthetic oligonucleotide
ccgguuccacgugaggucu

SEQ ID NO: 2891417 - RNA, 19 nt, Artificial Sequence
  Description of Artificial Sequence: Synthetic oligonucleotide
ccccgggacucauccggca

SEQ ID NO: 2891418 - RNA, 19 nt, Artificial Sequence
  Description of Artificial Sequence: Synthetic oligonucleotide
gggacucauccggcaggaa

SEQ ID NO: 2891419 - RNA, 19 nt, Artificial Sequence
  Description of Artificial Sequence: Synthetic oligonucleotide
cggccguccgcucaucaua

SEQ ID NO: 2891420 - RNA, 19 nt, Artificial Sequence
  Description of Artificial Sequence: Synthetic oligonucleotide
ggccuccccuucaacgcgu

SEQ ID NO: 2891421 - RNA, 19 nt, Artificial Sequence
  Description of Artificial Sequence: Synthetic oligonucleotide
cgggacucauccggcagga

SEQ ID NO: 2891422 - RNA, 19 nt, Artificial Sequence
  Description of Artificial Sequence: Synthetic oligonucleotide
cccggccguccgcucauca

SEQ ID NO: 2891423 - RNA, 19 nt, Artificial Sequence
  Description of Artificial Sequence: Synthetic oligonucleotide
cggaaccgacaccguucuc

SEQ ID NO: 2891424 - RNA, 19 nt, Artificial Sequence
  Description of Artificial Sequence: Synthetic oligonucleotide
ccuccccuucaacgcguua

SEQ ID NO: 2891425 - RNA, 19 nt, Artificial Sequence
  Description of Artificial Sequence: Synthetic oligonucleotide
ggcccggccguccgcucau

SEQ ID NO: 2891426 - RNA, 19 nt, Artificial Sequence
  Description of Artificial Sequence: Synthetic oligonucleotide
ccggccguccgcucaucau

SEQ ID NO: 2891427 - RNA, 19 nt, Artificial Sequence
  Description of Artificial Sequence: Synthetic oligonucleotide
ccggcccggccguccgcuc

SEQ ID NO: 2891428 - RNA, 19 nt, Artificial Sequence
  Description of Artificial Sequence: Synthetic oligonucleotide
gccguccgcucaucauauu

SEQ ID NO: 2891429 - RNA, 19 nt, Artificial Sequence
  Description of Artificial Sequence: Synthetic oligonucleotide
cgacaccguucuccuccga

SEQ ID NO: 2891430 - RNA, 19 nt, Artificial Sequence
  Description of Artificial Sequence: Synthetic oligonucleotide
cggcccggccguccgcuca

SEQ ID NO: 2891431 - RNA, 19 nt, Artificial Sequence
  Description of Artificial Sequence: Synthetic oligonucleotide
gccgcgggucguugagcuu

SEQ ID NO: 2891432 - RNA, 19 nt, Artificial Sequence
  Description of Artificial Sequence: Synthetic oligonucleotide
cgacgaccgccggaaccga

SEQ ID NO: 2891433 - RNA, 19 nt, Artificial Sequence
  Description of Artificial Sequence: Synthetic oligonucleotide
cgccggaaccgacaccguu

SEQ ID NO: 2891434 - RNA, 19 nt, Artificial Sequence
  Description of Artificial Sequence: Synthetic oligonucleotide
gccuccccuucaacgcguu

SEQ ID NO: 2891435 - RNA, 19 nt, Artificial Sequence
  Description of Artificial Sequence: Synthetic oligonucleotide
ccgccggaaccgacaccgu

SEQ ID NO: 2891436 - RNA, 19 nt, Artificial Sequence
  Description of Artificial Sequence: Synthetic oligonucleotide
cccggcccggccguccgcu

SEQ ID NO: 2891437 - RNA, 19 nt, Artificial Sequence
  Description of Artificial Sequence: Synthetic oligonucleotide
aauagaaaagaacaguaag

SEQ ID NO: 2891438 - RNA, 19 nt, Artificial Sequence
  Description of Artificial Sequence: Synthetic oligonucleotide
auuugcagcaucuucaagc

SEQ ID NO: 2891439 - RNA, 19 nt, Artificial Sequence
  Description of Artificial Sequence: Synthetic oligonucleotide
uagaaguacaucauguugg

SEQ ID NO: 2891440 - RNA, 19 nt, Artificial Sequence
  Description of Artificial Sequence: Synthetic oligonucleotide
ucuuauuccauucacauau

SEQ ID NO: 2891441 - RNA, 19 nt, Artificial Sequence
  Description of Artificial Sequence: Synthetic oligonucleotide
uccauucacauauacaugg

SEQ ID NO: 2891442 - RNA, 19 nt, Artificial Sequence
  Description of Artificial Sequence: Synthetic oligonucleotide
aaguauuuaguuuugcugu

SEQ ID NO: 2891443 - RNA, 19 nt, Artificial Sequence
  Description of Artificial Sequence: Synthetic oligonucleotide
uuaguuuugcuguucaacg

SEQ ID NO: 2891444 - RNA, 19 nt, Artificial Sequence
  Description of Artificial Sequence: Synthetic oligonucleotide
uguauguacacacacacac

SEQ ID NO: 2891445 - RNA, 19 nt, Artificial Sequence
  Description of Artificial Sequence: Synthetic oligonucleotide
gaaagaauagaaaagaaca

SEQ ID NO: 2891446 - RNA, 19 nt, Artificial Sequence
  Description of Artificial Sequence: Synthetic oligonucleotide
aaguacaucauguuggacu

SEQ ID NO: 2891447 - RNA, 19 nt, Artificial Sequence
  Description of Artificial Sequence: Synthetic oligonucleotide
uaugaauacauuuccuagg

SEQ ID NO: 2891448 - RNA, 19 nt, Artificial Sequence
  Description of Artificial Sequence: Synthetic oligonucleotide
acuccaagggcucugaggc

SEQ ID NO: 2891449 - RNA, 19 nt, Artificial Sequence
  Description of Artificial Sequence: Synthetic oligonucleotide
ugaaagaauagaaaagaac

SEQ ID NO: 2891450 - RNA, 19 nt, Artificial Sequence
  Description of Artificial Sequence: Synthetic oligonucleotide
uucccaaaucaucagaggg

SEQ ID NO: 2891451 - RNA, 19 nt, Artificial Sequence
  Description of Artificial Sequence: Synthetic oligonucleotide
uaaguauuuaguuuugcug

SEQ ID NO: 2891452 - RNA, 19 nt, Artificial Sequence
  Description of Artificial Sequence: Synthetic oligonucleotide
uuagaaguacaucauguug

SEQ ID NO: 2891453 - RNA, 19 nt, Artificial Sequence
  Description of Artificial Sequence: Synthetic oligonucleotide
aguauauucugccacauga

SEQ ID NO: 2891454 - RNA, 19 nt, Artificial Sequence
  Description of Artificial Sequence: Synthetic oligonucleotide
ucaagcauugcuuauagaa

SEQ ID NO: 2891455 - RNA, 19 nt, Artificial Sequence
  Description of Artificial Sequence: Synthetic oligonucleotide
auauacaugggcuacauau

SEQ ID NO: 2891456 - RNA, 19 nt, Artificial Sequence
  Description of Artificial Sequence: Synthetic oligonucleotide
uacugaaagaauagaaaag

SEQ ID NO: 2891457 - RNA, 19 nt, Artificial Sequence
  Description of Artificial Sequence: Synthetic oligonucleotide
uuacugaaagaauagaaaa

SEQ ID NO: 2891458 - RNA, 19 nt, Artificial Sequence
  Description of Artificial Sequence: Synthetic oligonucleotide
uuuacugaaagaauagaaa

SEQ ID NO: 2891459 - RNA, 19 nt, Artificial Sequence
  Description of Artificial Sequence: Synthetic oligonucleotide
ugggcuacauaucagcugg

SEQ ID NO: 2891460 - RNA, 19 nt, Artificial Sequence
  Description of Artificial Sequence: Synthetic oligonucleotide
uguaaggagaccauggggu

SEQ ID NO: 2891461 - RNA, 19 nt, Artificial Sequence
  Description of Artificial Sequence: Synthetic oligonucleotide
aaagaauagaaaagaacag

SEQ ID NO: 2891462 - RNA, 19 nt, Artificial Sequence
  Description of Artificial Sequence: Synthetic oligonucleotide
augggguuuaucuuauucc

SEQ ID NO: 2891463 - RNA, 19 nt, Artificial Sequence
  Description of Artificial Sequence: Synthetic oligonucleotide
uguacacacacacacacac

SEQ ID NO: 2891464 - RNA, 19 nt, Artificial Sequence
  Description of Artificial Sequence: Synthetic oligonucleotide
ucauguuggacuaugaaua

SEQ ID NO: 2891465 - RNA, 19 nt, Artificial Sequence
  Description of Artificial Sequence: Synthetic oligonucleotide
uaggguuagaaguacauca

SEQ ID NO: 2891466 - RNA, 19 nt, Artificial Sequence
  Description of Artificial Sequence: Synthetic oligonucleotide
uauguacacacacacacac

SEQ ID NO: 2891467 - RNA, 19 nt, Artificial Sequence
  Description of Artificial Sequence: Synthetic oligonucleotide
agaaaagaacaguaaguuc

SEQ ID NO: 2891468 - RNA, 19 nt, Artificial Sequence
  Description of Artificial Sequence: Synthetic oligonucleotide
acugauucuuaccuggugg

SEQ ID NO: 2891469 - RNA, 19 nt, Artificial Sequence
  Description of Artificial Sequence: Synthetic oligonucleotide
uuuaucuuauuccauucac

SEQ ID NO: 2891470 - RNA, 19 nt, Artificial Sequence
  Description of Artificial Sequence: Synthetic oligonucleotide
acguguauuucccacauuc

SEQ ID NO: 2891471 - RNA, 19 nt, Artificial Sequence
  Description of Artificial Sequence: Synthetic oligonucleotide
ugccacaugaacuccaagg

SEQ ID NO: 2891472 - RNA, 19 nt, Artificial Sequence
  Description of Artificial Sequence: Synthetic oligonucleotide
cuaugaauacauuuccuag

SEQ ID NO: 2891473 - RNA, 19 nt, Artificial Sequence
  Description of Artificial Sequence: Synthetic oligonucleotide
ucaauugcaauucugugua

SEQ ID NO: 2891474 - RNA, 19 nt, Artificial Sequence
  Description of Artificial Sequence: Synthetic oligonucleotide
aagaauagaaaagaacagu

SEQ ID NO: 2891475 - RNA, 19 nt, Artificial Sequence
  Description of Artificial Sequence: Synthetic oligonucleotide
aacaguaaguucuuguaau

SEQ ID NO: 2891476 - RNA, 19 nt, Artificial Sequence
  Description of Artificial Sequence: Synthetic oligonucleotide
gaauacauuuccuagguaa

SEQ ID NO: 2891477 - RNA, 19 nt, Artificial Sequence
  Description of Artificial Sequence: Synthetic oligonucleotide
uacuuguaggguuagaagu

SEQ ID NO: 2891478 - RNA, 19 nt, Artificial Sequence
  Description of Artificial Sequence: Synthetic oligonucleotide
cuuguauguauguacacac

SEQ ID NO: 2891479 - RNA, 19 nt, Artificial Sequence
  Description of Artificial Sequence: Synthetic oligonucleotide
ugugcacugauucuuaccu

SEQ ID NO: 2891480 - RNA, 19 nt, Artificial Sequence
  Description of Artificial Sequence: Synthetic oligonucleotide
acaugggcuacauaucagc

SEQ ID NO: 2891481 - RNA, 19 nt, Artificial Sequence
  Description of Artificial Sequence: Synthetic oligonucleotide
uguguaaggagaccauggg

SEQ ID NO: 2891482 - RNA, 19 nt, Artificial Sequence
  Description of Artificial Sequence: Synthetic oligonucleotide
ugcacugauucuuaccugg

SEQ ID NO: 2891483 - RNA, 19 nt, Artificial Sequence
  Description of Artificial Sequence: Synthetic oligonucleotide
uuuacgccgauucugacuc

SEQ ID NO: 2891484 - RNA, 19 nt, Artificial Sequence
  Description of Artificial Sequence: Synthetic oligonucleotide
aagcauugcuuauagaaaa

SEQ ID NO: 2891485 - RNA, 19 nt, Artificial Sequence
  Description of Artificial Sequence: Synthetic oligonucleotide
aagaacaguaaguucuugu

SEQ ID NO: 2891486 - RNA, 19 nt, Artificial Sequence
  Description of Artificial Sequence: Synthetic oligonucleotide
auugcaauucuguguaagg

SEQ ID NO: 2891487 - RNA, 19 nt, Artificial Sequence
  Description of Artificial Sequence: Synthetic oligonucleotide
uacacacacacacacacac

SEQ ID NO: 2891488 - RNA, 19 nt, Artificial Sequence
  Description of Artificial Sequence: Synthetic oligonucleotide
ugcaauucuguguaaggag

SEQ ID NO: 2891489 - RNA, 19 nt, Artificial Sequence
  Description of Artificial Sequence: Synthetic oligonucleotide
uggacuaugaauacauuuc

SEQ ID NO: 2891490 - RNA, 19 nt, Artificial Sequence
  Description of Artificial Sequence: Synthetic oligonucleotide
aauucuguguaaggagacc

SEQ ID NO: 2891491 - RNA, 19 nt, Artificial Sequence
  Description of Artificial Sequence: Synthetic oligonucleotide
ucaucagagggucauuugc

SEQ ID NO: 2891492 - RNA, 19 nt, Artificial Sequence
  Description of Artificial Sequence: Synthetic oligonucleotide
gaaaagaacaguaaguucu

SEQ ID NO: 2891493 - RNA, 19 nt, Artificial Sequence
  Description of Artificial Sequence: Synthetic oligonucleotide
uaucuuauuccauucacau

SEQ ID NO: 2891494 - RNA, 19 nt, Artificial Sequence
  Description of Artificial Sequence: Synthetic oligonucleotide
uauauucugccacaugaac

SEQ ID NO: 2891495 - RNA, 19 nt, Artificial Sequence
  Description of Artificial Sequence: Synthetic oligonucleotide
uuaucuuauuccauucaca

SEQ ID NO: 2891496 - RNA, 19 nt, Artificial Sequence
  Description of Artificial Sequence: Synthetic oligonucleotide
aacuccaagggcucugagg

SEQ ID NO: 2891497 - RNA, 19 nt, Artificial Sequence
  Description of Artificial Sequence: Synthetic oligonucleotide
uauuuaguuuugcuguuca

SEQ ID NO: 2891498 - RNA, 19 nt, Artificial Sequence
  Description of Artificial Sequence: Synthetic oligonucleotide
aguaaguucuuguaaugug

SEQ ID NO: 2891499 - RNA, 19 nt, Artificial Sequence
  Description of Artificial Sequence: Synthetic oligonucleotide
uguuggacuaugaauacau

SEQ ID NO: 2891500 - RNA, 19 nt, Artificial Sequence
  Description of Artificial Sequence: Synthetic oligonucleotide
uauuccauucacauauaca

SEQ ID NO: 2891501 - RNA, 19 nt, Artificial Sequence
  Description of Artificial Sequence: Synthetic oligonucleotide
aauacauuuccuagguaag

SEQ ID NO: 2891502 - RNA, 19 nt, Artificial Sequence
  Description of Artificial Sequence: Synthetic oligonucleotide
aauugcaauucuguguaag

SEQ ID NO: 2891503 - RNA, 19 nt, Artificial Sequence
  Description of Artificial Sequence: Synthetic oligonucleotide
ugucuuguauguauguaca

SEQ ID NO: 2891504 - RNA, 19 nt, Artificial Sequence
  Description of Artificial Sequence: Synthetic oligonucleotide
uguauagcuaccuggagua

SEQ ID NO: 2891505 - RNA, 19 nt, Artificial Sequence
  Description of Artificial Sequence: Synthetic oligonucleotide
aaguucuuguaaugugcac

SEQ ID NO: 2891506 - RNA, 19 nt, Artificial Sequence
  Description of Artificial Sequence: Synthetic oligonucleotide
uuguauagcuaccuggagu

SEQ ID NO: 2891507 - RNA, 19 nt, Artificial Sequence
  Description of Artificial Sequence: Synthetic oligonucleotide
uagguaaguauuuaguuuu

SEQ ID NO: 2891508 - RNA, 19 nt, Artificial Sequence
  Description of Artificial Sequence: Synthetic oligonucleotide
uauucugccacaugaacuc

SEQ ID NO: 2891509 - RNA, 19 nt, Artificial Sequence
  Description of Artificial Sequence: Synthetic oligonucleotide
uaguuuugcuguucaacgg

SEQ ID NO: 2891510 - RNA, 19 nt, Artificial Sequence
  Description of Artificial Sequence: Synthetic oligonucleotide
augaauacauuuccuaggu

SEQ ID NO: 2891511 - RNA, 19 nt, Artificial Sequence
  Description of Artificial Sequence: Synthetic oligonucleotide
uuugcuguucaacggagga

SEQ ID NO: 2891512 - RNA, 19 nt, Artificial Sequence
  Description of Artificial Sequence: Synthetic oligonucleotide
aaaagucaauugcaauucu

SEQ ID NO: 2891513 - RNA, 19 nt, Artificial Sequence
  Description of Artificial Sequence: Synthetic oligonucleotide
uuuaguuuugcuguucaac

SEQ ID NO: 2891514 - RNA, 19 nt, Artificial Sequence
  Description of Artificial Sequence: Synthetic oligonucleotide
cacauucaguccauuaagg

SEQ ID NO: 2891515 - RNA, 19 nt, Artificial Sequence
  Description of Artificial Sequence: Synthetic oligonucleotide
uuauuccauucacauauac

SEQ ID NO: 2891516 - RNA, 19 nt, Artificial Sequence
  Description of Artificial Sequence: Synthetic oligonucleotide
auucuuaccugguggauug

SEQ ID NO: 2891517 - RNA, 19 nt, Artificial Sequence
  Description of Artificial Sequence: Synthetic oligonucleotide
auagaaaagaacaguaagu

SEQ ID NO: 2891518 - RNA, 19 nt, Artificial Sequence
  Description of Artificial Sequence: Synthetic oligonucleotide
ggauuguauagcuaccugg

SEQ ID NO: 2891519 - RNA, 19 nt, Artificial Sequence
  Description of Artificial Sequence: Synthetic oligonucleotide
cuguguaaggagaccaugg

SEQ ID NO: 2891520 - RNA, 19 nt, Artificial Sequence
  Description of Artificial Sequence: Synthetic oligonucleotide
ugguggauuguauagcuac

SEQ ID NO: 2891521 - RNA, 19 nt, Artificial Sequence
  Description of Artificial Sequence: Synthetic oligonucleotide
guauuucccacauucaguc

SEQ ID NO: 2891522 - RNA, 19 nt, Artificial Sequence
  Description of Artificial Sequence: Synthetic oligonucleotide
uuuugcuguucaacggagg

SEQ ID NO: 2891523 - RNA, 19 nt, Artificial Sequence
  Description of Artificial Sequence: Synthetic oligonucleotide
auacaugggcuacauauca

SEQ ID NO: 2891524 - RNA, 19 nt, Artificial Sequence
  Description of Artificial Sequence: Synthetic oligonucleotide
uagaaaagaacaguaaguu

SEQ ID NO: 2891525 - RNA, 19 nt, Artificial Sequence
  Description of Artificial Sequence: Synthetic oligonucleotide
ugggguuuaucuuauucca

SEQ ID NO: 2891526 - RNA, 19 nt, Artificial Sequence
  Description of Artificial Sequence: Synthetic oligonucleotide
aucauguuggacuaugaau

SEQ ID NO: 2891527 - RNA, 19 nt, Artificial Sequence
  Description of Artificial Sequence: Synthetic oligonucleotide
uguaaugugcacugauucu

SEQ ID NO: 2891528 - RNA, 19 nt, Artificial Sequence
  Description of Artificial Sequence: Synthetic oligonucleotide
uccuagguaaguauuuagu

SEQ ID NO: 2891529 - RNA, 19 nt, Artificial Sequence
  Description of Artificial Sequence: Synthetic oligonucleotide
acuaugaauacauuuccua

SEQ ID NO: 2891530 - RNA, 19 nt, Artificial Sequence
  Description of Artificial Sequence: Synthetic oligonucleotide
guguauuucccacauucag

SEQ ID NO: 2891531 - RNA, 19 nt, Artificial Sequence
  Description of Artificial Sequence: Synthetic oligonucleotide
aagucaauugcaauucugu

SEQ ID NO: 2891532 - RNA, 19 nt, Artificial Sequence
  Description of Artificial Sequence: Synthetic oligonucleotide
accuggaguacuuguaggg

SEQ ID NO: 2891533 - RNA, 19 nt, Artificial Sequence
  Description of Artificial Sequence: Synthetic oligonucleotide
cauucacauauacaugggc

SEQ ID NO: 2891534 - RNA, 19 nt, Artificial Sequence
  Description of Artificial Sequence: Synthetic oligonucleotide
augugcacugauucuuacc

SEQ ID NO: 2891535 - RNA, 19 nt, Artificial Sequence
  Description of Artificial Sequence: Synthetic oligonucleotide
agucaauugcaauucugug

SEQ ID NO: 2891536 - RNA, 19 nt, Artificial Sequence
  Description of Artificial Sequence: Synthetic oligonucleotide
uuggacuaugaauacauuu

SEQ ID NO: 2891537 - RNA, 19 nt, Artificial Sequence
  Description of Artificial Sequence: Synthetic oligonucleotide
ucuuguauguauguacaca

SEQ ID NO: 2891538 - RNA, 19 nt, Artificial Sequence
  Description of Artificial Sequence: Synthetic oligonucleotide
agggcucugaggcuggccc

SEQ ID NO: 2891539 - RNA, 19 nt, Artificial Sequence
  Description of Artificial Sequence: Synthetic oligonucleotide
guucuuguaaugugcacug

SEQ ID NO: 2891540 - RNA, 19 nt, Artificial Sequence
  Description of Artificial Sequence: Synthetic oligonucleotide
aaagucaauugcaauucug

SEQ ID NO: 2891541 - RNA, 19 nt, Artificial Sequence
  Description of Artificial Sequence: Synthetic oligonucleotide
uuccuagguaaguauuuag

SEQ ID NO: 2891542 - RNA, 19 nt, Artificial Sequence
  Description of Artificial Sequence: Synthetic oligonucleotide
cugucuuguauguauguac

SEQ ID NO: 2891543 - RNA, 19 nt, Artificial Sequence
  Description of Artificial Sequence: Synthetic oligonucleotide
guguaaggagaccaugggg

SEQ ID NO: 2891544 - RNA, 19 nt, Artificial Sequence
  Description of Artificial Sequence: Synthetic oligonucleotide
gauucugacuccucuuccc

SEQ ID NO: 2891545 - RNA, 19 nt, Artificial Sequence
  Description of Artificial Sequence: Synthetic oligonucleotide
cacacacacacacacacac

SEQ ID NO: 2891546 - RNA, 19 nt, Artificial Sequence
  Description of Artificial Sequence: Synthetic oligonucleotide
aguuuugcuguucaacgga

SEQ ID NO: 2891547 - RNA, 19 nt, Artificial Sequence
  Description of Artificial Sequence: Synthetic oligonucleotide
uuccauucacauauacaug

SEQ ID NO: 2891548 - RNA, 19 nt, Artificial Sequence
  Description of Artificial Sequence: Synthetic oligonucleotide
acauucaguccauuaagga

SEQ ID NO: 2891549 - RNA, 19 nt, Artificial Sequence
  Description of Artificial Sequence: Synthetic oligonucleotide
uauacaugggcuacauauc

SEQ ID NO: 2891550 - RNA, 19 nt, Artificial Sequence
  Description of Artificial Sequence: Synthetic oligonucleotide
acaguaaguucuuguaaug

SEQ ID NO: 2891551 - RNA, 19 nt, Artificial Sequence
  Description of Artificial Sequence: Synthetic oligonucleotide
cuucaagcauugcuuauag

SEQ ID NO: 2891552 - RNA, 19 nt, Artificial Sequence
  Description of Artificial Sequence: Synthetic oligonucleotide
acacacguguauuucccac

SEQ ID NO: 2891553 - RNA, 19 nt, Artificial Sequence
  Description of Artificial Sequence: Synthetic oligonucleotide
guacuuguaggguuagaag

SEQ ID NO: 2891554 - RNA, 19 nt, Artificial Sequence
  Description of Artificial Sequence: Synthetic oligonucleotide
ucccaaaucaucagagggu

SEQ ID NO: 2891555 - RNA, 19 nt, Artificial Sequence
  Description of Artificial Sequence: Synthetic oligonucleotide
auuguauagcuaccuggag

SEQ ID NO: 2891556 - RNA, 19 nt, Artificial Sequence
  Description of Artificial Sequence: Synthetic oligonucleotide
ucuuguaaugugcacugau

SEQ ID NO: 2891557 - RNA, 19 nt, Artificial Sequence
  Description of Artificial Sequence: Synthetic oligonucleotide
aaguauauucugccacaug

SEQ ID NO: 2891558 - RNA, 19 nt, Artificial Sequence
  Description of Artificial Sequence: Synthetic oligonucleotide
uaccugguggauuguauag

SEQ ID NO: 2891559 - RNA, 19 nt, Artificial Sequence
  Description of Artificial Sequence: Synthetic oligonucleotide
auuuacugaaagaauagaa

SEQ ID NO: 2891560 - RNA, 19 nt, Artificial Sequence
  Description of Artificial Sequence: Synthetic oligonucleotide
uguaggguuagaaguacau

SEQ ID NO: 2891561 - RNA, 19 nt, Artificial Sequence
  Description of Artificial Sequence: Synthetic oligonucleotide
agaauagaaaagaacagua

SEQ ID NO: 2891562 - RNA, 19 nt, Artificial Sequence
  Description of Artificial Sequence: Synthetic oligonucleotide
uucacauauacaugggcua

SEQ ID NO: 2891563 - RNA, 19 nt, Artificial Sequence
  Description of Artificial Sequence: Synthetic oligonucleotide
aacccugucuuguauguau

SEQ ID NO: 2891564 - RNA, 19 nt, Artificial Sequence
  Description of Artificial Sequence: Synthetic oligonucleotide
uaucagcuggcccugauuu

SEQ ID NO: 2891565 - RNA, 19 nt, Artificial Sequence
  Description of Artificial Sequence: Synthetic oligonucleotide
auucacauauacaugggcu

SEQ ID NO: 2891566 - RNA, 19 nt, Artificial Sequence
  Description of Artificial Sequence: Synthetic oligonucleotide
cugauuuacugaaagaaua

SEQ ID NO: 2891567 - RNA, 19 nt, Artificial Sequence
  Description of Artificial Sequence: Synthetic oligonucleotide
uaccuggaguacuuguagg

SEQ ID NO: 2891568 - RNA, 19 nt, Artificial Sequence
  Description of Artificial Sequence: Synthetic oligonucleotide
ugcagcaucuucaagcauu

SEQ ID NO: 2891569 - RNA, 19 nt, Artificial Sequence
  Description of Artificial Sequence: Synthetic oligonucleotide
gagcuauuuacgccgauuc

SEQ ID NO: 2891570 - RNA, 19 nt, Artificial Sequence
  Description of Artificial Sequence: Synthetic oligonucleotide
aguacaucauguuggacua

SEQ ID NO: 2891571 - RNA, 19 nt, Artificial Sequence
  Description of Artificial Sequence: Synthetic oligonucleotide
agaacaguaaguucuugua

SEQ ID NO: 2891572 - RNA, 19 nt, Artificial Sequence
  Description of Artificial Sequence: Synthetic oligonucleotide
gauuguauagcuaccugga

SEQ ID NO: 2891573 - RNA, 19 nt, Artificial Sequence
  Description of Artificial Sequence: Synthetic oligonucleotide
cuucccaaaucaucagagg

SEQ ID NO: 2891574 - RNA, 19 nt, Artificial Sequence
  Description of Artificial Sequence: Synthetic oligonucleotide
uacaugggcuacauaucag

SEQ ID NO: 2891575 - RNA, 19 nt, Artificial Sequence
  Description of Artificial Sequence: Synthetic oligonucleotide
aguucuuguaaugugcacu

SEQ ID NO: 2891576 - RNA, 19 nt, Artificial Sequence
  Description of Artificial Sequence: Synthetic oligonucleotide
ggacuaugaauacauuucc

SEQ ID NO: 2891577 - RNA, 19 nt, Artificial Sequence
  Description of Artificial Sequence: Synthetic oligonucleotide
agaaguacaucauguugga

SEQ ID NO: 2891578 - RNA, 19 nt, Artificial Sequence
  Description of Artificial Sequence: Synthetic oligonucleotide
aucagagggucauuugcag

SEQ ID NO: 2891579 - RNA, 19 nt, Artificial Sequence
  Description of Artificial Sequence: Synthetic oligonucleotide
auuuacgccgauucugacu

SEQ ID NO: 2891580 - RNA, 19 nt, Artificial Sequence
  Description of Artificial Sequence: Synthetic oligonucleotide
gagaccaugggguuuaucu

SEQ ID NO: 2891581 - RNA, 19 nt, Artificial Sequence
  Description of Artificial Sequence: Synthetic oligonucleotide
gacuccucuucccaaauca

SEQ ID NO: 2891582 - RNA, 19 nt, Artificial Sequence
  Description of Artificial Sequence: Synthetic oligonucleotide
aacggaggaacccugucuu

SEQ ID NO: 2891583 - RNA, 19 nt, Artificial Sequence
  Description of Artificial Sequence: Synthetic oligonucleotide
uugcaauucuguguaagga

SEQ ID NO: 2891584 - RNA, 19 nt, Artificial Sequence
  Description of Artificial Sequence: Synthetic oligonucleotide
cauguuggacuaugaauac

SEQ ID NO: 2891585 - RNA, 19 nt, Artificial Sequence
  Description of Artificial Sequence: Synthetic oligonucleotide
gauuuacugaaagaauaga

SEQ ID NO: 2891586 - RNA, 19 nt, Artificial Sequence
  Description of Artificial Sequence: Synthetic oligonucleotide
ugcuguucaacggaggaac

SEQ ID NO: 2891587 - RNA, 19 nt, Artificial Sequence
  Description of Artificial Sequence: Synthetic oligonucleotide
ucagagggucauuugcagc

SEQ ID NO: 2891588 - RNA, 19 nt, Artificial Sequence
  Description of Artificial Sequence: Synthetic oligonucleotide
auauucugccacaugaacu

SEQ ID NO: 2891589 - RNA, 19 nt, Artificial Sequence
  Description of Artificial Sequence: Synthetic oligonucleotide
caauucuguguaaggagac

SEQ ID NO: 2891590 - RNA, 19 nt, Artificial Sequence
  Description of Artificial Sequence: Synthetic oligonucleotide
gaauagaaaagaacaguaa

SEQ ID NO: 2891591 - RNA, 19 nt, Artificial Sequence
  Description of Artificial Sequence: Synthetic oligonucleotide
gaacaguaaguucuuguaa

SEQ ID NO: 2891592 - RNA, 19 nt, Artificial Sequence
  Description of Artificial Sequence: Synthetic oligonucleotide
gccacaugaacuccaaggg

SEQ ID NO: 2891593 - RNA, 19 nt, Artificial Sequence
  Description of Artificial Sequence: Synthetic oligonucleotide
cacacacacguguauuucc

SEQ ID NO: 2891594 - RNA, 19 nt, Artificial Sequence
  Description of Artificial Sequence: Synthetic oligonucleotide
caugggguuuaucuuauuc

SEQ ID NO: 2891595 - RNA, 19 nt, Artificial Sequence
  Description of Artificial Sequence: Synthetic oligonucleotide
cuaccuggaguacuuguag

SEQ ID NO: 2891596 - RNA, 19 nt, Artificial Sequence
  Description of Artificial Sequence: Synthetic oligonucleotide
acacacacguguauuuccc

SEQ ID NO: 2891597 - RNA, 19 nt, Artificial Sequence
  Description of Artificial Sequence: Synthetic oligonucleotide
auucuguguaaggagacca

SEQ ID NO: 2891598 - RNA, 19 nt, Artificial Sequence
  Description of Artificial Sequence: Synthetic oligonucleotide
aaaguauauucugccacau

SEQ ID NO: 2891599 - RNA, 19 nt, Artificial Sequence
  Description of Artificial Sequence: Synthetic oligonucleotide
uacaucauguuggacuaug

SEQ ID NO: 2891600 - RNA, 19 nt, Artificial Sequence
  Description of Artificial Sequence: Synthetic oligonucleotide
guuuaucuuauuccauuca

SEQ ID NO: 2891601 - RNA, 19 nt, Artificial Sequence
  Description of Artificial Sequence: Synthetic oligonucleotide
auucaguccauuaaggaua

SEQ ID NO: 2891602 - RNA, 19 nt, Artificial Sequence
  Description of Artificial Sequence: Synthetic oligonucleotide
uauuucccacauucagucc

SEQ ID NO: 2891603 - RNA, 19 nt, Artificial Sequence
  Description of Artificial Sequence: Synthetic oligonucleotide
aguacuuguaggguuagaa

SEQ ID NO: 2891604 - RNA, 19 nt, Artificial Sequence
  Description of Artificial Sequence: Synthetic oligonucleotide
uauagcuaccuggaguacu

SEQ ID NO: 2891605 - RNA, 19 nt, Artificial Sequence
  Description of Artificial Sequence: Synthetic oligonucleotide
ucuguguaaggagaccaug

SEQ ID NO: 2891606 - RNA, 19 nt, Artificial Sequence
  Description of Artificial Sequence: Synthetic oligonucleotide
ucacauauacaugggcuac

SEQ ID NO: 2891607 - RNA, 19 nt, Artificial Sequence
  Description of Artificial Sequence: Synthetic oligonucleotide
uguucaacggaggaacccu

SEQ ID NO: 2891608 - RNA, 19 nt, Artificial Sequence
  Description of Artificial Sequence: Synthetic oligonucleotide
cuauuuacgccgauucuga

SEQ ID NO: 2891609 - RNA, 19 nt, Artificial Sequence
  Description of Artificial Sequence: Synthetic oligonucleotide
acauuuccuagguaaguau

SEQ ID NO: 2891610 - RNA, 19 nt, Artificial Sequence
  Description of Artificial Sequence: Synthetic oligonucleotide
ucauuugcagcaucuucaa

SEQ ID NO: 2891611 - RNA, 19 nt, Artificial Sequence
  Description of Artificial Sequence: Synthetic oligonucleotide
aaucaucagagggucauuu

SEQ ID NO: 2891612 - RNA, 19 nt, Artificial Sequence
  Description of Artificial Sequence: Synthetic oligonucleotide
gucauuugcagcaucuuca

SEQ ID NO: 2891613 - RNA, 19 nt, Artificial Sequence
  Description of Artificial Sequence: Synthetic oligonucleotide
accugguggauuguauagc

SEQ ID NO: 2891614 - RNA, 19 nt, Artificial Sequence
  Description of Artificial Sequence: Synthetic oligonucleotide
uuguaggguuagaaguaca

SEQ ID NO: 2891615 - RNA, 19 nt, Artificial Sequence
  Description of Artificial Sequence: Synthetic oligonucleotide
augggcuacauaucagcug

SEQ ID NO: 2891616 - RNA, 19 nt, Artificial Sequence
  Description of Artificial Sequence: Synthetic oligonucleotide
aguauuuaguuuugcuguu

SEQ ID NO: 2891617 - RNA, 19 nt, Artificial Sequence
  Description of Artificial Sequence: Synthetic oligonucleotide
gucaauugcaauucugugu

SEQ ID NO: 2891618 - RNA, 19 nt, Artificial Sequence
  Description of Artificial Sequence: Synthetic oligonucleotide
guaaguauuuaguuuugcu

SEQ ID NO: 2891619 - RNA, 19 nt, Artificial Sequence
  Description of Artificial Sequence: Synthetic oligonucleotide
aucaucagagggucauuug

SEQ ID NO: 2891620 - RNA, 19 nt, Artificial Sequence
  Description of Artificial Sequence: Synthetic oligonucleotide
auucugccacaugaacucc

SEQ ID NO: 2891621 - RNA, 19 nt, Artificial Sequence
  Description of Artificial Sequence: Synthetic oligonucleotide
uaaugugcacugauucuua

SEQ ID NO: 2891622 - RNA, 19 nt, Artificial Sequence
  Description of Artificial Sequence: Synthetic oligonucleotide
uacauuuccuagguaagua

SEQ ID NO: 2891623 - RNA, 19 nt, Artificial Sequence
  Description of Artificial Sequence: Synthetic oligonucleotide
ugaggcuggcccuugguau

SEQ ID NO: 2891624 - RNA, 19 nt, Artificial Sequence
  Description of Artificial Sequence: Synthetic oligonucleotide
uggaguacuuguaggguua

SEQ ID NO: 2891625 - RNA, 19 nt, Artificial Sequence
  Description of Artificial Sequence: Synthetic oligonucleotide
ugaauacauuuccuaggua

SEQ ID NO: 2891626 - RNA, 19 nt, Artificial Sequence
  Description of Artificial Sequence: Synthetic oligonucleotide
caagcauugcuuauagaaa

SEQ ID NO: 2891627 - RNA, 19 nt, Artificial Sequence
  Description of Artificial Sequence: Synthetic oligonucleotide
guuuugcuguucaacggag

SEQ ID NO: 2891628 - RNA, 19 nt, Artificial Sequence
  Description of Artificial Sequence: Synthetic oligonucleotide
cuuguaggguuagaaguac

SEQ ID NO: 2891629 - RNA, 19 nt, Artificial Sequence
  Description of Artificial Sequence: Synthetic oligonucleotide
cagagggucauuugcagca

SEQ ID NO: 2891630 - RNA, 19 nt, Artificial Sequence
  Description of Artificial Sequence: Synthetic oligonucleotide
uccaagggcucugaggcug

SEQ ID NO: 2891631 - RNA, 19 nt, Artificial Sequence
  Description of Artificial Sequence: Synthetic oligonucleotide
uuaccugguggauuguaua

SEQ ID NO: 2891632 - RNA, 19 nt, Artificial Sequence
  Description of Artificial Sequence: Synthetic oligonucleotide
aggaacccugucuuguaug

SEQ ID NO: 2891633 - RNA, 19 nt, Artificial Sequence
  Description of Artificial Sequence: Synthetic oligonucleotide
gguuuaucuuauuccauuc

SEQ ID NO: 2891634 - RNA, 19 nt, Artificial Sequence
  Description of Artificial Sequence: Synthetic oligonucleotide
uauuuacgccgauucugac

SEQ ID NO: 2891635 - RNA, 19 nt, Artificial Sequence
  Description of Artificial Sequence: Synthetic oligonucleotide
cuacauaucagcuggcccu

SEQ ID NO: 2891636 - RNA, 19 nt, Artificial Sequence
  Description of Artificial Sequence: Synthetic oligonucleotide
agcuauuuacgccgauucu

SEQ ID NO: 2891637 - RNA, 19 nt, Artificial Sequence
  Description of Artificial Sequence: Synthetic oligonucleotide
auacauuuccuagguaagu

SEQ ID NO: 2891638 - RNA, 19 nt, Artificial Sequence
  Description of Artificial Sequence: Synthetic oligonucleotide
gcuauuuacgccgauucug

SEQ ID NO: 2891639 - RNA, 19 nt, Artificial Sequence
  Description of Artificial Sequence: Synthetic oligonucleotide
acacacacacguguauuuc

SEQ ID NO: 2891640 - RNA, 19 nt, Artificial Sequence
  Description of Artificial Sequence: Synthetic oligonucleotide
uucaacggaggaacccugu

SEQ ID NO: 2891641 - RNA, 19 nt, Artificial Sequence
  Description of Artificial Sequence: Synthetic oligonucleotide
cacaugaacuccaagggcu

SEQ ID NO: 2891642 - RNA, 19 nt, Artificial Sequence
  Description of Artificial Sequence: Synthetic oligonucleotide
gucuuguauguauguacac

SEQ ID NO: 2891643 - RNA, 19 nt, Artificial Sequence
  Description of Artificial Sequence: Synthetic oligonucleotide
uucaagcauugcuuauaga

SEQ ID NO: 2891644 - RNA, 19 nt, Artificial Sequence
  Description of Artificial Sequence: Synthetic oligonucleotide
ucugacuccucuucccaaa

SEQ ID NO: 2891645 - RNA, 19 nt, Artificial Sequence
  Description of Artificial Sequence: Synthetic oligonucleotide
gcuacauaucagcuggccc

SEQ ID NO: 2891646 - RNA, 19 nt, Artificial Sequence
  Description of Artificial Sequence: Synthetic oligonucleotide
auuuaguuuugcuguucaa

SEQ ID NO: 2891647 - RNA, 19 nt, Artificial Sequence
  Description of Artificial Sequence: Synthetic oligonucleotide
caucagagggucauuugca

SEQ ID NO: 2891648 - RNA, 19 nt, Artificial Sequence
  Description of Artificial Sequence: Synthetic oligonucleotide
ucaacggaggaacccuguc

SEQ ID NO: 2891649 - RNA, 19 nt, Artificial Sequence
  Description of Artificial Sequence: Synthetic oligonucleotide
uucuguguaaggagaccau

SEQ ID NO: 2891650 - RNA, 19 nt, Artificial Sequence
  Description of Artificial Sequence: Synthetic oligonucleotide
aagggcucugaggcuggcc

SEQ ID NO: 2891651 - RNA, 19 nt, Artificial Sequence
  Description of Artificial Sequence: Synthetic oligonucleotide
uuuccuagguaaguauuua

SEQ ID NO: 2891652 - RNA, 19 nt, Artificial Sequence
  Description of Artificial Sequence: Synthetic oligonucleotide
cugauucuuaccuggugga

SEQ ID NO: 2891653 - RNA, 19 nt, Artificial Sequence
  Description of Artificial Sequence: Synthetic oligonucleotide
acaugaacuccaagggcuc

SEQ ID NO: 2891654 - RNA, 19 nt, Artificial Sequence
  Description of Artificial Sequence: Synthetic oligonucleotide
gaccaugggguuuaucuua

SEQ ID NO: 2891655 - RNA, 19 nt, Artificial Sequence
  Description of Artificial Sequence: Synthetic oligonucleotide
acacguguauuucccacau

SEQ ID NO: 2891656 - RNA, 19 nt, Artificial Sequence
  Description of Artificial Sequence: Synthetic oligonucleotide
agcuaccuggaguacuugu

SEQ ID NO: 2891657 - RNA, 19 nt, Artificial Sequence
  Description of Artificial Sequence: Synthetic oligonucleotide
aucuuauuccauucacaua

SEQ ID NO: 2891658 - RNA, 19 nt, Artificial Sequence
  Description of Artificial Sequence: Synthetic oligonucleotide
ggcccugauuuacugaaag

SEQ ID NO: 2891659 - RNA, 19 nt, Artificial Sequence
  Description of Artificial Sequence: Synthetic oligonucleotide
cuguucaacggaggaaccc

SEQ ID NO: 2891660 - RNA, 19 nt, Artificial Sequence
  Description of Artificial Sequence: Synthetic oligonucleotide
cauuugcagcaucuucaag

SEQ ID NO: 2891661 - RNA, 19 nt, Artificial Sequence
  Description of Artificial Sequence: Synthetic oligonucleotide
gguaaguauuuaguuuugc

SEQ ID NO: 2891662 - RNA, 19 nt, Artificial Sequence
  Description of Artificial Sequence: Synthetic oligonucleotide
ccacauucaguccauuaag

SEQ ID NO: 2891663 - RNA, 19 nt, Artificial Sequence
  Description of Artificial Sequence: Synthetic oligonucleotide
ggguuagaaguacaucaug

SEQ ID NO: 2891664 - RNA, 19 nt, Artificial Sequence
  Description of Artificial Sequence: Synthetic oligonucleotide
aucuucaagcauugcuuau

SEQ ID NO: 2891665 - RNA, 19 nt, Artificial Sequence
  Description of Artificial Sequence: Synthetic oligonucleotide
cauucaguccauuaaggau

SEQ ID NO: 2891666 - RNA, 19 nt, Artificial Sequence
  Description of Artificial Sequence: Synthetic oligonucleotide
cuagguaaguauuuaguuu

SEQ ID NO: 2891667 - RNA, 19 nt, Artificial Sequence
  Description of Artificial Sequence: Synthetic oligonucleotide
cacugauucuuaccuggug

SEQ ID NO: 2891668 - RNA, 19 nt, Artificial Sequence
  Description of Artificial Sequence: Synthetic oligonucleotide
auuuccuagguaaguauuu

SEQ ID NO: 2891669 - RNA, 19 nt, Artificial Sequence
  Description of Artificial Sequence: Synthetic oligonucleotide
ccauucacauauacauggg

SEQ ID NO: 2891670 - RNA, 19 nt, Artificial Sequence
  Description of Artificial Sequence: Synthetic oligonucleotide
aaggagaccaugggguuua

SEQ ID NO: 2891671 - RNA, 19 nt, Artificial Sequence
  Description of Artificial Sequence: Synthetic oligonucleotide
acacacacacacacacacg

SEQ ID NO: 2891672 - RNA, 19 nt, Artificial Sequence
  Description of Artificial Sequence: Synthetic oligonucleotide
agaccaugggguuuaucuu

SEQ ID NO: 2891673 - RNA, 19 nt, Artificial Sequence
  Description of Artificial Sequence: Synthetic oligonucleotide
ggucauuugcagcaucuuc

SEQ ID NO: 2891674 - RNA, 19 nt, Artificial Sequence
  Description of Artificial Sequence: Synthetic oligonucleotide
gaacuccaagggcucugag

SEQ ID NO: 2891675 - RNA, 19 nt, Artificial Sequence
  Description of Artificial Sequence: Synthetic oligonucleotide
acuuguaggguuagaagua

SEQ ID NO: 2891676 - RNA, 19 nt, Artificial Sequence
  Description of Artificial Sequence: Synthetic oligonucleotide
uucugacuccucuucccaa

SEQ ID NO: 2891677 - RNA, 19 nt, Artificial Sequence
  Description of Artificial Sequence: Synthetic oligonucleotide
guauuuaguuuugcuguuc

SEQ ID NO: 2891678 - RNA, 19 nt, Artificial Sequence
  Description of Artificial Sequence: Synthetic oligonucleotide
ugacuccucuucccaaauc

SEQ ID NO: 2891679 - RNA, 19 nt, Artificial Sequence
  Description of Artificial Sequence: Synthetic oligonucleotide
cacacacacacacacacgu

SEQ ID NO: 2891680 - RNA, 19 nt, Artificial Sequence
  Description of Artificial Sequence: Synthetic oligonucleotide
agcuggcccugauuuacug

SEQ ID NO: 2891681 - RNA, 19 nt, Artificial Sequence
  Description of Artificial Sequence: Synthetic oligonucleotide
ugaacuccaagggcucuga

SEQ ID NO: 2891682 - RNA, 19 nt, Artificial Sequence
  Description of Artificial Sequence: Synthetic oligonucleotide
ucccacauucaguccauua

SEQ ID NO: 2891683 - RNA, 19 nt, Artificial Sequence
  Description of Artificial Sequence: Synthetic oligonucleotide
caucuucaagcauugcuua

SEQ ID NO: 2891684 - RNA, 19 nt, Artificial Sequence
  Description of Artificial Sequence: Synthetic oligonucleotide
guaggguuagaaguacauc

SEQ ID NO: 2891685 - RNA, 19 nt, Artificial Sequence
  Description of Artificial Sequence: Synthetic oligonucleotide
agguaaguauuuaguuuug

SEQ ID NO: 2891686 - RNA, 19 nt, Artificial Sequence
  Description of Artificial Sequence: Synthetic oligonucleotide
guuagaaguacaucauguu

SEQ ID NO: 2891687 - RNA, 19 nt, Artificial Sequence
  Description of Artificial Sequence: Synthetic oligonucleotide
auguuggacuaugaauaca

SEQ ID NO: 2891688 - RNA, 19 nt, Artificial Sequence
  Description of Artificial Sequence: Synthetic oligonucleotide
guauguacacacacacaca

SEQ ID NO: 2891689 - RNA, 19 nt, Artificial Sequence
  Description of Artificial Sequence: Synthetic oligonucleotide
gguuagaaguacaucaugu

SEQ ID NO: 2891690 - RNA, 19 nt, Artificial Sequence
  Description of Artificial Sequence: Synthetic oligonucleotide
caucauguuggacuaugaa

SEQ ID NO: 2891691 - RNA, 19 nt, Artificial Sequence
  Description of Artificial Sequence: Synthetic oligonucleotide
uucuuguaaugugcacuga

SEQ ID NO: 2891692 - RNA, 19 nt, Artificial Sequence
  Description of Artificial Sequence: Synthetic oligonucleotide
gugcacugauucuuaccug

SEQ ID NO: 2891693 - RNA, 19 nt, Artificial Sequence
  Description of Artificial Sequence: Synthetic oligonucleotide
ccacaugaacuccaagggc

SEQ ID NO: 2891694 - RNA, 19 nt, Artificial Sequence
  Description of Artificial Sequence: Synthetic oligonucleotide
ugauucuuaccugguggau

SEQ ID NO: 2891695 - RNA, 19 nt, Artificial Sequence
  Description of Artificial Sequence: Synthetic oligonucleotide
gcaauucuguguaaggaga

SEQ ID NO: 2891696 - RNA, 19 nt, Artificial Sequence
  Description of Artificial Sequence: Synthetic oligonucleotide
gacuaugaauacauuuccu

SEQ ID NO: 2891697 - RNA, 19 nt, Artificial Sequence
  Description of Artificial Sequence: Synthetic oligonucleotide
guauauucugccacaugaa

SEQ ID NO: 2891698 - RNA, 19 nt, Artificial Sequence
  Description of Artificial Sequence: Synthetic oligonucleotide
cacacguguauuucccaca

SEQ ID NO: 2891699 - RNA, 19 nt, Artificial Sequence
  Description of Artificial Sequence: Synthetic oligonucleotide
cuggcccugauuuacugaa

SEQ ID NO: 2891700 - RNA, 19 nt, Artificial Sequence
  Description of Artificial Sequence: Synthetic oligonucleotide
gaggcuggcccuugguauc

SEQ ID NO: 2891701 - RNA, 19 nt, Artificial Sequence
  Description of Artificial Sequence: Synthetic oligonucleotide
aaaucaucagagggucauu

SEQ ID NO: 2891702 - RNA, 19 nt, Artificial Sequence
  Description of Artificial Sequence: Synthetic oligonucleotide
uugcuguucaacggaggaa

SEQ ID NO: 2891703 - RNA, 19 nt, Artificial Sequence
  Description of Artificial Sequence: Synthetic oligonucleotide
cacacacacacacacgugu

SEQ ID NO: 2891704 - RNA, 19 nt, Artificial Sequence
  Description of Artificial Sequence: Synthetic oligonucleotide
aggguuagaaguacaucau

SEQ ID NO: 2891705 - RNA, 19 nt, Artificial Sequence
  Description of Artificial Sequence: Synthetic oligonucleotide
uacgccgauucugacuccu

SEQ ID NO: 2891706 - RNA, 19 nt, Artificial Sequence
  Description of Artificial Sequence: Synthetic oligonucleotide
augaacuccaagggcucug

SEQ ID NO: 2891707 - RNA, 19 nt, Artificial Sequence
  Description of Artificial Sequence: Synthetic oligonucleotide
guucaacggaggaacccug

SEQ ID NO: 2891708 - RNA, 19 nt, Artificial Sequence
  Description of Artificial Sequence: Synthetic oligonucleotide
acggaggaacccugucuug

SEQ ID NO: 2891709 - RNA, 19 nt, Artificial Sequence
  Description of Artificial Sequence: Synthetic oligonucleotide
uaaggagaccaugggguuu

SEQ ID NO: 2891710 - RNA, 19 nt, Artificial Sequence
  Description of Artificial Sequence: Synthetic oligonucleotide
gguggauuguauagcuacc

SEQ ID NO: 2891711 - RNA, 19 nt, Artificial Sequence
  Description of Artificial Sequence: Synthetic oligonucleotide
ucuuaccugguggauugua

SEQ ID NO: 2891712 - RNA, 19 nt, Artificial Sequence
  Description of Artificial Sequence: Synthetic oligonucleotide
acaucauguuggacuauga

SEQ ID NO: 2891713 - RNA, 19 nt, Artificial Sequence
  Description of Artificial Sequence: Synthetic oligonucleotide
auagcuaccuggaguacuu

SEQ ID NO: 2891714 - RNA, 19 nt, Artificial Sequence
  Description of Artificial Sequence: Synthetic oligonucleotide
caugggcuacauaucagcu

SEQ ID NO: 2891715 - RNA, 19 nt, Artificial Sequence
  Description of Artificial Sequence: Synthetic oligonucleotide
guaaugugcacugauucuu

SEQ ID NO: 2891716 - RNA, 19 nt, Artificial Sequence
  Description of Artificial Sequence: Synthetic oligonucleotide
uugcagcaucuucaagcau

SEQ ID NO: 2891717 - RNA, 19 nt, Artificial Sequence
  Description of Artificial Sequence: Synthetic oligonucleotide
uuacgccgauucugacucc

SEQ ID NO: 2891718 - RNA, 19 nt, Artificial Sequence
  Description of Artificial Sequence: Synthetic oligonucleotide
auguacacacacacacaca

SEQ ID NO: 2891719 - RNA, 19 nt, Artificial Sequence
  Description of Artificial Sequence: Synthetic oligonucleotide
acacacacacacguguauu

SEQ ID NO: 2891720 - RNA, 19 nt, Artificial Sequence
  Description of Artificial Sequence: Synthetic oligonucleotide
cauuuccuagguaaguauu

SEQ ID NO: 2891721 - RNA, 19 nt, Artificial Sequence
  Description of Artificial Sequence: Synthetic oligonucleotide
cuuauuccauucacauaua

SEQ ID NO: 2891722 - RNA, 19 nt, Artificial Sequence
  Description of Artificial Sequence: Synthetic oligonucleotide
cccaaaucaucagaggguc

SEQ ID NO: 2891723 - RNA, 19 nt, Artificial Sequence
  Description of Artificial Sequence: Synthetic oligonucleotide
gauucuuaccugguggauu

SEQ ID NO: 2891724 - RNA, 19 nt, Artificial Sequence
  Description of Artificial Sequence: Synthetic oligonucleotide
acacacacacacacacgug

SEQ ID NO: 2891725 - RNA, 19 nt, Artificial Sequence
  Description of Artificial Sequence: Synthetic oligonucleotide
cugccacaugaacuccaag

SEQ ID NO: 2891726 - RNA, 19 nt, Artificial Sequence
  Description of Artificial Sequence: Synthetic oligonucleotide
cacacacguguauuuccca

SEQ ID NO: 2891727 - RNA, 19 nt, Artificial Sequence
  Description of Artificial Sequence: Synthetic oligonucleotide
uggcccugauuuacugaaa

SEQ ID NO: 2891728 - RNA, 19 nt, Artificial Sequence
  Description of Artificial Sequence: Synthetic oligonucleotide
caguaaguucuuguaaugu

SEQ ID NO: 2891729 - RNA, 19 nt, Artificial Sequence
  Description of Artificial Sequence: Synthetic oligonucleotide
guauagcuaccuggaguac

SEQ ID NO: 2891730 - RNA, 19 nt, Artificial Sequence
  Description of Artificial Sequence: Synthetic oligonucleotide
guggauuguauagcuaccu

SEQ ID NO: 2891731 - RNA, 19 nt, Artificial Sequence
  Description of Artificial Sequence: Synthetic oligonucleotide
caaaucaucagagggucau

SEQ ID NO: 2891732 - RNA, 19 nt, Artificial Sequence
  Description of Artificial Sequence: Synthetic oligonucleotide
guacacacacacacacaca

SEQ ID NO: 2891733 - RNA, 19 nt, Artificial Sequence
  Description of Artificial Sequence: Synthetic oligonucleotide
cacauauacaugggcuaca

SEQ ID NO: 2891734 - RNA, 19 nt, Artificial Sequence
  Description of Artificial Sequence: Synthetic oligonucleotide
acacacacacacacacaca

SEQ ID NO: 2891735 - RNA, 19 nt, Artificial Sequence
  Description of Artificial Sequence: Synthetic oligonucleotide
acccugucuuguauguaug

SEQ ID NO: 2891736 - RNA, 19 nt, Artificial Sequence
  Description of Artificial Sequence: Synthetic oligonucleotide
cccugauuuacugaaagaa

SEQ ID NO: 2891737 - RNA, 19 nt, Artificial Sequence
  Description of Artificial Sequence: Synthetic oligonucleotide
aucagcuggcccugauuua

SEQ ID NO: 2891738 - RNA, 19 nt, Artificial Sequence
  Description of Artificial Sequence: Synthetic oligonucleotide
uagcuaccuggaguacuug

SEQ ID NO: 2891739 - RNA, 19 nt, Artificial Sequence
  Description of Artificial Sequence: Synthetic oligonucleotide
ggaguacuuguaggguuag

SEQ ID NO: 2891740 - RNA, 19 nt, Artificial Sequence
  Description of Artificial Sequence: Synthetic oligonucleotide
ccucuucccaaaucaucag

SEQ ID NO: 2891741 - RNA, 19 nt, Artificial Sequence
  Description of Artificial Sequence: Synthetic oligonucleotide
cuuaccugguggauuguau

SEQ ID NO: 2891742 - RNA, 19 nt, Artificial Sequence
  Description of Artificial Sequence: Synthetic oligonucleotide
accaugggguuuaucuuau

SEQ ID NO: 2891743 - RNA, 19 nt, Artificial Sequence
  Description of Artificial Sequence: Synthetic oligonucleotide
guaaggagaccaugggguu

SEQ ID NO: 2891744 - RNA, 19 nt, Artificial Sequence
  Description of Artificial Sequence: Synthetic oligonucleotide
acuccucuucccaaaucau

SEQ ID NO: 2891745 - RNA, 19 nt, Artificial Sequence
  Description of Artificial Sequence: Synthetic oligonucleotide
ccgauucugacuccucuuc

SEQ ID NO: 2891746 - RNA, 19 nt, Artificial Sequence
  Description of Artificial Sequence: Synthetic oligonucleotide
cgauucugacuccucuucc

SEQ ID NO: 2891747 - RNA, 19 nt, Artificial Sequence
  Description of Artificial Sequence: Synthetic oligonucleotide
caauugcaauucuguguaa

SEQ ID NO: 2891748 - RNA, 19 nt, Artificial Sequence
  Description of Artificial Sequence: Synthetic oligonucleotide
ggaacccugucuuguaugu

SEQ ID NO: 2891749 - RNA, 19 nt, Artificial Sequence
  Description of Artificial Sequence: Synthetic oligonucleotide
gaggaacccugucuuguau

SEQ ID NO: 2891750 - RNA, 19 nt, Artificial Sequence
  Description of Artificial Sequence: Synthetic oligonucleotide
uucuuaccugguggauugu

SEQ ID NO: 2891751 - RNA, 19 nt, Artificial Sequence
  Description of Artificial Sequence: Synthetic oligonucleotide
gcuggcccuugguaucugg

SEQ ID NO: 2891752 - RNA, 19 nt, Artificial Sequence
  Description of Artificial Sequence: Synthetic oligonucleotide
cuggcccuugguaucugga

SEQ ID NO: 2891753 - RNA, 19 nt, Artificial Sequence
  Description of Artificial Sequence: Synthetic oligonucleotide
cauauacaugggcuacaua

SEQ ID NO: 2891754 - RNA, 19 nt, Artificial Sequence
  Description of Artificial Sequence: Synthetic oligonucleotide
cuggaguacuuguaggguu

SEQ ID NO: 2891755 - RNA, 19 nt, Artificial Sequence
  Description of Artificial Sequence: Synthetic oligonucleotide
acacacacacacacgugua

SEQ ID NO: 2891756 - RNA, 19 nt, Artificial Sequence
  Description of Artificial Sequence: Synthetic oligonucleotide
caacggaggaacccugucu

SEQ ID NO: 2891757 - RNA, 19 nt, Artificial Sequence
  Description of Artificial Sequence: Synthetic oligonucleotide
gcuguucaacggaggaacc

SEQ ID NO: 2891758 - RNA, 19 nt, Artificial Sequence
  Description of Artificial Sequence: Synthetic oligonucleotide
cccacauucaguccauuaa

SEQ ID NO: 2891759 - RNA, 19 nt, Artificial Sequence
  Description of Artificial Sequence: Synthetic oligonucleotide
gcccuugguaucuggaaaa

SEQ ID NO: 2891760 - RNA, 19 nt, Artificial Sequence
  Description of Artificial Sequence: Synthetic oligonucleotide
agagggucauuugcagcau

SEQ ID NO: 2891761 - RNA, 19 nt, Artificial Sequence
  Description of Artificial Sequence: Synthetic oligonucleotide
gcccugauuuacugaaaga

SEQ ID NO: 2891762 - RNA, 19 nt, Artificial Sequence
  Description of Artificial Sequence: Synthetic oligonucleotide
gaguacuuguaggguuaga

SEQ ID NO: 2891763 - RNA, 19 nt, Artificial Sequence
  Description of Artificial Sequence: Synthetic oligonucleotide
ccuagguaaguauuuaguu

SEQ ID NO: 2891764 - RNA, 19 nt, Artificial Sequence
  Description of Artificial Sequence: Synthetic oligonucleotide
cugguggauuguauagcua

SEQ ID NO: 2891765 - RNA, 19 nt, Artificial Sequence
  Description of Artificial Sequence: Synthetic oligonucleotide
ggcccuugguaucuggaaa

SEQ ID NO: 2891766 - RNA, 19 nt, Artificial Sequence
  Description of Artificial Sequence: Synthetic oligonucleotide
ccugauuuacugaaagaau

SEQ ID NO: 2891767 - RNA, 19 nt, Artificial Sequence
  Description of Artificial Sequence: Synthetic oligonucleotide
cagcaucuucaagcauugc

SEQ ID NO: 2891768 - RNA, 19 nt, Artificial Sequence
  Description of Artificial Sequence: Synthetic oligonucleotide
ccaagggcucugaggcugg

SEQ ID NO: 2891769 - RNA, 19 nt, Artificial Sequence
  Description of Artificial Sequence: Synthetic oligonucleotide
cugaggcuggcccuuggua

SEQ ID NO: 2891770 - RNA, 19 nt, Artificial Sequence
  Description of Artificial Sequence: Synthetic oligonucleotide
agggagcuauuuacgccga

SEQ ID NO: 2891771 - RNA, 19 nt, Artificial Sequence
  Description of Artificial Sequence: Synthetic oligonucleotide
acauaucagcuggcccuga

SEQ ID NO: 2891772 - RNA, 19 nt, Artificial Sequence
  Description of Artificial Sequence: Synthetic oligonucleotide
gcuggcccugauuuacuga

SEQ ID NO: 2891773 - RNA, 19 nt, Artificial Sequence
  Description of Artificial Sequence: Synthetic oligonucleotide
ccugguggauuguauagcu

SEQ ID NO: 2891774 - RNA, 19 nt, Artificial Sequence
  Description of Artificial Sequence: Synthetic oligonucleotide
acgccgauucugacuccuc

SEQ ID NO: 2891775 - RNA, 19 nt, Artificial Sequence
  Description of Artificial Sequence: Synthetic oligonucleotide
cacacacacacacguguau

SEQ ID NO: 2891776 - RNA, 19 nt, Artificial Sequence
  Description of Artificial Sequence: Synthetic oligonucleotide
ccaaaucaucagaggguca

SEQ ID NO: 2891777 - RNA, 19 nt, Artificial Sequence
  Description of Artificial Sequence: Synthetic oligonucleotide
ggaggaacccugucuugua

SEQ ID NO: 2891778 - RNA, 19 nt, Artificial Sequence
  Description of Artificial Sequence: Synthetic oligonucleotide
caagggcucugaggcuggc

SEQ ID NO: 2891779 - RNA, 19 nt, Artificial Sequence
  Description of Artificial Sequence: Synthetic oligonucleotide
gcuaccuggaguacuugua

SEQ ID NO: 2891780 - RNA, 19 nt, Artificial Sequence
  Description of Artificial Sequence: Synthetic oligonucleotide
guuggacuaugaauacauu

SEQ ID NO: 2891781 - RNA, 19 nt, Artificial Sequence
  Description of Artificial Sequence: Synthetic oligonucleotide
cauaucagcuggcccugau

SEQ ID NO: 2891782 - RNA, 19 nt, Artificial Sequence
  Description of Artificial Sequence: Synthetic oligonucleotide
cugacuccucuucccaaau

SEQ ID NO: 2891783 - RNA, 19 nt, Artificial Sequence
  Description of Artificial Sequence: Synthetic oligonucleotide
gggcuacauaucagcuggc

SEQ ID NO: 2891784 - RNA, 19 nt, Artificial Sequence
  Description of Artificial Sequence: Synthetic oligonucleotide
cuccaagggcucugaggcu

SEQ ID NO: 2891785 - RNA, 19 nt, Artificial Sequence
  Description of Artificial Sequence: Synthetic oligonucleotide
ccugucuuguauguaugua

SEQ ID NO: 2891786 - RNA, 19 nt, Artificial Sequence
  Description of Artificial Sequence: Synthetic oligonucleotide
gggguuuaucuuauuccau

SEQ ID NO: 2891787 - RNA, 19 nt, Artificial Sequence
  Description of Artificial Sequence: Synthetic oligonucleotide
ggagcuauuuacgccgauu

SEQ ID NO: 2891788 - RNA, 19 nt, Artificial Sequence
  Description of Artificial Sequence: Synthetic oligonucleotide
ggagaccaugggguuuauc

SEQ ID NO: 2891789 - RNA, 19 nt, Artificial Sequence
  Description of Artificial Sequence: Synthetic oligonucleotide
cagcuggcccugauuuacu

SEQ ID NO: 2891790 - RNA, 19 nt, Artificial Sequence
  Description of Artificial Sequence: Synthetic oligonucleotide
guacaucauguuggacuau

SEQ ID NO: 2891791 - RNA, 19 nt, Artificial Sequence
  Description of Artificial Sequence: Synthetic oligonucleotide
cccugucuuguauguaugu

SEQ ID NO: 2891792 - RNA, 19 nt, Artificial Sequence
  Description of Artificial Sequence: Synthetic oligonucleotide
ccuggaguacuuguagggu

SEQ ID NO: 2891793 - RNA, 19 nt, Artificial Sequence
  Description of Artificial Sequence: Synthetic oligonucleotide
gccgauucugacuccucuu

SEQ ID NO: 2891794 - RNA, 19 nt, Artificial Sequence
  Description of Artificial Sequence: Synthetic oligonucleotide
gcacugauucuuaccuggu

SEQ ID NO: 2891795 - RNA, 19 nt, Artificial Sequence
  Description of Artificial Sequence: Synthetic oligonucleotide
cacguguauuucccacauu

SEQ ID NO: 2891796 - RNA, 19 nt, Artificial Sequence
  Description of Artificial Sequence: Synthetic oligonucleotide
gggcucugaggcuggcccu

SEQ ID NO: 2891797 - RNA, 19 nt, Artificial Sequence
  Description of Artificial Sequence: Synthetic oligonucleotide
ggcuggcccuugguaucug

SEQ ID NO: 2891798 - RNA, 19 nt, Artificial Sequence
  Description of Artificial Sequence: Synthetic oligonucleotide
gggagcuauuuacgccgau

SEQ ID NO: 2891799 - RNA, 19 nt, Artificial Sequence
  Description of Artificial Sequence: Synthetic oligonucleotide
cgccgauucugacuccucu

SEQ ID NO: 2891800 - RNA, 19 nt, Artificial Sequence
  Description of Artificial Sequence: Synthetic oligonucleotide
cggaggaacccugucuugu

SEQ ID NO: 2891801 - RNA, 19 nt, Artificial Sequence
  Description of Artificial Sequence: Synthetic oligonucleotide
ccaugggguuuaucuuauu

SEQ ID NO: 2891802 - RNA, 19 nt, Artificial Sequence
  Description of Artificial Sequence: Synthetic oligonucleotide
aaauuuauucauuucuugc

SEQ ID NO: 2891803 - RNA, 19 nt, Artificial Sequence
  Description of Artificial Sequence: Synthetic oligonucleotide
aauuagauugaucuggugu

SEQ ID NO: 2891804 - RNA, 19 nt, Artificial Sequence
  Description of Artificial Sequence: Synthetic oligonucleotide
uuugccauaguccuuaacc

SEQ ID NO: 2891805 - RNA, 19 nt, Artificial Sequence
  Description of Artificial Sequence: Synthetic oligonucleotide
aauuuauucauuucuugca

SEQ ID NO: 2891806 - RNA, 19 nt, Artificial Sequence
  Description of Artificial Sequence: Synthetic oligonucleotide
uuaaccacuacacaacugc

SEQ ID NO: 2891807 - RNA, 19 nt, Artificial Sequence
  Description of Artificial Sequence: Synthetic oligonucleotide
cuuaauuagauugaucugg

SEQ ID NO: 2891808 - RNA, 19 nt, Artificial Sequence
  Description of Artificial Sequence: Synthetic oligonucleotide
acagagaugggcuuggcgc

SEQ ID NO: 2891809 - RNA, 19 nt, Artificial Sequence
  Description of Artificial Sequence: Synthetic oligonucleotide
accuuaauuagauugaucu

SEQ ID NO: 2891810 - RNA, 19 nt, Artificial Sequence
  Description of Artificial Sequence: Synthetic oligonucleotide
aucaaccuuaauuagauug

SEQ ID NO: 2891811 - RNA, 19 nt, Artificial Sequence
  Description of Artificial Sequence: Synthetic oligonucleotide
auuuauucauuucuugcac

SEQ ID NO: 2891812 - RNA, 19 nt, Artificial Sequence
  Description of Artificial Sequence: Synthetic oligonucleotide
cucucgaucaauuuuacag

SEQ ID NO: 2891813 - RNA, 19 nt, Artificial Sequence
  Description of Artificial Sequence: Synthetic oligonucleotide
uuucuuguugucaucaacc

SEQ ID NO: 2891814 - RNA, 19 nt, Artificial Sequence
  Description of Artificial Sequence: Synthetic oligonucleotide
ugguguucagcacaaaggg

SEQ ID NO: 2891815 - RNA, 19 nt, Artificial Sequence
  Description of Artificial Sequence: Synthetic oligonucleotide
ucuucgaugacauccuugg

SEQ ID NO: 2891816 - RNA, 19 nt, Artificial Sequence
  Description of Artificial Sequence: Synthetic oligonucleotide
uugucuagggcuuuggcgg

SEQ ID NO: 2891817 - RNA, 19 nt, Artificial Sequence
  Description of Artificial Sequence: Synthetic oligonucleotide
gaaucuugaacgcaccggg

SEQ ID NO: 2891818 - RNA, 19 nt, Artificial Sequence
  Description of Artificial Sequence: Synthetic oligonucleotide
uucgaugacauccuuggcc

SEQ ID NO: 2891819 - RNA, 19 nt, Artificial Sequence
  Description of Artificial Sequence: Synthetic oligonucleotide
accacuacacaacugcagc

SEQ ID NO: 2891820 - RNA, 19 nt, Artificial Sequence
  Description of Artificial Sequence: Synthetic oligonucleotide
aauuuuacagaggccuacc

SEQ ID NO: 2891821 - RNA, 19 nt, Artificial Sequence
  Description of Artificial Sequence: Synthetic oligonucleotide
aucacaauuggaugcgagc

SEQ ID NO: 2891822 - RNA, 19 nt, Artificial Sequence
  Description of Artificial Sequence: Synthetic oligonucleotide
uugucaucaaccuuaauua

SEQ ID NO: 2891823 - RNA, 19 nt, Artificial Sequence
  Description of Artificial Sequence: Synthetic oligonucleotide
acugcagccaaccacuuuc

SEQ ID NO: 2891824 - RNA, 19 nt, Artificial Sequence
  Description of Artificial Sequence: Synthetic oligonucleotide
agcacaaagggccuccacc

SEQ ID NO: 2891825 - RNA, 19 nt, Artificial Sequence
  Description of Artificial Sequence: Synthetic oligonucleotide
uugaaguacucuucgauga

SEQ ID NO: 2891826 - RNA, 19 nt, Artificial Sequence
  Description of Artificial Sequence: Synthetic oligonucleotide
aucaauuuuacagaggccu

SEQ ID NO: 2891827 - RNA, 19 nt, Artificial Sequence
  Description of Artificial Sequence: Synthetic oligonucleotide
ucaaccuuaauuagauuga

SEQ ID NO: 2891828 - RNA, 19 nt, Artificial Sequence
  Description of Artificial Sequence: Synthetic oligonucleotide
auuuuacagaggccuaccc

SEQ ID NO: 2891829 - RNA, 19 nt, Artificial Sequence
  Description of Artificial Sequence: Synthetic oligonucleotide
agauucuuugccauagucc

SEQ ID NO: 2891830 - RNA, 19 nt, Artificial Sequence
  Description of Artificial Sequence: Synthetic oligonucleotide
aucuugaacgcaccgggcc

SEQ ID NO: 2891831 - RNA, 19 nt, Artificial Sequence
  Description of Artificial Sequence: Synthetic oligonucleotide
agcaaugccuuccucggcc

SEQ ID NO: 2891832 - RNA, 19 nt, Artificial Sequence
  Description of Artificial Sequence: Synthetic oligonucleotide
ucugguguucagcacaaag

SEQ ID NO: 2891833 - RNA, 19 nt, Artificial Sequence
  Description of Artificial Sequence: Synthetic oligonucleotide
uuaauuagauugaucuggu

SEQ ID NO: 2891834 - RNA, 19 nt, Artificial Sequence
  Description of Artificial Sequence: Synthetic oligonucleotide
cuugucuagggcuuuggcg

SEQ ID NO: 2891835 - RNA, 19 nt, Artificial Sequence
  Description of Artificial Sequence: Synthetic oligonucleotide
auuggaugcgagcacacag

SEQ ID NO: 2891836 - RNA, 19 nt, Artificial Sequence
  Description of Artificial Sequence: Synthetic oligonucleotide
auggcgguggacuacgggc

SEQ ID NO: 2891837 - RNA, 19 nt, Artificial Sequence
  Description of Artificial Sequence: Synthetic oligonucleotide
uucagcaccuccugaagcg

SEQ ID NO: 2891838 - RNA, 19 nt, Artificial Sequence
  Description of Artificial Sequence: Synthetic oligonucleotide
uggacuacgggcgaggccg

SEQ ID NO: 2891839 - RNA, 19 nt, Artificial Sequence
  Description of Artificial Sequence: Synthetic oligonucleotide
ugcgagcacacagagaugg

SEQ ID NO: 2891840 - RNA, 19 nt, Artificial Sequence
  Description of Artificial Sequence: Synthetic oligonucleotide
uaguccuuaaccacuacac

SEQ ID NO: 2891841 - RNA, 19 nt, Artificial Sequence
  Description of Artificial Sequence: Synthetic oligonucleotide
acauacaugggcucaucac

SEQ ID NO: 2891842 - RNA, 19 nt, Artificial Sequence
  Description of Artificial Sequence: Synthetic oligonucleotide
ucauuucuugcacuugaag

SEQ ID NO: 2891843 - RNA, 19 nt, Artificial Sequence
  Description of Artificial Sequence: Synthetic oligonucleotide
cugguguucagcacaaagg

SEQ ID NO: 2891844 - RNA, 19 nt, Artificial Sequence
  Description of Artificial Sequence: Synthetic oligonucleotide
uuuuacagaggccuaccca

SEQ ID NO: 2891845 - RNA, 19 nt, Artificial Sequence
  Description of Artificial Sequence: Synthetic oligonucleotide
ugaucugguguucagcaca

SEQ ID NO: 2891846 - RNA, 19 nt, Artificial Sequence
  Description of Artificial Sequence: Synthetic oligonucleotide
uuuacagaggccuacccau

SEQ ID NO: 2891847 - RNA, 19 nt, Artificial Sequence
  Description of Artificial Sequence: Synthetic oligonucleotide
ucucgaucaauuuuacaga

SEQ ID NO: 2891848 - RNA, 19 nt, Artificial Sequence
  Description of Artificial Sequence: Synthetic oligonucleotide
uuuauucauuucuugcacu

SEQ ID NO: 2891849 - RNA, 19 nt, Artificial Sequence
  Description of Artificial Sequence: Synthetic oligonucleotide
ugucaucaaccuuaauuag

SEQ ID NO: 2891850 - RNA, 19 nt, Artificial Sequence
  Description of Artificial Sequence: Synthetic oligonucleotide
cuugaaguacucuucgaug

SEQ ID NO: 2891851 - RNA, 19 nt, Artificial Sequence
  Description of Artificial Sequence: Synthetic oligonucleotide
cucgaucaauuuuacagag

SEQ ID NO: 2891852 - RNA, 19 nt, Artificial Sequence
  Description of Artificial Sequence: Synthetic oligonucleotide
auuagauugaucugguguu

SEQ ID NO: 2891853 - RNA, 19 nt, Artificial Sequence
  Description of Artificial Sequence: Synthetic oligonucleotide
auuucuugcacuugaagua

SEQ ID NO: 2891854 - RNA, 19 nt, Artificial Sequence
  Description of Artificial Sequence: Synthetic oligonucleotide
ucgaucaauuuuacagagg

SEQ ID NO: 2891855 - RNA, 19 nt, Artificial Sequence
  Description of Artificial Sequence: Synthetic oligonucleotide
uccauuacaccuccagcag

SEQ ID NO: 2891856 - RNA, 19 nt, Artificial Sequence
  Description of Artificial Sequence: Synthetic oligonucleotide
uacaccuccagcagcaaug

SEQ ID NO: 2891857 - RNA, 19 nt, Artificial Sequence
  Description of Artificial Sequence: Synthetic oligonucleotide
guacucuucgaugacaucc

SEQ ID NO: 2891858 - RNA, 19 nt, Artificial Sequence
  Description of Artificial Sequence: Synthetic oligonucleotide
gauucuuugccauaguccu

SEQ ID NO: 2891859 - RNA, 19 nt, Artificial Sequence
  Description of Artificial Sequence: Synthetic oligonucleotide
gaugcgagcacacagagau

SEQ ID NO: 2891860 - RNA, 19 nt, Artificial Sequence
  Description of Artificial Sequence: Synthetic oligonucleotide
auucauuucuugcacuuga

SEQ ID NO: 2891861 - RNA, 19 nt, Artificial Sequence
  Description of Artificial Sequence: Synthetic oligonucleotide
uccuuaaccacuacacaac

SEQ ID NO: 2891862 - RNA, 19 nt, Artificial Sequence
  Description of Artificial Sequence: Synthetic oligonucleotide
ucgaugacauccuuggccu

SEQ ID NO: 2891863 - RNA, 19 nt, Artificial Sequence
  Description of Artificial Sequence: Synthetic oligonucleotide
ucacaauuggaugcgagca

SEQ ID NO: 2891864 - RNA, 19 nt, Artificial Sequence
  Description of Artificial Sequence: Synthetic oligonucleotide
ugaagcgcgguguugacgu

SEQ ID NO: 2891865 - RNA, 19 nt, Artificial Sequence
  Description of Artificial Sequence: Synthetic oligonucleotide
guguucagcacaaagggcc

SEQ ID NO: 2891866 - RNA, 19 nt, Artificial Sequence
  Description of Artificial Sequence: Synthetic oligonucleotide
cuuguugucaucaaccuua

SEQ ID NO: 2891867 - RNA, 19 nt, Artificial Sequence
  Description of Artificial Sequence: Synthetic oligonucleotide
aaucuugaacgcaccgggc

SEQ ID NO: 2891868 - RNA, 19 nt, Artificial Sequence
  Description of Artificial Sequence: Synthetic oligonucleotide
acaaagggccuccaccaac

SEQ ID NO: 2891869 - RNA, 19 nt, Artificial Sequence
  Description of Artificial Sequence: Synthetic oligonucleotide
uggccugagauucuuugcc

SEQ ID NO: 2891870 - RNA, 19 nt, Artificial Sequence
  Description of Artificial Sequence: Synthetic oligonucleotide
uggaugcgagcacacagag

SEQ ID NO: 2891871 - RNA, 19 nt, Artificial Sequence
  Description of Artificial Sequence: Synthetic oligonucleotide
aacuugacauacaugggcu

SEQ ID NO: 2891872 - RNA, 19 nt, Artificial Sequence
  Description of Artificial Sequence: Synthetic oligonucleotide
aacgcaccgggccuccgcc

SEQ ID NO: 2891873 - RNA, 19 nt, Artificial Sequence
  Description of Artificial Sequence: Synthetic oligonucleotide
uacccauuccccuaguuuc

SEQ ID NO: 2891874 - RNA, 19 nt, Artificial Sequence
  Description of Artificial Sequence: Synthetic oligonucleotide
uucuuguugucaucaaccu

SEQ ID NO: 2891875 - RNA, 19 nt, Artificial Sequence
  Description of Artificial Sequence: Synthetic oligonucleotide
uuauucauuucuugcacuu

SEQ ID NO: 2891876 - RNA, 19 nt, Artificial Sequence
  Description of Artificial Sequence: Synthetic oligonucleotide
uacacaacugcagccaacc

SEQ ID NO: 2891877 - RNA, 19 nt, Artificial Sequence
  Description of Artificial Sequence: Synthetic oligonucleotide
acuugaaguacucuucgau

SEQ ID NO: 2891878 - RNA, 19 nt, Artificial Sequence
  Description of Artificial Sequence: Synthetic oligonucleotide
auaguccuuaaccacuaca

SEQ ID NO: 2891879 - RNA, 19 nt, Artificial Sequence
  Description of Artificial Sequence: Synthetic oligonucleotide
aaccuuaauuagauugauc

SEQ ID NO: 2891880 - RNA, 19 nt, Artificial Sequence
  Description of Artificial Sequence: Synthetic oligonucleotide
gagauucuuugccauaguc

SEQ ID NO: 2891881 - RNA, 19 nt, Artificial Sequence
  Description of Artificial Sequence: Synthetic oligonucleotide
acagaggccuacccauucc

SEQ ID NO: 2891882 - RNA, 19 nt, Artificial Sequence
  Description of Artificial Sequence: Synthetic oligonucleotide
caugggcucaucacaauug

SEQ ID NO: 2891883 - RNA, 19 nt, Artificial Sequence
  Description of Artificial Sequence: Synthetic oligonucleotide
augagggcggucuucagca

SEQ ID NO: 2891884 - RNA, 19 nt, Artificial Sequence
  Description of Artificial Sequence: Synthetic oligonucleotide
uaauuagauugaucuggug

SEQ ID NO: 2891885 - RNA, 19 nt, Artificial Sequence
  Description of Artificial Sequence: Synthetic oligonucleotide
guccauuacaccuccagca

SEQ ID NO: 2891886 - RNA, 19 nt, Artificial Sequence
  Description of Artificial Sequence: Synthetic oligonucleotide
uaguuucuuguugucauca

SEQ ID NO: 2891887 - RNA, 19 nt, Artificial Sequence
  Description of Artificial Sequence: Synthetic oligonucleotide
uaaccacuacacaacugca

SEQ ID NO: 2891888 - RNA, 19 nt, Artificial Sequence
  Description of Artificial Sequence: Synthetic oligonucleotide
guugucaucaaccuuaauu

SEQ ID NO: 2891889 - RNA, 19 nt, Artificial Sequence
  Description of Artificial Sequence: Synthetic oligonucleotide
uuucuugcacuugaaguac

SEQ ID NO: 2891890 - RNA, 19 nt, Artificial Sequence
  Description of Artificial Sequence: Synthetic oligonucleotide
uccgccuccgcgcaccucg

SEQ ID NO: 2891891 - RNA, 19 nt, Artificial Sequence
  Description of Artificial Sequence: Synthetic oligonucleotide
gaugagggcggucuucagc

SEQ ID NO: 2891892 - RNA, 19 nt, Artificial Sequence
  Description of Artificial Sequence: Synthetic oligonucleotide
cagccaaccacuuuccgug

SEQ ID NO: 2891893 - RNA, 19 nt, Artificial Sequence
  Description of Artificial Sequence: Synthetic oligonucleotide
ugaaguacucuucgaugac

SEQ ID NO: 2891894 - RNA, 19 nt, Artificial Sequence
  Description of Artificial Sequence: Synthetic oligonucleotide
uuggaugcgagcacacaga

SEQ ID NO: 2891895 - RNA, 19 nt, Artificial Sequence
  Description of Artificial Sequence: Synthetic oligonucleotide
cgaucaauuuuacagaggc

SEQ ID NO: 2891896 - RNA, 19 nt, Artificial Sequence
  Description of Artificial Sequence: Synthetic oligonucleotide
cauacaugggcucaucaca

SEQ ID NO: 2891897 - RNA, 19 nt, Artificial Sequence
  Description of Artificial Sequence: Synthetic oligonucleotide
uuccccuaguuucuuguug

SEQ ID NO: 2891898 - RNA, 19 nt, Artificial Sequence
  Description of Artificial Sequence: Synthetic oligonucleotide
cucaucacaauuggaugcg

SEQ ID NO: 2891899 - RNA, 19 nt, Artificial Sequence
  Description of Artificial Sequence: Synthetic oligonucleotide
cuuggccugagauucuuug

SEQ ID NO: 2891900 - RNA, 19 nt, Artificial Sequence
  Description of Artificial Sequence: Synthetic oligonucleotide
guugacguccauuacaccu

SEQ ID NO: 2891901 - RNA, 19 nt, Artificial Sequence
  Description of Artificial Sequence: Synthetic oligonucleotide
ucaauuuuacagaggccua

SEQ ID NO: 2891902 - RNA, 19 nt, Artificial Sequence
  Description of Artificial Sequence: Synthetic oligonucleotide
aaccacuacacaacugcag

SEQ ID NO: 2891903 - RNA, 19 nt, Artificial Sequence
  Description of Artificial Sequence: Synthetic oligonucleotide
ucuugaacgcaccgggccu

SEQ ID NO: 2891904 - RNA, 19 nt, Artificial Sequence
  Description of Artificial Sequence: Synthetic oligonucleotide
cuuaaccacuacacaacug

SEQ ID NO: 2891905 - RNA, 19 nt, Artificial Sequence
  Description of Artificial Sequence: Synthetic oligonucleotide
aagcgcgguguugacgucc

SEQ ID NO: 2891906 - RNA, 19 nt, Artificial Sequence
  Description of Artificial Sequence: Synthetic oligonucleotide
uacucuucgaugacauccu

SEQ ID NO: 2891907 - RNA, 19 nt, Artificial Sequence
  Description of Artificial Sequence: Synthetic oligonucleotide
cacaacugcagccaaccac

SEQ ID NO: 2891908 - RNA, 19 nt, Artificial Sequence
  Description of Artificial Sequence: Synthetic oligonucleotide
uugacguccauuacaccuc

SEQ ID NO: 2891909 - RNA, 19 nt, Artificial Sequence
  Description of Artificial Sequence: Synthetic oligonucleotide
cugagauucuuugccauag

SEQ ID NO: 2891910 - RNA, 19 nt, Artificial Sequence
  Description of Artificial Sequence: Synthetic oligonucleotide
guuucuuguugucaucaac

SEQ ID NO: 2891911 - RNA, 19 nt, Artificial Sequence
  Description of Artificial Sequence: Synthetic oligonucleotide
cauuucuugcacuugaagu

SEQ ID NO: 2891912 - RNA, 19 nt, Artificial Sequence
  Description of Artificial Sequence: Synthetic oligonucleotide
cauccuuggccugagauuc

SEQ ID NO: 2891913 - RNA, 19 nt, Artificial Sequence
  Description of Artificial Sequence: Synthetic oligonucleotide
caucacaauuggaugcgag

SEQ ID NO: 2891914 - RNA, 19 nt, Artificial Sequence
  Description of Artificial Sequence: Synthetic oligonucleotide
uguucagcacaaagggccu

SEQ ID NO: 2891915 - RNA, 19 nt, Artificial Sequence
  Description of Artificial Sequence: Synthetic oligonucleotide
gcucaucacaauuggaugc

SEQ ID NO: 2891916 - RNA, 19 nt, Artificial Sequence
  Description of Artificial Sequence: Synthetic oligonucleotide
gaucaauuuuacagaggcc

SEQ ID NO: 2891917 - RNA, 19 nt, Artificial Sequence
  Description of Artificial Sequence: Synthetic oligonucleotide
guccuuaaccacuacacaa

SEQ ID NO: 2891918 - RNA, 19 nt, Artificial Sequence
  Description of Artificial Sequence: Synthetic oligonucleotide
uauucauuucuugcacuug

SEQ ID NO: 2891919 - RNA, 19 nt, Artificial Sequence
  Description of Artificial Sequence: Synthetic oligonucleotide
aguccuuaaccacuacaca

SEQ ID NO: 2891920 - RNA, 19 nt, Artificial Sequence
  Description of Artificial Sequence: Synthetic oligonucleotide
acguccauuacaccuccag

SEQ ID NO: 2891921 - RNA, 19 nt, Artificial Sequence
  Description of Artificial Sequence: Synthetic oligonucleotide
uccccuaguuucuuguugu

SEQ ID NO: 2891922 - RNA, 19 nt, Artificial Sequence
  Description of Artificial Sequence: Synthetic oligonucleotide
agauugaucugguguucag

SEQ ID NO: 2891923 - RNA, 19 nt, Artificial Sequence
  Description of Artificial Sequence: Synthetic oligonucleotide
acaacugcagccaaccacu

SEQ ID NO: 2891924 - RNA, 19 nt, Artificial Sequence
  Description of Artificial Sequence: Synthetic oligonucleotide
ugacguccauuacaccucc

SEQ ID NO: 2891925 - RNA, 19 nt, Artificial Sequence
  Description of Artificial Sequence: Synthetic oligonucleotide
uuggccugagauucuuugc

SEQ ID NO: 2891926 - RNA, 19 nt, Artificial Sequence
  Description of Artificial Sequence: Synthetic oligonucleotide
cauuacaccuccagcagca

SEQ ID NO: 2891927 - RNA, 19 nt, Artificial Sequence
  Description of Artificial Sequence: Synthetic oligonucleotide
gaggccgaaucuugaacgc

SEQ ID NO: 2891928 - RNA, 19 nt, Artificial Sequence
  Description of Artificial Sequence: Synthetic oligonucleotide
uucauuucuugcacuugaa

SEQ ID NO: 2891929 - RNA, 19 nt, Artificial Sequence
  Description of Artificial Sequence: Synthetic oligonucleotide
aguacucuucgaugacauc

SEQ ID NO: 2891930 - RNA, 19 nt, Artificial Sequence
  Description of Artificial Sequence: Synthetic oligonucleotide
ugcagccaaccacuuuccg

SEQ ID NO: 2891931 - RNA, 19 nt, Artificial Sequence
  Description of Artificial Sequence: Synthetic oligonucleotide
uugcacuugaaguacucuu

SEQ ID NO: 2891932 - RNA, 19 nt, Artificial Sequence
  Description of Artificial Sequence: Synthetic oligonucleotide
gcacuugaaguacucuucg

SEQ ID NO: 2891933 - RNA, 19 nt, Artificial Sequence
  Description of Artificial Sequence: Synthetic oligonucleotide
acaauuggaugcgagcaca

SEQ ID NO: 2891934 - RNA, 19 nt, Artificial Sequence
  Description of Artificial Sequence: Synthetic oligonucleotide
aaguacucuucgaugacau

SEQ ID NO: 2891935 - RNA, 19 nt, Artificial Sequence
  Description of Artificial Sequence: Synthetic oligonucleotide
ucuugcacuugaaguacuc

SEQ ID NO: 2891936 - RNA, 19 nt, Artificial Sequence
  Description of Artificial Sequence: Synthetic oligonucleotide
ucuuguugucaucaaccuu

SEQ ID NO: 2891937 - RNA, 19 nt, Artificial Sequence
  Description of Artificial Sequence: Synthetic oligonucleotide
uagauugaucugguguuca

SEQ ID NO: 2891938 - RNA, 19 nt, Artificial Sequence
  Description of Artificial Sequence: Synthetic oligonucleotide
cacagagaugggcuuggcg

SEQ ID NO: 2891939 - RNA, 19 nt, Artificial Sequence
  Description of Artificial Sequence: Synthetic oligonucleotide
caauuuuacagaggccuac

SEQ ID NO: 2891940 - RNA, 19 nt, Artificial Sequence
  Description of Artificial Sequence: Synthetic oligonucleotide
uucuuugccauaguccuua

SEQ ID NO: 2891941 - RNA, 19 nt, Artificial Sequence
  Description of Artificial Sequence: Synthetic oligonucleotide
uacagaggccuacccauuc

SEQ ID NO: 2891942 - RNA, 19 nt, Artificial Sequence
  Description of Artificial Sequence: Synthetic oligonucleotide
cucuucgaugacauccuug

SEQ ID NO: 2891943 - RNA, 19 nt, Artificial Sequence
  Description of Artificial Sequence: Synthetic oligonucleotide
uucuugcacuugaaguacu

SEQ ID NO: 2891944 - RNA, 19 nt, Artificial Sequence
  Description of Artificial Sequence: Synthetic oligonucleotide
caggccaucguggaugagg

SEQ ID NO: 2891945 - RNA, 19 nt, Artificial Sequence
  Description of Artificial Sequence: Synthetic oligonucleotide
augggcuuggcgcuugucu

SEQ ID NO: 2891946 - RNA, 19 nt, Artificial Sequence
  Description of Artificial Sequence: Synthetic oligonucleotide
guguugacguccauuacac

SEQ ID NO: 2891947 - RNA, 19 nt, Artificial Sequence
  Description of Artificial Sequence: Synthetic oligonucleotide
aauuggaugcgagcacaca

SEQ ID NO: 2891948 - RNA, 19 nt, Artificial Sequence
  Description of Artificial Sequence: Synthetic oligonucleotide
gcagcaaugccuuccucgg

SEQ ID NO: 2891949 - RNA, 19 nt, Artificial Sequence
  Description of Artificial Sequence: Synthetic oligonucleotide
uccaccaacuugacauaca

SEQ ID NO: 2891950 - RNA, 19 nt, Artificial Sequence
  Description of Artificial Sequence: Synthetic oligonucleotide
uuagauugaucugguguuc

SEQ ID NO: 2891951 - RNA, 19 nt, Artificial Sequence
  Description of Artificial Sequence: Synthetic oligonucleotide
ugagauucuuugccauagu

SEQ ID NO: 2891952 - RNA, 19 nt, Artificial Sequence
  Description of Artificial Sequence: Synthetic oligonucleotide
uguugacguccauuacacc

SEQ ID NO: 2891953 - RNA, 19 nt, Artificial Sequence
  Description of Artificial Sequence: Synthetic oligonucleotide
gaugccgcgcgccaggcca

SEQ ID NO: 2891954 - RNA, 19 nt, Artificial Sequence
  Description of Artificial Sequence: Synthetic oligonucleotide
gucaucaaccuuaauuaga

SEQ ID NO: 2891955 - RNA, 19 nt, Artificial Sequence
  Description of Artificial Sequence: Synthetic oligonucleotide
ccuuccucggccauggcgg

SEQ ID NO: 2891956 - RNA, 19 nt, Artificial Sequence
  Description of Artificial Sequence: Synthetic oligonucleotide
gguguugacguccauuaca

SEQ ID NO: 2891957 - RNA, 19 nt, Artificial Sequence
  Description of Artificial Sequence: Synthetic oligonucleotide
ggcucaucacaauuggaug

SEQ ID NO: 2891958 - RNA, 19 nt, Artificial Sequence
  Description of Artificial Sequence: Synthetic oligonucleotide
uuggcggccucgcggaugc

SEQ ID NO: 2891959 - RNA, 19 nt, Artificial Sequence
  Description of Artificial Sequence: Synthetic oligonucleotide
cacaauuggaugcgagcac

SEQ ID NO: 2891960 - RNA, 19 nt, Artificial Sequence
  Description of Artificial Sequence: Synthetic oligonucleotide
gccaucguggaugagggcg

SEQ ID NO: 2891961 - RNA, 19 nt, Artificial Sequence
  Description of Artificial Sequence: Synthetic oligonucleotide
ugucuagggcuuuggcggc

SEQ ID NO: 2891962 - RNA, 19 nt, Artificial Sequence
  Description of Artificial Sequence: Synthetic oligonucleotide
cuuggcgcuugucuagggc

SEQ ID NO: 2891963 - RNA, 19 nt, Artificial Sequence
  Description of Artificial Sequence: Synthetic oligonucleotide
uccugaagcgcgguguuga

SEQ ID NO: 2891964 - RNA, 19 nt, Artificial Sequence
  Description of Artificial Sequence: Synthetic oligonucleotide
uuguugucaucaaccuuaa

SEQ ID NO: 2891965 - RNA, 19 nt, Artificial Sequence
  Description of Artificial Sequence: Synthetic oligonucleotide
aaugccuuccucggccaug

SEQ ID NO: 2891966 - RNA, 19 nt, Artificial Sequence
  Description of Artificial Sequence: Synthetic oligonucleotide
caauuggaugcgagcacac

SEQ ID NO: 2891967 - RNA, 19 nt, Artificial Sequence
  Description of Artificial Sequence: Synthetic oligonucleotide
cuaguuucuuguugucauc

SEQ ID NO: 2891968 - RNA, 19 nt, Artificial Sequence
  Description of Artificial Sequence: Synthetic oligonucleotide
uggcuuccccucucgauca

SEQ ID NO: 2891969 - RNA, 19 nt, Artificial Sequence
  Description of Artificial Sequence: Synthetic oligonucleotide
uccguggcuuccccucucg

SEQ ID NO: 2891970 - RNA, 19 nt, Artificial Sequence
  Description of Artificial Sequence: Synthetic oligonucleotide
ugggcucaucacaauugga

SEQ ID NO: 2891971 - RNA, 19 nt, Artificial Sequence
  Description of Artificial Sequence: Synthetic oligonucleotide
uccucggccauggcggugg

SEQ ID NO: 2891972 - RNA, 19 nt, Artificial Sequence
  Description of Artificial Sequence: Synthetic oligonucleotide
agaggccuacccauucccc

SEQ ID NO: 2891973 - RNA, 19 nt, Artificial Sequence
  Description of Artificial Sequence: Synthetic oligonucleotide
acuacacaacugcagccaa

SEQ ID NO: 2891974 - RNA, 19 nt, Artificial Sequence
  Description of Artificial Sequence: Synthetic oligonucleotide
cagaggccuacccauuccc

SEQ ID NO: 2891975 - RNA, 19 nt, Artificial Sequence
  Description of Artificial Sequence: Synthetic oligonucleotide
ccuuaauuagauugaucug

SEQ ID NO: 2891976 - RNA, 19 nt, Artificial Sequence
  Description of Artificial Sequence: Synthetic oligonucleotide
uuacaccuccagcagcaau

SEQ ID NO: 2891977 - RNA, 19 nt, Artificial Sequence
  Description of Artificial Sequence: Synthetic oligonucleotide
accuccagcagcaaugccu

SEQ ID NO: 2891978 - RNA, 19 nt, Artificial Sequence
  Description of Artificial Sequence: Synthetic oligonucleotide
gagggcggucuucagcacc

SEQ ID NO: 2891979 - RNA, 19 nt, Artificial Sequence
  Description of Artificial Sequence: Synthetic oligonucleotide
ucggccauggcgguggacu

SEQ ID NO: 2891980 - RNA, 19 nt, Artificial Sequence
  Description of Artificial Sequence: Synthetic oligonucleotide
agggccuccaccaacuuga

SEQ ID NO: 2891981 - RNA, 19 nt, Artificial Sequence
  Description of Artificial Sequence: Synthetic oligonucleotide
ccaaaauuuauucauuucu

SEQ ID NO: 2891982 - RNA, 19 nt, Artificial Sequence
  Description of Artificial Sequence: Synthetic oligonucleotide
gaugacauccuuggccuga

SEQ ID NO: 2891983 - RNA, 19 nt, Artificial Sequence
  Description of Artificial Sequence: Synthetic oligonucleotide
uggaugagggcggucuuca

SEQ ID NO: 2891984 - RNA, 19 nt, Artificial Sequence
  Description of Artificial Sequence: Synthetic oligonucleotide
uccccucucgaucaauuuu

SEQ ID NO: 2891985 - RNA, 19 nt, Artificial Sequence
  Description of Artificial Sequence: Synthetic oligonucleotide
ucguggaugagggcggucu

SEQ ID NO: 2891986 - RNA, 19 nt, Artificial Sequence
  Description of Artificial Sequence: Synthetic oligonucleotide
ccaacuugacauacauggg

SEQ ID NO: 2891987 - RNA, 19 nt, Artificial Sequence
  Description of Artificial Sequence: Synthetic oligonucleotide
cauggcgguggacuacggg

SEQ ID NO: 2891988 - RNA, 19 nt, Artificial Sequence
  Description of Artificial Sequence: Synthetic oligonucleotide
agccaaccacuuuccgugg

SEQ ID NO: 2891989 - RNA, 19 nt, Artificial Sequence
  Description of Artificial Sequence: Synthetic oligonucleotide
cuacacaacugcagccaac

SEQ ID NO: 2891990 - RNA, 19 nt, Artificial Sequence
  Description of Artificial Sequence: Synthetic oligonucleotide
cuucgaugacauccuuggc

SEQ ID NO: 2891991 - RNA, 19 nt, Artificial Sequence
  Description of Artificial Sequence: Synthetic oligonucleotide
aguuucuuguugucaucaa

SEQ ID NO: 2891992 - RNA, 19 nt, Artificial Sequence
  Description of Artificial Sequence: Synthetic oligonucleotide
cgaggccgaaucuugaacg

SEQ ID NO: 2891993 - RNA, 19 nt, Artificial Sequence
  Description of Artificial Sequence: Synthetic oligonucleotide
agggcuuuggcggccucgc

SEQ ID NO: 2891994 - RNA, 19 nt, Artificial Sequence
  Description of Artificial Sequence: Synthetic oligonucleotide
cacacagagaugggcuugg

SEQ ID NO: 2891995 - RNA, 19 nt, Artificial Sequence
  Description of Artificial Sequence: Synthetic oligonucleotide
uuuccguggcuuccccucu

SEQ ID NO: 2891996 - RNA, 19 nt, Artificial Sequence
  Description of Artificial Sequence: Synthetic oligonucleotide
cagcaccuccugaagcgcg

SEQ ID NO: 2891997 - RNA, 19 nt, Artificial Sequence
  Description of Artificial Sequence: Synthetic oligonucleotide
auacaugggcucaucacaa

SEQ ID NO: 2891998 - RNA, 19 nt, Artificial Sequence
  Description of Artificial Sequence: Synthetic oligonucleotide
guggcuuccccucucgauc

SEQ ID NO: 2891999 - RNA, 19 nt, Artificial Sequence
  Description of Artificial Sequence: Synthetic oligonucleotide
caccaacuugacauacaug

SEQ ID NO: 2892000 - RNA, 19 nt, Artificial Sequence
  Description of Artificial Sequence: Synthetic oligonucleotide
cugcagccaaccacuuucc

SEQ ID NO: 2892001 - RNA, 19 nt, Artificial Sequence
  Description of Artificial Sequence: Synthetic oligonucleotide
ucaucacaauuggaugcga

SEQ ID NO: 2892002 - RNA, 19 nt, Artificial Sequence
  Description of Artificial Sequence: Synthetic oligonucleotide
ugggcuuggcgcuugucua

SEQ ID NO: 2892003 - RNA, 19 nt, Artificial Sequence
  Description of Artificial Sequence: Synthetic oligonucleotide
gacauccuuggccugagau

SEQ ID NO: 2892004 - RNA, 19 nt, Artificial Sequence
  Description of Artificial Sequence: Synthetic oligonucleotide
ggcuuuggcggccucgcgg

SEQ ID NO: 2892005 - RNA, 19 nt, Artificial Sequence
  Description of Artificial Sequence: Synthetic oligonucleotide
uuacagaggccuacccauu

SEQ ID NO: 2892006 - RNA, 19 nt, Artificial Sequence
  Description of Artificial Sequence: Synthetic oligonucleotide
aacugcagccaaccacuuu

SEQ ID NO: 2892007 - RNA, 19 nt, Artificial Sequence
  Description of Artificial Sequence: Synthetic oligonucleotide
cugaagcgcgguguugacg

SEQ ID NO: 2892008 - RNA, 19 nt, Artificial Sequence
  Description of Artificial Sequence: Synthetic oligonucleotide
uagggcuuuggcggccucg

SEQ ID NO: 2892009 - RNA, 19 nt, Artificial Sequence
  Description of Artificial Sequence: Synthetic oligonucleotide
cauaguccuuaaccacuac

SEQ ID NO: 2892010 - RNA, 19 nt, Artificial Sequence
  Description of Artificial Sequence: Synthetic oligonucleotide
cuuugccauaguccuuaac

SEQ ID NO: 2892011 - RNA, 19 nt, Artificial Sequence
  Description of Artificial Sequence: Synthetic oligonucleotide
cuacgggcgaggccgaauc

SEQ ID NO: 2892012 - RNA, 19 nt, Artificial Sequence
  Description of Artificial Sequence: Synthetic oligonucleotide
gguguucagcacaaagggc

SEQ ID NO: 2892013 - RNA, 19 nt, Artificial Sequence
  Description of Artificial Sequence: Synthetic oligonucleotide
ccacuacacaacugcagcc

SEQ ID NO: 2892014 - RNA, 19 nt, Artificial Sequence
  Description of Artificial Sequence: Synthetic oligonucleotide
acacaacugcagccaacca

SEQ ID NO: 2892015 - RNA, 19 nt, Artificial Sequence
  Description of Artificial Sequence: Synthetic oligonucleotide
uugacauacaugggcucau

SEQ ID NO: 2892016 - RNA, 19 nt, Artificial Sequence
  Description of Artificial Sequence: Synthetic oligonucleotide
gcacaaagggccuccacca

SEQ ID NO: 2892017 - RNA, 19 nt, Artificial Sequence
  Description of Artificial Sequence: Synthetic oligonucleotide
cacuacacaacugcagcca

SEQ ID NO: 2892018 - RNA, 19 nt, Artificial Sequence
  Description of Artificial Sequence: Synthetic oligonucleotide
uacaugggcucaucacaau

SEQ ID NO: 2892019 - RNA, 19 nt, Artificial Sequence
  Description of Artificial Sequence: Synthetic oligonucleotide
acuuuccguggcuuccccu

SEQ ID NO: 2892020 - RNA, 19 nt, Artificial Sequence
  Description of Artificial Sequence: Synthetic oligonucleotide
gaacgcaccgggccuccgc

SEQ ID NO: 2892021 - RNA, 19 nt, Artificial Sequence
  Description of Artificial Sequence: Synthetic oligonucleotide
uuuggcggccucgcggaug

SEQ ID NO: 2892022 - RNA, 19 nt, Artificial Sequence
  Description of Artificial Sequence: Synthetic oligonucleotide
gccuuccucggccauggcg

SEQ ID NO: 2892023 - RNA, 19 nt, Artificial Sequence
  Description of Artificial Sequence: Synthetic oligonucleotide
ccauuacaccuccagcagc

SEQ ID NO: 2892024 - RNA, 19 nt, Artificial Sequence
  Description of Artificial Sequence: Synthetic oligonucleotide
cacuugaaguacucuucga

SEQ ID NO: 2892025 - RNA, 19 nt, Artificial Sequence
  Description of Artificial Sequence: Synthetic oligonucleotide
ccgaaucuugaacgcaccg

SEQ ID NO: 2892026 - RNA, 19 nt, Artificial Sequence
  Description of Artificial Sequence: Synthetic oligonucleotide
ccaucguggaugagggcgg

SEQ ID NO: 2892027 - RNA, 19 nt, Artificial Sequence
  Description of Artificial Sequence: Synthetic oligonucleotide
augacauccuuggccugag

SEQ ID NO: 2892028 - RNA, 19 nt, Artificial Sequence
  Description of Artificial Sequence: Synthetic oligonucleotide
uacgggcgaggccgaaucu

SEQ ID NO: 2892029 - RNA, 19 nt, Artificial Sequence
  Description of Artificial Sequence: Synthetic oligonucleotide
gaucugguguucagcacaa

SEQ ID NO: 2892030 - RNA, 19 nt, Artificial Sequence
  Description of Artificial Sequence: Synthetic oligonucleotide
auuccccuaguuucuuguu

SEQ ID NO: 2892031 - RNA, 19 nt, Artificial Sequence
  Description of Artificial Sequence: Synthetic oligonucleotide
uuccccucucgaucaauuu

SEQ ID NO: 2892032 - RNA, 19 nt, Artificial Sequence
  Description of Artificial Sequence: Synthetic oligonucleotide
guggacuacgggcgaggcc

SEQ ID NO: 2892033 - RNA, 19 nt, Artificial Sequence
  Description of Artificial Sequence: Synthetic oligonucleotide
ucuuugccauaguccuuaa

SEQ ID NO: 2892034 - RNA, 19 nt, Artificial Sequence
  Description of Artificial Sequence: Synthetic oligonucleotide
cagcaaugccuuccucggc

SEQ ID NO: 2892035 - RNA, 19 nt, Artificial Sequence
  Description of Artificial Sequence: Synthetic oligonucleotide
agcaccuccugaagcgcgg

SEQ ID NO: 2892036 - RNA, 19 nt, Artificial Sequence
  Description of Artificial Sequence: Synthetic oligonucleotide
gcuugucuagggcuuuggc

SEQ ID NO: 2892037 - RNA, 19 nt, Artificial Sequence
  Description of Artificial Sequence: Synthetic oligonucleotide
ugacauacaugggcucauc

SEQ ID NO: 2892038 - RNA, 19 nt, Artificial Sequence
  Description of Artificial Sequence: Synthetic oligonucleotide
cacuuuccguggcuucccc

SEQ ID NO: 2892039 - RNA, 19 nt, Artificial Sequence
  Description of Artificial Sequence: Synthetic oligonucleotide
cuugaacgcaccgggccuc

SEQ ID NO: 2892040 - RNA, 19 nt, Artificial Sequence
  Description of Artificial Sequence: Synthetic oligonucleotide
gaggccuacccauuccccu

SEQ ID NO: 2892041 - RNA, 19 nt, Artificial Sequence
  Description of Artificial Sequence: Synthetic oligonucleotide
ugacauccuuggccugaga

SEQ ID NO: 2892042 - RNA, 19 nt, Artificial Sequence
  Description of Artificial Sequence: Synthetic oligonucleotide
cauuccccuaguuucuugu

SEQ ID NO: 2892043 - RNA, 19 nt, Artificial Sequence
  Description of Artificial Sequence: Synthetic oligonucleotide
cgaaucuugaacgcaccgg

SEQ ID NO: 2892044 - RNA, 19 nt, Artificial Sequence
  Description of Artificial Sequence: Synthetic oligonucleotide
uugaacgcaccgggccucc

SEQ ID NO: 2892045 - RNA, 19 nt, Artificial Sequence
  Description of Artificial Sequence: Synthetic oligonucleotide
ucuagggcuuuggcggccu

SEQ ID NO: 2892046 - RNA, 19 nt, Artificial Sequence
  Description of Artificial Sequence: Synthetic oligonucleotide
uggcgcuugucuagggcuu

SEQ ID NO: 2892047 - RNA, 19 nt, Artificial Sequence
  Description of Artificial Sequence: Synthetic oligonucleotide
ugagggcggucuucagcac

SEQ ID NO: 2892048 - RNA, 19 nt, Artificial Sequence
  Description of Artificial Sequence: Synthetic oligonucleotide
gagaugggcuuggcgcuug

SEQ ID NO: 2892049 - RNA, 19 nt, Artificial Sequence
  Description of Artificial Sequence: Synthetic oligonucleotide
aggccgaaucuugaacgca

SEQ ID NO: 2892050 - RNA, 19 nt, Artificial Sequence
  Description of Artificial Sequence: Synthetic oligonucleotide
gggcuuggcgcuugucuag

SEQ ID NO: 2892051 - RNA, 19 nt, Artificial Sequence
  Description of Artificial Sequence: Synthetic oligonucleotide
aggccuacccauuccccua

SEQ ID NO: 2892052 - RNA, 19 nt, Artificial Sequence
  Description of Artificial Sequence: Synthetic oligonucleotide
ugaacgcaccgggccuccg

SEQ ID NO: 2892053 - RNA, 19 nt, Artificial Sequence
  Description of Artificial Sequence: Synthetic oligonucleotide
cguccauuacaccuccagc

SEQ ID NO: 2892054 - RNA, 19 nt, Artificial Sequence
  Description of Artificial Sequence: Synthetic oligonucleotide
acccauuccccuaguuucu

SEQ ID NO: 2892055 - RNA, 19 nt, Artificial Sequence
  Description of Artificial Sequence: Synthetic oligonucleotide
ggccugagauucuuugcca

SEQ ID NO: 2892056 - RNA, 19 nt, Artificial Sequence
  Description of Artificial Sequence: Synthetic oligonucleotide
uuccguggcuuccccucuc

SEQ ID NO: 2892057 - RNA, 19 nt, Artificial Sequence
  Description of Artificial Sequence: Synthetic oligonucleotide
ggccgaaucuugaacgcac

SEQ ID NO: 2892058 - RNA, 19 nt, Artificial Sequence
  Description of Artificial Sequence: Synthetic oligonucleotide
gcgguguugacguccauua

SEQ ID NO: 2892059 - RNA, 19 nt, Artificial Sequence
  Description of Artificial Sequence: Synthetic oligonucleotide
agggcggucuucagcaccu

SEQ ID NO: 2892060 - RNA, 19 nt, Artificial Sequence
  Description of Artificial Sequence: Synthetic oligonucleotide
cucgcggaugccgcgcgcc

SEQ ID NO: 2892061 - RNA, 19 nt, Artificial Sequence
  Description of Artificial Sequence: Synthetic oligonucleotide
ggccuacccauuccccuag

SEQ ID NO: 2892062 - RNA, 19 nt, Artificial Sequence
  Description of Artificial Sequence: Synthetic oligonucleotide
gccauggcgguggacuacg

SEQ ID NO: 2892063 - RNA, 19 nt, Artificial Sequence
  Description of Artificial Sequence: Synthetic oligonucleotide
gccuccgcgcaccucggcg

SEQ ID NO: 2892064 - RNA, 19 nt, Artificial Sequence
  Description of Artificial Sequence: Synthetic oligonucleotide
gcgaggccgaaucuugaac

SEQ ID NO: 2892065 - RNA, 19 nt, Artificial Sequence
  Description of Artificial Sequence: Synthetic oligonucleotide
gcuuggcgcuugucuaggg

SEQ ID NO: 2892066 - RNA, 19 nt, Artificial Sequence
  Description of Artificial Sequence: Synthetic oligonucleotide
caccuccagcagcaaugcc

SEQ ID NO: 2892067 - RNA, 19 nt, Artificial Sequence
  Description of Artificial Sequence: Synthetic oligonucleotide
aucguggaugagggcgguc

SEQ ID NO: 2892068 - RNA, 19 nt, Artificial Sequence
  Description of Artificial Sequence: Synthetic oligonucleotide
gcuuuggcggccucgcgga

SEQ ID NO: 2892069 - RNA, 19 nt, Artificial Sequence
  Description of Artificial Sequence: Synthetic oligonucleotide
ggcggucuucagcaccucc

SEQ ID NO: 2892070 - RNA, 19 nt, Artificial Sequence
  Description of Artificial Sequence: Synthetic oligonucleotide
ggcuuggcgcuugucuagg

SEQ ID NO: 2892071 - RNA, 19 nt, Artificial Sequence
  Description of Artificial Sequence: Synthetic oligonucleotide
auuacaccuccagcagcaa

SEQ ID NO: 2892072 - RNA, 19 nt, Artificial Sequence
  Description of Artificial Sequence: Synthetic oligonucleotide
gaagcgcgguguugacguc

SEQ ID NO: 2892073 - RNA, 19 nt, Artificial Sequence
  Description of Artificial Sequence: Synthetic oligonucleotide
uccuuggccugagauucuu

SEQ ID NO: 2892074 - RNA, 19 nt, Artificial Sequence
  Description of Artificial Sequence: Synthetic oligonucleotide
cuacccauuccccuaguuu

SEQ ID NO: 2892075 - RNA, 19 nt, Artificial Sequence
  Description of Artificial Sequence: Synthetic oligonucleotide
auucuuugccauaguccuu

SEQ ID NO: 2892076 - RNA, 19 nt, Artificial Sequence
  Description of Artificial Sequence: Synthetic oligonucleotide
cuugcacuugaaguacucu

SEQ ID NO: 2892077 - RNA, 19 nt, Artificial Sequence
  Description of Artificial Sequence: Synthetic oligonucleotide
agaugggcuuggcgcuugu

SEQ ID NO: 2892078 - RNA, 19 nt, Artificial Sequence
  Description of Artificial Sequence: Synthetic oligonucleotide
ggaugagggcggucuucag

SEQ ID NO: 2892079 - RNA, 19 nt, Artificial Sequence
  Description of Artificial Sequence: Synthetic oligonucleotide
ccuccgcgcaccucggcgg

SEQ ID NO: 2892080 - RNA, 19 nt, Artificial Sequence
  Description of Artificial Sequence: Synthetic oligonucleotide
ccuaguuucuuguugucau

SEQ ID NO: 2892081 - RNA, 19 nt, Artificial Sequence
  Description of Artificial Sequence: Synthetic oligonucleotide
cgagcacacagagaugggc

SEQ ID NO: 2892082 - RNA, 19 nt, Artificial Sequence
  Description of Artificial Sequence: Synthetic oligonucleotide
gccaaccacuuuccguggc

SEQ ID NO: 2892083 - RNA, 19 nt, Artificial Sequence
  Description of Artificial Sequence: Synthetic oligonucleotide
gucuagggcuuuggcggcc

SEQ ID NO: 2892084 - RNA, 19 nt, Artificial Sequence
  Description of Artificial Sequence: Synthetic oligonucleotide
guggaugagggcggucuuc

SEQ ID NO: 2892085 - RNA, 19 nt, Artificial Sequence
  Description of Artificial Sequence: Synthetic oligonucleotide
cuccgcgcaccucggcggc

SEQ ID NO: 2892086 - RNA, 19 nt, Artificial Sequence
  Description of Artificial Sequence: Synthetic oligonucleotide
gguggacuacgggcgaggc

SEQ ID NO: 2892087 - RNA, 19 nt, Artificial Sequence
  Description of Artificial Sequence: Synthetic oligonucleotide
cuccugaagcgcgguguug

SEQ ID NO: 2892088 - RNA, 19 nt, Artificial Sequence
  Description of Artificial Sequence: Synthetic oligonucleotide
gcagccaaccacuuuccgu

SEQ ID NO: 2892089 - RNA, 19 nt, Artificial Sequence
  Description of Artificial Sequence: Synthetic oligonucleotide
cccucucgaucaauuuuac

SEQ ID NO: 2892090 - RNA, 19 nt, Artificial Sequence
  Description of Artificial Sequence: Synthetic oligonucleotide
cacaaagggccuccaccaa

SEQ ID NO: 2892091 - RNA, 19 nt, Artificial Sequence
  Description of Artificial Sequence: Synthetic oligonucleotide
gccgaaucuugaacgcacc

SEQ ID NO: 2892092 - RNA, 19 nt, Artificial Sequence
  Description of Artificial Sequence: Synthetic oligonucleotide
caaccuuaauuagauugau

SEQ ID NO: 2892093 - RNA, 19 nt, Artificial Sequence
  Description of Artificial Sequence: Synthetic oligonucleotide
gaugggcuuggcgcuuguc

SEQ ID NO: 2892094 - RNA, 19 nt, Artificial Sequence
  Description of Artificial Sequence: Synthetic oligonucleotide
caccuccugaagcgcggug

SEQ ID NO: 2892095 - RNA, 19 nt, Artificial Sequence
  Description of Artificial Sequence: Synthetic oligonucleotide
gccauaguccuuaaccacu

SEQ ID NO: 2892096 - RNA, 19 nt, Artificial Sequence
  Description of Artificial Sequence: Synthetic oligonucleotide
augcgagcacacagagaug

SEQ ID NO: 2892097 - RNA, 19 nt, Artificial Sequence
  Description of Artificial Sequence: Synthetic oligonucleotide
gggcucaucacaauuggau

SEQ ID NO: 2892098 - RNA, 19 nt, Artificial Sequence
  Description of Artificial Sequence: Synthetic oligonucleotide
ccauuccccuaguuucuug

SEQ ID NO: 2892099 - RNA, 19 nt, Artificial Sequence
  Description of Artificial Sequence: Synthetic oligonucleotide
gcaaugccuuccucggcca

SEQ ID NO: 2892100 - RNA, 19 nt, Artificial Sequence
  Description of Artificial Sequence: Synthetic oligonucleotide
gcggaugccgcgcgccagg

SEQ ID NO: 2892101 - RNA, 19 nt, Artificial Sequence
  Description of Artificial Sequence: Synthetic oligonucleotide
agagaugggcuuggcgcuu

SEQ ID NO: 2892102 - RNA, 19 nt, Artificial Sequence
  Description of Artificial Sequence: Synthetic oligonucleotide
acuacgggcgaggccgaau

SEQ ID NO: 2892103 - RNA, 19 nt, Artificial Sequence
  Description of Artificial Sequence: Synthetic oligonucleotide
ugccuuccucggccauggc

SEQ ID NO: 2892104 - RNA, 19 nt, Artificial Sequence
  Description of Artificial Sequence: Synthetic oligonucleotide
uccgcgcaccucggcggcg

SEQ ID NO: 2892105 - RNA, 19 nt, Artificial Sequence
  Description of Artificial Sequence: Synthetic oligonucleotide
uuccucggccauggcggug

SEQ ID NO: 2892106 - RNA, 19 nt, Artificial Sequence
  Description of Artificial Sequence: Synthetic oligonucleotide
agcgcgguguugacgucca

SEQ ID NO: 2892107 - RNA, 19 nt, Artificial Sequence
  Description of Artificial Sequence: Synthetic oligonucleotide
ggcggccucgcggaugccg

SEQ ID NO: 2892108 - RNA, 19 nt, Artificial Sequence
  Description of Artificial Sequence: Synthetic oligonucleotide
ccuuaaccacuacacaacu

SEQ ID NO: 2892109 - RNA, 19 nt, Artificial Sequence
  Description of Artificial Sequence: Synthetic oligonucleotide
ccauaguccuuaaccacua

SEQ ID NO: 2892110 - RNA, 19 nt, Artificial Sequence
  Description of Artificial Sequence: Synthetic oligonucleotide
acgggcgaggccgaaucuu

SEQ ID NO: 2892111 - RNA, 19 nt, Artificial Sequence
  Description of Artificial Sequence: Synthetic oligonucleotide
gcgagcacacagagauggg

SEQ ID NO: 2892112 - RNA, 19 nt, Artificial Sequence
  Description of Artificial Sequence: Synthetic oligonucleotide
ccccucucgaucaauuuua

SEQ ID NO: 2892113 - RNA, 19 nt, Artificial Sequence
  Description of Artificial Sequence: Synthetic oligonucleotide
cuuccccucucgaucaauu

SEQ ID NO: 2892114 - RNA, 19 nt, Artificial Sequence
  Description of Artificial Sequence: Synthetic oligonucleotide
caucaaccuuaauuagauu

SEQ ID NO: 2892115 - RNA, 19 nt, Artificial Sequence
  Description of Artificial Sequence: Synthetic oligonucleotide
auccuuggccugagauucu

SEQ ID NO: 2892116 - RNA, 19 nt, Artificial Sequence
  Description of Artificial Sequence: Synthetic oligonucleotide
gggcuuuggcggccucgcg

SEQ ID NO: 2892117 - RNA, 19 nt, Artificial Sequence
  Description of Artificial Sequence: Synthetic oligonucleotide
acgcaccgggccuccgccu

SEQ ID NO: 2892118 - RNA, 19 nt, Artificial Sequence
  Description of Artificial Sequence: Synthetic oligonucleotide
ccugaagcgcgguguugac

SEQ ID NO: 2892119 - RNA, 19 nt, Artificial Sequence
  Description of Artificial Sequence: Synthetic oligonucleotide
gacguccauuacaccucca

SEQ ID NO: 2892120 - RNA, 19 nt, Artificial Sequence
  Description of Artificial Sequence: Synthetic oligonucleotide
ccucucgaucaauuuuaca

SEQ ID NO: 2892121 - RNA, 19 nt, Artificial Sequence
  Description of Artificial Sequence: Synthetic oligonucleotide
ggcgaggccgaaucuugaa

SEQ ID NO: 2892122 - RNA, 19 nt, Artificial Sequence
  Description of Artificial Sequence: Synthetic oligonucleotide
cuagggcuuuggcggccuc

SEQ ID NO: 2892123 - RNA, 19 nt, Artificial Sequence
  Description of Artificial Sequence: Synthetic oligonucleotide
cccuaguuucuuguuguca

SEQ ID NO: 2892124 - RNA, 19 nt, Artificial Sequence
  Description of Artificial Sequence: Synthetic oligonucleotide
ggccaucguggaugagggc

SEQ ID NO: 2892125 - RNA, 19 nt, Artificial Sequence
  Description of Artificial Sequence: Synthetic oligonucleotide
ccauggcgguggacuacgg

SEQ ID NO: 2892126 - RNA, 19 nt, Artificial Sequence
  Description of Artificial Sequence: Synthetic oligonucleotide
ggaugcgagcacacagaga

SEQ ID NO: 2892127 - RNA, 19 nt, Artificial Sequence
  Description of Artificial Sequence: Synthetic oligonucleotide
ccugagauucuuugccaua

SEQ ID NO: 2892128 - RNA, 19 nt, Artificial Sequence
  Description of Artificial Sequence: Synthetic oligonucleotide
ggaugccgcgcgccaggcc

SEQ ID NO: 2892129 - RNA, 19 nt, Artificial Sequence
  Description of Artificial Sequence: Synthetic oligonucleotide
aucugguguucagcacaaa

SEQ ID NO: 2892130 - RNA, 19 nt, Artificial Sequence
  Description of Artificial Sequence: Synthetic oligonucleotide
ccaccaacuugacauacau

SEQ ID NO: 2892131 - RNA, 19 nt, Artificial Sequence
  Description of Artificial Sequence: Synthetic oligonucleotide
gccugagauucuuugccau

SEQ ID NO: 2892132 - RNA, 19 nt, Artificial Sequence
  Description of Artificial Sequence: Synthetic oligonucleotide
gcgcgccaggccaucgugg

SEQ ID NO: 2892133 - RNA, 19 nt, Artificial Sequence
  Description of Artificial Sequence: Synthetic oligonucleotide
ccccuaguuucuuguuguc

SEQ ID NO: 2892134 - RNA, 19 nt, Artificial Sequence
  Description of Artificial Sequence: Synthetic oligonucleotide
caccgggccuccgccuccg

SEQ ID NO: 2892135 - RNA, 19 nt, Artificial Sequence
  Description of Artificial Sequence: Synthetic oligonucleotide
ggcgguggacuacgggcga

SEQ ID NO: 2892136 - RNA, 19 nt, Artificial Sequence
  Description of Artificial Sequence: Synthetic oligonucleotide
cgggcgaggccgaaucuug

SEQ ID NO: 2892137 - RNA, 19 nt, Artificial Sequence
  Description of Artificial Sequence: Synthetic oligonucleotide
ggccuccaccaacuugaca

SEQ ID NO: 2892138 - RNA, 19 nt, Artificial Sequence
  Description of Artificial Sequence: Synthetic oligonucleotide
cuuccucggccauggcggu

SEQ ID NO: 2892139 - RNA, 19 nt, Artificial Sequence
  Description of Artificial Sequence: Synthetic oligonucleotide
gcggccucgcggaugccgc

SEQ ID NO: 2892140 - RNA, 19 nt, Artificial Sequence
  Description of Artificial Sequence: Synthetic oligonucleotide
cgcuugucuagggcuuugg

SEQ ID NO: 2892141 - RNA, 19 nt, Artificial Sequence
  Description of Artificial Sequence: Synthetic oligonucleotide
gcgguggacuacgggcgag

SEQ ID NO: 2892142 - RNA, 19 nt, Artificial Sequence
  Description of Artificial Sequence: Synthetic oligonucleotide
ggccauggcgguggacuac

SEQ ID NO: 2892143 - RNA, 19 nt, Artificial Sequence
  Description of Artificial Sequence: Synthetic oligonucleotide
cgguguugacguccauuac

SEQ ID NO: 2892144 - RNA, 19 nt, Artificial Sequence
  Description of Artificial Sequence: Synthetic oligonucleotide
gccuccgccuccgcgcacc

SEQ ID NO: 2892145 - RNA, 19 nt, Artificial Sequence
  Description of Artificial Sequence: Synthetic oligonucleotide
gcggucuucagcaccuccu

SEQ ID NO: 2892146 - RNA, 19 nt, Artificial Sequence
  Description of Artificial Sequence: Synthetic oligonucleotide
gacuacgggcgaggccgaa

SEQ ID NO: 2892147 - RNA, 19 nt, Artificial Sequence
  Description of Artificial Sequence: Synthetic oligonucleotide
ggccucgcggaugccgcgc

SEQ ID NO: 2892148 - RNA, 19 nt, Artificial Sequence
  Description of Artificial Sequence: Synthetic oligonucleotide
caacugcagccaaccacuu

SEQ ID NO: 2892149 - RNA, 19 nt, Artificial Sequence
  Description of Artificial Sequence: Synthetic oligonucleotide
ccuccagcagcaaugccuu

SEQ ID NO: 2892150 - RNA, 19 nt, Artificial Sequence
  Description of Artificial Sequence: Synthetic oligonucleotide
caaccacuuuccguggcuu

SEQ ID NO: 2892151 - RNA, 19 nt, Artificial Sequence
  Description of Artificial Sequence: Synthetic oligonucleotide
ccaaccacuuuccguggcu

SEQ ID NO: 2892152 - RNA, 19 nt, Artificial Sequence
  Description of Artificial Sequence: Synthetic oligonucleotide
ccuccaccaacuugacaua

SEQ ID NO: 2892153 - RNA, 19 nt, Artificial Sequence
  Description of Artificial Sequence: Synthetic oligonucleotide
gcgcuugucuagggcuuug

SEQ ID NO: 2892154 - RNA, 19 nt, Artificial Sequence
  Description of Artificial Sequence: Synthetic oligonucleotide
gggcgaggccgaaucuuga

SEQ ID NO: 2892155 - RNA, 19 nt, Artificial Sequence
  Description of Artificial Sequence: Synthetic oligonucleotide
caaugccuuccucggccau

SEQ ID NO: 2892156 - RNA, 19 nt, Artificial Sequence
  Description of Artificial Sequence: Synthetic oligonucleotide
gggccuccgccuccgcgca

SEQ ID NO: 2892157 - RNA, 19 nt, Artificial Sequence
  Description of Artificial Sequence: Synthetic oligonucleotide
caucguggaugagggcggu

SEQ ID NO: 2892158 - RNA, 19 nt, Artificial Sequence
  Description of Artificial Sequence: Synthetic oligonucleotide
gccgcgcgccaggccaucg

SEQ ID NO: 2892159 - RNA, 19 nt, Artificial Sequence
  Description of Artificial Sequence: Synthetic oligonucleotide
ccucgcggaugccgcgcgc

SEQ ID NO: 2892160 - RNA, 19 nt, Artificial Sequence
  Description of Artificial Sequence: Synthetic oligonucleotide
gggccuccaccaacuugac

SEQ ID NO: 2892161 - RNA, 19 nt, Artificial Sequence
  Description of Artificial Sequence: Synthetic oligonucleotide
ugccgcgcgccaggccauc

SEQ ID NO: 2892162 - RNA, 19 nt, Artificial Sequence
  Description of Artificial Sequence: Synthetic oligonucleotide
ccgccuccgcgcaccucgg

SEQ ID NO: 2892163 - RNA, 19 nt, Artificial Sequence
  Description of Artificial Sequence: Synthetic oligonucleotide
cgcgcgccaggccaucgug

SEQ ID NO: 2892164 - RNA, 19 nt, Artificial Sequence
  Description of Artificial Sequence: Synthetic oligonucleotide
augccgcgcgccaggccau

SEQ ID NO: 2892165 - RNA, 19 nt, Artificial Sequence
  Description of Artificial Sequence: Synthetic oligonucleotide
cgcgccaggccaucgugga

SEQ ID NO: 2892166 - RNA, 19 nt, Artificial Sequence
  Description of Artificial Sequence: Synthetic oligonucleotide
ggcuuccccucucgaucaa

SEQ ID NO: 2892167 - RNA, 19 nt, Artificial Sequence
  Description of Artificial Sequence: Synthetic oligonucleotide
ggacuacgggcgaggccga

SEQ ID NO: 2892168 - RNA, 19 nt, Artificial Sequence
  Description of Artificial Sequence: Synthetic oligonucleotide
uggcggccucgcggaugcc

SEQ ID NO: 2892169 - RNA, 19 nt, Artificial Sequence
  Description of Artificial Sequence: Synthetic oligonucleotide
cuuuggcggccucgcggau

SEQ ID NO: 2892170 - RNA, 19 nt, Artificial Sequence
  Description of Artificial Sequence: Synthetic oligonucleotide
cuccgccuccgcgcaccuc

SEQ ID NO: 2892171 - RNA, 19 nt, Artificial Sequence
  Description of Artificial Sequence: Synthetic oligonucleotide
cgcaccgggccuccgccuc

SEQ ID NO: 2892172 - RNA, 19 nt, Artificial Sequence
  Description of Artificial Sequence: Synthetic oligonucleotide
ccuacccauuccccuaguu

SEQ ID NO: 2892173 - RNA, 19 nt, Artificial Sequence
  Description of Artificial Sequence: Synthetic oligonucleotide
ccguggcuuccccucucga

SEQ ID NO: 2892174 - RNA, 19 nt, Artificial Sequence
  Description of Artificial Sequence: Synthetic oligonucleotide
cggaugccgcgcgccaggc

SEQ ID NO: 2892175 - RNA, 19 nt, Artificial Sequence
  Description of Artificial Sequence: Synthetic oligonucleotide
cguggcuuccccucucgau

SEQ ID NO: 2892176 - RNA, 19 nt, Artificial Sequence
  Description of Artificial Sequence: Synthetic oligonucleotide
gccuacccauuccccuagu

SEQ ID NO: 2892177 - RNA, 19 nt, Artificial Sequence
  Description of Artificial Sequence: Synthetic oligonucleotide
ggccuccgccuccgcgcac

SEQ ID NO: 2892178 - RNA, 19 nt, Artificial Sequence
  Description of Artificial Sequence: Synthetic oligonucleotide
gggcggucuucagcaccuc

SEQ ID NO: 2892179 - RNA, 19 nt, Artificial Sequence
  Description of Artificial Sequence: Synthetic oligonucleotide
gcuuccccucucgaucaau

SEQ ID NO: 2892180 - RNA, 19 nt, Artificial Sequence
  Description of Artificial Sequence: Synthetic oligonucleotide
ccuccugaagcgcgguguu

SEQ ID NO: 2892181 - RNA, 19 nt, Artificial Sequence
  Description of Artificial Sequence: Synthetic oligonucleotide
gcaccuccugaagcgcggu

SEQ ID NO: 2892182 - RNA, 19 nt, Artificial Sequence
  Description of Artificial Sequence: Synthetic oligonucleotide
ggcgcuugucuagggcuuu

SEQ ID NO: 2892183 - RNA, 19 nt, Artificial Sequence
  Description of Artificial Sequence: Synthetic oligonucleotide
ccuuggccugagauucuuu

SEQ ID NO: 2892184 - RNA, 19 nt, Artificial Sequence
  Description of Artificial Sequence: Synthetic oligonucleotide
cgccuccgcgcaccucggc

SEQ ID NO: 2892185 - RNA, 19 nt, Artificial Sequence
  Description of Artificial Sequence: Synthetic oligonucleotide
cggccauggcgguggacua

SEQ ID NO: 2892186 - RNA, 19 nt, Artificial Sequence
  Description of Artificial Sequence: Synthetic oligonucleotide
gcgccaggccaucguggau

SEQ ID NO: 2892187 - RNA, 19 nt, Artificial Sequence
  Description of Artificial Sequence: Synthetic oligonucleotide
cccauuccccuaguuucuu

SEQ ID NO: 2892188 - RNA, 19 nt, Artificial Sequence
  Description of Artificial Sequence: Synthetic oligonucleotide
cguggaugagggcggucuu

SEQ ID NO: 2892189 - RNA, 19 nt, Artificial Sequence
  Description of Artificial Sequence: Synthetic oligonucleotide
cgcgguguugacguccauu

SEQ ID NO: 2892190 - RNA, 19 nt, Artificial Sequence
  Description of Artificial Sequence: Synthetic oligonucleotide
ccgcgcgccaggccaucgu

SEQ ID NO: 2892191 - RNA, 19 nt, Artificial Sequence
  Description of Artificial Sequence: Synthetic oligonucleotide
ccuccgccuccgcgcaccu

SEQ ID NO: 2892192 - RNA, 19 nt, Artificial Sequence
  Description of Artificial Sequence: Synthetic oligonucleotide
gcgcgguguugacguccau

SEQ ID NO: 2892193 - RNA, 19 nt, Artificial Sequence
  Description of Artificial Sequence: Synthetic oligonucleotide
aaaagugcaaauuuacucc

SEQ ID NO: 2892194 - RNA, 19 nt, Artificial Sequence
  Description of Artificial Sequence: Synthetic oligonucleotide
uauugauacagcaaaaugg

SEQ ID NO: 2892195 - RNA, 19 nt, Artificial Sequence
  Description of Artificial Sequence: Synthetic oligonucleotide
uuuauuggaauaaacaggc

SEQ ID NO: 2892196 - RNA, 19 nt, Artificial Sequence
  Description of Artificial Sequence: Synthetic oligonucleotide
uuuuauuggaauaaacagg

SEQ ID NO: 2892197 - RNA, 19 nt, Artificial Sequence
  Description of Artificial Sequence: Synthetic oligonucleotide
augggaaagaacuaggucc

SEQ ID NO: 2892198 - RNA, 19 nt, Artificial Sequence
  Description of Artificial Sequence: Synthetic oligonucleotide
auuaauauguccuuaauca

SEQ ID NO: 2892199 - RNA, 19 nt, Artificial Sequence
  Description of Artificial Sequence: Synthetic oligonucleotide
acaaguuccuuauugauac

SEQ ID NO: 2892200 - RNA, 19 nt, Artificial Sequence
  Description of Artificial Sequence: Synthetic oligonucleotide
cuuuuauuggaauaaacag

SEQ ID NO: 2892201 - RNA, 19 nt, Artificial Sequence
  Description of Artificial Sequence: Synthetic oligonucleotide
aaugcuucaagucaauuga

SEQ ID NO: 2892202 - RNA, 19 nt, Artificial Sequence
  Description of Artificial Sequence: Synthetic oligonucleotide
ucuuuuauuggaauaaaca

SEQ ID NO: 2892203 - RNA, 19 nt, Artificial Sequence
  Description of Artificial Sequence: Synthetic oligonucleotide
aguguuuggggucagaagg

SEQ ID NO: 2892204 - RNA, 19 nt, Artificial Sequence
  Description of Artificial Sequence: Synthetic oligonucleotide
aacuaggucccuuagugac

SEQ ID NO: 2892205 - RNA, 19 nt, Artificial Sequence
  Description of Artificial Sequence: Synthetic oligonucleotide
uccuuaaucacacaguugu

SEQ ID NO: 2892206 - RNA, 19 nt, Artificial Sequence
  Description of Artificial Sequence: Synthetic oligonucleotide
aaucacacaguugugauag

SEQ ID NO: 2892207 - RNA, 19 nt, Artificial Sequence
  Description of Artificial Sequence: Synthetic oligonucleotide
cuucaaacgaagaugagag

SEQ ID NO: 2892208 - RNA, 19 nt, Artificial Sequence
  Description of Artificial Sequence: Synthetic oligonucleotide
uauuggaauaaacaggcug

SEQ ID NO: 2892209 - RNA, 19 nt, Artificial Sequence
  Description of Artificial Sequence: Synthetic oligonucleotide
aaugggaaagaacuagguc

SEQ ID NO: 2892210 - RNA, 19 nt, Artificial Sequence
  Description of Artificial Sequence: Synthetic oligonucleotide
aauauguccuuaaucacac

SEQ ID NO: 2892211 - RNA, 19 nt, Artificial Sequence
  Description of Artificial Sequence: Synthetic oligonucleotide
uuauugauacagcaaaaug

SEQ ID NO: 2892212 - RNA, 19 nt, Artificial Sequence
  Description of Artificial Sequence: Synthetic oligonucleotide
ugugugauuaauauguccu

SEQ ID NO: 2892213 - RNA, 19 nt, Artificial Sequence
  Description of Artificial Sequence: Synthetic oligonucleotide
aagucaauugacuaagaca

SEQ ID NO: 2892214 - RNA, 19 nt, Artificial Sequence
  Description of Artificial Sequence: Synthetic oligonucleotide
uauguccuuaaucacacag

SEQ ID NO: 2892215 - RNA, 19 nt, Artificial Sequence
  Description of Artificial Sequence: Synthetic oligonucleotide
uuuacuccaaacuucaaac

SEQ ID NO: 2892216 - RNA, 19 nt, Artificial Sequence
  Description of Artificial Sequence: Synthetic oligonucleotide
gaaaagugcaaauuuacuc

SEQ ID NO: 2892217 - RNA, 19 nt, Artificial Sequence
  Description of Artificial Sequence: Synthetic oligonucleotide
aacugugugauuaauaugu

SEQ ID NO: 2892218 - RNA, 19 nt, Artificial Sequence
  Description of Artificial Sequence: Synthetic oligonucleotide
aaucaugucugaugaacuc

SEQ ID NO: 2892219 - RNA, 19 nt, Artificial Sequence
  Description of Artificial Sequence: Synthetic oligonucleotide
uaauauguccuuaaucaca

SEQ ID NO: 2892220 - RNA, 19 nt, Artificial Sequence
  Description of Artificial Sequence: Synthetic oligonucleotide
auugauacagcaaaauggg

SEQ ID NO: 2892221 - RNA, 19 nt, Artificial Sequence
  Description of Artificial Sequence: Synthetic oligonucleotide
gaagaugagagugacaggc

SEQ ID NO: 2892222 - RNA, 19 nt, Artificial Sequence
  Description of Artificial Sequence: Synthetic oligonucleotide
agacccucaaacuguaucc

SEQ ID NO: 2892223 - RNA, 19 nt, Artificial Sequence
  Description of Artificial Sequence: Synthetic oligonucleotide
cuuagugaccacaggaucg

SEQ ID NO: 2892224 - RNA, 19 nt, Artificial Sequence
  Description of Artificial Sequence: Synthetic oligonucleotide
ucaaacgaagaugagagug

SEQ ID NO: 2892225 - RNA, 19 nt, Artificial Sequence
  Description of Artificial Sequence: Synthetic oligonucleotide
accgaauuuacuccaaagg

SEQ ID NO: 2892226 - RNA, 19 nt, Artificial Sequence
  Description of Artificial Sequence: Synthetic oligonucleotide
guaacugagacccucaaac

SEQ ID NO: 2892227 - RNA, 19 nt, Artificial Sequence
  Description of Artificial Sequence: Synthetic oligonucleotide
ugauacagcaaaaugggaa

SEQ ID NO: 2892228 - RNA, 19 nt, Artificial Sequence
  Description of Artificial Sequence: Synthetic oligonucleotide
agaacuaggucccuuagug

SEQ ID NO: 2892229 - RNA, 19 nt, Artificial Sequence
  Description of Artificial Sequence: Synthetic oligonucleotide
acacaguugugauagcagc

SEQ ID NO: 2892230 - RNA, 19 nt, Artificial Sequence
  Description of Artificial Sequence: Synthetic oligonucleotide
gauuaauauguccuuaauc

SEQ ID NO: 2892231 - RNA, 19 nt, Artificial Sequence
  Description of Artificial Sequence: Synthetic oligonucleotide
aaaaugggaaagaacuagg

SEQ ID NO: 2892232 - RNA, 19 nt, Artificial Sequence
  Description of Artificial Sequence: Synthetic oligonucleotide
auagcagccaaucaugucu

SEQ ID NO: 2892233 - RNA, 19 nt, Artificial Sequence
  Description of Artificial Sequence: Synthetic oligonucleotide
agcaaaaugggaaagaacu

SEQ ID NO: 2892234 - RNA, 19 nt, Artificial Sequence
  Description of Artificial Sequence: Synthetic oligonucleotide
aacugagacccucaaacug

SEQ ID NO: 2892235 - RNA, 19 nt, Artificial Sequence
  Description of Artificial Sequence: Synthetic oligonucleotide
aaagugcaaauuuacucca

SEQ ID NO: 2892236 - RNA, 19 nt, Artificial Sequence
  Description of Artificial Sequence: Synthetic oligonucleotide
uccuuauugauacagcaaa

SEQ ID NO: 2892237 - RNA, 19 nt, Artificial Sequence
  Description of Artificial Sequence: Synthetic oligonucleotide
agagugacaggcuugacca

SEQ ID NO: 2892238 - RNA, 19 nt, Artificial Sequence
  Description of Artificial Sequence: Synthetic oligonucleotide
uaaacaggcuguaacugag

SEQ ID NO: 2892239 - RNA, 19 nt, Artificial Sequence
  Description of Artificial Sequence: Synthetic oligonucleotide
uuacuccaaacuucaaacg

SEQ ID NO: 2892240 - RNA, 19 nt, Artificial Sequence
  Description of Artificial Sequence: Synthetic oligonucleotide
ugugauagcagccaaucau

SEQ ID NO: 2892241 - RNA, 19 nt, Artificial Sequence
  Description of Artificial Sequence: Synthetic oligonucleotide
acgaagaugagagugacag

SEQ ID NO: 2892242 - RNA, 19 nt, Artificial Sequence
  Description of Artificial Sequence: Synthetic oligonucleotide
agucaauugacuaagacau

SEQ ID NO: 2892243 - RNA, 19 nt, Artificial Sequence
  Description of Artificial Sequence: Synthetic oligonucleotide
caggcuguaacugagaccc

SEQ ID NO: 2892244 - RNA, 19 nt, Artificial Sequence
  Description of Artificial Sequence: Synthetic oligonucleotide
uccuacaaguuccuuauug

SEQ ID NO: 2892245 - RNA, 19 nt, Artificial Sequence
  Description of Artificial Sequence: Synthetic oligonucleotide
uugacuaagacauggcaac

SEQ ID NO: 2892246 - RNA, 19 nt, Artificial Sequence
  Description of Artificial Sequence: Synthetic oligonucleotide
uacuccaaacuucaaacga

SEQ ID NO: 2892247 - RNA, 19 nt, Artificial Sequence
  Description of Artificial Sequence: Synthetic oligonucleotide
caaauuuacuccaaacuuc

SEQ ID NO: 2892248 - RNA, 19 nt, Artificial Sequence
  Description of Artificial Sequence: Synthetic oligonucleotide
aaccgaauuuacuccaaag

SEQ ID NO: 2892249 - RNA, 19 nt, Artificial Sequence
  Description of Artificial Sequence: Synthetic oligonucleotide
ucgaaaagugcaaauuuac

SEQ ID NO: 2892250 - RNA, 19 nt, Artificial Sequence
  Description of Artificial Sequence: Synthetic oligonucleotide
uuaauauguccuuaaucac

SEQ ID NO: 2892251 - RNA, 19 nt, Artificial Sequence
  Description of Artificial Sequence: Synthetic oligonucleotide
uucaagucaauugacuaag

SEQ ID NO: 2892252 - RNA, 19 nt, Artificial Sequence
  Description of Artificial Sequence: Synthetic oligonucleotide
aaauuuacuccaaacuuca

SEQ ID NO: 2892253 - RNA, 19 nt, Artificial Sequence
  Description of Artificial Sequence: Synthetic oligonucleotide
aaacugugugauuaauaug

SEQ ID NO: 2892254 - RNA, 19 nt, Artificial Sequence
  Description of Artificial Sequence: Synthetic oligonucleotide
aaacgaagaugagagugac

SEQ ID NO: 2892255 - RNA, 19 nt, Artificial Sequence
  Description of Artificial Sequence: Synthetic oligonucleotide
aaagaacuaggucccuuag

SEQ ID NO: 2892256 - RNA, 19 nt, Artificial Sequence
  Description of Artificial Sequence: Synthetic oligonucleotide
auuuacuccaaagggcugc

SEQ ID NO: 2892257 - RNA, 19 nt, Artificial Sequence
  Description of Artificial Sequence: Synthetic oligonucleotide
uccagaaccgaauuuacuc

SEQ ID NO: 2892258 - RNA, 19 nt, Artificial Sequence
  Description of Artificial Sequence: Synthetic oligonucleotide
aacuguaucccaguguuug

SEQ ID NO: 2892259 - RNA, 19 nt, Artificial Sequence
  Description of Artificial Sequence: Synthetic oligonucleotide
ugggaaagaacuagguccc

SEQ ID NO: 2892260 - RNA, 19 nt, Artificial Sequence
  Description of Artificial Sequence: Synthetic oligonucleotide
aaguuccuuauugauacag

SEQ ID NO: 2892261 - RNA, 19 nt, Artificial Sequence
  Description of Artificial Sequence: Synthetic oligonucleotide
uccuggacaagcagcaccg

SEQ ID NO: 2892262 - RNA, 19 nt, Artificial Sequence
  Description of Artificial Sequence: Synthetic oligonucleotide
caaaaugggaaagaacuag

SEQ ID NO: 2892263 - RNA, 19 nt, Artificial Sequence
  Description of Artificial Sequence: Synthetic oligonucleotide
uuuggucucuuuuauugga

SEQ ID NO: 2892264 - RNA, 19 nt, Artificial Sequence
  Description of Artificial Sequence: Synthetic oligonucleotide
ucccuuagugaccacagga

SEQ ID NO: 2892265 - RNA, 19 nt, Artificial Sequence
  Description of Artificial Sequence: Synthetic oligonucleotide
uacuccaaagggcugcucc

SEQ ID NO: 2892266 - RNA, 19 nt, Artificial Sequence
  Description of Artificial Sequence: Synthetic oligonucleotide
uuaaucacacaguugugau

SEQ ID NO: 2892267 - RNA, 19 nt, Artificial Sequence
  Description of Artificial Sequence: Synthetic oligonucleotide
gauacagcaaaaugggaaa

SEQ ID NO: 2892268 - RNA, 19 nt, Artificial Sequence
  Description of Artificial Sequence: Synthetic oligonucleotide
auaaacaggcuguaacuga

SEQ ID NO: 2892269 - RNA, 19 nt, Artificial Sequence
  Description of Artificial Sequence: Synthetic oligonucleotide
uuuccuacaaguuccuuau

SEQ ID NO: 2892270 - RNA, 19 nt, Artificial Sequence
  Description of Artificial Sequence: Synthetic oligonucleotide
uguaucccaguguuugggg

SEQ ID NO: 2892271 - RNA, 19 nt, Artificial Sequence
  Description of Artificial Sequence: Synthetic oligonucleotide
cuuuggucucuuuuauugg

SEQ ID NO: 2892272 - RNA, 19 nt, Artificial Sequence
  Description of Artificial Sequence: Synthetic oligonucleotide
gagagugacaggcuugacc

SEQ ID NO: 2892273 - RNA, 19 nt, Artificial Sequence
  Description of Artificial Sequence: Synthetic oligonucleotide
ucaaacuguaucccagugu

SEQ ID NO: 2892274 - RNA, 19 nt, Artificial Sequence
  Description of Artificial Sequence: Synthetic oligonucleotide
auuuacuccaaacuucaaa

SEQ ID NO: 2892275 - RNA, 19 nt, Artificial Sequence
  Description of Artificial Sequence: Synthetic oligonucleotide
uguccuuaaucacacaguu

SEQ ID NO: 2892276 - RNA, 19 nt, Artificial Sequence
  Description of Artificial Sequence: Synthetic oligonucleotide
acaggcuguaacugagacc

SEQ ID NO: 2892277 - RNA, 19 nt, Artificial Sequence
  Description of Artificial Sequence: Synthetic oligonucleotide
auuggaauaaacaggcugu

SEQ ID NO: 2892278 - RNA, 19 nt, Artificial Sequence
  Description of Artificial Sequence: Synthetic oligonucleotide
uuuuccuacaaguuccuua

SEQ ID NO: 2892279 - RNA, 19 nt, Artificial Sequence
  Description of Artificial Sequence: Synthetic oligonucleotide
gaaacugugugauuaauau

SEQ ID NO: 2892280 - RNA, 19 nt, Artificial Sequence
  Description of Artificial Sequence: Synthetic oligonucleotide
ucugaugaacucuuugguc

SEQ ID NO: 2892281 - RNA, 19 nt, Artificial Sequence
  Description of Artificial Sequence: Synthetic oligonucleotide
ggaauaaacaggcuguaac

SEQ ID NO: 2892282 - RNA, 19 nt, Artificial Sequence
  Description of Artificial Sequence: Synthetic oligonucleotide
cucuuuuauuggaauaaac

SEQ ID NO: 2892283 - RNA, 19 nt, Artificial Sequence
  Description of Artificial Sequence: Synthetic oligonucleotide
uacaaguuccuuauugaua

SEQ ID NO: 2892284 - RNA, 19 nt, Artificial Sequence
  Description of Artificial Sequence: Synthetic oligonucleotide
agccaaucaugucugauga

SEQ ID NO: 2892285 - RNA, 19 nt, Artificial Sequence
  Description of Artificial Sequence: Synthetic oligonucleotide
uuuuccagaaccgaauuua

SEQ ID NO: 2892286 - RNA, 19 nt, Artificial Sequence
  Description of Artificial Sequence: Synthetic oligonucleotide
aacucuuuggucucuuuua

SEQ ID NO: 2892287 - RNA, 19 nt, Artificial Sequence
  Description of Artificial Sequence: Synthetic oligonucleotide
uggacaagcagcaccgcug

SEQ ID NO: 2892288 - RNA, 19 nt, Artificial Sequence
  Description of Artificial Sequence: Synthetic oligonucleotide
ccgaauuuacuccaaaggg

SEQ ID NO: 2892289 - RNA, 19 nt, Artificial Sequence
  Description of Artificial Sequence: Synthetic oligonucleotide
aaaugggaaagaacuaggu

SEQ ID NO: 2892290 - RNA, 19 nt, Artificial Sequence
  Description of Artificial Sequence: Synthetic oligonucleotide
guuccuuauugauacagca

SEQ ID NO: 2892291 - RNA, 19 nt, Artificial Sequence
  Description of Artificial Sequence: Synthetic oligonucleotide
gaauaaacaggcuguaacu

SEQ ID NO: 2892292 - RNA, 19 nt, Artificial Sequence
  Description of Artificial Sequence: Synthetic oligonucleotide
caagucaauugacuaagac

SEQ ID NO: 2892293 - RNA, 19 nt, Artificial Sequence
  Description of Artificial Sequence: Synthetic oligonucleotide
uuuccagaaccgaauuuac

SEQ ID NO: 2892294 - RNA, 19 nt, Artificial Sequence
  Description of Artificial Sequence: Synthetic oligonucleotide
cacaggaucgaaaagugca

SEQ ID NO: 2892295 - RNA, 19 nt, Artificial Sequence
  Description of Artificial Sequence: Synthetic oligonucleotide
ugauagcagccaaucaugu

SEQ ID NO: 2892296 - RNA, 19 nt, Artificial Sequence
  Description of Artificial Sequence: Synthetic oligonucleotide
uugauacagcaaaauggga

SEQ ID NO: 2892297 - RNA, 19 nt, Artificial Sequence
  Description of Artificial Sequence: Synthetic oligonucleotide
aagaacuaggucccuuagu

SEQ ID NO: 2892298 - RNA, 19 nt, Artificial Sequence
  Description of Artificial Sequence: Synthetic oligonucleotide
cuccaaacuucaaacgaag

SEQ ID NO: 2892299 - RNA, 19 nt, Artificial Sequence
  Description of Artificial Sequence: Synthetic oligonucleotide
ugauuaauauguccuuaau

SEQ ID NO: 2892300 - RNA, 19 nt, Artificial Sequence
  Description of Artificial Sequence: Synthetic oligonucleotide
uaagacauggcaaccuuuu

SEQ ID NO: 2892301 - RNA, 19 nt, Artificial Sequence
  Description of Artificial Sequence: Synthetic oligonucleotide
acuucaaacgaagaugaga

SEQ ID NO: 2892302 - RNA, 19 nt, Artificial Sequence
  Description of Artificial Sequence: Synthetic oligonucleotide
aguuccuuauugauacagc

SEQ ID NO: 2892303 - RNA, 19 nt, Artificial Sequence
  Description of Artificial Sequence: Synthetic oligonucleotide
cacaguugugauagcagcc

SEQ ID NO: 2892304 - RNA, 19 nt, Artificial Sequence
  Description of Artificial Sequence: Synthetic oligonucleotide
caauugacuaagacauggc

SEQ ID NO: 2892305 - RNA, 19 nt, Artificial Sequence
  Description of Artificial Sequence: Synthetic oligonucleotide
uuccuuauugauacagcaa

SEQ ID NO: 2892306 - RNA, 19 nt, Artificial Sequence
  Description of Artificial Sequence: Synthetic oligonucleotide
acagccagugcuggaaugc

SEQ ID NO: 2892307 - RNA, 19 nt, Artificial Sequence
  Description of Artificial Sequence: Synthetic oligonucleotide
uuauuggaauaaacaggcu

SEQ ID NO: 2892308 - RNA, 19 nt, Artificial Sequence
  Description of Artificial Sequence: Synthetic oligonucleotide
aaaacagccagugcuggaa

SEQ ID NO: 2892309 - RNA, 19 nt, Artificial Sequence
  Description of Artificial Sequence: Synthetic oligonucleotide
uaacugagacccucaaacu

SEQ ID NO: 2892310 - RNA, 19 nt, Artificial Sequence
  Description of Artificial Sequence: Synthetic oligonucleotide
cacacaguugugauagcag

SEQ ID NO: 2892311 - RNA, 19 nt, Artificial Sequence
  Description of Artificial Sequence: Synthetic oligonucleotide
gacaggcuugaccacuggg

SEQ ID NO: 2892312 - RNA, 19 nt, Artificial Sequence
  Description of Artificial Sequence: Synthetic oligonucleotide
gaauuuacuccaaagggcu

SEQ ID NO: 2892313 - RNA, 19 nt, Artificial Sequence
  Description of Artificial Sequence: Synthetic oligonucleotide
acuguaucccaguguuugg

SEQ ID NO: 2892314 - RNA, 19 nt, Artificial Sequence
  Description of Artificial Sequence: Synthetic oligonucleotide
aacagccagugcuggaaug

SEQ ID NO: 2892315 - RNA, 19 nt, Artificial Sequence
  Description of Artificial Sequence: Synthetic oligonucleotide
uugugauagcagccaauca

SEQ ID NO: 2892316 - RNA, 19 nt, Artificial Sequence
  Description of Artificial Sequence: Synthetic oligonucleotide
ucaagucaauugacuaaga

SEQ ID NO: 2892317 - RNA, 19 nt, Artificial Sequence
  Description of Artificial Sequence: Synthetic oligonucleotide
aggcuugaccacuggggcc

SEQ ID NO: 2892318 - RNA, 19 nt, Artificial Sequence
  Description of Artificial Sequence: Synthetic oligonucleotide
gagacccucaaacuguauc

SEQ ID NO: 2892319 - RNA, 19 nt, Artificial Sequence
  Description of Artificial Sequence: Synthetic oligonucleotide
agcaccgcugcucugccuc

SEQ ID NO: 2892320 - RNA, 19 nt, Artificial Sequence
  Description of Artificial Sequence: Synthetic oligonucleotide
cuuaaucacacaguuguga

SEQ ID NO: 2892321 - RNA, 19 nt, Artificial Sequence
  Description of Artificial Sequence: Synthetic oligonucleotide
auugacuaagacauggcaa

SEQ ID NO: 2892322 - RNA, 19 nt, Artificial Sequence
  Description of Artificial Sequence: Synthetic oligonucleotide
ugaccacaggaucgaaaag

SEQ ID NO: 2892323 - RNA, 19 nt, Artificial Sequence
  Description of Artificial Sequence: Synthetic oligonucleotide
ucacacaguugugauagca

SEQ ID NO: 2892324 - RNA, 19 nt, Artificial Sequence
  Description of Artificial Sequence: Synthetic oligonucleotide
uguaacugagacccucaaa

SEQ ID NO: 2892325 - RNA, 19 nt, Artificial Sequence
  Description of Artificial Sequence: Synthetic oligonucleotide
acaggcuugaccacugggg

SEQ ID NO: 2892326 - RNA, 19 nt, Artificial Sequence
  Description of Artificial Sequence: Synthetic oligonucleotide
ugugauuaauauguccuua

SEQ ID NO: 2892327 - RNA, 19 nt, Artificial Sequence
  Description of Artificial Sequence: Synthetic oligonucleotide
uacagcaaaaugggaaaga

SEQ ID NO: 2892328 - RNA, 19 nt, Artificial Sequence
  Description of Artificial Sequence: Synthetic oligonucleotide
uagcagccaaucaugucug

SEQ ID NO: 2892329 - RNA, 19 nt, Artificial Sequence
  Description of Artificial Sequence: Synthetic oligonucleotide
gugcaaauuuacuccaaac

SEQ ID NO: 2892330 - RNA, 19 nt, Artificial Sequence
  Description of Artificial Sequence: Synthetic oligonucleotide
uugaccacuggggccaugg

SEQ ID NO: 2892331 - RNA, 19 nt, Artificial Sequence
  Description of Artificial Sequence: Synthetic oligonucleotide
aauuuacuccaaagggcug

SEQ ID NO: 2892332 - RNA, 19 nt, Artificial Sequence
  Description of Artificial Sequence: Synthetic oligonucleotide
gaugagagugacaggcuug

SEQ ID NO: 2892333 - RNA, 19 nt, Artificial Sequence
  Description of Artificial Sequence: Synthetic oligonucleotide
uuccagaaccgaauuuacu

SEQ ID NO: 2892334 - RNA, 19 nt, Artificial Sequence
  Description of Artificial Sequence: Synthetic oligonucleotide
agugcaaauuuacuccaaa

SEQ ID NO: 2892335 - RNA, 19 nt, Artificial Sequence
  Description of Artificial Sequence: Synthetic oligonucleotide
cgaauuuacuccaaagggc

SEQ ID NO: 2892336 - RNA, 19 nt, Artificial Sequence
  Description of Artificial Sequence: Synthetic oligonucleotide
auacagcaaaaugggaaag

SEQ ID NO: 2892337 - RNA, 19 nt, Artificial Sequence
  Description of Artificial Sequence: Synthetic oligonucleotide
caaacgaagaugagaguga

SEQ ID NO: 2892338 - RNA, 19 nt, Artificial Sequence
  Description of Artificial Sequence: Synthetic oligonucleotide
uuagugaccacaggaucga

SEQ ID NO: 2892339 - RNA, 19 nt, Artificial Sequence
  Description of Artificial Sequence: Synthetic oligonucleotide
cagcaaaaugggaaagaac

SEQ ID NO: 2892340 - RNA, 19 nt, Artificial Sequence
  Description of Artificial Sequence: Synthetic oligonucleotide
cuccuggacaagcagcacc

SEQ ID NO: 2892341 - RNA, 19 nt, Artificial Sequence
  Description of Artificial Sequence: Synthetic oligonucleotide
acuaggucccuuagugacc

SEQ ID NO: 2892342 - RNA, 19 nt, Artificial Sequence
  Description of Artificial Sequence: Synthetic oligonucleotide
gaucgaaaagugcaaauuu

SEQ ID NO: 2892343 - RNA, 19 nt, Artificial Sequence
  Description of Artificial Sequence: Synthetic oligonucleotide
acaagcagcaccgcugcuc

SEQ ID NO: 2892344 - RNA, 19 nt, Artificial Sequence
  Description of Artificial Sequence: Synthetic oligonucleotide
uuggucucuuuuauuggaa

SEQ ID NO: 2892345 - RNA, 19 nt, Artificial Sequence
  Description of Artificial Sequence: Synthetic oligonucleotide
gaaagaacuaggucccuua

SEQ ID NO: 2892346 - RNA, 19 nt, Artificial Sequence
  Description of Artificial Sequence: Synthetic oligonucleotide
uucaaacgaagaugagagu

SEQ ID NO: 2892347 - RNA, 19 nt, Artificial Sequence
  Description of Artificial Sequence: Synthetic oligonucleotide
cagccaaucaugucugaug

SEQ ID NO: 2892348 - RNA, 19 nt, Artificial Sequence
  Description of Artificial Sequence: Synthetic oligonucleotide
gauagcagccaaucauguc

SEQ ID NO: 2892349 - RNA, 19 nt, Artificial Sequence
  Description of Artificial Sequence: Synthetic oligonucleotide
cucaaacuguaucccagug

SEQ ID NO: 2892350 - RNA, 19 nt, Artificial Sequence
  Description of Artificial Sequence: Synthetic oligonucleotide
ugacuaagacauggcaacc

SEQ ID NO: 2892351 - RNA, 19 nt, Artificial Sequence
  Description of Artificial Sequence: Synthetic oligonucleotide
caggcuugaccacuggggc

SEQ ID NO: 2892352 - RNA, 19 nt, Artificial Sequence
  Description of Artificial Sequence: Synthetic oligonucleotide
guugugauagcagccaauc

SEQ ID NO: 2892353 - RNA, 19 nt, Artificial Sequence
  Description of Artificial Sequence: Synthetic oligonucleotide
gugauuaauauguccuuaa

SEQ ID NO: 2892354 - RNA, 19 nt, Artificial Sequence
  Description of Artificial Sequence: Synthetic oligonucleotide
cuucaagucaauugacuaa

SEQ ID NO: 2892355 - RNA, 19 nt, Artificial Sequence
  Description of Artificial Sequence: Synthetic oligonucleotide
gugaccacaggaucgaaaa

SEQ ID NO: 2892356 - RNA, 19 nt, Artificial Sequence
  Description of Artificial Sequence: Synthetic oligonucleotide
aucacacaguugugauagc

SEQ ID NO: 2892357 - RNA, 19 nt, Artificial Sequence
  Description of Artificial Sequence: Synthetic oligonucleotide
gaacuaggucccuuaguga

SEQ ID NO: 2892358 - RNA, 19 nt, Artificial Sequence
  Description of Artificial Sequence: Synthetic oligonucleotide
gcuggaaugcuucaaguca

SEQ ID NO: 2892359 - RNA, 19 nt, Artificial Sequence
  Description of Artificial Sequence: Synthetic oligonucleotide
acugagacccucaaacugu

SEQ ID NO: 2892360 - RNA, 19 nt, Artificial Sequence
  Description of Artificial Sequence: Synthetic oligonucleotide
aaacagccagugcuggaau

SEQ ID NO: 2892361 - RNA, 19 nt, Artificial Sequence
  Description of Artificial Sequence: Synthetic oligonucleotide
cuguaucccaguguuuggg

SEQ ID NO: 2892362 - RNA, 19 nt, Artificial Sequence
  Description of Artificial Sequence: Synthetic oligonucleotide
agaugagagugacaggcuu

SEQ ID NO: 2892363 - RNA, 19 nt, Artificial Sequence
  Description of Artificial Sequence: Synthetic oligonucleotide
uaaucacacaguugugaua

SEQ ID NO: 2892364 - RNA, 19 nt, Artificial Sequence
  Description of Artificial Sequence: Synthetic oligonucleotide
acaguugugauagcagcca

SEQ ID NO: 2892365 - RNA, 19 nt, Artificial Sequence
  Description of Artificial Sequence: Synthetic oligonucleotide
aggaucgaaaagugcaaau

SEQ ID NO: 2892366 - RNA, 19 nt, Artificial Sequence
  Description of Artificial Sequence: Synthetic oligonucleotide
acuaagacauggcaaccuu

SEQ ID NO: 2892367 - RNA, 19 nt, Artificial Sequence
  Description of Artificial Sequence: Synthetic oligonucleotide
ccagaaccgaauuuacucc

SEQ ID NO: 2892368 - RNA, 19 nt, Artificial Sequence
  Description of Artificial Sequence: Synthetic oligonucleotide
uaucccaguguuugggguc

SEQ ID NO: 2892369 - RNA, 19 nt, Artificial Sequence
  Description of Artificial Sequence: Synthetic oligonucleotide
aacuucaaacgaagaugag

SEQ ID NO: 2892370 - RNA, 19 nt, Artificial Sequence
  Description of Artificial Sequence: Synthetic oligonucleotide
acugugugauuaauauguc

SEQ ID NO: 2892371 - RNA, 19 nt, Artificial Sequence
  Description of Artificial Sequence: Synthetic oligonucleotide
cauggaaacugugugauua

SEQ ID NO: 2892372 - RNA, 19 nt, Artificial Sequence
  Description of Artificial Sequence: Synthetic oligonucleotide
augcuucaagucaauugac

SEQ ID NO: 2892373 - RNA, 19 nt, Artificial Sequence
  Description of Artificial Sequence: Synthetic oligonucleotide
caguguuuggggucagaag

SEQ ID NO: 2892374 - RNA, 19 nt, Artificial Sequence
  Description of Artificial Sequence: Synthetic oligonucleotide
uguuuggggucagaaggca

SEQ ID NO: 2892375 - RNA, 19 nt, Artificial Sequence
  Description of Artificial Sequence: Synthetic oligonucleotide
ugacaggcuugaccacugg

SEQ ID NO: 2892376 - RNA, 19 nt, Artificial Sequence
  Description of Artificial Sequence: Synthetic oligonucleotide
cuuggaggcggcucccugc

SEQ ID NO: 2892377 - RNA, 19 nt, Artificial Sequence
  Description of Artificial Sequence: Synthetic oligonucleotide
uggucucuuuuauuggaau

SEQ ID NO: 2892378 - RNA, 19 nt, Artificial Sequence
  Description of Artificial Sequence: Synthetic oligonucleotide
aagaugagagugacaggcu

SEQ ID NO: 2892379 - RNA, 19 nt, Artificial Sequence
  Description of Artificial Sequence: Synthetic oligonucleotide
accacaggaucgaaaagug

SEQ ID NO: 2892380 - RNA, 19 nt, Artificial Sequence
  Description of Artificial Sequence: Synthetic oligonucleotide
uccuuggccuuggaggcgg

SEQ ID NO: 2892381 - RNA, 19 nt, Artificial Sequence
  Description of Artificial Sequence: Synthetic oligonucleotide
gucucuuuuauuggaauaa

SEQ ID NO: 2892382 - RNA, 19 nt, Artificial Sequence
  Description of Artificial Sequence: Synthetic oligonucleotide
gacccucaaacuguauccc

SEQ ID NO: 2892383 - RNA, 19 nt, Artificial Sequence
  Description of Artificial Sequence: Synthetic oligonucleotide
uccagucuggcuggggucc

SEQ ID NO: 2892384 - RNA, 19 nt, Artificial Sequence
  Description of Artificial Sequence: Synthetic oligonucleotide
gguccuuggccuuggaggc

SEQ ID NO: 2892385 - RNA, 19 nt, Artificial Sequence
  Description of Artificial Sequence: Synthetic oligonucleotide
cagaaccgaauuuacucca

SEQ ID NO: 2892386 - RNA, 19 nt, Artificial Sequence
  Description of Artificial Sequence: Synthetic oligonucleotide
agugacaggcuugaccacu

SEQ ID NO: 2892387 - RNA, 19 nt, Artificial Sequence
  Description of Artificial Sequence: Synthetic oligonucleotide
aucgaaaagugcaaauuua

SEQ ID NO: 2892388 - RNA, 19 nt, Artificial Sequence
  Description of Artificial Sequence: Synthetic oligonucleotide
uggaauaaacaggcuguaa

SEQ ID NO: 2892389 - RNA, 19 nt, Artificial Sequence
  Description of Artificial Sequence: Synthetic oligonucleotide
cuggaaugcuucaagucaa

SEQ ID NO: 2892390 - RNA, 19 nt, Artificial Sequence
  Description of Artificial Sequence: Synthetic oligonucleotide
gucagaaggcacauuaaaa

SEQ ID NO: 2892391 - RNA, 19 nt, Artificial Sequence
  Description of Artificial Sequence: Synthetic oligonucleotide
gaccacaggaucgaaaagu

SEQ ID NO: 2892392 - RNA, 19 nt, Artificial Sequence
  Description of Artificial Sequence: Synthetic oligonucleotide
uuuacuccaaagggcugcu

SEQ ID NO: 2892393 - RNA, 19 nt, Artificial Sequence
  Description of Artificial Sequence: Synthetic oligonucleotide
ccaaucaugucugaugaac

SEQ ID NO: 2892394 - RNA, 19 nt, Artificial Sequence
  Description of Artificial Sequence: Synthetic oligonucleotide
uccaaagggcugcuccagu

SEQ ID NO: 2892395 - RNA, 19 nt, Artificial Sequence
  Description of Artificial Sequence: Synthetic oligonucleotide
ugccucucccagcucaagu

SEQ ID NO: 2892396 - RNA, 19 nt, Artificial Sequence
  Description of Artificial Sequence: Synthetic oligonucleotide
auggaaacugugugauuaa

SEQ ID NO: 2892397 - RNA, 19 nt, Artificial Sequence
  Description of Artificial Sequence: Synthetic oligonucleotide
acuccaaacuucaaacgaa

SEQ ID NO: 2892398 - RNA, 19 nt, Artificial Sequence
  Description of Artificial Sequence: Synthetic oligonucleotide
augagagugacaggcuuga

SEQ ID NO: 2892399 - RNA, 19 nt, Artificial Sequence
  Description of Artificial Sequence: Synthetic oligonucleotide
gcaaauuuacuccaaacuu

SEQ ID NO: 2892400 - RNA, 19 nt, Artificial Sequence
  Description of Artificial Sequence: Synthetic oligonucleotide
accgcugcucugccucucc

SEQ ID NO: 2892401 - RNA, 19 nt, Artificial Sequence
  Description of Artificial Sequence: Synthetic oligonucleotide
ugcucgcagcuccuggaca

SEQ ID NO: 2892402 - RNA, 19 nt, Artificial Sequence
  Description of Artificial Sequence: Synthetic oligonucleotide
acccucaaacuguauccca

SEQ ID NO: 2892403 - RNA, 19 nt, Artificial Sequence
  Description of Artificial Sequence: Synthetic oligonucleotide
guguuuggggucagaaggc

SEQ ID NO: 2892404 - RNA, 19 nt, Artificial Sequence
  Description of Artificial Sequence: Synthetic oligonucleotide
auguccuuaaucacacagu

SEQ ID NO: 2892405 - RNA, 19 nt, Artificial Sequence
  Description of Artificial Sequence: Synthetic oligonucleotide
caaacuguaucccaguguu

SEQ ID NO: 2892406 - RNA, 19 nt, Artificial Sequence
  Description of Artificial Sequence: Synthetic oligonucleotide
aauuuacuccaaacuucaa

SEQ ID NO: 2892407 - RNA, 19 nt, Artificial Sequence
  Description of Artificial Sequence: Synthetic oligonucleotide
ggaggcggcucccugcucg

SEQ ID NO: 2892408 - RNA, 19 nt, Artificial Sequence
  Description of Artificial Sequence: Synthetic oligonucleotide
uuggaauaaacaggcugua

SEQ ID NO: 2892409 - RNA, 19 nt, Artificial Sequence
  Description of Artificial Sequence: Synthetic oligonucleotide
caaucaugucugaugaacu

SEQ ID NO: 2892410 - RNA, 19 nt, Artificial Sequence
  Description of Artificial Sequence: Synthetic oligonucleotide
aaacaggcuguaacugaga

SEQ ID NO: 2892411 - RNA, 19 nt, Artificial Sequence
  Description of Artificial Sequence: Synthetic oligonucleotide
gcuucaagucaauugacua

SEQ ID NO: 2892412 - RNA, 19 nt, Artificial Sequence
  Description of Artificial Sequence: Synthetic oligonucleotide
gaaccgaauuuacuccaaa

SEQ ID NO: 2892413 - RNA, 19 nt, Artificial Sequence
  Description of Artificial Sequence: Synthetic oligonucleotide
uggaaugcuucaagucaau

SEQ ID NO: 2892414 - RNA, 19 nt, Artificial Sequence
  Description of Artificial Sequence: Synthetic oligonucleotide
aacgaagaugagagugaca

SEQ ID NO: 2892415 - RNA, 19 nt, Artificial Sequence
  Description of Artificial Sequence: Synthetic oligonucleotide
auauguccuuaaucacaca

SEQ ID NO: 2892416 - RNA, 19 nt, Artificial Sequence
  Description of Artificial Sequence: Synthetic oligonucleotide
gucugaugaacucuuuggu

SEQ ID NO: 2892417 - RNA, 19 nt, Artificial Sequence
  Description of Artificial Sequence: Synthetic oligonucleotide
gucccuuagugaccacagg

SEQ ID NO: 2892418 - RNA, 19 nt, Artificial Sequence
  Description of Artificial Sequence: Synthetic oligonucleotide
ggacaagcagcaccgcugc

SEQ ID NO: 2892419 - RNA, 19 nt, Artificial Sequence
  Description of Artificial Sequence: Synthetic oligonucleotide
gggccauggaaacugugug

SEQ ID NO: 2892420 - RNA, 19 nt, Artificial Sequence
  Description of Artificial Sequence: Synthetic oligonucleotide
uggaaacugugugauuaau

SEQ ID NO: 2892421 - RNA, 19 nt, Artificial Sequence
  Description of Artificial Sequence: Synthetic oligonucleotide
gcugcuccagucuggcugg

SEQ ID NO: 2892422 - RNA, 19 nt, Artificial Sequence
  Description of Artificial Sequence: Synthetic oligonucleotide
cuuauugauacagcaaaau

SEQ ID NO: 2892423 - RNA, 19 nt, Artificial Sequence
  Description of Artificial Sequence: Synthetic oligonucleotide
guccuuaaucacacaguug

SEQ ID NO: 2892424 - RNA, 19 nt, Artificial Sequence
  Description of Artificial Sequence: Synthetic oligonucleotide
ggucagaaggcacauuaaa

SEQ ID NO: 2892425 - RNA, 19 nt, Artificial Sequence
  Description of Artificial Sequence: Synthetic oligonucleotide
gucaauugacuaagacaug

SEQ ID NO: 2892426 - RNA, 19 nt, Artificial Sequence
  Description of Artificial Sequence: Synthetic oligonucleotide
uggcugggguccuuggccu

SEQ ID NO: 2892427 - RNA, 19 nt, Artificial Sequence
  Description of Artificial Sequence: Synthetic oligonucleotide
aagugcaaauuuacuccaa

SEQ ID NO: 2892428 - RNA, 19 nt, Artificial Sequence
  Description of Artificial Sequence: Synthetic oligonucleotide
ccuacaaguuccuuauuga

SEQ ID NO: 2892429 - RNA, 19 nt, Artificial Sequence
  Description of Artificial Sequence: Synthetic oligonucleotide
cuaggucccuuagugacca

SEQ ID NO: 2892430 - RNA, 19 nt, Artificial Sequence
  Description of Artificial Sequence: Synthetic oligonucleotide
agcuccuggacaagcagca

SEQ ID NO: 2892431 - RNA, 19 nt, Artificial Sequence
  Description of Artificial Sequence: Synthetic oligonucleotide
cccucaaacuguaucccag

SEQ ID NO: 2892432 - RNA, 19 nt, Artificial Sequence
  Description of Artificial Sequence: Synthetic oligonucleotide
gaccacuggggccauggaa

SEQ ID NO: 2892433 - RNA, 19 nt, Artificial Sequence
  Description of Artificial Sequence: Synthetic oligonucleotide
gacuaagacauggcaaccu

SEQ ID NO: 2892434 - RNA, 19 nt, Artificial Sequence
  Description of Artificial Sequence: Synthetic oligonucleotide
cuacaaguuccuuauugau

SEQ ID NO: 2892435 - RNA, 19 nt, Artificial Sequence
  Description of Artificial Sequence: Synthetic oligonucleotide
ccuuagugaccacaggauc

SEQ ID NO: 2892436 - RNA, 19 nt, Artificial Sequence
  Description of Artificial Sequence: Synthetic oligonucleotide
acaggaucgaaaagugcaa

SEQ ID NO: 2892437 - RNA, 19 nt, Artificial Sequence
  Description of Artificial Sequence: Synthetic oligonucleotide
ugaacucuuuggucucuuu

SEQ ID NO: 2892438 - RNA, 19 nt, Artificial Sequence
  Description of Artificial Sequence: Synthetic oligonucleotide
gagugacaggcuugaccac

SEQ ID NO: 2892439 - RNA, 19 nt, Artificial Sequence
  Description of Artificial Sequence: Synthetic oligonucleotide
ggggucagaaggcacauua

SEQ ID NO: 2892440 - RNA, 19 nt, Artificial Sequence
  Description of Artificial Sequence: Synthetic oligonucleotide
gaacucuuuggucucuuuu

SEQ ID NO: 2892441 - RNA, 19 nt, Artificial Sequence
  Description of Artificial Sequence: Synthetic oligonucleotide
ggucccuuagugaccacag

SEQ ID NO: 2892442 - RNA, 19 nt, Artificial Sequence
  Description of Artificial Sequence: Synthetic oligonucleotide
ugagacccucaaacuguau

SEQ ID NO: 2892443 - RNA, 19 nt, Artificial Sequence
  Description of Artificial Sequence: Synthetic oligonucleotide
guuuggggucagaaggcac

SEQ ID NO: 2892444 - RNA, 19 nt, Artificial Sequence
  Description of Artificial Sequence: Synthetic oligonucleotide
ccacaggaucgaaaagugc

SEQ ID NO: 2892445 - RNA, 19 nt, Artificial Sequence
  Description of Artificial Sequence: Synthetic oligonucleotide
cuccaaagggcugcuccag

SEQ ID NO: 2892446 - RNA, 19 nt, Artificial Sequence
  Description of Artificial Sequence: Synthetic oligonucleotide
ugaccacuggggccaugga

SEQ ID NO: 2892447 - RNA, 19 nt, Artificial Sequence
  Description of Artificial Sequence: Synthetic oligonucleotide
aaacuguaucccaguguuu

SEQ ID NO: 2892448 - RNA, 19 nt, Artificial Sequence
  Description of Artificial Sequence: Synthetic oligonucleotide
aucccaguguuugggguca

SEQ ID NO: 2892449 - RNA, 19 nt, Artificial Sequence
  Description of Artificial Sequence: Synthetic oligonucleotide
gugacaggcuugaccacug

SEQ ID NO: 2892450 - RNA, 19 nt, Artificial Sequence
  Description of Artificial Sequence: Synthetic oligonucleotide
ggucucuuuuauuggaaua

SEQ ID NO: 2892451 - RNA, 19 nt, Artificial Sequence
  Description of Artificial Sequence: Synthetic oligonucleotide
aguugugauagcagccaau

SEQ ID NO: 2892452 - RNA, 19 nt, Artificial Sequence
  Description of Artificial Sequence: Synthetic oligonucleotide
guaucccaguguuuggggu

SEQ ID NO: 2892453 - RNA, 19 nt, Artificial Sequence
  Description of Artificial Sequence: Synthetic oligonucleotide
agugaccacaggaucgaaa

SEQ ID NO: 2892454 - RNA, 19 nt, Artificial Sequence
  Description of Artificial Sequence: Synthetic oligonucleotide
ccuuaaucacacaguugug

SEQ ID NO: 2892455 - RNA, 19 nt, Artificial Sequence
  Description of Artificial Sequence: Synthetic oligonucleotide
aggucccuuagugaccaca

SEQ ID NO: 2892456 - RNA, 19 nt, Artificial Sequence
  Description of Artificial Sequence: Synthetic oligonucleotide
uuggccuuggaggcggcuc

SEQ ID NO: 2892457 - RNA, 19 nt, Artificial Sequence
  Description of Artificial Sequence: Synthetic oligonucleotide
gcucccugcucgcagcucc

SEQ ID NO: 2892458 - RNA, 19 nt, Artificial Sequence
  Description of Artificial Sequence: Synthetic oligonucleotide
uuccuacaaguuccuuauu

SEQ ID NO: 2892459 - RNA, 19 nt, Artificial Sequence
  Description of Artificial Sequence: Synthetic oligonucleotide
ugcuccagucuggcugggg

SEQ ID NO: 2892460 - RNA, 19 nt, Artificial Sequence
  Description of Artificial Sequence: Synthetic oligonucleotide
ggccauggaaacuguguga

SEQ ID NO: 2892461 - RNA, 19 nt, Artificial Sequence
  Description of Artificial Sequence: Synthetic oligonucleotide
agaaccgaauuuacuccaa

SEQ ID NO: 2892462 - RNA, 19 nt, Artificial Sequence
  Description of Artificial Sequence: Synthetic oligonucleotide
caaguuccuuauugauaca

SEQ ID NO: 2892463 - RNA, 19 nt, Artificial Sequence
  Description of Artificial Sequence: Synthetic oligonucleotide
agcagccaaucaugucuga

SEQ ID NO: 2892464 - RNA, 19 nt, Artificial Sequence
  Description of Artificial Sequence: Synthetic oligonucleotide
ggaaacugugugauuaaua

SEQ ID NO: 2892465 - RNA, 19 nt, Artificial Sequence
  Description of Artificial Sequence: Synthetic oligonucleotide
cugcucgcagcuccuggac

SEQ ID NO: 2892466 - RNA, 19 nt, Artificial Sequence
  Description of Artificial Sequence: Synthetic oligonucleotide
ugagagugacaggcuugac

SEQ ID NO: 2892467 - RNA, 19 nt, Artificial Sequence
  Description of Artificial Sequence: Synthetic oligonucleotide
gaggcggcucccugcucgc

SEQ ID NO: 2892468 - RNA, 19 nt, Artificial Sequence
  Description of Artificial Sequence: Synthetic oligonucleotide
gugugauuaauauguccuu

SEQ ID NO: 2892469 - RNA, 19 nt, Artificial Sequence
  Description of Artificial Sequence: Synthetic oligonucleotide
ccuuauugauacagcaaaa

SEQ ID NO: 2892470 - RNA, 19 nt, Artificial Sequence
  Description of Artificial Sequence: Synthetic oligonucleotide
ccaaagggcugcuccaguc

SEQ ID NO: 2892471 - RNA, 19 nt, Artificial Sequence
  Description of Artificial Sequence: Synthetic oligonucleotide
caagcagcaccgcugcucu

SEQ ID NO: 2892472 - RNA, 19 nt, Artificial Sequence
  Description of Artificial Sequence: Synthetic oligonucleotide
guccuuggccuuggaggcg

SEQ ID NO: 2892473 - RNA, 19 nt, Artificial Sequence
  Description of Artificial Sequence: Synthetic oligonucleotide
cuaagacauggcaaccuuu

SEQ ID NO: 2892474 - RNA, 19 nt, Artificial Sequence
  Description of Artificial Sequence: Synthetic oligonucleotide
cugagacccucaaacugua

SEQ ID NO: 2892475 - RNA, 19 nt, Artificial Sequence
  Description of Artificial Sequence: Synthetic oligonucleotide
cuguaacugagacccucaa

SEQ ID NO: 2892476 - RNA, 19 nt, Artificial Sequence
  Description of Artificial Sequence: Synthetic oligonucleotide
caguugugauagcagccaa

SEQ ID NO: 2892477 - RNA, 19 nt, Artificial Sequence
  Description of Artificial Sequence: Synthetic oligonucleotide
gcaaaaugggaaagaacua

SEQ ID NO: 2892478 - RNA, 19 nt, Artificial Sequence
  Description of Artificial Sequence: Synthetic oligonucleotide
caggaucgaaaagugcaaa

SEQ ID NO: 2892479 - RNA, 19 nt, Artificial Sequence
  Description of Artificial Sequence: Synthetic oligonucleotide
agucuggcugggguccuug

SEQ ID NO: 2892480 - RNA, 19 nt, Artificial Sequence
  Description of Artificial Sequence: Synthetic oligonucleotide
caaagggcugcuccagucu

SEQ ID NO: 2892481 - RNA, 19 nt, Artificial Sequence
  Description of Artificial Sequence: Synthetic oligonucleotide
uuacuccaaagggcugcuc

SEQ ID NO: 2892482 - RNA, 19 nt, Artificial Sequence
  Description of Artificial Sequence: Synthetic oligonucleotide
ggcuguaacugagacccuc

SEQ ID NO: 2892483 - RNA, 19 nt, Artificial Sequence
  Description of Artificial Sequence: Synthetic oligonucleotide
gccagugcuggaaugcuuc

SEQ ID NO: 2892484 - RNA, 19 nt, Artificial Sequence
  Description of Artificial Sequence: Synthetic oligonucleotide
uagugaccacaggaucgaa

SEQ ID NO: 2892485 - RNA, 19 nt, Artificial Sequence
  Description of Artificial Sequence: Synthetic oligonucleotide
augaacucuuuggucucuu

SEQ ID NO: 2892486 - RNA, 19 nt, Artificial Sequence
  Description of Artificial Sequence: Synthetic oligonucleotide
cuggacaagcagcaccgcu

SEQ ID NO: 2892487 - RNA, 19 nt, Artificial Sequence
  Description of Artificial Sequence: Synthetic oligonucleotide
gcuguaacugagacccuca

SEQ ID NO: 2892488 - RNA, 19 nt, Artificial Sequence
  Description of Artificial Sequence: Synthetic oligonucleotide
ggaucgaaaagugcaaauu

SEQ ID NO: 2892489 - RNA, 19 nt, Artificial Sequence
  Description of Artificial Sequence: Synthetic oligonucleotide
gcucgcagcuccuggacaa

SEQ ID NO: 2892490 - RNA, 19 nt, Artificial Sequence
  Description of Artificial Sequence: Synthetic oligonucleotide
ggcggcucccugcucgcag

SEQ ID NO: 2892491 - RNA, 19 nt, Artificial Sequence
  Description of Artificial Sequence: Synthetic oligonucleotide
cgaaaagugcaaauuuacu

SEQ ID NO: 2892492 - RNA, 19 nt, Artificial Sequence
  Description of Artificial Sequence: Synthetic oligonucleotide
uaggucccuuagugaccac

SEQ ID NO: 2892493 - RNA, 19 nt, Artificial Sequence
  Description of Artificial Sequence: Synthetic oligonucleotide
gcagcaccgcugcucugcc

SEQ ID NO: 2892494 - RNA, 19 nt, Artificial Sequence
  Description of Artificial Sequence: Synthetic oligonucleotide
ucccugcucgcagcuccug

SEQ ID NO: 2892495 - RNA, 19 nt, Artificial Sequence
  Description of Artificial Sequence: Synthetic oligonucleotide
uggaggcggcucccugcuc

SEQ ID NO: 2892496 - RNA, 19 nt, Artificial Sequence
  Description of Artificial Sequence: Synthetic oligonucleotide
gccauggaaacugugugau

SEQ ID NO: 2892497 - RNA, 19 nt, Artificial Sequence
  Description of Artificial Sequence: Synthetic oligonucleotide
cccugcucgcagcuccugg

SEQ ID NO: 2892498 - RNA, 19 nt, Artificial Sequence
  Description of Artificial Sequence: Synthetic oligonucleotide
gacaagcagcaccgcugcu

SEQ ID NO: 2892499 - RNA, 19 nt, Artificial Sequence
  Description of Artificial Sequence: Synthetic oligonucleotide
caugucugaugaacucuuu

SEQ ID NO: 2892500 - RNA, 19 nt, Artificial Sequence
  Description of Artificial Sequence: Synthetic oligonucleotide
gcuccagucuggcuggggu

SEQ ID NO: 2892501 - RNA, 19 nt, Artificial Sequence
  Description of Artificial Sequence: Synthetic oligonucleotide
gccaaucaugucugaugaa

SEQ ID NO: 2892502 - RNA, 19 nt, Artificial Sequence
  Description of Artificial Sequence: Synthetic oligonucleotide
uggggucagaaggcacauu

SEQ ID NO: 2892503 - RNA, 19 nt, Artificial Sequence
  Description of Artificial Sequence: Synthetic oligonucleotide
gcggcucccugcucgcagc

SEQ ID NO: 2892504 - RNA, 19 nt, Artificial Sequence
  Description of Artificial Sequence: Synthetic oligonucleotide
cagugcuggaaugcuucaa

SEQ ID NO: 2892505 - RNA, 19 nt, Artificial Sequence
  Description of Artificial Sequence: Synthetic oligonucleotide
gggucagaaggcacauuaa

SEQ ID NO: 2892506 - RNA, 19 nt, Artificial Sequence
  Description of Artificial Sequence: Synthetic oligonucleotide
cugcuccagucuggcuggg

SEQ ID NO: 2892507 - RNA, 19 nt, Artificial Sequence
  Description of Artificial Sequence: Synthetic oligonucleotide
cuugaccacuggggccaug

SEQ ID NO: 2892508 - RNA, 19 nt, Artificial Sequence
  Description of Artificial Sequence: Synthetic oligonucleotide
ccuuggaggcggcucccug

SEQ ID NO: 2892509 - RNA, 19 nt, Artificial Sequence
  Description of Artificial Sequence: Synthetic oligonucleotide
ccaguguuuggggucagaa

SEQ ID NO: 2892510 - RNA, 19 nt, Artificial Sequence
  Description of Artificial Sequence: Synthetic oligonucleotide
ccugcucgcagcuccugga

SEQ ID NO: 2892511 - RNA, 19 nt, Artificial Sequence
  Description of Artificial Sequence: Synthetic oligonucleotide
ccagugcuggaaugcuuca

SEQ ID NO: 2892512 - RNA, 19 nt, Artificial Sequence
  Description of Artificial Sequence: Synthetic oligonucleotide
gcugggguccuuggccuug

SEQ ID NO: 2892513 - RNA, 19 nt, Artificial Sequence
  Description of Artificial Sequence: Synthetic oligonucleotide
cccuuagugaccacaggau

SEQ ID NO: 2892514 - RNA, 19 nt, Artificial Sequence
  Description of Artificial Sequence: Synthetic oligonucleotide
ccucaaacuguaucccagu

SEQ ID NO: 2892515 - RNA, 19 nt, Artificial Sequence
  Description of Artificial Sequence: Synthetic oligonucleotide
ggaaagaacuaggucccuu

SEQ ID NO: 2892516 - RNA, 19 nt, Artificial Sequence
  Description of Artificial Sequence: Synthetic oligonucleotide
aggcuguaacugagacccu

SEQ ID NO: 2892517 - RNA, 19 nt, Artificial Sequence
  Description of Artificial Sequence: Synthetic oligonucleotide
ccuggacaagcagcaccgc

SEQ ID NO: 2892518 - RNA, 19 nt, Artificial Sequence
  Description of Artificial Sequence: Synthetic oligonucleotide
ggaaugcuucaagucaauu

SEQ ID NO: 2892519 - RNA, 19 nt, Artificial Sequence
  Description of Artificial Sequence: Synthetic oligonucleotide
gccucucccagcucaaguu

SEQ ID NO: 2892520 - RNA, 19 nt, Artificial Sequence
  Description of Artificial Sequence: Synthetic oligonucleotide
cuggggccauggaaacugu

SEQ ID NO: 2892521 - RNA, 19 nt, Artificial Sequence
  Description of Artificial Sequence: Synthetic oligonucleotide
ccgcugcucugccucuccc

SEQ ID NO: 2892522 - RNA, 19 nt, Artificial Sequence
  Description of Artificial Sequence: Synthetic oligonucleotide
cagccagugcuggaaugcu

SEQ ID NO: 2892523 - RNA, 19 nt, Artificial Sequence
  Description of Artificial Sequence: Synthetic oligonucleotide
caccgcugcucugccucuc

SEQ ID NO: 2892524 - RNA, 19 nt, Artificial Sequence
  Description of Artificial Sequence: Synthetic oligonucleotide
ggccuuggaggcggcuccc

SEQ ID NO: 2892525 - RNA, 19 nt, Artificial Sequence
  Description of Artificial Sequence: Synthetic oligonucleotide
gcagccaaucaugucugau

SEQ ID NO: 2892526 - RNA, 19 nt, Artificial Sequence
  Description of Artificial Sequence: Synthetic oligonucleotide
cgcagcuccuggacaagca

SEQ ID NO: 2892527 - RNA, 19 nt, Artificial Sequence
  Description of Artificial Sequence: Synthetic oligonucleotide
aggcggcucccugcucgca

SEQ ID NO: 2892528 - RNA, 19 nt, Artificial Sequence
  Description of Artificial Sequence: Synthetic oligonucleotide
gggaaagaacuaggucccu

SEQ ID NO: 2892529 - RNA, 19 nt, Artificial Sequence
  Description of Artificial Sequence: Synthetic oligonucleotide
cucccugcucgcagcuccu

SEQ ID NO: 2892530 - RNA, 19 nt, Artificial Sequence
  Description of Artificial Sequence: Synthetic oligonucleotide
cuuggccuuggaggcggcu

SEQ ID NO: 2892531 - RNA, 19 nt, Artificial Sequence
  Description of Artificial Sequence: Synthetic oligonucleotide
cagcaccgcugcucugccu

SEQ ID NO: 2892532 - RNA, 19 nt, Artificial Sequence
  Description of Artificial Sequence: Synthetic oligonucleotide
ccauggaaacugugugauu

SEQ ID NO: 2892533 - RNA, 19 nt, Artificial Sequence
  Description of Artificial Sequence: Synthetic oligonucleotide
gcaccgcugcucugccucu

SEQ ID NO: 2892534 - RNA, 19 nt, Artificial Sequence
  Description of Artificial Sequence: Synthetic oligonucleotide
ggcugggguccuuggccuu

SEQ ID NO: 2892535 - RNA, 19 nt, Artificial Sequence
  Description of Artificial Sequence: Synthetic oligonucleotide
cagucuggcugggguccuu

SEQ ID NO: 2892536 - RNA, 19 nt, Artificial Sequence
  Description of Artificial Sequence: Synthetic oligonucleotide
ccagucuggcugggguccu

SEQ ID NO: 2892537 - RNA, 19 nt, Artificial Sequence
  Description of Artificial Sequence: Synthetic oligonucleotide
gcuugaccacuggggccau

SEQ ID NO: 2892538 - RNA, 19 nt, Artificial Sequence
  Description of Artificial Sequence: Synthetic oligonucleotide
gaugguacauuucugaugg

SEQ ID NO: 2892539 - RNA, 19 nt, Artificial Sequence
  Description of Artificial Sequence: Synthetic oligonucleotide
uaagauuaaaccagcauag

SEQ ID NO: 2892540 - RNA, 19 nt, Artificial Sequence
  Description of Artificial Sequence: Synthetic oligonucleotide
uccauuuaagauuaaacca

SEQ ID NO: 2892541 - RNA, 19 nt, Artificial Sequence
  Description of Artificial Sequence: Synthetic oligonucleotide
uuaagauuaaaccagcaua

SEQ ID NO: 2892542 - RNA, 19 nt, Artificial Sequence
  Description of Artificial Sequence: Synthetic oligonucleotide
ugaaauuggagucagguau

SEQ ID NO: 2892543 - RNA, 19 nt, Artificial Sequence
  Description of Artificial Sequence: Synthetic oligonucleotide
aucuaccuggaauauaucc

SEQ ID NO: 2892544 - RNA, 19 nt, Artificial Sequence
  Description of Artificial Sequence: Synthetic oligonucleotide
agauuaaaccagcauaggg

SEQ ID NO: 2892545 - RNA, 19 nt, Artificial Sequence
  Description of Artificial Sequence: Synthetic oligonucleotide
cuccauuuaagauuaaacc

SEQ ID NO: 2892546 - RNA, 19 nt, Artificial Sequence
  Description of Artificial Sequence: Synthetic oligonucleotide
agcuugauuuuccaguucc

SEQ ID NO: 2892547 - RNA, 19 nt, Artificial Sequence
  Description of Artificial Sequence: Synthetic oligonucleotide
gauuaaaccagcauagggc

SEQ ID NO: 2892548 - RNA, 19 nt, Artificial Sequence
  Description of Artificial Sequence: Synthetic oligonucleotide
aauaaguccugcuaucaca

SEQ ID NO: 2892549 - RNA, 19 nt, Artificial Sequence
  Description of Artificial Sequence: Synthetic oligonucleotide
uguaguaaggucugaaucu

SEQ ID NO: 2892550 - RNA, 19 nt, Artificial Sequence
  Description of Artificial Sequence: Synthetic oligonucleotide
uuucugaugguuacugagg

SEQ ID NO: 2892551 - RNA, 19 nt, Artificial Sequence
  Description of Artificial Sequence: Synthetic oligonucleotide
accuuuucuagguaugggc

SEQ ID NO: 2892552 - RNA, 19 nt, Artificial Sequence
  Description of Artificial Sequence: Synthetic oligonucleotide
auuaaaccagcauagggcu

SEQ ID NO: 2892553 - RNA, 19 nt, Artificial Sequence
  Description of Artificial Sequence: Synthetic oligonucleotide
agucagguauuucugcugc

SEQ ID NO: 2892554 - RNA, 19 nt, Artificial Sequence
  Description of Artificial Sequence: Synthetic oligonucleotide
ucuaucagcacuucuugcc

SEQ ID NO: 2892555 - RNA, 19 nt, Artificial Sequence
  Description of Artificial Sequence: Synthetic oligonucleotide
uuuaagauuaaaccagcau

SEQ ID NO: 2892556 - RNA, 19 nt, Artificial Sequence
  Description of Artificial Sequence: Synthetic oligonucleotide
auuucugaugguuacugag

SEQ ID NO: 2892557 - RNA, 19 nt, Artificial Sequence
  Description of Artificial Sequence: Synthetic oligonucleotide
uuugaaauuggagucaggu

SEQ ID NO: 2892558 - RNA, 19 nt, Artificial Sequence
  Description of Artificial Sequence: Synthetic oligonucleotide
cuucauuuuccucagaguc

SEQ ID NO: 2892559 - RNA, 19 nt, Artificial Sequence
  Description of Artificial Sequence: Synthetic oligonucleotide
uccucagagucuuugagcc

SEQ ID NO: 2892560 - RNA, 19 nt, Artificial Sequence
  Description of Artificial Sequence: Synthetic oligonucleotide
ucuccaaugucaauaaguc

SEQ ID NO: 2892561 - RNA, 19 nt, Artificial Sequence
  Description of Artificial Sequence: Synthetic oligonucleotide
ugggguuugaaauuggagu

SEQ ID NO: 2892562 - RNA, 19 nt, Artificial Sequence
  Description of Artificial Sequence: Synthetic oligonucleotide
auuggagucagguauuucu

SEQ ID NO: 2892563 - RNA, 19 nt, Artificial Sequence
  Description of Artificial Sequence: Synthetic oligonucleotide
ugauuuuccaguuccacaa

SEQ ID NO: 2892564 - RNA, 19 nt, Artificial Sequence
  Description of Artificial Sequence: Synthetic oligonucleotide
uggaauauauccuucccac

SEQ ID NO: 2892565 - RNA, 19 nt, Artificial Sequence
  Description of Artificial Sequence: Synthetic oligonucleotide
ucuaccuggaauauauccu

SEQ ID NO: 2892566 - RNA, 19 nt, Artificial Sequence
  Description of Artificial Sequence: Synthetic oligonucleotide
cauuuaagauuaaaccagc

SEQ ID NO: 2892567 - RNA, 19 nt, Artificial Sequence
  Description of Artificial Sequence: Synthetic oligonucleotide
aaugucaauaaguccugcu

SEQ ID NO: 2892568 - RNA, 19 nt, Artificial Sequence
  Description of Artificial Sequence: Synthetic oligonucleotide
aguuaagguuucuggacac

SEQ ID NO: 2892569 - RNA, 19 nt, Artificial Sequence
  Description of Artificial Sequence: Synthetic oligonucleotide
gaaacuucauuuuccucag

SEQ ID NO: 2892570 - RNA, 19 nt, Artificial Sequence
  Description of Artificial Sequence: Synthetic oligonucleotide
ugucucaagagucuugacu

SEQ ID NO: 2892571 - RNA, 19 nt, Artificial Sequence
  Description of Artificial Sequence: Synthetic oligonucleotide
uccaguaaccaucuggggu

SEQ ID NO: 2892572 - RNA, 19 nt, Artificial Sequence
  Description of Artificial Sequence: Synthetic oligonucleotide
ugagcaauguggauggcga

SEQ ID NO: 2892573 - RNA, 19 nt, Artificial Sequence
  Description of Artificial Sequence: Synthetic oligonucleotide
uugacuccauuuaagauua

SEQ ID NO: 2892574 - RNA, 19 nt, Artificial Sequence
  Description of Artificial Sequence: Synthetic oligonucleotide
uaaggucugaaucuguguc

SEQ ID NO: 2892575 - RNA, 19 nt, Artificial Sequence
  Description of Artificial Sequence: Synthetic oligonucleotide
ugcaaagucucuccaaugu

SEQ ID NO: 2892576 - RNA, 19 nt, Artificial Sequence
  Description of Artificial Sequence: Synthetic oligonucleotide
accuggaauauauccuucc

SEQ ID NO: 2892577 - RNA, 19 nt, Artificial Sequence
  Description of Artificial Sequence: Synthetic oligonucleotide
cugaugguuacugaggagg

SEQ ID NO: 2892578 - RNA, 19 nt, Artificial Sequence
  Description of Artificial Sequence: Synthetic oligonucleotide
aaguccugcuaucacaccu

SEQ ID NO: 2892579 - RNA, 19 nt, Artificial Sequence
  Description of Artificial Sequence: Synthetic oligonucleotide
aagauuaaaccagcauagg

SEQ ID NO: 2892580 - RNA, 19 nt, Artificial Sequence
  Description of Artificial Sequence: Synthetic oligonucleotide
ugggauaucuaccuggaau

SEQ ID NO: 2892581 - RNA, 19 nt, Artificial Sequence
  Description of Artificial Sequence: Synthetic oligonucleotide
ucucuaucagcacuucuug

SEQ ID NO: 2892582 - RNA, 19 nt, Artificial Sequence
  Description of Artificial Sequence: Synthetic oligonucleotide
uauuucugcugcagguugg

SEQ ID NO: 2892583 - RNA, 19 nt, Artificial Sequence
  Description of Artificial Sequence: Synthetic oligonucleotide
ugucaauaaguccugcuau

SEQ ID NO: 2892584 - RNA, 19 nt, Artificial Sequence
  Description of Artificial Sequence: Synthetic oligonucleotide
cugugagcaauguggaugg

SEQ ID NO: 2892585 - RNA, 19 nt, Artificial Sequence
  Description of Artificial Sequence: Synthetic oligonucleotide
ccauuuaagauuaaaccag

SEQ ID NO: 2892586 - RNA, 19 nt, Artificial Sequence
  Description of Artificial Sequence: Synthetic oligonucleotide
ucugccauauuucucuccu

SEQ ID NO: 2892587 - RNA, 19 nt, Artificial Sequence
  Description of Artificial Sequence: Synthetic oligonucleotide
ugcagguugguuagcacag

SEQ ID NO: 2892588 - RNA, 19 nt, Artificial Sequence
  Description of Artificial Sequence: Synthetic oligonucleotide
uccacaaccucaucggcag

SEQ ID NO: 2892589 - RNA, 19 nt, Artificial Sequence
  Description of Artificial Sequence: Synthetic oligonucleotide
gaugcucugggauaucuac

SEQ ID NO: 2892590 - RNA, 19 nt, Artificial Sequence
  Description of Artificial Sequence: Synthetic oligonucleotide
auaaguccugcuaucacac

SEQ ID NO: 2892591 - RNA, 19 nt, Artificial Sequence
  Description of Artificial Sequence: Synthetic oligonucleotide
uugauuuuccaguuccaca

SEQ ID NO: 2892592 - RNA, 19 nt, Artificial Sequence
  Description of Artificial Sequence: Synthetic oligonucleotide
gucucaagagucuugacuc

SEQ ID NO: 2892593 - RNA, 19 nt, Artificial Sequence
  Description of Artificial Sequence: Synthetic oligonucleotide
cucugggauaucuaccugg

SEQ ID NO: 2892594 - RNA, 19 nt, Artificial Sequence
  Description of Artificial Sequence: Synthetic oligonucleotide
gacacugcaaagucucucc

SEQ ID NO: 2892595 - RNA, 19 nt, Artificial Sequence
  Description of Artificial Sequence: Synthetic oligonucleotide
aucugugucagggucauuc

SEQ ID NO: 2892596 - RNA, 19 nt, Artificial Sequence
  Description of Artificial Sequence: Synthetic oligonucleotide
agguaugggcuccaguaac

SEQ ID NO: 2892597 - RNA, 19 nt, Artificial Sequence
  Description of Artificial Sequence: Synthetic oligonucleotide
ugugucagggucauuccca

SEQ ID NO: 2892598 - RNA, 19 nt, Artificial Sequence
  Description of Artificial Sequence: Synthetic oligonucleotide
aaggucugaaucuguguca

SEQ ID NO: 2892599 - RNA, 19 nt, Artificial Sequence
  Description of Artificial Sequence: Synthetic oligonucleotide
gucugaaucugugucaggg

SEQ ID NO: 2892600 - RNA, 19 nt, Artificial Sequence
  Description of Artificial Sequence: Synthetic oligonucleotide
ugaaucugugucaggguca

SEQ ID NO: 2892601 - RNA, 19 nt, Artificial Sequence
  Description of Artificial Sequence: Synthetic oligonucleotide
ucaucggcaguuaagguuu

SEQ ID NO: 2892602 - RNA, 19 nt, Artificial Sequence
  Description of Artificial Sequence: Synthetic oligonucleotide
uucccaaccucucuaucag

SEQ ID NO: 2892603 - RNA, 19 nt, Artificial Sequence
  Description of Artificial Sequence: Synthetic oligonucleotide
gucccugugagcaaugugg

SEQ ID NO: 2892604 - RNA, 19 nt, Artificial Sequence
  Description of Artificial Sequence: Synthetic oligonucleotide
uaaaccagcauagggcugc

SEQ ID NO: 2892605 - RNA, 19 nt, Artificial Sequence
  Description of Artificial Sequence: Synthetic oligonucleotide
gaauauauccuucccaccu

SEQ ID NO: 2892606 - RNA, 19 nt, Artificial Sequence
  Description of Artificial Sequence: Synthetic oligonucleotide
auggcgaugguacauuucu

SEQ ID NO: 2892607 - RNA, 19 nt, Artificial Sequence
  Description of Artificial Sequence: Synthetic oligonucleotide
uauccuucccaccuuuucu

SEQ ID NO: 2892608 - RNA, 19 nt, Artificial Sequence
  Description of Artificial Sequence: Synthetic oligonucleotide
ucaauaaguccugcuauca

SEQ ID NO: 2892609 - RNA, 19 nt, Artificial Sequence
  Description of Artificial Sequence: Synthetic oligonucleotide
cuguaguaaggucugaauc

SEQ ID NO: 2892610 - RNA, 19 nt, Artificial Sequence
  Description of Artificial Sequence: Synthetic oligonucleotide
accagcauagggcugccgg

SEQ ID NO: 2892611 - RNA, 19 nt, Artificial Sequence
  Description of Artificial Sequence: Synthetic oligonucleotide
gucagggucauucccaacc

SEQ ID NO: 2892612 - RNA, 19 nt, Artificial Sequence
  Description of Artificial Sequence: Synthetic oligonucleotide
auauuucucuccuuccugu

SEQ ID NO: 2892613 - RNA, 19 nt, Artificial Sequence
  Description of Artificial Sequence: Synthetic oligonucleotide
uuaagguuucuggacacug

SEQ ID NO: 2892614 - RNA, 19 nt, Artificial Sequence
  Description of Artificial Sequence: Synthetic oligonucleotide
auguggauggcgaugguac

SEQ ID NO: 2892615 - RNA, 19 nt, Artificial Sequence
  Description of Artificial Sequence: Synthetic oligonucleotide
uuggagucagguauuucug

SEQ ID NO: 2892616 - RNA, 19 nt, Artificial Sequence
  Description of Artificial Sequence: Synthetic oligonucleotide
auucccaaccucucuauca

SEQ ID NO: 2892617 - RNA, 19 nt, Artificial Sequence
  Description of Artificial Sequence: Synthetic oligonucleotide
uuuucuagguaugggcucc

SEQ ID NO: 2892618 - RNA, 19 nt, Artificial Sequence
  Description of Artificial Sequence: Synthetic oligonucleotide
ucuugacuccauuuaagau

SEQ ID NO: 2892619 - RNA, 19 nt, Artificial Sequence
  Description of Artificial Sequence: Synthetic oligonucleotide
accaucugggguuugaaau

SEQ ID NO: 2892620 - RNA, 19 nt, Artificial Sequence
  Description of Artificial Sequence: Synthetic oligonucleotide
aauauauccuucccaccuu

SEQ ID NO: 2892621 - RNA, 19 nt, Artificial Sequence
  Description of Artificial Sequence: Synthetic oligonucleotide
auuucucuccuuccuguag

SEQ ID NO: 2892622 - RNA, 19 nt, Artificial Sequence
  Description of Artificial Sequence: Synthetic oligonucleotide
ucugggauaucuaccugga

SEQ ID NO: 2892623 - RNA, 19 nt, Artificial Sequence
  Description of Artificial Sequence: Synthetic oligonucleotide
auaucuaccuggaauauau

SEQ ID NO: 2892624 - RNA, 19 nt, Artificial Sequence
  Description of Artificial Sequence: Synthetic oligonucleotide
guauuucugcugcagguug

SEQ ID NO: 2892625 - RNA, 19 nt, Artificial Sequence
  Description of Artificial Sequence: Synthetic oligonucleotide
ugcucugggauaucuaccu

SEQ ID NO: 2892626 - RNA, 19 nt, Artificial Sequence
  Description of Artificial Sequence: Synthetic oligonucleotide
accucaucggcaguuaagg

SEQ ID NO: 2892627 - RNA, 19 nt, Artificial Sequence
  Description of Artificial Sequence: Synthetic oligonucleotide
gguugguuagcacagcuug

SEQ ID NO: 2892628 - RNA, 19 nt, Artificial Sequence
  Description of Artificial Sequence: Synthetic oligonucleotide
ugccauauuucucuccuuc

SEQ ID NO: 2892629 - RNA, 19 nt, Artificial Sequence
  Description of Artificial Sequence: Synthetic oligonucleotide
aagagucuugacuccauuu

SEQ ID NO: 2892630 - RNA, 19 nt, Artificial Sequence
  Description of Artificial Sequence: Synthetic oligonucleotide
cuccaaugucaauaagucc

SEQ ID NO: 2892631 - RNA, 19 nt, Artificial Sequence
  Description of Artificial Sequence: Synthetic oligonucleotide
guuucuggacacugcaaag

SEQ ID NO: 2892632 - RNA, 19 nt, Artificial Sequence
  Description of Artificial Sequence: Synthetic oligonucleotide
uuccacaaccucaucggca

SEQ ID NO: 2892633 - RNA, 19 nt, Artificial Sequence
  Description of Artificial Sequence: Synthetic oligonucleotide
uuaaaccagcauagggcug

SEQ ID NO: 2892634 - RNA, 19 nt, Artificial Sequence
  Description of Artificial Sequence: Synthetic oligonucleotide
uucuggacacugcaaaguc

SEQ ID NO: 2892635 - RNA, 19 nt, Artificial Sequence
  Description of Artificial Sequence: Synthetic oligonucleotide
caaagucucuccaauguca

SEQ ID NO: 2892636 - RNA, 19 nt, Artificial Sequence
  Description of Artificial Sequence: Synthetic oligonucleotide
agcacuucuugccaggcgu

SEQ ID NO: 2892637 - RNA, 19 nt, Artificial Sequence
  Description of Artificial Sequence: Synthetic oligonucleotide
ucuggacacugcaaagucu

SEQ ID NO: 2892638 - RNA, 19 nt, Artificial Sequence
  Description of Artificial Sequence: Synthetic oligonucleotide
uaucagcacuucuugccag

SEQ ID NO: 2892639 - RNA, 19 nt, Artificial Sequence
  Description of Artificial Sequence: Synthetic oligonucleotide
ucuucccagucccugugag

SEQ ID NO: 2892640 - RNA, 19 nt, Artificial Sequence
  Description of Artificial Sequence: Synthetic oligonucleotide
aauuggagucagguauuuc

SEQ ID NO: 2892641 - RNA, 19 nt, Artificial Sequence
  Description of Artificial Sequence: Synthetic oligonucleotide
uuuuccucagagucuuuga

SEQ ID NO: 2892642 - RNA, 19 nt, Artificial Sequence
  Description of Artificial Sequence: Synthetic oligonucleotide
acauuucugaugguuacug

SEQ ID NO: 2892643 - RNA, 19 nt, Artificial Sequence
  Description of Artificial Sequence: Synthetic oligonucleotide
uggagucagguauuucugc

SEQ ID NO: 2892644 - RNA, 19 nt, Artificial Sequence
  Description of Artificial Sequence: Synthetic oligonucleotide
ucugggguuugaaauugga

SEQ ID NO: 2892645 - RNA, 19 nt, Artificial Sequence
  Description of Artificial Sequence: Synthetic oligonucleotide
cuggacacugcaaagucuc

SEQ ID NO: 2892646 - RNA, 19 nt, Artificial Sequence
  Description of Artificial Sequence: Synthetic oligonucleotide
guacauuucugaugguuac

SEQ ID NO: 2892647 - RNA, 19 nt, Artificial Sequence
  Description of Artificial Sequence: Synthetic oligonucleotide
acuucauuuuccucagagu

SEQ ID NO: 2892648 - RNA, 19 nt, Artificial Sequence
  Description of Artificial Sequence: Synthetic oligonucleotide
ucucaagagucuugacucc

SEQ ID NO: 2892649 - RNA, 19 nt, Artificial Sequence
  Description of Artificial Sequence: Synthetic oligonucleotide
uucccagucccugugagca

SEQ ID NO: 2892650 - RNA, 19 nt, Artificial Sequence
  Description of Artificial Sequence: Synthetic oligonucleotide
uugaaauuggagucaggua

SEQ ID NO: 2892651 - RNA, 19 nt, Artificial Sequence
  Description of Artificial Sequence: Synthetic oligonucleotide
cugaaucugugucaggguc

SEQ ID NO: 2892652 - RNA, 19 nt, Artificial Sequence
  Description of Artificial Sequence: Synthetic oligonucleotide
acugcaaagucucuccaau

SEQ ID NO: 2892653 - RNA, 19 nt, Artificial Sequence
  Description of Artificial Sequence: Synthetic oligonucleotide
uuucuggacacugcaaagu

SEQ ID NO: 2892654 - RNA, 19 nt, Artificial Sequence
  Description of Artificial Sequence: Synthetic oligonucleotide
cugggguuugaaauuggag

SEQ ID NO: 2892655 - RNA, 19 nt, Artificial Sequence
  Description of Artificial Sequence: Synthetic oligonucleotide
ugcuaucacaccucugcca

SEQ ID NO: 2892656 - RNA, 19 nt, Artificial Sequence
  Description of Artificial Sequence: Synthetic oligonucleotide
augucaauaaguccugcua

SEQ ID NO: 2892657 - RNA, 19 nt, Artificial Sequence
  Description of Artificial Sequence: Synthetic oligonucleotide
cuuuucuagguaugggcuc

SEQ ID NO: 2892658 - RNA, 19 nt, Artificial Sequence
  Description of Artificial Sequence: Synthetic oligonucleotide
ggcuccaguaaccaucugg

SEQ ID NO: 2892659 - RNA, 19 nt, Artificial Sequence
  Description of Artificial Sequence: Synthetic oligonucleotide
cuuccuguaguaaggucug

SEQ ID NO: 2892660 - RNA, 19 nt, Artificial Sequence
  Description of Artificial Sequence: Synthetic oligonucleotide
aucagcacuucuugccagg

SEQ ID NO: 2892661 - RNA, 19 nt, Artificial Sequence
  Description of Artificial Sequence: Synthetic oligonucleotide
gagucagguauuucugcug

SEQ ID NO: 2892662 - RNA, 19 nt, Artificial Sequence
  Description of Artificial Sequence: Synthetic oligonucleotide
cucuaucagcacuucuugc

SEQ ID NO: 2892663 - RNA, 19 nt, Artificial Sequence
  Description of Artificial Sequence: Synthetic oligonucleotide
agagucuugacuccauuua

SEQ ID NO: 2892664 - RNA, 19 nt, Artificial Sequence
  Description of Artificial Sequence: Synthetic oligonucleotide
uagcacagcuugauuuucc

SEQ ID NO: 2892665 - RNA, 19 nt, Artificial Sequence
  Description of Artificial Sequence: Synthetic oligonucleotide
ucugaaucugugucagggu

SEQ ID NO: 2892666 - RNA, 19 nt, Artificial Sequence
  Description of Artificial Sequence: Synthetic oligonucleotide
ucucuccaaugucaauaag

SEQ ID NO: 2892667 - RNA, 19 nt, Artificial Sequence
  Description of Artificial Sequence: Synthetic oligonucleotide
guaguaaggucugaaucug

SEQ ID NO: 2892668 - RNA, 19 nt, Artificial Sequence
  Description of Artificial Sequence: Synthetic oligonucleotide
ugaggaggggacgccaacg

SEQ ID NO: 2892669 - RNA, 19 nt, Artificial Sequence
  Description of Artificial Sequence: Synthetic oligonucleotide
cagguauuucugcugcagg

SEQ ID NO: 2892670 - RNA, 19 nt, Artificial Sequence
  Description of Artificial Sequence: Synthetic oligonucleotide
ucagggucauucccaaccu

SEQ ID NO: 2892671 - RNA, 19 nt, Artificial Sequence
  Description of Artificial Sequence: Synthetic oligonucleotide
gucuugacuccauuuaaga

SEQ ID NO: 2892672 - RNA, 19 nt, Artificial Sequence
  Description of Artificial Sequence: Synthetic oligonucleotide
guuacugaggaggggacgc

SEQ ID NO: 2892673 - RNA, 19 nt, Artificial Sequence
  Description of Artificial Sequence: Synthetic oligonucleotide
ccugcuaucacaccucugc

SEQ ID NO: 2892674 - RNA, 19 nt, Artificial Sequence
  Description of Artificial Sequence: Synthetic oligonucleotide
auuuaagauuaaaccagca

SEQ ID NO: 2892675 - RNA, 19 nt, Artificial Sequence
  Description of Artificial Sequence: Synthetic oligonucleotide
caauaaguccugcuaucac

SEQ ID NO: 2892676 - RNA, 19 nt, Artificial Sequence
  Description of Artificial Sequence: Synthetic oligonucleotide
gaugguuacugaggagggg

SEQ ID NO: 2892677 - RNA, 19 nt, Artificial Sequence
  Description of Artificial Sequence: Synthetic oligonucleotide
aguaaggucugaaucugug

SEQ ID NO: 2892678 - RNA, 19 nt, Artificial Sequence
  Description of Artificial Sequence: Synthetic oligonucleotide
cuagguaugggcuccagua

SEQ ID NO: 2892679 - RNA, 19 nt, Artificial Sequence
  Description of Artificial Sequence: Synthetic oligonucleotide
ucauuuuccucagagucuu

SEQ ID NO: 2892680 - RNA, 19 nt, Artificial Sequence
  Description of Artificial Sequence: Synthetic oligonucleotide
ucuagguaugggcuccagu

SEQ ID NO: 2892681 - RNA, 19 nt, Artificial Sequence
  Description of Artificial Sequence: Synthetic oligonucleotide
gugagcaauguggauggcg

SEQ ID NO: 2892682 - RNA, 19 nt, Artificial Sequence
  Description of Artificial Sequence: Synthetic oligonucleotide
ucccugugagcaaugugga

SEQ ID NO: 2892683 - RNA, 19 nt, Artificial Sequence
  Description of Artificial Sequence: Synthetic oligonucleotide
gauuuuccaguuccacaac

SEQ ID NO: 2892684 - RNA, 19 nt, Artificial Sequence
  Description of Artificial Sequence: Synthetic oligonucleotide
gucaauaaguccugcuauc

SEQ ID NO: 2892685 - RNA, 19 nt, Artificial Sequence
  Description of Artificial Sequence: Synthetic oligonucleotide
uagguaugggcuccaguaa

SEQ ID NO: 2892686 - RNA, 19 nt, Artificial Sequence
  Description of Artificial Sequence: Synthetic oligonucleotide
ucacaccucugccauauuu

SEQ ID NO: 2892687 - RNA, 19 nt, Artificial Sequence
  Description of Artificial Sequence: Synthetic oligonucleotide
aaccaucugggguuugaaa

SEQ ID NO: 2892688 - RNA, 19 nt, Artificial Sequence
  Description of Artificial Sequence: Synthetic oligonucleotide
gacgccaacgugucucaag

SEQ ID NO: 2892689 - RNA, 19 nt, Artificial Sequence
  Description of Artificial Sequence: Synthetic oligonucleotide
uaguaaggucugaaucugu

SEQ ID NO: 2892690 - RNA, 19 nt, Artificial Sequence
  Description of Artificial Sequence: Synthetic oligonucleotide
acagcuugauuuuccaguu

SEQ ID NO: 2892691 - RNA, 19 nt, Artificial Sequence
  Description of Artificial Sequence: Synthetic oligonucleotide
gggguuugaaauuggaguc

SEQ ID NO: 2892692 - RNA, 19 nt, Artificial Sequence
  Description of Artificial Sequence: Synthetic oligonucleotide
agucuugacuccauuuaag

SEQ ID NO: 2892693 - RNA, 19 nt, Artificial Sequence
  Description of Artificial Sequence: Synthetic oligonucleotide
ugggcuccaguaaccaucu

SEQ ID NO: 2892694 - RNA, 19 nt, Artificial Sequence
  Description of Artificial Sequence: Synthetic oligonucleotide
aggcagggaaacuucauuu

SEQ ID NO: 2892695 - RNA, 19 nt, Artificial Sequence
  Description of Artificial Sequence: Synthetic oligonucleotide
augcucugggauaucuacc

SEQ ID NO: 2892696 - RNA, 19 nt, Artificial Sequence
  Description of Artificial Sequence: Synthetic oligonucleotide
acgccaacgugucucaaga

SEQ ID NO: 2892697 - RNA, 19 nt, Artificial Sequence
  Description of Artificial Sequence: Synthetic oligonucleotide
aaaccagcauagggcugcc

SEQ ID NO: 2892698 - RNA, 19 nt, Artificial Sequence
  Description of Artificial Sequence: Synthetic oligonucleotide
cuggaauauauccuuccca

SEQ ID NO: 2892699 - RNA, 19 nt, Artificial Sequence
  Description of Artificial Sequence: Synthetic oligonucleotide
ggaauauauccuucccacc

SEQ ID NO: 2892700 - RNA, 19 nt, Artificial Sequence
  Description of Artificial Sequence: Synthetic oligonucleotide
gcuccaguaaccaucuggg

SEQ ID NO: 2892701 - RNA, 19 nt, Artificial Sequence
  Description of Artificial Sequence: Synthetic oligonucleotide
uaucacaccucugccauau

SEQ ID NO: 2892702 - RNA, 19 nt, Artificial Sequence
  Description of Artificial Sequence: Synthetic oligonucleotide
gcaauguggauggcgaugg

SEQ ID NO: 2892703 - RNA, 19 nt, Artificial Sequence
  Description of Artificial Sequence: Synthetic oligonucleotide
uccuucccaccuuuucuag

SEQ ID NO: 2892704 - RNA, 19 nt, Artificial Sequence
  Description of Artificial Sequence: Synthetic oligonucleotide
aggucugaaucugugucag

SEQ ID NO: 2892705 - RNA, 19 nt, Artificial Sequence
  Description of Artificial Sequence: Synthetic oligonucleotide
aaccucaucggcaguuaag

SEQ ID NO: 2892706 - RNA, 19 nt, Artificial Sequence
  Description of Artificial Sequence: Synthetic oligonucleotide
cuugacuccauuuaagauu

SEQ ID NO: 2892707 - RNA, 19 nt, Artificial Sequence
  Description of Artificial Sequence: Synthetic oligonucleotide
gcaguuaagguuucuggac

SEQ ID NO: 2892708 - RNA, 19 nt, Artificial Sequence
  Description of Artificial Sequence: Synthetic oligonucleotide
aauguggauggcgauggua

SEQ ID NO: 2892709 - RNA, 19 nt, Artificial Sequence
  Description of Artificial Sequence: Synthetic oligonucleotide
gagucuugacuccauuuaa

SEQ ID NO: 2892710 - RNA, 19 nt, Artificial Sequence
  Description of Artificial Sequence: Synthetic oligonucleotide
caguuaagguuucuggaca

SEQ ID NO: 2892711 - RNA, 19 nt, Artificial Sequence
  Description of Artificial Sequence: Synthetic oligonucleotide
ucaucuucccagucccugu

SEQ ID NO: 2892712 - RNA, 19 nt, Artificial Sequence
  Description of Artificial Sequence: Synthetic oligonucleotide
agucucuccaaugucaaua

SEQ ID NO: 2892713 - RNA, 19 nt, Artificial Sequence
  Description of Artificial Sequence: Synthetic oligonucleotide
uguggauggcgaugguaca

SEQ ID NO: 2892714 - RNA, 19 nt, Artificial Sequence
  Description of Artificial Sequence: Synthetic oligonucleotide
uaaguccugcuaucacacc

SEQ ID NO: 2892715 - RNA, 19 nt, Artificial Sequence
  Description of Artificial Sequence: Synthetic oligonucleotide
agcacagcuugauuuucca

SEQ ID NO: 2892716 - RNA, 19 nt, Artificial Sequence
  Description of Artificial Sequence: Synthetic oligonucleotide
cuccaguaaccaucugggg

SEQ ID NO: 2892717 - RNA, 19 nt, Artificial Sequence
  Description of Artificial Sequence: Synthetic oligonucleotide
cucuccaaugucaauaagu

SEQ ID NO: 2892718 - RNA, 19 nt, Artificial Sequence
  Description of Artificial Sequence: Synthetic oligonucleotide
gaucagaugcucugggaua

SEQ ID NO: 2892719 - RNA, 19 nt, Artificial Sequence
  Description of Artificial Sequence: Synthetic oligonucleotide
cugugucagggucauuccc

SEQ ID NO: 2892720 - RNA, 19 nt, Artificial Sequence
  Description of Artificial Sequence: Synthetic oligonucleotide
cugcaaagucucuccaaug

SEQ ID NO: 2892721 - RNA, 19 nt, Artificial Sequence
  Description of Artificial Sequence: Synthetic oligonucleotide
uaccuggaauauauccuuc

SEQ ID NO: 2892722 - RNA, 19 nt, Artificial Sequence
  Description of Artificial Sequence: Synthetic oligonucleotide
guuccacaaccucaucggc

SEQ ID NO: 2892723 - RNA, 19 nt, Artificial Sequence
  Description of Artificial Sequence: Synthetic oligonucleotide
caucugggguuugaaauug

SEQ ID NO: 2892724 - RNA, 19 nt, Artificial Sequence
  Description of Artificial Sequence: Synthetic oligonucleotide
gguuugaaauuggagucag

SEQ ID NO: 2892725 - RNA, 19 nt, Artificial Sequence
  Description of Artificial Sequence: Synthetic oligonucleotide
aaauuggagucagguauuu

SEQ ID NO: 2892726 - RNA, 19 nt, Artificial Sequence
  Description of Artificial Sequence: Synthetic oligonucleotide
ucaagagucuugacuccau

SEQ ID NO: 2892727 - RNA, 19 nt, Artificial Sequence
  Description of Artificial Sequence: Synthetic oligonucleotide
uagggcugccggaaggaga

SEQ ID NO: 2892728 - RNA, 19 nt, Artificial Sequence
  Description of Artificial Sequence: Synthetic oligonucleotide
uaucuaccuggaauauauc

SEQ ID NO: 2892729 - RNA, 19 nt, Artificial Sequence
  Description of Artificial Sequence: Synthetic oligonucleotide
cugcuaucacaccucugcc

SEQ ID NO: 2892730 - RNA, 19 nt, Artificial Sequence
  Description of Artificial Sequence: Synthetic oligonucleotide
ucauucccaaccucucuau

SEQ ID NO: 2892731 - RNA, 19 nt, Artificial Sequence
  Description of Artificial Sequence: Synthetic oligonucleotide
uacauuucugaugguuacu

SEQ ID NO: 2892732 - RNA, 19 nt, Artificial Sequence
  Description of Artificial Sequence: Synthetic oligonucleotide
cuaucagcacuucuugcca

SEQ ID NO: 2892733 - RNA, 19 nt, Artificial Sequence
  Description of Artificial Sequence: Synthetic oligonucleotide
agcaauguggauggcgaug

SEQ ID NO: 2892734 - RNA, 19 nt, Artificial Sequence
  Description of Artificial Sequence: Synthetic oligonucleotide
ugguacauuucugaugguu

SEQ ID NO: 2892735 - RNA, 19 nt, Artificial Sequence
  Description of Artificial Sequence: Synthetic oligonucleotide
uugguuagcacagcuugau

SEQ ID NO: 2892736 - RNA, 19 nt, Artificial Sequence
  Description of Artificial Sequence: Synthetic oligonucleotide
cucugccauauuucucucc

SEQ ID NO: 2892737 - RNA, 19 nt, Artificial Sequence
  Description of Artificial Sequence: Synthetic oligonucleotide
ucggcaguuaagguuucug

SEQ ID NO: 2892738 - RNA, 19 nt, Artificial Sequence
  Description of Artificial Sequence: Synthetic oligonucleotide
uggcgaugguacauuucug

SEQ ID NO: 2892739 - RNA, 19 nt, Artificial Sequence
  Description of Artificial Sequence: Synthetic oligonucleotide
uuagcacagcuugauuuuc

SEQ ID NO: 2892740 - RNA, 19 nt, Artificial Sequence
  Description of Artificial Sequence: Synthetic oligonucleotide
ccaacgugucucaagaguc

SEQ ID NO: 2892741 - RNA, 19 nt, Artificial Sequence
  Description of Artificial Sequence: Synthetic oligonucleotide
guuugaaauuggagucagg

SEQ ID NO: 2892742 - RNA, 19 nt, Artificial Sequence
  Description of Artificial Sequence: Synthetic oligonucleotide
agucccugugagcaaugug

SEQ ID NO: 2892743 - RNA, 19 nt, Artificial Sequence
  Description of Artificial Sequence: Synthetic oligonucleotide
ggcaguuaagguuucugga

SEQ ID NO: 2892744 - RNA, 19 nt, Artificial Sequence
  Description of Artificial Sequence: Synthetic oligonucleotide
cugcagguugguuagcaca

SEQ ID NO: 2892745 - RNA, 19 nt, Artificial Sequence
  Description of Artificial Sequence: Synthetic oligonucleotide
aguccugcuaucacaccuc

SEQ ID NO: 2892746 - RNA, 19 nt, Artificial Sequence
  Description of Artificial Sequence: Synthetic oligonucleotide
acacugcaaagucucucca

SEQ ID NO: 2892747 - RNA, 19 nt, Artificial Sequence
  Description of Artificial Sequence: Synthetic oligonucleotide
uucuugccaggcgucaucu

SEQ ID NO: 2892748 - RNA, 19 nt, Artificial Sequence
  Description of Artificial Sequence: Synthetic oligonucleotide
ucccaccuuuucuagguau

SEQ ID NO: 2892749 - RNA, 19 nt, Artificial Sequence
  Description of Artificial Sequence: Synthetic oligonucleotide
cacagcuugauuuuccagu

SEQ ID NO: 2892750 - RNA, 19 nt, Artificial Sequence
  Description of Artificial Sequence: Synthetic oligonucleotide
caccuuuucuagguauggg

SEQ ID NO: 2892751 - RNA, 19 nt, Artificial Sequence
  Description of Artificial Sequence: Synthetic oligonucleotide
gggauaucuaccuggaaua

SEQ ID NO: 2892752 - RNA, 19 nt, Artificial Sequence
  Description of Artificial Sequence: Synthetic oligonucleotide
aucagaugcucugggauau

SEQ ID NO: 2892753 - RNA, 19 nt, Artificial Sequence
  Description of Artificial Sequence: Synthetic oligonucleotide
caaugucaauaaguccugc

SEQ ID NO: 2892754 - RNA, 19 nt, Artificial Sequence
  Description of Artificial Sequence: Synthetic oligonucleotide
ucagcacuucuugccaggc

SEQ ID NO: 2892755 - RNA, 19 nt, Artificial Sequence
  Description of Artificial Sequence: Synthetic oligonucleotide
aagucucuccaaugucaau

SEQ ID NO: 2892756 - RNA, 19 nt, Artificial Sequence
  Description of Artificial Sequence: Synthetic oligonucleotide
cuucccagucccugugagc

SEQ ID NO: 2892757 - RNA, 19 nt, Artificial Sequence
  Description of Artificial Sequence: Synthetic oligonucleotide
gguuucuggacacugcaaa

SEQ ID NO: 2892758 - RNA, 19 nt, Artificial Sequence
  Description of Artificial Sequence: Synthetic oligonucleotide
agggcugccggaaggagag

SEQ ID NO: 2892759 - RNA, 19 nt, Artificial Sequence
  Description of Artificial Sequence: Synthetic oligonucleotide
ggcgaugguacauuucuga

SEQ ID NO: 2892760 - RNA, 19 nt, Artificial Sequence
  Description of Artificial Sequence: Synthetic oligonucleotide
ccaggcgucaucuucccag

SEQ ID NO: 2892761 - RNA, 19 nt, Artificial Sequence
  Description of Artificial Sequence: Synthetic oligonucleotide
uggacacugcaaagucucu

SEQ ID NO: 2892762 - RNA, 19 nt, Artificial Sequence
  Description of Artificial Sequence: Synthetic oligonucleotide
ucccaaccucucuaucagc

SEQ ID NO: 2892763 - RNA, 19 nt, Artificial Sequence
  Description of Artificial Sequence: Synthetic oligonucleotide
ugcugcagguugguuagca

SEQ ID NO: 2892764 - RNA, 19 nt, Artificial Sequence
  Description of Artificial Sequence: Synthetic oligonucleotide
uccuguaguaaggucugaa

SEQ ID NO: 2892765 - RNA, 19 nt, Artificial Sequence
  Description of Artificial Sequence: Synthetic oligonucleotide
cauuucugaugguuacuga

SEQ ID NO: 2892766 - RNA, 19 nt, Artificial Sequence
  Description of Artificial Sequence: Synthetic oligonucleotide
gucucuccaaugucaauaa

SEQ ID NO: 2892767 - RNA, 19 nt, Artificial Sequence
  Description of Artificial Sequence: Synthetic oligonucleotide
gccauauuucucuccuucc

SEQ ID NO: 2892768 - RNA, 19 nt, Artificial Sequence
  Description of Artificial Sequence: Synthetic oligonucleotide
ccugugagcaauguggaug

SEQ ID NO: 2892769 - RNA, 19 nt, Artificial Sequence
  Description of Artificial Sequence: Synthetic oligonucleotide
ccuggaauauauccuuccc

SEQ ID NO: 2892770 - RNA, 19 nt, Artificial Sequence
  Description of Artificial Sequence: Synthetic oligonucleotide
gucaucuucccagucccug

SEQ ID NO: 2892771 - RNA, 19 nt, Artificial Sequence
  Description of Artificial Sequence: Synthetic oligonucleotide
uaugggcuccaguaaccau

SEQ ID NO: 2892772 - RNA, 19 nt, Artificial Sequence
  Description of Artificial Sequence: Synthetic oligonucleotide
gacuccauuuaagauuaaa

SEQ ID NO: 2892773 - RNA, 19 nt, Artificial Sequence
  Description of Artificial Sequence: Synthetic oligonucleotide
uccuuccuguaguaagguc

SEQ ID NO: 2892774 - RNA, 19 nt, Artificial Sequence
  Description of Artificial Sequence: Synthetic oligonucleotide
aacgugucucaagagucuu

SEQ ID NO: 2892775 - RNA, 19 nt, Artificial Sequence
  Description of Artificial Sequence: Synthetic oligonucleotide
gauaucuaccuggaauaua

SEQ ID NO: 2892776 - RNA, 19 nt, Artificial Sequence
  Description of Artificial Sequence: Synthetic oligonucleotide
ggcgucaucuucccagucc

SEQ ID NO: 2892777 - RNA, 19 nt, Artificial Sequence
  Description of Artificial Sequence: Synthetic oligonucleotide
aaggagaggcagggaaacu

SEQ ID NO: 2892778 - RNA, 19 nt, Artificial Sequence
  Description of Artificial Sequence: Synthetic oligonucleotide
uuacugaggaggggacgcc

SEQ ID NO: 2892779 - RNA, 19 nt, Artificial Sequence
  Description of Artificial Sequence: Synthetic oligonucleotide
gcagggaaacuucauuuuc

SEQ ID NO: 2892780 - RNA, 19 nt, Artificial Sequence
  Description of Artificial Sequence: Synthetic oligonucleotide
uccugcuaucacaccucug

SEQ ID NO: 2892781 - RNA, 19 nt, Artificial Sequence
  Description of Artificial Sequence: Synthetic oligonucleotide
gucauucccaaccucucua

SEQ ID NO: 2892782 - RNA, 19 nt, Artificial Sequence
  Description of Artificial Sequence: Synthetic oligonucleotide
gcgucaucuucccaguccc

SEQ ID NO: 2892783 - RNA, 19 nt, Artificial Sequence
  Description of Artificial Sequence: Synthetic oligonucleotide
gguuagcacagcuugauuu

SEQ ID NO: 2892784 - RNA, 19 nt, Artificial Sequence
  Description of Artificial Sequence: Synthetic oligonucleotide
aggaggggacgccaacgug

SEQ ID NO: 2892785 - RNA, 19 nt, Artificial Sequence
  Description of Artificial Sequence: Synthetic oligonucleotide
guaaggucugaaucugugu

SEQ ID NO: 2892786 - RNA, 19 nt, Artificial Sequence
  Description of Artificial Sequence: Synthetic oligonucleotide
cagcacuucuugccaggcg

SEQ ID NO: 2892787 - RNA, 19 nt, Artificial Sequence
  Description of Artificial Sequence: Synthetic oligonucleotide
ugguuagcacagcuugauu

SEQ ID NO: 2892788 - RNA, 19 nt, Artificial Sequence
  Description of Artificial Sequence: Synthetic oligonucleotide
aaccucucuaucagcacuu

SEQ ID NO: 2892789 - RNA, 19 nt, Artificial Sequence
  Description of Artificial Sequence: Synthetic oligonucleotide
uucucuccuuccuguagua

SEQ ID NO: 2892790 - RNA, 19 nt, Artificial Sequence
  Description of Artificial Sequence: Synthetic oligonucleotide
aucugggguuugaaauugg

SEQ ID NO: 2892791 - RNA, 19 nt, Artificial Sequence
  Description of Artificial Sequence: Synthetic oligonucleotide
uacugaggaggggacgcca

SEQ ID NO: 2892792 - RNA, 19 nt, Artificial Sequence
  Description of Artificial Sequence: Synthetic oligonucleotide
gguaugggcuccaguaacc

SEQ ID NO: 2892793 - RNA, 19 nt, Artificial Sequence
  Description of Artificial Sequence: Synthetic oligonucleotide
cauucccaaccucucuauc

SEQ ID NO: 2892794 - RNA, 19 nt, Artificial Sequence
  Description of Artificial Sequence: Synthetic oligonucleotide
gauggcgaugguacauuuc

SEQ ID NO: 2892795 - RNA, 19 nt, Artificial Sequence
  Description of Artificial Sequence: Synthetic oligonucleotide
auuucugcugcagguuggu

SEQ ID NO: 2892796 - RNA, 19 nt, Artificial Sequence
  Description of Artificial Sequence: Synthetic oligonucleotide
gcaaagucucuccaauguc

SEQ ID NO: 2892797 - RNA, 19 nt, Artificial Sequence
  Description of Artificial Sequence: Synthetic oligonucleotide
cuucccaccuuuucuaggu

SEQ ID NO: 2892798 - RNA, 19 nt, Artificial Sequence
  Description of Artificial Sequence: Synthetic oligonucleotide
guuagcacagcuugauuuu

SEQ ID NO: 2892799 - RNA, 19 nt, Artificial Sequence
  Description of Artificial Sequence: Synthetic oligonucleotide
cugccggaaggagaggcag

SEQ ID NO: 2892800 - RNA, 19 nt, Artificial Sequence
  Description of Artificial Sequence: Synthetic oligonucleotide
gguacauuucugaugguua

SEQ ID NO: 2892801 - RNA, 19 nt, Artificial Sequence
  Description of Artificial Sequence: Synthetic oligonucleotide
aaccagcauagggcugccg

SEQ ID NO: 2892802 - RNA, 19 nt, Artificial Sequence
  Description of Artificial Sequence: Synthetic oligonucleotide
gagaggcagggaaacuuca

SEQ ID NO: 2892803 - RNA, 19 nt, Artificial Sequence
  Description of Artificial Sequence: Synthetic oligonucleotide
aggcgucaucuucccaguc

SEQ ID NO: 2892804 - RNA, 19 nt, Artificial Sequence
  Description of Artificial Sequence: Synthetic oligonucleotide
ugccaggcgucaucuuccc

SEQ ID NO: 2892805 - RNA, 19 nt, Artificial Sequence
  Description of Artificial Sequence: Synthetic oligonucleotide
aucuucccagucccuguga

SEQ ID NO: 2892806 - RNA, 19 nt, Artificial Sequence
  Description of Artificial Sequence: Synthetic oligonucleotide
uaaccaucugggguuugaa

SEQ ID NO: 2892807 - RNA, 19 nt, Artificial Sequence
  Description of Artificial Sequence: Synthetic oligonucleotide
uucuagguaugggcuccag

SEQ ID NO: 2892808 - RNA, 19 nt, Artificial Sequence
  Description of Artificial Sequence: Synthetic oligonucleotide
ugucagggucauucccaac

SEQ ID NO: 2892809 - RNA, 19 nt, Artificial Sequence
  Description of Artificial Sequence: Synthetic oligonucleotide
uuucuagguaugggcucca

SEQ ID NO: 2892810 - RNA, 19 nt, Artificial Sequence
  Description of Artificial Sequence: Synthetic oligonucleotide
guugguuagcacagcuuga

SEQ ID NO: 2892811 - RNA, 19 nt, Artificial Sequence
  Description of Artificial Sequence: Synthetic oligonucleotide
guaugggcuccaguaacca

SEQ ID NO: 2892812 - RNA, 19 nt, Artificial Sequence
  Description of Artificial Sequence: Synthetic oligonucleotide
gcacagcuugauuuuccag

SEQ ID NO: 2892813 - RNA, 19 nt, Artificial Sequence
  Description of Artificial Sequence: Synthetic oligonucleotide
cucaucggcaguuaagguu

SEQ ID NO: 2892814 - RNA, 19 nt, Artificial Sequence
  Description of Artificial Sequence: Synthetic oligonucleotide
caccucugccauauuucuc

SEQ ID NO: 2892815 - RNA, 19 nt, Artificial Sequence
  Description of Artificial Sequence: Synthetic oligonucleotide
cucucuaucagcacuucuu

SEQ ID NO: 2892816 - RNA, 19 nt, Artificial Sequence
  Description of Artificial Sequence: Synthetic oligonucleotide
cuaccuggaauauauccuu

SEQ ID NO: 2892817 - RNA, 19 nt, Artificial Sequence
  Description of Artificial Sequence: Synthetic oligonucleotide
accucucuaucagcacuuc

SEQ ID NO: 2892818 - RNA, 19 nt, Artificial Sequence
  Description of Artificial Sequence: Synthetic oligonucleotide
cggcaguuaagguuucugg

SEQ ID NO: 2892819 - RNA, 19 nt, Artificial Sequence
  Description of Artificial Sequence: Synthetic oligonucleotide
ggucugaaucugugucagg

SEQ ID NO: 2892820 - RNA, 19 nt, Artificial Sequence
  Description of Artificial Sequence: Synthetic oligonucleotide
ucucuccuuccuguaguaa

SEQ ID NO: 2892821 - RNA, 19 nt, Artificial Sequence
  Description of Artificial Sequence: Synthetic oligonucleotide
cgaugguacauuucugaug

SEQ ID NO: 2892822 - RNA, 19 nt, Artificial Sequence
  Description of Artificial Sequence: Synthetic oligonucleotide
uucccaccuuuucuaggua

SEQ ID NO: 2892823 - RNA, 19 nt, Artificial Sequence
  Description of Artificial Sequence: Synthetic oligonucleotide
guaaccaucugggguuuga

SEQ ID NO: 2892824 - RNA, 19 nt, Artificial Sequence
  Description of Artificial Sequence: Synthetic oligonucleotide
ccuucccaccuuuucuagg

SEQ ID NO: 2892825 - RNA, 19 nt, Artificial Sequence
  Description of Artificial Sequence: Synthetic oligonucleotide
gaaauuggagucagguauu

SEQ ID NO: 2892826 - RNA, 19 nt, Artificial Sequence
  Description of Artificial Sequence: Synthetic oligonucleotide
cagcuugauuuuccaguuc

SEQ ID NO: 2892827 - RNA, 19 nt, Artificial Sequence
  Description of Artificial Sequence: Synthetic oligonucleotide
ccuuccuguaguaaggucu

SEQ ID NO: 2892828 - RNA, 19 nt, Artificial Sequence
  Description of Artificial Sequence: Synthetic oligonucleotide
caaccucucuaucagcacu

SEQ ID NO: 2892829 - RNA, 19 nt, Artificial Sequence
  Description of Artificial Sequence: Synthetic oligonucleotide
gucagguauuucugcugca

SEQ ID NO: 2892830 - RNA, 19 nt, Artificial Sequence
  Description of Artificial Sequence: Synthetic oligonucleotide
ugugagcaauguggauggc

SEQ ID NO: 2892831 - RNA, 19 nt, Artificial Sequence
  Description of Artificial Sequence: Synthetic oligonucleotide
uggauggcgaugguacauu

SEQ ID NO: 2892832 - RNA, 19 nt, Artificial Sequence
  Description of Artificial Sequence: Synthetic oligonucleotide
gccggaaggagaggcaggg

SEQ ID NO: 2892833 - RNA, 19 nt, Artificial Sequence
  Description of Artificial Sequence: Synthetic oligonucleotide
augguacauuucugauggu

SEQ ID NO: 2892834 - RNA, 19 nt, Artificial Sequence
  Description of Artificial Sequence: Synthetic oligonucleotide
ccaccuuuucuagguaugg

SEQ ID NO: 2892835 - RNA, 19 nt, Artificial Sequence
  Description of Artificial Sequence: Synthetic oligonucleotide
ggaucagaugcucugggau

SEQ ID NO: 2892836 - RNA, 19 nt, Artificial Sequence
  Description of Artificial Sequence: Synthetic oligonucleotide
cacugcaaagucucuccaa

SEQ ID NO: 2892837 - RNA, 19 nt, Artificial Sequence
  Description of Artificial Sequence: Synthetic oligonucleotide
ggagucagguauuucugcu

SEQ ID NO: 2892838 - RNA, 19 nt, Artificial Sequence
  Description of Artificial Sequence: Synthetic oligonucleotide
ggguuugaaauuggaguca

SEQ ID NO: 2892839 - RNA, 19 nt, Artificial Sequence
  Description of Artificial Sequence: Synthetic oligonucleotide
gaggaggggacgccaacgu

SEQ ID NO: 2892840 - RNA, 19 nt, Artificial Sequence
  Description of Artificial Sequence: Synthetic oligonucleotide
gaggggacgccaacguguc

SEQ ID NO: 2892841 - RNA, 19 nt, Artificial Sequence
  Description of Artificial Sequence: Synthetic oligonucleotide
gaggcagggaaacuucauu

SEQ ID NO: 2892842 - RNA, 19 nt, Artificial Sequence
  Description of Artificial Sequence: Synthetic oligonucleotide
cccaaccucucuaucagca

SEQ ID NO: 2892843 - RNA, 19 nt, Artificial Sequence
  Description of Artificial Sequence: Synthetic oligonucleotide
ugacuccauuuaagauuaa

SEQ ID NO: 2892844 - RNA, 19 nt, Artificial Sequence
  Description of Artificial Sequence: Synthetic oligonucleotide
uuccuguaguaaggucuga

SEQ ID NO: 2892845 - RNA, 19 nt, Artificial Sequence
  Description of Artificial Sequence: Synthetic oligonucleotide
cauagggcugccggaagga

SEQ ID NO: 2892846 - RNA, 19 nt, Artificial Sequence
  Description of Artificial Sequence: Synthetic oligonucleotide
gcuaucacaccucugccau

SEQ ID NO: 2892847 - RNA, 19 nt, Artificial Sequence
  Description of Artificial Sequence: Synthetic oligonucleotide
acgugucucaagagucuug

SEQ ID NO: 2892848 - RNA, 19 nt, Artificial Sequence
  Description of Artificial Sequence: Synthetic oligonucleotide
aguaaccaucugggguuug

SEQ ID NO: 2892849 - RNA, 19 nt, Artificial Sequence
  Description of Artificial Sequence: Synthetic oligonucleotide
ccuuuucuagguaugggcu

SEQ ID NO: 2892850 - RNA, 19 nt, Artificial Sequence
  Description of Artificial Sequence: Synthetic oligonucleotide
caacgugucucaagagucu

SEQ ID NO: 2892851 - RNA, 19 nt, Artificial Sequence
  Description of Artificial Sequence: Synthetic oligonucleotide
ggagaggcagggaaacuuc

SEQ ID NO: 2892852 - RNA, 19 nt, Artificial Sequence
  Description of Artificial Sequence: Synthetic oligonucleotide
gggaucagaugcucuggga

SEQ ID NO: 2892853 - RNA, 19 nt, Artificial Sequence
  Description of Artificial Sequence: Synthetic oligonucleotide
caucggcaguuaagguuuc

SEQ ID NO: 2892854 - RNA, 19 nt, Artificial Sequence
  Description of Artificial Sequence: Synthetic oligonucleotide
gaaucugugucagggucau

SEQ ID NO: 2892855 - RNA, 19 nt, Artificial Sequence
  Description of Artificial Sequence: Synthetic oligonucleotide
agaggcagggaaacuucau

SEQ ID NO: 2892856 - RNA, 19 nt, Artificial Sequence
  Description of Artificial Sequence: Synthetic oligonucleotide
ggcugccggaaggagaggc

SEQ ID NO: 2892857 - RNA, 19 nt, Artificial Sequence
  Description of Artificial Sequence: Synthetic oligonucleotide
ccaaccucucuaucagcac

SEQ ID NO: 2892858 - RNA, 19 nt, Artificial Sequence
  Description of Artificial Sequence: Synthetic oligonucleotide
gccaacgugucucaagagu

SEQ ID NO: 2892859 - RNA, 19 nt, Artificial Sequence
  Description of Artificial Sequence: Synthetic oligonucleotide
ggacacugcaaagucucuc

SEQ ID NO: 2892860 - RNA, 19 nt, Artificial Sequence
  Description of Artificial Sequence: Synthetic oligonucleotide
acuucuugccaggcgucau

SEQ ID NO: 2892861 - RNA, 19 nt, Artificial Sequence
  Description of Artificial Sequence: Synthetic oligonucleotide
cagguugguuagcacagcu

SEQ ID NO: 2892862 - RNA, 19 nt, Artificial Sequence
  Description of Artificial Sequence: Synthetic oligonucleotide
gcucugggauaucuaccug

SEQ ID NO: 2892863 - RNA, 19 nt, Artificial Sequence
  Description of Artificial Sequence: Synthetic oligonucleotide
acaaccucaucggcaguua

SEQ ID NO: 2892864 - RNA, 19 nt, Artificial Sequence
  Description of Artificial Sequence: Synthetic oligonucleotide
gcugcagguugguuagcac

SEQ ID NO: 2892865 - RNA, 19 nt, Artificial Sequence
  Description of Artificial Sequence: Synthetic oligonucleotide
ucagaugcucugggauauc

SEQ ID NO: 2892866 - RNA, 19 nt, Artificial Sequence
  Description of Artificial Sequence: Synthetic oligonucleotide
agguuucuggacacugcaa

SEQ ID NO: 2892867 - RNA, 19 nt, Artificial Sequence
  Description of Artificial Sequence: Synthetic oligonucleotide
ggggacgccaacgugucuc

SEQ ID NO: 2892868 - RNA, 19 nt, Artificial Sequence
  Description of Artificial Sequence: Synthetic oligonucleotide
guuaagguuucuggacacu

SEQ ID NO: 2892869 - RNA, 19 nt, Artificial Sequence
  Description of Artificial Sequence: Synthetic oligonucleotide
agguugguuagcacagcuu

SEQ ID NO: 2892870 - RNA, 19 nt, Artificial Sequence
  Description of Artificial Sequence: Synthetic oligonucleotide
caaccucaucggcaguuaa

SEQ ID NO: 2892871 - RNA, 19 nt, Artificial Sequence
  Description of Artificial Sequence: Synthetic oligonucleotide
uuucugcugcagguugguu

SEQ ID NO: 2892872 - RNA, 19 nt, Artificial Sequence
  Description of Artificial Sequence: Synthetic oligonucleotide
acugaggaggggacgccaa

SEQ ID NO: 2892873 - RNA, 19 nt, Artificial Sequence
  Description of Artificial Sequence: Synthetic oligonucleotide
aucggcaguuaagguuucu

SEQ ID NO: 2892874 - RNA, 19 nt, Artificial Sequence
  Description of Artificial Sequence: Synthetic oligonucleotide
agaugcucugggauaucua

SEQ ID NO: 2892875 - RNA, 19 nt, Artificial Sequence
  Description of Artificial Sequence: Synthetic oligonucleotide
gagcaauguggauggcgau

SEQ ID NO: 2892876 - RNA, 19 nt, Artificial Sequence
  Description of Artificial Sequence: Synthetic oligonucleotide
cacuucuugccaggcguca

SEQ ID NO: 2892877 - RNA, 19 nt, Artificial Sequence
  Description of Artificial Sequence: Synthetic oligonucleotide
cugggauaucuaccuggaa

SEQ ID NO: 2892878 - RNA, 19 nt, Artificial Sequence
  Description of Artificial Sequence: Synthetic oligonucleotide
guccugcuaucacaccucu

SEQ ID NO: 2892879 - RNA, 19 nt, Artificial Sequence
  Description of Artificial Sequence: Synthetic oligonucleotide
aggggacgccaacgugucu

SEQ ID NO: 2892880 - RNA, 19 nt, Artificial Sequence
  Description of Artificial Sequence: Synthetic oligonucleotide
ggaggggacgccaacgugu

SEQ ID NO: 2892881 - RNA, 19 nt, Artificial Sequence
  Description of Artificial Sequence: Synthetic oligonucleotide
ggucauucccaaccucucu

SEQ ID NO: 2892882 - RNA, 19 nt, Artificial Sequence
  Description of Artificial Sequence: Synthetic oligonucleotide
ccaguaaccaucugggguu

SEQ ID NO: 2892883 - RNA, 19 nt, Artificial Sequence
  Description of Artificial Sequence: Synthetic oligonucleotide
cagaugcucugggauaucu

SEQ ID NO: 2892884 - RNA, 19 nt, Artificial Sequence
  Description of Artificial Sequence: Synthetic oligonucleotide
cuaucacaccucugccaua

SEQ ID NO: 2892885 - RNA, 19 nt, Artificial Sequence
  Description of Artificial Sequence: Synthetic oligonucleotide
ggcagggaaacuucauuuu

SEQ ID NO: 2892886 - RNA, 19 nt, Artificial Sequence
  Description of Artificial Sequence: Synthetic oligonucleotide
gggucauucccaaccucuc

SEQ ID NO: 2892887 - RNA, 19 nt, Artificial Sequence
  Description of Artificial Sequence: Synthetic oligonucleotide
gcagguugguuagcacagc

SEQ ID NO: 2892888 - RNA, 19 nt, Artificial Sequence
  Description of Artificial Sequence: Synthetic oligonucleotide
aucacaccucugccauauu

SEQ ID NO: 2892889 - RNA, 19 nt, Artificial Sequence
  Description of Artificial Sequence: Synthetic oligonucleotide
aaucugugucagggucauu

SEQ ID NO: 2892890 - RNA, 19 nt, Artificial Sequence
  Description of Artificial Sequence: Synthetic oligonucleotide
gggacgccaacgugucuca

SEQ ID NO: 2892891 - RNA, 19 nt, Artificial Sequence
  Description of Artificial Sequence: Synthetic oligonucleotide
gcgaugguacauuucugau

SEQ ID NO: 2892892 - RNA, 19 nt, Artificial Sequence
  Description of Artificial Sequence: Synthetic oligonucleotide
ggauaucuaccuggaauau

SEQ ID NO: 2892893 - RNA, 19 nt, Artificial Sequence
  Description of Artificial Sequence: Synthetic oligonucleotide
guggauggcgaugguacau

SEQ ID NO: 2892894 - RNA, 19 nt, Artificial Sequence
  Description of Artificial Sequence: Synthetic oligonucleotide
ccagcauagggcugccgga

SEQ ID NO: 2892895 - RNA, 19 nt, Artificial Sequence
  Description of Artificial Sequence: Synthetic oligonucleotide
ccucugccauauuucucuc

SEQ ID NO: 2892896 - RNA, 19 nt, Artificial Sequence
  Description of Artificial Sequence: Synthetic oligonucleotide
cgugucucaagagucuuga

SEQ ID NO: 2892897 - RNA, 19 nt, Artificial Sequence
  Description of Artificial Sequence: Synthetic oligonucleotide
caagagucuugacuccauu

SEQ ID NO: 2892898 - RNA, 19 nt, Artificial Sequence
  Description of Artificial Sequence: Synthetic oligonucleotide
cugcugcagguugguuagc

SEQ ID NO: 2892899 - RNA, 19 nt, Artificial Sequence
  Description of Artificial Sequence: Synthetic oligonucleotide
ccuguaguaaggucugaau

SEQ ID NO: 2892900 - RNA, 19 nt, Artificial Sequence
  Description of Artificial Sequence: Synthetic oligonucleotide
ccagucccugugagcaaug

SEQ ID NO: 2892901 - RNA, 19 nt, Artificial Sequence
  Description of Artificial Sequence: Synthetic oligonucleotide
cuccuuccuguaguaaggu

SEQ ID NO: 2892902 - RNA, 19 nt, Artificial Sequence
  Description of Artificial Sequence: Synthetic oligonucleotide
cacaaccucaucggcaguu

SEQ ID NO: 2892903 - RNA, 19 nt, Artificial Sequence
  Description of Artificial Sequence: Synthetic oligonucleotide
gcacuucuugccaggcguc

SEQ ID NO: 2892904 - RNA, 19 nt, Artificial Sequence
  Description of Artificial Sequence: Synthetic oligonucleotide
cgccaacgugucucaagag

SEQ ID NO: 2892905 - RNA, 19 nt, Artificial Sequence
  Description of Artificial Sequence: Synthetic oligonucleotide
ggauggcgaugguacauuu

SEQ ID NO: 2892906 - RNA, 19 nt, Artificial Sequence
  Description of Artificial Sequence: Synthetic oligonucleotide
gcugccggaaggagaggca

SEQ ID NO: 2892907 - RNA, 19 nt, Artificial Sequence
  Description of Artificial Sequence: Synthetic oligonucleotide
ccaucugggguuugaaauu

SEQ ID NO: 2892908 - RNA, 19 nt, Artificial Sequence
  Description of Artificial Sequence: Synthetic oligonucleotide
caauguggauggcgauggu

SEQ ID NO: 2892909 - RNA, 19 nt, Artificial Sequence
  Description of Artificial Sequence: Synthetic oligonucleotide
ccucaucggcaguuaaggu

SEQ ID NO: 2892910 - RNA, 19 nt, Artificial Sequence
  Description of Artificial Sequence: Synthetic oligonucleotide
cugccauauuucucuccuu

SEQ ID NO: 2892911 - RNA, 19 nt, Artificial Sequence
  Description of Artificial Sequence: Synthetic oligonucleotide
gggcuccaguaaccaucug

SEQ ID NO: 2892912 - RNA, 19 nt, Artificial Sequence
  Description of Artificial Sequence: Synthetic oligonucleotide
cauuuuccucagagucuuu

SEQ ID NO: 2892913 - RNA, 19 nt, Artificial Sequence
  Description of Artificial Sequence: Synthetic oligonucleotide
cagucccugugagcaaugu

SEQ ID NO: 2892914 - RNA, 19 nt, Artificial Sequence
  Description of Artificial Sequence: Synthetic oligonucleotide
gccaggcgucaucuuccca

SEQ ID NO: 2892915 - RNA, 19 nt, Artificial Sequence
  Description of Artificial Sequence: Synthetic oligonucleotide
gggcugccggaaggagagg

SEQ ID NO: 2892916 - RNA, 19 nt, Artificial Sequence
  Description of Artificial Sequence: Synthetic oligonucleotide
ccucucuaucagcacuucu

SEQ ID NO: 2892917 - RNA, 19 nt, Artificial Sequence
  Description of Artificial Sequence: Synthetic oligonucleotide
caguaaccaucugggguuu

SEQ ID NO: 2892918 - RNA, 19 nt, Artificial Sequence
  Description of Artificial Sequence: Synthetic oligonucleotide
ggacgccaacgugucucaa

SEQ ID NO: 2892919 - RNA, 19 nt, Artificial Sequence
  Description of Artificial Sequence: Synthetic oligonucleotide
cccugugagcaauguggau

SEQ ID NO: 2892920 - RNA, 19 nt, Artificial Sequence
  Description of Artificial Sequence: Synthetic oligonucleotide
ccggaaggagaggcaggga

SEQ ID NO: 2892921 - RNA, 19 nt, Artificial Sequence
  Description of Artificial Sequence: Synthetic oligonucleotide
cccagucccugugagcaau

SEQ ID NO: 2892922 - RNA, 19 nt, Artificial Sequence
  Description of Artificial Sequence: Synthetic oligonucleotide
cgucaucuucccagucccu

SEQ ID NO: 2892923 - RNA, 19 nt, Artificial Sequence
  Description of Artificial Sequence: Synthetic oligonucleotide
ccacaaccucaucggcagu

SEQ ID NO: 2892924 - RNA, 19 nt, Artificial Sequence
  Description of Artificial Sequence: Synthetic oligonucleotide
aaauaauucugucaggcuc

SEQ ID NO: 2892925 - RNA, 19 nt, Artificial Sequence
  Description of Artificial Sequence: Synthetic oligonucleotide
aaauuuucuucaugaagcc

SEQ ID NO: 2892926 - RNA, 19 nt, Artificial Sequence
  Description of Artificial Sequence: Synthetic oligonucleotide
caaauuuucuucaugaagc

SEQ ID NO: 2892927 - RNA, 19 nt, Artificial Sequence
  Description of Artificial Sequence: Synthetic oligonucleotide
uuuaguaaaucccuuacug

SEQ ID NO: 2892928 - RNA, 19 nt, Artificial Sequence
  Description of Artificial Sequence: Synthetic oligonucleotide
cuuuauauaacuuagaagu

SEQ ID NO: 2892929 - RNA, 19 nt, Artificial Sequence
  Description of Artificial Sequence: Synthetic oligonucleotide
auaacuuagaaguucaucu

SEQ ID NO: 2892930 - RNA, 19 nt, Artificial Sequence
  Description of Artificial Sequence: Synthetic oligonucleotide
ucuucuuuauauaacuuag

SEQ ID NO: 2892931 - RNA, 19 nt, Artificial Sequence
  Description of Artificial Sequence: Synthetic oligonucleotide
uaauucaugauucucuuug

SEQ ID NO: 2892932 - RNA, 19 nt, Artificial Sequence
  Description of Artificial Sequence: Synthetic oligonucleotide
uauucuuaauucaugauuc

SEQ ID NO: 2892933 - RNA, 19 nt, Artificial Sequence
  Description of Artificial Sequence: Synthetic oligonucleotide
gaaauccacaucuugaggc

SEQ ID NO: 2892934 - RNA, 19 nt, Artificial Sequence
  Description of Artificial Sequence: Synthetic oligonucleotide
acaucuugaggcuucaccc

SEQ ID NO: 2892935 - RNA, 19 nt, Artificial Sequence
  Description of Artificial Sequence: Synthetic oligonucleotide
ucuuuauauaacuuagaag

SEQ ID NO: 2892936 - RNA, 19 nt, Artificial Sequence
  Description of Artificial Sequence: Synthetic oligonucleotide
uauauaacuuagaaguuca

SEQ ID NO: 2892937 - RNA, 19 nt, Artificial Sequence
  Description of Artificial Sequence: Synthetic oligonucleotide
ugugaauucuacuucagca

SEQ ID NO: 2892938 - RNA, 19 nt, Artificial Sequence
  Description of Artificial Sequence: Synthetic oligonucleotide
uggcaaauaauucugucag

SEQ ID NO: 2892939 - RNA, 19 nt, Artificial Sequence
  Description of Artificial Sequence: Synthetic oligonucleotide
ucuuaauucaugauucucu

SEQ ID NO: 2892940 - RNA, 19 nt, Artificial Sequence
  Description of Artificial Sequence: Synthetic oligonucleotide
ucuucaugaagccuggcag

SEQ ID NO: 2892941 - RNA, 19 nt, Artificial Sequence
  Description of Artificial Sequence: Synthetic oligonucleotide
aauucugucaggcucuuca

SEQ ID NO: 2892942 - RNA, 19 nt, Artificial Sequence
  Description of Artificial Sequence: Synthetic oligonucleotide
aauucaugauucucuuugg

SEQ ID NO: 2892943 - RNA, 19 nt, Artificial Sequence
  Description of Artificial Sequence: Synthetic oligonucleotide
uucuuuauauaacuuagaa

SEQ ID NO: 2892944 - RNA, 19 nt, Artificial Sequence
  Description of Artificial Sequence: Synthetic oligonucleotide
uuguuuaucaugcgaacgc

SEQ ID NO: 2892945 - RNA, 19 nt, Artificial Sequence
  Description of Artificial Sequence: Synthetic oligonucleotide
ucaguggugacaucaaucc

SEQ ID NO: 2892946 - RNA, 19 nt, Artificial Sequence
  Description of Artificial Sequence: Synthetic oligonucleotide
aaucccuuacugcuccucc

SEQ ID NO: 2892947 - RNA, 19 nt, Artificial Sequence
  Description of Artificial Sequence: Synthetic oligonucleotide
ucuuuggcaaauaauucug

SEQ ID NO: 2892948 - RNA, 19 nt, Artificial Sequence
  Description of Artificial Sequence: Synthetic oligonucleotide
guaacuucaaauuuucuuc

SEQ ID NO: 2892949 - RNA, 19 nt, Artificial Sequence
  Description of Artificial Sequence: Synthetic oligonucleotide
uuaguaaaucccuuacugc

SEQ ID NO: 2892950 - RNA, 19 nt, Artificial Sequence
  Description of Artificial Sequence: Synthetic oligonucleotide
uuuaucaugcgaacgccag

SEQ ID NO: 2892951 - RNA, 19 nt, Artificial Sequence
  Description of Artificial Sequence: Synthetic oligonucleotide
auucaugauucucuuuggc

SEQ ID NO: 2892952 - RNA, 19 nt, Artificial Sequence
  Description of Artificial Sequence: Synthetic oligonucleotide
uuuuaggucuucuuuauau

SEQ ID NO: 2892953 - RNA, 19 nt, Artificial Sequence
  Description of Artificial Sequence: Synthetic oligonucleotide
uucucuuuggcaaauaauu

SEQ ID NO: 2892954 - RNA, 19 nt, Artificial Sequence
  Description of Artificial Sequence: Synthetic oligonucleotide
uaguaaaucccuuacugcu

SEQ ID NO: 2892955 - RNA, 19 nt, Artificial Sequence
  Description of Artificial Sequence: Synthetic oligonucleotide
ugaagaaaugcccacuuuc

SEQ ID NO: 2892956 - RNA, 19 nt, Artificial Sequence
  Description of Artificial Sequence: Synthetic oligonucleotide
ucuucaauccuucugugaa

SEQ ID NO: 2892957 - RNA, 19 nt, Artificial Sequence
  Description of Artificial Sequence: Synthetic oligonucleotide
uugguaaccacuuuucuuc

SEQ ID NO: 2892958 - RNA, 19 nt, Artificial Sequence
  Description of Artificial Sequence: Synthetic oligonucleotide
uguaguaacuucaaauuuu

SEQ ID NO: 2892959 - RNA, 19 nt, Artificial Sequence
  Description of Artificial Sequence: Synthetic oligonucleotide
aacgccagcugacuggaac

SEQ ID NO: 2892960 - RNA, 19 nt, Artificial Sequence
  Description of Artificial Sequence: Synthetic oligonucleotide
  modified_base (3)..(3): a, c, u, g, unknown or other
ucnccuuuguuguuuauca

SEQ ID NO: 2892961 - RNA, 19 nt, Artificial Sequence
  Description of Artificial Sequence: Synthetic oligonucleotide
ugaagccuggcagugaucg

SEQ ID NO: 2892962 - RNA, 19 nt, Artificial Sequence
  Description of Artificial Sequence: Synthetic oligonucleotide
uucagcaugucuuccauca

SEQ ID NO: 2892963 - RNA, 19 nt, Artificial Sequence
  Description of Artificial Sequence: Synthetic oligonucleotide
ugcuauucuuaauucauga

SEQ ID NO: 2892964 - RNA, 19 nt, Artificial Sequence
  Description of Artificial Sequence: Synthetic oligonucleotide
uuauauaacuuagaaguuc

SEQ ID NO: 2892965 - RNA, 19 nt, Artificial Sequence
  Description of Artificial Sequence: Synthetic oligonucleotide
uuggcaaauaauucuguca

SEQ ID NO: 2892966 - RNA, 19 nt, Artificial Sequence
  Description of Artificial Sequence: Synthetic oligonucleotide
aguaacuucaaauuuucuu

SEQ ID NO: 2892967 - RNA, 19 nt, Artificial Sequence
  Description of Artificial Sequence: Synthetic oligonucleotide
ucaugauucucuuuggcaa

SEQ ID NO: 2892968 - RNA, 19 nt, Artificial Sequence
  Description of Artificial Sequence: Synthetic oligonucleotide
uuuccauuugguaaccacu

SEQ ID NO: 2892969 - RNA, 19 nt, Artificial Sequence
  Description of Artificial Sequence: Synthetic oligonucleotide
uaacuucaaauuuucuuca

SEQ ID NO: 2892970 - RNA, 19 nt, Artificial Sequence
  Description of Artificial Sequence: Synthetic oligonucleotide
aauaauucugucaggcucu

SEQ ID NO: 2892971 - RNA, 19 nt, Artificial Sequence
  Description of Artificial Sequence: Synthetic oligonucleotide
aguguaguaacuucaaauu

SEQ ID NO: 2892972 - RNA, 19 nt, Artificial Sequence
  Description of Artificial Sequence: Synthetic oligonucleotide
uuuccuucccugaagaaau

SEQ ID NO: 2892973 - RNA, 19 nt, Artificial Sequence
  Description of Artificial Sequence: Synthetic oligonucleotide
uuaggucuucuuuauauaa

SEQ ID NO: 2892974 - RNA, 19 nt, Artificial Sequence
  Description of Artificial Sequence: Synthetic oligonucleotide
uuuauauaacuuagaaguu

SEQ ID NO: 2892975 - RNA, 19 nt, Artificial Sequence
  Description of Artificial Sequence: Synthetic oligonucleotide
aaauccacaucuugaggcu

SEQ ID NO: 2892976 - RNA, 19 nt, Artificial Sequence
  Description of Artificial Sequence: Synthetic oligonucleotide
auuuucuucaugaagccug

SEQ ID NO: 2892977 - RNA, 19 nt, Artificial Sequence
  Description of Artificial Sequence: Synthetic oligonucleotide
aguggugacaucaauccgg

SEQ ID NO: 2892978 - RNA, 19 nt, Artificial Sequence
  Description of Artificial Sequence: Synthetic oligonucleotide
gugacaucaauccggagug

SEQ ID NO: 2892979 - RNA, 19 nt, Artificial Sequence
  Description of Artificial Sequence: Synthetic oligonucleotide
agcugacuggaacaucucc

SEQ ID NO: 2892980 - RNA, 19 nt, Artificial Sequence
  Description of Artificial Sequence: Synthetic oligonucleotide
cauuuaguaaaucccuuac

SEQ ID NO: 2892981 - RNA, 19 nt, Artificial Sequence
  Description of Artificial Sequence: Synthetic oligonucleotide
aagaaaugcccacuuuccu

SEQ ID NO: 2892982 - RNA, 19 nt, Artificial Sequence
  Description of Artificial Sequence: Synthetic oligonucleotide
guuguuuaucaugcgaacg

SEQ ID NO: 2892983 - RNA, 19 nt, Artificial Sequence
  Description of Artificial Sequence: Synthetic oligonucleotide
aacuuagaaguucaucuuu

SEQ ID NO: 2892984 - RNA, 19 nt, Artificial Sequence
  Description of Artificial Sequence: Synthetic oligonucleotide
agaaaugcccacuuuccug

SEQ ID NO: 2892985 - RNA, 19 nt, Artificial Sequence
  Description of Artificial Sequence: Synthetic oligonucleotide
cuucccugaagaaaugccc

SEQ ID NO: 2892986 - RNA, 19 nt, Artificial Sequence
  Description of Artificial Sequence: Synthetic oligonucleotide
uucuacuucagcaugucuu

SEQ ID NO: 2892987 - RNA, 19 nt, Artificial Sequence
  Description of Artificial Sequence: Synthetic oligonucleotide
gaagaaaugcccacuuucc

SEQ ID NO: 2892988 - RNA, 19 nt, Artificial Sequence
  Description of Artificial Sequence: Synthetic oligonucleotide
ucucuuuggcaaauaauuc

SEQ ID NO: 2892989 - RNA, 19 nt, Artificial Sequence
  Description of Artificial Sequence: Synthetic oligonucleotide
ucauuuuaggucuucuuua

SEQ ID NO: 2892990 - RNA, 19 nt, Artificial Sequence
  Description of Artificial Sequence: Synthetic oligonucleotide
aaccacuuuucuuccacug

SEQ ID NO: 2892991 - RNA, 19 nt, Artificial Sequence
  Description of Artificial Sequence: Synthetic oligonucleotide
auuuaguaaaucccuuacu

SEQ ID NO: 2892992 - RNA, 19 nt, Artificial Sequence
  Description of Artificial Sequence: Synthetic oligonucleotide
aauucuacuucagcauguc

SEQ ID NO: 2892993 - RNA, 19 nt, Artificial Sequence
  Description of Artificial Sequence: Synthetic oligonucleotide
uguaacagggccccaauuu

SEQ ID NO: 2892994 - RNA, 19 nt, Artificial Sequence
  Description of Artificial Sequence: Synthetic oligonucleotide
acugcugugaauucuacuu

SEQ ID NO: 2892995 - RNA, 19 nt, Artificial Sequence
  Description of Artificial Sequence: Synthetic oligonucleotide
acuucaaauuuucuucaug

SEQ ID NO: 2892996 - RNA, 19 nt, Artificial Sequence
  Description of Artificial Sequence: Synthetic oligonucleotide
guaaaucccuuacugcucc

SEQ ID NO: 2892997 - RNA, 19 nt, Artificial Sequence
  Description of Artificial Sequence: Synthetic oligonucleotide
uuuuccauuugguaaccac

SEQ ID NO: 2892998 - RNA, 19 nt, Artificial Sequence
  Description of Artificial Sequence: Synthetic oligonucleotide
cuuuccugaugucaugucc

SEQ ID NO: 2892999 - RNA, 19 nt, Artificial Sequence
  Description of Artificial Sequence: Synthetic oligonucleotide
ucuuccacuguucacgcaa

SEQ ID NO: 2893000 - RNA, 19 nt, Artificial Sequence
  Description of Artificial Sequence: Synthetic oligonucleotide
accccauuuaguaaauccc

SEQ ID NO: 2893001 - RNA, 19 nt, Artificial Sequence
  Description of Artificial Sequence: Synthetic oligonucleotide
caccccauuuaguaaaucc

SEQ ID NO: 2893002 - RNA, 19 nt, Artificial Sequence
  Description of Artificial Sequence: Synthetic oligonucleotide
gaaaugcccacuuuccuga

SEQ ID NO: 2893003 - RNA, 19 nt, Artificial Sequence
  Description of Artificial Sequence: Synthetic oligonucleotide
uauaacuuagaaguucauc

SEQ ID NO: 2893004 - RNA, 19 nt, Artificial Sequence
  Description of Artificial Sequence: Synthetic oligonucleotide
uguccacucacagggaacg

SEQ ID NO: 2893005 - RNA, 19 nt, Artificial Sequence
  Description of Artificial Sequence: Synthetic oligonucleotide
aacugcuguaacagggccc

SEQ ID NO: 2893006 - RNA, 19 nt, Artificial Sequence
  Description of Artificial Sequence: Synthetic oligonucleotide
ucugucaggcucuucaauc

SEQ ID NO: 2893007 - RNA, 19 nt, Artificial Sequence
  Description of Artificial Sequence: Synthetic oligonucleotide
uucccugaagaaaugccca

SEQ ID NO: 2893008 - RNA, 19 nt, Artificial Sequence
  Description of Artificial Sequence: Synthetic oligonucleotide
aauuuucuucaugaagccu

SEQ ID NO: 2893009 - RNA, 19 nt, Artificial Sequence
  Description of Artificial Sequence: Synthetic oligonucleotide
ucuacuucagcaugucuuc

SEQ ID NO: 2893010 - RNA, 19 nt, Artificial Sequence
  Description of Artificial Sequence: Synthetic oligonucleotide
uaacagggccccaauuucc

SEQ ID NO: 2893011 - RNA, 19 nt, Artificial Sequence
  Description of Artificial Sequence: Synthetic oligonucleotide
ugcugugaauucuacuuca

SEQ ID NO: 2893012 - RNA, 19 nt, Artificial Sequence
  Description of Artificial Sequence: Synthetic oligonucleotide
cauuugguaaccacuuuuc

SEQ ID NO: 2893013 - RNA, 19 nt, Artificial Sequence
  Description of Artificial Sequence: Synthetic oligonucleotide
uguuuaucaugcgaacgcc

SEQ ID NO: 2893014 - RNA, 19 nt, Artificial Sequence
  Description of Artificial Sequence: Synthetic oligonucleotide
acucacagggaacgguggc

SEQ ID NO: 2893015 - RNA, 19 nt, Artificial Sequence
  Description of Artificial Sequence: Synthetic oligonucleotide
uaggucuucuuuauauaac

SEQ ID NO: 2893016 - RNA, 19 nt, Artificial Sequence
  Description of Artificial Sequence: Synthetic oligonucleotide
  modified_base (9)..(9): a, c, u, g, unknown or other
ugcuucucnccuuuguugu

SEQ ID NO: 2893017 - RNA, 19 nt, Artificial Sequence
  Description of Artificial Sequence: Synthetic oligonucleotide
aacaucuccuucaucugag

SEQ ID NO: 2893018 - RNA, 19 nt, Artificial Sequence
  Description of Artificial Sequence: Synthetic oligonucleotide
ccuuuguuguuuaucaugc

SEQ ID NO: 2893019 - RNA, 19 nt, Artificial Sequence
  Description of Artificial Sequence: Synthetic oligonucleotide
cacaucuugaggcuucacc

SEQ ID NO: 2893020 - RNA, 19 nt, Artificial Sequence
  Description of Artificial Sequence: Synthetic oligonucleotide
cuuuguuguuuaucaugcg

SEQ ID NO: 2893021 - RNA, 19 nt, Artificial Sequence
  Description of Artificial Sequence: Synthetic oligonucleotide
augucauguccacucacag

SEQ ID NO: 2893022 - RNA, 19 nt, Artificial Sequence
  Description of Artificial Sequence: Synthetic oligonucleotide
ucaugcgaacgccagcuga

SEQ ID NO: 2893023 - RNA, 19 nt, Artificial Sequence
  Description of Artificial Sequence: Synthetic oligonucleotide
uuucuuccacuguucacgc

SEQ ID NO: 2893024 - RNA, 19 nt, Artificial Sequence
  Description of Artificial Sequence: Synthetic oligonucleotide
uaucaugcgaacgccagcu

SEQ ID NO: 2893025 - RNA, 19 nt, Artificial Sequence
  Description of Artificial Sequence: Synthetic oligonucleotide
aagccuggcagugaucguc

SEQ ID NO: 2893026 - RNA, 19 nt, Artificial Sequence
  Description of Artificial Sequence: Synthetic oligonucleotide
uuaucaugcgaacgccagc

SEQ ID NO: 2893027 - RNA, 19 nt, Artificial Sequence
  Description of Artificial Sequence: Synthetic oligonucleotide
gcaaauaauucugucaggc

SEQ ID NO: 2893028 - RNA, 19 nt, Artificial Sequence
  Description of Artificial Sequence: Synthetic oligonucleotide
auucuuaauucaugauucu

SEQ ID NO: 2893029 - RNA, 19 nt, Artificial Sequence
  Description of Artificial Sequence: Synthetic oligonucleotide
ggaacgguggcacagacca

SEQ ID NO: 2893030 - RNA, 19 nt, Artificial Sequence
  Description of Artificial Sequence: Synthetic oligonucleotide
cuucaucugaguaggggug

SEQ ID NO: 2893031 - RNA, 19 nt, Artificial Sequence
  Description of Artificial Sequence: Synthetic oligonucleotide
acuuuucuuccacuguuca

SEQ ID NO: 2893032 - RNA, 19 nt, Artificial Sequence
  Description of Artificial Sequence: Synthetic oligonucleotide
ucuuccaucaguggugaca

SEQ ID NO: 2893033 - RNA, 19 nt, Artificial Sequence
  Description of Artificial Sequence: Synthetic oligonucleotide
uucaucugaguaggggugg

SEQ ID NO: 2893034 - RNA, 19 nt, Artificial Sequence
  Description of Artificial Sequence: Synthetic oligonucleotide
cugucaggcucuucaaucc

SEQ ID NO: 2893035 - RNA, 19 nt, Artificial Sequence
  Description of Artificial Sequence: Synthetic oligonucleotide
aguaaaucccuuacugcuc

SEQ ID NO: 2893036 - RNA, 19 nt, Artificial Sequence
  Description of Artificial Sequence: Synthetic oligonucleotide
aacuucaaauuuucuucau

SEQ ID NO: 2893037 - RNA, 19 nt, Artificial Sequence
  Description of Artificial Sequence: Synthetic oligonucleotide
uccugcuauucuuaauuca

SEQ ID NO: 2893038 - RNA, 19 nt, Artificial Sequence
  Description of Artificial Sequence: Synthetic oligonucleotide
uuuaggucuucuuuauaua

SEQ ID NO: 2893039 - RNA, 19 nt, Artificial Sequence
  Description of Artificial Sequence: Synthetic oligonucleotide
uuccauuugguaaccacuu

SEQ ID NO: 2893040 - RNA, 19 nt, Artificial Sequence
  Description of Artificial Sequence: Synthetic oligonucleotide
gacuggaacaucuccuuca

SEQ ID NO: 2893041 - RNA, 19 nt, Artificial Sequence
  Description of Artificial Sequence: Synthetic oligonucleotide
aauuuccuucccugaagaa

SEQ ID NO: 2893042 - RNA, 19 nt, Artificial Sequence
  Description of Artificial Sequence: Synthetic oligonucleotide
uaacuuagaaguucaucuu

SEQ ID NO: 2893043 - RNA, 19 nt, Artificial Sequence
  Description of Artificial Sequence: Synthetic oligonucleotide
gaguguaguaacuucaaau

SEQ ID NO: 2893044 - RNA, 19 nt, Artificial Sequence
  Description of Artificial Sequence: Synthetic oligonucleotide
caucuugaggcuucacccc

SEQ ID NO: 2893045 - RNA, 19 nt, Artificial Sequence
  Description of Artificial Sequence: Synthetic oligonucleotide
aaaucccuuacugcuccuc

SEQ ID NO: 2893046 - RNA, 19 nt, Artificial Sequence
  Description of Artificial Sequence: Synthetic oligonucleotide
uucuuaauucaugauucuc

SEQ ID NO: 2893047 - RNA, 19 nt, Artificial Sequence
  Description of Artificial Sequence: Synthetic oligonucleotide
guaaccacuuuucuuccac

SEQ ID NO: 2893048 - RNA, 19 nt, Artificial Sequence
  Description of Artificial Sequence: Synthetic oligonucleotide
cacgcaacugcuguaacag

SEQ ID NO: 2893049 - RNA, 19 nt, Artificial Sequence
  Description of Artificial Sequence: Synthetic oligonucleotide
cugugaauucuacuucagc

SEQ ID NO: 2893050 - RNA, 19 nt, Artificial Sequence
  Description of Artificial Sequence: Synthetic oligonucleotide
uggcgaaauccacaucuug

SEQ ID NO: 2893051 - RNA, 19 nt, Artificial Sequence
  Description of Artificial Sequence: Synthetic oligonucleotide
aacgguggcacagaccacu

SEQ ID NO: 2893052 - RNA, 19 nt, Artificial Sequence
  Description of Artificial Sequence: Synthetic oligonucleotide
gaacaucuccuucaucuga

SEQ ID NO: 2893053 - RNA, 19 nt, Artificial Sequence
  Description of Artificial Sequence: Synthetic oligonucleotide
guaguaacuucaaauuuuc

SEQ ID NO: 2893054 - RNA, 19 nt, Artificial Sequence
  Description of Artificial Sequence: Synthetic oligonucleotide
caauccggaguguaguaac

SEQ ID NO: 2893055 - RNA, 19 nt, Artificial Sequence
  Description of Artificial Sequence: Synthetic oligonucleotide
ugguaaccacuuuucuucc

SEQ ID NO: 2893056 - RNA, 19 nt, Artificial Sequence
  Description of Artificial Sequence: Synthetic oligonucleotide
ugaugucauguccacucac

SEQ ID NO: 2893057 - RNA, 19 nt, Artificial Sequence
  Description of Artificial Sequence: Synthetic oligonucleotide
acuuuccugaugucauguc

SEQ ID NO: 2893058 - RNA, 19 nt, Artificial Sequence
  Description of Artificial Sequence: Synthetic oligonucleotide
uucaugaagccuggcagug

SEQ ID NO: 2893059 - RNA, 19 nt, Artificial Sequence
  Description of Artificial Sequence: Synthetic oligonucleotide
uacuucagcaugucuucca

SEQ ID NO: 2893060 - RNA, 19 nt, Artificial Sequence
  Description of Artificial Sequence: Synthetic oligonucleotide
aaugcccacuuuccugaug

SEQ ID NO: 2893061 - RNA, 19 nt, Artificial Sequence
  Description of Artificial Sequence: Synthetic oligonucleotide
ucacgcaacugcuguaaca

SEQ ID NO: 2893062 - RNA, 19 nt, Artificial Sequence
  Description of Artificial Sequence: Synthetic oligonucleotide
cuuuucuuccacuguucac

SEQ ID NO: 2893063 - RNA, 19 nt, Artificial Sequence
  Description of Artificial Sequence: Synthetic oligonucleotide
uuaauucaugauucucuuu

SEQ ID NO: 2893064 - RNA, 19 nt, Artificial Sequence
  Description of Artificial Sequence: Synthetic oligonucleotide
guaacagggccccaauuuc

SEQ ID NO: 2893065 - RNA, 19 nt, Artificial Sequence
  Description of Artificial Sequence: Synthetic oligonucleotide
cugcuauucuuaauucaug

SEQ ID NO: 2893066 - RNA, 19 nt, Artificial Sequence
  Description of Artificial Sequence: Synthetic oligonucleotide
caacugcuguaacagggcc

SEQ ID NO: 2893067 - RNA, 19 nt, Artificial Sequence
  Description of Artificial Sequence: Synthetic oligonucleotide
cuucuuuauauaacuuaga

SEQ ID NO: 2893068 - RNA, 19 nt, Artificial Sequence
  Description of Artificial Sequence: Synthetic oligonucleotide
ugucaggcucuucaauccu

SEQ ID NO: 2893069 - RNA, 19 nt, Artificial Sequence
  Description of Artificial Sequence: Synthetic oligonucleotide
ggcaaauaauucugucagg

SEQ ID NO: 2893070 - RNA, 19 nt, Artificial Sequence
  Description of Artificial Sequence: Synthetic oligonucleotide
aucuugaggcuucacccca

SEQ ID NO: 2893071 - RNA, 19 nt, Artificial Sequence
  Description of Artificial Sequence: Synthetic oligonucleotide
gcgaaauccacaucuugag

SEQ ID NO: 2893072 - RNA, 19 nt, Artificial Sequence
  Description of Artificial Sequence: Synthetic oligonucleotide
agggaacgguggcacagac

SEQ ID NO: 2893073 - RNA, 19 nt, Artificial Sequence
  Description of Artificial Sequence: Synthetic oligonucleotide
auucuacuucagcaugucu

SEQ ID NO: 2893074 - RNA, 19 nt, Artificial Sequence
  Description of Artificial Sequence: Synthetic oligonucleotide
caugcgaacgccagcugac

SEQ ID NO: 2893075 - RNA, 19 nt, Artificial Sequence
  Description of Artificial Sequence: Synthetic oligonucleotide
ugcgaacgccagcugacug

SEQ ID NO: 2893076 - RNA, 19 nt, Artificial Sequence
  Description of Artificial Sequence: Synthetic oligonucleotide
uggcacagaccacugcugu

SEQ ID NO: 2893077 - RNA, 19 nt, Artificial Sequence
  Description of Artificial Sequence: Synthetic oligonucleotide
accacuuuucuuccacugu

SEQ ID NO: 2893078 - RNA, 19 nt, Artificial Sequence
  Description of Artificial Sequence: Synthetic oligonucleotide
agcaugucuuccaucagug

SEQ ID NO: 2893079 - RNA, 19 nt, Artificial Sequence
  Description of Artificial Sequence: Synthetic oligonucleotide
ucccuuacugcuccuccug

SEQ ID NO: 2893080 - RNA, 19 nt, Artificial Sequence
  Description of Artificial Sequence: Synthetic oligonucleotide
caauuuccuucccugaaga

SEQ ID NO: 2893081 - RNA, 19 nt, Artificial Sequence
  Description of Artificial Sequence: Synthetic oligonucleotide
cacucacagggaacggugg

SEQ ID NO: 2893082 - RNA, 19 nt, Artificial Sequence
  Description of Artificial Sequence: Synthetic oligonucleotide
agaccacugcugugaauuc

SEQ ID NO: 2893083 - RNA, 19 nt, Artificial Sequence
  Description of Artificial Sequence: Synthetic oligonucleotide
gaugucauguccacucaca

SEQ ID NO: 2893084 - RNA, 19 nt, Artificial Sequence
  Description of Artificial Sequence: Synthetic oligonucleotide
cucuuuggcaaauaauucu

SEQ ID NO: 2893085 - RNA, 19 nt, Artificial Sequence
  Description of Artificial Sequence: Synthetic oligonucleotide
  modified_base (18)..(18): a, c, u, g, unknown or other
aucgucccaugcuucucnc

SEQ ID NO: 2893086 - RNA, 19 nt, Artificial Sequence
  Description of Artificial Sequence: Synthetic oligonucleotide
caguggugacaucaauccg

SEQ ID NO: 2893087 - RNA, 19 nt, Artificial Sequence
  Description of Artificial Sequence: Synthetic oligonucleotide
uccacuguucacgcaacug

SEQ ID NO: 2893088 - RNA, 19 nt, Artificial Sequence
  Description of Artificial Sequence: Synthetic oligonucleotide
cuucaccccauuuaguaaa

SEQ ID NO: 2893089 - RNA, 19 nt, Artificial Sequence
  Description of Artificial Sequence: Synthetic oligonucleotide
aggcucuucaauccuucug

SEQ ID NO: 2893090 - RNA, 19 nt, Artificial Sequence
  Description of Artificial Sequence: Synthetic oligonucleotide
cuauucuuaauucaugauu

SEQ ID NO: 2893091 - RNA, 19 nt, Artificial Sequence
  Description of Artificial Sequence: Synthetic oligonucleotide
uccggaguguaguaacuuc

SEQ ID NO: 2893092 - RNA, 19 nt, Artificial Sequence
  Description of Artificial Sequence: Synthetic oligonucleotide
uccuucccugaagaaaugc

SEQ ID NO: 2893093 - RNA, 19 nt, Artificial Sequence
  Description of Artificial Sequence: Synthetic oligonucleotide
  modified_base (19)..(19): a, c, u, g, unknown or other
gaucgucccaugcuucucn

SEQ ID NO: 2893094 - RNA, 19 nt, Artificial Sequence
  Description of Artificial Sequence: Synthetic oligonucleotide
aucugaguagggguggcag

SEQ ID NO: 2893095 - RNA, 19 nt, Artificial Sequence
  Description of Artificial Sequence: Synthetic oligonucleotide
ugacuggaacaucuccuuc

SEQ ID NO: 2893096 - RNA, 19 nt, Artificial Sequence
  Description of Artificial Sequence: Synthetic oligonucleotide
agugaucgucccaugcuuc

SEQ ID NO: 2893097 - RNA, 19 nt, Artificial Sequence
  Description of Artificial Sequence: Synthetic oligonucleotide
ucugaguagggguggcagu

SEQ ID NO: 2893098 - RNA, 19 nt, Artificial Sequence
  Description of Artificial Sequence: Synthetic oligonucleotide
uuacugcuccuccugcuau

SEQ ID NO: 2893099 - RNA, 19 nt, Artificial Sequence
  Description of Artificial Sequence: Synthetic oligonucleotide
ugucuuccaucagugguga

SEQ ID NO: 2893100 - RNA, 19 nt, Artificial Sequence
  Description of Artificial Sequence: Synthetic oligonucleotide
augucuuccaucaguggug

SEQ ID NO: 2893101 - RNA, 19 nt, Artificial Sequence
  Description of Artificial Sequence: Synthetic oligonucleotide
cuccugcuauucuuaauuc

SEQ ID NO: 2893102 - RNA, 19 nt, Artificial Sequence
  Description of Artificial Sequence: Synthetic oligonucleotide
uucugucaggcucuucaau

SEQ ID NO: 2893103 - RNA, 19 nt, Artificial Sequence
  Description of Artificial Sequence: Synthetic oligonucleotide
ucaauccggaguguaguaa

SEQ ID NO: 2893104 - RNA, 19 nt, Artificial Sequence
  Description of Artificial Sequence: Synthetic oligonucleotide
acaucaauccggaguguag

SEQ ID NO: 2893105 - RNA, 19 nt, Artificial Sequence
  Description of Artificial Sequence: Synthetic oligonucleotide
cacuuuucuuccacuguuc

SEQ ID NO: 2893106 - RNA, 19 nt, Artificial Sequence
  Description of Artificial Sequence: Synthetic oligonucleotide
acgcaacugcuguaacagg

SEQ ID NO: 2893107 - RNA, 19 nt, Artificial Sequence
  Description of Artificial Sequence: Synthetic oligonucleotide
aauccggaguguaguaacu

SEQ ID NO: 2893108 - RNA, 19 nt, Artificial Sequence
  Description of Artificial Sequence: Synthetic oligonucleotide
auuuuaggucuucuuuaua

SEQ ID NO: 2893109 - RNA, 19 nt, Artificial Sequence
  Description of Artificial Sequence: Synthetic oligonucleotide
ggugacaucaauccggagu

SEQ ID NO: 2893110 - RNA, 19 nt, Artificial Sequence
  Description of Artificial Sequence: Synthetic oligonucleotide
gguggcgaaauccacaucu

SEQ ID NO: 2893111 - RNA, 19 nt, Artificial Sequence
  Description of Artificial Sequence: Synthetic oligonucleotide
acagggaacgguggcacag

SEQ ID NO: 2893112 - RNA, 19 nt, Artificial Sequence
  Description of Artificial Sequence: Synthetic oligonucleotide
ucccugaagaaaugcccac

SEQ ID NO: 2893113 - RNA, 19 nt, Artificial Sequence
  Description of Artificial Sequence: Synthetic oligonucleotide
cugcugugaauucuacuuc

SEQ ID NO: 2893114 - RNA, 19 nt, Artificial Sequence
  Description of Artificial Sequence: Synthetic oligonucleotide
uucacgcaacugcuguaac

SEQ ID NO: 2893115 - RNA, 19 nt, Artificial Sequence
  Description of Artificial Sequence: Synthetic oligonucleotide
ucauguccacucacaggga

SEQ ID NO: 2893116 - RNA, 19 nt, Artificial Sequence
  Description of Artificial Sequence: Synthetic oligonucleotide
  modified_base (4)..(4): a, c, u, g, unknown or other
cucnccuuuguuguuuauc

SEQ ID NO: 2893117 - RNA, 19 nt, Artificial Sequence
  Description of Artificial Sequence: Synthetic oligonucleotide
uuccugaugucauguccac

SEQ ID NO: 2893118 - RNA, 19 nt, Artificial Sequence
  Description of Artificial Sequence: Synthetic oligonucleotide
ucacagggaacgguggcac

SEQ ID NO: 2893119 - RNA, 19 nt, Artificial Sequence
  Description of Artificial Sequence: Synthetic oligonucleotide
  modified_base (14)..(14): a, c, u, g, unknown or other
ucccaugcuucucnccuuu

SEQ ID NO: 2893120 - RNA, 19 nt, Artificial Sequence
  Description of Artificial Sequence: Synthetic oligonucleotide
aacagggccccaauuuccu

SEQ ID NO: 2893121 - RNA, 19 nt, Artificial Sequence
  Description of Artificial Sequence: Synthetic oligonucleotide
ccacuguucacgcaacugc

SEQ ID NO: 2893122 - RNA, 19 nt, Artificial Sequence
  Description of Artificial Sequence: Synthetic oligonucleotide
cgcaacugcuguaacaggg

SEQ ID NO: 2893123 - RNA, 19 nt, Artificial Sequence
  Description of Artificial Sequence: Synthetic oligonucleotide
auucucuuuggcaaauaau

SEQ ID NO: 2893124 - RNA, 19 nt, Artificial Sequence
  Description of Artificial Sequence: Synthetic oligonucleotide
agccuggcagugaucgucc

SEQ ID NO: 2893125 - RNA, 19 nt, Artificial Sequence
  Description of Artificial Sequence: Synthetic oligonucleotide
acuuagaaguucaucuuuu

SEQ ID NO: 2893126 - RNA, 19 nt, Artificial Sequence
  Description of Artificial Sequence: Synthetic oligonucleotide
auguccacucacagggaac

SEQ ID NO: 2893127 - RNA, 19 nt, Artificial Sequence
  Description of Artificial Sequence: Synthetic oligonucleotide
gugaauucuacuucagcau

SEQ ID NO: 2893128 - RNA, 19 nt, Artificial Sequence
  Description of Artificial Sequence: Synthetic oligonucleotide
uucaccccauuuaguaaau

SEQ ID NO: 2893129 - RNA, 19 nt, Artificial Sequence
  Description of Artificial Sequence: Synthetic oligonucleotide
uccauuugguaaccacuuu

SEQ ID NO: 2893130 - RNA, 19 nt, Artificial Sequence
  Description of Artificial Sequence: Synthetic oligonucleotide
cugaguagggguggcagug

SEQ ID NO: 2893131 - RNA, 19 nt, Artificial Sequence
  Description of Artificial Sequence: Synthetic oligonucleotide
guuuaucaugcgaacgcca

SEQ ID NO: 2893132 - RNA, 19 nt, Artificial Sequence
  Description of Artificial Sequence: Synthetic oligonucleotide
acgccagcugacuggaaca

SEQ ID NO: 2893133 - RNA, 19 nt, Artificial Sequence
  Description of Artificial Sequence: Synthetic oligonucleotide
cuuccacuguucacgcaac

SEQ ID NO: 2893134 - RNA, 19 nt, Artificial Sequence
  Description of Artificial Sequence: Synthetic oligonucleotide
uuccacuguucacgcaacu

SEQ ID NO: 2893135 - RNA, 19 nt, Artificial Sequence
  Description of Artificial Sequence: Synthetic oligonucleotide
cuacuucagcaugucuucc

SEQ ID NO: 2893136 - RNA, 19 nt, Artificial Sequence
  Description of Artificial Sequence: Synthetic oligonucleotide
ccuucccugaagaaaugcc

SEQ ID NO: 2893137 - RNA, 19 nt, Artificial Sequence
  Description of Artificial Sequence: Synthetic oligonucleotide
aaaugcccacuuuccugau

SEQ ID NO: 2893138 - RNA, 19 nt, Artificial Sequence
  Description of Artificial Sequence: Synthetic oligonucleotide
cucuucaauccuucuguga

SEQ ID NO: 2893139 - RNA, 19 nt, Artificial Sequence
  Description of Artificial Sequence: Synthetic oligonucleotide
caugauucucuuuggcaaa

SEQ ID NO: 2893140 - RNA, 19 nt, Artificial Sequence
  Description of Artificial Sequence: Synthetic oligonucleotide
auucugucaggcucuucaa

SEQ ID NO: 2893141 - RNA, 19 nt, Artificial Sequence
  Description of Artificial Sequence: Synthetic oligonucleotide
uccacucacagggaacggu

SEQ ID NO: 2893142 - RNA, 19 nt, Artificial Sequence
  Description of Artificial Sequence: Synthetic oligonucleotide
aucaauccggaguguagua

SEQ ID NO: 2893143 - RNA, 19 nt, Artificial Sequence
  Description of Artificial Sequence: Synthetic oligonucleotide
aauccacaucuugaggcuu

SEQ ID NO: 2893144 - RNA, 19 nt, Artificial Sequence
  Description of Artificial Sequence: Synthetic oligonucleotide
cuuaauucaugauucucuu

SEQ ID NO: 2893145 - RNA, 19 nt, Artificial Sequence
  Description of Artificial Sequence: Synthetic oligonucleotide
auccacaucuugaggcuuc

SEQ ID NO: 2893146 - RNA, 19 nt, Artificial Sequence
  Description of Artificial Sequence: Synthetic oligonucleotide
gaauucuacuucagcaugu

SEQ ID NO: 2893147 - RNA, 19 nt, Artificial Sequence
  Description of Artificial Sequence: Synthetic oligonucleotide
ucaucugaguagggguggc

SEQ ID NO: 2893148 - RNA, 19 nt, Artificial Sequence
  Description of Artificial Sequence: Synthetic oligonucleotide
guguaguaacuucaaauuu

SEQ ID NO: 2893149 - RNA, 19 nt, Artificial Sequence
  Description of Artificial Sequence: Synthetic oligonucleotide
uguucacgcaacugcugua

SEQ ID NO: 2893150 - RNA, 19 nt, Artificial Sequence
  Description of Artificial Sequence: Synthetic oligonucleotide
uaaaucccuuacugcuccu

SEQ ID NO: 2893151 - RNA, 19 nt, Artificial Sequence
  Description of Artificial Sequence: Synthetic oligonucleotide
  modified_base (6)..(6): a, c, u, g, unknown or other
uucucnccuuuguuguuua

SEQ ID NO: 2893152 - RNA, 19 nt, Artificial Sequence
  Description of Artificial Sequence: Synthetic oligonucleotide
gcgaacgccagcugacugg

SEQ ID NO: 2893153 - RNA, 19 nt, Artificial Sequence
  Description of Artificial Sequence: Synthetic oligonucleotide
ccaauuuccuucccugaag

SEQ ID NO: 2893154 - RNA, 19 nt, Artificial Sequence
  Description of Artificial Sequence: Synthetic oligonucleotide
ggcagugaucgucccaugc

SEQ ID NO: 2893155 - RNA, 19 nt, Artificial Sequence
  Description of Artificial Sequence: Synthetic oligonucleotide
ucaugaagccuggcaguga

SEQ ID NO: 2893156 - RNA, 19 nt, Artificial Sequence
  Description of Artificial Sequence: Synthetic oligonucleotide
aucaugcgaacgccagcug

SEQ ID NO: 2893157 - RNA, 19 nt, Artificial Sequence
  Description of Artificial Sequence: Synthetic oligonucleotide
ucuugaggcuucaccccau

SEQ ID NO: 2893158 - RNA, 19 nt, Artificial Sequence
  Description of Artificial Sequence: Synthetic oligonucleotide
cagggccccaauuuccuuc

SEQ ID NO: 2893159 - RNA, 19 nt, Artificial Sequence
  Description of Artificial Sequence: Synthetic oligonucleotide
  modified_base (17)..(17): a, c, u, g, unknown or other
ucgucccaugcuucucncc

SEQ ID NO: 2893160 - RNA, 19 nt, Artificial Sequence
  Description of Artificial Sequence: Synthetic oligonucleotide
ggcgaaauccacaucuuga

SEQ ID NO: 2893161 - RNA, 19 nt, Artificial Sequence
  Description of Artificial Sequence: Synthetic oligonucleotide
uucuuccacuguucacgca

SEQ ID NO: 2893162 - RNA, 19 nt, Artificial Sequence
  Description of Artificial Sequence: Synthetic oligonucleotide
cuuuggcaaauaauucugu

SEQ ID NO: 2893163 - RNA, 19 nt, Artificial Sequence
  Description of Artificial Sequence: Synthetic oligonucleotide
uggugacaucaauccggag

SEQ ID NO: 2893164 - RNA, 19 nt, Artificial Sequence
  Description of Artificial Sequence: Synthetic oligonucleotide
cuucaauccuucugugaaa

SEQ ID NO: 2893165 - RNA, 19 nt, Artificial Sequence
  Description of Artificial Sequence: Synthetic oligonucleotide
cauuuuaggucuucuuuau

SEQ ID NO: 2893166 - RNA, 19 nt, Artificial Sequence
  Description of Artificial Sequence: Synthetic oligonucleotide
cuccuucaucugaguaggg

SEQ ID NO: 2893167 - RNA, 19 nt, Artificial Sequence
  Description of Artificial Sequence: Synthetic oligonucleotide
cgaaauccacaucuugagg

SEQ ID NO: 2893168 - RNA, 19 nt, Artificial Sequence
  Description of Artificial Sequence: Synthetic oligonucleotide
uugaggcuucaccccauuu

SEQ ID NO: 2893169 - RNA, 19 nt, Artificial Sequence
  Description of Artificial Sequence: Synthetic oligonucleotide
gacaucaauccggagugua

SEQ ID NO: 2893170 - RNA, 19 nt, Artificial Sequence
  Description of Artificial Sequence: Synthetic oligonucleotide
cagugguggcgaaauccac

SEQ ID NO: 2893171 - RNA, 19 nt, Artificial Sequence
  Description of Artificial Sequence: Synthetic oligonucleotide
cauguccacucacagggaa

SEQ ID NO: 2893172 - RNA, 19 nt, Artificial Sequence
  Description of Artificial Sequence: Synthetic oligonucleotide
auauaacuuagaaguucau

SEQ ID NO: 2893173 - RNA, 19 nt, Artificial Sequence
  Description of Artificial Sequence: Synthetic oligonucleotide
ggcuucaccccauuuagua

SEQ ID NO: 2893174 - RNA, 19 nt, Artificial Sequence
  Description of Artificial Sequence: Synthetic oligonucleotide
ggcucuucaauccuucugu

SEQ ID NO: 2893175 - RNA, 19 nt, Artificial Sequence
  Description of Artificial Sequence: Synthetic oligonucleotide
ugcuguaacagggccccaa

SEQ ID NO: 2893176 - RNA, 19 nt, Artificial Sequence
  Description of Artificial Sequence: Synthetic oligonucleotide
uccuccugcuauucuuaau

SEQ ID NO: 2893177 - RNA, 19 nt, Artificial Sequence
  Description of Artificial Sequence: Synthetic oligonucleotide
uccacaucuugaggcuuca

SEQ ID NO: 2893178 - RNA, 19 nt, Artificial Sequence
  Description of Artificial Sequence: Synthetic oligonucleotide
guggugacaucaauccgga

SEQ ID NO: 2893179 - RNA, 19 nt, Artificial Sequence
  Description of Artificial Sequence: Synthetic oligonucleotide
gccccaauuuccuucccug

SEQ ID NO: 2893180 - RNA, 19 nt, Artificial Sequence
  Description of Artificial Sequence: Synthetic oligonucleotide
uccugaugucauguccacu

SEQ ID NO: 2893181 - RNA, 19 nt, Artificial Sequence
  Description of Artificial Sequence: Synthetic oligonucleotide
cugaugucauguccacuca

SEQ ID NO: 2893182 - RNA, 19 nt, Artificial Sequence
  Description of Artificial Sequence: Synthetic oligonucleotide
gcucuucaauccuucugug

SEQ ID NO: 2893183 - RNA, 19 nt, Artificial Sequence
  Description of Artificial Sequence: Synthetic oligonucleotide
guucacgcaacugcuguaa

SEQ ID NO: 2893184 - RNA, 19 nt, Artificial Sequence
  Description of Artificial Sequence: Synthetic oligonucleotide
gcaacugcuguaacagggc

SEQ ID NO: 2893185 - RNA, 19 nt, Artificial Sequence
  Description of Artificial Sequence: Synthetic oligonucleotide
uagggguggcagugguggc

SEQ ID NO: 2893186 - RNA, 19 nt, Artificial Sequence
  Description of Artificial Sequence: Synthetic oligonucleotide
ugauucucuuuggcaaaua

SEQ ID NO: 2893187 - RNA, 19 nt, Artificial Sequence
  Description of Artificial Sequence: Synthetic oligonucleotide
caucuccuucaucugagua

SEQ ID NO: 2893188 - RNA, 19 nt, Artificial Sequence
  Description of Artificial Sequence: Synthetic oligonucleotide
  modified_base (5)..(5): a, c, u, g, unknown or other
ucucnccuuuguuguuuau

SEQ ID NO: 2893189 - RNA, 19 nt, Artificial Sequence
  Description of Artificial Sequence: Synthetic oligonucleotide
ugacaucaauccggagugu

SEQ ID NO: 2893190 - RNA, 19 nt, Artificial Sequence
  Description of Artificial Sequence: Synthetic oligonucleotide
ccacucacagggaacggug

SEQ ID NO: 2893191 - RNA, 19 nt, Artificial Sequence
  Description of Artificial Sequence: Synthetic oligonucleotide
guggcacagaccacugcug

SEQ ID NO: 2893192 - RNA, 19 nt, Artificial Sequence
  Description of Artificial Sequence: Synthetic oligonucleotide
cuuacugcuccuccugcua

SEQ ID NO: 2893193 - RNA, 19 nt, Artificial Sequence
  Description of Artificial Sequence: Synthetic oligonucleotide
gguggcacagaccacugcu

SEQ ID NO: 2893194 - RNA, 19 nt, Artificial Sequence
  Description of Artificial Sequence: Synthetic oligonucleotide
ugaucgucccaugcuucuc

SEQ ID NO: 2893195 - RNA, 19 nt, Artificial Sequence
  Description of Artificial Sequence: Synthetic oligonucleotide
ucaccccauuuaguaaauc

SEQ ID NO: 2893196 - RNA, 19 nt, Artificial Sequence
  Description of Artificial Sequence: Synthetic oligonucleotide
cuguucacgcaacugcugu

SEQ ID NO: 2893197 - RNA, 19 nt, Artificial Sequence
  Description of Artificial Sequence: Synthetic oligonucleotide
ugguggcgaaauccacauc

SEQ ID NO: 2893198 - RNA, 19 nt, Artificial Sequence
  Description of Artificial Sequence: Synthetic oligonucleotide
ggaguguaguaacuucaaa

SEQ ID NO: 2893199 - RNA, 19 nt, Artificial Sequence
  Description of Artificial Sequence: Synthetic oligonucleotide
uggcagugaucgucccaug

SEQ ID NO: 2893200 - RNA, 19 nt, Artificial Sequence
  Description of Artificial Sequence: Synthetic oligonucleotide
ggcacagaccacugcugug

SEQ ID NO: 2893201 - RNA, 19 nt, Artificial Sequence
  Description of Artificial Sequence: Synthetic oligonucleotide
guccacucacagggaacgg

SEQ ID NO: 2893202 - RNA, 19 nt, Artificial Sequence
  Description of Artificial Sequence: Synthetic oligonucleotide
uacugcuccuccugcuauu

SEQ ID NO: 2893203 - RNA, 19 nt, Artificial Sequence
  Description of Artificial Sequence: Synthetic oligonucleotide
acagaccacugcugugaau

SEQ ID NO: 2893204 - RNA, 19 nt, Artificial Sequence
  Description of Artificial Sequence: Synthetic oligonucleotide
accacugcugugaauucua

SEQ ID NO: 2893205 - RNA, 19 nt, Artificial Sequence
  Description of Artificial Sequence: Synthetic oligonucleotide
cagcugacuggaacaucuc

SEQ ID NO: 2893206 - RNA, 19 nt, Artificial Sequence
  Description of Artificial Sequence: Synthetic oligonucleotide
cucacagggaacgguggca

SEQ ID NO: 2893207 - RNA, 19 nt, Artificial Sequence
  Description of Artificial Sequence: Synthetic oligonucleotide
caugaagccuggcagugau

SEQ ID NO: 2893208 - RNA, 19 nt, Artificial Sequence
  Description of Artificial Sequence: Synthetic oligonucleotide
caucaauccggaguguagu

SEQ ID NO: 2893209 - RNA, 19 nt, Artificial Sequence
  Description of Artificial Sequence: Synthetic oligonucleotide
cuuccaucaguggugacau

SEQ ID NO: 2893210 - RNA, 19 nt, Artificial Sequence
  Description of Artificial Sequence: Synthetic oligonucleotide
auaauucugucaggcucuu

SEQ ID NO: 2893211 - RNA, 19 nt, Artificial Sequence
  Description of Artificial Sequence: Synthetic oligonucleotide
ccauuuaguaaaucccuua

SEQ ID NO: 2893212 - RNA, 19 nt, Artificial Sequence
  Description of Artificial Sequence: Synthetic oligonucleotide
gcuucaccccauuuaguaa

SEQ ID NO: 2893213 - RNA, 19 nt, Artificial Sequence
  Description of Artificial Sequence: Synthetic oligonucleotide
ccggaguguaguaacuuca

SEQ ID NO: 2893214 - RNA, 19 nt, Artificial Sequence
  Description of Artificial Sequence: Synthetic oligonucleotide
auccggaguguaguaacuu

SEQ ID NO: 2893215 - RNA, 19 nt, Artificial Sequence
  Description of Artificial Sequence: Synthetic oligonucleotide
gcuauucuuaauucaugau

SEQ ID NO: 2893216 - RNA, 19 nt, Artificial Sequence
  Description of Artificial Sequence: Synthetic oligonucleotide
cagaccacugcugugaauu

SEQ ID NO: 2893217 - RNA, 19 nt, Artificial Sequence
  Description of Artificial Sequence: Synthetic oligonucleotide
gugaucgucccaugcuucu

SEQ ID NO: 2893218 - RNA, 19 nt, Artificial Sequence
  Description of Artificial Sequence: Synthetic oligonucleotide
uggcagugguggcgaaauc

SEQ ID NO: 2893219 - RNA, 19 nt, Artificial Sequence
  Description of Artificial Sequence: Synthetic oligonucleotide
gcacagaccacugcuguga

SEQ ID NO: 2893220 - RNA, 19 nt, Artificial Sequence
  Description of Artificial Sequence: Synthetic oligonucleotide
augcgaacgccagcugacu

SEQ ID NO: 2893221 - RNA, 19 nt, Artificial Sequence
  Description of Artificial Sequence: Synthetic oligonucleotide
gcagugguggcgaaaucca

SEQ ID NO: 2893222 - RNA, 19 nt, Artificial Sequence
  Description of Artificial Sequence: Synthetic oligonucleotide
ccugcuauucuuaauucau

SEQ ID NO: 2893223 - RNA, 19 nt, Artificial Sequence
  Description of Artificial Sequence: Synthetic oligonucleotide
acagggccccaauuuccuu

SEQ ID NO: 2893224 - RNA, 19 nt, Artificial Sequence
  Description of Artificial Sequence: Synthetic oligonucleotide
ccagcugacuggaacaucu

SEQ ID NO: 2893225 - RNA, 19 nt, Artificial Sequence
  Description of Artificial Sequence: Synthetic oligonucleotide
  modified_base (11)..(11): a, c, u, g, unknown or other
caugcuucucnccuuuguu

SEQ ID NO: 2893226 - RNA, 19 nt, Artificial Sequence
  Description of Artificial Sequence: Synthetic oligonucleotide
gaccacugcugugaauucu

SEQ ID NO: 2893227 - RNA, 19 nt, Artificial Sequence
  Description of Artificial Sequence: Synthetic oligonucleotide
cugacuggaacaucuccuu

SEQ ID NO: 2893228 - RNA, 19 nt, Artificial Sequence
  Description of Artificial Sequence: Synthetic oligonucleotide
ugcccacuuuccugauguc

SEQ ID NO: 2893229 - RNA, 19 nt, Artificial Sequence
  Description of Artificial Sequence: Synthetic oligonucleotide
cccuuacugcuccuccugc

SEQ ID NO: 2893230 - RNA, 19 nt, Artificial Sequence
  Description of Artificial Sequence: Synthetic oligonucleotide
cacuuuccugaugucaugu

SEQ ID NO: 2893231 - RNA, 19 nt, Artificial Sequence
  Description of Artificial Sequence: Synthetic oligonucleotide
uuccaucaguggugacauc

SEQ ID NO: 2893232 - RNA, 19 nt, Artificial Sequence
  Description of Artificial Sequence: Synthetic oligonucleotide
gcagugaucgucccaugcu

SEQ ID NO: 2893233 - RNA, 19 nt, Artificial Sequence
  Description of Artificial Sequence: Synthetic oligonucleotide
gaacgguggcacagaccac

SEQ ID NO: 2893234 - RNA, 19 nt, Artificial Sequence
  Description of Artificial Sequence: Synthetic oligonucleotide
aggcuucaccccauuuagu

SEQ ID NO: 2893235 - RNA, 19 nt, Artificial Sequence
  Description of Artificial Sequence: Synthetic oligonucleotide
ccacuuuccugaugucaug

SEQ ID NO: 2893236 - RNA, 19 nt, Artificial Sequence
  Description of Artificial Sequence: Synthetic oligonucleotide
gcugacuggaacaucuccu

SEQ ID NO: 2893237 - RNA, 19 nt, Artificial Sequence
  Description of Artificial Sequence: Synthetic oligonucleotide
cuccuccugcuauucuuaa

SEQ ID NO: 2893238 - RNA, 19 nt, Artificial Sequence
  Description of Artificial Sequence: Synthetic oligonucleotide
acgguggcacagaccacug

SEQ ID NO: 2893239 - RNA, 19 nt, Artificial Sequence
  Description of Artificial Sequence: Synthetic oligonucleotide
ccccauuuaguaaaucccu

SEQ ID NO: 2893240 - RNA, 19 nt, Artificial Sequence
  Description of Artificial Sequence: Synthetic oligonucleotide
cacagggaacgguggcaca

SEQ ID NO: 2893241 - RNA, 19 nt, Artificial Sequence
  Description of Artificial Sequence: Synthetic oligonucleotide
  modified_base (7)..(7): a, c, u, g, unknown or other
cuucucnccuuuguuguuu

SEQ ID NO: 2893242 - RNA, 19 nt, Artificial Sequence
  Description of Artificial Sequence: Synthetic oligonucleotide
cacagaccacugcugugaa

SEQ ID NO: 2893243 - RNA, 19 nt, Artificial Sequence
  Description of Artificial Sequence: Synthetic oligonucleotide
ccacugcugugaauucuac

SEQ ID NO: 2893244 - RNA, 19 nt, Artificial Sequence
  Description of Artificial Sequence: Synthetic oligonucleotide
gggaacgguggcacagacc

SEQ ID NO: 2893245 - RNA, 19 nt, Artificial Sequence
  Description of Artificial Sequence: Synthetic oligonucleotide
gaagccuggcagugaucgu

SEQ ID NO: 2893246 - RNA, 19 nt, Artificial Sequence
  Description of Artificial Sequence: Synthetic oligonucleotide
caucugaguagggguggca

SEQ ID NO: 2893247 - RNA, 19 nt, Artificial Sequence
  Description of Artificial Sequence: Synthetic oligonucleotide
cugaagaaaugcccacuuu

SEQ ID NO: 2893248 - RNA, 19 nt, Artificial Sequence
  Description of Artificial Sequence: Synthetic oligonucleotide
cuggcagugaucgucccau

SEQ ID NO: 2893249 - RNA, 19 nt, Artificial Sequence
  Description of Artificial Sequence: Synthetic oligonucleotide
caucaguggugacaucaau

SEQ ID NO: 2893250 - RNA, 19 nt, Artificial Sequence
  Description of Artificial Sequence: Synthetic oligonucleotide
cagugaucgucccaugcuu

SEQ ID NO: 2893251 - RNA, 19 nt, Artificial Sequence
  Description of Artificial Sequence: Synthetic oligonucleotide
  modified_base (2)..(2): a, c, u, g, unknown or other
cnccuuuguuguuuaucau

SEQ ID NO: 2893252 - RNA, 19 nt, Artificial Sequence
  Description of Artificial Sequence: Synthetic oligonucleotide
cccaauuuccuucccugaa

SEQ ID NO: 2893253 - RNA, 19 nt, Artificial Sequence
  Description of Artificial Sequence: Synthetic oligonucleotide
guggcagugguggcgaaau

SEQ ID NO: 2893254 - RNA, 19 nt, Artificial Sequence
  Description of Artificial Sequence: Synthetic oligonucleotide
ccauuugguaaccacuuuu

SEQ ID NO: 2893255 - RNA, 19 nt, Artificial Sequence
  Description of Artificial Sequence: Synthetic oligonucleotide
gcucauuuuaggucuucuu

SEQ ID NO: 2893256 - RNA, 19 nt, Artificial Sequence
  Description of Artificial Sequence: Synthetic oligonucleotide
  modified_base (13)..(13): a, c, u, g, unknown or other
cccaugcuucucnccuuug

SEQ ID NO: 2893257 - RNA, 19 nt, Artificial Sequence
  Description of Artificial Sequence: Synthetic oligonucleotide
ccccaauuuccuucccuga

SEQ ID NO: 2893258 - RNA, 19 nt, Artificial Sequence
  Description of Artificial Sequence: Synthetic oligonucleotide
caggcucuucaauccuucu

SEQ ID NO: 2893259 - RNA, 19 nt, Artificial Sequence
  Description of Artificial Sequence: Synthetic oligonucleotide
cagggaacgguggcacaga

SEQ ID NO: 2893260 - RNA, 19 nt, Artificial Sequence
  Description of Artificial Sequence: Synthetic oligonucleotide
ccaucaguggugacaucaa

SEQ ID NO: 2893261 - RNA, 19 nt, Artificial Sequence
  Description of Artificial Sequence: Synthetic oligonucleotide
cccacuuuccugaugucau

SEQ ID NO: 2893262 - RNA, 19 nt, Artificial Sequence
  Description of Artificial Sequence: Synthetic oligonucleotide
  modified_base (16)..(16): a, c, u, g, unknown or other
cgucccaugcuucucnccu

SEQ ID NO: 2893263 - RNA, 19 nt, Artificial Sequence
  Description of Artificial Sequence: Synthetic oligonucleotide
gccuggcagugaucguccc

SEQ ID NO: 2893264 - RNA, 19 nt, Artificial Sequence
  Description of Artificial Sequence: Synthetic oligonucleotide
cuguaacagggccccaauu

SEQ ID NO: 2893265 - RNA, 19 nt, Artificial Sequence
  Description of Artificial Sequence: Synthetic oligonucleotide
gggguggcagugguggcga

SEQ ID NO: 2893266 - RNA, 19 nt, Artificial Sequence
  Description of Artificial Sequence: Synthetic oligonucleotide
ccugaagaaaugcccacuu

SEQ ID NO: 2893267 - RNA, 19 nt, Artificial Sequence
  Description of Artificial Sequence: Synthetic oligonucleotide
gucaggcucuucaauccuu

SEQ ID NO: 2893268 - RNA, 19 nt, Artificial Sequence
  Description of Artificial Sequence: Synthetic oligonucleotide
ccacuuuucuuccacuguu

SEQ ID NO: 2893269 - RNA, 19 nt, Artificial Sequence
  Description of Artificial Sequence: Synthetic oligonucleotide
gcuguaacagggccccaau

SEQ ID NO: 2893270 - RNA, 19 nt, Artificial Sequence
  Description of Artificial Sequence: Synthetic oligonucleotide
cccauuuaguaaaucccuu

SEQ ID NO: 2893271 - RNA, 19 nt, Artificial Sequence
  Description of Artificial Sequence: Synthetic oligonucleotide
cggaguguaguaacuucaa

SEQ ID NO: 2893272 - RNA, 19 nt, Artificial Sequence
  Description of Artificial Sequence: Synthetic oligonucleotide
gcuccuccugcuauucuua

SEQ ID NO: 2893273 - RNA, 19 nt, Artificial Sequence
  Description of Artificial Sequence: Synthetic oligonucleotide
  modified_base (15)..(15): a, c, u, g, unknown or other
gucccaugcuucucnccuu

SEQ ID NO: 2893274 - RNA, 19 nt, Artificial Sequence
  Description of Artificial Sequence: Synthetic oligonucleotide
ccuggcagugaucguccca

SEQ ID NO: 2893275 - RNA, 19 nt, Artificial Sequence
  Description of Artificial Sequence: Synthetic oligonucleotide
cuugaggcuucaccccauu

SEQ ID NO: 2893276 - RNA, 19 nt, Artificial Sequence
  Description of Artificial Sequence: Synthetic oligonucleotide
guggcgaaauccacaucuu

SEQ ID NO: 2893277 - RNA, 19 nt, Artificial Sequence
  Description of Artificial Sequence: Synthetic oligonucleotide
gaacgccagcugacuggaa

SEQ ID NO: 2893278 - RNA, 19 nt, Artificial Sequence
  Description of Artificial Sequence: Synthetic oligonucleotide
  modified_base (12)..(12): a, c, u, g, unknown or other
ccaugcuucucnccuuugu

SEQ ID NO: 2893279 - RNA, 19 nt, Artificial Sequence
  Description of Artificial Sequence: Synthetic oligonucleotide
ccuuacugcuccuccugcu

SEQ ID NO: 2893280 - RNA, 19 nt, Artificial Sequence
  Description of Artificial Sequence: Synthetic oligonucleotide
gccagcugacuggaacauc

SEQ ID NO: 2893281 - RNA, 19 nt, Artificial Sequence
  Description of Artificial Sequence: Synthetic oligonucleotide
gguggcagugguggcgaaa

SEQ ID NO: 2893282 - RNA, 19 nt, Artificial Sequence
  Description of Artificial Sequence: Synthetic oligonucleotide
cgguggcacagaccacugc

SEQ ID NO: 2893283 - RNA, 19 nt, Artificial Sequence
  Description of Artificial Sequence: Synthetic oligonucleotide
ccacaucuugaggcuucac

SEQ ID NO: 2893284 - RNA, 19 nt, Artificial Sequence
  Description of Artificial Sequence: Synthetic oligonucleotide
cgaacgccagcugacugga

SEQ ID NO: 2893285 - RNA, 19 nt, Artificial Sequence
  Description of Artificial Sequence: Synthetic oligonucleotide
  modified_base (8)..(8): a, c, u, g, unknown or other
gcuucucnccuuuguuguu

SEQ ID NO: 2893286 - RNA, 19 nt, Artificial Sequence
  Description of Artificial Sequence: Synthetic oligonucleotide
cccugaagaaaugcccacu

SEQ ID NO: 2893287 - RNA, 19 nt, Artificial Sequence
  Description of Artificial Sequence: Synthetic oligonucleotide
uuauuccugaucaaaaugc

SEQ ID NO: 2893288 - RNA, 19 nt, Artificial Sequence
  Description of Artificial Sequence: Synthetic oligonucleotide
agaacaguagcacaagacg

SEQ ID NO: 2893289 - RNA, 19 nt, Artificial Sequence
  Description of Artificial Sequence: Synthetic oligonucleotide
aaacccagcagccuccugc

SEQ ID NO: 2893290 - RNA, 19 nt, Artificial Sequence
  Description of Artificial Sequence: Synthetic oligonucleotide
uauuccugaucaaaaugcg

SEQ ID NO: 2893291 - RNA, 19 nt, Artificial Sequence
  Description of Artificial Sequence: Synthetic oligonucleotide
uuccugaucaaaaugcggc

SEQ ID NO: 2893292 - RNA, 19 nt, Artificial Sequence
  Description of Artificial Sequence: Synthetic oligonucleotide
agcgccaaagaacaguagc

SEQ ID NO: 2893293 - RNA, 19 nt, Artificial Sequence
  Description of Artificial Sequence: Synthetic oligonucleotide
ucacuguuauuccugauca

SEQ ID NO: 2893294 - RNA, 19 nt, Artificial Sequence
  Description of Artificial Sequence: Synthetic oligonucleotide
agucuuugaggacuggggc

SEQ ID NO: 2893295 - RNA, 19 nt, Artificial Sequence
  Description of Artificial Sequence: Synthetic oligonucleotide
aagaacaguagcacaagac

SEQ ID NO: 2893296 - RNA, 19 nt, Artificial Sequence
  Description of Artificial Sequence: Synthetic oligonucleotide
ugccuuuaaacccagcagc

SEQ ID NO: 2893297 - RNA, 19 nt, Artificial Sequence
  Description of Artificial Sequence: Synthetic oligonucleotide
uccugggacacauagacca

SEQ ID NO: 2893298 - RNA, 19 nt, Artificial Sequence
  Description of Artificial Sequence: Synthetic oligonucleotide
acgaagaagucuuugagga

SEQ ID NO: 2893299 - RNA, 19 nt, Artificial Sequence
  Description of Artificial Sequence: Synthetic oligonucleotide
cacaagacgaucuccagcc

SEQ ID NO: 2893300 - RNA, 19 nt, Artificial Sequence
  Description of Artificial Sequence: Synthetic oligonucleotide
aagcacguagaacucauca

SEQ ID NO: 2893301 - RNA, 19 nt, Artificial Sequence
  Description of Artificial Sequence: Synthetic oligonucleotide
guuauuccugaucaaaaug

SEQ ID NO: 2893302 - RNA, 19 nt, Artificial Sequence
  Description of Artificial Sequence: Synthetic oligonucleotide
aaagaacaguagcacaaga

SEQ ID NO: 2893303 - RNA, 19 nt, Artificial Sequence
  Description of Artificial Sequence: Synthetic oligonucleotide
ucaucagugagucgcacga

SEQ ID NO: 2893304 - RNA, 19 nt, Artificial Sequence
  Description of Artificial Sequence: Synthetic oligonucleotide
aagcaggagggucccaggc

SEQ ID NO: 2893305 - RNA, 19 nt, Artificial Sequence
  Description of Artificial Sequence: Synthetic oligonucleotide
ugccaguuggcgaagcagg

SEQ ID NO: 2893306 - RNA, 19 nt, Artificial Sequence
  Description of Artificial Sequence: Synthetic oligonucleotide
cacgaagaagucuuugagg

SEQ ID NO: 2893307 - RNA, 19 nt, Artificial Sequence
  Description of Artificial Sequence: Synthetic oligonucleotide
ucauggaacggcaggaaga

SEQ ID NO: 2893308 - RNA, 19 nt, Artificial Sequence
  Description of Artificial Sequence: Synthetic oligonucleotide
aacccagcagccuccugcc

SEQ ID NO: 2893309 - RNA, 19 nt, Artificial Sequence
  Description of Artificial Sequence: Synthetic oligonucleotide
aagucuuugaggacugggg

SEQ ID NO: 2893310 - RNA, 19 nt, Artificial Sequence
  Description of Artificial Sequence: Synthetic oligonucleotide
ugaggaacagguccuguug

SEQ ID NO: 2893311 - RNA, 19 nt, Artificial Sequence
  Description of Artificial Sequence: Synthetic oligonucleotide
auccuggucacuguuauuc

SEQ ID NO: 2893312 - RNA, 19 nt, Artificial Sequence
  Description of Artificial Sequence: Synthetic oligonucleotide
cucaggucaucauggaacg

SEQ ID NO: 2893313 - RNA, 19 nt, Artificial Sequence
  Description of Artificial Sequence: Synthetic oligonucleotide
uugagcaccacgacagcag

SEQ ID NO: 2893314 - RNA, 19 nt, Artificial Sequence
  Description of Artificial Sequence: Synthetic oligonucleotide
aagacgaucuccagccggc

SEQ ID NO: 2893315 - RNA, 19 nt, Artificial Sequence
  Description of Artificial Sequence: Synthetic oligonucleotide
ugaggacuggggcaaaggc

SEQ ID NO: 2893316 - RNA, 19 nt, Artificial Sequence
  Description of Artificial Sequence: Synthetic oligonucleotide
uguuauuccugaucaaaau

SEQ ID NO: 2893317 - RNA, 19 nt, Artificial Sequence
  Description of Artificial Sequence: Synthetic oligonucleotide
ggacacauagaccagggcc

SEQ ID NO: 2893318 - RNA, 19 nt, Artificial Sequence
  Description of Artificial Sequence: Synthetic oligonucleotide
gaacuggcgaccgaggucc

SEQ ID NO: 2893319 - RNA, 19 nt, Artificial Sequence
  Description of Artificial Sequence: Synthetic oligonucleotide
gucaucauggaacggcagg

SEQ ID NO: 2893320 - RNA, 19 nt, Artificial Sequence
  Description of Artificial Sequence: Synthetic oligonucleotide
aaaggccuggcacugggga

SEQ ID NO: 2893321 - RNA, 19 nt, Artificial Sequence
  Description of Artificial Sequence: Synthetic oligonucleotide
ugggacacauagaccaggg

SEQ ID NO: 2893322 - RNA, 19 nt, Artificial Sequence
  Description of Artificial Sequence: Synthetic oligonucleotide
ugagcaccacgacagcagg

SEQ ID NO: 2893323 - RNA, 19 nt, Artificial Sequence
  Description of Artificial Sequence: Synthetic oligonucleotide
gaacagguccuguugcucc

SEQ ID NO: 2893324 - RNA, 19 nt, Artificial Sequence
  Description of Artificial Sequence: Synthetic oligonucleotide
acgaucuccagccggcggc

SEQ ID NO: 2893325 - RNA, 19 nt, Artificial Sequence
  Description of Artificial Sequence: Synthetic oligonucleotide
cacgacagcaggcaggcgg

SEQ ID NO: 2893326 - RNA, 19 nt, Artificial Sequence
  Description of Artificial Sequence: Synthetic oligonucleotide
gaagucuuugaggacuggg

SEQ ID NO: 2893327 - RNA, 19 nt, Artificial Sequence
  Description of Artificial Sequence: Synthetic oligonucleotide
cuuuaaacccagcagccuc

SEQ ID NO: 2893328 - RNA, 19 nt, Artificial Sequence
  Description of Artificial Sequence: Synthetic oligonucleotide
cucggucuccacuucaucc

SEQ ID NO: 2893329 - RNA, 19 nt, Artificial Sequence
  Description of Artificial Sequence: Synthetic oligonucleotide
ucguccguggcaucgcucg

SEQ ID NO: 2893330 - RNA, 19 nt, Artificial Sequence
  Description of Artificial Sequence: Synthetic oligonucleotide
agcacguagaacucaucag

SEQ ID NO: 2893331 - RNA, 19 nt, Artificial Sequence
  Description of Artificial Sequence: Synthetic oligonucleotide
uagcacaagacgaucucca

SEQ ID NO: 2893332 - RNA, 19 nt, Artificial Sequence
  Description of Artificial Sequence: Synthetic oligonucleotide
aucagugagucgcacgaag

SEQ ID NO: 2893333 - RNA, 19 nt, Artificial Sequence
  Description of Artificial Sequence: Synthetic oligonucleotide
gaagagccacuucucaggc

SEQ ID NO: 2893334 - RNA, 19 nt, Artificial Sequence
  Description of Artificial Sequence: Synthetic oligonucleotide
uccugaucaaaaugcggcc

SEQ ID NO: 2893335 - RNA, 19 nt, Artificial Sequence
  Description of Artificial Sequence: Synthetic oligonucleotide
gaacaguagcacaagacga

SEQ ID NO: 2893336 - RNA, 19 nt, Artificial Sequence
  Description of Artificial Sequence: Synthetic oligonucleotide
ucagugagucgcacgaaga

SEQ ID NO: 2893337 - RNA, 19 nt, Artificial Sequence
  Description of Artificial Sequence: Synthetic oligonucleotide
caguuggcgaagcaggagg

SEQ ID NO: 2893338 - RNA, 19 nt, Artificial Sequence
  Description of Artificial Sequence: Synthetic oligonucleotide
gucccugaggaacaggucc

SEQ ID NO: 2893339 - RNA, 19 nt, Artificial Sequence
  Description of Artificial Sequence: Synthetic oligonucleotide
ggaagagccacuucucagg

SEQ ID NO: 2893340 - RNA, 19 nt, Artificial Sequence
  Description of Artificial Sequence: Synthetic oligonucleotide
aucauggaacggcaggaag

SEQ ID NO: 2893341 - RNA, 19 nt, Artificial Sequence
  Description of Artificial Sequence: Synthetic oligonucleotide
uagaacucaucagugaguc

SEQ ID NO: 2893342 - RNA, 19 nt, Artificial Sequence
  Description of Artificial Sequence: Synthetic oligonucleotide
aggaagagccacuucucag

SEQ ID NO: 2893343 - RNA, 19 nt, Artificial Sequence
  Description of Artificial Sequence: Synthetic oligonucleotide
agaacuggcgaccgagguc

SEQ ID NO: 2893344 - RNA, 19 nt, Artificial Sequence
  Description of Artificial Sequence: Synthetic oligonucleotide
caagacgaucuccagccgg

SEQ ID NO: 2893345 - RNA, 19 nt, Artificial Sequence
  Description of Artificial Sequence: Synthetic oligonucleotide
cacguagaacucaucagug

SEQ ID NO: 2893346 - RNA, 19 nt, Artificial Sequence
  Description of Artificial Sequence: Synthetic oligonucleotide
agagccacuucucaggcau

SEQ ID NO: 2893347 - RNA, 19 nt, Artificial Sequence
  Description of Artificial Sequence: Synthetic oligonucleotide
auuccugaucaaaaugcgg

SEQ ID NO: 2893348 - RNA, 19 nt, Artificial Sequence
  Description of Artificial Sequence: Synthetic oligonucleotide
accacgacagcaggcaggc

SEQ ID NO: 2893349 - RNA, 19 nt, Artificial Sequence
  Description of Artificial Sequence: Synthetic oligonucleotide
cuccacuucauccugguca

SEQ ID NO: 2893350 - RNA, 19 nt, Artificial Sequence
  Description of Artificial Sequence: Synthetic oligonucleotide
ucaucauggaacggcagga

SEQ ID NO: 2893351 - RNA, 19 nt, Artificial Sequence
  Description of Artificial Sequence: Synthetic oligonucleotide
auagaccagggccagcugu

SEQ ID NO: 2893352 - RNA, 19 nt, Artificial Sequence
  Description of Artificial Sequence: Synthetic oligonucleotide
gacacauagaccagggcca

SEQ ID NO: 2893353 - RNA, 19 nt, Artificial Sequence
  Description of Artificial Sequence: Synthetic oligonucleotide
ucauccuggucacuguuau

SEQ ID NO: 2893354 - RNA, 19 nt, Artificial Sequence
  Description of Artificial Sequence: Synthetic oligonucleotide
agaacucaucagugagucg

SEQ ID NO: 2893355 - RNA, 19 nt, Artificial Sequence
  Description of Artificial Sequence: Synthetic oligonucleotide
gaagaagucuuugaggacu

SEQ ID NO: 2893356 - RNA, 19 nt, Artificial Sequence
  Description of Artificial Sequence: Synthetic oligonucleotide
gucacuguuauuccugauc

SEQ ID NO: 2893357 - RNA, 19 nt, Artificial Sequence
  Description of Artificial Sequence: Synthetic oligonucleotide
uggcacuggggacaggccc

SEQ ID NO: 2893358 - RNA, 19 nt, Artificial Sequence
  Description of Artificial Sequence: Synthetic oligonucleotide
caggucaucauggaacggc

SEQ ID NO: 2893359 - RNA, 19 nt, Artificial Sequence
  Description of Artificial Sequence: Synthetic oligonucleotide
gaucucguccguggcaucg

SEQ ID NO: 2893360 - RNA, 19 nt, Artificial Sequence
  Description of Artificial Sequence: Synthetic oligonucleotide
acaguagcacaagacgauc

SEQ ID NO: 2893361 - RNA, 19 nt, Artificial Sequence
  Description of Artificial Sequence: Synthetic oligonucleotide
aacaguagcacaagacgau

SEQ ID NO: 2893362 - RNA, 19 nt, Artificial Sequence
  Description of Artificial Sequence: Synthetic oligonucleotide
agugagucgcacgaagaag

SEQ ID NO: 2893363 - RNA, 19 nt, Artificial Sequence
  Description of Artificial Sequence: Synthetic oligonucleotide
agcaggagggucccaggcg

SEQ ID NO: 2893364 - RNA, 19 nt, Artificial Sequence
  Description of Artificial Sequence: Synthetic oligonucleotide
acuguuauuccugaucaaa

SEQ ID NO: 2893365 - RNA, 19 nt, Artificial Sequence
  Description of Artificial Sequence: Synthetic oligonucleotide
aucgcucgucagcacgucc

SEQ ID NO: 2893366 - RNA, 19 nt, Artificial Sequence
  Description of Artificial Sequence: Synthetic oligonucleotide
aagaagucuuugaggacug

SEQ ID NO: 2893367 - RNA, 19 nt, Artificial Sequence
  Description of Artificial Sequence: Synthetic oligonucleotide
cauggaacggcaggaagag

SEQ ID NO: 2893368 - RNA, 19 nt, Artificial Sequence
  Description of Artificial Sequence: Synthetic oligonucleotide
ugcugcccgaagcacguag

SEQ ID NO: 2893369 - RNA, 19 nt, Artificial Sequence
  Description of Artificial Sequence: Synthetic oligonucleotide
cuggucacuguuauuccug

SEQ ID NO: 2893370 - RNA, 19 nt, Artificial Sequence
  Description of Artificial Sequence: Synthetic oligonucleotide
uggcgaagcaggagggucc

SEQ ID NO: 2893371 - RNA, 19 nt, Artificial Sequence
  Description of Artificial Sequence: Synthetic oligonucleotide
ucgcucgucagcacguccc

SEQ ID NO: 2893372 - RNA, 19 nt, Artificial Sequence
  Description of Artificial Sequence: Synthetic oligonucleotide
caaagaacaguagcacaag

SEQ ID NO: 2893373 - RNA, 19 nt, Artificial Sequence
  Description of Artificial Sequence: Synthetic oligonucleotide
agcacaagacgaucuccag

SEQ ID NO: 2893374 - RNA, 19 nt, Artificial Sequence
  Description of Artificial Sequence: Synthetic oligonucleotide
gaggacuggggcaaaggcc

SEQ ID NO: 2893375 - RNA, 19 nt, Artificial Sequence
  Description of Artificial Sequence: Synthetic oligonucleotide
ucggucuccacuucauccu

SEQ ID NO: 2893376 - RNA, 19 nt, Artificial Sequence
  Description of Artificial Sequence: Synthetic oligonucleotide
acguagaacucaucaguga

SEQ ID NO: 2893377 - RNA, 19 nt, Artificial Sequence
  Description of Artificial Sequence: Synthetic oligonucleotide
acaagacgaucuccagccg

SEQ ID NO: 2893378 - RNA, 19 nt, Artificial Sequence
  Description of Artificial Sequence: Synthetic oligonucleotide
aacagguccuguugcuccu

SEQ ID NO: 2893379 - RNA, 19 nt, Artificial Sequence
  Description of Artificial Sequence: Synthetic oligonucleotide
cugugcugcccgaagcacg

SEQ ID NO: 2893380 - RNA, 19 nt, Artificial Sequence
  Description of Artificial Sequence: Synthetic oligonucleotide
uucucaggcaugucccuga

SEQ ID NO: 2893381 - RNA, 19 nt, Artificial Sequence
  Description of Artificial Sequence: Synthetic oligonucleotide
gucagcacguccccgcccg

SEQ ID NO: 2893382 - RNA, 19 nt, Artificial Sequence
  Description of Artificial Sequence: Synthetic oligonucleotide
uccuggucacuguuauucc

SEQ ID NO: 2893383 - RNA, 19 nt, Artificial Sequence
  Description of Artificial Sequence: Synthetic oligonucleotide
gacgaucuccagccggcgg

SEQ ID NO: 2893384 - RNA, 19 nt, Artificial Sequence
  Description of Artificial Sequence: Synthetic oligonucleotide
aggcgcuggaucucguccg

SEQ ID NO: 2893385 - RNA, 19 nt, Artificial Sequence
  Description of Artificial Sequence: Synthetic oligonucleotide
uggucacuguuauuccuga

SEQ ID NO: 2893386 - RNA, 19 nt, Artificial Sequence
  Description of Artificial Sequence: Synthetic oligonucleotide
aggacuggggcaaaggccu

SEQ ID NO: 2893387 - RNA, 19 nt, Artificial Sequence
  Description of Artificial Sequence: Synthetic oligonucleotide
gcacgaagaagucuuugag

SEQ ID NO: 2893388 - RNA, 19 nt, Artificial Sequence
  Description of Artificial Sequence: Synthetic oligonucleotide
cuguuauuccugaucaaaa

SEQ ID NO: 2893389 - RNA, 19 nt, Artificial Sequence
  Description of Artificial Sequence: Synthetic oligonucleotide
ggcuugagcaccacgacag

SEQ ID NO: 2893390 - RNA, 19 nt, Artificial Sequence
  Description of Artificial Sequence: Synthetic oligonucleotide
ucccugaggaacagguccu

SEQ ID NO: 2893391 - RNA, 19 nt, Artificial Sequence
  Description of Artificial Sequence: Synthetic oligonucleotide
aguuggcgaagcaggaggg

SEQ ID NO: 2893392 - RNA, 19 nt, Artificial Sequence
  Description of Artificial Sequence: Synthetic oligonucleotide
caccacgacagcaggcagg

SEQ ID NO: 2893393 - RNA, 19 nt, Artificial Sequence
  Description of Artificial Sequence: Synthetic oligonucleotide
uuugaggacuggggcaaag

SEQ ID NO: 2893394 - RNA, 19 nt, Artificial Sequence
  Description of Artificial Sequence: Synthetic oligonucleotide
ucucaggcaugucccugag

SEQ ID NO: 2893395 - RNA, 19 nt, Artificial Sequence
  Description of Artificial Sequence: Synthetic oligonucleotide
ugagucgcacgaagaaguc

SEQ ID NO: 2893396 - RNA, 19 nt, Artificial Sequence
  Description of Artificial Sequence: Synthetic oligonucleotide
ccuccucaggucaucaugg

SEQ ID NO: 2893397 - RNA, 19 nt, Artificial Sequence
  Description of Artificial Sequence: Synthetic oligonucleotide
cucgucagcacguccccgc

SEQ ID NO: 2893398 - RNA, 19 nt, Artificial Sequence
  Description of Artificial Sequence: Synthetic oligonucleotide
uucauccuggucacuguua

SEQ ID NO: 2893399 - RNA, 19 nt, Artificial Sequence
  Description of Artificial Sequence: Synthetic oligonucleotide
ggcaucgcucgucagcacg

SEQ ID NO: 2893400 - RNA, 19 nt, Artificial Sequence
  Description of Artificial Sequence: Synthetic oligonucleotide
uguugcuccuccgugggau

SEQ ID NO: 2893401 - RNA, 19 nt, Artificial Sequence
  Description of Artificial Sequence: Synthetic oligonucleotide
auccugggacacauagacc

SEQ ID NO: 2893402 - RNA, 19 nt, Artificial Sequence
  Description of Artificial Sequence: Synthetic oligonucleotide
caggcgcuggaucucgucc

SEQ ID NO: 2893403 - RNA, 19 nt, Artificial Sequence
  Description of Artificial Sequence: Synthetic oligonucleotide
agcugugcugcccgaagca

SEQ ID NO: 2893404 - RNA, 19 nt, Artificial Sequence
  Description of Artificial Sequence: Synthetic oligonucleotide
uccccgcccggcuugagca

SEQ ID NO: 2893405 - RNA, 19 nt, Artificial Sequence
  Description of Artificial Sequence: Synthetic oligonucleotide
ugaucaaaaugcggccaga

SEQ ID NO: 2893406 - RNA, 19 nt, Artificial Sequence
  Description of Artificial Sequence: Synthetic oligonucleotide
agcaccacgacagcaggca

SEQ ID NO: 2893407 - RNA, 19 nt, Artificial Sequence
  Description of Artificial Sequence: Synthetic oligonucleotide
acucaucagugagucgcac

SEQ ID NO: 2893408 - RNA, 19 nt, Artificial Sequence
  Description of Artificial Sequence: Synthetic oligonucleotide
acuucucaggcaugucccu

SEQ ID NO: 2893409 - RNA, 19 nt, Artificial Sequence
  Description of Artificial Sequence: Synthetic oligonucleotide
uuggcgaagcaggaggguc

SEQ ID NO: 2893410 - RNA, 19 nt, Artificial Sequence
  Description of Artificial Sequence: Synthetic oligonucleotide
auggaacggcaggaagagc

SEQ ID NO: 2893411 - RNA, 19 nt, Artificial Sequence
  Description of Artificial Sequence: Synthetic oligonucleotide
gaggucccuccucagguca

SEQ ID NO: 2893412 - RNA, 19 nt, Artificial Sequence
  Description of Artificial Sequence: Synthetic oligonucleotide
gcaaaggccuggcacuggg

SEQ ID NO: 2893413 - RNA, 19 nt, Artificial Sequence
  Description of Artificial Sequence: Synthetic oligonucleotide
gcacaagacgaucuccagc

SEQ ID NO: 2893414 - RNA, 19 nt, Artificial Sequence
  Description of Artificial Sequence: Synthetic oligonucleotide
uggaucucguccguggcau

SEQ ID NO: 2893415 - RNA, 19 nt, Artificial Sequence
  Description of Artificial Sequence: Synthetic oligonucleotide
acacauagaccagggccag

SEQ ID NO: 2893416 - RNA, 19 nt, Artificial Sequence
  Description of Artificial Sequence: Synthetic oligonucleotide
agaagucuuugaggacugg

SEQ ID NO: 2893417 - RNA, 19 nt, Artificial Sequence
  Description of Artificial Sequence: Synthetic oligonucleotide
agaccagggccagcugugc

SEQ ID NO: 2893418 - RNA, 19 nt, Artificial Sequence
  Description of Artificial Sequence: Synthetic oligonucleotide
ucgucagcacguccccgcc

SEQ ID NO: 2893419 - RNA, 19 nt, Artificial Sequence
  Description of Artificial Sequence: Synthetic oligonucleotide
aggcaggcggcgcacggag

SEQ ID NO: 2893420 - RNA, 19 nt, Artificial Sequence
  Description of Artificial Sequence: Synthetic oligonucleotide
agucgcacgaagaagucuu

SEQ ID NO: 2893421 - RNA, 19 nt, Artificial Sequence
  Description of Artificial Sequence: Synthetic oligonucleotide
uccgugggauccugggaca

SEQ ID NO: 2893422 - RNA, 19 nt, Artificial Sequence
  Description of Artificial Sequence: Synthetic oligonucleotide
ucgcacgaagaagucuuug

SEQ ID NO: 2893423 - RNA, 19 nt, Artificial Sequence
  Description of Artificial Sequence: Synthetic oligonucleotide
gccaaagaacaguagcaca

SEQ ID NO: 2893424 - RNA, 19 nt, Artificial Sequence
  Description of Artificial Sequence: Synthetic oligonucleotide
gacuggggcaaaggccugg

SEQ ID NO: 2893425 - RNA, 19 nt, Artificial Sequence
  Description of Artificial Sequence: Synthetic oligonucleotide
uuaaacccagcagccuccu

SEQ ID NO: 2893426 - RNA, 19 nt, Artificial Sequence
  Description of Artificial Sequence: Synthetic oligonucleotide
aucucguccguggcaucgc

SEQ ID NO: 2893427 - RNA, 19 nt, Artificial Sequence
  Description of Artificial Sequence: Synthetic oligonucleotide
uaaacccagcagccuccug

SEQ ID NO: 2893428 - RNA, 19 nt, Artificial Sequence
  Description of Artificial Sequence: Synthetic oligonucleotide
cugccaguuggcgaagcag

SEQ ID NO: 2893429 - RNA, 19 nt, Artificial Sequence
  Description of Artificial Sequence: Synthetic oligonucleotide
cacggagaacuggcgaccg

SEQ ID NO: 2893430 - RNA, 19 nt, Artificial Sequence
  Description of Artificial Sequence: Synthetic oligonucleotide
ggggacaggccccagcgcc

SEQ ID NO: 2893431 - RNA, 19 nt, Artificial Sequence
  Description of Artificial Sequence: Synthetic oligonucleotide
cagcugugcugcccgaagc

SEQ ID NO: 2893432 - RNA, 19 nt, Artificial Sequence
  Description of Artificial Sequence: Synthetic oligonucleotide
gccuuuaaacccagcagcc

SEQ ID NO: 2893433 - RNA, 19 nt, Artificial Sequence
  Description of Artificial Sequence: Synthetic oligonucleotide
gugagucgcacgaagaagu

SEQ ID NO: 2893434 - RNA, 19 nt, Artificial Sequence
  Description of Artificial Sequence: Synthetic oligonucleotide
agggccagcugugcugccc

SEQ ID NO: 2893435 - RNA, 19 nt, Artificial Sequence
  Description of Artificial Sequence: Synthetic oligonucleotide
gcaggagggucccaggcgc

SEQ ID NO: 2893436 - RNA, 19 nt, Artificial Sequence
  Description of Artificial Sequence: Synthetic oligonucleotide
cuugagcaccacgacagca

SEQ ID NO: 2893437 - RNA, 19 nt, Artificial Sequence
  Description of Artificial Sequence: Synthetic oligonucleotide
gagaacuggcgaccgaggu

SEQ ID NO: 2893438 - RNA, 19 nt, Artificial Sequence
  Description of Artificial Sequence: Synthetic oligonucleotide
ucccaggcgcuggaucucg

SEQ ID NO: 2893439 - RNA, 19 nt, Artificial Sequence
  Description of Artificial Sequence: Synthetic oligonucleotide
caggaagagccacuucuca

SEQ ID NO: 2893440 - RNA, 19 nt, Artificial Sequence
  Description of Artificial Sequence: Synthetic oligonucleotide
aacggcaggaagagccacu

SEQ ID NO: 2893441 - RNA, 19 nt, Artificial Sequence
  Description of Artificial Sequence: Synthetic oligonucleotide
ucggccucggucuccacuu

SEQ ID NO: 2893442 - RNA, 19 nt, Artificial Sequence
  Description of Artificial Sequence: Synthetic oligonucleotide
ucucguccguggcaucgcu

SEQ ID NO: 2893443 - RNA, 19 nt, Artificial Sequence
  Description of Artificial Sequence: Synthetic oligonucleotide
ggcaggaagagccacuucu

SEQ ID NO: 2893444 - RNA, 19 nt, Artificial Sequence
  Description of Artificial Sequence: Synthetic oligonucleotide
ucuccacuucauccugguc

SEQ ID NO: 2893445 - RNA, 19 nt, Artificial Sequence
  Description of Artificial Sequence: Synthetic oligonucleotide
aggucaucauggaacggca

SEQ ID NO: 2893446 - RNA, 19 nt, Artificial Sequence
  Description of Artificial Sequence: Synthetic oligonucleotide
caugucccugaggaacagg

SEQ ID NO: 2893447 - RNA, 19 nt, Artificial Sequence
  Description of Artificial Sequence: Synthetic oligonucleotide
cuucucaggcaugucccug

SEQ ID NO: 2893448 - RNA, 19 nt, Artificial Sequence
  Description of Artificial Sequence: Synthetic oligonucleotide
guggcaucgcucgucagca

SEQ ID NO: 2893449 - RNA, 19 nt, Artificial Sequence
  Description of Artificial Sequence: Synthetic oligonucleotide
uggggacaggccccagcgc

SEQ ID NO: 2893450 - RNA, 19 nt, Artificial Sequence
  Description of Artificial Sequence: Synthetic oligonucleotide
gcccgaagcacguagaacu

SEQ ID NO: 2893451 - RNA, 19 nt, Artificial Sequence
  Description of Artificial Sequence: Synthetic oligonucleotide
ucagcacguccccgcccgg

SEQ ID NO: 2893452 - RNA, 19 nt, Artificial Sequence
  Description of Artificial Sequence: Synthetic oligonucleotide
acaggccccagcgccaaag

SEQ ID NO: 2893453 - RNA, 19 nt, Artificial Sequence
  Description of Artificial Sequence: Synthetic oligonucleotide
ugcccgaagcacguagaac

SEQ ID NO: 2893454 - RNA, 19 nt, Artificial Sequence
  Description of Artificial Sequence: Synthetic oligonucleotide
gaacggcaggaagagccac

SEQ ID NO: 2893455 - RNA, 19 nt, Artificial Sequence
  Description of Artificial Sequence: Synthetic oligonucleotide
cagcgccaaagaacaguag

SEQ ID NO: 2893456 - RNA, 19 nt, Artificial Sequence
  Description of Artificial Sequence: Synthetic oligonucleotide
cauagaccagggccagcug

SEQ ID NO: 2893457 - RNA, 19 nt, Artificial Sequence
  Description of Artificial Sequence: Synthetic oligonucleotide
gcacguagaacucaucagu

SEQ ID NO: 2893458 - RNA, 19 nt, Artificial Sequence
  Description of Artificial Sequence: Synthetic oligonucleotide
aacuggcgaccgagguccc

SEQ ID NO: 2893459 - RNA, 19 nt, Artificial Sequence
  Description of Artificial Sequence: Synthetic oligonucleotide
ccuguugcuccuccguggg

SEQ ID NO: 2893460 - RNA, 19 nt, Artificial Sequence
  Description of Artificial Sequence: Synthetic oligonucleotide
agccacuucucaggcaugu

SEQ ID NO: 2893461 - RNA, 19 nt, Artificial Sequence
  Description of Artificial Sequence: Synthetic oligonucleotide
cagugagucgcacgaagaa

SEQ ID NO: 2893462 - RNA, 19 nt, Artificial Sequence
  Description of Artificial Sequence: Synthetic oligonucleotide
gagcaccacgacagcaggc

SEQ ID NO: 2893463 - RNA, 19 nt, Artificial Sequence
  Description of Artificial Sequence: Synthetic oligonucleotide
aucuccagccggcggcuca

SEQ ID NO: 2893464 - RNA, 19 nt, Artificial Sequence
  Description of Artificial Sequence: Synthetic oligonucleotide
gaagcacguagaacucauc

SEQ ID NO: 2893465 - RNA, 19 nt, Artificial Sequence
  Description of Artificial Sequence: Synthetic oligonucleotide
uccagccggcggcucagcu

SEQ ID NO: 2893466 - RNA, 19 nt, Artificial Sequence
  Description of Artificial Sequence: Synthetic oligonucleotide
gaccgaggucccuccucag

SEQ ID NO: 2893467 - RNA, 19 nt, Artificial Sequence
  Description of Artificial Sequence: Synthetic oligonucleotide
ucuccagccggcggcucag

SEQ ID NO: 2893468 - RNA, 19 nt, Artificial Sequence
  Description of Artificial Sequence: Synthetic oligonucleotide
gggacacauagaccagggc

SEQ ID NO: 2893469 - RNA, 19 nt, Artificial Sequence
  Description of Artificial Sequence: Synthetic oligonucleotide
agccuccugccaguuggcg

SEQ ID NO: 2893470 - RNA, 19 nt, Artificial Sequence
  Description of Artificial Sequence: Synthetic oligonucleotide
agcacguccccgcccggcu

SEQ ID NO: 2893471 - RNA, 19 nt, Artificial Sequence
  Description of Artificial Sequence: Synthetic oligonucleotide
aggccuggcacuggggaca

SEQ ID NO: 2893472 - RNA, 19 nt, Artificial Sequence
  Description of Artificial Sequence: Synthetic oligonucleotide
gcuggaucucguccguggc

SEQ ID NO: 2893473 - RNA, 19 nt, Artificial Sequence
  Description of Artificial Sequence: Synthetic oligonucleotide
uggcgaccgaggucccucc

SEQ ID NO: 2893474 - RNA, 19 nt, Artificial Sequence
  Description of Artificial Sequence: Synthetic oligonucleotide
cuggaucucguccguggca

SEQ ID NO: 2893475 - RNA, 19 nt, Artificial Sequence
  Description of Artificial Sequence: Synthetic oligonucleotide
gggccagcugugcugcccg

SEQ ID NO: 2893476 - RNA, 19 nt, Artificial Sequence
  Description of Artificial Sequence: Synthetic oligonucleotide
ggucaucauggaacggcag

SEQ ID NO: 2893477 - RNA, 19 nt, Artificial Sequence
  Description of Artificial Sequence: Synthetic oligonucleotide
gcgccaaagaacaguagca

SEQ ID NO: 2893478 - RNA, 19 nt, Artificial Sequence
  Description of Artificial Sequence: Synthetic oligonucleotide
aggcggcgcacggagaacu

SEQ ID NO: 2893479 - RNA, 19 nt, Artificial Sequence
  Description of Artificial Sequence: Synthetic oligonucleotide
aggccccagcgccaaagaa

SEQ ID NO: 2893480 - RNA, 19 nt, Artificial Sequence
  Description of Artificial Sequence: Synthetic oligonucleotide
uccugccaguuggcgaagc

SEQ ID NO: 2893481 - RNA, 19 nt, Artificial Sequence
  Description of Artificial Sequence: Synthetic oligonucleotide
acggagaacuggcgaccga

SEQ ID NO: 2893482 - RNA, 19 nt, Artificial Sequence
  Description of Artificial Sequence: Synthetic oligonucleotide
cacauagaccagggccagc

SEQ ID NO: 2893483 - RNA, 19 nt, Artificial Sequence
  Description of Artificial Sequence: Synthetic oligonucleotide
cacuguuauuccugaucaa

SEQ ID NO: 2893484 - RNA, 19 nt, Artificial Sequence
  Description of Artificial Sequence: Synthetic oligonucleotide
cccuccucaggucaucaug

SEQ ID NO: 2893485 - RNA, 19 nt, Artificial Sequence
  Description of Artificial Sequence: Synthetic oligonucleotide
cccagcagccuccugccag

SEQ ID NO: 2893486 - RNA, 19 nt, Artificial Sequence
  Description of Artificial Sequence: Synthetic oligonucleotide
cucguccguggcaucgcuc

SEQ ID NO: 2893487 - RNA, 19 nt, Artificial Sequence
  Description of Artificial Sequence: Synthetic oligonucleotide
uggcgguggugcaugccuu

SEQ ID NO: 2893488 - RNA, 19 nt, Artificial Sequence
  Description of Artificial Sequence: Synthetic oligonucleotide
cuccucaggucaucaugga

SEQ ID NO: 2893489 - RNA, 19 nt, Artificial Sequence
  Description of Artificial Sequence: Synthetic oligonucleotide
guggcgguggugcaugccu

SEQ ID NO: 2893490 - RNA, 19 nt, Artificial Sequence
  Description of Artificial Sequence: Synthetic oligonucleotide
cagccuccugccaguuggc

SEQ ID NO: 2893491 - RNA, 19 nt, Artificial Sequence
  Description of Artificial Sequence: Synthetic oligonucleotide
ggaacagguccuguugcuc

SEQ ID NO: 2893492 - RNA, 19 nt, Artificial Sequence
  Description of Artificial Sequence: Synthetic oligonucleotide
cguggcaucgcucgucagc

SEQ ID NO: 2893493 - RNA, 19 nt, Artificial Sequence
  Description of Artificial Sequence: Synthetic oligonucleotide
gcuugagcaccacgacagc

SEQ ID NO: 2893494 - RNA, 19 nt, Artificial Sequence
  Description of Artificial Sequence: Synthetic oligonucleotide
gccccagcgccaaagaaca

SEQ ID NO: 2893495 - RNA, 19 nt, Artificial Sequence
  Description of Artificial Sequence: Synthetic oligonucleotide
cuggcgaccgaggucccuc

SEQ ID NO: 2893496 - RNA, 19 nt, Artificial Sequence
  Description of Artificial Sequence: Synthetic oligonucleotide
acggcaggaagagccacuu

SEQ ID NO: 2893497 - RNA, 19 nt, Artificial Sequence
  Description of Artificial Sequence: Synthetic oligonucleotide
gcaccacgacagcaggcag

SEQ ID NO: 2893498 - RNA, 19 nt, Artificial Sequence
  Description of Artificial Sequence: Synthetic oligonucleotide
ucccuccucaggucaucau

SEQ ID NO: 2893499 - RNA, 19 nt, Artificial Sequence
  Description of Artificial Sequence: Synthetic oligonucleotide
cacguccccgcccggcuug

SEQ ID NO: 2893500 - RNA, 19 nt, Artificial Sequence
  Description of Artificial Sequence: Synthetic oligonucleotide
caucauggaacggcaggaa

SEQ ID NO: 2893501 - RNA, 19 nt, Artificial Sequence
  Description of Artificial Sequence: Synthetic oligonucleotide
gcaggcaggcggcgcacgg

SEQ ID NO: 2893502 - RNA, 19 nt, Artificial Sequence
  Description of Artificial Sequence: Synthetic oligonucleotide
uggcaucgcucgucagcac

SEQ ID NO: 2893503 - RNA, 19 nt, Artificial Sequence
  Description of Artificial Sequence: Synthetic oligonucleotide
ggcgcacggagaacuggcg

SEQ ID NO: 2893504 - RNA, 19 nt, Artificial Sequence
  Description of Artificial Sequence: Synthetic oligonucleotide
guccccgcccggcuugagc

SEQ ID NO: 2893505 - RNA, 19 nt, Artificial Sequence
  Description of Artificial Sequence: Synthetic oligonucleotide
ugggauccugggacacaua

SEQ ID NO: 2893506 - RNA, 19 nt, Artificial Sequence
  Description of Artificial Sequence: Synthetic oligonucleotide
ggggcaaaggccuggcacu

SEQ ID NO: 2893507 - RNA, 19 nt, Artificial Sequence
  Description of Artificial Sequence: Synthetic oligonucleotide
ggucccaggcgcuggaucu

SEQ ID NO: 2893508 - RNA, 19 nt, Artificial Sequence
  Description of Artificial Sequence: Synthetic oligonucleotide
gcacggagaacuggcgacc

SEQ ID NO: 2893509 - RNA, 19 nt, Artificial Sequence
  Description of Artificial Sequence: Synthetic oligonucleotide
ccugaucaaaaugcggcca

SEQ ID NO: 2893510 - RNA, 19 nt, Artificial Sequence
  Description of Artificial Sequence: Synthetic oligonucleotide
aggagggucccaggcgcug

SEQ ID NO: 2893511 - RNA, 19 nt, Artificial Sequence
  Description of Artificial Sequence: Synthetic oligonucleotide
ggagggucccaggcgcugg

SEQ ID NO: 2893512 - RNA, 19 nt, Artificial Sequence
  Description of Artificial Sequence: Synthetic oligonucleotide
ggcaaaggccuggcacugg

SEQ ID NO: 2893513 - RNA, 19 nt, Artificial Sequence
  Description of Artificial Sequence: Synthetic oligonucleotide
cccggcuugagcaccacga

SEQ ID NO: 2893514 - RNA, 19 nt, Artificial Sequence
  Description of Artificial Sequence: Synthetic oligonucleotide
ccagcugugcugcccgaag

SEQ ID NO: 2893515 - RNA, 19 nt, Artificial Sequence
  Description of Artificial Sequence: Synthetic oligonucleotide
cgcacggagaacuggcgac

SEQ ID NO: 2893516 - RNA, 19 nt, Artificial Sequence
  Description of Artificial Sequence: Synthetic oligonucleotide
cccgaagcacguagaacuc

SEQ ID NO: 2893517 - RNA, 19 nt, Artificial Sequence
  Description of Artificial Sequence: Synthetic oligonucleotide
ugcuccuccgugggauccu

SEQ ID NO: 2893518 - RNA, 19 nt, Artificial Sequence
  Description of Artificial Sequence: Synthetic oligonucleotide
cgccaaagaacaguagcac

SEQ ID NO: 2893519 - RNA, 19 nt, Artificial Sequence
  Description of Artificial Sequence: Synthetic oligonucleotide
cugcccgaagcacguagaa

SEQ ID NO: 2893520 - RNA, 19 nt, Artificial Sequence
  Description of Artificial Sequence: Synthetic oligonucleotide
ggcgaagcaggaggguccc

SEQ ID NO: 2893521 - RNA, 19 nt, Artificial Sequence
  Description of Artificial Sequence: Synthetic oligonucleotide
ccaguuggcgaagcaggag

SEQ ID NO: 2893522 - RNA, 19 nt, Artificial Sequence
  Description of Artificial Sequence: Synthetic oligonucleotide
ggaacggcaggaagagcca

SEQ ID NO: 2893523 - RNA, 19 nt, Artificial Sequence
  Description of Artificial Sequence: Synthetic oligonucleotide
ccagcgccaaagaacagua

SEQ ID NO: 2893524 - RNA, 19 nt, Artificial Sequence
  Description of Artificial Sequence: Synthetic oligonucleotide
gggcaaaggccuggcacug

SEQ ID NO: 2893525 - RNA, 19 nt, Artificial Sequence
  Description of Artificial Sequence: Synthetic oligonucleotide
cugaggaacagguccuguu

SEQ ID NO: 2893526 - RNA, 19 nt, Artificial Sequence
  Description of Artificial Sequence: Synthetic oligonucleotide
gcucagcucggccucgguc

SEQ ID NO: 2893527 - RNA, 19 nt, Artificial Sequence
  Description of Artificial Sequence: Synthetic oligonucleotide
cgcacgaagaagucuuuga

SEQ ID NO: 2893528 - RNA, 19 nt, Artificial Sequence
  Description of Artificial Sequence: Synthetic oligonucleotide
gcugugcugcccgaagcac

SEQ ID NO: 2893529 - RNA, 19 nt, Artificial Sequence
  Description of Artificial Sequence: Synthetic oligonucleotide
gccuccugccaguuggcga

SEQ ID NO: 2893530 - RNA, 19 nt, Artificial Sequence
  Description of Artificial Sequence: Synthetic oligonucleotide
ccuccugccaguuggcgaa

SEQ ID NO: 2893531 - RNA, 19 nt, Artificial Sequence
  Description of Artificial Sequence: Synthetic oligonucleotide
caucgcucgucagcacguc

SEQ ID NO: 2893532 - RNA, 19 nt, Artificial Sequence
  Description of Artificial Sequence: Synthetic oligonucleotide
cagcacguccccgcccggc

SEQ ID NO: 2893533 - RNA, 19 nt, Artificial Sequence
  Description of Artificial Sequence: Synthetic oligonucleotide
guccguggcaucgcucguc

SEQ ID NO: 2893534 - RNA, 19 nt, Artificial Sequence
  Description of Artificial Sequence: Synthetic oligonucleotide
gucccuccucaggucauca

SEQ ID NO: 2893535 - RNA, 19 nt, Artificial Sequence
  Description of Artificial Sequence: Synthetic oligonucleotide
gcaggcggcgcacggagaa

SEQ ID NO: 2893536 - RNA, 19 nt, Artificial Sequence
  Description of Artificial Sequence: Synthetic oligonucleotide
gcgcacggagaacuggcga

SEQ ID NO: 2893537 - RNA, 19 nt, Artificial Sequence
  Description of Artificial Sequence: Synthetic oligonucleotide
gcucgucagcacguccccg

SEQ ID NO: 2893538 - RNA, 19 nt, Artificial Sequence
  Description of Artificial Sequence: Synthetic oligonucleotide
gguccuguugcuccuccgu

SEQ ID NO: 2893539 - RNA, 19 nt, Artificial Sequence
  Description of Artificial Sequence: Synthetic oligonucleotide
gcggcgcacggagaacugg

SEQ ID NO: 2893540 - RNA, 19 nt, Artificial Sequence
  Description of Artificial Sequence: Synthetic oligonucleotide
gggucccaggcgcuggauc

SEQ ID NO: 2893541 - RNA, 19 nt, Artificial Sequence
  Description of Artificial Sequence: Synthetic oligonucleotide
ccggcuugagcaccacgac

SEQ ID NO: 2893542 - RNA, 19 nt, Artificial Sequence
  Description of Artificial Sequence: Synthetic oligonucleotide
gugggauccugggacacau

SEQ ID NO: 2893543 - RNA, 19 nt, Artificial Sequence
  Description of Artificial Sequence: Synthetic oligonucleotide
cuguugcuccuccguggga

SEQ ID NO: 2893544 - RNA, 19 nt, Artificial Sequence
  Description of Artificial Sequence: Synthetic oligonucleotide
caucagugagucgcacgaa

SEQ ID NO: 2893545 - RNA, 19 nt, Artificial Sequence
  Description of Artificial Sequence: Synthetic oligonucleotide
cagggccagcugugcugcc

SEQ ID NO: 2893546 - RNA, 19 nt, Artificial Sequence
  Description of Artificial Sequence: Synthetic oligonucleotide
acuggcgaccgaggucccu

SEQ ID NO: 2893547 - RNA, 19 nt, Artificial Sequence
  Description of Artificial Sequence: Synthetic oligonucleotide
cuccugccaguuggcgaag

SEQ ID NO: 2893548 - RNA, 19 nt, Artificial Sequence
  Description of Artificial Sequence: Synthetic oligonucleotide
gaucuccagccggcggcuc

SEQ ID NO: 2893549 - RNA, 19 nt, Artificial Sequence
  Description of Artificial Sequence: Synthetic oligonucleotide
caggccccagcgccaaaga

SEQ ID NO: 2893550 - RNA, 19 nt, Artificial Sequence
  Description of Artificial Sequence: Synthetic oligonucleotide
cggcgcacggagaacuggc

SEQ ID NO: 2893551 - RNA, 19 nt, Artificial Sequence
  Description of Artificial Sequence: Synthetic oligonucleotide
guuggcgaagcaggagggu

SEQ ID NO: 2893552 - RNA, 19 nt, Artificial Sequence
  Description of Artificial Sequence: Synthetic oligonucleotide
ggccucggucuccacuuca

SEQ ID NO: 2893553 - RNA, 19 nt, Artificial Sequence
  Description of Artificial Sequence: Synthetic oligonucleotide
gccaguuggcgaagcagga

SEQ ID NO: 2893554 - RNA, 19 nt, Artificial Sequence
  Description of Artificial Sequence: Synthetic oligonucleotide
ggaucucguccguggcauc

SEQ ID NO: 2893555 - RNA, 19 nt, Artificial Sequence
  Description of Artificial Sequence: Synthetic oligonucleotide
cuuugaggacuggggcaaa

SEQ ID NO: 2893556 - RNA, 19 nt, Artificial Sequence
  Description of Artificial Sequence: Synthetic oligonucleotide
cucggccucggucuccacu

SEQ ID NO: 2893557 - RNA, 19 nt, Artificial Sequence
  Description of Artificial Sequence: Synthetic oligonucleotide
ccucggucuccacuucauc

SEQ ID NO: 2893558 - RNA, 19 nt, Artificial Sequence
  Description of Artificial Sequence: Synthetic oligonucleotide
cagcucggccucggucucc

SEQ ID NO: 2893559 - RNA, 19 nt, Artificial Sequence
  Description of Artificial Sequence: Synthetic oligonucleotide
gcgaccgaggucccuccuc

SEQ ID NO: 2893560 - RNA, 19 nt, Artificial Sequence
  Description of Artificial Sequence: Synthetic oligonucleotide
caggcggcgcacggagaac

SEQ ID NO: 2893561 - RNA, 19 nt, Artificial Sequence
  Description of Artificial Sequence: Synthetic oligonucleotide
gcugcccgaagcacguaga

SEQ ID NO: 2893562 - RNA, 19 nt, Artificial Sequence
  Description of Artificial Sequence: Synthetic oligonucleotide
ggacuggggcaaaggccug

SEQ ID NO: 2893563 - RNA, 19 nt, Artificial Sequence
  Description of Artificial Sequence: Synthetic oligonucleotide
gucccaggcgcuggaucuc

SEQ ID NO: 2893564 - RNA, 19 nt, Artificial Sequence
  Description of Artificial Sequence: Synthetic oligonucleotide
aggucccuccucaggucau

SEQ ID NO: 2893565 - RNA, 19 nt, Artificial Sequence
  Description of Artificial Sequence: Synthetic oligonucleotide
ggccuggcacuggggacag

SEQ ID NO: 2893566 - RNA, 19 nt, Artificial Sequence
  Description of Artificial Sequence: Synthetic oligonucleotide
ccgaagcacguagaacuca

SEQ ID NO: 2893567 - RNA, 19 nt, Artificial Sequence
  Description of Artificial Sequence: Synthetic oligonucleotide
ccugccaguuggcgaagca

SEQ ID NO: 2893568 - RNA, 19 nt, Artificial Sequence
  Description of Artificial Sequence: Synthetic oligonucleotide
cgcucgucagcacgucccc

SEQ ID NO: 2893569 - RNA, 19 nt, Artificial Sequence
  Description of Artificial Sequence: Synthetic oligonucleotide
ggucacuguuauuccugau

SEQ ID NO: 2893570 - RNA, 19 nt, Artificial Sequence
  Description of Artificial Sequence: Synthetic oligonucleotide
gacaggccccagcgccaaa

SEQ ID NO: 2893571 - RNA, 19 nt, Artificial Sequence
  Description of Artificial Sequence: Synthetic oligonucleotide
cuccagccggcggcucagc

SEQ ID NO: 2893572 - RNA, 19 nt, Artificial Sequence
  Description of Artificial Sequence: Synthetic oligonucleotide
gggacaggccccagcgcca

SEQ ID NO: 2893573 - RNA, 19 nt, Artificial Sequence
  Description of Artificial Sequence: Synthetic oligonucleotide
cgaggucccuccucagguc

SEQ ID NO: 2893574 - RNA, 19 nt, Artificial Sequence
  Description of Artificial Sequence: Synthetic oligonucleotide
ccggcggcucagcucggcc

SEQ ID NO: 2893575 - RNA, 19 nt, Artificial Sequence
  Description of Artificial Sequence: Synthetic oligonucleotide
ccuuuaaacccagcagccu

SEQ ID NO: 2893576 - RNA, 19 nt, Artificial Sequence
  Description of Artificial Sequence: Synthetic oligonucleotide
caggcaggcggcgcacgga

SEQ ID NO: 2893577 - RNA, 19 nt, Artificial Sequence
  Description of Artificial Sequence: Synthetic oligonucleotide
ccgaggucccuccucaggu

SEQ ID NO: 2893578 - RNA, 19 nt, Artificial Sequence
  Description of Artificial Sequence: Synthetic oligonucleotide
ccuccgugggauccuggga

SEQ ID NO: 2893579 - RNA, 19 nt, Artificial Sequence
  Description of Artificial Sequence: Synthetic oligonucleotide
cccugaggaacagguccug

SEQ ID NO: 2893580 - RNA, 19 nt, Artificial Sequence
  Description of Artificial Sequence: Synthetic oligonucleotide
ccccagcgccaaagaacag

SEQ ID NO: 2893581 - RNA, 19 nt, Artificial Sequence
  Description of Artificial Sequence: Synthetic oligonucleotide
ggcggcgcacggagaacug

SEQ ID NO: 2893582 - RNA, 19 nt, Artificial Sequence
  Description of Artificial Sequence: Synthetic oligonucleotide
cggcuugagcaccacgaca

SEQ ID NO: 2893583 - RNA, 19 nt, Artificial Sequence
  Description of Artificial Sequence: Synthetic oligonucleotide
cgaccgaggucccuccuca

SEQ ID NO: 2893584 - RNA, 19 nt, Artificial Sequence
  Description of Artificial Sequence: Synthetic oligonucleotide
cauccuggucacuguuauu

SEQ ID NO: 2893585 - RNA, 19 nt, Artificial Sequence
  Description of Artificial Sequence: Synthetic oligonucleotide
gcggcucagcucggccucg

SEQ ID NO: 2893586 - RNA, 19 nt, Artificial Sequence
  Description of Artificial Sequence: Synthetic oligonucleotide
ccgugggauccugggacac

SEQ ID NO: 2893587 - RNA, 19 nt, Artificial Sequence
  Description of Artificial Sequence: Synthetic oligonucleotide
ggucccuccucaggucauc

SEQ ID NO: 2893588 - RNA, 19 nt, Artificial Sequence
  Description of Artificial Sequence: Synthetic oligonucleotide
gcaucgcucgucagcacgu

SEQ ID NO: 2893589 - RNA, 19 nt, Artificial Sequence
  Description of Artificial Sequence: Synthetic oligonucleotide
cgaagcacguagaacucau

SEQ ID NO: 2893590 - RNA, 19 nt, Artificial Sequence
  Description of Artificial Sequence: Synthetic oligonucleotide
cccagcgccaaagaacagu

SEQ ID NO: 2893591 - RNA, 19 nt, Artificial Sequence
  Description of Artificial Sequence: Synthetic oligonucleotide
ggcgcuggaucucguccgu

SEQ ID NO: 2893592 - RNA, 19 nt, Artificial Sequence
  Description of Artificial Sequence: Synthetic oligonucleotide
acguccccgcccggcuuga

SEQ ID NO: 2893593 - RNA, 19 nt, Artificial Sequence
  Description of Artificial Sequence: Synthetic oligonucleotide
gucgcacgaagaagucuuu

SEQ ID NO: 2893594 - RNA, 19 nt, Artificial Sequence
  Description of Artificial Sequence: Synthetic oligonucleotide
gcgcuggaucucguccgug

SEQ ID NO: 2893595 - RNA, 19 nt, Artificial Sequence
  Description of Artificial Sequence: Synthetic oligonucleotide
agccggcggcucagcucgg

SEQ ID NO: 2893596 - RNA, 19 nt, Artificial Sequence
  Description of Artificial Sequence: Synthetic oligonucleotide
ggacaggccccagcgccaa

SEQ ID NO: 2893597 - RNA, 19 nt, Artificial Sequence
  Description of Artificial Sequence: Synthetic oligonucleotide
ggccagcugugcugcccga

SEQ ID NO: 2893598 - RNA, 19 nt, Artificial Sequence
  Description of Artificial Sequence: Synthetic oligonucleotide
ccagcagccuccugccagu

SEQ ID NO: 2893599 - RNA, 19 nt, Artificial Sequence
  Description of Artificial Sequence: Synthetic oligonucleotide
ggcgguggugcaugccuuu

SEQ ID NO: 2893600 - RNA, 19 nt, Artificial Sequence
  Description of Artificial Sequence: Synthetic oligonucleotide
ggcaggcggcgcacggaga

SEQ ID NO: 2893601 - RNA, 19 nt, Artificial Sequence
  Description of Artificial Sequence: Synthetic oligonucleotide
gccagcugugcugcccgaa

SEQ ID NO: 2893602 - RNA, 19 nt, Artificial Sequence
  Description of Artificial Sequence: Synthetic oligonucleotide
gccggcggcucagcucggc

SEQ ID NO: 2893603 - RNA, 19 nt, Artificial Sequence
  Description of Artificial Sequence: Synthetic oligonucleotide
ccugaggaacagguccugu

SEQ ID NO: 2893604 - RNA, 19 nt, Artificial Sequence
  Description of Artificial Sequence: Synthetic oligonucleotide
cggcaggaagagccacuuc

SEQ ID NO: 2893605 - RNA, 19 nt, Artificial Sequence
  Description of Artificial Sequence: Synthetic oligonucleotide
gcgguggugcaugccuuua

SEQ ID NO: 2893606 - RNA, 19 nt, Artificial Sequence
  Description of Artificial Sequence: Synthetic oligonucleotide
ggcgaccgaggucccuccu

SEQ ID NO: 2893607 - RNA, 19 nt, Artificial Sequence
  Description of Artificial Sequence: Synthetic oligonucleotide
gugcugcccgaagcacgua

SEQ ID NO: 2893608 - RNA, 19 nt, Artificial Sequence
  Description of Artificial Sequence: Synthetic oligonucleotide
ggcucagcucggccucggu

SEQ ID NO: 2893609 - RNA, 19 nt, Artificial Sequence
  Description of Artificial Sequence: Synthetic oligonucleotide
gcgaagcaggaggguccca

SEQ ID NO: 2893610 - RNA, 19 nt, Artificial Sequence
  Description of Artificial Sequence: Synthetic oligonucleotide
cgugggauccugggacaca

SEQ ID NO: 2893611 - RNA, 19 nt, Artificial Sequence
  Description of Artificial Sequence: Synthetic oligonucleotide
gccucggucuccacuucau

SEQ ID NO: 2893612 - RNA, 19 nt, Artificial Sequence
  Description of Artificial Sequence: Synthetic oligonucleotide
cggcucagcucggccucgg

SEQ ID NO: 2893613 - RNA, 19 nt, Artificial Sequence
  Description of Artificial Sequence: Synthetic oligonucleotide
cggccucggucuccacuuc

SEQ ID NO: 2893614 - RNA, 19 nt, Artificial Sequence
  Description of Artificial Sequence: Synthetic oligonucleotide
gcacguccccgcccggcuu

SEQ ID NO: 2893615 - RNA, 19 nt, Artificial Sequence
  Description of Artificial Sequence: Synthetic oligonucleotide
cggcggcucagcucggccu

SEQ ID NO: 2893616 - RNA, 19 nt, Artificial Sequence
  Description of Artificial Sequence: Synthetic oligonucleotide
cagcagccuccugccaguu

SEQ ID NO: 2893617 - RNA, 19 nt, Artificial Sequence
  Description of Artificial Sequence: Synthetic oligonucleotide
cccaggcgcuggaucucgu

SEQ ID NO: 2893618 - RNA, 19 nt, Artificial Sequence
  Description of Artificial Sequence: Synthetic oligonucleotide
cguccccgcccggcuugag

SEQ ID NO: 2893619 - RNA, 19 nt, Artificial Sequence
  Description of Artificial Sequence: Synthetic oligonucleotide
cguccguggcaucgcucgu

SEQ ID NO: 2893620 - RNA, 19 nt, Artificial Sequence
  Description of Artificial Sequence: Synthetic oligonucleotide
cgcccggcuugagcaccac

SEQ ID NO: 2893621 - RNA, 19 nt, Artificial Sequence
  Description of Artificial Sequence: Synthetic oligonucleotide
acuaauaaaauauaaaugc

SEQ ID NO: 2893622 - RNA, 19 nt, Artificial Sequence
  Description of Artificial Sequence: Synthetic oligonucleotide
aauauaaaugcuuggauac

SEQ ID NO: 2893623 - RNA, 19 nt, Artificial Sequence
  Description of Artificial Sequence: Synthetic oligonucleotide
uuucauaucauauaagugg

SEQ ID NO: 2893624 - RNA, 19 nt, Artificial Sequence
  Description of Artificial Sequence: Synthetic oligonucleotide
aauguuuuaaccuuagguc

SEQ ID NO: 2893625 - RNA, 19 nt, Artificial Sequence
  Description of Artificial Sequence: Synthetic oligonucleotide
aauauauuaauuaggaaac

SEQ ID NO: 2893626 - RNA, 19 nt, Artificial Sequence
  Description of Artificial Sequence: Synthetic oligonucleotide
aaaauucaauguuuuaacc

SEQ ID NO: 2893627 - RNA, 19 nt, Artificial Sequence
  Description of Artificial Sequence: Synthetic oligonucleotide
uuuaguucaaaacauaaga

SEQ ID NO: 2893628 - RNA, 19 nt, Artificial Sequence
  Description of Artificial Sequence: Synthetic oligonucleotide
aauaucagaauuuucauau

SEQ ID NO: 2893629 - RNA, 19 nt, Artificial Sequence
  Description of Artificial Sequence: Synthetic oligonucleotide
uaauauauuaauuaggaaa

SEQ ID NO: 2893630 - RNA, 19 nt, Artificial Sequence
  Description of Artificial Sequence: Synthetic oligonucleotide
aacuuauuagcucauacag

SEQ ID NO: 2893631 - RNA, 19 nt, Artificial Sequence
  Description of Artificial Sequence: Synthetic oligonucleotide
uuauguaaaauuaauguga

SEQ ID NO: 2893632 - RNA, 19 nt, Artificial Sequence
  Description of Artificial Sequence: Synthetic oligonucleotide
aauuuucuuauauugcuuc

SEQ ID NO: 2893633 - RNA, 19 nt, Artificial Sequence
  Description of Artificial Sequence: Synthetic oligonucleotide
ucuuauauaauuguaauug

SEQ ID NO: 2893634 - RNA, 19 nt, Artificial Sequence
  Description of Artificial Sequence: Synthetic oligonucleotide
uuuaaaaggacuuuugaca

SEQ ID NO: 2893635 - RNA, 19 nt, Artificial Sequence
  Description of Artificial Sequence: Synthetic oligonucleotide
ucaacauacacuuucaugu

SEQ ID NO: 2893636 - RNA, 19 nt, Artificial Sequence
  Description of Artificial Sequence: Synthetic oligonucleotide
uauuagcucauacagacag

SEQ ID NO: 2893637 - RNA, 19 nt, Artificial Sequence
  Description of Artificial Sequence: Synthetic oligonucleotide
guuaauacagcacugagug

SEQ ID NO: 2893638 - RNA, 19 nt, Artificial Sequence
  Description of Artificial Sequence: Synthetic oligonucleotide
uuuauguaaaauuaaugug

SEQ ID NO: 2893639 - RNA, 19 nt, Artificial Sequence
  Description of Artificial Sequence: Synthetic oligonucleotide
uuaagcaagacauuacagg

SEQ ID NO: 2893640 - RNA, 19 nt, Artificial Sequence
  Description of Artificial Sequence: Synthetic oligonucleotide
uuucugauaguuuuaaaag

SEQ ID NO: 2893641 - RNA, 19 nt, Artificial Sequence
  Description of Artificial Sequence: Synthetic oligonucleotide
aaauucaauguuuuaaccu

SEQ ID NO: 2893642 - RNA, 19 nt, Artificial Sequence
  Description of Artificial Sequence: Synthetic oligonucleotide
aguaagauaaucuuagugu

SEQ ID NO: 2893643 - RNA, 19 nt, Artificial Sequence
  Description of Artificial Sequence: Synthetic oligonucleotide
aaaagaguguuauuaagca

SEQ ID NO: 2893644 - RNA, 19 nt, Artificial Sequence
  Description of Artificial Sequence: Synthetic oligonucleotide
aauugaacuuauuagcuca

SEQ ID NO: 2893645 - RNA, 19 nt, Artificial Sequence
  Description of Artificial Sequence: Synthetic oligonucleotide
uguaaaauuaaugugaaau

SEQ ID NO: 2893646 - RNA, 19 nt, Artificial Sequence
  Description of Artificial Sequence: Synthetic oligonucleotide
ugacauagcuuucugauag

SEQ ID NO: 2893647 - RNA, 19 nt, Artificial Sequence
  Description of Artificial Sequence: Synthetic oligonucleotide
uacaauugaacuuauuagc

SEQ ID NO: 2893648 - RNA, 19 nt, Artificial Sequence
  Description of Artificial Sequence: Synthetic oligonucleotide
uguggcucaauaaauauug

SEQ ID NO: 2893649 - RNA, 19 nt, Artificial Sequence
  Description of Artificial Sequence: Synthetic oligonucleotide
uuauauugcuucaacauac

SEQ ID NO: 2893650 - RNA, 19 nt, Artificial Sequence
  Description of Artificial Sequence: Synthetic oligonucleotide
cuuauuagcucauacagac

SEQ ID NO: 2893651 - RNA, 19 nt, Artificial Sequence
  Description of Artificial Sequence: Synthetic oligonucleotide
aagaccauaguuaauacag

SEQ ID NO: 2893652 - RNA, 19 nt, Artificial Sequence
  Description of Artificial Sequence: Synthetic oligonucleotide
uucugauaguuuuaaaagg

SEQ ID NO: 2893653 - RNA, 19 nt, Artificial Sequence
  Description of Artificial Sequence: Synthetic oligonucleotide
auacaauugaacuuauuag

SEQ ID NO: 2893654 - RNA, 19 nt, Artificial Sequence
  Description of Artificial Sequence: Synthetic oligonucleotide
aguauuacugcuucaaaag

SEQ ID NO: 2893655 - RNA, 19 nt, Artificial Sequence
  Description of Artificial Sequence: Synthetic oligonucleotide
auuuucauaucauauaagu

SEQ ID NO: 2893656 - RNA, 19 nt, Artificial Sequence
  Description of Artificial Sequence: Synthetic oligonucleotide
uuugacacuguauaaaugu

SEQ ID NO: 2893657 - RNA, 19 nt, Artificial Sequence
  Description of Artificial Sequence: Synthetic oligonucleotide
auaaaauauaaaugcuugg

SEQ ID NO: 2893658 - RNA, 19 nt, Artificial Sequence
  Description of Artificial Sequence: Synthetic oligonucleotide
uauuacugcuucaaaagag

SEQ ID NO: 2893659 - RNA, 19 nt, Artificial Sequence
  Description of Artificial Sequence: Synthetic oligonucleotide
uuaacuaauaaaauauaaa

SEQ ID NO: 2893660 - RNA, 19 nt, Artificial Sequence
  Description of Artificial Sequence: Synthetic oligonucleotide
ucugauaguuuuaaaagga

SEQ ID NO: 2893661 - RNA, 19 nt, Artificial Sequence
  Description of Artificial Sequence: Synthetic oligonucleotide
uuucaugugauacaauuga

SEQ ID NO: 2893662 - RNA, 19 nt, Artificial Sequence
  Description of Artificial Sequence: Synthetic oligonucleotide
cuuaauauauuaauuagga

SEQ ID NO: 2893663 - RNA, 19 nt, Artificial Sequence
  Description of Artificial Sequence: Synthetic oligonucleotide
aaauauuggcacuacaaaa

SEQ ID NO: 2893664 - RNA, 19 nt, Artificial Sequence
  Description of Artificial Sequence: Synthetic oligonucleotide
aaauauaaaugcuuggaua

SEQ ID NO: 2893665 - RNA, 19 nt, Artificial Sequence
  Description of Artificial Sequence: Synthetic oligonucleotide
uaguucaaaacauaagacc

SEQ ID NO: 2893666 - RNA, 19 nt, Artificial Sequence
  Description of Artificial Sequence: Synthetic oligonucleotide
uuaaaaggacuuuugacac

SEQ ID NO: 2893667 - RNA, 19 nt, Artificial Sequence
  Description of Artificial Sequence: Synthetic oligonucleotide
uuuucauaucauauaagug

SEQ ID NO: 2893668 - RNA, 19 nt, Artificial Sequence
  Description of Artificial Sequence: Synthetic oligonucleotide
uucauaucauauaaguggc

SEQ ID NO: 2893669 - RNA, 19 nt, Artificial Sequence
  Description of Artificial Sequence: Synthetic oligonucleotide
caaaauuucuugaaaauuc

SEQ ID NO: 2893670 - RNA, 19 nt, Artificial Sequence
  Description of Artificial Sequence: Synthetic oligonucleotide
uuuuaguucaaaacauaag

SEQ ID NO: 2893671 - RNA, 19 nt, Artificial Sequence
  Description of Artificial Sequence: Synthetic oligonucleotide
uuaguucaaaacauaagac

SEQ ID NO: 2893672 - RNA, 19 nt, Artificial Sequence
  Description of Artificial Sequence: Synthetic oligonucleotide
gaaaauucaauguuuuaac

SEQ ID NO: 2893673 - RNA, 19 nt, Artificial Sequence
  Description of Artificial Sequence: Synthetic oligonucleotide
aagaguguuauuaagcaag

SEQ ID NO: 2893674 - RNA, 19 nt, Artificial Sequence
  Description of Artificial Sequence: Synthetic oligonucleotide
uauauaauuguaauugaau

SEQ ID NO: 2893675 - RNA, 19 nt, Artificial Sequence
  Description of Artificial Sequence: Synthetic oligonucleotide
uuaaccuuaggucuuauau

SEQ ID NO: 2893676 - RNA, 19 nt, Artificial Sequence
  Description of Artificial Sequence: Synthetic oligonucleotide
uaaaauuaaugugaaaugu

SEQ ID NO: 2893677 - RNA, 19 nt, Artificial Sequence
  Description of Artificial Sequence: Synthetic oligonucleotide
caaaagaguguuauuaagc

SEQ ID NO: 2893678 - RNA, 19 nt, Artificial Sequence
  Description of Artificial Sequence: Synthetic oligonucleotide
aauuaggaaaccauuaacu

SEQ ID NO: 2893679 - RNA, 19 nt, Artificial Sequence
  Description of Artificial Sequence: Synthetic oligonucleotide
uaagcaagacauuacagga

SEQ ID NO: 2893680 - RNA, 19 nt, Artificial Sequence
  Description of Artificial Sequence: Synthetic oligonucleotide
ugaauuuucuuauauugcu

SEQ ID NO: 2893681 - RNA, 19 nt, Artificial Sequence
  Description of Artificial Sequence: Synthetic oligonucleotide
uguaauugaauuuucuuau

SEQ ID NO: 2893682 - RNA, 19 nt, Artificial Sequence
  Description of Artificial Sequence: Synthetic oligonucleotide
uagugugaaauaaagcuug

SEQ ID NO: 2893683 - RNA, 19 nt, Artificial Sequence
  Description of Artificial Sequence: Synthetic oligonucleotide
ugacacuguauaaaugugg

SEQ ID NO: 2893684 - RNA, 19 nt, Artificial Sequence
  Description of Artificial Sequence: Synthetic oligonucleotide
aacauaagaccauaguuaa

SEQ ID NO: 2893685 - RNA, 19 nt, Artificial Sequence
  Description of Artificial Sequence: Synthetic oligonucleotide
uugaauuuucuuauauugc

SEQ ID NO: 2893686 - RNA, 19 nt, Artificial Sequence
  Description of Artificial Sequence: Synthetic oligonucleotide
aauucaauguuuuaaccuu

SEQ ID NO: 2893687 - RNA, 19 nt, Artificial Sequence
  Description of Artificial Sequence: Synthetic oligonucleotide
auuacaggagacuuuauga

SEQ ID NO: 2893688 - RNA, 19 nt, Artificial Sequence
  Description of Artificial Sequence: Synthetic oligonucleotide
auugcuucaacauacacuu

SEQ ID NO: 2893689 - RNA, 19 nt, Artificial Sequence
  Description of Artificial Sequence: Synthetic oligonucleotide
aguguuauuaagcaagaca

SEQ ID NO: 2893690 - RNA, 19 nt, Artificial Sequence
  Description of Artificial Sequence: Synthetic oligonucleotide
ucaaaagaguguuauuaag

SEQ ID NO: 2893691 - RNA, 19 nt, Artificial Sequence
  Description of Artificial Sequence: Synthetic oligonucleotide
gauacaauugaacuuauua

SEQ ID NO: 2893692 - RNA, 19 nt, Artificial Sequence
  Description of Artificial Sequence: Synthetic oligonucleotide
guaagauaaucuuagugug

SEQ ID NO: 2893693 - RNA, 19 nt, Artificial Sequence
  Description of Artificial Sequence: Synthetic oligonucleotide
auauaauuguaauugaauu

SEQ ID NO: 2893694 - RNA, 19 nt, Artificial Sequence
  Description of Artificial Sequence: Synthetic oligonucleotide
aaccuuaggucuuauauaa

SEQ ID NO: 2893695 - RNA, 19 nt, Artificial Sequence
  Description of Artificial Sequence: Synthetic oligonucleotide
gacaguaagauaaucuuag

SEQ ID NO: 2893696 - RNA, 19 nt, Artificial Sequence
  Description of Artificial Sequence: Synthetic oligonucleotide
gaaaccauuaacuaauaaa

SEQ ID NO: 2893697 - RNA, 19 nt, Artificial Sequence
  Description of Artificial Sequence: Synthetic oligonucleotide
uaaagcuugguuuucuuca

SEQ ID NO: 2893698 - RNA, 19 nt, Artificial Sequence
  Description of Artificial Sequence: Synthetic oligonucleotide
uuauauaauuguaauugaa

SEQ ID NO: 2893699 - RNA, 19 nt, Artificial Sequence
  Description of Artificial Sequence: Synthetic oligonucleotide
cugaaaaugaauaucagaa

SEQ ID NO: 2893700 - RNA, 19 nt, Artificial Sequence
  Description of Artificial Sequence: Synthetic oligonucleotide
ucuuauauugcuucaacau

SEQ ID NO: 2893701 - RNA, 19 nt, Artificial Sequence
  Description of Artificial Sequence: Synthetic oligonucleotide
uauugcuucaacauacacu

SEQ ID NO: 2893702 - RNA, 19 nt, Artificial Sequence
  Description of Artificial Sequence: Synthetic oligonucleotide
aauaaauauuggcacuaca

SEQ ID NO: 2893703 - RNA, 19 nt, Artificial Sequence
  Description of Artificial Sequence: Synthetic oligonucleotide
uauauuaauuaggaaacca

SEQ ID NO: 2893704 - RNA, 19 nt, Artificial Sequence
  Description of Artificial Sequence: Synthetic oligonucleotide
ucuuagugugaaauaaagc

SEQ ID NO: 2893705 - RNA, 19 nt, Artificial Sequence
  Description of Artificial Sequence: Synthetic oligonucleotide
uuaauuaggaaaccauuaa

SEQ ID NO: 2893706 - RNA, 19 nt, Artificial Sequence
  Description of Artificial Sequence: Synthetic oligonucleotide
uauaauuguaauugaauuu

SEQ ID NO: 2893707 - RNA, 19 nt, Artificial Sequence
  Description of Artificial Sequence: Synthetic oligonucleotide
ugauaguuuuaaaaggacu

SEQ ID NO: 2893708 - RNA, 19 nt, Artificial Sequence
  Description of Artificial Sequence: Synthetic oligonucleotide
uaauuaggaaaccauuaac

SEQ ID NO: 2893709 - RNA, 19 nt, Artificial Sequence
  Description of Artificial Sequence: Synthetic oligonucleotide
uaaauauuggcacuacaaa

SEQ ID NO: 2893710 - RNA, 19 nt, Artificial Sequence
  Description of Artificial Sequence: Synthetic oligonucleotide
auguuuuaaccuuaggucu

SEQ ID NO: 2893711 - RNA, 19 nt, Artificial Sequence
  Description of Artificial Sequence: Synthetic oligonucleotide
gaauuuucauaucauauaa

SEQ ID NO: 2893712 - RNA, 19 nt, Artificial Sequence
  Description of Artificial Sequence: Synthetic oligonucleotide
ugaaaauucaauguuuuaa

SEQ ID NO: 2893713 - RNA, 19 nt, Artificial Sequence
  Description of Artificial Sequence: Synthetic oligonucleotide
auaagaccauaguuaauac

SEQ ID NO: 2893714 - RNA, 19 nt, Artificial Sequence
  Description of Artificial Sequence: Synthetic oligonucleotide
auaaauguggcucaauaaa

SEQ ID NO: 2893715 - RNA, 19 nt, Artificial Sequence
  Description of Artificial Sequence: Synthetic oligonucleotide
ucaaaacauaagaccauag

SEQ ID NO: 2893716 - RNA, 19 nt, Artificial Sequence
  Description of Artificial Sequence: Synthetic oligonucleotide
ugaacuuauuagcucauac

SEQ ID NO: 2893717 - RNA, 19 nt, Artificial Sequence
  Description of Artificial Sequence: Synthetic oligonucleotide
auauauuaauuaggaaacc

SEQ ID NO: 2893718 - RNA, 19 nt, Artificial Sequence
  Description of Artificial Sequence: Synthetic oligonucleotide
aaaaggacuuuugacacug

SEQ ID NO: 2893719 - RNA, 19 nt, Artificial Sequence
  Description of Artificial Sequence: Synthetic oligonucleotide
ugugaaauaaagcuugguu

SEQ ID NO: 2893720 - RNA, 19 nt, Artificial Sequence
  Description of Artificial Sequence: Synthetic oligonucleotide
aauguggcucaauaaauau

SEQ ID NO: 2893721 - RNA, 19 nt, Artificial Sequence
  Description of Artificial Sequence: Synthetic oligonucleotide
uaauacagcacugagugcu

SEQ ID NO: 2893722 - RNA, 19 nt, Artificial Sequence
  Description of Artificial Sequence: Synthetic oligonucleotide
agcucauacagacaguaag

SEQ ID NO: 2893723 - RNA, 19 nt, Artificial Sequence
  Description of Artificial Sequence: Synthetic oligonucleotide
uucaacauacacuuucaug

SEQ ID NO: 2893724 - RNA, 19 nt, Artificial Sequence
  Description of Artificial Sequence: Synthetic oligonucleotide
uaugacauagcuuucugau

SEQ ID NO: 2893725 - RNA, 19 nt, Artificial Sequence
  Description of Artificial Sequence: Synthetic oligonucleotide
aguucaaaacauaagacca

SEQ ID NO: 2893726 - RNA, 19 nt, Artificial Sequence
  Description of Artificial Sequence: Synthetic oligonucleotide
uuguaauugaauuuucuua

SEQ ID NO: 2893727 - RNA, 19 nt, Artificial Sequence
  Description of Artificial Sequence: Synthetic oligonucleotide
cuuagugugaaauaaagcu

SEQ ID NO: 2893728 - RNA, 19 nt, Artificial Sequence
  Description of Artificial Sequence: Synthetic oligonucleotide
uaaaagcauauuuauguaa

SEQ ID NO: 2893729 - RNA, 19 nt, Artificial Sequence
  Description of Artificial Sequence: Synthetic oligonucleotide
auacacuuucaugugauac

SEQ ID NO: 2893730 - RNA, 19 nt, Artificial Sequence
  Description of Artificial Sequence: Synthetic oligonucleotide
augaauaucagaauuuuca

SEQ ID NO: 2893731 - RNA, 19 nt, Artificial Sequence
  Description of Artificial Sequence: Synthetic oligonucleotide
uauuaauuaggaaaccauu

SEQ ID NO: 2893732 - RNA, 19 nt, Artificial Sequence
  Description of Artificial Sequence: Synthetic oligonucleotide
uuaggaaaccauuaacuaa

SEQ ID NO: 2893733 - RNA, 19 nt, Artificial Sequence
  Description of Artificial Sequence: Synthetic oligonucleotide
acugaaaaugaauaucaga

SEQ ID NO: 2893734 - RNA, 19 nt, Artificial Sequence
  Description of Artificial Sequence: Synthetic oligonucleotide
aaacauaagaccauaguua

SEQ ID NO: 2893735 - RNA, 19 nt, Artificial Sequence
  Description of Artificial Sequence: Synthetic oligonucleotide
uggauacugaaaaugaaua

SEQ ID NO: 2893736 - RNA, 19 nt, Artificial Sequence
  Description of Artificial Sequence: Synthetic oligonucleotide
uauaaauguggcucaauaa

SEQ ID NO: 2893737 - RNA, 19 nt, Artificial Sequence
  Description of Artificial Sequence: Synthetic oligonucleotide
uuaauauauuaauuaggaa

SEQ ID NO: 2893738 - RNA, 19 nt, Artificial Sequence
  Description of Artificial Sequence: Synthetic oligonucleotide
cuuaggucuuauauaauug

SEQ ID NO: 2893739 - RNA, 19 nt, Artificial Sequence
  Description of Artificial Sequence: Synthetic oligonucleotide
aaaauuucuugaaaauuca

SEQ ID NO: 2893740 - RNA, 19 nt, Artificial Sequence
  Description of Artificial Sequence: Synthetic oligonucleotide
uuaggucuuauauaauugu

SEQ ID NO: 2893741 - RNA, 19 nt, Artificial Sequence
  Description of Artificial Sequence: Synthetic oligonucleotide
uuauuaagcaagacauuac

SEQ ID NO: 2893742 - RNA, 19 nt, Artificial Sequence
  Description of Artificial Sequence: Synthetic oligonucleotide
auaaagcuugguuuucuuc

SEQ ID NO: 2893743 - RNA, 19 nt, Artificial Sequence
  Description of Artificial Sequence: Synthetic oligonucleotide
aauuuucauaucauauaag

SEQ ID NO: 2893744 - RNA, 19 nt, Artificial Sequence
  Description of Artificial Sequence: Synthetic oligonucleotide
uuuaugacauagcuuucug

SEQ ID NO: 2893745 - RNA, 19 nt, Artificial Sequence
  Description of Artificial Sequence: Synthetic oligonucleotide
uaaauguggcucaauaaau

SEQ ID NO: 2893746 - RNA, 19 nt, Artificial Sequence
  Description of Artificial Sequence: Synthetic oligonucleotide
ugugauacaauugaacuua

SEQ ID NO: 2893747 - RNA, 19 nt, Artificial Sequence
  Description of Artificial Sequence: Synthetic oligonucleotide
uauaaaugcuuggauacug

SEQ ID NO: 2893748 - RNA, 19 nt, Artificial Sequence
  Description of Artificial Sequence: Synthetic oligonucleotide
gauacugaaaaugaauauc

SEQ ID NO: 2893749 - RNA, 19 nt, Artificial Sequence
  Description of Artificial Sequence: Synthetic oligonucleotide
uuuugacacuguauaaaug

SEQ ID NO: 2893750 - RNA, 19 nt, Artificial Sequence
  Description of Artificial Sequence: Synthetic oligonucleotide
accauuaacuaauaaaaua

SEQ ID NO: 2893751 - RNA, 19 nt, Artificial Sequence
  Description of Artificial Sequence: Synthetic oligonucleotide
uaagauaaucuuaguguga

SEQ ID NO: 2893752 - RNA, 19 nt, Artificial Sequence
  Description of Artificial Sequence: Synthetic oligonucleotide
aacauacacuuucauguga

SEQ ID NO: 2893753 - RNA, 19 nt, Artificial Sequence
  Description of Artificial Sequence: Synthetic oligonucleotide
uucuuauauugcuucaaca

SEQ ID NO: 2893754 - RNA, 19 nt, Artificial Sequence
  Description of Artificial Sequence: Synthetic oligonucleotide
aaaagcauauuuauguaaa

SEQ ID NO: 2893755 - RNA, 19 nt, Artificial Sequence
  Description of Artificial Sequence: Synthetic oligonucleotide
auuggcacuacaaaauuuc

SEQ ID NO: 2893756 - RNA, 19 nt, Artificial Sequence
  Description of Artificial Sequence: Synthetic oligonucleotide
uucaauguuuuaaccuuag

SEQ ID NO: 2893757 - RNA, 19 nt, Artificial Sequence
  Description of Artificial Sequence: Synthetic oligonucleotide
aaauuaaugugaaauguuu

SEQ ID NO: 2893758 - RNA, 19 nt, Artificial Sequence
  Description of Artificial Sequence: Synthetic oligonucleotide
ucaauguuuuaaccuuagg

SEQ ID NO: 2893759 - RNA, 19 nt, Artificial Sequence
  Description of Artificial Sequence: Synthetic oligonucleotide
auaucauauaaguggccuc

SEQ ID NO: 2893760 - RNA, 19 nt, Artificial Sequence
  Description of Artificial Sequence: Synthetic oligonucleotide
uuagugugaaauaaagcuu

SEQ ID NO: 2893761 - RNA, 19 nt, Artificial Sequence
  Description of Artificial Sequence: Synthetic oligonucleotide
ugcuucaacauacacuuuc

SEQ ID NO: 2893762 - RNA, 19 nt, Artificial Sequence
  Description of Artificial Sequence: Synthetic oligonucleotide
auagcuuucugauaguuuu

SEQ ID NO: 2893763 - RNA, 19 nt, Artificial Sequence
  Description of Artificial Sequence: Synthetic oligonucleotide
uuucuuauauugcuucaac

SEQ ID NO: 2893764 - RNA, 19 nt, Artificial Sequence
  Description of Artificial Sequence: Synthetic oligonucleotide
uuggauacugaaaaugaau

SEQ ID NO: 2893765 - RNA, 19 nt, Artificial Sequence
  Description of Artificial Sequence: Synthetic oligonucleotide
uacugaaaaugaauaucag

SEQ ID NO: 2893766 - RNA, 19 nt, Artificial Sequence
  Description of Artificial Sequence: Synthetic oligonucleotide
uaaucuuagugugaaauaa

SEQ ID NO: 2893767 - RNA, 19 nt, Artificial Sequence
  Description of Artificial Sequence: Synthetic oligonucleotide
aaaaugaauaucagaauuu

SEQ ID NO: 2893768 - RNA, 19 nt, Artificial Sequence
  Description of Artificial Sequence: Synthetic oligonucleotide
aauuucuugaaaauucaau

SEQ ID NO: 2893769 - RNA, 19 nt, Artificial Sequence
  Description of Artificial Sequence: Synthetic oligonucleotide
aaagaguguuauuaagcaa

SEQ ID NO: 2893770 - RNA, 19 nt, Artificial Sequence
  Description of Artificial Sequence: Synthetic oligonucleotide
auaauuguaauugaauuuu

SEQ ID NO: 2893771 - RNA, 19 nt, Artificial Sequence
  Description of Artificial Sequence: Synthetic oligonucleotide
auuaggaaaccauuaacua

SEQ ID NO: 2893772 - RNA, 19 nt, Artificial Sequence
  Description of Artificial Sequence: Synthetic oligonucleotide
uuacaggagacuuuaugac

SEQ ID NO: 2893773 - RNA, 19 nt, Artificial Sequence
  Description of Artificial Sequence: Synthetic oligonucleotide
gacuuuaugacauagcuuu

SEQ ID NO: 2893774 - RNA, 19 nt, Artificial Sequence
  Description of Artificial Sequence: Synthetic oligonucleotide
auuaacuaauaaaauauaa

SEQ ID NO: 2893775 - RNA, 19 nt, Artificial Sequence
  Description of Artificial Sequence: Synthetic oligonucleotide
ugaaaaugaauaucagaau

SEQ ID NO: 2893776 - RNA, 19 nt, Artificial Sequence
  Description of Artificial Sequence: Synthetic oligonucleotide
gaaaaugaauaucagaauu

SEQ ID NO: 2893777 - RNA, 19 nt, Artificial Sequence
  Description of Artificial Sequence: Synthetic oligonucleotide
ugaauaucagaauuuucau

SEQ ID NO: 2893778 - RNA, 19 nt, Artificial Sequence
  Description of Artificial Sequence: Synthetic oligonucleotide
caguaagauaaucuuagug

SEQ ID NO: 2893779 - RNA, 19 nt, Artificial Sequence
  Description of Artificial Sequence: Synthetic oligonucleotide
ggcuuaauauauuaauuag

SEQ ID NO: 2893780 - RNA, 19 nt, Artificial Sequence
  Description of Artificial Sequence: Synthetic oligonucleotide
acuacaaaauuucuugaaa

SEQ ID NO: 2893781 - RNA, 19 nt, Artificial Sequence
  Description of Artificial Sequence: Synthetic oligonucleotide
acuuucaugugauacaauu

SEQ ID NO: 2893782 - RNA, 19 nt, Artificial Sequence
  Description of Artificial Sequence: Synthetic oligonucleotide
cuuucaugugauacaauug

SEQ ID NO: 2893783 - RNA, 19 nt, Artificial Sequence
  Description of Artificial Sequence: Synthetic oligonucleotide
agaauuuucauaucauaua

SEQ ID NO: 2893784 - RNA, 19 nt, Artificial Sequence
  Description of Artificial Sequence: Synthetic oligonucleotide
uucaaaagaguguuauuaa

SEQ ID NO: 2893785 - RNA, 19 nt, Artificial Sequence
  Description of Artificial Sequence: Synthetic oligonucleotide
gacacuguauaaauguggc

SEQ ID NO: 2893786 - RNA, 19 nt, Artificial Sequence
  Description of Artificial Sequence: Synthetic oligonucleotide
aaagcauauuuauguaaaa

SEQ ID NO: 2893787 - RNA, 19 nt, Artificial Sequence
  Description of Artificial Sequence: Synthetic oligonucleotide
cuuucugauaguuuuaaaa

SEQ ID NO: 2893788 - RNA, 19 nt, Artificial Sequence
  Description of Artificial Sequence: Synthetic oligonucleotide
auuguaauugaauuuucuu

SEQ ID NO: 2893789 - RNA, 19 nt, Artificial Sequence
  Description of Artificial Sequence: Synthetic oligonucleotide
aagauaaucuuagugugaa

SEQ ID NO: 2893790 - RNA, 19 nt, Artificial Sequence
  Description of Artificial Sequence: Synthetic oligonucleotide
uggcucaauaaauauuggc

SEQ ID NO: 2893791 - RNA, 19 nt, Artificial Sequence
  Description of Artificial Sequence: Synthetic oligonucleotide
ggcacuacaaaauuucuug

SEQ ID NO: 2893792 - RNA, 19 nt, Artificial Sequence
  Description of Artificial Sequence: Synthetic oligonucleotide
aaaugaauaucagaauuuu

SEQ ID NO: 2893793 - RNA, 19 nt, Artificial Sequence
  Description of Artificial Sequence: Synthetic oligonucleotide
agcaagacauuacaggaga

SEQ ID NO: 2893794 - RNA, 19 nt, Artificial Sequence
  Description of Artificial Sequence: Synthetic oligonucleotide
uacacuuucaugugauaca

SEQ ID NO: 2893795 - RNA, 19 nt, Artificial Sequence
  Description of Artificial Sequence: Synthetic oligonucleotide
gaacuuauuagcucauaca

SEQ ID NO: 2893796 - RNA, 19 nt, Artificial Sequence
  Description of Artificial Sequence: Synthetic oligonucleotide
uaagaccauaguuaauaca

SEQ ID NO: 2893797 - RNA, 19 nt, Artificial Sequence
  Description of Artificial Sequence: Synthetic oligonucleotide
uaucauauaaguggccuca

SEQ ID NO: 2893798 - RNA, 19 nt, Artificial Sequence
  Description of Artificial Sequence: Synthetic oligonucleotide
uugacacuguauaaaugug

SEQ ID NO: 2893799 - RNA, 19 nt, Artificial Sequence
  Description of Artificial Sequence: Synthetic oligonucleotide
aggcuuaauauauuaauua

SEQ ID NO: 2893800 - RNA, 19 nt, Artificial Sequence
  Description of Artificial Sequence: Synthetic oligonucleotide
cauaguuaauacagcacug

SEQ ID NO: 2893801 - RNA, 19 nt, Artificial Sequence
  Description of Artificial Sequence: Synthetic oligonucleotide
uacaggagacuuuaugaca

SEQ ID NO: 2893802 - RNA, 19 nt, Artificial Sequence
  Description of Artificial Sequence: Synthetic oligonucleotide
gcuuaauauauuaauuagg

SEQ ID NO: 2893803 - RNA, 19 nt, Artificial Sequence
  Description of Artificial Sequence: Synthetic oligonucleotide
auaucagaauuuucauauc

SEQ ID NO: 2893804 - RNA, 19 nt, Artificial Sequence
  Description of Artificial Sequence: Synthetic oligonucleotide
gaccauaguuaauacagca

SEQ ID NO: 2893805 - RNA, 19 nt, Artificial Sequence
  Description of Artificial Sequence: Synthetic oligonucleotide
uauaaguggccucaguauu

SEQ ID NO: 2893806 - RNA, 19 nt, Artificial Sequence
  Description of Artificial Sequence: Synthetic oligonucleotide
auuaagcaagacauuacag

SEQ ID NO: 2893807 - RNA, 19 nt, Artificial Sequence
  Description of Artificial Sequence: Synthetic oligonucleotide
acuguauaaauguggcuca

SEQ ID NO: 2893808 - RNA, 19 nt, Artificial Sequence
  Description of Artificial Sequence: Synthetic oligonucleotide
cuuauauaauuguaauuga

SEQ ID NO: 2893809 - RNA, 19 nt, Artificial Sequence
  Description of Artificial Sequence: Synthetic oligonucleotide
ucauaucauauaaguggcc

SEQ ID NO: 2893810 - RNA, 19 nt, Artificial Sequence
  Description of Artificial Sequence: Synthetic oligonucleotide
gcacugagugcuuagaagg

SEQ ID NO: 2893811 - RNA, 19 nt, Artificial Sequence
  Description of Artificial Sequence: Synthetic oligonucleotide
ugcuuagaaggcuuaauau

SEQ ID NO: 2893812 - RNA, 19 nt, Artificial Sequence
  Description of Artificial Sequence: Synthetic oligonucleotide
cugauaguuuuaaaaggac

SEQ ID NO: 2893813 - RNA, 19 nt, Artificial Sequence
  Description of Artificial Sequence: Synthetic oligonucleotide
uaauuguaauugaauuuuc

SEQ ID NO: 2893814 - RNA, 19 nt, Artificial Sequence
  Description of Artificial Sequence: Synthetic oligonucleotide
uuaugacauagcuuucuga

SEQ ID NO: 2893815 - RNA, 19 nt, Artificial Sequence
  Description of Artificial Sequence: Synthetic oligonucleotide
auaaauauuggcacuacaa

SEQ ID NO: 2893816 - RNA, 19 nt, Artificial Sequence
  Description of Artificial Sequence: Synthetic oligonucleotide
cauauuuauguaaaauuaa

SEQ ID NO: 2893817 - RNA, 19 nt, Artificial Sequence
  Description of Artificial Sequence: Synthetic oligonucleotide
acaauugaacuuauuagcu

SEQ ID NO: 2893818 - RNA, 19 nt, Artificial Sequence
  Description of Artificial Sequence: Synthetic oligonucleotide
ugcuuggauacugaaaaug

SEQ ID NO: 2893819 - RNA, 19 nt, Artificial Sequence
  Description of Artificial Sequence: Synthetic oligonucleotide
aagcuugguuuucuucaac

SEQ ID NO: 2893820 - RNA, 19 nt, Artificial Sequence
  Description of Artificial Sequence: Synthetic oligonucleotide
auauaaguggccucaguau

SEQ ID NO: 2893821 - RNA, 19 nt, Artificial Sequence
  Description of Artificial Sequence: Synthetic oligonucleotide
gagacuuuaugacauagcu

SEQ ID NO: 2893822 - RNA, 19 nt, Artificial Sequence
  Description of Artificial Sequence: Synthetic oligonucleotide
aucuuagugugaaauaaag

SEQ ID NO: 2893823 - RNA, 19 nt, Artificial Sequence
  Description of Artificial Sequence: Synthetic oligonucleotide
cauuacaggagacuuuaug

SEQ ID NO: 2893824 - RNA, 19 nt, Artificial Sequence
  Description of Artificial Sequence: Synthetic oligonucleotide
aauuaaugugaaauguuuu

SEQ ID NO: 2893825 - RNA, 19 nt, Artificial Sequence
  Description of Artificial Sequence: Synthetic oligonucleotide
aagcauauuuauguaaaau

SEQ ID NO: 2893826 - RNA, 19 nt, Artificial Sequence
  Description of Artificial Sequence: Synthetic oligonucleotide
cacuguauaaauguggcuc

SEQ ID NO: 2893827 - RNA, 19 nt, Artificial Sequence
  Description of Artificial Sequence: Synthetic oligonucleotide
aagacauuacaggagacuu

SEQ ID NO: 2893828 - RNA, 19 nt, Artificial Sequence
  Description of Artificial Sequence: Synthetic oligonucleotide
agcacugagugcuuagaag

SEQ ID NO: 2893829 - RNA, 19 nt, Artificial Sequence
  Description of Artificial Sequence: Synthetic oligonucleotide
uagaaggcuuaauauauua

SEQ ID NO: 2893830 - RNA, 19 nt, Artificial Sequence
  Description of Artificial Sequence: Synthetic oligonucleotide
ucaauaaauauuggcacua

SEQ ID NO: 2893831 - RNA, 19 nt, Artificial Sequence
  Description of Artificial Sequence: Synthetic oligonucleotide
guuauuaagcaagacauua

SEQ ID NO: 2893832 - RNA, 19 nt, Artificial Sequence
  Description of Artificial Sequence: Synthetic oligonucleotide
auauuuauguaaaauuaau

SEQ ID NO: 2893833 - RNA, 19 nt, Artificial Sequence
  Description of Artificial Sequence: Synthetic oligonucleotide
caauugaacuuauuagcuc

SEQ ID NO: 2893834 - RNA, 19 nt, Artificial Sequence
  Description of Artificial Sequence: Synthetic oligonucleotide
uacugcuucaaaagagugu

SEQ ID NO: 2893835 - RNA, 19 nt, Artificial Sequence
  Description of Artificial Sequence: Synthetic oligonucleotide
auuaauuaggaaaccauua

SEQ ID NO: 2893836 - RNA, 19 nt, Artificial Sequence
  Description of Artificial Sequence: Synthetic oligonucleotide
aauaaagcuugguuuucuu

SEQ ID NO: 2893837 - RNA, 19 nt, Artificial Sequence
  Description of Artificial Sequence: Synthetic oligonucleotide
accauaguuaauacagcac

SEQ ID NO: 2893838 - RNA, 19 nt, Artificial Sequence
  Description of Artificial Sequence: Synthetic oligonucleotide
caugugauacaauugaacu

SEQ ID NO: 2893839 - RNA, 19 nt, Artificial Sequence
  Description of Artificial Sequence: Synthetic oligonucleotide
uuauuagcucauacagaca

SEQ ID NO: 2893840 - RNA, 19 nt, Artificial Sequence
  Description of Artificial Sequence: Synthetic oligonucleotide
uuaauacagcacugagugc

SEQ ID NO: 2893841 - RNA, 19 nt, Artificial Sequence
  Description of Artificial Sequence: Synthetic oligonucleotide
uucaugugauacaauugaa

SEQ ID NO: 2893842 - RNA, 19 nt, Artificial Sequence
  Description of Artificial Sequence: Synthetic oligonucleotide
gaauaucagaauuuucaua

SEQ ID NO: 2893843 - RNA, 19 nt, Artificial Sequence
  Description of Artificial Sequence: Synthetic oligonucleotide
acagacaguaagauaaucu

SEQ ID NO: 2893844 - RNA, 19 nt, Artificial Sequence
  Description of Artificial Sequence: Synthetic oligonucleotide
gcucaauaaauauuggcac

SEQ ID NO: 2893845 - RNA, 19 nt, Artificial Sequence
  Description of Artificial Sequence: Synthetic oligonucleotide
aagcaagacauuacaggag

SEQ ID NO: 2893846 - RNA, 19 nt, Artificial Sequence
  Description of Artificial Sequence: Synthetic oligonucleotide
auaaucuuagugugaaaua

SEQ ID NO: 2893847 - RNA, 19 nt, Artificial Sequence
  Description of Artificial Sequence: Synthetic oligonucleotide
guauuacugcuucaaaaga

SEQ ID NO: 2893848 - RNA, 19 nt, Artificial Sequence
  Description of Artificial Sequence: Synthetic oligonucleotide
uguuuuaaccuuaggucuu

SEQ ID NO: 2893849 - RNA, 19 nt, Artificial Sequence
  Description of Artificial Sequence: Synthetic oligonucleotide
auauuaauuaggaaaccau

SEQ ID NO: 2893850 - RNA, 19 nt, Artificial Sequence
  Description of Artificial Sequence: Synthetic oligonucleotide
gauaaucuuagugugaaau

SEQ ID NO: 2893851 - RNA, 19 nt, Artificial Sequence
  Description of Artificial Sequence: Synthetic oligonucleotide
aaagcuugguuuucuucaa

SEQ ID NO: 2893852 - RNA, 19 nt, Artificial Sequence
  Description of Artificial Sequence: Synthetic oligonucleotide
aaggcuuaauauauuaauu

SEQ ID NO: 2893853 - RNA, 19 nt, Artificial Sequence
  Description of Artificial Sequence: Synthetic oligonucleotide
uauuggcacuacaaaauuu

SEQ ID NO: 2893854 - RNA, 19 nt, Artificial Sequence
  Description of Artificial Sequence: Synthetic oligonucleotide
uaaaugcuuggauacugaa

SEQ ID NO: 2893855 - RNA, 19 nt, Artificial Sequence
  Description of Artificial Sequence: Synthetic oligonucleotide
auaguuaauacagcacuga

SEQ ID NO: 2893856 - RNA, 19 nt, Artificial Sequence
  Description of Artificial Sequence: Synthetic oligonucleotide
uaggucuuauauaauugua

SEQ ID NO: 2893857 - RNA, 19 nt, Artificial Sequence
  Description of Artificial Sequence: Synthetic oligonucleotide
uaaccuuaggucuuauaua

SEQ ID NO: 2893858 - RNA, 19 nt, Artificial Sequence
  Description of Artificial Sequence: Synthetic oligonucleotide
uuagcucauacagacagua

SEQ ID NO: 2893859 - RNA, 19 nt, Artificial Sequence
  Description of Artificial Sequence: Synthetic oligonucleotide
gaaggcuuaauauauuaau

SEQ ID NO: 2893860 - RNA, 19 nt, Artificial Sequence
  Description of Artificial Sequence: Synthetic oligonucleotide
aaccauuaacuaauaaaau

SEQ ID NO: 2893861 - RNA, 19 nt, Artificial Sequence
  Description of Artificial Sequence: Synthetic oligonucleotide
agaccauaguuaauacagc

SEQ ID NO: 2893862 - RNA, 19 nt, Artificial Sequence
  Description of Artificial Sequence: Synthetic oligonucleotide
ucaguauuacugcuucaaa

SEQ ID NO: 2893863 - RNA, 19 nt, Artificial Sequence
  Description of Artificial Sequence: Synthetic oligonucleotide
agcuugguuuucuucaaca

SEQ ID NO: 2893864 - RNA, 19 nt, Artificial Sequence
  Description of Artificial Sequence: Synthetic oligonucleotide
uuggcacuacaaaauuucu

SEQ ID NO: 2893865 - RNA, 19 nt, Artificial Sequence
  Description of Artificial Sequence: Synthetic oligonucleotide
aaauuucuugaaaauucaa

SEQ ID NO: 2893866 - RNA, 19 nt, Artificial Sequence
  Description of Artificial Sequence: Synthetic oligonucleotide
uguuauuaagcaagacauu

SEQ ID NO: 2893867 - RNA, 19 nt, Artificial Sequence
  Description of Artificial Sequence: Synthetic oligonucleotide
cuuagaaggcuuaauauau

SEQ ID NO: 2893868 - RNA, 19 nt, Artificial Sequence
  Description of Artificial Sequence: Synthetic oligonucleotide
auuacugcuucaaaagagu

SEQ ID NO: 2893869 - RNA, 19 nt, Artificial Sequence
  Description of Artificial Sequence: Synthetic oligonucleotide
augugauacaauugaacuu

SEQ ID NO: 2893870 - RNA, 19 nt, Artificial Sequence
  Description of Artificial Sequence: Synthetic oligonucleotide
auauuggcacuacaaaauu

SEQ ID NO: 2893871 - RNA, 19 nt, Artificial Sequence
  Description of Artificial Sequence: Synthetic oligonucleotide
uugaaaauucaauguuuua

SEQ ID NO: 2893872 - RNA, 19 nt, Artificial Sequence
  Description of Artificial Sequence: Synthetic oligonucleotide
cauaagaccauaguuaaua

SEQ ID NO: 2893873 - RNA, 19 nt, Artificial Sequence
  Description of Artificial Sequence: Synthetic oligonucleotide
guauaaauguggcucaaua

SEQ ID NO: 2893874 - RNA, 19 nt, Artificial Sequence
  Description of Artificial Sequence: Synthetic oligonucleotide
uuuucuuauauugcuucaa

SEQ ID NO: 2893875 - RNA, 19 nt, Artificial Sequence
  Description of Artificial Sequence: Synthetic oligonucleotide
ugcuucaaaagaguguuau

SEQ ID NO: 2893876 - RNA, 19 nt, Artificial Sequence
  Description of Artificial Sequence: Synthetic oligonucleotide
caacauacacuuucaugug

SEQ ID NO: 2893877 - RNA, 19 nt, Artificial Sequence
  Description of Artificial Sequence: Synthetic oligonucleotide
acugcuucaaaagaguguu

SEQ ID NO: 2893878 - RNA, 19 nt, Artificial Sequence
  Description of Artificial Sequence: Synthetic oligonucleotide
aguuaauacagcacugagu

SEQ ID NO: 2893879 - RNA, 19 nt, Artificial Sequence
  Description of Artificial Sequence: Synthetic oligonucleotide
ucauacagacaguaagaua

SEQ ID NO: 2893880 - RNA, 19 nt, Artificial Sequence
  Description of Artificial Sequence: Synthetic oligonucleotide
ucauauaaguggccucagu

SEQ ID NO: 2893881 - RNA, 19 nt, Artificial Sequence
  Description of Artificial Sequence: Synthetic oligonucleotide
gauaguuuuaaaaggacuu

SEQ ID NO: 2893882 - RNA, 19 nt, Artificial Sequence
  Description of Artificial Sequence: Synthetic oligonucleotide
uucaaaacauaagaccaua

SEQ ID NO: 2893883 - RNA, 19 nt, Artificial Sequence
  Description of Artificial Sequence: Synthetic oligonucleotide
guguuauuaagcaagacau

SEQ ID NO: 2893884 - RNA, 19 nt, Artificial Sequence
  Description of Artificial Sequence: Synthetic oligonucleotide
aaucuuagugugaaauaaa

SEQ ID NO: 2893885 - RNA, 19 nt, Artificial Sequence
  Description of Artificial Sequence: Synthetic oligonucleotide
uuagaaggcuuaauauauu

SEQ ID NO: 2893886 - RNA, 19 nt, Artificial Sequence
  Description of Artificial Sequence: Synthetic oligonucleotide
acuuuugacacuguauaaa

SEQ ID NO: 2893887 - RNA, 19 nt, Artificial Sequence
  Description of Artificial Sequence: Synthetic oligonucleotide
cuuauauugcuucaacaua

SEQ ID NO: 2893888 - RNA, 19 nt, Artificial Sequence
  Description of Artificial Sequence: Synthetic oligonucleotide
aggagacuuuaugacauag

SEQ ID NO: 2893889 - RNA, 19 nt, Artificial Sequence
  Description of Artificial Sequence: Synthetic oligonucleotide
aguggccucaguauuacug

SEQ ID NO: 2893890 - RNA, 19 nt, Artificial Sequence
  Description of Artificial Sequence: Synthetic oligonucleotide
cacugagugcuuagaaggc

SEQ ID NO: 2893891 - RNA, 19 nt, Artificial Sequence
  Description of Artificial Sequence: Synthetic oligonucleotide
aaggacuuuugacacugua

SEQ ID NO: 2893892 - RNA, 19 nt, Artificial Sequence
  Description of Artificial Sequence: Synthetic oligonucleotide
cauauaaguggccucagua

SEQ ID NO: 2893893 - RNA, 19 nt, Artificial Sequence
  Description of Artificial Sequence: Synthetic oligonucleotide
agugugaaauaaagcuugg

SEQ ID NO: 2893894 - RNA, 19 nt, Artificial Sequence
  Description of Artificial Sequence: Synthetic oligonucleotide
aaaugcuuggauacugaaa

SEQ ID NO: 2893895 - RNA, 19 nt, Artificial Sequence
  Description of Artificial Sequence: Synthetic oligonucleotide
guggccucaguauuacugc

SEQ ID NO: 2893896 - RNA, 19 nt, Artificial Sequence
  Description of Artificial Sequence: Synthetic oligonucleotide
uacagcacugagugcuuag

SEQ ID NO: 2893897 - RNA, 19 nt, Artificial Sequence
  Description of Artificial Sequence: Synthetic oligonucleotide
ggcucaauaaauauuggca

SEQ ID NO: 2893898 - RNA, 19 nt, Artificial Sequence
  Description of Artificial Sequence: Synthetic oligonucleotide
caguauuacugcuucaaaa

SEQ ID NO: 2893899 - RNA, 19 nt, Artificial Sequence
  Description of Artificial Sequence: Synthetic oligonucleotide
gacuuuugacacuguauaa

SEQ ID NO: 2893900 - RNA, 19 nt, Artificial Sequence
  Description of Artificial Sequence: Synthetic oligonucleotide
auauaaaugcuuggauacu

SEQ ID NO: 2893901 - RNA, 19 nt, Artificial Sequence
  Description of Artificial Sequence: Synthetic oligonucleotide
acuuauuagcucauacaga

SEQ ID NO: 2893902 - RNA, 19 nt, Artificial Sequence
  Description of Artificial Sequence: Synthetic oligonucleotide
acacuguauaaauguggcu

SEQ ID NO: 2893903 - RNA, 19 nt, Artificial Sequence
  Description of Artificial Sequence: Synthetic oligonucleotide
cagaauuuucauaucauau

SEQ ID NO: 2893904 - RNA, 19 nt, Artificial Sequence
  Description of Artificial Sequence: Synthetic oligonucleotide
auaguuuuaaaaggacuuu

SEQ ID NO: 2893905 - RNA, 19 nt, Artificial Sequence
  Description of Artificial Sequence: Synthetic oligonucleotide
aggucuuauauaauuguaa

SEQ ID NO: 2893906 - RNA, 19 nt, Artificial Sequence
  Description of Artificial Sequence: Synthetic oligonucleotide
caauaaauauuggcacuac

SEQ ID NO: 2893907 - RNA, 19 nt, Artificial Sequence
  Description of Artificial Sequence: Synthetic oligonucleotide
uggcacuacaaaauuucuu

SEQ ID NO: 2893908 - RNA, 19 nt, Artificial Sequence
  Description of Artificial Sequence: Synthetic oligonucleotide
auguaaaauuaaugugaaa

SEQ ID NO: 2893909 - RNA, 19 nt, Artificial Sequence
  Description of Artificial Sequence: Synthetic oligonucleotide
uuuaaccuuaggucuuaua

SEQ ID NO: 2893910 - RNA, 19 nt, Artificial Sequence
  Description of Artificial Sequence: Synthetic oligonucleotide
cuuggauacugaaaaugaa

SEQ ID NO: 2893911 - RNA, 19 nt, Artificial Sequence
  Description of Artificial Sequence: Synthetic oligonucleotide
acacuuucaugugauacaa

SEQ ID NO: 2893912 - RNA, 19 nt, Artificial Sequence
  Description of Artificial Sequence: Synthetic oligonucleotide
gcauauuuauguaaaauua

SEQ ID NO: 2893913 - RNA, 19 nt, Artificial Sequence
  Description of Artificial Sequence: Synthetic oligonucleotide
auaaaugcuuggauacuga

SEQ ID NO: 2893914 - RNA, 19 nt, Artificial Sequence
  Description of Artificial Sequence: Synthetic oligonucleotide
uacagacaguaagauaauc

SEQ ID NO: 2893915 - RNA, 19 nt, Artificial Sequence
  Description of Artificial Sequence: Synthetic oligonucleotide
acuuuaugacauagcuuuc

SEQ ID NO: 2893916 - RNA, 19 nt, Artificial Sequence
  Description of Artificial Sequence: Synthetic oligonucleotide
uaaguggccucaguauuac

SEQ ID NO: 2893917 - RNA, 19 nt, Artificial Sequence
  Description of Artificial Sequence: Synthetic oligonucleotide
ggacuuuugacacuguaua

SEQ ID NO: 2893918 - RNA, 19 nt, Artificial Sequence
  Description of Artificial Sequence: Synthetic oligonucleotide
cuugaaaauucaauguuuu

SEQ ID NO: 2893919 - RNA, 19 nt, Artificial Sequence
  Description of Artificial Sequence: Synthetic oligonucleotide
caaaacauaagaccauagu

SEQ ID NO: 2893920 - RNA, 19 nt, Artificial Sequence
  Description of Artificial Sequence: Synthetic oligonucleotide
guaauugaauuuucuuaua

SEQ ID NO: 2893921 - RNA, 19 nt, Artificial Sequence
  Description of Artificial Sequence: Synthetic oligonucleotide
ugauacaauugaacuuauu

SEQ ID NO: 2893922 - RNA, 19 nt, Artificial Sequence
  Description of Artificial Sequence: Synthetic oligonucleotide
cuuuugacacuguauaaau

SEQ ID NO: 2893923 - RNA, 19 nt, Artificial Sequence
  Description of Artificial Sequence: Synthetic oligonucleotide
ccauuaacuaauaaaauau

SEQ ID NO: 2893924 - RNA, 19 nt, Artificial Sequence
  Description of Artificial Sequence: Synthetic oligonucleotide
guggcucaauaaauauugg

SEQ ID NO: 2893925 - RNA, 19 nt, Artificial Sequence
  Description of Artificial Sequence: Synthetic oligonucleotide
agaguguuauuaagcaaga

SEQ ID NO: 2893926 - RNA, 19 nt, Artificial Sequence
  Description of Artificial Sequence: Synthetic oligonucleotide
augacauagcuuucugaua

SEQ ID NO: 2893927 - RNA, 19 nt, Artificial Sequence
  Description of Artificial Sequence: Synthetic oligonucleotide
ugagugcuuagaaggcuua

SEQ ID NO: 2893928 - RNA, 19 nt, Artificial Sequence
  Description of Artificial Sequence: Synthetic oligonucleotide
cauaucauauaaguggccu

SEQ ID NO: 2893929 - RNA, 19 nt, Artificial Sequence
  Description of Artificial Sequence: Synthetic oligonucleotide
uguauaaauguggcucaau

SEQ ID NO: 2893930 - RNA, 19 nt, Artificial Sequence
  Description of Artificial Sequence: Synthetic oligonucleotide
agaaggcuuaauauauuaa

SEQ ID NO: 2893931 - RNA, 19 nt, Artificial Sequence
  Description of Artificial Sequence: Synthetic oligonucleotide
acugagugcuuagaaggcu

SEQ ID NO: 2893932 - RNA, 19 nt, Artificial Sequence
  Description of Artificial Sequence: Synthetic oligonucleotide
acauacacuuucaugugau

SEQ ID NO: 2893933 - RNA, 19 nt, Artificial Sequence
  Description of Artificial Sequence: Synthetic oligonucleotide
gugcuuagaaggcuuaaua

SEQ ID NO: 2893934 - RNA, 19 nt, Artificial Sequence
  Description of Artificial Sequence: Synthetic oligonucleotide
aucauauaaguggccucag

SEQ ID NO: 2893935 - RNA, 19 nt, Artificial Sequence
  Description of Artificial Sequence: Synthetic oligonucleotide
gaguguuauuaagcaagac

SEQ ID NO: 2893936 - RNA, 19 nt, Artificial Sequence
  Description of Artificial Sequence: Synthetic oligonucleotide
uagcucauacagacaguaa

SEQ ID NO: 2893937 - RNA, 19 nt, Artificial Sequence
  Description of Artificial Sequence: Synthetic oligonucleotide
gcuuagaaggcuuaauaua

SEQ ID NO: 2893938 - RNA, 19 nt, Artificial Sequence
  Description of Artificial Sequence: Synthetic oligonucleotide
agauaaucuuagugugaaa

SEQ ID NO: 2893939 - RNA, 19 nt, Artificial Sequence
  Description of Artificial Sequence: Synthetic oligonucleotide
agacaguaagauaaucuua

SEQ ID NO: 2893940 - RNA, 19 nt, Artificial Sequence
  Description of Artificial Sequence: Synthetic oligonucleotide
uggccucaguauuacugcu

SEQ ID NO: 2893941 - RNA, 19 nt, Artificial Sequence
  Description of Artificial Sequence: Synthetic oligonucleotide
gcuuggauacugaaaauga

SEQ ID NO: 2893942 - RNA, 19 nt, Artificial Sequence
  Description of Artificial Sequence: Synthetic oligonucleotide
uagcuuucugauaguuuua

SEQ ID NO: 2893943 - RNA, 19 nt, Artificial Sequence
  Description of Artificial Sequence: Synthetic oligonucleotide
aggacuuuugacacuguau

SEQ ID NO: 2893944 - RNA, 19 nt, Artificial Sequence
  Description of Artificial Sequence: Synthetic oligonucleotide
aaguggccucaguauuacu

SEQ ID NO: 2893945 - RNA, 19 nt, Artificial Sequence
  Description of Artificial Sequence: Synthetic oligonucleotide
ggucuuauauaauuguaau

SEQ ID NO: 2893946 - RNA, 19 nt, Artificial Sequence
  Description of Artificial Sequence: Synthetic oligonucleotide
gucuuauauaauuguaauu

SEQ ID NO: 2893947 - RNA, 19 nt, Artificial Sequence
  Description of Artificial Sequence: Synthetic oligonucleotide
auucaauguuuuaaccuua

SEQ ID NO: 2893948 - RNA, 19 nt, Artificial Sequence
  Description of Artificial Sequence: Synthetic oligonucleotide
cucaguauuacugcuucaa

SEQ ID NO: 2893949 - RNA, 19 nt, Artificial Sequence
  Description of Artificial Sequence: Synthetic oligonucleotide
cagacaguaagauaaucuu

SEQ ID NO: 2893950 - RNA, 19 nt, Artificial Sequence
  Description of Artificial Sequence: Synthetic oligonucleotide
acauagcuuucugauaguu

SEQ ID NO: 2893951 - RNA, 19 nt, Artificial Sequence
  Description of Artificial Sequence: Synthetic oligonucleotide
agugcuuagaaggcuuaau

SEQ ID NO: 2893952 - RNA, 19 nt, Artificial Sequence
  Description of Artificial Sequence: Synthetic oligonucleotide
agacuuuaugacauagcuu

SEQ ID NO: 2893953 - RNA, 19 nt, Artificial Sequence
  Description of Artificial Sequence: Synthetic oligonucleotide
auaaguggccucaguauua

SEQ ID NO: 2893954 - RNA, 19 nt, Artificial Sequence
  Description of Artificial Sequence: Synthetic oligonucleotide
ggagacuuuaugacauagc

SEQ ID NO: 2893955 - RNA, 19 nt, Artificial Sequence
  Description of Artificial Sequence: Synthetic oligonucleotide
auugaacuuauuagcucau

SEQ ID NO: 2893956 - RNA, 19 nt, Artificial Sequence
  Description of Artificial Sequence: Synthetic oligonucleotide
aauacagcacugagugcuu

SEQ ID NO: 2893957 - RNA, 19 nt, Artificial Sequence
  Description of Artificial Sequence: Synthetic oligonucleotide
uugaacuuauuagcucaua

SEQ ID NO: 2893958 - RNA, 19 nt, Artificial Sequence
  Description of Artificial Sequence: Synthetic oligonucleotide
cuuuaugacauagcuuucu

SEQ ID NO: 2893959 - RNA, 19 nt, Artificial Sequence
  Description of Artificial Sequence: Synthetic oligonucleotide
ggaaaccauuaacuaauaa

SEQ ID NO: 2893960 - RNA, 19 nt, Artificial Sequence
  Description of Artificial Sequence: Synthetic oligonucleotide
auuagcucauacagacagu

SEQ ID NO: 2893961 - RNA, 19 nt, Artificial Sequence
  Description of Artificial Sequence: Synthetic oligonucleotide
ccauaguuaauacagcacu

SEQ ID NO: 2893962 - RNA, 19 nt, Artificial Sequence
  Description of Artificial Sequence: Synthetic oligonucleotide
uuuuaaccuuaggucuuau

SEQ ID NO: 2893963 - RNA, 19 nt, Artificial Sequence
  Description of Artificial Sequence: Synthetic oligonucleotide
aaaggacuuuugacacugu

SEQ ID NO: 2893964 - RNA, 19 nt, Artificial Sequence
  Description of Artificial Sequence: Synthetic oligonucleotide
gcucauacagacaguaaga

SEQ ID NO: 2893965 - RNA, 19 nt, Artificial Sequence
  Description of Artificial Sequence: Synthetic oligonucleotide
gccucaguauuacugcuuc

SEQ ID NO: 2893966 - RNA, 19 nt, Artificial Sequence
  Description of Artificial Sequence: Synthetic oligonucleotide
acagcacugagugcuuaga

SEQ ID NO: 2893967 - RNA, 19 nt, Artificial Sequence
  Description of Artificial Sequence: Synthetic oligonucleotide
auguggcucaauaaauauu

SEQ ID NO: 2893968 - RNA, 19 nt, Artificial Sequence
  Description of Artificial Sequence: Synthetic oligonucleotide
agacauuacaggagacuuu

SEQ ID NO: 2893969 - RNA, 19 nt, Artificial Sequence
  Description of Artificial Sequence: Synthetic oligonucleotide
acauaagaccauaguuaau

SEQ ID NO: 2893970 - RNA, 19 nt, Artificial Sequence
  Description of Artificial Sequence: Synthetic oligonucleotide
caagacauuacaggagacu

SEQ ID NO: 2893971 - RNA, 19 nt, Artificial Sequence
  Description of Artificial Sequence: Synthetic oligonucleotide
uugcuucaacauacacuuu

SEQ ID NO: 2893972 - RNA, 19 nt, Artificial Sequence
  Description of Artificial Sequence: Synthetic oligonucleotide
gcuucaacauacacuuuca

SEQ ID NO: 2893973 - RNA, 19 nt, Artificial Sequence
  Description of Artificial Sequence: Synthetic oligonucleotide
cucauacagacaguaagau

SEQ ID NO: 2893974 - RNA, 19 nt, Artificial Sequence
  Description of Artificial Sequence: Synthetic oligonucleotide
cauacacuuucaugugaua

SEQ ID NO: 2893975 - RNA, 19 nt, Artificial Sequence
  Description of Artificial Sequence: Synthetic oligonucleotide
guuuuaaccuuaggucuua

SEQ ID NO: 2893976 - RNA, 19 nt, Artificial Sequence
  Description of Artificial Sequence: Synthetic oligonucleotide
cauagcuuucugauaguuu

SEQ ID NO: 2893977 - RNA, 19 nt, Artificial Sequence
  Description of Artificial Sequence: Synthetic oligonucleotide
cagcacugagugcuuagaa

SEQ ID NO: 2893978 - RNA, 19 nt, Artificial Sequence
  Description of Artificial Sequence: Synthetic oligonucleotide
aggaaaccauuaacuaaua

SEQ ID NO: 2893979 - RNA, 19 nt, Artificial Sequence
  Description of Artificial Sequence: Synthetic oligonucleotide
gagugcuuagaaggcuuaa

SEQ ID NO: 2893980 - RNA, 19 nt, Artificial Sequence
  Description of Artificial Sequence: Synthetic oligonucleotide
gcaagacauuacaggagac

SEQ ID NO: 2893981 - RNA, 19 nt, Artificial Sequence
  Description of Artificial Sequence: Synthetic oligonucleotide
cuucaacauacacuuucau

SEQ ID NO: 2893982 - RNA, 19 nt, Artificial Sequence
  Description of Artificial Sequence: Synthetic oligonucleotide
accuuaggucuuauauaau

SEQ ID NO: 2893983 - RNA, 19 nt, Artificial Sequence
  Description of Artificial Sequence: Synthetic oligonucleotide
gugugaaauaaagcuuggu

SEQ ID NO: 2893984 - RNA, 19 nt, Artificial Sequence
  Description of Artificial Sequence: Synthetic oligonucleotide
ccuuaggucuuauauaauu

SEQ ID NO: 2893985 - RNA, 19 nt, Artificial Sequence
  Description of Artificial Sequence: Synthetic oligonucleotide
gcuuucugauaguuuuaaa

SEQ ID NO: 2893986 - RNA, 19 nt, Artificial Sequence
  Description of Artificial Sequence: Synthetic oligonucleotide
cugagugcuuagaaggcuu

SEQ ID NO: 2893987 - RNA, 19 nt, Artificial Sequence
  Description of Artificial Sequence: Synthetic oligonucleotide
auacagcacugagugcuua

SEQ ID NO: 2893988 - RNA, 19 nt, Artificial Sequence
  Description of Artificial Sequence: Synthetic oligonucleotide
cuguauaaauguggcucaa

SEQ ID NO: 2893989 - RNA, 19 nt, Artificial Sequence
  Description of Artificial Sequence: Synthetic oligonucleotide
cugcuucaaaagaguguua

SEQ ID NO: 2893990 - RNA, 19 nt, Artificial Sequence
  Description of Artificial Sequence: Synthetic oligonucleotide
caggagacuuuaugacaua

SEQ ID NO: 2893991 - RNA, 19 nt, Artificial Sequence
  Description of Artificial Sequence: Synthetic oligonucleotide
gugauacaauugaacuuau

SEQ ID NO: 2893992 - RNA, 19 nt, Artificial Sequence
  Description of Artificial Sequence: Synthetic oligonucleotide
gcuucaaaagaguguuauu

SEQ ID NO: 2893993 - RNA, 19 nt, Artificial Sequence
  Description of Artificial Sequence: Synthetic oligonucleotide
cacuuucaugugauacaau

SEQ ID NO: 2893994 - RNA, 19 nt, Artificial Sequence
  Description of Artificial Sequence: Synthetic oligonucleotide
ggccucaguauuacugcuu

SEQ ID NO: 2893995 - RNA, 19 nt, Artificial Sequence
  Description of Artificial Sequence: Synthetic oligonucleotide
auuggcaucagccaaagac

SEQ ID NO: 2893996 - RNA, 19 nt, Artificial Sequence
  Description of Artificial Sequence: Synthetic oligonucleotide
aaacgcaucacccuuacug

SEQ ID NO: 2893997 - RNA, 19 nt, Artificial Sequence
  Description of Artificial Sequence: Synthetic oligonucleotide
agaugcaaggaccacagcc

SEQ ID NO: 2893998 - RNA, 19 nt, Artificial Sequence
  Description of Artificial Sequence: Synthetic oligonucleotide
aucaacaccaguaagacac

SEQ ID NO: 2893999 - RNA, 19 nt, Artificial Sequence
  Description of Artificial Sequence: Synthetic oligonucleotide
ugaugaaauguccauacag

SEQ ID NO: 2894000 - RNA, 19 nt, Artificial Sequence
  Description of Artificial Sequence: Synthetic oligonucleotide
augaaauguccauacaggc

SEQ ID NO: 2894001 - RNA, 19 nt, Artificial Sequence
  Description of Artificial Sequence: Synthetic oligonucleotide
acauugaggcaauaggucc

SEQ ID NO: 2894002 - RNA, 19 nt, Artificial Sequence
  Description of Artificial Sequence: Synthetic oligonucleotide
gacacagucagcucaaacg

SEQ ID NO: 2894003 - RNA, 19 nt, Artificial Sequence
  Description of Artificial Sequence: Synthetic oligonucleotide
aauacccuggacaaugucc

SEQ ID NO: 2894004 - RNA, 19 nt, Artificial Sequence
  Description of Artificial Sequence: Synthetic oligonucleotide
uauacaucagagaugcaag

SEQ ID NO: 2894005 - RNA, 19 nt, Artificial Sequence
  Description of Artificial Sequence: Synthetic oligonucleotide
aggaacaacaauuugggug

SEQ ID NO: 2894006 - RNA, 19 nt, Artificial Sequence
  Description of Artificial Sequence: Synthetic oligonucleotide
uaagacaccuacaagcaag

SEQ ID NO: 2894007 - RNA, 19 nt, Artificial Sequence
  Description of Artificial Sequence: Synthetic oligonucleotide
acacagucagcucaaacgc

SEQ ID NO: 2894008 - RNA, 19 nt, Artificial Sequence
  Description of Artificial Sequence: Synthetic oligonucleotide
gacacauugaggcaauagg

SEQ ID NO: 2894009 - RNA, 19 nt, Artificial Sequence
  Description of Artificial Sequence: Synthetic oligonucleotide
auuuucaauacccuggaca

SEQ ID NO: 2894010 - RNA, 19 nt, Artificial Sequence
  Description of Artificial Sequence: Synthetic oligonucleotide
gaugaaauguccauacagg

SEQ ID NO: 2894011 - RNA, 19 nt, Artificial Sequence
  Description of Artificial Sequence: Synthetic oligonucleotide
aagcaagggagccugcccc

SEQ ID NO: 2894012 - RNA, 19 nt, Artificial Sequence
  Description of Artificial Sequence: Synthetic oligonucleotide
aacgcaucacccuuacugg

SEQ ID NO: 2894013 - RNA, 19 nt, Artificial Sequence
  Description of Artificial Sequence: Synthetic oligonucleotide
uugguguaggaccagcugg

SEQ ID NO: 2894014 - RNA, 19 nt, Artificial Sequence
  Description of Artificial Sequence: Synthetic oligonucleotide
uuuucaauacccuggacaa

SEQ ID NO: 2894015 - RNA, 19 nt, Artificial Sequence
  Description of Artificial Sequence: Synthetic oligonucleotide
cucagcauuuucaauaccc

SEQ ID NO: 2894016 - RNA, 19 nt, Artificial Sequence
  Description of Artificial Sequence: Synthetic oligonucleotide
acaucagagaugcaaggac

SEQ ID NO: 2894017 - RNA, 19 nt, Artificial Sequence
  Description of Artificial Sequence: Synthetic oligonucleotide
acaccaguaagacaccuac

SEQ ID NO: 2894018 - RNA, 19 nt, Artificial Sequence
  Description of Artificial Sequence: Synthetic oligonucleotide
caggcuauuggcaucagcc

SEQ ID NO: 2894019 - RNA, 19 nt, Artificial Sequence
  Description of Artificial Sequence: Synthetic oligonucleotide
uugaccaggaacaacaauu

SEQ ID NO: 2894020 - RNA, 19 nt, Artificial Sequence
  Description of Artificial Sequence: Synthetic oligonucleotide
acaauguccagggugaggg

SEQ ID NO: 2894021 - RNA, 19 nt, Artificial Sequence
  Description of Artificial Sequence: Synthetic oligonucleotide
aaggaccacagccaucaac

SEQ ID NO: 2894022 - RNA, 19 nt, Artificial Sequence
  Description of Artificial Sequence: Synthetic oligonucleotide
aucucagcauuuucaauac

SEQ ID NO: 2894023 - RNA, 19 nt, Artificial Sequence
  Description of Artificial Sequence: Synthetic oligonucleotide
ugaaauguccauacaggcu

SEQ ID NO: 2894024 - RNA, 19 nt, Artificial Sequence
  Description of Artificial Sequence: Synthetic oligonucleotide
cuuggcaggacacagucag

SEQ ID NO: 2894025 - RNA, 19 nt, Artificial Sequence
  Description of Artificial Sequence: Synthetic oligonucleotide
uucaauacccuggacaaug

SEQ ID NO: 2894026 - RNA, 19 nt, Artificial Sequence
  Description of Artificial Sequence: Synthetic oligonucleotide
acaccuacaagcaagggag

SEQ ID NO: 2894027 - RNA, 19 nt, Artificial Sequence
  Description of Artificial Sequence: Synthetic oligonucleotide
accaggaacaacaauuugg

SEQ ID NO: 2894028 - RNA, 19 nt, Artificial Sequence
  Description of Artificial Sequence: Synthetic oligonucleotide
auacaucagagaugcaagg

SEQ ID NO: 2894029 - RNA, 19 nt, Artificial Sequence
  Description of Artificial Sequence: Synthetic oligonucleotide
agcauuuucaauacccugg

SEQ ID NO: 2894030 - RNA, 19 nt, Artificial Sequence
  Description of Artificial Sequence: Synthetic oligonucleotide
cuuacuggaugucacggcc

SEQ ID NO: 2894031 - RNA, 19 nt, Artificial Sequence
  Description of Artificial Sequence: Synthetic oligonucleotide
uggacaauguccaggguga

SEQ ID NO: 2894032 - RNA, 19 nt, Artificial Sequence
  Description of Artificial Sequence: Synthetic oligonucleotide
caucagagaugcaaggacc

SEQ ID NO: 2894033 - RNA, 19 nt, Artificial Sequence
  Description of Artificial Sequence: Synthetic oligonucleotide
aagggagccugccccaggc

SEQ ID NO: 2894034 - RNA, 19 nt, Artificial Sequence
  Description of Artificial Sequence: Synthetic oligonucleotide
aucagccaaagacacauug

SEQ ID NO: 2894035 - RNA, 19 nt, Artificial Sequence
  Description of Artificial Sequence: Synthetic oligonucleotide
cagagcuugguguaggacc

SEQ ID NO: 2894036 - RNA, 19 nt, Artificial Sequence
  Description of Artificial Sequence: Synthetic oligonucleotide
acaacaauuugggugcugg

SEQ ID NO: 2894037 - RNA, 19 nt, Artificial Sequence
  Description of Artificial Sequence: Synthetic oligonucleotide
gacuugguggcacaggcug

SEQ ID NO: 2894038 - RNA, 19 nt, Artificial Sequence
  Description of Artificial Sequence: Synthetic oligonucleotide
ucagcauuuucaauacccu

SEQ ID NO: 2894039 - RNA, 19 nt, Artificial Sequence
  Description of Artificial Sequence: Synthetic oligonucleotide
uggacuugguggcacaggc

SEQ ID NO: 2894040 - RNA, 19 nt, Artificial Sequence
  Description of Artificial Sequence: Synthetic oligonucleotide
aacaauuugggugcuggcu

SEQ ID NO: 2894041 - RNA, 19 nt, Artificial Sequence
  Description of Artificial Sequence: Synthetic oligonucleotide
aauguccauacaggcuucc

SEQ ID NO: 2894042 - RNA, 19 nt, Artificial Sequence
  Description of Artificial Sequence: Synthetic oligonucleotide
aggcaauaggucccggagc

SEQ ID NO: 2894043 - RNA, 19 nt, Artificial Sequence
  Description of Artificial Sequence: Synthetic oligonucleotide
ucagccaaagacacauuga

SEQ ID NO: 2894044 - RNA, 19 nt, Artificial Sequence
  Description of Artificial Sequence: Synthetic oligonucleotide
cauugaggcaauagguccc

SEQ ID NO: 2894045 - RNA, 19 nt, Artificial Sequence
  Description of Artificial Sequence: Synthetic oligonucleotide
gaggcaauaggucccggag

SEQ ID NO: 2894046 - RNA, 19 nt, Artificial Sequence
  Description of Artificial Sequence: Synthetic oligonucleotide
aagacaccuacaagcaagg

SEQ ID NO: 2894047 - RNA, 19 nt, Artificial Sequence
  Description of Artificial Sequence: Synthetic oligonucleotide
cagccaaagacacauugag

SEQ ID NO: 2894048 - RNA, 19 nt, Artificial Sequence
  Description of Artificial Sequence: Synthetic oligonucleotide
gacaccuacaagcaaggga

SEQ ID NO: 2894049 - RNA, 19 nt, Artificial Sequence
  Description of Artificial Sequence: Synthetic oligonucleotide
gaugucacggccugcagga

SEQ ID NO: 2894050 - RNA, 19 nt, Artificial Sequence
  Description of Artificial Sequence: Synthetic oligonucleotide
accuuucagagcuuggugu

SEQ ID NO: 2894051 - RNA, 19 nt, Artificial Sequence
  Description of Artificial Sequence: Synthetic oligonucleotide
cuggacaauguccagggug

SEQ ID NO: 2894052 - RNA, 19 nt, Artificial Sequence
  Description of Artificial Sequence: Synthetic oligonucleotide
uccauacaggcuuccuugg

SEQ ID NO: 2894053 - RNA, 19 nt, Artificial Sequence
  Description of Artificial Sequence: Synthetic oligonucleotide
ccaggaacaacaauuuggg

SEQ ID NO: 2894054 - RNA, 19 nt, Artificial Sequence
  Description of Artificial Sequence: Synthetic oligonucleotide
ggugaugaaauguccauac

SEQ ID NO: 2894055 - RNA, 19 nt, Artificial Sequence
  Description of Artificial Sequence: Synthetic oligonucleotide
ucggcguuugggaaacagg

SEQ ID NO: 2894056 - RNA, 19 nt, Artificial Sequence
  Description of Artificial Sequence: Synthetic oligonucleotide
cacauugaggcaauagguc

SEQ ID NO: 2894057 - RNA, 19 nt, Artificial Sequence
  Description of Artificial Sequence: Synthetic oligonucleotide
ggcagucuggacuuggugg

SEQ ID NO: 2894058 - RNA, 19 nt, Artificial Sequence
  Description of Artificial Sequence: Synthetic oligonucleotide
gaaauguccauacaggcuu

SEQ ID NO: 2894059 - RNA, 19 nt, Artificial Sequence
  Description of Artificial Sequence: Synthetic oligonucleotide
accuacaagcaagggagcc

SEQ ID NO: 2894060 - RNA, 19 nt, Artificial Sequence
  Description of Artificial Sequence: Synthetic oligonucleotide
uuucagagcuugguguagg

SEQ ID NO: 2894061 - RNA, 19 nt, Artificial Sequence
  Description of Artificial Sequence: Synthetic oligonucleotide
guccauacaggcuuccuug

SEQ ID NO: 2894062 - RNA, 19 nt, Artificial Sequence
  Description of Artificial Sequence: Synthetic oligonucleotide
aguaagacaccuacaagca

SEQ ID NO: 2894063 - RNA, 19 nt, Artificial Sequence
  Description of Artificial Sequence: Synthetic oligonucleotide
uugggugcuggcuacugcc

SEQ ID NO: 2894064 - RNA, 19 nt, Artificial Sequence
  Description of Artificial Sequence: Synthetic oligonucleotide
ugguguaggaccagcuggc

SEQ ID NO: 2894065 - RNA, 19 nt, Artificial Sequence
  Description of Artificial Sequence: Synthetic oligonucleotide
gcuacugccaggcuauugg

SEQ ID NO: 2894066 - RNA, 19 nt, Artificial Sequence
  Description of Artificial Sequence: Synthetic oligonucleotide
gaaacaggccccugcuucc

SEQ ID NO: 2894067 - RNA, 19 nt, Artificial Sequence
  Description of Artificial Sequence: Synthetic oligonucleotide
gccuauacaucagagaugc

SEQ ID NO: 2894068 - RNA, 19 nt, Artificial Sequence
  Description of Artificial Sequence: Synthetic oligonucleotide
uacaucagagaugcaagga

SEQ ID NO: 2894069 - RNA, 19 nt, Artificial Sequence
  Description of Artificial Sequence: Synthetic oligonucleotide
ugaccaggaacaacaauuu

SEQ ID NO: 2894070 - RNA, 19 nt, Artificial Sequence
  Description of Artificial Sequence: Synthetic oligonucleotide
acacauugaggcaauaggu

SEQ ID NO: 2894071 - RNA, 19 nt, Artificial Sequence
  Description of Artificial Sequence: Synthetic oligonucleotide
cagcucaaacgcaucaccc

SEQ ID NO: 2894072 - RNA, 19 nt, Artificial Sequence
  Description of Artificial Sequence: Synthetic oligonucleotide
ucaaacgcaucacccuuac

SEQ ID NO: 2894073 - RNA, 19 nt, Artificial Sequence
  Description of Artificial Sequence: Synthetic oligonucleotide
cuauacaucagagaugcaa

SEQ ID NO: 2894074 - RNA, 19 nt, Artificial Sequence
  Description of Artificial Sequence: Synthetic oligonucleotide
ugcuucccaagccugcgcc

SEQ ID NO: 2894075 - RNA, 19 nt, Artificial Sequence
  Description of Artificial Sequence: Synthetic oligonucleotide
acaauuugggugcuggcua

SEQ ID NO: 2894076 - RNA, 19 nt, Artificial Sequence
  Description of Artificial Sequence: Synthetic oligonucleotide
aaauguccauacaggcuuc

SEQ ID NO: 2894077 - RNA, 19 nt, Artificial Sequence
  Description of Artificial Sequence: Synthetic oligonucleotide
aggaccacagccaucaaca

SEQ ID NO: 2894078 - RNA, 19 nt, Artificial Sequence
  Description of Artificial Sequence: Synthetic oligonucleotide
acaagcaagggagccugcc

SEQ ID NO: 2894079 - RNA, 19 nt, Artificial Sequence
  Description of Artificial Sequence: Synthetic oligonucleotide
aaacaggccccugcuuccc

SEQ ID NO: 2894080 - RNA, 19 nt, Artificial Sequence
  Description of Artificial Sequence: Synthetic oligonucleotide
ucaacaccaguaagacacc

SEQ ID NO: 2894081 - RNA, 19 nt, Artificial Sequence
  Description of Artificial Sequence: Synthetic oligonucleotide
aauaggucccggagccacc

SEQ ID NO: 2894082 - RNA, 19 nt, Artificial Sequence
  Description of Artificial Sequence: Synthetic oligonucleotide
agucagcucaaacgcauca

SEQ ID NO: 2894083 - RNA, 19 nt, Artificial Sequence
  Description of Artificial Sequence: Synthetic oligonucleotide
ucaauacccuggacaaugu

SEQ ID NO: 2894084 - RNA, 19 nt, Artificial Sequence
  Description of Artificial Sequence: Synthetic oligonucleotide
uuugggugcuggcuacugc

SEQ ID NO: 2894085 - RNA, 19 nt, Artificial Sequence
  Description of Artificial Sequence: Synthetic oligonucleotide
ggcaauaggucccggagcc

SEQ ID NO: 2894086 - RNA, 19 nt, Artificial Sequence
  Description of Artificial Sequence: Synthetic oligonucleotide
uuacuggaugucacggccu

SEQ ID NO: 2894087 - RNA, 19 nt, Artificial Sequence
  Description of Artificial Sequence: Synthetic oligonucleotide
auugaggcaauaggucccg

SEQ ID NO: 2894088 - RNA, 19 nt, Artificial Sequence
  Description of Artificial Sequence: Synthetic oligonucleotide
uacuggaugucacggccug

SEQ ID NO: 2894089 - RNA, 19 nt, Artificial Sequence
  Description of Artificial Sequence: Synthetic oligonucleotide
agacacauugaggcaauag

SEQ ID NO: 2894090 - RNA, 19 nt, Artificial Sequence
  Description of Artificial Sequence: Synthetic oligonucleotide
cagcauuuucaauacccug

SEQ ID NO: 2894091 - RNA, 19 nt, Artificial Sequence
  Description of Artificial Sequence: Synthetic oligonucleotide
ugcgccuauacaucagaga

SEQ ID NO: 2894092 - RNA, 19 nt, Artificial Sequence
  Description of Artificial Sequence: Synthetic oligonucleotide
agcucaaacgcaucacccu

SEQ ID NO: 2894093 - RNA, 19 nt, Artificial Sequence
  Description of Artificial Sequence: Synthetic oligonucleotide
aauguccagggugagggaa

SEQ ID NO: 2894094 - RNA, 19 nt, Artificial Sequence
  Description of Artificial Sequence: Synthetic oligonucleotide
agccaucaacaccaguaag

SEQ ID NO: 2894095 - RNA, 19 nt, Artificial Sequence
  Description of Artificial Sequence: Synthetic oligonucleotide
gaccaggaacaacaauuug

SEQ ID NO: 2894096 - RNA, 19 nt, Artificial Sequence
  Description of Artificial Sequence: Synthetic oligonucleotide
acugccaggcuauuggcau

SEQ ID NO: 2894097 - RNA, 19 nt, Artificial Sequence
  Description of Artificial Sequence: Synthetic oligonucleotide
aggaucucagcauuuucaa

SEQ ID NO: 2894098 - RNA, 19 nt, Artificial Sequence
  Description of Artificial Sequence: Synthetic oligonucleotide
uacaggcuuccuuggguag

SEQ ID NO: 2894099 - RNA, 19 nt, Artificial Sequence
  Description of Artificial Sequence: Synthetic oligonucleotide
cuugguguaggaccagcug

SEQ ID NO: 2894100 - RNA, 19 nt, Artificial Sequence
  Description of Artificial Sequence: Synthetic oligonucleotide
acccuuacuggaugucacg

SEQ ID NO: 2894101 - RNA, 19 nt, Artificial Sequence
  Description of Artificial Sequence: Synthetic oligonucleotide
caggaucucagcauuuuca

SEQ ID NO: 2894102 - RNA, 19 nt, Artificial Sequence
  Description of Artificial Sequence: Synthetic oligonucleotide
gacaauguccagggugagg

SEQ ID NO: 2894103 - RNA, 19 nt, Artificial Sequence
  Description of Artificial Sequence: Synthetic oligonucleotide
agccaaagacacauugagg

SEQ ID NO: 2894104 - RNA, 19 nt, Artificial Sequence
  Description of Artificial Sequence: Synthetic oligonucleotide
aagccugcgccuauacauc

SEQ ID NO: 2894105 - RNA, 19 nt, Artificial Sequence
  Description of Artificial Sequence: Synthetic oligonucleotide
ugaggcaauaggucccgga

SEQ ID NO: 2894106 - RNA, 19 nt, Artificial Sequence
  Description of Artificial Sequence: Synthetic oligonucleotide
ucuugaccaggaacaacaa

SEQ ID NO: 2894107 - RNA, 19 nt, Artificial Sequence
  Description of Artificial Sequence: Synthetic oligonucleotide
gcguuugggaaacaggccc

SEQ ID NO: 2894108 - RNA, 19 nt, Artificial Sequence
  Description of Artificial Sequence: Synthetic oligonucleotide
acaggcuuccuuggguagc

SEQ ID NO: 2894109 - RNA, 19 nt, Artificial Sequence
  Description of Artificial Sequence: Synthetic oligonucleotide
uguccauacaggcuuccuu

SEQ ID NO: 2894110 - RNA, 19 nt, Artificial Sequence
  Description of Artificial Sequence: Synthetic oligonucleotide
acagccaucaacaccagua

SEQ ID NO: 2894111 - RNA, 19 nt, Artificial Sequence
  Description of Artificial Sequence: Synthetic oligonucleotide
caauuugggugcuggcuac

SEQ ID NO: 2894112 - RNA, 19 nt, Artificial Sequence
  Description of Artificial Sequence: Synthetic oligonucleotide
cuacaagcaagggagccug

SEQ ID NO: 2894113 - RNA, 19 nt, Artificial Sequence
  Description of Artificial Sequence: Synthetic oligonucleotide
uggcaggacacagucagcu

SEQ ID NO: 2894114 - RNA, 19 nt, Artificial Sequence
  Description of Artificial Sequence: Synthetic oligonucleotide
aggaccagcuggcagucug

SEQ ID NO: 2894115 - RNA, 19 nt, Artificial Sequence
  Description of Artificial Sequence: Synthetic oligonucleotide
cuacugccaggcuauuggc

SEQ ID NO: 2894116 - RNA, 19 nt, Artificial Sequence
  Description of Artificial Sequence: Synthetic oligonucleotide
auacccuggacaaugucca

SEQ ID NO: 2894117 - RNA, 19 nt, Artificial Sequence
  Description of Artificial Sequence: Synthetic oligonucleotide
caagcaagggagccugccc

SEQ ID NO: 2894118 - RNA, 19 nt, Artificial Sequence
  Description of Artificial Sequence: Synthetic oligonucleotide
caacaauuugggugcuggc

SEQ ID NO: 2894119 - RNA, 19 nt, Artificial Sequence
  Description of Artificial Sequence: Synthetic oligonucleotide
uggguagcccgccuuggca

SEQ ID NO: 2894120 - RNA, 19 nt, Artificial Sequence
  Description of Artificial Sequence: Synthetic oligonucleotide
uucggcguuugggaaacag

SEQ ID NO: 2894121 - RNA, 19 nt, Artificial Sequence
  Description of Artificial Sequence: Synthetic oligonucleotide
aggcuauuggcaucagcca

SEQ ID NO: 2894122 - RNA, 19 nt, Artificial Sequence
  Description of Artificial Sequence: Synthetic oligonucleotide
agugggugcuggccguucg

SEQ ID NO: 2894123 - RNA, 19 nt, Artificial Sequence
  Description of Artificial Sequence: Synthetic oligonucleotide
agcuugguguaggaccagc

SEQ ID NO: 2894124 - RNA, 19 nt, Artificial Sequence
  Description of Artificial Sequence: Synthetic oligonucleotide
uucagagcuugguguagga

SEQ ID NO: 2894125 - RNA, 19 nt, Artificial Sequence
  Description of Artificial Sequence: Synthetic oligonucleotide
ucacccuuacuggauguca

SEQ ID NO: 2894126 - RNA, 19 nt, Artificial Sequence
  Description of Artificial Sequence: Synthetic oligonucleotide
uggcagucuggacuuggug

SEQ ID NO: 2894127 - RNA, 19 nt, Artificial Sequence
  Description of Artificial Sequence: Synthetic oligonucleotide
ggaugucacggccugcagg

SEQ ID NO: 2894128 - RNA, 19 nt, Artificial Sequence
  Description of Artificial Sequence: Synthetic oligonucleotide
aucagagaugcaaggacca

SEQ ID NO: 2894129 - RNA, 19 nt, Artificial Sequence
  Description of Artificial Sequence: Synthetic oligonucleotide
aacaacaauuugggugcug

SEQ ID NO: 2894130 - RNA, 19 nt, Artificial Sequence
  Description of Artificial Sequence: Synthetic oligonucleotide
auacaggcuuccuugggua

SEQ ID NO: 2894131 - RNA, 19 nt, Artificial Sequence
  Description of Artificial Sequence: Synthetic oligonucleotide
caaagacacauugaggcaa

SEQ ID NO: 2894132 - RNA, 19 nt, Artificial Sequence
  Description of Artificial Sequence: Synthetic oligonucleotide
ugucacggccugcaggauc

SEQ ID NO: 2894133 - RNA, 19 nt, Artificial Sequence
  Description of Artificial Sequence: Synthetic oligonucleotide
agucuggacuugguggcac

SEQ ID NO: 2894134 - RNA, 19 nt, Artificial Sequence
  Description of Artificial Sequence: Synthetic oligonucleotide
agagcuugguguaggacca

SEQ ID NO: 2894135 - RNA, 19 nt, Artificial Sequence
  Description of Artificial Sequence: Synthetic oligonucleotide
aaagacacauugaggcaau

SEQ ID NO: 2894136 - RNA, 19 nt, Artificial Sequence
  Description of Artificial Sequence: Synthetic oligonucleotide
ggagccaccuuucagagcu

SEQ ID NO: 2894137 - RNA, 19 nt, Artificial Sequence
  Description of Artificial Sequence: Synthetic oligonucleotide
cauuuucaauacccuggac

SEQ ID NO: 2894138 - RNA, 19 nt, Artificial Sequence
  Description of Artificial Sequence: Synthetic oligonucleotide
cugcgccuauacaucagag

SEQ ID NO: 2894139 - RNA, 19 nt, Artificial Sequence
  Description of Artificial Sequence: Synthetic oligonucleotide
uggccguucggcguuuggg

SEQ ID NO: 2894140 - RNA, 19 nt, Artificial Sequence
  Description of Artificial Sequence: Synthetic oligonucleotide
acccuggugaugaaauguc

SEQ ID NO: 2894141 - RNA, 19 nt, Artificial Sequence
  Description of Artificial Sequence: Synthetic oligonucleotide
ucuggacuugguggcacag

SEQ ID NO: 2894142 - RNA, 19 nt, Artificial Sequence
  Description of Artificial Sequence: Synthetic oligonucleotide
uuggguagcccgccuuggc

SEQ ID NO: 2894143 - RNA, 19 nt, Artificial Sequence
  Description of Artificial Sequence: Synthetic oligonucleotide
acccuggacaauguccagg

SEQ ID NO: 2894144 - RNA, 19 nt, Artificial Sequence
  Description of Artificial Sequence: Synthetic oligonucleotide
uggcacagccucugggcag

SEQ ID NO: 2894145 - RNA, 19 nt, Artificial Sequence
  Description of Artificial Sequence: Synthetic oligonucleotide
caauaggucccggagccac

SEQ ID NO: 2894146 - RNA, 19 nt, Artificial Sequence
  Description of Artificial Sequence: Synthetic oligonucleotide
aggcgcagccagugggugc

SEQ ID NO: 2894147 - RNA, 19 nt, Artificial Sequence
  Description of Artificial Sequence: Synthetic oligonucleotide
uggaugucacggccugcag

SEQ ID NO: 2894148 - RNA, 19 nt, Artificial Sequence
  Description of Artificial Sequence: Synthetic oligonucleotide
cacccuuacuggaugucac

SEQ ID NO: 2894149 - RNA, 19 nt, Artificial Sequence
  Description of Artificial Sequence: Synthetic oligonucleotide
ucccggagccaccuuucag

SEQ ID NO: 2894150 - RNA, 19 nt, Artificial Sequence
  Description of Artificial Sequence: Synthetic oligonucleotide
aggccccugcuucccaagc

SEQ ID NO: 2894151 - RNA, 19 nt, Artificial Sequence
  Description of Artificial Sequence: Synthetic oligonucleotide
accagcuggcagucuggac

SEQ ID NO: 2894152 - RNA, 19 nt, Artificial Sequence
  Description of Artificial Sequence: Synthetic oligonucleotide
uuggcaggacacagucagc

SEQ ID NO: 2894153 - RNA, 19 nt, Artificial Sequence
  Description of Artificial Sequence: Synthetic oligonucleotide
uauuggcaucagccaaaga

SEQ ID NO: 2894154 - RNA, 19 nt, Artificial Sequence
  Description of Artificial Sequence: Synthetic oligonucleotide
uacaagcaagggagccugc

SEQ ID NO: 2894155 - RNA, 19 nt, Artificial Sequence
  Description of Artificial Sequence: Synthetic oligonucleotide
aauuugggugcuggcuacu

SEQ ID NO: 2894156 - RNA, 19 nt, Artificial Sequence
  Description of Artificial Sequence: Synthetic oligonucleotide
gugaugaaauguccauaca

SEQ ID NO: 2894157 - RNA, 19 nt, Artificial Sequence
  Description of Artificial Sequence: Synthetic oligonucleotide
ucagagcuugguguaggac

SEQ ID NO: 2894158 - RNA, 19 nt, Artificial Sequence
  Description of Artificial Sequence: Synthetic oligonucleotide
cuugguggcacaggcuggc

SEQ ID NO: 2894159 - RNA, 19 nt, Artificial Sequence
  Description of Artificial Sequence: Synthetic oligonucleotide
guaagacaccuacaagcaa

SEQ ID NO: 2894160 - RNA, 19 nt, Artificial Sequence
  Description of Artificial Sequence: Synthetic oligonucleotide
ugguggcacaggcuggcac

SEQ ID NO: 2894161 - RNA, 19 nt, Artificial Sequence
  Description of Artificial Sequence: Synthetic oligonucleotide
agacaccuacaagcaaggg

SEQ ID NO: 2894162 - RNA, 19 nt, Artificial Sequence
  Description of Artificial Sequence: Synthetic oligonucleotide
cccuggacaauguccaggg

SEQ ID NO: 2894163 - RNA, 19 nt, Artificial Sequence
  Description of Artificial Sequence: Synthetic oligonucleotide
uggugaugaaauguccaua

SEQ ID NO: 2894164 - RNA, 19 nt, Artificial Sequence
  Description of Artificial Sequence: Synthetic oligonucleotide
augcaaggaccacagccau

SEQ ID NO: 2894165 - RNA, 19 nt, Artificial Sequence
  Description of Artificial Sequence: Synthetic oligonucleotide
ugggugcuggcuacugcca

SEQ ID NO: 2894166 - RNA, 19 nt, Artificial Sequence
  Description of Artificial Sequence: Synthetic oligonucleotide
ucagagaugcaaggaccac

SEQ ID NO: 2894167 - RNA, 19 nt, Artificial Sequence
  Description of Artificial Sequence: Synthetic oligonucleotide
ggcacaggcuggcacagcc

SEQ ID NO: 2894168 - RNA, 19 nt, Artificial Sequence
  Description of Artificial Sequence: Synthetic oligonucleotide
acgcaucacccuuacugga

SEQ ID NO: 2894169 - RNA, 19 nt, Artificial Sequence
  Description of Artificial Sequence: Synthetic oligonucleotide
caagccugcgccuauacau

SEQ ID NO: 2894170 - RNA, 19 nt, Artificial Sequence
  Description of Artificial Sequence: Synthetic oligonucleotide
agccugcgccuauacauca

SEQ ID NO: 2894171 - RNA, 19 nt, Artificial Sequence
  Description of Artificial Sequence: Synthetic oligonucleotide
caccuacaagcaagggagc

SEQ ID NO: 2894172 - RNA, 19 nt, Artificial Sequence
  Description of Artificial Sequence: Synthetic oligonucleotide
acagucagcucaaacgcau

SEQ ID NO: 2894173 - RNA, 19 nt, Artificial Sequence
  Description of Artificial Sequence: Synthetic oligonucleotide
aucacccuuacuggauguc

SEQ ID NO: 2894174 - RNA, 19 nt, Artificial Sequence
  Description of Artificial Sequence: Synthetic oligonucleotide
cacaggcuggcacagccuc

SEQ ID NO: 2894175 - RNA, 19 nt, Artificial Sequence
  Description of Artificial Sequence: Synthetic oligonucleotide
cuucuugaccaggaacaac

SEQ ID NO: 2894176 - RNA, 19 nt, Artificial Sequence
  Description of Artificial Sequence: Synthetic oligonucleotide
ggggcuggcacccugguga

SEQ ID NO: 2894177 - RNA, 19 nt, Artificial Sequence
  Description of Artificial Sequence: Synthetic oligonucleotide
gcauuuucaauacccugga

SEQ ID NO: 2894178 - RNA, 19 nt, Artificial Sequence
  Description of Artificial Sequence: Synthetic oligonucleotide
ccaucaacaccaguaagac

SEQ ID NO: 2894179 - RNA, 19 nt, Artificial Sequence
  Description of Artificial Sequence: Synthetic oligonucleotide
caauacccuggacaauguc

SEQ ID NO: 2894180 - RNA, 19 nt, Artificial Sequence
  Description of Artificial Sequence: Synthetic oligonucleotide
caucaacaccaguaagaca

SEQ ID NO: 2894181 - RNA, 19 nt, Artificial Sequence
  Description of Artificial Sequence: Synthetic oligonucleotide
cuuggguagcccgccuugg

SEQ ID NO: 2894182 - RNA, 19 nt, Artificial Sequence
  Description of Artificial Sequence: Synthetic oligonucleotide
uacccuggacaauguccag

SEQ ID NO: 2894183 - RNA, 19 nt, Artificial Sequence
  Description of Artificial Sequence: Synthetic oligonucleotide
ggcuuccuuggguagcccg

SEQ ID NO: 2894184 - RNA, 19 nt, Artificial Sequence
  Description of Artificial Sequence: Synthetic oligonucleotide
ccaguaagacaccuacaag

SEQ ID NO: 2894185 - RNA, 19 nt, Artificial Sequence
  Description of Artificial Sequence: Synthetic oligonucleotide
auuugggugcuggcuacug

SEQ ID NO: 2894186 - RNA, 19 nt, Artificial Sequence
  Description of Artificial Sequence: Synthetic oligonucleotide
aacaggccccugcuuccca

SEQ ID NO: 2894187 - RNA, 19 nt, Artificial Sequence
  Description of Artificial Sequence: Synthetic oligonucleotide
ggugcuggcuacugccagg

SEQ ID NO: 2894188 - RNA, 19 nt, Artificial Sequence
  Description of Artificial Sequence: Synthetic oligonucleotide
ugcaaggaccacagccauc

SEQ ID NO: 2894189 - RNA, 19 nt, Artificial Sequence
  Description of Artificial Sequence: Synthetic oligonucleotide
uuucaauacccuggacaau

SEQ ID NO: 2894190 - RNA, 19 nt, Artificial Sequence
  Description of Artificial Sequence: Synthetic oligonucleotide
agcaagggagccugcccca

SEQ ID NO: 2894191 - RNA, 19 nt, Artificial Sequence
  Description of Artificial Sequence: Synthetic oligonucleotide
cacagucagcucaaacgca

SEQ ID NO: 2894192 - RNA, 19 nt, Artificial Sequence
  Description of Artificial Sequence: Synthetic oligonucleotide
gccaucaacaccaguaaga

SEQ ID NO: 2894193 - RNA, 19 nt, Artificial Sequence
  Description of Artificial Sequence: Synthetic oligonucleotide
cggcguuugggaaacaggc

SEQ ID NO: 2894194 - RNA, 19 nt, Artificial Sequence
  Description of Artificial Sequence: Synthetic oligonucleotide
ggguagcccgccuuggcag

SEQ ID NO: 2894195 - RNA, 19 nt, Artificial Sequence
  Description of Artificial Sequence: Synthetic oligonucleotide
aacaccaguaagacaccua

SEQ ID NO: 2894196 - RNA, 19 nt, Artificial Sequence
  Description of Artificial Sequence: Synthetic oligonucleotide
cuuccuuggguagcccgcc

SEQ ID NO: 2894197 - RNA, 19 nt, Artificial Sequence
  Description of Artificial Sequence: Synthetic oligonucleotide
uugaggcaauaggucccgg

SEQ ID NO: 2894198 - RNA, 19 nt, Artificial Sequence
  Description of Artificial Sequence: Synthetic oligonucleotide
ccuuacuggaugucacggc

SEQ ID NO: 2894199 - RNA, 19 nt, Artificial Sequence
  Description of Artificial Sequence: Synthetic oligonucleotide
cuggacuugguggcacagg

SEQ ID NO: 2894200 - RNA, 19 nt, Artificial Sequence
  Description of Artificial Sequence: Synthetic oligonucleotide
cagagaugcaaggaccaca

SEQ ID NO: 2894201 - RNA, 19 nt, Artificial Sequence
  Description of Artificial Sequence: Synthetic oligonucleotide
caggcuuccuuggguagcc

SEQ ID NO: 2894202 - RNA, 19 nt, Artificial Sequence
  Description of Artificial Sequence: Synthetic oligonucleotide
caagggagccugccccagg

SEQ ID NO: 2894203 - RNA, 19 nt, Artificial Sequence
  Description of Artificial Sequence: Synthetic oligonucleotide
ggcuauuggcaucagccaa

SEQ ID NO: 2894204 - RNA, 19 nt, Artificial Sequence
  Description of Artificial Sequence: Synthetic oligonucleotide
gugggugcuggccguucgg

SEQ ID NO: 2894205 - RNA, 19 nt, Artificial Sequence
  Description of Artificial Sequence: Synthetic oligonucleotide
cauacaggcuuccuugggu

SEQ ID NO: 2894206 - RNA, 19 nt, Artificial Sequence
  Description of Artificial Sequence: Synthetic oligonucleotide
ugcaggaucucagcauuuu

SEQ ID NO: 2894207 - RNA, 19 nt, Artificial Sequence
  Description of Artificial Sequence: Synthetic oligonucleotide
auaggucccggagccaccu

SEQ ID NO: 2894208 - RNA, 19 nt, Artificial Sequence
  Description of Artificial Sequence: Synthetic oligonucleotide
gguagcccgccuuggcagg

SEQ ID NO: 2894209 - RNA, 19 nt, Artificial Sequence
  Description of Artificial Sequence: Synthetic oligonucleotide
cccuggugaugaaaugucc

SEQ ID NO: 2894210 - RNA, 19 nt, Artificial Sequence
  Description of Artificial Sequence: Synthetic oligonucleotide
gugcuggcuacugccaggc

SEQ ID NO: 2894211 - RNA, 19 nt, Artificial Sequence
  Description of Artificial Sequence: Synthetic oligonucleotide
uguccagggugagggaaaa

SEQ ID NO: 2894212 - RNA, 19 nt, Artificial Sequence
  Description of Artificial Sequence: Synthetic oligonucleotide
cagucagcucaaacgcauc

SEQ ID NO: 2894213 - RNA, 19 nt, Artificial Sequence
  Description of Artificial Sequence: Synthetic oligonucleotide
gcgccuauacaucagagau

SEQ ID NO: 2894214 - RNA, 19 nt, Artificial Sequence
  Description of Artificial Sequence: Synthetic oligonucleotide
cccuuacuggaugucacgg

SEQ ID NO: 2894215 - RNA, 19 nt, Artificial Sequence
  Description of Artificial Sequence: Synthetic oligonucleotide
ugggugcuggccguucggc

SEQ ID NO: 2894216 - RNA, 19 nt, Artificial Sequence
  Description of Artificial Sequence: Synthetic oligonucleotide
ggcuggcacagccucuggg

SEQ ID NO: 2894217 - RNA, 19 nt, Artificial Sequence
  Description of Artificial Sequence: Synthetic oligonucleotide
gguggcacaggcuggcaca

SEQ ID NO: 2894218 - RNA, 19 nt, Artificial Sequence
  Description of Artificial Sequence: Synthetic oligonucleotide
uuccuuggguagcccgccu

SEQ ID NO: 2894219 - RNA, 19 nt, Artificial Sequence
  Description of Artificial Sequence: Synthetic oligonucleotide
cugcuucccaagccugcgc

SEQ ID NO: 2894220 - RNA, 19 nt, Artificial Sequence
  Description of Artificial Sequence: Synthetic oligonucleotide
ccauacaggcuuccuuggg

SEQ ID NO: 2894221 - RNA, 19 nt, Artificial Sequence
  Description of Artificial Sequence: Synthetic oligonucleotide
cagccaucaacaccaguaa

SEQ ID NO: 2894222 - RNA, 19 nt, Artificial Sequence
  Description of Artificial Sequence: Synthetic oligonucleotide
uccuuggguagcccgccuu

SEQ ID NO: 2894223 - RNA, 19 nt, Artificial Sequence
  Description of Artificial Sequence: Synthetic oligonucleotide
cucaaacgcaucacccuua

SEQ ID NO: 2894224 - RNA, 19 nt, Artificial Sequence
  Description of Artificial Sequence: Synthetic oligonucleotide
caccaguaagacaccuaca

SEQ ID NO: 2894225 - RNA, 19 nt, Artificial Sequence
  Description of Artificial Sequence: Synthetic oligonucleotide
ccaaagacacauugaggca

SEQ ID NO: 2894226 - RNA, 19 nt, Artificial Sequence
  Description of Artificial Sequence: Synthetic oligonucleotide
cguuugggaaacaggcccc

SEQ ID NO: 2894227 - RNA, 19 nt, Artificial Sequence
  Description of Artificial Sequence: Synthetic oligonucleotide
gggugcuggccguucggcg

SEQ ID NO: 2894228 - RNA, 19 nt, Artificial Sequence
  Description of Artificial Sequence: Synthetic oligonucleotide
ggcguuugggaaacaggcc

SEQ ID NO: 2894229 - RNA, 19 nt, Artificial Sequence
  Description of Artificial Sequence: Synthetic oligonucleotide
aggcuggcacagccucugg

SEQ ID NO: 2894230 - RNA, 19 nt, Artificial Sequence
  Description of Artificial Sequence: Synthetic oligonucleotide
aagacacauugaggcaaua

SEQ ID NO: 2894231 - RNA, 19 nt, Artificial Sequence
  Description of Artificial Sequence: Synthetic oligonucleotide
cuggugaugaaauguccau

SEQ ID NO: 2894232 - RNA, 19 nt, Artificial Sequence
  Description of Artificial Sequence: Synthetic oligonucleotide
auguccauacaggcuuccu

SEQ ID NO: 2894233 - RNA, 19 nt, Artificial Sequence
  Description of Artificial Sequence: Synthetic oligonucleotide
uucccaagccugcgccuau

SEQ ID NO: 2894234 - RNA, 19 nt, Artificial Sequence
  Description of Artificial Sequence: Synthetic oligonucleotide
gcuggcacccuggugauga

SEQ ID NO: 2894235 - RNA, 19 nt, Artificial Sequence
  Description of Artificial Sequence: Synthetic oligonucleotide
gggugcuggcuacugccag

SEQ ID NO: 2894236 - RNA, 19 nt, Artificial Sequence
  Description of Artificial Sequence: Synthetic oligonucleotide
aggcuuccuuggguagccc

SEQ ID NO: 2894237 - RNA, 19 nt, Artificial Sequence
  Description of Artificial Sequence: Synthetic oligonucleotide
aggucccggagccaccuuu

SEQ ID NO: 2894238 - RNA, 19 nt, Artificial Sequence
  Description of Artificial Sequence: Synthetic oligonucleotide
gcaggaucucagcauuuuc

SEQ ID NO: 2894239 - RNA, 19 nt, Artificial Sequence
  Description of Artificial Sequence: Synthetic oligonucleotide
guaggaccagcuggcaguc

SEQ ID NO: 2894240 - RNA, 19 nt, Artificial Sequence
  Description of Artificial Sequence: Synthetic oligonucleotide
ccggagccaccuuucagag

SEQ ID NO: 2894241 - RNA, 19 nt, Artificial Sequence
  Description of Artificial Sequence: Synthetic oligonucleotide
caggcuggcacagccucug

SEQ ID NO: 2894242 - RNA, 19 nt, Artificial Sequence
  Description of Artificial Sequence: Synthetic oligonucleotide
caggacacagucagcucaa

SEQ ID NO: 2894243 - RNA, 19 nt, Artificial Sequence
  Description of Artificial Sequence: Synthetic oligonucleotide
cuggccguucggcguuugg

SEQ ID NO: 2894244 - RNA, 19 nt, Artificial Sequence
  Description of Artificial Sequence: Synthetic oligonucleotide
gcuggcagucuggacuugg

SEQ ID NO: 2894245 - RNA, 19 nt, Artificial Sequence
  Description of Artificial Sequence: Synthetic oligonucleotide
ggaccacagccaucaacac

SEQ ID NO: 2894246 - RNA, 19 nt, Artificial Sequence
  Description of Artificial Sequence: Synthetic oligonucleotide
gcaucagccaaagacacau

SEQ ID NO: 2894247 - RNA, 19 nt, Artificial Sequence
  Description of Artificial Sequence: Synthetic oligonucleotide
cuggcuacugccaggcuau

SEQ ID NO: 2894248 - RNA, 19 nt, Artificial Sequence
  Description of Artificial Sequence: Synthetic oligonucleotide
gagcuugguguaggaccag

SEQ ID NO: 2894249 - RNA, 19 nt, Artificial Sequence
  Description of Artificial Sequence: Synthetic oligonucleotide
ugcuggcuacugccaggcu

SEQ ID NO: 2894250 - RNA, 19 nt, Artificial Sequence
  Description of Artificial Sequence: Synthetic oligonucleotide
acaggccccugcuucccaa

SEQ ID NO: 2894251 - RNA, 19 nt, Artificial Sequence
  Description of Artificial Sequence: Synthetic oligonucleotide
caggccccugcuucccaag

SEQ ID NO: 2894252 - RNA, 19 nt, Artificial Sequence
  Description of Artificial Sequence: Synthetic oligonucleotide
gucuggacuugguggcaca

SEQ ID NO: 2894253 - RNA, 19 nt, Artificial Sequence
  Description of Artificial Sequence: Synthetic oligonucleotide
caauguccagggugaggga

SEQ ID NO: 2894254 - RNA, 19 nt, Artificial Sequence
  Description of Artificial Sequence: Synthetic oligonucleotide
ggccguucggcguuuggga

SEQ ID NO: 2894255 - RNA, 19 nt, Artificial Sequence
  Description of Artificial Sequence: Synthetic oligonucleotide
gcuuccuuggguagcccgc

SEQ ID NO: 2894256 - RNA, 19 nt, Artificial Sequence
  Description of Artificial Sequence: Synthetic oligonucleotide
gcuggcuacugccaggcua

SEQ ID NO: 2894257 - RNA, 19 nt, Artificial Sequence
  Description of Artificial Sequence: Synthetic oligonucleotide
gcacccuggugaugaaaug

SEQ ID NO: 2894258 - RNA, 19 nt, Artificial Sequence
  Description of Artificial Sequence: Synthetic oligonucleotide
cuugaccaggaacaacaau

SEQ ID NO: 2894259 - RNA, 19 nt, Artificial Sequence
  Description of Artificial Sequence: Synthetic oligonucleotide
gucacggccugcaggaucu

SEQ ID NO: 2894260 - RNA, 19 nt, Artificial Sequence
  Description of Artificial Sequence: Synthetic oligonucleotide
gcuauuggcaucagccaaa

SEQ ID NO: 2894261 - RNA, 19 nt, Artificial Sequence
  Description of Artificial Sequence: Synthetic oligonucleotide
gaccagcuggcagucugga

SEQ ID NO: 2894262 - RNA, 19 nt, Artificial Sequence
  Description of Artificial Sequence: Synthetic oligonucleotide
ccaggcuauuggcaucagc

SEQ ID NO: 2894263 - RNA, 19 nt, Artificial Sequence
  Description of Artificial Sequence: Synthetic oligonucleotide
auguccagggugagggaaa

SEQ ID NO: 2894264 - RNA, 19 nt, Artificial Sequence
  Description of Artificial Sequence: Synthetic oligonucleotide
ggccccugcuucccaagcc

SEQ ID NO: 2894265 - RNA, 19 nt, Artificial Sequence
  Description of Artificial Sequence: Synthetic oligonucleotide
caucacccuuacuggaugu

SEQ ID NO: 2894266 - RNA, 19 nt, Artificial Sequence
  Description of Artificial Sequence: Synthetic oligonucleotide
cccggagccaccuuucaga

SEQ ID NO: 2894267 - RNA, 19 nt, Artificial Sequence
  Description of Artificial Sequence: Synthetic oligonucleotide
ggacaauguccagggugag

SEQ ID NO: 2894268 - RNA, 19 nt, Artificial Sequence
  Description of Artificial Sequence: Synthetic oligonucleotide
ccagcuggcagucuggacu

SEQ ID NO: 2894269 - RNA, 19 nt, Artificial Sequence
  Description of Artificial Sequence: Synthetic oligonucleotide
cgccuauacaucagagaug

SEQ ID NO: 2894270 - RNA, 19 nt, Artificial Sequence
  Description of Artificial Sequence: Synthetic oligonucleotide
uggcacccuggugaugaaa

SEQ ID NO: 2894271 - RNA, 19 nt, Artificial Sequence
  Description of Artificial Sequence: Synthetic oligonucleotide
ccaggccaccuucuugacc

SEQ ID NO: 2894272 - RNA, 19 nt, Artificial Sequence
  Description of Artificial Sequence: Synthetic oligonucleotide
agcccgccuuggcaggaca

SEQ ID NO: 2894273 - RNA, 19 nt, Artificial Sequence
  Description of Artificial Sequence: Synthetic oligonucleotide
ggcaggacacagucagcuc

SEQ ID NO: 2894274 - RNA, 19 nt, Artificial Sequence
  Description of Artificial Sequence: Synthetic oligonucleotide
ccuuggguagcccgccuug

SEQ ID NO: 2894275 - RNA, 19 nt, Artificial Sequence
  Description of Artificial Sequence: Synthetic oligonucleotide
gccaccuuucagagcuugg

SEQ ID NO: 2894276 - RNA, 19 nt, Artificial Sequence
  Description of Artificial Sequence: Synthetic oligonucleotide
gagccugccccaggccacc

SEQ ID NO: 2894277 - RNA, 19 nt, Artificial Sequence
  Description of Artificial Sequence: Synthetic oligonucleotide
ccuuucagagcuuggugua

SEQ ID NO: 2894278 - RNA, 19 nt, Artificial Sequence
  Description of Artificial Sequence: Synthetic oligonucleotide
caggcgcagccagugggug

SEQ ID NO: 2894279 - RNA, 19 nt, Artificial Sequence
  Description of Artificial Sequence: Synthetic oligonucleotide
acaggcuggcacagccucu

SEQ ID NO: 2894280 - RNA, 19 nt, Artificial Sequence
  Description of Artificial Sequence: Synthetic oligonucleotide
ggcuacugccaggcuauug

SEQ ID NO: 2894281 - RNA, 19 nt, Artificial Sequence
  Description of Artificial Sequence: Synthetic oligonucleotide
ccccaggccaccuucuuga

SEQ ID NO: 2894282 - RNA, 19 nt, Artificial Sequence
  Description of Artificial Sequence: Synthetic oligonucleotide
guuugggaaacaggccccu

SEQ ID NO: 2894283 - RNA, 19 nt, Artificial Sequence
  Description of Artificial Sequence: Synthetic oligonucleotide
gcagccagugggugcuggc

SEQ ID NO: 2894284 - RNA, 19 nt, Artificial Sequence
  Description of Artificial Sequence: Synthetic oligonucleotide
ggaucucagcauuuucaau

SEQ ID NO: 2894285 - RNA, 19 nt, Artificial Sequence
  Description of Artificial Sequence: Synthetic oligonucleotide
gucccggagccaccuuuca

SEQ ID NO: 2894286 - RNA, 19 nt, Artificial Sequence
  Description of Artificial Sequence: Synthetic oligonucleotide
gccaccuucuugaccagga

SEQ ID NO: 2894287 - RNA, 19 nt, Artificial Sequence
  Description of Artificial Sequence: Synthetic oligonucleotide
uggcacaggcuggcacagc

SEQ ID NO: 2894288 - RNA, 19 nt, Artificial Sequence
  Description of Artificial Sequence: Synthetic oligonucleotide
ggugcuggccguucggcgu

SEQ ID NO: 2894289 - RNA, 19 nt, Artificial Sequence
  Description of Artificial Sequence: Synthetic oligonucleotide
uaggaccagcuggcagucu

SEQ ID NO: 2894290 - RNA, 19 nt, Artificial Sequence
  Description of Artificial Sequence: Synthetic oligonucleotide
caacaccaguaagacaccu

SEQ ID NO: 2894291 - RNA, 19 nt, Artificial Sequence
  Description of Artificial Sequence: Synthetic oligonucleotide
gcucaaacgcaucacccuu

SEQ ID NO: 2894292 - RNA, 19 nt, Artificial Sequence
  Description of Artificial Sequence: Synthetic oligonucleotide
gguguaggaccagcuggca

SEQ ID NO: 2894293 - RNA, 19 nt, Artificial Sequence
  Description of Artificial Sequence: Synthetic oligonucleotide
ccugcgccuauacaucaga

SEQ ID NO: 2894294 - RNA, 19 nt, Artificial Sequence
  Description of Artificial Sequence: Synthetic oligonucleotide
cccaagccugcgccuauac

SEQ ID NO: 2894295 - RNA, 19 nt, Artificial Sequence
  Description of Artificial Sequence: Synthetic oligonucleotide
uaggucccggagccaccuu

SEQ ID NO: 2894296 - RNA, 19 nt, Artificial Sequence
  Description of Artificial Sequence: Synthetic oligonucleotide
cagucuggacuugguggca

SEQ ID NO: 2894297 - RNA, 19 nt, Artificial Sequence
  Description of Artificial Sequence: Synthetic oligonucleotide
gccguucggcguuugggaa

SEQ ID NO: 2894298 - RNA, 19 nt, Artificial Sequence
  Description of Artificial Sequence: Synthetic oligonucleotide
ggagccugccccaggccac

SEQ ID NO: 2894299 - RNA, 19 nt, Artificial Sequence
  Description of Artificial Sequence: Synthetic oligonucleotide
ucccaagccugcgccuaua

SEQ ID NO: 2894300 - RNA, 19 nt, Artificial Sequence
  Description of Artificial Sequence: Synthetic oligonucleotide
cuggcagucuggacuuggu

SEQ ID NO: 2894301 - RNA, 19 nt, Artificial Sequence
  Description of Artificial Sequence: Synthetic oligonucleotide
guagcccgccuuggcagga

SEQ ID NO: 2894302 - RNA, 19 nt, Artificial Sequence
  Description of Artificial Sequence: Synthetic oligonucleotide
ccgccuuggcaggacacag

SEQ ID NO: 2894303 - RNA, 19 nt, Artificial Sequence
  Description of Artificial Sequence: Synthetic oligonucleotide
agcuggcagucuggacuug

SEQ ID NO: 2894304 - RNA, 19 nt, Artificial Sequence
  Description of Artificial Sequence: Synthetic oligonucleotide
ccccugcuucccaagccug

SEQ ID NO: 2894305 - RNA, 19 nt, Artificial Sequence
  Description of Artificial Sequence: Synthetic oligonucleotide
ggcacccuggugaugaaau

SEQ ID NO: 2894306 - RNA, 19 nt, Artificial Sequence
  Description of Artificial Sequence: Synthetic oligonucleotide
cguucggcguuugggaaac

SEQ ID NO: 2894307 - RNA, 19 nt, Artificial Sequence
  Description of Artificial Sequence: Synthetic oligonucleotide
uagcccgccuuggcaggac

SEQ ID NO: 2894308 - RNA, 19 nt, Artificial Sequence
  Description of Artificial Sequence: Synthetic oligonucleotide
ccuuggcaggacacaguca

SEQ ID NO: 2894309 - RNA, 19 nt, Artificial Sequence
  Description of Artificial Sequence: Synthetic oligonucleotide
cagcuggcagucuggacuu

SEQ ID NO: 2894310 - RNA, 19 nt, Artificial Sequence
  Description of Artificial Sequence: Synthetic oligonucleotide
cagugggugcuggccguuc

SEQ ID NO: 2894311 - RNA, 19 nt, Artificial Sequence
  Description of Artificial Sequence: Synthetic oligonucleotide
gccugcgccuauacaucag

SEQ ID NO: 2894312 - RNA, 19 nt, Artificial Sequence
  Description of Artificial Sequence: Synthetic oligonucleotide
augucacggccugcaggau

SEQ ID NO: 2894313 - RNA, 19 nt, Artificial Sequence
  Description of Artificial Sequence: Synthetic oligonucleotide
ccacagccaucaacaccag

SEQ ID NO: 2894314 - RNA, 19 nt, Artificial Sequence
  Description of Artificial Sequence: Synthetic oligonucleotide
ggucccggagccaccuuuc

SEQ ID NO: 2894315 - RNA, 19 nt, Artificial Sequence
  Description of Artificial Sequence: Synthetic oligonucleotide
caaacgcaucacccuuacu

SEQ ID NO: 2894316 - RNA, 19 nt, Artificial Sequence
  Description of Artificial Sequence: Synthetic oligonucleotide
ccaagccugcgccuauaca

SEQ ID NO: 2894317 - RNA, 19 nt, Artificial Sequence
  Description of Artificial Sequence: Synthetic oligonucleotide
cacagccaucaacaccagu

SEQ ID NO: 2894318 - RNA, 19 nt, Artificial Sequence
  Description of Artificial Sequence: Synthetic oligonucleotide
cacggccugcaggaucuca

SEQ ID NO: 2894319 - RNA, 19 nt, Artificial Sequence
  Description of Artificial Sequence: Synthetic oligonucleotide
gcuugguguaggaccagcu

SEQ ID NO: 2894320 - RNA, 19 nt, Artificial Sequence
  Description of Artificial Sequence: Synthetic oligonucleotide
gcaauaggucccggagcca

SEQ ID NO: 2894321 - RNA, 19 nt, Artificial Sequence
  Description of Artificial Sequence: Synthetic oligonucleotide
ccuucuugaccaggaacaa

SEQ ID NO: 2894322 - RNA, 19 nt, Artificial Sequence
  Description of Artificial Sequence: Synthetic oligonucleotide
caaggaccacagccaucaa

SEQ ID NO: 2894323 - RNA, 19 nt, Artificial Sequence
  Description of Artificial Sequence: Synthetic oligonucleotide
ccuauacaucagagaugca

SEQ ID NO: 2894324 - RNA, 19 nt, Artificial Sequence
  Description of Artificial Sequence: Synthetic oligonucleotide
cccaggccaccuucuugac

SEQ ID NO: 2894325 - RNA, 19 nt, Artificial Sequence
  Description of Artificial Sequence: Synthetic oligonucleotide
cugcaggaucucagcauuu

SEQ ID NO: 2894326 - RNA, 19 nt, Artificial Sequence
  Description of Artificial Sequence: Synthetic oligonucleotide
cggagccaccuuucagagc

SEQ ID NO: 2894327 - RNA, 19 nt, Artificial Sequence
  Description of Artificial Sequence: Synthetic oligonucleotide
gccccugcuucccaagccu

SEQ ID NO: 2894328 - RNA, 19 nt, Artificial Sequence
  Description of Artificial Sequence: Synthetic oligonucleotide
ccuacaagcaagggagccu

SEQ ID NO: 2894329 - RNA, 19 nt, Artificial Sequence
  Description of Artificial Sequence: Synthetic oligonucleotide
ucacggccugcaggaucuc

SEQ ID NO: 2894330 - RNA, 19 nt, Artificial Sequence
  Description of Artificial Sequence: Synthetic oligonucleotide
ccguucggcguuugggaaa

SEQ ID NO: 2894331 - RNA, 19 nt, Artificial Sequence
  Description of Artificial Sequence: Synthetic oligonucleotide
ggcgcagccagugggugcu

SEQ ID NO: 2894332 - RNA, 19 nt, Artificial Sequence
  Description of Artificial Sequence: Synthetic oligonucleotide
uggcuacugccaggcuauu

SEQ ID NO: 2894333 - RNA, 19 nt, Artificial Sequence
  Description of Artificial Sequence: Synthetic oligonucleotide
cuggcacccuggugaugaa

SEQ ID NO: 2894334 - RNA, 19 nt, Artificial Sequence
  Description of Artificial Sequence: Synthetic oligonucleotide
ggacuugguggcacaggcu

SEQ ID NO: 2894335 - RNA, 19 nt, Artificial Sequence
  Description of Artificial Sequence: Synthetic oligonucleotide
agccugccccaggccaccu

SEQ ID NO: 2894336 - RNA, 19 nt, Artificial Sequence
  Description of Artificial Sequence: Synthetic oligonucleotide
guucggcguuugggaaaca

SEQ ID NO: 2894337 - RNA, 19 nt, Artificial Sequence
  Description of Artificial Sequence: Synthetic oligonucleotide
ugcuggccguucggcguuu

SEQ ID NO: 2894338 - RNA, 19 nt, Artificial Sequence
  Description of Artificial Sequence: Synthetic oligonucleotide
cugccccaggccaccuucu

SEQ ID NO: 2894339 - RNA, 19 nt, Artificial Sequence
  Description of Artificial Sequence: Synthetic oligonucleotide
gggaaacaggccccugcuu

SEQ ID NO: 2894340 - RNA, 19 nt, Artificial Sequence
  Description of Artificial Sequence: Synthetic oligonucleotide
ccaccuucuugaccaggaa

SEQ ID NO: 2894341 - RNA, 19 nt, Artificial Sequence
  Description of Artificial Sequence: Synthetic oligonucleotide
gugcuggccguucggcguu

SEQ ID NO: 2894342 - RNA, 19 nt, Artificial Sequence
  Description of Artificial Sequence: Synthetic oligonucleotide
gccagugggugcuggccgu

SEQ ID NO: 2894343 - RNA, 19 nt, Artificial Sequence
  Description of Artificial Sequence: Synthetic oligonucleotide
gccaggcuauuggcaucag

SEQ ID NO: 2894344 - RNA, 19 nt, Artificial Sequence
  Description of Artificial Sequence: Synthetic oligonucleotide
gcccgccuuggcaggacac

SEQ ID NO: 2894345 - RNA, 19 nt, Artificial Sequence
  Description of Artificial Sequence: Synthetic oligonucleotide
cgcagccagugggugcugg

SEQ ID NO: 2894346 - RNA, 19 nt, Artificial Sequence
  Description of Artificial Sequence: Synthetic oligonucleotide
ggcuggcacccuggugaug

SEQ ID NO: 2894347 - RNA, 19 nt, Artificial Sequence
  Description of Artificial Sequence: Synthetic oligonucleotide
gcaggcgcagccagugggu

SEQ ID NO: 2894348 - RNA, 19 nt, Artificial Sequence
  Description of Artificial Sequence: Synthetic oligonucleotide
gcuggccguucggcguuug

SEQ ID NO: 2894349 - RNA, 19 nt, Artificial Sequence
  Description of Artificial Sequence: Synthetic oligonucleotide
cgcaucacccuuacuggau

SEQ ID NO: 2894350 - RNA, 19 nt, Artificial Sequence
  Description of Artificial Sequence: Synthetic oligonucleotide
cccgccuuggcaggacaca

SEQ ID NO: 2894351 - RNA, 19 nt, Artificial Sequence
  Description of Artificial Sequence: Synthetic oligonucleotide
gcacaggcuggcacagccu

SEQ ID NO: 2894352 - RNA, 19 nt, Artificial Sequence
  Description of Artificial Sequence: Synthetic oligonucleotide
gggcuggcacccuggugau

SEQ ID NO: 2894353 - RNA, 19 nt, Artificial Sequence
  Description of Artificial Sequence: Synthetic oligonucleotide
ccuggacaauguccagggu

SEQ ID NO: 2894354 - RNA, 19 nt, Artificial Sequence
  Description of Artificial Sequence: Synthetic oligonucleotide
gcgcagccagugggugcug

SEQ ID NO: 2894355 - RNA, 19 nt, Artificial Sequence
  Description of Artificial Sequence: Synthetic oligonucleotide
cgccuuggcaggacacagu

SEQ ID NO: 2894356 - RNA, 19 nt, Artificial Sequence
  Description of Artificial Sequence: Synthetic oligonucleotide
gccugccccaggccaccuu

SEQ ID NO: 2894357 - RNA, 19 nt, Artificial Sequence
  Description of Artificial Sequence: Synthetic oligonucleotide
ccagugggugcuggccguu

SEQ ID NO: 2894358 - RNA, 19 nt, Artificial Sequence
  Description of Artificial Sequence: Synthetic oligonucleotide
  modified_base (3)..(3): a, c, u, g, unknown or other
uunuaaaacagcuuguagc

SEQ ID NO: 2894359 - RNA, 19 nt, Artificial Sequence
  Description of Artificial Sequence: Synthetic oligonucleotide
aauguacacacaccaagcc

SEQ ID NO: 2894360 - RNA, 19 nt, Artificial Sequence
  Description of Artificial Sequence: Synthetic oligonucleotide
  modified_base (2)..(2): a, c, u, g, unknown or other
unuaaaacagcuuguagcc

SEQ ID NO: 2894361 - RNA, 19 nt, Artificial Sequence
  Description of Artificial Sequence: Synthetic oligonucleotide
aauagguccguucuccugc

SEQ ID NO: 2894362 - RNA, 19 nt, Artificial Sequence
  Description of Artificial Sequence: Synthetic oligonucleotide
uuccaaaugaaguucaggg

SEQ ID NO: 2894363 - RNA, 19 nt, Artificial Sequence
  Description of Artificial Sequence: Synthetic oligonucleotide
  modified_base (4)..(4): a, c, u, g, unknown or other
uuunuaaaacagcuuguag

SEQ ID NO: 2894364 - RNA, 19 nt, Artificial Sequence
  Description of Artificial Sequence: Synthetic oligonucleotide
aguaauccggaccagauag

SEQ ID NO: 2894365 - RNA, 19 nt, Artificial Sequence
  Description of Artificial Sequence: Synthetic oligonucleotide
  modified_base (7)..(7): a, c, u, g, unknown or other
cucuuunuaaaacagcuug

SEQ ID NO: 2894366 - RNA, 19 nt, Artificial Sequence
  Description of Artificial Sequence: Synthetic oligonucleotide
acacacacaauguacacac

SEQ ID NO: 2894367 - RNA, 19 nt, Artificial Sequence
  Description of Artificial Sequence: Synthetic oligonucleotide
auccggaccagauagacac

SEQ ID NO: 2894368 - RNA, 19 nt, Artificial Sequence
  Description of Artificial Sequence: Synthetic oligonucleotide
aaguucaggggacuuaggg

SEQ ID NO: 2894369 - RNA, 19 nt, Artificial Sequence
  Description of Artificial Sequence: Synthetic oligonucleotide
uguacacacaccaagccgc

SEQ ID NO: 2894370 - RNA, 19 nt, Artificial Sequence
  Description of Artificial Sequence: Synthetic oligonucleotide
uuggauggaauucucagug

SEQ ID NO: 2894371 - RNA, 19 nt, Artificial Sequence
  Description of Artificial Sequence: Synthetic oligonucleotide
  modified_base (9)..(9): a, c, u, g, unknown or other
uccucuuunuaaaacagcu

SEQ ID NO: 2894372 - RNA, 19 nt, Artificial Sequence
  Description of Artificial Sequence: Synthetic oligonucleotide
uuuguuuccacaugcacac

SEQ ID NO: 2894373 - RNA, 19 nt, Artificial Sequence
  Description of Artificial Sequence: Synthetic oligonucleotide
acaauguacacacaccaag

SEQ ID NO: 2894374 - RNA, 19 nt, Artificial Sequence
  Description of Artificial Sequence: Synthetic oligonucleotide
acacacaauguacacacac

SEQ ID NO: 2894375 - RNA, 19 nt, Artificial Sequence
  Description of Artificial Sequence: Synthetic oligonucleotide
augguaguacaauucaggg

SEQ ID NO: 2894376 - RNA, 19 nt, Artificial Sequence
  Description of Artificial Sequence: Synthetic oligonucleotide
gaugguaguacaauucagg

SEQ ID NO: 2894377 - RNA, 19 nt, Artificial Sequence
  Description of Artificial Sequence: Synthetic oligonucleotide
gugucuggaaaauaggucc

SEQ ID NO: 2894378 - RNA, 19 nt, Artificial Sequence
  Description of Artificial Sequence: Synthetic oligonucleotide
aauucagggguuccaaaug

SEQ ID NO: 2894379 - RNA, 19 nt, Artificial Sequence
  Description of Artificial Sequence: Synthetic oligonucleotide
uggaaaauagguccguucu

SEQ ID NO: 2894380 - RNA, 19 nt, Artificial Sequence
  Description of Artificial Sequence: Synthetic oligonucleotide
ucuugcagccaccucacgg

SEQ ID NO: 2894381 - RNA, 19 nt, Artificial Sequence
  Description of Artificial Sequence: Synthetic oligonucleotide
accagauagacacugucag

SEQ ID NO: 2894382 - RNA, 19 nt, Artificial Sequence
  Description of Artificial Sequence: Synthetic oligonucleotide
  modified_base (6)..(6): a, c, u, g, unknown or other
ucuuunuaaaacagcuugu

SEQ ID NO: 2894383 - RNA, 19 nt, Artificial Sequence
  Description of Artificial Sequence: Synthetic oligonucleotide
ugguaguacaauucagggg

SEQ ID NO: 2894384 - RNA, 19 nt, Artificial Sequence
  Description of Artificial Sequence: Synthetic oligonucleotide
  modified_base (10)..(10): a, c, u, g, unknown or other
uuccucuuunuaaaacagc

SEQ ID NO: 2894385 - RNA, 19 nt, Artificial Sequence
  Description of Artificial Sequence: Synthetic oligonucleotide
uauacagcaggucaccagu

SEQ ID NO: 2894386 - RNA, 19 nt, Artificial Sequence
  Description of Artificial Sequence: Synthetic oligonucleotide
ugucuggaaaauagguccg

SEQ ID NO: 2894387 - RNA, 19 nt, Artificial Sequence
  Description of Artificial Sequence: Synthetic oligonucleotide
acacugucaggccucaggc

SEQ ID NO: 2894388 - RNA, 19 nt, Artificial Sequence
  Description of Artificial Sequence: Synthetic oligonucleotide
gaaaauagguccguucucc

SEQ ID NO: 2894389 - RNA, 19 nt, Artificial Sequence
  Description of Artificial Sequence: Synthetic oligonucleotide
aauucucagugcucaggcg

SEQ ID NO: 2894390 - RNA, 19 nt, Artificial Sequence
  Description of Artificial Sequence: Synthetic oligonucleotide
aguucaggggacuuagggg

SEQ ID NO: 2894391 - RNA, 19 nt, Artificial Sequence
  Description of Artificial Sequence: Synthetic oligonucleotide
gaauucucagugcucaggc

SEQ ID NO: 2894392 - RNA, 19 nt, Artificial Sequence
  Description of Artificial Sequence: Synthetic oligonucleotide
acuuggauggaauucucag

SEQ ID NO: 2894393 - RNA, 19 nt, Artificial Sequence
  Description of Artificial Sequence: Synthetic oligonucleotide
auguacacacaccaagccg

SEQ ID NO: 2894394 - RNA, 19 nt, Artificial Sequence
  Description of Artificial Sequence: Synthetic oligonucleotide
acacaauguacacacacca

SEQ ID NO: 2894395 - RNA, 19 nt, Artificial Sequence
  Description of Artificial Sequence: Synthetic oligonucleotide
guucaggggacuuaggggc

SEQ ID NO: 2894396 - RNA, 19 nt, Artificial Sequence
  Description of Artificial Sequence: Synthetic oligonucleotide
caauguacacacaccaagc

SEQ ID NO: 2894397 - RNA, 19 nt, Artificial Sequence
  Description of Artificial Sequence: Synthetic oligonucleotide
ugcacacacacaauguaca

SEQ ID NO: 2894398 - RNA, 19 nt, Artificial Sequence
  Description of Artificial Sequence: Synthetic oligonucleotide
  modified_base (11)..(11): a, c, u, g, unknown or other
cuuccucuuunuaaaacag

SEQ ID NO: 2894399 - RNA, 19 nt, Artificial Sequence
  Description of Artificial Sequence: Synthetic oligonucleotide
cugugugagguccacaccg

SEQ ID NO: 2894400 - RNA, 19 nt, Artificial Sequence
  Description of Artificial Sequence: Synthetic oligonucleotide
cagauagacacugucaggc

SEQ ID NO: 2894401 - RNA, 19 nt, Artificial Sequence
  Description of Artificial Sequence: Synthetic oligonucleotide
uuccaggagaugcucaugc

SEQ ID NO: 2894402 - RNA, 19 nt, Artificial Sequence
  Description of Artificial Sequence: Synthetic oligonucleotide
acaccgaugacucucccag

SEQ ID NO: 2894403 - RNA, 19 nt, Artificial Sequence
  Description of Artificial Sequence: Synthetic oligonucleotide
gaugcucaugcacaguccc

SEQ ID NO: 2894404 - RNA, 19 nt, Artificial Sequence
  Description of Artificial Sequence: Synthetic oligonucleotide
gaguguauacagcagguca

SEQ ID NO: 2894405 - RNA, 19 nt, Artificial Sequence
  Description of Artificial Sequence: Synthetic oligonucleotide
ucagugcucaggcggaagg

SEQ ID NO: 2894406 - RNA, 19 nt, Artificial Sequence
  Description of Artificial Sequence: Synthetic oligonucleotide
aguacaauucagggguucc

SEQ ID NO: 2894407 - RNA, 19 nt, Artificial Sequence
  Description of Artificial Sequence: Synthetic oligonucleotide
aaauagguccguucuccug

SEQ ID NO: 2894408 - RNA, 19 nt, Artificial Sequence
  Description of Artificial Sequence: Synthetic oligonucleotide
ucagggguuccaaaugaag

SEQ ID NO: 2894409 - RNA, 19 nt, Artificial Sequence
  Description of Artificial Sequence: Synthetic oligonucleotide
aaaauagguccguucuccu

SEQ ID NO: 2894410 - RNA, 19 nt, Artificial Sequence
  Description of Artificial Sequence: Synthetic oligonucleotide
gacacugucaggccucagg

SEQ ID NO: 2894411 - RNA, 19 nt, Artificial Sequence
  Description of Artificial Sequence: Synthetic oligonucleotide
aguguauacagcaggucac

SEQ ID NO: 2894412 - RNA, 19 nt, Artificial Sequence
  Description of Artificial Sequence: Synthetic oligonucleotide
gaguuccacaacuuggaug

SEQ ID NO: 2894413 - RNA, 19 nt, Artificial Sequence
  Description of Artificial Sequence: Synthetic oligonucleotide
gagaugguaguacaauuca

SEQ ID NO: 2894414 - RNA, 19 nt, Artificial Sequence
  Description of Artificial Sequence: Synthetic oligonucleotide
gacuuaggggcuuucacca

SEQ ID NO: 2894415 - RNA, 19 nt, Artificial Sequence
  Description of Artificial Sequence: Synthetic oligonucleotide
cagcuuguagcccugaaug

SEQ ID NO: 2894416 - RNA, 19 nt, Artificial Sequence
  Description of Artificial Sequence: Synthetic oligonucleotide
cacacaauguacacacacc

SEQ ID NO: 2894417 - RNA, 19 nt, Artificial Sequence
  Description of Artificial Sequence: Synthetic oligonucleotide
agcuuguagcccugaaugg

SEQ ID NO: 2894418 - RNA, 19 nt, Artificial Sequence
  Description of Artificial Sequence: Synthetic oligonucleotide
caaaugaaguucaggggac

SEQ ID NO: 2894419 - RNA, 19 nt, Artificial Sequence
  Description of Artificial Sequence: Synthetic oligonucleotide
agguccguucuccugcugc

SEQ ID NO: 2894420 - RNA, 19 nt, Artificial Sequence
  Description of Artificial Sequence: Synthetic oligonucleotide
gguaguacaauucaggggu

SEQ ID NO: 2894421 - RNA, 19 nt, Artificial Sequence
  Description of Artificial Sequence: Synthetic oligonucleotide
agugucuggaaaauagguc

SEQ ID NO: 2894422 - RNA, 19 nt, Artificial Sequence
  Description of Artificial Sequence: Synthetic oligonucleotide
acugucaggccucaggccu

SEQ ID NO: 2894423 - RNA, 19 nt, Artificial Sequence
  Description of Artificial Sequence: Synthetic oligonucleotide
auucagggguuccaaauga

SEQ ID NO: 2894424 - RNA, 19 nt, Artificial Sequence
  Description of Artificial Sequence: Synthetic oligonucleotide
cacaugcacacacacaaug

SEQ ID NO: 2894425 - RNA, 19 nt, Artificial Sequence
  Description of Artificial Sequence: Synthetic oligonucleotide
gagaugcucaugcacaguc

SEQ ID NO: 2894426 - RNA, 19 nt, Artificial Sequence
  Description of Artificial Sequence: Synthetic oligonucleotide
accgaugacucucccaguc

SEQ ID NO: 2894427 - RNA, 19 nt, Artificial Sequence
  Description of Artificial Sequence: Synthetic oligonucleotide
gcugaguguauacagcagg

SEQ ID NO: 2894428 - RNA, 19 nt, Artificial Sequence
  Description of Artificial Sequence: Synthetic oligonucleotide
ugcucaugcacaguccccg

SEQ ID NO: 2894429 - RNA, 19 nt, Artificial Sequence
  Description of Artificial Sequence: Synthetic oligonucleotide
accagugucuggaaaauag

SEQ ID NO: 2894430 - RNA, 19 nt, Artificial Sequence
  Description of Artificial Sequence: Synthetic oligonucleotide
acaacuuggauggaauucu

SEQ ID NO: 2894431 - RNA, 19 nt, Artificial Sequence
  Description of Artificial Sequence: Synthetic oligonucleotide
ugcucaggcggaaggacag

SEQ ID NO: 2894432 - RNA, 19 nt, Artificial Sequence
  Description of Artificial Sequence: Synthetic oligonucleotide
cugaaugguggcugggucc

SEQ ID NO: 2894433 - RNA, 19 nt, Artificial Sequence
  Description of Artificial Sequence: Synthetic oligonucleotide
agccaccucacggagaugg

SEQ ID NO: 2894434 - RNA, 19 nt, Artificial Sequence
  Description of Artificial Sequence: Synthetic oligonucleotide
augcacacacacaauguac

SEQ ID NO: 2894435 - RNA, 19 nt, Artificial Sequence
  Description of Artificial Sequence: Synthetic oligonucleotide
cuuguagcccugaauggug

SEQ ID NO: 2894436 - RNA, 19 nt, Artificial Sequence
  Description of Artificial Sequence: Synthetic oligonucleotide
cacaccaagccgcugagug

SEQ ID NO: 2894437 - RNA, 19 nt, Artificial Sequence
  Description of Artificial Sequence: Synthetic oligonucleotide
guauacagcaggucaccag

SEQ ID NO: 2894438 - RNA, 19 nt, Artificial Sequence
  Description of Artificial Sequence: Synthetic oligonucleotide
guuccaaaugaaguucagg

SEQ ID NO: 2894439 - RNA, 19 nt, Artificial Sequence
  Description of Artificial Sequence: Synthetic oligonucleotide
ugugagguccacaccgaug

SEQ ID NO: 2894440 - RNA, 19 nt, Artificial Sequence
  Description of Artificial Sequence: Synthetic oligonucleotide
aaugguggcuggguccucg

SEQ ID NO: 2894441 - RNA, 19 nt, Artificial Sequence
  Description of Artificial Sequence: Synthetic oligonucleotide
gugagguccacaccgauga

SEQ ID NO: 2894442 - RNA, 19 nt, Artificial Sequence
  Description of Artificial Sequence: Synthetic oligonucleotide
uccugugugagguccacac

SEQ ID NO: 2894443 - RNA, 19 nt, Artificial Sequence
  Description of Artificial Sequence: Synthetic oligonucleotide
uccacaacuuggauggaau

SEQ ID NO: 2894444 - RNA, 19 nt, Artificial Sequence
  Description of Artificial Sequence: Synthetic oligonucleotide
aggagaugcucaugcacag

SEQ ID NO: 2894445 - RNA, 19 nt, Artificial Sequence
  Description of Artificial Sequence: Synthetic oligonucleotide
ggugccagcaguaauccgg

SEQ ID NO: 2894446 - RNA, 19 nt, Artificial Sequence
  Description of Artificial Sequence: Synthetic oligonucleotide
auggaauucucagugcuca

SEQ ID NO: 2894447 - RNA, 19 nt, Artificial Sequence
  Description of Artificial Sequence: Synthetic oligonucleotide
uggauggaauucucagugc

SEQ ID NO: 2894448 - RNA, 19 nt, Artificial Sequence
  Description of Artificial Sequence: Synthetic oligonucleotide
caccucacggagaugguag

SEQ ID NO: 2894449 - RNA, 19 nt, Artificial Sequence
  Description of Artificial Sequence: Synthetic oligonucleotide
uaauccggaccagauagac

SEQ ID NO: 2894450 - RNA, 19 nt, Artificial Sequence
  Description of Artificial Sequence: Synthetic oligonucleotide
accacuuguggcuuugggu

SEQ ID NO: 2894451 - RNA, 19 nt, Artificial Sequence
  Description of Artificial Sequence: Synthetic oligonucleotide
cuggaaaauagguccguuc

SEQ ID NO: 2894452 - RNA, 19 nt, Artificial Sequence
  Description of Artificial Sequence: Synthetic oligonucleotide
aaaugaaguucaggggacu

SEQ ID NO: 2894453 - RNA, 19 nt, Artificial Sequence
  Description of Artificial Sequence: Synthetic oligonucleotide
gugucuugcagccaccuca

SEQ ID NO: 2894454 - RNA, 19 nt, Artificial Sequence
  Description of Artificial Sequence: Synthetic oligonucleotide
agccgcugaguguauacag

SEQ ID NO: 2894455 - RNA, 19 nt, Artificial Sequence
  Description of Artificial Sequence: Synthetic oligonucleotide
uuuggguguccugugugag

SEQ ID NO: 2894456 - RNA, 19 nt, Artificial Sequence
  Description of Artificial Sequence: Synthetic oligonucleotide
acuuaggggcuuucaccac

SEQ ID NO: 2894457 - RNA, 19 nt, Artificial Sequence
  Description of Artificial Sequence: Synthetic oligonucleotide
ucacggagaugguaguaca

SEQ ID NO: 2894458 - RNA, 19 nt, Artificial Sequence
  Description of Artificial Sequence: Synthetic oligonucleotide
uuggguguccugugugagg

SEQ ID NO: 2894459 - RNA, 19 nt, Artificial Sequence
  Description of Artificial Sequence: Synthetic oligonucleotide
agaugcucaugcacagucc

SEQ ID NO: 2894460 - RNA, 19 nt, Artificial Sequence
  Description of Artificial Sequence: Synthetic oligonucleotide
acacacaccaagccgcuga

SEQ ID NO: 2894461 - RNA, 19 nt, Artificial Sequence
  Description of Artificial Sequence: Synthetic oligonucleotide
agguccacaccgaugacuc

SEQ ID NO: 2894462 - RNA, 19 nt, Artificial Sequence
  Description of Artificial Sequence: Synthetic oligonucleotide
auagacacugucaggccuc

SEQ ID NO: 2894463 - RNA, 19 nt, Artificial Sequence
  Description of Artificial Sequence: Synthetic oligonucleotide
ugucuugcagccaccucac

SEQ ID NO: 2894464 - RNA, 19 nt, Artificial Sequence
  Description of Artificial Sequence: Synthetic oligonucleotide
agaugguaguacaauucag

SEQ ID NO: 2894465 - RNA, 19 nt, Artificial Sequence
  Description of Artificial Sequence: Synthetic oligonucleotide
agugcucaggcggaaggac

SEQ ID NO: 2894466 - RNA, 19 nt, Artificial Sequence
  Description of Artificial Sequence: Synthetic oligonucleotide
ugugugagguccacaccga

SEQ ID NO: 2894467 - RNA, 19 nt, Artificial Sequence
  Description of Artificial Sequence: Synthetic oligonucleotide
uccacaccgaugacucucc

SEQ ID NO: 2894468 - RNA, 19 nt, Artificial Sequence
  Description of Artificial Sequence: Synthetic oligonucleotide
gauagacacugucaggccu

SEQ ID NO: 2894469 - RNA, 19 nt, Artificial Sequence
  Description of Artificial Sequence: Synthetic oligonucleotide
cucucccagucccacacgg

SEQ ID NO: 2894470 - RNA, 19 nt, Artificial Sequence
  Description of Artificial Sequence: Synthetic oligonucleotide
ggacuuaggggcuuucacc

SEQ ID NO: 2894471 - RNA, 19 nt, Artificial Sequence
  Description of Artificial Sequence: Synthetic oligonucleotide
uacagcaggucaccagugu

SEQ ID NO: 2894472 - RNA, 19 nt, Artificial Sequence
  Description of Artificial Sequence: Synthetic oligonucleotide
ucucccagucccacacggg

SEQ ID NO: 2894473 - RNA, 19 nt, Artificial Sequence
  Description of Artificial Sequence: Synthetic oligonucleotide
  modified_base (15)..(15): a, c, u, g, unknown or other
ugcccuuccucuuunuaaa

SEQ ID NO: 2894474 - RNA, 19 nt, Artificial Sequence
  Description of Artificial Sequence: Synthetic oligonucleotide
aacuuggauggaauucuca

SEQ ID NO: 2894475 - RNA, 19 nt, Artificial Sequence
  Description of Artificial Sequence: Synthetic oligonucleotide
cacaacuuggauggaauuc

SEQ ID NO: 2894476 - RNA, 19 nt, Artificial Sequence
  Description of Artificial Sequence: Synthetic oligonucleotide
ccaaaugaaguucagggga

SEQ ID NO: 2894477 - RNA, 19 nt, Artificial Sequence
  Description of Artificial Sequence: Synthetic oligonucleotide
ugaaugguggcuggguccu

SEQ ID NO: 2894478 - RNA, 19 nt, Artificial Sequence
  Description of Artificial Sequence: Synthetic oligonucleotide
uggaauucucagugcucag

SEQ ID NO: 2894479 - RNA, 19 nt, Artificial Sequence
  Description of Artificial Sequence: Synthetic oligonucleotide
caggagaugcucaugcaca

SEQ ID NO: 2894480 - RNA, 19 nt, Artificial Sequence
  Description of Artificial Sequence: Synthetic oligonucleotide
aaugaaguucaggggacuu

SEQ ID NO: 2894481 - RNA, 19 nt, Artificial Sequence
  Description of Artificial Sequence: Synthetic oligonucleotide
uucagggguuccaaaugaa

SEQ ID NO: 2894482 - RNA, 19 nt, Artificial Sequence
  Description of Artificial Sequence: Synthetic oligonucleotide
ccacuuguggcuuugggug

SEQ ID NO: 2894483 - RNA, 19 nt, Artificial Sequence
  Description of Artificial Sequence: Synthetic oligonucleotide
uggguguccugugugaggu

SEQ ID NO: 2894484 - RNA, 19 nt, Artificial Sequence
  Description of Artificial Sequence: Synthetic oligonucleotide
cuugcagccaccucacgga

SEQ ID NO: 2894485 - RNA, 19 nt, Artificial Sequence
  Description of Artificial Sequence: Synthetic oligonucleotide
cucggugucuugcagccac

SEQ ID NO: 2894486 - RNA, 19 nt, Artificial Sequence
  Description of Artificial Sequence: Synthetic oligonucleotide
  modified_base (5)..(5): a, c, u, g, unknown or other
cuuunuaaaacagcuugua

SEQ ID NO: 2894487 - RNA, 19 nt, Artificial Sequence
  Description of Artificial Sequence: Synthetic oligonucleotide
uacaauucagggguuccaa

SEQ ID NO: 2894488 - RNA, 19 nt, Artificial Sequence
  Description of Artificial Sequence: Synthetic oligonucleotide
augacucucccagucccac

SEQ ID NO: 2894489 - RNA, 19 nt, Artificial Sequence
  Description of Artificial Sequence: Synthetic oligonucleotide
gaccagauagacacuguca

SEQ ID NO: 2894490 - RNA, 19 nt, Artificial Sequence
  Description of Artificial Sequence: Synthetic oligonucleotide
aggccucaggccuuccagg

SEQ ID NO: 2894491 - RNA, 19 nt, Artificial Sequence
  Description of Artificial Sequence: Synthetic oligonucleotide
acagcuuguagcccugaau

SEQ ID NO: 2894492 - RNA, 19 nt, Artificial Sequence
  Description of Artificial Sequence: Synthetic oligonucleotide
uucaggggacuuaggggcu

SEQ ID NO: 2894493 - RNA, 19 nt, Artificial Sequence
  Description of Artificial Sequence: Synthetic oligonucleotide
caagccgcugaguguauac

SEQ ID NO: 2894494 - RNA, 19 nt, Artificial Sequence
  Description of Artificial Sequence: Synthetic oligonucleotide
gauggaauucucagugcuc

SEQ ID NO: 2894495 - RNA, 19 nt, Artificial Sequence
  Description of Artificial Sequence: Synthetic oligonucleotide
gaaguucaggggacuuagg

SEQ ID NO: 2894496 - RNA, 19 nt, Artificial Sequence
  Description of Artificial Sequence: Synthetic oligonucleotide
gucaccagugucuggaaaa

SEQ ID NO: 2894497 - RNA, 19 nt, Artificial Sequence
  Description of Artificial Sequence: Synthetic oligonucleotide
gggcuuucaccacuugugg

SEQ ID NO: 2894498 - RNA, 19 nt, Artificial Sequence
  Description of Artificial Sequence: Synthetic oligonucleotide
acaauucagggguuccaaa

SEQ ID NO: 2894499 - RNA, 19 nt, Artificial Sequence
  Description of Artificial Sequence: Synthetic oligonucleotide
aacagcuuguagcccugaa

SEQ ID NO: 2894500 - RNA, 19 nt, Artificial Sequence
  Description of Artificial Sequence: Synthetic oligonucleotide
cucacggagaugguaguac

SEQ ID NO: 2894501 - RNA, 19 nt, Artificial Sequence
  Description of Artificial Sequence: Synthetic oligonucleotide
acaugcacacacacaaugu

SEQ ID NO: 2894502 - RNA, 19 nt, Artificial Sequence
  Description of Artificial Sequence: Synthetic oligonucleotide
ugaguguauacagcagguc

SEQ ID NO: 2894503 - RNA, 19 nt, Artificial Sequence
  Description of Artificial Sequence: Synthetic oligonucleotide
acgggugccagcaguaauc

SEQ ID NO: 2894504 - RNA, 19 nt, Artificial Sequence
  Description of Artificial Sequence: Synthetic oligonucleotide
cucaugcacaguccccggg

SEQ ID NO: 2894505 - RNA, 19 nt, Artificial Sequence
  Description of Artificial Sequence: Synthetic oligonucleotide
aggggcuuucaccacuugu

SEQ ID NO: 2894506 - RNA, 19 nt, Artificial Sequence
  Description of Artificial Sequence: Synthetic oligonucleotide
uccaggagaugcucaugca

SEQ ID NO: 2894507 - RNA, 19 nt, Artificial Sequence
  Description of Artificial Sequence: Synthetic oligonucleotide
ccagugucuggaaaauagg

SEQ ID NO: 2894508 - RNA, 19 nt, Artificial Sequence
  Description of Artificial Sequence: Synthetic oligonucleotide
ucccagucccacacgggug

SEQ ID NO: 2894509 - RNA, 19 nt, Artificial Sequence
  Description of Artificial Sequence: Synthetic oligonucleotide
  modified_base (16)..(16): a, c, u, g, unknown or other
cugcccuuccucuuunuaa

SEQ ID NO: 2894510 - RNA, 19 nt, Artificial Sequence
  Description of Artificial Sequence: Synthetic oligonucleotide
guguauacagcaggucacc

SEQ ID NO: 2894511 - RNA, 19 nt, Artificial Sequence
  Description of Artificial Sequence: Synthetic oligonucleotide
aauccggaccagauagaca

SEQ ID NO: 2894512 - RNA, 19 nt, Artificial Sequence
  Description of Artificial Sequence: Synthetic oligonucleotide
uccguucuccugcugcccu

SEQ ID NO: 2894513 - RNA, 19 nt, Artificial Sequence
  Description of Artificial Sequence: Synthetic oligonucleotide
caugcacaguccccgggag

SEQ ID NO: 2894514 - RNA, 19 nt, Artificial Sequence
  Description of Artificial Sequence: Synthetic oligonucleotide
ggagaugguaguacaauuc

SEQ ID NO: 2894515 - RNA, 19 nt, Artificial Sequence
  Description of Artificial Sequence: Synthetic oligonucleotide
augcucaugcacagucccc

SEQ ID NO: 2894516 - RNA, 19 nt, Artificial Sequence
  Description of Artificial Sequence: Synthetic oligonucleotide
cacugucaggccucaggcc

SEQ ID NO: 2894517 - RNA, 19 nt, Artificial Sequence
  Description of Artificial Sequence: Synthetic oligonucleotide
caccacuuguggcuuuggg

SEQ ID NO: 2894518 - RNA, 19 nt, Artificial Sequence
  Description of Artificial Sequence: Synthetic oligonucleotide
uagcccugaaugguggcug

SEQ ID NO: 2894519 - RNA, 19 nt, Artificial Sequence
  Description of Artificial Sequence: Synthetic oligonucleotide
uuaggggcuuucaccacuu

SEQ ID NO: 2894520 - RNA, 19 nt, Artificial Sequence
  Description of Artificial Sequence: Synthetic oligonucleotide
caacuuggauggaauucuc

SEQ ID NO: 2894521 - RNA, 19 nt, Artificial Sequence
  Description of Artificial Sequence: Synthetic oligonucleotide
acaccaagccgcugagugu

SEQ ID NO: 2894522 - RNA, 19 nt, Artificial Sequence
  Description of Artificial Sequence: Synthetic oligonucleotide
acuuguggcuuuggguguc

SEQ ID NO: 2894523 - RNA, 19 nt, Artificial Sequence
  Description of Artificial Sequence: Synthetic oligonucleotide
uaguacaauucagggguuc

SEQ ID NO: 2894524 - RNA, 19 nt, Artificial Sequence
  Description of Artificial Sequence: Synthetic oligonucleotide
ccagauagacacugucagg

SEQ ID NO: 2894525 - RNA, 19 nt, Artificial Sequence
  Description of Artificial Sequence: Synthetic oligonucleotide
gccagcaguaauccggacc

SEQ ID NO: 2894526 - RNA, 19 nt, Artificial Sequence
  Description of Artificial Sequence: Synthetic oligonucleotide
guccucggugucuugcagc

SEQ ID NO: 2894527 - RNA, 19 nt, Artificial Sequence
  Description of Artificial Sequence: Synthetic oligonucleotide
caugcacacacacaaugua

SEQ ID NO: 2894528 - RNA, 19 nt, Artificial Sequence
  Description of Artificial Sequence: Synthetic oligonucleotide
cuuuggguguccuguguga

SEQ ID NO: 2894529 - RNA, 19 nt, Artificial Sequence
  Description of Artificial Sequence: Synthetic oligonucleotide
ggaaaauagguccguucuc

SEQ ID NO: 2894530 - RNA, 19 nt, Artificial Sequence
  Description of Artificial Sequence: Synthetic oligonucleotide
uuccacaacuuggauggaa

SEQ ID NO: 2894531 - RNA, 19 nt, Artificial Sequence
  Description of Artificial Sequence: Synthetic oligonucleotide
ggcuuucaccacuuguggc

SEQ ID NO: 2894532 - RNA, 19 nt, Artificial Sequence
  Description of Artificial Sequence: Synthetic oligonucleotide
caggccucaggccuuccag

SEQ ID NO: 2894533 - RNA, 19 nt, Artificial Sequence
  Description of Artificial Sequence: Synthetic oligonucleotide
ucaggccucaggccuucca

SEQ ID NO: 2894534 - RNA, 19 nt, Artificial Sequence
  Description of Artificial Sequence: Synthetic oligonucleotide
auagguccguucuccugcu

SEQ ID NO: 2894535 - RNA, 19 nt, Artificial Sequence
  Description of Artificial Sequence: Synthetic oligonucleotide
acucucccagucccacacg

SEQ ID NO: 2894536 - RNA, 19 nt, Artificial Sequence
  Description of Artificial Sequence: Synthetic oligonucleotide
cagugucuggaaaauaggu

SEQ ID NO: 2894537 - RNA, 19 nt, Artificial Sequence
  Description of Artificial Sequence: Synthetic oligonucleotide
ucccacacgggugccagca

SEQ ID NO: 2894538 - RNA, 19 nt, Artificial Sequence
  Description of Artificial Sequence: Synthetic oligonucleotide
ugcacaguccccgggaguu

SEQ ID NO: 2894539 - RNA, 19 nt, Artificial Sequence
  Description of Artificial Sequence: Synthetic oligonucleotide
ucaccagugucuggaaaau

SEQ ID NO: 2894540 - RNA, 19 nt, Artificial Sequence
  Description of Artificial Sequence: Synthetic oligonucleotide
cuuggauggaauucucagu

SEQ ID NO: 2894541 - RNA, 19 nt, Artificial Sequence
  Description of Artificial Sequence: Synthetic oligonucleotide
cagggguuccaaaugaagu

SEQ ID NO: 2894542 - RNA, 19 nt, Artificial Sequence
  Description of Artificial Sequence: Synthetic oligonucleotide
ggggcuuucaccacuugug

SEQ ID NO: 2894543 - RNA, 19 nt, Artificial Sequence
  Description of Artificial Sequence: Synthetic oligonucleotide
ggaccagauagacacuguc

SEQ ID NO: 2894544 - RNA, 19 nt, Artificial Sequence
  Description of Artificial Sequence: Synthetic oligonucleotide
cacacaccaagccgcugag

SEQ ID NO: 2894545 - RNA, 19 nt, Artificial Sequence
  Description of Artificial Sequence: Synthetic oligonucleotide
ccagcaguaauccggacca

SEQ ID NO: 2894546 - RNA, 19 nt, Artificial Sequence
  Description of Artificial Sequence: Synthetic oligonucleotide
uggcuuuggguguccugug

SEQ ID NO: 2894547 - RNA, 19 nt, Artificial Sequence
  Description of Artificial Sequence: Synthetic oligonucleotide
acggagaugguaguacaau

SEQ ID NO: 2894548 - RNA, 19 nt, Artificial Sequence
  Description of Artificial Sequence: Synthetic oligonucleotide
uggguccucggugucuugc

SEQ ID NO: 2894549 - RNA, 19 nt, Artificial Sequence
  Description of Artificial Sequence: Synthetic oligonucleotide
cgggaguuccacaacuugg

SEQ ID NO: 2894550 - RNA, 19 nt, Artificial Sequence
  Description of Artificial Sequence: Synthetic oligonucleotide
auacagcaggucaccagug

SEQ ID NO: 2894551 - RNA, 19 nt, Artificial Sequence
  Description of Artificial Sequence: Synthetic oligonucleotide
ugacucucccagucccaca

SEQ ID NO: 2894552 - RNA, 19 nt, Artificial Sequence
  Description of Artificial Sequence: Synthetic oligonucleotide
cugaguguauacagcaggu

SEQ ID NO: 2894553 - RNA, 19 nt, Artificial Sequence
  Description of Artificial Sequence: Synthetic oligonucleotide
aaacagcuuguagcccuga

SEQ ID NO: 2894554 - RNA, 19 nt, Artificial Sequence
  Description of Artificial Sequence: Synthetic oligonucleotide
agucccacacgggugccag

SEQ ID NO: 2894555 - RNA, 19 nt, Artificial Sequence
  Description of Artificial Sequence: Synthetic oligonucleotide
ucggugucuugcagccacc

SEQ ID NO: 2894556 - RNA, 19 nt, Artificial Sequence
  Description of Artificial Sequence: Synthetic oligonucleotide
ccaggagaugcucaugcac

SEQ ID NO: 2894557 - RNA, 19 nt, Artificial Sequence
  Description of Artificial Sequence: Synthetic oligonucleotide
gggacuuaggggcuuucac

SEQ ID NO: 2894558 - RNA, 19 nt, Artificial Sequence
  Description of Artificial Sequence: Synthetic oligonucleotide
accucacggagaugguagu

SEQ ID NO: 2894559 - RNA, 19 nt, Artificial Sequence
  Description of Artificial Sequence: Synthetic oligonucleotide
cacaguccccgggaguucc

SEQ ID NO: 2894560 - RNA, 19 nt, Artificial Sequence
  Description of Artificial Sequence: Synthetic oligonucleotide
caauucagggguuccaaau

SEQ ID NO: 2894561 - RNA, 19 nt, Artificial Sequence
  Description of Artificial Sequence: Synthetic oligonucleotide
  modified_base (13)..(13): a, c, u, g, unknown or other
cccuuccucuuunuaaaac

SEQ ID NO: 2894562 - RNA, 19 nt, Artificial Sequence
  Description of Artificial Sequence: Synthetic oligonucleotide
guccacaccgaugacucuc

SEQ ID NO: 2894563 - RNA, 19 nt, Artificial Sequence
  Description of Artificial Sequence: Synthetic oligonucleotide
guacaauucagggguucca

SEQ ID NO: 2894564 - RNA, 19 nt, Artificial Sequence
  Description of Artificial Sequence: Synthetic oligonucleotide
uccggaccagauagacacu

SEQ ID NO: 2894565 - RNA, 19 nt, Artificial Sequence
  Description of Artificial Sequence: Synthetic oligonucleotide
uaggggcuuucaccacuug

SEQ ID NO: 2894566 - RNA, 19 nt, Artificial Sequence
  Description of Artificial Sequence: Synthetic oligonucleotide
gaugacucucccaguccca

SEQ ID NO: 2894567 - RNA, 19 nt, Artificial Sequence
  Description of Artificial Sequence: Synthetic oligonucleotide
gguuccaaaugaaguucag

SEQ ID NO: 2894568 - RNA, 19 nt, Artificial Sequence
  Description of Artificial Sequence: Synthetic oligonucleotide
uagacacugucaggccuca

SEQ ID NO: 2894569 - RNA, 19 nt, Artificial Sequence
  Description of Artificial Sequence: Synthetic oligonucleotide
gguccguucuccugcugcc

SEQ ID NO: 2894570 - RNA, 19 nt, Artificial Sequence
  Description of Artificial Sequence: Synthetic oligonucleotide
augcacaguccccgggagu

SEQ ID NO: 2894571 - RNA, 19 nt, Artificial Sequence
  Description of Artificial Sequence: Synthetic oligonucleotide
gucuugcagccaccucacg

SEQ ID NO: 2894572 - RNA, 19 nt, Artificial Sequence
  Description of Artificial Sequence: Synthetic oligonucleotide
gggguuccaaaugaaguuc

SEQ ID NO: 2894573 - RNA, 19 nt, Artificial Sequence
  Description of Artificial Sequence: Synthetic oligonucleotide
augaaguucaggggacuua

SEQ ID NO: 2894574 - RNA, 19 nt, Artificial Sequence
  Description of Artificial Sequence: Synthetic oligonucleotide
uacacacaccaagccgcug

SEQ ID NO: 2894575 - RNA, 19 nt, Artificial Sequence
  Description of Artificial Sequence: Synthetic oligonucleotide
uuguuuccacaugcacaca

SEQ ID NO: 2894576 - RNA, 19 nt, Artificial Sequence
  Description of Artificial Sequence: Synthetic oligonucleotide
cuuaggggcuuucaccacu

SEQ ID NO: 2894577 - RNA, 19 nt, Artificial Sequence
  Description of Artificial Sequence: Synthetic oligonucleotide
cucagugcucaggcggaag

SEQ ID NO: 2894578 - RNA, 19 nt, Artificial Sequence
  Description of Artificial Sequence: Synthetic oligonucleotide
cgaugacucucccaguccc

SEQ ID NO: 2894579 - RNA, 19 nt, Artificial Sequence
  Description of Artificial Sequence: Synthetic oligonucleotide
cuuguggcuuugggugucc

SEQ ID NO: 2894580 - RNA, 19 nt, Artificial Sequence
  Description of Artificial Sequence: Synthetic oligonucleotide
uguccugugugagguccac

SEQ ID NO: 2894581 - RNA, 19 nt, Artificial Sequence
  Description of Artificial Sequence: Synthetic oligonucleotide
uagguccguucuccugcug

SEQ ID NO: 2894582 - RNA, 19 nt, Artificial Sequence
  Description of Artificial Sequence: Synthetic oligonucleotide
cacaccgaugacucuccca

SEQ ID NO: 2894583 - RNA, 19 nt, Artificial Sequence
  Description of Artificial Sequence: Synthetic oligonucleotide
gggaguuccacaacuugga

SEQ ID NO: 2894584 - RNA, 19 nt, Artificial Sequence
  Description of Artificial Sequence: Synthetic oligonucleotide
guaauccggaccagauaga

SEQ ID NO: 2894585 - RNA, 19 nt, Artificial Sequence
  Description of Artificial Sequence: Synthetic oligonucleotide
gcucaugcacaguccccgg

SEQ ID NO: 2894586 - RNA, 19 nt, Artificial Sequence
  Description of Artificial Sequence: Synthetic oligonucleotide
cacggagaugguaguacaa

SEQ ID NO: 2894587 - RNA, 19 nt, Artificial Sequence
  Description of Artificial Sequence: Synthetic oligonucleotide
uuucaccacuuguggcuuu

SEQ ID NO: 2894588 - RNA, 19 nt, Artificial Sequence
  Description of Artificial Sequence: Synthetic oligonucleotide
gguccucggugucuugcag

SEQ ID NO: 2894589 - RNA, 19 nt, Artificial Sequence
  Description of Artificial Sequence: Synthetic oligonucleotide
cccagucccacacgggugc

SEQ ID NO: 2894590 - RNA, 19 nt, Artificial Sequence
  Description of Artificial Sequence: Synthetic oligonucleotide
ggguuccaaaugaaguuca

SEQ ID NO: 2894591 - RNA, 19 nt, Artificial Sequence
  Description of Artificial Sequence: Synthetic oligonucleotide
uccccgggaguuccacaac

SEQ ID NO: 2894592 - RNA, 19 nt, Artificial Sequence
  Description of Artificial Sequence: Synthetic oligonucleotide
aguccccgggaguuccaca

SEQ ID NO: 2894593 - RNA, 19 nt, Artificial Sequence
  Description of Artificial Sequence: Synthetic oligonucleotide
cacacacaauguacacaca

SEQ ID NO: 2894594 - RNA, 19 nt, Artificial Sequence
  Description of Artificial Sequence: Synthetic oligonucleotide
guccccgggaguuccacaa

SEQ ID NO: 2894595 - RNA, 19 nt, Artificial Sequence
  Description of Artificial Sequence: Synthetic oligonucleotide
guggcuuuggguguccugu

SEQ ID NO: 2894596 - RNA, 19 nt, Artificial Sequence
  Description of Artificial Sequence: Synthetic oligonucleotide
ugguggcuggguccucggu

SEQ ID NO: 2894597 - RNA, 19 nt, Artificial Sequence
  Description of Artificial Sequence: Synthetic oligonucleotide
ccugaaugguggcuggguc

SEQ ID NO: 2894598 - RNA, 19 nt, Artificial Sequence
  Description of Artificial Sequence: Synthetic oligonucleotide
gggugccagcaguaauccg

SEQ ID NO: 2894599 - RNA, 19 nt, Artificial Sequence
  Description of Artificial Sequence: Synthetic oligonucleotide
ugccagcaguaauccggac

SEQ ID NO: 2894600 - RNA, 19 nt, Artificial Sequence
  Description of Artificial Sequence: Synthetic oligonucleotide
ccgaugacucucccagucc

SEQ ID NO: 2894601 - RNA, 19 nt, Artificial Sequence
  Description of Artificial Sequence: Synthetic oligonucleotide
cagcaggucaccagugucu

SEQ ID NO: 2894602 - RNA, 19 nt, Artificial Sequence
  Description of Artificial Sequence: Synthetic oligonucleotide
gugcucaggcggaaggaca

SEQ ID NO: 2894603 - RNA, 19 nt, Artificial Sequence
  Description of Artificial Sequence: Synthetic oligonucleotide
gugccagcaguaauccgga

SEQ ID NO: 2894604 - RNA, 19 nt, Artificial Sequence
  Description of Artificial Sequence: Synthetic oligonucleotide
aggucaccagugucuggaa

SEQ ID NO: 2894605 - RNA, 19 nt, Artificial Sequence
  Description of Artificial Sequence: Synthetic oligonucleotide
ccgcugaguguauacagca

SEQ ID NO: 2894606 - RNA, 19 nt, Artificial Sequence
  Description of Artificial Sequence: Synthetic oligonucleotide
caguaauccggaccagaua

SEQ ID NO: 2894607 - RNA, 19 nt, Artificial Sequence
  Description of Artificial Sequence: Synthetic oligonucleotide
ucucagugcucaggcggaa

SEQ ID NO: 2894608 - RNA, 19 nt, Artificial Sequence
  Description of Artificial Sequence: Synthetic oligonucleotide
gccgcugaguguauacagc

SEQ ID NO: 2894609 - RNA, 19 nt, Artificial Sequence
  Description of Artificial Sequence: Synthetic oligonucleotide
aggggacuuaggggcuuuc

SEQ ID NO: 2894610 - RNA, 19 nt, Artificial Sequence
  Description of Artificial Sequence: Synthetic oligonucleotide
ccgggaguuccacaacuug

SEQ ID NO: 2894611 - RNA, 19 nt, Artificial Sequence
  Description of Artificial Sequence: Synthetic oligonucleotide
ucaggccuuccaggagaug

SEQ ID NO: 2894612 - RNA, 19 nt, Artificial Sequence
  Description of Artificial Sequence: Synthetic oligonucleotide
ugucaggccucaggccuuc

SEQ ID NO: 2894613 - RNA, 19 nt, Artificial Sequence
  Description of Artificial Sequence: Synthetic oligonucleotide
ccggaccagauagacacug

SEQ ID NO: 2894614 - RNA, 19 nt, Artificial Sequence
  Description of Artificial Sequence: Synthetic oligonucleotide
cucccagucccacacgggu

SEQ ID NO: 2894615 - RNA, 19 nt, Artificial Sequence
  Description of Artificial Sequence: Synthetic oligonucleotide
  modified_base (18)..(18): a, c, u, g, unknown or other
ugcugcccuuccucuuunu

SEQ ID NO: 2894616 - RNA, 19 nt, Artificial Sequence
  Description of Artificial Sequence: Synthetic oligonucleotide
cacacgggugccagcagua

SEQ ID NO: 2894617 - RNA, 19 nt, Artificial Sequence
  Description of Artificial Sequence: Synthetic oligonucleotide
ucaggggacuuaggggcuu

SEQ ID NO: 2894618 - RNA, 19 nt, Artificial Sequence
  Description of Artificial Sequence: Synthetic oligonucleotide
  modified_base (14)..(14): a, c, u, g, unknown or other
gcccuuccucuuunuaaaa

SEQ ID NO: 2894619 - RNA, 19 nt, Artificial Sequence
  Description of Artificial Sequence: Synthetic oligonucleotide
cacuuguggcuuugggugu

SEQ ID NO: 2894620 - RNA, 19 nt, Artificial Sequence
  Description of Artificial Sequence: Synthetic oligonucleotide
ggugucuugcagccaccuc

SEQ ID NO: 2894621 - RNA, 19 nt, Artificial Sequence
  Description of Artificial Sequence: Synthetic oligonucleotide
gccucaggccuuccaggag

SEQ ID NO: 2894622 - RNA, 19 nt, Artificial Sequence
  Description of Artificial Sequence: Synthetic oligonucleotide
ggucaccagugucuggaaa

SEQ ID NO: 2894623 - RNA, 19 nt, Artificial Sequence
  Description of Artificial Sequence: Synthetic oligonucleotide
ccucaggccuuccaggaga

SEQ ID NO: 2894624 - RNA, 19 nt, Artificial Sequence
  Description of Artificial Sequence: Synthetic oligonucleotide
gcuuguagcccugaauggu

SEQ ID NO: 2894625 - RNA, 19 nt, Artificial Sequence
  Description of Artificial Sequence: Synthetic oligonucleotide
cagugcucaggcggaagga

SEQ ID NO: 2894626 - RNA, 19 nt, Artificial Sequence
  Description of Artificial Sequence: Synthetic oligonucleotide
guagcccugaaugguggcu

SEQ ID NO: 2894627 - RNA, 19 nt, Artificial Sequence
  Description of Artificial Sequence: Synthetic oligonucleotide
gucuggaaaauagguccgu

SEQ ID NO: 2894628 - RNA, 19 nt, Artificial Sequence
  Description of Artificial Sequence: Synthetic oligonucleotide
acacgggugccagcaguaa

SEQ ID NO: 2894629 - RNA, 19 nt, Artificial Sequence
  Description of Artificial Sequence: Synthetic oligonucleotide
gucccacacgggugccagc

SEQ ID NO: 2894630 - RNA, 19 nt, Artificial Sequence
  Description of Artificial Sequence: Synthetic oligonucleotide
guacacacaccaagccgcu

SEQ ID NO: 2894631 - RNA, 19 nt, Artificial Sequence
  Description of Artificial Sequence: Synthetic oligonucleotide
cuggguccucggugucuug

SEQ ID NO: 2894632 - RNA, 19 nt, Artificial Sequence
  Description of Artificial Sequence: Synthetic oligonucleotide
ggguccucggugucuugca

SEQ ID NO: 2894633 - RNA, 19 nt, Artificial Sequence
  Description of Artificial Sequence: Synthetic oligonucleotide
guguccugugugaggucca

SEQ ID NO: 2894634 - RNA, 19 nt, Artificial Sequence
  Description of Artificial Sequence: Synthetic oligonucleotide
gaaugguggcuggguccuc

SEQ ID NO: 2894635 - RNA, 19 nt, Artificial Sequence
  Description of Artificial Sequence: Synthetic oligonucleotide
ggaguuccacaacuuggau

SEQ ID NO: 2894636 - RNA, 19 nt, Artificial Sequence
  Description of Artificial Sequence: Synthetic oligonucleotide
caguccccgggaguuccac

SEQ ID NO: 2894637 - RNA, 19 nt, Artificial Sequence
  Description of Artificial Sequence: Synthetic oligonucleotide
gugugagguccacaccgau

SEQ ID NO: 2894638 - RNA, 19 nt, Artificial Sequence
  Description of Artificial Sequence: Synthetic oligonucleotide
guuccacaacuuggaugga

SEQ ID NO: 2894639 - RNA, 19 nt, Artificial Sequence
  Description of Artificial Sequence: Synthetic oligonucleotide
gcaguaauccggaccagau

SEQ ID NO: 2894640 - RNA, 19 nt, Artificial Sequence
  Description of Artificial Sequence: Synthetic oligonucleotide
cuuucaccacuuguggcuu

SEQ ID NO: 2894641 - RNA, 19 nt, Artificial Sequence
  Description of Artificial Sequence: Synthetic oligonucleotide
cgggugccagcaguaaucc

SEQ ID NO: 2894642 - RNA, 19 nt, Artificial Sequence
  Description of Artificial Sequence: Synthetic oligonucleotide
gcccugaaugguggcuggg

SEQ ID NO: 2894643 - RNA, 19 nt, Artificial Sequence
  Description of Artificial Sequence: Synthetic oligonucleotide
guaguacaauucagggguu

SEQ ID NO: 2894644 - RNA, 19 nt, Artificial Sequence
  Description of Artificial Sequence: Synthetic oligonucleotide
ggggacuuaggggcuuuca

SEQ ID NO: 2894645 - RNA, 19 nt, Artificial Sequence
  Description of Artificial Sequence: Synthetic oligonucleotide
cucaggccuuccaggagau

SEQ ID NO: 2894646 - RNA, 19 nt, Artificial Sequence
  Description of Artificial Sequence: Synthetic oligonucleotide
caccagugucuggaaaaua

SEQ ID NO: 2894647 - RNA, 19 nt, Artificial Sequence
  Description of Artificial Sequence: Synthetic oligonucleotide
  modified_base (17)..(17): a, c, u, g, unknown or other
gcugcccuuccucuuunua

SEQ ID NO: 2894648 - RNA, 19 nt, Artificial Sequence
  Description of Artificial Sequence: Synthetic oligonucleotide
  modified_base (8)..(8): a, c, u, g, unknown or other
ccucuuunuaaaacagcuu

SEQ ID NO: 2894649 - RNA, 19 nt, Artificial Sequence
  Description of Artificial Sequence: Synthetic oligonucleotide
ccacaccgaugacucuccc

SEQ ID NO: 2894650 - RNA, 19 nt, Artificial Sequence
  Description of Artificial Sequence: Synthetic oligonucleotide
ggccuuccaggagaugcuc

SEQ ID NO: 2894651 - RNA, 19 nt, Artificial Sequence
  Description of Artificial Sequence: Synthetic oligonucleotide
gccuuccaggagaugcuca

SEQ ID NO: 2894652 - RNA, 19 nt, Artificial Sequence
  Description of Artificial Sequence: Synthetic oligonucleotide
acaguccccgggaguucca

SEQ ID NO: 2894653 - RNA, 19 nt, Artificial Sequence
  Description of Artificial Sequence: Synthetic oligonucleotide
cacgggugccagcaguaau

SEQ ID NO: 2894654 - RNA, 19 nt, Artificial Sequence
  Description of Artificial Sequence: Synthetic oligonucleotide
  modified_base (19)..(19): a, c, u, g, unknown or other
cugcugcccuuccucuuun

SEQ ID NO: 2894655 - RNA, 19 nt, Artificial Sequence
  Description of Artificial Sequence: Synthetic oligonucleotide
gucaggccucaggccuucc

SEQ ID NO: 2894656 - RNA, 19 nt, Artificial Sequence
  Description of Artificial Sequence: Synthetic oligonucleotide
accaagccgcugaguguau

SEQ ID NO: 2894657 - RNA, 19 nt, Artificial Sequence
  Description of Artificial Sequence: Synthetic oligonucleotide
caccgaugacucucccagu

SEQ ID NO: 2894658 - RNA, 19 nt, Artificial Sequence
  Description of Artificial Sequence: Synthetic oligonucleotide
ggguguccugugugagguc

SEQ ID NO: 2894659 - RNA, 19 nt, Artificial Sequence
  Description of Artificial Sequence: Synthetic oligonucleotide
ggagaugcucaugcacagu

SEQ ID NO: 2894660 - RNA, 19 nt, Artificial Sequence
  Description of Artificial Sequence: Synthetic oligonucleotide
cccacacgggugccagcag

SEQ ID NO: 2894661 - RNA, 19 nt, Artificial Sequence
  Description of Artificial Sequence: Synthetic oligonucleotide
cagucccacacgggugcca

SEQ ID NO: 2894662 - RNA, 19 nt, Artificial Sequence
  Description of Artificial Sequence: Synthetic oligonucleotide
cugucaggccucaggccuu

SEQ ID NO: 2894663 - RNA, 19 nt, Artificial Sequence
  Description of Artificial Sequence: Synthetic oligonucleotide
ccagucccacacgggugcc

SEQ ID NO: 2894664 - RNA, 19 nt, Artificial Sequence
  Description of Artificial Sequence: Synthetic oligonucleotide
gguccacaccgaugacucu

SEQ ID NO: 2894665 - RNA, 19 nt, Artificial Sequence
  Description of Artificial Sequence: Synthetic oligonucleotide
cagccaccucacggagaug

SEQ ID NO: 2894666 - RNA, 19 nt, Artificial Sequence
  Description of Artificial Sequence: Synthetic oligonucleotide
ccacaacuuggauggaauu

SEQ ID NO: 2894667 - RNA, 19 nt, Artificial Sequence
  Description of Artificial Sequence: Synthetic oligonucleotide
cggagaugguaguacaauu

SEQ ID NO: 2894668 - RNA, 19 nt, Artificial Sequence
  Description of Artificial Sequence: Synthetic oligonucleotide
gcacaguccccgggaguuc

SEQ ID NO: 2894669 - RNA, 19 nt, Artificial Sequence
  Description of Artificial Sequence: Synthetic oligonucleotide
ccccgggaguuccacaacu

SEQ ID NO: 2894670 - RNA, 19 nt, Artificial Sequence
  Description of Artificial Sequence: Synthetic oligonucleotide
cguucuccugcugcccuuc

SEQ ID NO: 2894671 - RNA, 19 nt, Artificial Sequence
  Description of Artificial Sequence: Synthetic oligonucleotide
ccacacgggugccagcagu

SEQ ID NO: 2894672 - RNA, 19 nt, Artificial Sequence
  Description of Artificial Sequence: Synthetic oligonucleotide
ccaccucacggagauggua

SEQ ID NO: 2894673 - RNA, 19 nt, Artificial Sequence
  Description of Artificial Sequence: Synthetic oligonucleotide
ccucacggagaugguagua

SEQ ID NO: 2894674 - RNA, 19 nt, Artificial Sequence
  Description of Artificial Sequence: Synthetic oligonucleotide
gcuggguccucggugucuu

SEQ ID NO: 2894675 - RNA, 19 nt, Artificial Sequence
  Description of Artificial Sequence: Synthetic oligonucleotide
cccugaaugguggcugggu

SEQ ID NO: 2894676 - RNA, 19 nt, Artificial Sequence
  Description of Artificial Sequence: Synthetic oligonucleotide
ccaagccgcugaguguaua

SEQ ID NO: 2894677 - RNA, 19 nt, Artificial Sequence
  Description of Artificial Sequence: Synthetic oligonucleotide
cggaccagauagacacugu

SEQ ID NO: 2894678 - RNA, 19 nt, Artificial Sequence
  Description of Artificial Sequence: Synthetic oligonucleotide
cccgggaguuccacaacuu

SEQ ID NO: 2894679 - RNA, 19 nt, Artificial Sequence
  Description of Artificial Sequence: Synthetic oligonucleotide
ccucggugucuugcagcca

SEQ ID NO: 2894680 - RNA, 19 nt, Artificial Sequence
  Description of Artificial Sequence: Synthetic oligonucleotide
caggggacuuaggggcuuu

SEQ ID NO: 2894681 - RNA, 19 nt, Artificial Sequence
  Description of Artificial Sequence: Synthetic oligonucleotide
gccaccucacggagauggu

SEQ ID NO: 2894682 - RNA, 19 nt, Artificial Sequence
  Description of Artificial Sequence: Synthetic oligonucleotide
cggugucuugcagccaccu

SEQ ID NO: 2894683 - RNA, 19 nt, Artificial Sequence
  Description of Artificial Sequence: Synthetic oligonucleotide
ccguucuccugcugcccuu

SEQ ID NO: 2894684 - RNA, 19 nt, Artificial Sequence
  Description of Artificial Sequence: Synthetic oligonucleotide
  modified_base (1)..(1): a, c, u, g, unknown or other
nuaaaacagcuuguagccc

SEQ ID NO: 2894685 - RNA, 19 nt, Artificial Sequence
  Description of Artificial Sequence: Synthetic oligonucleotide
auguauauaucuuaaaacg

SEQ ID NO: 2894686 - RNA, 19 nt, Artificial Sequence
  Description of Artificial Sequence: Synthetic oligonucleotide
aagugaacaguccuguucc

SEQ ID NO: 2894687 - RNA, 19 nt, Artificial Sequence
  Description of Artificial Sequence: Synthetic oligonucleotide
uauauaucuuaaaacgugg

SEQ ID NO: 2894688 - RNA, 19 nt, Artificial Sequence
  Description of Artificial Sequence: Synthetic oligonucleotide
aucauuuuaauguauaagu

SEQ ID NO: 2894689 - RNA, 19 nt, Artificial Sequence
  Description of Artificial Sequence: Synthetic oligonucleotide
aaguuaccgaguuugaauc

SEQ ID NO: 2894690 - RNA, 19 nt, Artificial Sequence
  Description of Artificial Sequence: Synthetic oligonucleotide
uauguauauaucuuaaaac

SEQ ID NO: 2894691 - RNA, 19 nt, Artificial Sequence
  Description of Artificial Sequence: Synthetic oligonucleotide
agaacaggcacccucaggg

SEQ ID NO: 2894692 - RNA, 19 nt, Artificial Sequence
  Description of Artificial Sequence: Synthetic oligonucleotide
uguauauaucuuaaaacgu

SEQ ID NO: 2894693 - RNA, 19 nt, Artificial Sequence
  Description of Artificial Sequence: Synthetic oligonucleotide
uuuaauguauaaguuuugg

SEQ ID NO: 2894694 - RNA, 19 nt, Artificial Sequence
  Description of Artificial Sequence: Synthetic oligonucleotide
acagcuaagguugagaggg

SEQ ID NO: 2894695 - RNA, 19 nt, Artificial Sequence
  Description of Artificial Sequence: Synthetic oligonucleotide
uuugaaucaggcaggauca

SEQ ID NO: 2894696 - RNA, 19 nt, Artificial Sequence
  Description of Artificial Sequence: Synthetic oligonucleotide
aaucauuuuaauguauaag

SEQ ID NO: 2894697 - RNA, 19 nt, Artificial Sequence
  Description of Artificial Sequence: Synthetic oligonucleotide
aacuggguaccccacagac

SEQ ID NO: 2894698 - RNA, 19 nt, Artificial Sequence
  Description of Artificial Sequence: Synthetic oligonucleotide
agcagcaccacacaccugc

SEQ ID NO: 2894699 - RNA, 19 nt, Artificial Sequence
  Description of Artificial Sequence: Synthetic oligonucleotide
aaaacguggaaacugccca

SEQ ID NO: 2894700 - RNA, 19 nt, Artificial Sequence
  Description of Artificial Sequence: Synthetic oligonucleotide
uaucuuaaaacguggaaac

SEQ ID NO: 2894701 - RNA, 19 nt, Artificial Sequence
  Description of Artificial Sequence: Synthetic oligonucleotide
aauuuaaauaucucccuau

SEQ ID NO: 2894702 - RNA, 19 nt, Artificial Sequence
  Description of Artificial Sequence: Synthetic oligonucleotide
uuaaauaucucccuaugua

SEQ ID NO: 2894703 - RNA, 19 nt, Artificial Sequence
  Description of Artificial Sequence: Synthetic oligonucleotide
aucaggcaggaucagagcc

SEQ ID NO: 2894704 - RNA, 19 nt, Artificial Sequence
  Description of Artificial Sequence: Synthetic oligonucleotide
uuaauguauaaguuuuggc

SEQ ID NO: 2894705 - RNA, 19 nt, Artificial Sequence
  Description of Artificial Sequence: Synthetic oligonucleotide
cuuaaaacguggaaacugc

SEQ ID NO: 2894706 - RNA, 19 nt, Artificial Sequence
  Description of Artificial Sequence: Synthetic oligonucleotide
uuuaaauaucucccuaugu

SEQ ID NO: 2894707 - RNA, 19 nt, Artificial Sequence
  Description of Artificial Sequence: Synthetic oligonucleotide
ucuuaaaacguggaaacug

SEQ ID NO: 2894708 - RNA, 19 nt, Artificial Sequence
  Description of Artificial Sequence: Synthetic oligonucleotide
aaucaggcaggaucagagc

SEQ ID NO: 2894709 - RNA, 19 nt, Artificial Sequence
  Description of Artificial Sequence: Synthetic oligonucleotide
cuuggaaucauuuuaaugu

SEQ ID NO: 2894710 - RNA, 19 nt, Artificial Sequence
  Description of Artificial Sequence: Synthetic oligonucleotide
guuugaaucaggcaggauc

SEQ ID NO: 2894711 - RNA, 19 nt, Artificial Sequence
  Description of Artificial Sequence: Synthetic oligonucleotide
uaaaacguggaaacugccc

SEQ ID NO: 2894712 - RNA, 19 nt, Artificial Sequence
  Description of Artificial Sequence: Synthetic oligonucleotide
aauaucucccuauguauau

SEQ ID NO: 2894713 - RNA, 19 nt, Artificial Sequence
  Description of Artificial Sequence: Synthetic oligonucleotide
auuuaaauaucucccuaug

SEQ ID NO: 2894714 - RNA, 19 nt, Artificial Sequence
  Description of Artificial Sequence: Synthetic oligonucleotide
uaaauaucucccuauguau

SEQ ID NO: 2894715 - RNA, 19 nt, Artificial Sequence
  Description of Artificial Sequence: Synthetic oligonucleotide
guggaaacugcccaguagg

SEQ ID NO: 2894716 - RNA, 19 nt, Artificial Sequence
  Description of Artificial Sequence: Synthetic oligonucleotide
uugagagggaggcaacugg

SEQ ID NO: 2894717 - RNA, 19 nt, Artificial Sequence
  Description of Artificial Sequence: Synthetic oligonucleotide
ucauuuuaauguauaaguu

SEQ ID NO: 2894718 - RNA, 19 nt, Artificial Sequence
  Description of Artificial Sequence: Synthetic oligonucleotide
guauauaucuuaaaacgug

SEQ ID NO: 2894719 - RNA, 19 nt, Artificial Sequence
  Description of Artificial Sequence: Synthetic oligonucleotide
ucucccuauguauauaucu

SEQ ID NO: 2894720 - RNA, 19 nt, Artificial Sequence
  Description of Artificial Sequence: Synthetic oligonucleotide
caggagacagcuaagguug

SEQ ID NO: 2894721 - RNA, 19 nt, Artificial Sequence
  Description of Artificial Sequence: Synthetic oligonucleotide
agacagcuaagguugagag

SEQ ID NO: 2894722 - RNA, 19 nt, Artificial Sequence
  Description of Artificial Sequence: Synthetic oligonucleotide
uuaaaacguggaaacugcc

SEQ ID NO: 2894723 - RNA, 19 nt, Artificial Sequence
  Description of Artificial Sequence: Synthetic oligonucleotide
ugagagggaggcaacuggg

SEQ ID NO: 2894724 - RNA, 19 nt, Artificial Sequence
  Description of Artificial Sequence: Synthetic oligonucleotide
cacacagcccucaugaccc

SEQ ID NO: 2894725 - RNA, 19 nt, Artificial Sequence
  Description of Artificial Sequence: Synthetic oligonucleotide
gaaacugcccaguaggaca

SEQ ID NO: 2894726 - RNA, 19 nt, Artificial Sequence
  Description of Artificial Sequence: Synthetic oligonucleotide
gaaucaggcaggaucagag

SEQ ID NO: 2894727 - RNA, 19 nt, Artificial Sequence
  Description of Artificial Sequence: Synthetic oligonucleotide
aguggcuucauuuccugag

SEQ ID NO: 2894728 - RNA, 19 nt, Artificial Sequence
  Description of Artificial Sequence: Synthetic oligonucleotide
agagacaggagacagcuaa

SEQ ID NO: 2894729 - RNA, 19 nt, Artificial Sequence
  Description of Artificial Sequence: Synthetic oligonucleotide
cuuugguaggcauuggcac

SEQ ID NO: 2894730 - RNA, 19 nt, Artificial Sequence
  Description of Artificial Sequence: Synthetic oligonucleotide
ugacccacagaacaggcac

SEQ ID NO: 2894731 - RNA, 19 nt, Artificial Sequence
  Description of Artificial Sequence: Synthetic oligonucleotide
auuuuaauguauaaguuuu

SEQ ID NO: 2894732 - RNA, 19 nt, Artificial Sequence
  Description of Artificial Sequence: Synthetic oligonucleotide
ugaacaguccuguuccuug

SEQ ID NO: 2894733 - RNA, 19 nt, Artificial Sequence
  Description of Artificial Sequence: Synthetic oligonucleotide
ucacagggaaguuaccgag

SEQ ID NO: 2894734 - RNA, 19 nt, Artificial Sequence
  Description of Artificial Sequence: Synthetic oligonucleotide
auaucuuaaaacguggaaa

SEQ ID NO: 2894735 - RNA, 19 nt, Artificial Sequence
  Description of Artificial Sequence: Synthetic oligonucleotide
uucauuuccugagcaaagg

SEQ ID NO: 2894736 - RNA, 19 nt, Artificial Sequence
  Description of Artificial Sequence: Synthetic oligonucleotide
aaacguggaaacugcccag

SEQ ID NO: 2894737 - RNA, 19 nt, Artificial Sequence
  Description of Artificial Sequence: Synthetic oligonucleotide
ucagagacaggagacagcu

SEQ ID NO: 2894738 - RNA, 19 nt, Artificial Sequence
  Description of Artificial Sequence: Synthetic oligonucleotide
cuaagguugagagggaggc

SEQ ID NO: 2894739 - RNA, 19 nt, Artificial Sequence
  Description of Artificial Sequence: Synthetic oligonucleotide
uaggcauuggcacauccac

SEQ ID NO: 2894740 - RNA, 19 nt, Artificial Sequence
  Description of Artificial Sequence: Synthetic oligonucleotide
auguauaaguuuuggcucu

SEQ ID NO: 2894741 - RNA, 19 nt, Artificial Sequence
  Description of Artificial Sequence: Synthetic oligonucleotide
uuaccgaguuugaaucagg

SEQ ID NO: 2894742 - RNA, 19 nt, Artificial Sequence
  Description of Artificial Sequence: Synthetic oligonucleotide
cauuggcacauccacacag

SEQ ID NO: 2894743 - RNA, 19 nt, Artificial Sequence
  Description of Artificial Sequence: Synthetic oligonucleotide
guaccccacagacagagag

SEQ ID NO: 2894744 - RNA, 19 nt, Artificial Sequence
  Description of Artificial Sequence: Synthetic oligonucleotide
uuuccagguucagagacag

SEQ ID NO: 2894745 - RNA, 19 nt, Artificial Sequence
  Description of Artificial Sequence: Synthetic oligonucleotide
agucacagggaaguuaccg

SEQ ID NO: 2894746 - RNA, 19 nt, Artificial Sequence
  Description of Artificial Sequence: Synthetic oligonucleotide
gacagcuaagguugagagg

SEQ ID NO: 2894747 - RNA, 19 nt, Artificial Sequence
  Description of Artificial Sequence: Synthetic oligonucleotide
uguuccuugcuuuccaggu

SEQ ID NO: 2894748 - RNA, 19 nt, Artificial Sequence
  Description of Artificial Sequence: Synthetic oligonucleotide
aggacaagugaacaguccu

SEQ ID NO: 2894749 - RNA, 19 nt, Artificial Sequence
  Description of Artificial Sequence: Synthetic oligonucleotide
ucaggggcuccuuugguag

SEQ ID NO: 2894750 - RNA, 19 nt, Artificial Sequence
  Description of Artificial Sequence: Synthetic oligonucleotide
uuugguaggcauuggcaca

SEQ ID NO: 2894751 - RNA, 19 nt, Artificial Sequence
  Description of Artificial Sequence: Synthetic oligonucleotide
aaaggguggguugaggcca

SEQ ID NO: 2894752 - RNA, 19 nt, Artificial Sequence
  Description of Artificial Sequence: Synthetic oligonucleotide
ucaugacccacagaacagg

SEQ ID NO: 2894753 - RNA, 19 nt, Artificial Sequence
  Description of Artificial Sequence: Synthetic oligonucleotide
aguaggacaagugaacagu

SEQ ID NO: 2894754 - RNA, 19 nt, Artificial Sequence
  Description of Artificial Sequence: Synthetic oligonucleotide
uaccgaguuugaaucaggc

SEQ ID NO: 2894755 - RNA, 19 nt, Artificial Sequence
  Description of Artificial Sequence: Synthetic oligonucleotide
uaggacaagugaacagucc

SEQ ID NO: 2894756 - RNA, 19 nt, Artificial Sequence
  Description of Artificial Sequence: Synthetic oligonucleotide
aacaggcacccucagggcu

SEQ ID NO: 2894757 - RNA, 19 nt, Artificial Sequence
  Description of Artificial Sequence: Synthetic oligonucleotide
agggccagacaccagguag

SEQ ID NO: 2894758 - RNA, 19 nt, Artificial Sequence
  Description of Artificial Sequence: Synthetic oligonucleotide
uuggaaucauuuuaaugua

SEQ ID NO: 2894759 - RNA, 19 nt, Artificial Sequence
  Description of Artificial Sequence: Synthetic oligonucleotide
ugcccaguaggacaaguga

SEQ ID NO: 2894760 - RNA, 19 nt, Artificial Sequence
  Description of Artificial Sequence: Synthetic oligonucleotide
uuggcacauccacacagcc

SEQ ID NO: 2894761 - RNA, 19 nt, Artificial Sequence
  Description of Artificial Sequence: Synthetic oligonucleotide
ccgaguuugaaucaggcag

SEQ ID NO: 2894762 - RNA, 19 nt, Artificial Sequence
  Description of Artificial Sequence: Synthetic oligonucleotide
gagaguggggcacaacagc

SEQ ID NO: 2894763 - RNA, 19 nt, Artificial Sequence
  Description of Artificial Sequence: Synthetic oligonucleotide
uagagcagugggaagggcu

SEQ ID NO: 2894764 - RNA, 19 nt, Artificial Sequence
  Description of Artificial Sequence: Synthetic oligonucleotide
uccuuugguaggcauuggc

SEQ ID NO: 2894765 - RNA, 19 nt, Artificial Sequence
  Description of Artificial Sequence: Synthetic oligonucleotide
cucaugacccacagaacag

SEQ ID NO: 2894766 - RNA, 19 nt, Artificial Sequence
  Description of Artificial Sequence: Synthetic oligonucleotide
acaggagacagcuaagguu

SEQ ID NO: 2894767 - RNA, 19 nt, Artificial Sequence
  Description of Artificial Sequence: Synthetic oligonucleotide
caagugaacaguccuguuc

SEQ ID NO: 2894768 - RNA, 19 nt, Artificial Sequence
  Description of Artificial Sequence: Synthetic oligonucleotide
uggaaucauuuuaauguau

SEQ ID NO: 2894769 - RNA, 19 nt, Artificial Sequence
  Description of Artificial Sequence: Synthetic oligonucleotide
uaucucccuauguauauau

SEQ ID NO: 2894770 - RNA, 19 nt, Artificial Sequence
  Description of Artificial Sequence: Synthetic oligonucleotide
agcaccacacaccugcuca

SEQ ID NO: 2894771 - RNA, 19 nt, Artificial Sequence
  Description of Artificial Sequence: Synthetic oligonucleotide
uuccuugcuuuccagguuc

SEQ ID NO: 2894772 - RNA, 19 nt, Artificial Sequence
  Description of Artificial Sequence: Synthetic oligonucleotide
aaauaucucccuauguaua

SEQ ID NO: 2894773 - RNA, 19 nt, Artificial Sequence
  Description of Artificial Sequence: Synthetic oligonucleotide
caaaggguggguugaggcc

SEQ ID NO: 2894774 - RNA, 19 nt, Artificial Sequence
  Description of Artificial Sequence: Synthetic oligonucleotide
ugcucaggggcuccuuugg

SEQ ID NO: 2894775 - RNA, 19 nt, Artificial Sequence
  Description of Artificial Sequence: Synthetic oligonucleotide
agacaggagacagcuaagg

SEQ ID NO: 2894776 - RNA, 19 nt, Artificial Sequence
  Description of Artificial Sequence: Synthetic oligonucleotide
caugacccacagaacaggc

SEQ ID NO: 2894777 - RNA, 19 nt, Artificial Sequence
  Description of Artificial Sequence: Synthetic oligonucleotide
uucagagacaggagacagc

SEQ ID NO: 2894778 - RNA, 19 nt, Artificial Sequence
  Description of Artificial Sequence: Synthetic oligonucleotide
acaacagcuuuggggaccc

SEQ ID NO: 2894779 - RNA, 19 nt, Artificial Sequence
  Description of Artificial Sequence: Synthetic oligonucleotide
guucagagacaggagacag

SEQ ID NO: 2894780 - RNA, 19 nt, Artificial Sequence
  Description of Artificial Sequence: Synthetic oligonucleotide
agguucagagacaggagac

SEQ ID NO: 2894781 - RNA, 19 nt, Artificial Sequence
  Description of Artificial Sequence: Synthetic oligonucleotide
gggcacaacagcuuugggg

SEQ ID NO: 2894782 - RNA, 19 nt, Artificial Sequence
  Description of Artificial Sequence: Synthetic oligonucleotide
ggcacaacagcuuugggga

SEQ ID NO: 2894783 - RNA, 19 nt, Artificial Sequence
  Description of Artificial Sequence: Synthetic oligonucleotide
cacagggccagacaccagg

SEQ ID NO: 2894784 - RNA, 19 nt, Artificial Sequence
  Description of Artificial Sequence: Synthetic oligonucleotide
agcagcagcaccacacacc

SEQ ID NO: 2894785 - RNA, 19 nt, Artificial Sequence
  Description of Artificial Sequence: Synthetic oligonucleotide
aguccuguuccuugcuuuc

SEQ ID NO: 2894786 - RNA, 19 nt, Artificial Sequence
  Description of Artificial Sequence: Synthetic oligonucleotide
auuggcacauccacacagc

SEQ ID NO: 2894787 - RNA, 19 nt, Artificial Sequence
  Description of Artificial Sequence: Synthetic oligonucleotide
agcuuuggggacccagugg

SEQ ID NO: 2894788 - RNA, 19 nt, Artificial Sequence
  Description of Artificial Sequence: Synthetic oligonucleotide
ucaggcaggaucagagccu

SEQ ID NO: 2894789 - RNA, 19 nt, Artificial Sequence
  Description of Artificial Sequence: Synthetic oligonucleotide
cacacaccugcucaggggc

SEQ ID NO: 2894790 - RNA, 19 nt, Artificial Sequence
  Description of Artificial Sequence: Synthetic oligonucleotide
aggaucagagccugagcag

SEQ ID NO: 2894791 - RNA, 19 nt, Artificial Sequence
  Description of Artificial Sequence: Synthetic oligonucleotide
agggcuuggaaucauuuua

SEQ ID NO: 2894792 - RNA, 19 nt, Artificial Sequence
  Description of Artificial Sequence: Synthetic oligonucleotide
caguaggacaagugaacag

SEQ ID NO: 2894793 - RNA, 19 nt, Artificial Sequence
  Description of Artificial Sequence: Synthetic oligonucleotide
uggaaacugcccaguagga

SEQ ID NO: 2894794 - RNA, 19 nt, Artificial Sequence
  Description of Artificial Sequence: Synthetic oligonucleotide
aacagcuuuggggacccag

SEQ ID NO: 2894795 - RNA, 19 nt, Artificial Sequence
  Description of Artificial Sequence: Synthetic oligonucleotide
aguuaccgaguuugaauca

SEQ ID NO: 2894796 - RNA, 19 nt, Artificial Sequence
  Description of Artificial Sequence: Synthetic oligonucleotide
gagggaggcaacuggguac

SEQ ID NO: 2894797 - RNA, 19 nt, Artificial Sequence
  Description of Artificial Sequence: Synthetic oligonucleotide
uggcuucauuuccugagca

SEQ ID NO: 2894798 - RNA, 19 nt, Artificial Sequence
  Description of Artificial Sequence: Synthetic oligonucleotide
gcuuggaaucauuuuaaug

SEQ ID NO: 2894799 - RNA, 19 nt, Artificial Sequence
  Description of Artificial Sequence: Synthetic oligonucleotide
gaaguuaccgaguuugaau

SEQ ID NO: 2894800 - RNA, 19 nt, Artificial Sequence
  Description of Artificial Sequence: Synthetic oligonucleotide
ugagcaaaggguggguuga

SEQ ID NO: 2894801 - RNA, 19 nt, Artificial Sequence
  Description of Artificial Sequence: Synthetic oligonucleotide
guuaccgaguuugaaucag

SEQ ID NO: 2894802 - RNA, 19 nt, Artificial Sequence
  Description of Artificial Sequence: Synthetic oligonucleotide
acccacagaacaggcaccc

SEQ ID NO: 2894803 - RNA, 19 nt, Artificial Sequence
  Description of Artificial Sequence: Synthetic oligonucleotide
caccagguagagcaguggg

SEQ ID NO: 2894804 - RNA, 19 nt, Artificial Sequence
  Description of Artificial Sequence: Synthetic oligonucleotide
auauaucuuaaaacgugga

SEQ ID NO: 2894805 - RNA, 19 nt, Artificial Sequence
  Description of Artificial Sequence: Synthetic oligonucleotide
ucccuauguauauaucuua

SEQ ID NO: 2894806 - RNA, 19 nt, Artificial Sequence
  Description of Artificial Sequence: Synthetic oligonucleotide
guggguugaggccagcccc

SEQ ID NO: 2894807 - RNA, 19 nt, Artificial Sequence
  Description of Artificial Sequence: Synthetic oligonucleotide
agggaggcaacuggguacc

SEQ ID NO: 2894808 - RNA, 19 nt, Artificial Sequence
  Description of Artificial Sequence: Synthetic oligonucleotide
ccagacaccagguagagca

SEQ ID NO: 2894809 - RNA, 19 nt, Artificial Sequence
  Description of Artificial Sequence: Synthetic oligonucleotide
caggaucagagccugagca

SEQ ID NO: 2894810 - RNA, 19 nt, Artificial Sequence
  Description of Artificial Sequence: Synthetic oligonucleotide
acagacagagaguggggca

SEQ ID NO: 2894811 - RNA, 19 nt, Artificial Sequence
  Description of Artificial Sequence: Synthetic oligonucleotide
uggcacauccacacagccc

SEQ ID NO: 2894812 - RNA, 19 nt, Artificial Sequence
  Description of Artificial Sequence: Synthetic oligonucleotide
gugggaagggcuuggaauc

SEQ ID NO: 2894813 - RNA, 19 nt, Artificial Sequence
  Description of Artificial Sequence: Synthetic oligonucleotide
cugagcaaaggguggguug

SEQ ID NO: 2894814 - RNA, 19 nt, Artificial Sequence
  Description of Artificial Sequence: Synthetic oligonucleotide
ggcauuggcacauccacac

SEQ ID NO: 2894815 - RNA, 19 nt, Artificial Sequence
  Description of Artificial Sequence: Synthetic oligonucleotide
gcuuuggggacccaguggc

SEQ ID NO: 2894816 - RNA, 19 nt, Artificial Sequence
  Description of Artificial Sequence: Synthetic oligonucleotide
ugaaucaggcaggaucaga

SEQ ID NO: 2894817 - RNA, 19 nt, Artificial Sequence
  Description of Artificial Sequence: Synthetic oligonucleotide
gcaaaggguggguugaggc

SEQ ID NO: 2894818 - RNA, 19 nt, Artificial Sequence
  Description of Artificial Sequence: Synthetic oligonucleotide
gaggcaacuggguacccca

SEQ ID NO: 2894819 - RNA, 19 nt, Artificial Sequence
  Description of Artificial Sequence: Synthetic oligonucleotide
accgaguuugaaucaggca

SEQ ID NO: 2894820 - RNA, 19 nt, Artificial Sequence
  Description of Artificial Sequence: Synthetic oligonucleotide
accccacagacagagagug

SEQ ID NO: 2894821 - RNA, 19 nt, Artificial Sequence
  Description of Artificial Sequence: Synthetic oligonucleotide
gcuuuccagguucagagac

SEQ ID NO: 2894822 - RNA, 19 nt, Artificial Sequence
  Description of Artificial Sequence: Synthetic oligonucleotide
acagggaaguuaccgaguu

SEQ ID NO: 2894823 - RNA, 19 nt, Artificial Sequence
  Description of Artificial Sequence: Synthetic oligonucleotide
cagagaguggggcacaaca

SEQ ID NO: 2894824 - RNA, 19 nt, Artificial Sequence
  Description of Artificial Sequence: Synthetic oligonucleotide
cacagacagagaguggggc

SEQ ID NO: 2894825 - RNA, 19 nt, Artificial Sequence
  Description of Artificial Sequence: Synthetic oligonucleotide
aucuuaaaacguggaaacu

SEQ ID NO: 2894826 - RNA, 19 nt, Artificial Sequence
  Description of Artificial Sequence: Synthetic oligonucleotide
agagaguggggcacaacag

SEQ ID NO: 2894827 - RNA, 19 nt, Artificial Sequence
  Description of Artificial Sequence: Synthetic oligonucleotide
gacccaguggcuucauuuc

SEQ ID NO: 2894828 - RNA, 19 nt, Artificial Sequence
  Description of Artificial Sequence: Synthetic oligonucleotide
gucacagggaaguuaccga

SEQ ID NO: 2894829 - RNA, 19 nt, Artificial Sequence
  Description of Artificial Sequence: Synthetic oligonucleotide
aacguggaaacugcccagu

SEQ ID NO: 2894830 - RNA, 19 nt, Artificial Sequence
  Description of Artificial Sequence: Synthetic oligonucleotide
guggcuucauuuccugagc

SEQ ID NO: 2894831 - RNA, 19 nt, Artificial Sequence
  Description of Artificial Sequence: Synthetic oligonucleotide
ugcaggcagucacagggaa

SEQ ID NO: 2894832 - RNA, 19 nt, Artificial Sequence
  Description of Artificial Sequence: Synthetic oligonucleotide
agcuaagguugagagggag

SEQ ID NO: 2894833 - RNA, 19 nt, Artificial Sequence
  Description of Artificial Sequence: Synthetic oligonucleotide
acagaacaggcacccucag

SEQ ID NO: 2894834 - RNA, 19 nt, Artificial Sequence
  Description of Artificial Sequence: Synthetic oligonucleotide
cagaacaggcacccucagg

SEQ ID NO: 2894835 - RNA, 19 nt, Artificial Sequence
  Description of Artificial Sequence: Synthetic oligonucleotide
cagguucagagacaggaga

SEQ ID NO: 2894836 - RNA, 19 nt, Artificial Sequence
  Description of Artificial Sequence: Synthetic oligonucleotide
aaacugcccaguaggacaa

SEQ ID NO: 2894837 - RNA, 19 nt, Artificial Sequence
  Description of Artificial Sequence: Synthetic oligonucleotide
agaguggggcacaacagcu

SEQ ID NO: 2894838 - RNA, 19 nt, Artificial Sequence
  Description of Artificial Sequence: Synthetic oligonucleotide
uaccccacagacagagagu

SEQ ID NO: 2894839 - RNA, 19 nt, Artificial Sequence
  Description of Artificial Sequence: Synthetic oligonucleotide
aguggggcacaacagcuuu

SEQ ID NO: 2894840 - RNA, 19 nt, Artificial Sequence
  Description of Artificial Sequence: Synthetic oligonucleotide
cacaacagcuuuggggacc

SEQ ID NO: 2894841 - RNA, 19 nt, Artificial Sequence
  Description of Artificial Sequence: Synthetic oligonucleotide
gagacaggagacagcuaag

SEQ ID NO: 2894842 - RNA, 19 nt, Artificial Sequence
  Description of Artificial Sequence: Synthetic oligonucleotide
guaggacaagugaacaguc

SEQ ID NO: 2894843 - RNA, 19 nt, Artificial Sequence
  Description of Artificial Sequence: Synthetic oligonucleotide
guugagagggaggcaacug

SEQ ID NO: 2894844 - RNA, 19 nt, Artificial Sequence
  Description of Artificial Sequence: Synthetic oligonucleotide
gagacagcuaagguugaga

SEQ ID NO: 2894845 - RNA, 19 nt, Artificial Sequence
  Description of Artificial Sequence: Synthetic oligonucleotide
agagggaggcaacugggua

SEQ ID NO: 2894846 - RNA, 19 nt, Artificial Sequence
  Description of Artificial Sequence: Synthetic oligonucleotide
uugaaucaggcaggaucag

SEQ ID NO: 2894847 - RNA, 19 nt, Artificial Sequence
  Description of Artificial Sequence: Synthetic oligonucleotide
aggggcuccuuugguaggc

SEQ ID NO: 2894848 - RNA, 19 nt, Artificial Sequence
  Description of Artificial Sequence: Synthetic oligonucleotide
cgaguuugaaucaggcagg

SEQ ID NO: 2894849 - RNA, 19 nt, Artificial Sequence
  Description of Artificial Sequence: Synthetic oligonucleotide
cacagaacaggcacccuca

SEQ ID NO: 2894850 - RNA, 19 nt, Artificial Sequence
  Description of Artificial Sequence: Synthetic oligonucleotide
agcaaaggguggguugagg

SEQ ID NO: 2894851 - RNA, 19 nt, Artificial Sequence
  Description of Artificial Sequence: Synthetic oligonucleotide
agagccugagcagcagccg

SEQ ID NO: 2894852 - RNA, 19 nt, Artificial Sequence
  Description of Artificial Sequence: Synthetic oligonucleotide
gacaccagguagagcagug

SEQ ID NO: 2894853 - RNA, 19 nt, Artificial Sequence
  Description of Artificial Sequence: Synthetic oligonucleotide
agugaacaguccuguuccu

SEQ ID NO: 2894854 - RNA, 19 nt, Artificial Sequence
  Description of Artificial Sequence: Synthetic oligonucleotide
uugguaggcauuggcacau

SEQ ID NO: 2894855 - RNA, 19 nt, Artificial Sequence
  Description of Artificial Sequence: Synthetic oligonucleotide
cucagggcugccccgcucc

SEQ ID NO: 2894856 - RNA, 19 nt, Artificial Sequence
  Description of Artificial Sequence: Synthetic oligonucleotide
gcaacuggguaccccacag

SEQ ID NO: 2894857 - RNA, 19 nt, Artificial Sequence
  Description of Artificial Sequence: Synthetic oligonucleotide
gcccucaugacccacagaa

SEQ ID NO: 2894858 - RNA, 19 nt, Artificial Sequence
  Description of Artificial Sequence: Synthetic oligonucleotide
cagacagagaguggggcac

SEQ ID NO: 2894859 - RNA, 19 nt, Artificial Sequence
  Description of Artificial Sequence: Synthetic oligonucleotide
ggaucagagccugagcagc

SEQ ID NO: 2894860 - RNA, 19 nt, Artificial Sequence
  Description of Artificial Sequence: Synthetic oligonucleotide
uccuugcuuuccagguuca

SEQ ID NO: 2894861 - RNA, 19 nt, Artificial Sequence
  Description of Artificial Sequence: Synthetic oligonucleotide
gguaggcauuggcacaucc

SEQ ID NO: 2894862 - RNA, 19 nt, Artificial Sequence
  Description of Artificial Sequence: Synthetic oligonucleotide
ggcacauccacacagcccu

SEQ ID NO: 2894863 - RNA, 19 nt, Artificial Sequence
  Description of Artificial Sequence: Synthetic oligonucleotide
gacaagugaacaguccugu

SEQ ID NO: 2894864 - RNA, 19 nt, Artificial Sequence
  Description of Artificial Sequence: Synthetic oligonucleotide
cugcccaguaggacaagug

SEQ ID NO: 2894865 - RNA, 19 nt, Artificial Sequence
  Description of Artificial Sequence: Synthetic oligonucleotide
uaagguugagagggaggca

SEQ ID NO: 2894866 - RNA, 19 nt, Artificial Sequence
  Description of Artificial Sequence: Synthetic oligonucleotide
gacaggagacagcuaaggu

SEQ ID NO: 2894867 - RNA, 19 nt, Artificial Sequence
  Description of Artificial Sequence: Synthetic oligonucleotide
gguagagcagugggaaggg

SEQ ID NO: 2894868 - RNA, 19 nt, Artificial Sequence
  Description of Artificial Sequence: Synthetic oligonucleotide
cuuuccagguucagagaca

SEQ ID NO: 2894869 - RNA, 19 nt, Artificial Sequence
  Description of Artificial Sequence: Synthetic oligonucleotide
gcuaagguugagagggagg

SEQ ID NO: 2894870 - RNA, 19 nt, Artificial Sequence
  Description of Artificial Sequence: Synthetic oligonucleotide
ccucaugacccacagaaca

SEQ ID NO: 2894871 - RNA, 19 nt, Artificial Sequence
  Description of Artificial Sequence: Synthetic oligonucleotide
aucucccuauguauauauc

SEQ ID NO: 2894872 - RNA, 19 nt, Artificial Sequence
  Description of Artificial Sequence: Synthetic oligonucleotide
gaguuugaaucaggcagga

SEQ ID NO: 2894873 - RNA, 19 nt, Artificial Sequence
  Description of Artificial Sequence: Synthetic oligonucleotide
ugggaagggcuuggaauca

SEQ ID NO: 2894874 - RNA, 19 nt, Artificial Sequence
  Description of Artificial Sequence: Synthetic oligonucleotide
gcagucacagggaaguuac

SEQ ID NO: 2894875 - RNA, 19 nt, Artificial Sequence
  Description of Artificial Sequence: Synthetic oligonucleotide
uguauaaguuuuggcucua

SEQ ID NO: 2894876 - RNA, 19 nt, Artificial Sequence
  Description of Artificial Sequence: Synthetic oligonucleotide
caccacagggccagacacc

SEQ ID NO: 2894877 - RNA, 19 nt, Artificial Sequence
  Description of Artificial Sequence: Synthetic oligonucleotide
ggguaccccacagacagag

SEQ ID NO: 2894878 - RNA, 19 nt, Artificial Sequence
  Description of Artificial Sequence: Synthetic oligonucleotide
acacaccacagggccagac

SEQ ID NO: 2894879 - RNA, 19 nt, Artificial Sequence
  Description of Artificial Sequence: Synthetic oligonucleotide
cagcuuuggggacccagug

SEQ ID NO: 2894880 - RNA, 19 nt, Artificial Sequence
  Description of Artificial Sequence: Synthetic oligonucleotide
uuuggggacccaguggcuu

SEQ ID NO: 2894881 - RNA, 19 nt, Artificial Sequence
  Description of Artificial Sequence: Synthetic oligonucleotide
gcagcagccggccaucagc

SEQ ID NO: 2894882 - RNA, 19 nt, Artificial Sequence
  Description of Artificial Sequence: Synthetic oligonucleotide
gguggguugaggccagccc

SEQ ID NO: 2894883 - RNA, 19 nt, Artificial Sequence
  Description of Artificial Sequence: Synthetic oligonucleotide
ggaaucauuuuaauguaua

SEQ ID NO: 2894884 - RNA, 19 nt, Artificial Sequence
  Description of Artificial Sequence: Synthetic oligonucleotide
gacccacagaacaggcacc

SEQ ID NO: 2894885 - RNA, 19 nt, Artificial Sequence
  Description of Artificial Sequence: Synthetic oligonucleotide
ccacacagcccucaugacc

SEQ ID NO: 2894886 - RNA, 19 nt, Artificial Sequence
  Description of Artificial Sequence: Synthetic oligonucleotide
cccaguaggacaagugaac

SEQ ID NO: 2894887 - RNA, 19 nt, Artificial Sequence
  Description of Artificial Sequence: Synthetic oligonucleotide
cuugcuuuccagguucaga

SEQ ID NO: 2894888 - RNA, 19 nt, Artificial Sequence
  Description of Artificial Sequence: Synthetic oligonucleotide
uccacacagcccucaugac

SEQ ID NO: 2894889 - RNA, 19 nt, Artificial Sequence
  Description of Artificial Sequence: Synthetic oligonucleotide
acagagaguggggcacaac

SEQ ID NO: 2894890 - RNA, 19 nt, Artificial Sequence
  Description of Artificial Sequence: Synthetic oligonucleotide
gaucagagccugagcagca

SEQ ID NO: 2894891 - RNA, 19 nt, Artificial Sequence
  Description of Artificial Sequence: Synthetic oligonucleotide
agguugagagggaggcaac

SEQ ID NO: 2894892 - RNA, 19 nt, Artificial Sequence
  Description of Artificial Sequence: Synthetic oligonucleotide
caggggcuccuuugguagg

SEQ ID NO: 2894893 - RNA, 19 nt, Artificial Sequence
  Description of Artificial Sequence: Synthetic oligonucleotide
cugcucaggggcuccuuug

SEQ ID NO: 2894894 - RNA, 19 nt, Artificial Sequence
  Description of Artificial Sequence: Synthetic oligonucleotide
ggacaagugaacaguccug

SEQ ID NO: 2894895 - RNA, 19 nt, Artificial Sequence
  Description of Artificial Sequence: Synthetic oligonucleotide
cagucacagggaaguuacc

SEQ ID NO: 2894896 - RNA, 19 nt, Artificial Sequence
  Description of Artificial Sequence: Synthetic oligonucleotide
ggcaggaucagagccugag

SEQ ID NO: 2894897 - RNA, 19 nt, Artificial Sequence
  Description of Artificial Sequence: Synthetic oligonucleotide
guaggcauuggcacaucca

SEQ ID NO: 2894898 - RNA, 19 nt, Artificial Sequence
  Description of Artificial Sequence: Synthetic oligonucleotide
gcuccuuugguaggcauug

SEQ ID NO: 2894899 - RNA, 19 nt, Artificial Sequence
  Description of Artificial Sequence: Synthetic oligonucleotide
aucagagccugagcagcag

SEQ ID NO: 2894900 - RNA, 19 nt, Artificial Sequence
  Description of Artificial Sequence: Synthetic oligonucleotide
acaguccuguuccuugcuu

SEQ ID NO: 2894901 - RNA, 19 nt, Artificial Sequence
  Description of Artificial Sequence: Synthetic oligonucleotide
agacaccagguagagcagu

SEQ ID NO: 2894902 - RNA, 19 nt, Artificial Sequence
  Description of Artificial Sequence: Synthetic oligonucleotide
aaggguggguugaggccag

SEQ ID NO: 2894903 - RNA, 19 nt, Artificial Sequence
  Description of Artificial Sequence: Synthetic oligonucleotide
acagcuuuggggacccagu

SEQ ID NO: 2894904 - RNA, 19 nt, Artificial Sequence
  Description of Artificial Sequence: Synthetic oligonucleotide
acaggcacccucagggcug

SEQ ID NO: 2894905 - RNA, 19 nt, Artificial Sequence
  Description of Artificial Sequence: Synthetic oligonucleotide
ccuuugguaggcauuggca

SEQ ID NO: 2894906 - RNA, 19 nt, Artificial Sequence
  Description of Artificial Sequence: Synthetic oligonucleotide
ggaaacugcccaguaggac

SEQ ID NO: 2894907 - RNA, 19 nt, Artificial Sequence
  Description of Artificial Sequence: Synthetic oligonucleotide
accagguagagcaguggga

SEQ ID NO: 2894908 - RNA, 19 nt, Artificial Sequence
  Description of Artificial Sequence: Synthetic oligonucleotide
acugcccaguaggacaagu

SEQ ID NO: 2894909 - RNA, 19 nt, Artificial Sequence
  Description of Artificial Sequence: Synthetic oligonucleotide
agcagcagccggccaucag

SEQ ID NO: 2894910 - RNA, 19 nt, Artificial Sequence
  Description of Artificial Sequence: Synthetic oligonucleotide
ccagguucagagacaggag

SEQ ID NO: 2894911 - RNA, 19 nt, Artificial Sequence
  Description of Artificial Sequence: Synthetic oligonucleotide
cagcccucaugacccacag

SEQ ID NO: 2894912 - RNA, 19 nt, Artificial Sequence
  Description of Artificial Sequence: Synthetic oligonucleotide
gagcaaaggguggguugag

SEQ ID NO: 2894913 - RNA, 19 nt, Artificial Sequence
  Description of Artificial Sequence: Synthetic oligonucleotide
acccucagggcugccccgc

SEQ ID NO: 2894914 - RNA, 19 nt, Artificial Sequence
  Description of Artificial Sequence: Synthetic oligonucleotide
ccacacaccugcucagggg

SEQ ID NO: 2894915 - RNA, 19 nt, Artificial Sequence
  Description of Artificial Sequence: Synthetic oligonucleotide
guagagcagugggaagggc

SEQ ID NO: 2894916 - RNA, 19 nt, Artificial Sequence
  Description of Artificial Sequence: Synthetic oligonucleotide
auaucucccuauguauaua

SEQ ID NO: 2894917 - RNA, 19 nt, Artificial Sequence
  Description of Artificial Sequence: Synthetic oligonucleotide
augacccacagaacaggca

SEQ ID NO: 2894918 - RNA, 19 nt, Artificial Sequence
  Description of Artificial Sequence: Synthetic oligonucleotide
ccacagacagagagugggg

SEQ ID NO: 2894919 - RNA, 19 nt, Artificial Sequence
  Description of Artificial Sequence: Synthetic oligonucleotide
acuggguaccccacagaca

SEQ ID NO: 2894920 - RNA, 19 nt, Artificial Sequence
  Description of Artificial Sequence: Synthetic oligonucleotide
agagcagugggaagggcuu

SEQ ID NO: 2894921 - RNA, 19 nt, Artificial Sequence
  Description of Artificial Sequence: Synthetic oligonucleotide
gcaggaucagagccugagc

SEQ ID NO: 2894922 - RNA, 19 nt, Artificial Sequence
  Description of Artificial Sequence: Synthetic oligonucleotide
aacugcccaguaggacaag

SEQ ID NO: 2894923 - RNA, 19 nt, Artificial Sequence
  Description of Artificial Sequence: Synthetic oligonucleotide
uggguaccccacagacaga

SEQ ID NO: 2894924 - RNA, 19 nt, Artificial Sequence
  Description of Artificial Sequence: Synthetic oligonucleotide
gguucagagacaggagaca

SEQ ID NO: 2894925 - RNA, 19 nt, Artificial Sequence
  Description of Artificial Sequence: Synthetic oligonucleotide
cuccuuugguaggcauugg

SEQ ID NO: 2894926 - RNA, 19 nt, Artificial Sequence
  Description of Artificial Sequence: Synthetic oligonucleotide
ccacagaacaggcacccuc

SEQ ID NO: 2894927 - RNA, 19 nt, Artificial Sequence
  Description of Artificial Sequence: Synthetic oligonucleotide
aggcauuggcacauccaca

SEQ ID NO: 2894928 - RNA, 19 nt, Artificial Sequence
  Description of Artificial Sequence: Synthetic oligonucleotide
acguggaaacugcccagua

SEQ ID NO: 2894929 - RNA, 19 nt, Artificial Sequence
  Description of Artificial Sequence: Synthetic oligonucleotide
cacaccacagggccagaca

SEQ ID NO: 2894930 - RNA, 19 nt, Artificial Sequence
  Description of Artificial Sequence: Synthetic oligonucleotide
aggcaacuggguaccccac

SEQ ID NO: 2894931 - RNA, 19 nt, Artificial Sequence
  Description of Artificial Sequence: Synthetic oligonucleotide
cucccuauguauauaucuu

SEQ ID NO: 2894932 - RNA, 19 nt, Artificial Sequence
  Description of Artificial Sequence: Synthetic oligonucleotide
cacccucagggcugccccg

SEQ ID NO: 2894933 - RNA, 19 nt, Artificial Sequence
  Description of Artificial Sequence: Synthetic oligonucleotide
caggcagucacagggaagu

SEQ ID NO: 2894934 - RNA, 19 nt, Artificial Sequence
  Description of Artificial Sequence: Synthetic oligonucleotide
aguuugaaucaggcaggau

SEQ ID NO: 2894935 - RNA, 19 nt, Artificial Sequence
  Description of Artificial Sequence: Synthetic oligonucleotide
cguggaaacugcccaguag

SEQ ID NO: 2894936 - RNA, 19 nt, Artificial Sequence
  Description of Artificial Sequence: Synthetic oligonucleotide
cucaggggcuccuuuggua

SEQ ID NO: 2894937 - RNA, 19 nt, Artificial Sequence
  Description of Artificial Sequence: Synthetic oligonucleotide
gaagggcuuggaaucauuu

SEQ ID NO: 2894938 - RNA, 19 nt, Artificial Sequence
  Description of Artificial Sequence: Synthetic oligonucleotide
ggaaguuaccgaguuugaa

SEQ ID NO: 2894939 - RNA, 19 nt, Artificial Sequence
  Description of Artificial Sequence: Synthetic oligonucleotide
guauaaguuuuggcucuaa

SEQ ID NO: 2894940 - RNA, 19 nt, Artificial Sequence
  Description of Artificial Sequence: Synthetic oligonucleotide
ggagacagcuaagguugag

SEQ ID NO: 2894941 - RNA, 19 nt, Artificial Sequence
  Description of Artificial Sequence: Synthetic oligonucleotide
ggggcacaacagcuuuggg

SEQ ID NO: 2894942 - RNA, 19 nt, Artificial Sequence
  Description of Artificial Sequence: Synthetic oligonucleotide
gcacccucagggcugcccc

SEQ ID NO: 2894943 - RNA, 19 nt, Artificial Sequence
  Description of Artificial Sequence: Synthetic oligonucleotide
acagggccagacaccaggu

SEQ ID NO: 2894944 - RNA, 19 nt, Artificial Sequence
  Description of Artificial Sequence: Synthetic oligonucleotide
caguggcuucauuuccuga

SEQ ID NO: 2894945 - RNA, 19 nt, Artificial Sequence
  Description of Artificial Sequence: Synthetic oligonucleotide
cugcaggcagucacaggga

SEQ ID NO: 2894946 - RNA, 19 nt, Artificial Sequence
  Description of Artificial Sequence: Synthetic oligonucleotide
acagcccucaugacccaca

SEQ ID NO: 2894947 - RNA, 19 nt, Artificial Sequence
  Description of Artificial Sequence: Synthetic oligonucleotide
caacuggguaccccacaga

SEQ ID NO: 2894948 - RNA, 19 nt, Artificial Sequence
  Description of Artificial Sequence: Synthetic oligonucleotide
ggaggcaacuggguacccc

SEQ ID NO: 2894949 - RNA, 19 nt, Artificial Sequence
  Description of Artificial Sequence: Synthetic oligonucleotide
cagcaccacacaccugcuc

SEQ ID NO: 2894950 - RNA, 19 nt, Artificial Sequence
  Description of Artificial Sequence: Synthetic oligonucleotide
ccaguaggacaagugaaca

SEQ ID NO: 2894951 - RNA, 19 nt, Artificial Sequence
  Description of Artificial Sequence: Synthetic oligonucleotide
ggcuucauuuccugagcaa

SEQ ID NO: 2894952 - RNA, 19 nt, Artificial Sequence
  Description of Artificial Sequence: Synthetic oligonucleotide
gggcuuggaaucauuuuaa

SEQ ID NO: 2894953 - RNA, 19 nt, Artificial Sequence
  Description of Artificial Sequence: Synthetic oligonucleotide
ggccagacaccagguagag

SEQ ID NO: 2894954 - RNA, 19 nt, Artificial Sequence
  Description of Artificial Sequence: Synthetic oligonucleotide
cacagggaaguuaccgagu

SEQ ID NO: 2894955 - RNA, 19 nt, Artificial Sequence
  Description of Artificial Sequence: Synthetic oligonucleotide
agcccucaugacccacaga

SEQ ID NO: 2894956 - RNA, 19 nt, Artificial Sequence
  Description of Artificial Sequence: Synthetic oligonucleotide
aggagacagcuaagguuga

SEQ ID NO: 2894957 - RNA, 19 nt, Artificial Sequence
  Description of Artificial Sequence: Synthetic oligonucleotide
gcacaacagcuuuggggac

SEQ ID NO: 2894958 - RNA, 19 nt, Artificial Sequence
  Description of Artificial Sequence: Synthetic oligonucleotide
cacaccugcucaggggcuc

SEQ ID NO: 2894959 - RNA, 19 nt, Artificial Sequence
  Description of Artificial Sequence: Synthetic oligonucleotide
gacagagaguggggcacaa

SEQ ID NO: 2894960 - RNA, 19 nt, Artificial Sequence
  Description of Artificial Sequence: Synthetic oligonucleotide
ggcaacuggguaccccaca

SEQ ID NO: 2894961 - RNA, 19 nt, Artificial Sequence
  Description of Artificial Sequence: Synthetic oligonucleotide
gagagggaggcaacugggu

SEQ ID NO: 2894962 - RNA, 19 nt, Artificial Sequence
  Description of Artificial Sequence: Synthetic oligonucleotide
ggacccaguggcuucauuu

SEQ ID NO: 2894963 - RNA, 19 nt, Artificial Sequence
  Description of Artificial Sequence: Synthetic oligonucleotide
gcaggcagucacagggaag

SEQ ID NO: 2894964 - RNA, 19 nt, Artificial Sequence
  Description of Artificial Sequence: Synthetic oligonucleotide
caucagcagcagcaccaca

SEQ ID NO: 2894965 - RNA, 19 nt, Artificial Sequence
  Description of Artificial Sequence: Synthetic oligonucleotide
acacaccugcucaggggcu

SEQ ID NO: 2894966 - RNA, 19 nt, Artificial Sequence
  Description of Artificial Sequence: Synthetic oligonucleotide
cagcuaagguugagaggga

SEQ ID NO: 2894967 - RNA, 19 nt, Artificial Sequence
  Description of Artificial Sequence: Synthetic oligonucleotide
aggguggguugaggccagc

SEQ ID NO: 2894968 - RNA, 19 nt, Artificial Sequence
  Description of Artificial Sequence: Synthetic oligonucleotide
ccagguagagcagugggaa

SEQ ID NO: 2894969 - RNA, 19 nt, Artificial Sequence
  Description of Artificial Sequence: Synthetic oligonucleotide
cccucaugacccacagaac

SEQ ID NO: 2894970 - RNA, 19 nt, Artificial Sequence
  Description of Artificial Sequence: Synthetic oligonucleotide
caggcacccucagggcugc

SEQ ID NO: 2894971 - RNA, 19 nt, Artificial Sequence
  Description of Artificial Sequence: Synthetic oligonucleotide
cacagcccucaugacccac

SEQ ID NO: 2894972 - RNA, 19 nt, Artificial Sequence
  Description of Artificial Sequence: Synthetic oligonucleotide
cagugggaagggcuuggaa

SEQ ID NO: 2894973 - RNA, 19 nt, Artificial Sequence
  Description of Artificial Sequence: Synthetic oligonucleotide
guuccuugcuuuccagguu

SEQ ID NO: 2894974 - RNA, 19 nt, Artificial Sequence
  Description of Artificial Sequence: Synthetic oligonucleotide
gcccaguaggacaagugaa

SEQ ID NO: 2894975 - RNA, 19 nt, Artificial Sequence
  Description of Artificial Sequence: Synthetic oligonucleotide
gcauuggcacauccacaca

SEQ ID NO: 2894976 - RNA, 19 nt, Artificial Sequence
  Description of Artificial Sequence: Synthetic oligonucleotide
gggaaguuaccgaguuuga

SEQ ID NO: 2894977 - RNA, 19 nt, Artificial Sequence
  Description of Artificial Sequence: Synthetic oligonucleotide
ccccacagacagagagugg

SEQ ID NO: 2894978 - RNA, 19 nt, Artificial Sequence
  Description of Artificial Sequence: Synthetic oligonucleotide
cuuuggggacccaguggcu

SEQ ID NO: 2894979 - RNA, 19 nt, Artificial Sequence
  Description of Artificial Sequence: Synthetic oligonucleotide
gggccagacaccagguaga

SEQ ID NO: 2894980 - RNA, 19 nt, Artificial Sequence
  Description of Artificial Sequence: Synthetic oligonucleotide
caguccuguuccuugcuuu

SEQ ID NO: 2894981 - RNA, 19 nt, Artificial Sequence
  Description of Artificial Sequence: Synthetic oligonucleotide
cugagcagcagccggccau

SEQ ID NO: 2894982 - RNA, 19 nt, Artificial Sequence
  Description of Artificial Sequence: Synthetic oligonucleotide
ggcagucacagggaaguua

SEQ ID NO: 2894983 - RNA, 19 nt, Artificial Sequence
  Description of Artificial Sequence: Synthetic oligonucleotide
ugguaggcauuggcacauc

SEQ ID NO: 2894984 - RNA, 19 nt, Artificial Sequence
  Description of Artificial Sequence: Synthetic oligonucleotide
ggguggguugaggccagcc

SEQ ID NO: 2894985 - RNA, 19 nt, Artificial Sequence
  Description of Artificial Sequence: Synthetic oligonucleotide
ggcuuggaaucauuuuaau

SEQ ID NO: 2894986 - RNA, 19 nt, Artificial Sequence
  Description of Artificial Sequence: Synthetic oligonucleotide
cagagacaggagacagcua

SEQ ID NO: 2894987 - RNA, 19 nt, Artificial Sequence
  Description of Artificial Sequence: Synthetic oligonucleotide
ggcacccucagggcugccc

SEQ ID NO: 2894988 - RNA, 19 nt, Artificial Sequence
  Description of Artificial Sequence: Synthetic oligonucleotide
gguugagagggaggcaacu

SEQ ID NO: 2894989 - RNA, 19 nt, Artificial Sequence
  Description of Artificial Sequence: Synthetic oligonucleotide
gagcagcagccggccauca

SEQ ID NO: 2894990 - RNA, 19 nt, Artificial Sequence
  Description of Artificial Sequence: Synthetic oligonucleotide
gugaacaguccuguuccuu

SEQ ID NO: 2894991 - RNA, 19 nt, Artificial Sequence
  Description of Artificial Sequence: Synthetic oligonucleotide
gaguggggcacaacagcuu

SEQ ID NO: 2894992 - RNA, 19 nt, Artificial Sequence
  Description of Artificial Sequence: Synthetic oligonucleotide
gccagacaccagguagagc

SEQ ID NO: 2894993 - RNA, 19 nt, Artificial Sequence
  Description of Artificial Sequence: Synthetic oligonucleotide
aggcagucacagggaaguu

SEQ ID NO: 2894994 - RNA, 19 nt, Artificial Sequence
  Description of Artificial Sequence: Synthetic oligonucleotide
aggcacccucagggcugcc

SEQ ID NO: 2894995 - RNA, 19 nt, Artificial Sequence
  Description of Artificial Sequence: Synthetic oligonucleotide
gguaccccacagacagaga

SEQ ID NO: 2894996 - RNA, 19 nt, Artificial Sequence
  Description of Artificial Sequence: Synthetic oligonucleotide
ccacagggccagacaccag

SEQ ID NO: 2894997 - RNA, 19 nt, Artificial Sequence
  Description of Artificial Sequence: Synthetic oligonucleotide
cccaguggcuucauuuccu

SEQ ID NO: 2894998 - RNA, 19 nt, Artificial Sequence
  Description of Artificial Sequence: Synthetic oligonucleotide
gggaggcaacuggguaccc

SEQ ID NO: 2894999 - RNA, 19 nt, Artificial Sequence
  Description of Artificial Sequence: Synthetic oligonucleotide
aggcaggaucagagccuga

SEQ ID NO: 2895000 - RNA, 19 nt, Artificial Sequence
  Description of Artificial Sequence: Synthetic oligonucleotide
cagggaaguuaccgaguuu

SEQ ID NO: 2895001 - RNA, 19 nt, Artificial Sequence
  Description of Artificial Sequence: Synthetic oligonucleotide
gcucaggggcuccuuuggu

SEQ ID NO: 2895002 - RNA, 19 nt, Artificial Sequence
  Description of Artificial Sequence: Synthetic oligonucleotide
accugcucaggggcuccuu

SEQ ID NO: 2895003 - RNA, 19 nt, Artificial Sequence
  Description of Artificial Sequence: Synthetic oligonucleotide
cacacaccacagggccaga

SEQ ID NO: 2895004 - RNA, 19 nt, Artificial Sequence
  Description of Artificial Sequence: Synthetic oligonucleotide
ggaagggcuuggaaucauu

SEQ ID NO: 2895005 - RNA, 19 nt, Artificial Sequence
  Description of Artificial Sequence: Synthetic oligonucleotide
ccugagcagcagccggcca

SEQ ID NO: 2895006 - RNA, 19 nt, Artificial Sequence
  Description of Artificial Sequence: Synthetic oligonucleotide
gggcuccuuugguaggcau

SEQ ID NO: 2895007 - RNA, 19 nt, Artificial Sequence
  Description of Artificial Sequence: Synthetic oligonucleotide
ggcuccuuugguaggcauu

SEQ ID NO: 2895008 - RNA, 19 nt, Artificial Sequence
  Description of Artificial Sequence: Synthetic oligonucleotide
caacagcuuuggggaccca

SEQ ID NO: 2895009 - RNA, 19 nt, Artificial Sequence
  Description of Artificial Sequence: Synthetic oligonucleotide
gggaagggcuuggaaucau

SEQ ID NO: 2895010 - RNA, 19 nt, Artificial Sequence
  Description of Artificial Sequence: Synthetic oligonucleotide
gcagcaccacacaccugcu

SEQ ID NO: 2895011 - RNA, 19 nt, Artificial Sequence
  Description of Artificial Sequence: Synthetic oligonucleotide
ccugcucaggggcuccuuu

SEQ ID NO: 2895012 - RNA, 19 nt, Artificial Sequence
  Description of Artificial Sequence: Synthetic oligonucleotide
gggacccaguggcuucauu

SEQ ID NO: 2895013 - RNA, 19 nt, Artificial Sequence
  Description of Artificial Sequence: Synthetic oligonucleotide
cccacagaacaggcacccu

SEQ ID NO: 2895014 - RNA, 19 nt, Artificial Sequence
  Description of Artificial Sequence: Synthetic oligonucleotide
ggggacccaguggcuucau

SEQ ID NO: 2895015 - RNA, 19 nt, Artificial Sequence
  Description of Artificial Sequence: Synthetic oligonucleotide
aucaucaugaccuggaucg

SEQ ID NO: 2895016 - RNA, 19 nt, Artificial Sequence
  Description of Artificial Sequence: Synthetic oligonucleotide
auauauugcaauaucaugg

SEQ ID NO: 2895017 - RNA, 19 nt, Artificial Sequence
  Description of Artificial Sequence: Synthetic oligonucleotide
ugcaauaucauggugaccc

SEQ ID NO: 2895018 - RNA, 19 nt, Artificial Sequence
  Description of Artificial Sequence: Synthetic oligonucleotide
uauugcaauaucaugguga

SEQ ID NO: 2895019 - RNA, 19 nt, Artificial Sequence
  Description of Artificial Sequence: Synthetic oligonucleotide
gauauauugcaauaucaug

SEQ ID NO: 2895020 - RNA, 19 nt, Artificial Sequence
  Description of Artificial Sequence: Synthetic oligonucleotide
uugcagucugccuagaugg

SEQ ID NO: 2895021 - RNA, 19 nt, Artificial Sequence
  Description of Artificial Sequence: Synthetic oligonucleotide
auugcaauaucauggugac

SEQ ID NO: 2895022 - RNA, 19 nt, Artificial Sequence
  Description of Artificial Sequence: Synthetic oligonucleotide
caucucuucagccaggucc

SEQ ID NO: 2895023 - RNA, 19 nt, Artificial Sequence
  Description of Artificial Sequence: Synthetic oligonucleotide
uauauugcaauaucauggu

SEQ ID NO: 2895024 - RNA, 19 nt, Artificial Sequence
  Description of Artificial Sequence: Synthetic oligonucleotide
ucuucagccagguccaccg

SEQ ID NO: 2895025 - RNA, 19 nt, Artificial Sequence
  Description of Artificial Sequence: Synthetic oligonucleotide
uguccaggaagccuucucg

SEQ ID NO: 2895026 - RNA, 19 nt, Artificial Sequence
  Description of Artificial Sequence: Synthetic oligonucleotide
agcucugcuaccugggugc

SEQ ID NO: 2895027 - RNA, 19 nt, Artificial Sequence
  Description of Artificial Sequence: Synthetic oligonucleotide
aucauggugacccaucucu

SEQ ID NO: 2895028 - RNA, 19 nt, Artificial Sequence
  Description of Artificial Sequence: Synthetic oligonucleotide
ucuggugagaguguugggg

SEQ ID NO: 2895029 - RNA, 19 nt, Artificial Sequence
  Description of Artificial Sequence: Synthetic oligonucleotide
aauaucauggugacccauc

SEQ ID NO: 2895030 - RNA, 19 nt, Artificial Sequence
  Description of Artificial Sequence: Synthetic oligonucleotide
aaaaguccugacggaaggc

SEQ ID NO: 2895031 - RNA, 19 nt, Artificial Sequence
  Description of Artificial Sequence: Synthetic oligonucleotide
ucugccuagauggugcugg

SEQ ID NO: 2895032 - RNA, 19 nt, Artificial Sequence
  Description of Artificial Sequence: Synthetic oligonucleotide
gcagcaugcagauauauug

SEQ ID NO: 2895033 - RNA, 19 nt, Artificial Sequence
  Description of Artificial Sequence: Synthetic oligonucleotide
acggcguugggaucuacgc

SEQ ID NO: 2895034 - RNA, 19 nt, Artificial Sequence
  Description of Artificial Sequence: Synthetic oligonucleotide
agaguguuggggucugcgc

SEQ ID NO: 2895035 - RNA, 19 nt, Artificial Sequence
  Description of Artificial Sequence: Synthetic oligonucleotide
cagauauauugcaauauca

SEQ ID NO: 2895036 - RNA, 19 nt, Artificial Sequence
  Description of Artificial Sequence: Synthetic oligonucleotide
ucgugcacaggucugguga

SEQ ID NO: 2895037 - RNA, 19 nt, Artificial Sequence
  Description of Artificial Sequence: Synthetic oligonucleotide
caggaagccuucucgagcc

SEQ ID NO: 2895038 - RNA, 19 nt, Artificial Sequence
  Description of Artificial Sequence: Synthetic oligonucleotide
aucuacgccggcuuccagg

SEQ ID NO: 2895039 - RNA, 19 nt, Artificial Sequence
  Description of Artificial Sequence: Synthetic oligonucleotide
auauugcaauaucauggug

SEQ ID NO: 2895040 - RNA, 19 nt, Artificial Sequence
  Description of Artificial Sequence: Synthetic oligonucleotide
cagcaugcagauauauugc

SEQ ID NO: 2895041 - RNA, 19 nt, Artificial Sequence
  Description of Artificial Sequence: Synthetic oligonucleotide
ccaggugucacgcacaucc

SEQ ID NO: 2895042 - RNA, 19 nt, Artificial Sequence
  Description of Artificial Sequence: Synthetic oligonucleotide
uucucgagccgcaucgugc

SEQ ID NO: 2895043 - RNA, 19 nt, Artificial Sequence
  Description of Artificial Sequence: Synthetic oligonucleotide
aaaguccugacggaaggcu

SEQ ID NO: 2895044 - RNA, 19 nt, Artificial Sequence
  Description of Artificial Sequence: Synthetic oligonucleotide
auaucauggugacccaucu

SEQ ID NO: 2895045 - RNA, 19 nt, Artificial Sequence
  Description of Artificial Sequence: Synthetic oligonucleotide
ggcguugggaucuacgccg

SEQ ID NO: 2895046 - RNA, 19 nt, Artificial Sequence
  Description of Artificial Sequence: Synthetic oligonucleotide
aaggcugagggaaccugcc

SEQ ID NO: 2895047 - RNA, 19 nt, Artificial Sequence
  Description of Artificial Sequence: Synthetic oligonucleotide
agauauauugcaauaucau

SEQ ID NO: 2895048 - RNA, 19 nt, Artificial Sequence
  Description of Artificial Sequence: Synthetic oligonucleotide
agcaugcagauauauugca

SEQ ID NO: 2895049 - RNA, 19 nt, Artificial Sequence
  Description of Artificial Sequence: Synthetic oligonucleotide
uuggguuccgcuccgugca

SEQ ID NO: 2895050 - RNA, 19 nt, Artificial Sequence
  Description of Artificial Sequence: Synthetic oligonucleotide
aucaugaccuggaucgggc

SEQ ID NO: 2895051 - RNA, 19 nt, Artificial Sequence
  Description of Artificial Sequence: Synthetic oligonucleotide
ucugcuaccugggugcugc

SEQ ID NO: 2895052 - RNA, 19 nt, Artificial Sequence
  Description of Artificial Sequence: Synthetic oligonucleotide
cuugcagucugccuagaug

SEQ ID NO: 2895053 - RNA, 19 nt, Artificial Sequence
  Description of Artificial Sequence: Synthetic oligonucleotide
cucccgaagcgguugacgg

SEQ ID NO: 2895054 - RNA, 19 nt, Artificial Sequence
  Description of Artificial Sequence: Synthetic oligonucleotide
ucaugaccuggaucgggcg

SEQ ID NO: 2895055 - RNA, 19 nt, Artificial Sequence
  Description of Artificial Sequence: Synthetic oligonucleotide
cagucugccuagauggugc

SEQ ID NO: 2895056 - RNA, 19 nt, Artificial Sequence
  Description of Artificial Sequence: Synthetic oligonucleotide
ugacccaucucuucagcca

SEQ ID NO: 2895057 - RNA, 19 nt, Artificial Sequence
  Description of Artificial Sequence: Synthetic oligonucleotide
acugccgccgcccagcaug

SEQ ID NO: 2895058 - RNA, 19 nt, Artificial Sequence
  Description of Artificial Sequence: Synthetic oligonucleotide
gacccaucucuucagccag

SEQ ID NO: 2895059 - RNA, 19 nt, Artificial Sequence
  Description of Artificial Sequence: Synthetic oligonucleotide
aucagucuccaguggcagc

SEQ ID NO: 2895060 - RNA, 19 nt, Artificial Sequence
  Description of Artificial Sequence: Synthetic oligonucleotide
ugucacgcacauccagccg

SEQ ID NO: 2895061 - RNA, 19 nt, Artificial Sequence
  Description of Artificial Sequence: Synthetic oligonucleotide
cugugcagcaccaccagug

SEQ ID NO: 2895062 - RNA, 19 nt, Artificial Sequence
  Description of Artificial Sequence: Synthetic oligonucleotide
uacgccggcuuccaggagc

SEQ ID NO: 2895063 - RNA, 19 nt, Artificial Sequence
  Description of Artificial Sequence: Synthetic oligonucleotide
ugcagauauauugcaauau

SEQ ID NO: 2895064 - RNA, 19 nt, Artificial Sequence
  Description of Artificial Sequence: Synthetic oligonucleotide
ucuacgccggcuuccagga

SEQ ID NO: 2895065 - RNA, 19 nt, Artificial Sequence
  Description of Artificial Sequence: Synthetic oligonucleotide
aagcgguugacggcguugg

SEQ ID NO: 2895066 - RNA, 19 nt, Artificial Sequence
  Description of Artificial Sequence: Synthetic oligonucleotide
uccaggaagccuucucgag

SEQ ID NO: 2895067 - RNA, 19 nt, Artificial Sequence
  Description of Artificial Sequence: Synthetic oligonucleotide
aguguuggggucugcgcag

SEQ ID NO: 2895068 - RNA, 19 nt, Artificial Sequence
  Description of Artificial Sequence: Synthetic oligonucleotide
augaccuggaucgggcgcc

SEQ ID NO: 2895069 - RNA, 19 nt, Artificial Sequence
  Description of Artificial Sequence: Synthetic oligonucleotide
agcaccaccagugugucca

SEQ ID NO: 2895070 - RNA, 19 nt, Artificial Sequence
  Description of Artificial Sequence: Synthetic oligonucleotide
auggugacccaucucuuca

SEQ ID NO: 2895071 - RNA, 19 nt, Artificial Sequence
  Description of Artificial Sequence: Synthetic oligonucleotide
ucacgcacauccagccgcg

SEQ ID NO: 2895072 - RNA, 19 nt, Artificial Sequence
  Description of Artificial Sequence: Synthetic oligonucleotide
cugcccaucaucaugaccu

SEQ ID NO: 2895073 - RNA, 19 nt, Artificial Sequence
  Description of Artificial Sequence: Synthetic oligonucleotide
agccgcaucgugcacaggu

SEQ ID NO: 2895074 - RNA, 19 nt, Artificial Sequence
  Description of Artificial Sequence: Synthetic oligonucleotide
uucagccagguccaccggc

SEQ ID NO: 2895075 - RNA, 19 nt, Artificial Sequence
  Description of Artificial Sequence: Synthetic oligonucleotide
ugacggaaggcugagggaa

SEQ ID NO: 2895076 - RNA, 19 nt, Artificial Sequence
  Description of Artificial Sequence: Synthetic oligonucleotide
cacaggucuggugagagug

SEQ ID NO: 2895077 - RNA, 19 nt, Artificial Sequence
  Description of Artificial Sequence: Synthetic oligonucleotide
gagaguguuggggucugcg

SEQ ID NO: 2895078 - RNA, 19 nt, Artificial Sequence
  Description of Artificial Sequence: Synthetic oligonucleotide
ugugcagcaccaccagugu

SEQ ID NO: 2895079 - RNA, 19 nt, Artificial Sequence
  Description of Artificial Sequence: Synthetic oligonucleotide
uuccgcuccgugcagcagc

SEQ ID NO: 2895080 - RNA, 19 nt, Artificial Sequence
  Description of Artificial Sequence: Synthetic oligonucleotide
ugccaucagucuccagugg

SEQ ID NO: 2895081 - RNA, 19 nt, Artificial Sequence
  Description of Artificial Sequence: Synthetic oligonucleotide
gaguguuggggucugcgca

SEQ ID NO: 2895082 - RNA, 19 nt, Artificial Sequence
  Description of Artificial Sequence: Synthetic oligonucleotide
ucucgagccgcaucgugca

SEQ ID NO: 2895083 - RNA, 19 nt, Artificial Sequence
  Description of Artificial Sequence: Synthetic oligonucleotide
ugcacaggucuggugagag

SEQ ID NO: 2895084 - RNA, 19 nt, Artificial Sequence
  Description of Artificial Sequence: Synthetic oligonucleotide
acgcacauccagccgcgcc

SEQ ID NO: 2895085 - RNA, 19 nt, Artificial Sequence
  Description of Artificial Sequence: Synthetic oligonucleotide
accuggaucgggcgccucc

SEQ ID NO: 2895086 - RNA, 19 nt, Artificial Sequence
  Description of Artificial Sequence: Synthetic oligonucleotide
guuggguuccgcuccgugc

SEQ ID NO: 2895087 - RNA, 19 nt, Artificial Sequence
  Description of Artificial Sequence: Synthetic oligonucleotide
ucagccagguccaccggca

SEQ ID NO: 2895088 - RNA, 19 nt, Artificial Sequence
  Description of Artificial Sequence: Synthetic oligonucleotide
ggucuggugagaguguugg

SEQ ID NO: 2895089 - RNA, 19 nt, Artificial Sequence
  Description of Artificial Sequence: Synthetic oligonucleotide
cugccaucagucuccagug

SEQ ID NO: 2895090 - RNA, 19 nt, Artificial Sequence
  Description of Artificial Sequence: Synthetic oligonucleotide
ccugacggaaggcugaggg

SEQ ID NO: 2895091 - RNA, 19 nt, Artificial Sequence
  Description of Artificial Sequence: Synthetic oligonucleotide
aggugucacgcacauccag

SEQ ID NO: 2895092 - RNA, 19 nt, Artificial Sequence
  Description of Artificial Sequence: Synthetic oligonucleotide
gaaggcugagggaaccugc

SEQ ID NO: 2895093 - RNA, 19 nt, Artificial Sequence
  Description of Artificial Sequence: Synthetic oligonucleotide
ugagggaaccugccaucag

SEQ ID NO: 2895094 - RNA, 19 nt, Artificial Sequence
  Description of Artificial Sequence: Synthetic oligonucleotide
caccaguguguccaggaag

SEQ ID NO: 2895095 - RNA, 19 nt, Artificial Sequence
  Description of Artificial Sequence: Synthetic oligonucleotide
gugacccaucucuucagcc

SEQ ID NO: 2895096 - RNA, 19 nt, Artificial Sequence
  Description of Artificial Sequence: Synthetic oligonucleotide
caucaucaugaccuggauc

SEQ ID NO: 2895097 - RNA, 19 nt, Artificial Sequence
  Description of Artificial Sequence: Synthetic oligonucleotide
ugcccugugcagcaccacc

SEQ ID NO: 2895098 - RNA, 19 nt, Artificial Sequence
  Description of Artificial Sequence: Synthetic oligonucleotide
gcagauauauugcaauauc

SEQ ID NO: 2895099 - RNA, 19 nt, Artificial Sequence
  Description of Artificial Sequence: Synthetic oligonucleotide
ucaucaugaccuggaucgg

SEQ ID NO: 2895100 - RNA, 19 nt, Artificial Sequence
  Description of Artificial Sequence: Synthetic oligonucleotide
augcagauauauugcaaua

SEQ ID NO: 2895101 - RNA, 19 nt, Artificial Sequence
  Description of Artificial Sequence: Synthetic oligonucleotide
caugaccuggaucgggcgc

SEQ ID NO: 2895102 - RNA, 19 nt, Artificial Sequence
  Description of Artificial Sequence: Synthetic oligonucleotide
acggaaggcugagggaacc

SEQ ID NO: 2895103 - RNA, 19 nt, Artificial Sequence
  Description of Artificial Sequence: Synthetic oligonucleotide
ucgggcgccucccgaagcg

SEQ ID NO: 2895104 - RNA, 19 nt, Artificial Sequence
  Description of Artificial Sequence: Synthetic oligonucleotide
uggugacccaucucuucag

SEQ ID NO: 2895105 - RNA, 19 nt, Artificial Sequence
  Description of Artificial Sequence: Synthetic oligonucleotide
caucaugaccuggaucggg

SEQ ID NO: 2895106 - RNA, 19 nt, Artificial Sequence
  Description of Artificial Sequence: Synthetic oligonucleotide
aaguccugacggaaggcug

SEQ ID NO: 2895107 - RNA, 19 nt, Artificial Sequence
  Description of Artificial Sequence: Synthetic oligonucleotide
aggcccgcgucacugccgc

SEQ ID NO: 2895108 - RNA, 19 nt, Artificial Sequence
  Description of Artificial Sequence: Synthetic oligonucleotide
aucgggcgccucccgaagc

SEQ ID NO: 2895109 - RNA, 19 nt, Artificial Sequence
  Description of Artificial Sequence: Synthetic oligonucleotide
uaucauggugacccaucuc

SEQ ID NO: 2895110 - RNA, 19 nt, Artificial Sequence
  Description of Artificial Sequence: Synthetic oligonucleotide
cauggugacccaucucuuc

SEQ ID NO: 2895111 - RNA, 19 nt, Artificial Sequence
  Description of Artificial Sequence: Synthetic oligonucleotide
agggaaccugccaucaguc

SEQ ID NO: 2895112 - RNA, 19 nt, Artificial Sequence
  Description of Artificial Sequence: Synthetic oligonucleotide
ggugcugcccaucaucaug

SEQ ID NO: 2895113 - RNA, 19 nt, Artificial Sequence
  Description of Artificial Sequence: Synthetic oligonucleotide
gccuucucgagccgcaucg

SEQ ID NO: 2895114 - RNA, 19 nt, Artificial Sequence
  Description of Artificial Sequence: Synthetic oligonucleotide
ugcgcaguuggguuccgcu

SEQ ID NO: 2895115 - RNA, 19 nt, Artificial Sequence
  Description of Artificial Sequence: Synthetic oligonucleotide
cagcagcucugcuaccugg

SEQ ID NO: 2895116 - RNA, 19 nt, Artificial Sequence
  Description of Artificial Sequence: Synthetic oligonucleotide
caugcagauauauugcaau

SEQ ID NO: 2895117 - RNA, 19 nt, Artificial Sequence
  Description of Artificial Sequence: Synthetic oligonucleotide
gacggcguugggaucuacg

SEQ ID NO: 2895118 - RNA, 19 nt, Artificial Sequence
  Description of Artificial Sequence: Synthetic oligonucleotide
gcagcagcagcucugcuac

SEQ ID NO: 2895119 - RNA, 19 nt, Artificial Sequence
  Description of Artificial Sequence: Synthetic oligonucleotide
uugggaucuacgccggcuu

SEQ ID NO: 2895120 - RNA, 19 nt, Artificial Sequence
  Description of Artificial Sequence: Synthetic oligonucleotide
aguuggguuccgcuccgug

SEQ ID NO: 2895121 - RNA, 19 nt, Artificial Sequence
  Description of Artificial Sequence: Synthetic oligonucleotide
caucagucuccaguggcag

SEQ ID NO: 2895122 - RNA, 19 nt, Artificial Sequence
  Description of Artificial Sequence: Synthetic oligonucleotide
ggaaccugccaucagucuc

SEQ ID NO: 2895123 - RNA, 19 nt, Artificial Sequence
  Description of Artificial Sequence: Synthetic oligonucleotide
gugcuugcagucugccuag

SEQ ID NO: 2895124 - RNA, 19 nt, Artificial Sequence
  Description of Artificial Sequence: Synthetic oligonucleotide
aguguguccaggaagccuu

SEQ ID NO: 2895125 - RNA, 19 nt, Artificial Sequence
  Description of Artificial Sequence: Synthetic oligonucleotide
agcagcagcagcucugcua

SEQ ID NO: 2895126 - RNA, 19 nt, Artificial Sequence
  Description of Artificial Sequence: Synthetic oligonucleotide
ugcagucugccuagauggu

SEQ ID NO: 2895127 - RNA, 19 nt, Artificial Sequence
  Description of Artificial Sequence: Synthetic oligonucleotide
cuucgugcuugcagucugc

SEQ ID NO: 2895128 - RNA, 19 nt, Artificial Sequence
  Description of Artificial Sequence: Synthetic oligonucleotide
gaagcgguugacggcguug

SEQ ID NO: 2895129 - RNA, 19 nt, Artificial Sequence
  Description of Artificial Sequence: Synthetic oligonucleotide
ucuccaguggcagcaugca

SEQ ID NO: 2895130 - RNA, 19 nt, Artificial Sequence
  Description of Artificial Sequence: Synthetic oligonucleotide
uccaccggcaggcggcccc

SEQ ID NO: 2895131 - RNA, 19 nt, Artificial Sequence
  Description of Artificial Sequence: Synthetic oligonucleotide
uccgugcagcagcagcagc

SEQ ID NO: 2895132 - RNA, 19 nt, Artificial Sequence
  Description of Artificial Sequence: Synthetic oligonucleotide
uggggucugcgcaguuggg

SEQ ID NO: 2895133 - RNA, 19 nt, Artificial Sequence
  Description of Artificial Sequence: Synthetic oligonucleotide
cugggugcugcccaucauc

SEQ ID NO: 2895134 - RNA, 19 nt, Artificial Sequence
  Description of Artificial Sequence: Synthetic oligonucleotide
ucccgaagcgguugacggc

SEQ ID NO: 2895135 - RNA, 19 nt, Artificial Sequence
  Description of Artificial Sequence: Synthetic oligonucleotide
gccaucagucuccaguggc

SEQ ID NO: 2895136 - RNA, 19 nt, Artificial Sequence
  Description of Artificial Sequence: Synthetic oligonucleotide
gaucgggcgccucccgaag

SEQ ID NO: 2895137 - RNA, 19 nt, Artificial Sequence
  Description of Artificial Sequence: Synthetic oligonucleotide
uucgugcuugcagucugcc

SEQ ID NO: 2895138 - RNA, 19 nt, Artificial Sequence
  Description of Artificial Sequence: Synthetic oligonucleotide
gucuccaguggcagcaugc

SEQ ID NO: 2895139 - RNA, 19 nt, Artificial Sequence
  Description of Artificial Sequence: Synthetic oligonucleotide
uugcaauaucauggugacc

SEQ ID NO: 2895140 - RNA, 19 nt, Artificial Sequence
  Description of Artificial Sequence: Synthetic oligonucleotide
aggaagccuucucgagccg

SEQ ID NO: 2895141 - RNA, 19 nt, Artificial Sequence
  Description of Artificial Sequence: Synthetic oligonucleotide
agccuucucgagccgcauc

SEQ ID NO: 2895142 - RNA, 19 nt, Artificial Sequence
  Description of Artificial Sequence: Synthetic oligonucleotide
gucuggugagaguguuggg

SEQ ID NO: 2895143 - RNA, 19 nt, Artificial Sequence
  Description of Artificial Sequence: Synthetic oligonucleotide
cuucucgagccgcaucgug

SEQ ID NO: 2895144 - RNA, 19 nt, Artificial Sequence
  Description of Artificial Sequence: Synthetic oligonucleotide
ugcccaucaucaugaccug

SEQ ID NO: 2895145 - RNA, 19 nt, Artificial Sequence
  Description of Artificial Sequence: Synthetic oligonucleotide
aucgugcacaggucuggug

SEQ ID NO: 2895146 - RNA, 19 nt, Artificial Sequence
  Description of Artificial Sequence: Synthetic oligonucleotide
uccgcuccgugcagcagca

SEQ ID NO: 2895147 - RNA, 19 nt, Artificial Sequence
  Description of Artificial Sequence: Synthetic oligonucleotide
agucuccaguggcagcaug

SEQ ID NO: 2895148 - RNA, 19 nt, Artificial Sequence
  Description of Artificial Sequence: Synthetic oligonucleotide
gagggaaccugccaucagu

SEQ ID NO: 2895149 - RNA, 19 nt, Artificial Sequence
  Description of Artificial Sequence: Synthetic oligonucleotide
uggaucgggcgccucccga

SEQ ID NO: 2895150 - RNA, 19 nt, Artificial Sequence
  Description of Artificial Sequence: Synthetic oligonucleotide
agucugccuagauggugcu

SEQ ID NO: 2895151 - RNA, 19 nt, Artificial Sequence
  Description of Artificial Sequence: Synthetic oligonucleotide
agcagcagcucugcuaccu

SEQ ID NO: 2895152 - RNA, 19 nt, Artificial Sequence
  Description of Artificial Sequence: Synthetic oligonucleotide
ggugucacgcacauccagc

SEQ ID NO: 2895153 - RNA, 19 nt, Artificial Sequence
  Description of Artificial Sequence: Synthetic oligonucleotide
ucgagccgcaucgugcaca

SEQ ID NO: 2895154 - RNA, 19 nt, Artificial Sequence
  Description of Artificial Sequence: Synthetic oligonucleotide
ugggaucuacgccggcuuc

SEQ ID NO: 2895155 - RNA, 19 nt, Artificial Sequence
  Description of Artificial Sequence: Synthetic oligonucleotide
cugccuagauggugcuggg

SEQ ID NO: 2895156 - RNA, 19 nt, Artificial Sequence
  Description of Artificial Sequence: Synthetic oligonucleotide
guccaggaagccuucucga

SEQ ID NO: 2895157 - RNA, 19 nt, Artificial Sequence
  Description of Artificial Sequence: Synthetic oligonucleotide
gaucuacgccggcuuccag

SEQ ID NO: 2895158 - RNA, 19 nt, Artificial Sequence
  Description of Artificial Sequence: Synthetic oligonucleotide
caccgucuccaccugcccc

SEQ ID NO: 2895159 - RNA, 19 nt, Artificial Sequence
  Description of Artificial Sequence: Synthetic oligonucleotide
ccaggaagccuucucgagc

SEQ ID NO: 2895160 - RNA, 19 nt, Artificial Sequence
  Description of Artificial Sequence: Synthetic oligonucleotide
cuccaguggcagcaugcag

SEQ ID NO: 2895161 - RNA, 19 nt, Artificial Sequence
  Description of Artificial Sequence: Synthetic oligonucleotide
cuucagccagguccaccgg

SEQ ID NO: 2895162 - RNA, 19 nt, Artificial Sequence
  Description of Artificial Sequence: Synthetic oligonucleotide
cauccagccgcgccccugc

SEQ ID NO: 2895163 - RNA, 19 nt, Artificial Sequence
  Description of Artificial Sequence: Synthetic oligonucleotide
ucgugcuugcagucugccu

SEQ ID NO: 2895164 - RNA, 19 nt, Artificial Sequence
  Description of Artificial Sequence: Synthetic oligonucleotide
cuagauggugcugggauua

SEQ ID NO: 2895165 - RNA, 19 nt, Artificial Sequence
  Description of Artificial Sequence: Synthetic oligonucleotide
uggguuccgcuccgugcag

SEQ ID NO: 2895166 - RNA, 19 nt, Artificial Sequence
  Description of Artificial Sequence: Synthetic oligonucleotide
accugggugcugcccauca

SEQ ID NO: 2895167 - RNA, 19 nt, Artificial Sequence
  Description of Artificial Sequence: Synthetic oligonucleotide
aguccugacggaaggcuga

SEQ ID NO: 2895168 - RNA, 19 nt, Artificial Sequence
  Description of Artificial Sequence: Synthetic oligonucleotide
ggugacccaucucuucagc

SEQ ID NO: 2895169 - RNA, 19 nt, Artificial Sequence
  Description of Artificial Sequence: Synthetic oligonucleotide
cagguccaccggcaggcgg

SEQ ID NO: 2895170 - RNA, 19 nt, Artificial Sequence
  Description of Artificial Sequence: Synthetic oligonucleotide
gugcagcaccaccagugug

SEQ ID NO: 2895171 - RNA, 19 nt, Artificial Sequence
  Description of Artificial Sequence: Synthetic oligonucleotide
gugcugcccaucaucauga

SEQ ID NO: 2895172 - RNA, 19 nt, Artificial Sequence
  Description of Artificial Sequence: Synthetic oligonucleotide
agcgguugacggcguuggg

SEQ ID NO: 2895173 - RNA, 19 nt, Artificial Sequence
  Description of Artificial Sequence: Synthetic oligonucleotide
uccugacggaaggcugagg

SEQ ID NO: 2895174 - RNA, 19 nt, Artificial Sequence
  Description of Artificial Sequence: Synthetic oligonucleotide
uccagccgcgccccugccc

SEQ ID NO: 2895175 - RNA, 19 nt, Artificial Sequence
  Description of Artificial Sequence: Synthetic oligonucleotide
gucacugccgccgcccagc

SEQ ID NO: 2895176 - RNA, 19 nt, Artificial Sequence
  Description of Artificial Sequence: Synthetic oligonucleotide
gacggaaggcugagggaac

SEQ ID NO: 2895177 - RNA, 19 nt, Artificial Sequence
  Description of Artificial Sequence: Synthetic oligonucleotide
guugacggcguugggaucu

SEQ ID NO: 2895178 - RNA, 19 nt, Artificial Sequence
  Description of Artificial Sequence: Synthetic oligonucleotide
ugcuaccugggugcugccc

SEQ ID NO: 2895179 - RNA, 19 nt, Artificial Sequence
  Description of Artificial Sequence: Synthetic oligonucleotide
gaagccuucucgagccgca

SEQ ID NO: 2895180 - RNA, 19 nt, Artificial Sequence
  Description of Artificial Sequence: Synthetic oligonucleotide
cugacggaaggcugaggga

SEQ ID NO: 2895181 - RNA, 19 nt, Artificial Sequence
  Description of Artificial Sequence: Synthetic oligonucleotide
gucugcgcaguuggguucc

SEQ ID NO: 2895182 - RNA, 19 nt, Artificial Sequence
  Description of Artificial Sequence: Synthetic oligonucleotide
cccgaagcgguugacggcg

SEQ ID NO: 2895183 - RNA, 19 nt, Artificial Sequence
  Description of Artificial Sequence: Synthetic oligonucleotide
gcaucgugcacaggucugg

SEQ ID NO: 2895184 - RNA, 19 nt, Artificial Sequence
  Description of Artificial Sequence: Synthetic oligonucleotide
gcugcccaucaucaugacc

SEQ ID NO: 2895185 - RNA, 19 nt, Artificial Sequence
  Description of Artificial Sequence: Synthetic oligonucleotide
auccagccgcgccccugcc

SEQ ID NO: 2895186 - RNA, 19 nt, Artificial Sequence
  Description of Artificial Sequence: Synthetic oligonucleotide
ggagcugccgcaccgucuc

SEQ ID NO: 2895187 - RNA, 19 nt, Artificial Sequence
  Description of Artificial Sequence: Synthetic oligonucleotide
ucacugccgccgcccagca

SEQ ID NO: 2895188 - RNA, 19 nt, Artificial Sequence
  Description of Artificial Sequence: Synthetic oligonucleotide
gcaguuggguuccgcuccg

SEQ ID NO: 2895189 - RNA, 19 nt, Artificial Sequence
  Description of Artificial Sequence: Synthetic oligonucleotide
gcuaccugggugcugccca

SEQ ID NO: 2895190 - RNA, 19 nt, Artificial Sequence
  Description of Artificial Sequence: Synthetic oligonucleotide
caggcccgcgucacugccg

SEQ ID NO: 2895191 - RNA, 19 nt, Artificial Sequence
  Description of Artificial Sequence: Synthetic oligonucleotide
cuggaucgggcgccucccg

SEQ ID NO: 2895192 - RNA, 19 nt, Artificial Sequence
  Description of Artificial Sequence: Synthetic oligonucleotide
ugccuagauggugcuggga

SEQ ID NO: 2895193 - RNA, 19 nt, Artificial Sequence
  Description of Artificial Sequence: Synthetic oligonucleotide
cugagggaaccugccauca

SEQ ID NO: 2895194 - RNA, 19 nt, Artificial Sequence
  Description of Artificial Sequence: Synthetic oligonucleotide
ggaaggcugagggaaccug

SEQ ID NO: 2895195 - RNA, 19 nt, Artificial Sequence
  Description of Artificial Sequence: Synthetic oligonucleotide
ugagaguguuggggucugc

SEQ ID NO: 2895196 - RNA, 19 nt, Artificial Sequence
  Description of Artificial Sequence: Synthetic oligonucleotide
ggaagccuucucgagccgc

SEQ ID NO: 2895197 - RNA, 19 nt, Artificial Sequence
  Description of Artificial Sequence: Synthetic oligonucleotide
gugagaguguuggggucug

SEQ ID NO: 2895198 - RNA, 19 nt, Artificial Sequence
  Description of Artificial Sequence: Synthetic oligonucleotide
ugcugcccaucaucaugac

SEQ ID NO: 2895199 - RNA, 19 nt, Artificial Sequence
  Description of Artificial Sequence: Synthetic oligonucleotide
uagauggugcugggauuaa

SEQ ID NO: 2895200 - RNA, 19 nt, Artificial Sequence
  Description of Artificial Sequence: Synthetic oligonucleotide
cuccgugcagcagcagcag

SEQ ID NO: 2895201 - RNA, 19 nt, Artificial Sequence
  Description of Artificial Sequence: Synthetic oligonucleotide
gcugagggaaccugccauc

SEQ ID NO: 2895202 - RNA, 19 nt, Artificial Sequence
  Description of Artificial Sequence: Synthetic oligonucleotide
ucugcgcaguuggguuccg

SEQ ID NO: 2895203 - RNA, 19 nt, Artificial Sequence
  Description of Artificial Sequence: Synthetic oligonucleotide
acccaucucuucagccagg

SEQ ID NO: 2895204 - RNA, 19 nt, Artificial Sequence
  Description of Artificial Sequence: Synthetic oligonucleotide
cgcaguuggguuccgcucc

SEQ ID NO: 2895205 - RNA, 19 nt, Artificial Sequence
  Description of Artificial Sequence: Synthetic oligonucleotide
gcagucugccuagauggug

SEQ ID NO: 2895206 - RNA, 19 nt, Artificial Sequence
  Description of Artificial Sequence: Synthetic oligonucleotide
gcaauaucauggugaccca

SEQ ID NO: 2895207 - RNA, 19 nt, Artificial Sequence
  Description of Artificial Sequence: Synthetic oligonucleotide
guccugacggaaggcugag

SEQ ID NO: 2895208 - RNA, 19 nt, Artificial Sequence
  Description of Artificial Sequence: Synthetic oligonucleotide
agauggugcugggauuaaa

SEQ ID NO: 2895209 - RNA, 19 nt, Artificial Sequence
  Description of Artificial Sequence: Synthetic oligonucleotide
gggaucuacgccggcuucc

SEQ ID NO: 2895210 - RNA, 19 nt, Artificial Sequence
  Description of Artificial Sequence: Synthetic oligonucleotide
ggucugcgcaguuggguuc

SEQ ID NO: 2895211 - RNA, 19 nt, Artificial Sequence
  Description of Artificial Sequence: Synthetic oligonucleotide
accggcaggcggccccagg

SEQ ID NO: 2895212 - RNA, 19 nt, Artificial Sequence
  Description of Artificial Sequence: Synthetic oligonucleotide
aggucuggugagaguguug

SEQ ID NO: 2895213 - RNA, 19 nt, Artificial Sequence
  Description of Artificial Sequence: Synthetic oligonucleotide
guugggaucuacgccggcu

SEQ ID NO: 2895214 - RNA, 19 nt, Artificial Sequence
  Description of Artificial Sequence: Synthetic oligonucleotide
ccugccaucagucuccagu

SEQ ID NO: 2895215 - RNA, 19 nt, Artificial Sequence
  Description of Artificial Sequence: Synthetic oligonucleotide
acauccagccgcgccccug

SEQ ID NO: 2895216 - RNA, 19 nt, Artificial Sequence
  Description of Artificial Sequence: Synthetic oligonucleotide
aagccuucucgagccgcau

SEQ ID NO: 2895217 - RNA, 19 nt, Artificial Sequence
  Description of Artificial Sequence: Synthetic oligonucleotide
ccggcuuccaggagcugcc

SEQ ID NO: 2895218 - RNA, 19 nt, Artificial Sequence
  Description of Artificial Sequence: Synthetic oligonucleotide
ggcuuccaggagcugccgc

SEQ ID NO: 2895219 - RNA, 19 nt, Artificial Sequence
  Description of Artificial Sequence: Synthetic oligonucleotide
ggccccaggugucacgcac

SEQ ID NO: 2895220 - RNA, 19 nt, Artificial Sequence
  Description of Artificial Sequence: Synthetic oligonucleotide
caggagcugccgcaccguc

SEQ ID NO: 2895221 - RNA, 19 nt, Artificial Sequence
  Description of Artificial Sequence: Synthetic oligonucleotide
caggugucacgcacaucca

SEQ ID NO: 2895222 - RNA, 19 nt, Artificial Sequence
  Description of Artificial Sequence: Synthetic oligonucleotide
ccaucagucuccaguggca

SEQ ID NO: 2895223 - RNA, 19 nt, Artificial Sequence
  Description of Artificial Sequence: Synthetic oligonucleotide
cgcacauccagccgcgccc

SEQ ID NO: 2895224 - RNA, 19 nt, Artificial Sequence
  Description of Artificial Sequence: Synthetic oligonucleotide
gcaugcagauauauugcaa

SEQ ID NO: 2895225 - RNA, 19 nt, Artificial Sequence
  Description of Artificial Sequence: Synthetic oligonucleotide
cagcagcagcucugcuacc

SEQ ID NO: 2895226 - RNA, 19 nt, Artificial Sequence
  Description of Artificial Sequence: Synthetic oligonucleotide
gguuccgcuccgugcagca

SEQ ID NO: 2895227 - RNA, 19 nt, Artificial Sequence
  Description of Artificial Sequence: Synthetic oligonucleotide
aggagcugccgcaccgucu

SEQ ID NO: 2895228 - RNA, 19 nt, Artificial Sequence
  Description of Artificial Sequence: Synthetic oligonucleotide
gccggcuuccaggagcugc

SEQ ID NO: 2895229 - RNA, 19 nt, Artificial Sequence
  Description of Artificial Sequence: Synthetic oligonucleotide
gccuagauggugcugggau

SEQ ID NO: 2895230 - RNA, 19 nt, Artificial Sequence
  Description of Artificial Sequence: Synthetic oligonucleotide
cuacgccggcuuccaggag

SEQ ID NO: 2895231 - RNA, 19 nt, Artificial Sequence
  Description of Artificial Sequence: Synthetic oligonucleotide
gucugccuagauggugcug

SEQ ID NO: 2895232 - RNA, 19 nt, Artificial Sequence
  Description of Artificial Sequence: Synthetic oligonucleotide
guuccgcuccgugcagcag

SEQ ID NO: 2895233 - RNA, 19 nt, Artificial Sequence
  Description of Artificial Sequence: Synthetic oligonucleotide
ugaccuggaucgggcgccu

SEQ ID NO: 2895234 - RNA, 19 nt, Artificial Sequence
  Description of Artificial Sequence: Synthetic oligonucleotide
ugcuugcagucugccuaga

SEQ ID NO: 2895235 - RNA, 19 nt, Artificial Sequence
  Description of Artificial Sequence: Synthetic oligonucleotide
cugcuaccugggugcugcc

SEQ ID NO: 2895236 - RNA, 19 nt, Artificial Sequence
  Description of Artificial Sequence: Synthetic oligonucleotide
ccucccgaagcgguugacg

SEQ ID NO: 2895237 - RNA, 19 nt, Artificial Sequence
  Description of Artificial Sequence: Synthetic oligonucleotide
cucgagccgcaucgugcac

SEQ ID NO: 2895238 - RNA, 19 nt, Artificial Sequence
  Description of Artificial Sequence: Synthetic oligonucleotide
cgugcacaggucuggugag

SEQ ID NO: 2895239 - RNA, 19 nt, Artificial Sequence
  Description of Artificial Sequence: Synthetic oligonucleotide
accugccaucagucuccag

SEQ ID NO: 2895240 - RNA, 19 nt, Artificial Sequence
  Description of Artificial Sequence: Synthetic oligonucleotide
gcguugggaucuacgccgg

SEQ ID NO: 2895241 - RNA, 19 nt, Artificial Sequence
  Description of Artificial Sequence: Synthetic oligonucleotide
gguugacggcguugggauc

SEQ ID NO: 2895242 - RNA, 19 nt, Artificial Sequence
  Description of Artificial Sequence: Synthetic oligonucleotide
cgugcuugcagucugccua

SEQ ID NO: 2895243 - RNA, 19 nt, Artificial Sequence
  Description of Artificial Sequence: Synthetic oligonucleotide
gcuccgugcagcagcagca

SEQ ID NO: 2895244 - RNA, 19 nt, Artificial Sequence
  Description of Artificial Sequence: Synthetic oligonucleotide
ggugagaguguuggggucu

SEQ ID NO: 2895245 - RNA, 19 nt, Artificial Sequence
  Description of Artificial Sequence: Synthetic oligonucleotide
gcggcgguggccaggcccg

SEQ ID NO: 2895246 - RNA, 19 nt, Artificial Sequence
  Description of Artificial Sequence: Synthetic oligonucleotide
guggccaggcccgcgucac

SEQ ID NO: 2895247 - RNA, 19 nt, Artificial Sequence
  Description of Artificial Sequence: Synthetic oligonucleotide
acgccggcuuccaggagcu

SEQ ID NO: 2895248 - RNA, 19 nt, Artificial Sequence
  Description of Artificial Sequence: Synthetic oligonucleotide
gcccgcgucacugccgccg

SEQ ID NO: 2895249 - RNA, 19 nt, Artificial Sequence
  Description of Artificial Sequence: Synthetic oligonucleotide
cgcaccgucuccaccugcc

SEQ ID NO: 2895250 - RNA, 19 nt, Artificial Sequence
  Description of Artificial Sequence: Synthetic oligonucleotide
ggcugagggaaccugccau

SEQ ID NO: 2895251 - RNA, 19 nt, Artificial Sequence
  Description of Artificial Sequence: Synthetic oligonucleotide
gccgccgcccagcaugccc

SEQ ID NO: 2895252 - RNA, 19 nt, Artificial Sequence
  Description of Artificial Sequence: Synthetic oligonucleotide
uggccaggcccgcgucacu

SEQ ID NO: 2895253 - RNA, 19 nt, Artificial Sequence
  Description of Artificial Sequence: Synthetic oligonucleotide
caauaucauggugacccau

SEQ ID NO: 2895254 - RNA, 19 nt, Artificial Sequence
  Description of Artificial Sequence: Synthetic oligonucleotide
ggaucuacgccggcuucca

SEQ ID NO: 2895255 - RNA, 19 nt, Artificial Sequence
  Description of Artificial Sequence: Synthetic oligonucleotide
gcgcaguuggguuccgcuc

SEQ ID NO: 2895256 - RNA, 19 nt, Artificial Sequence
  Description of Artificial Sequence: Synthetic oligonucleotide
ggcggccccaggugucacg

SEQ ID NO: 2895257 - RNA, 19 nt, Artificial Sequence
  Description of Artificial Sequence: Synthetic oligonucleotide
gcaccgucuccaccugccc

SEQ ID NO: 2895258 - RNA, 19 nt, Artificial Sequence
  Description of Artificial Sequence: Synthetic oligonucleotide
cgcuccgugcagcagcagc

SEQ ID NO: 2895259 - RNA, 19 nt, Artificial Sequence
  Description of Artificial Sequence: Synthetic oligonucleotide
cugcgcaguuggguuccgc

SEQ ID NO: 2895260 - RNA, 19 nt, Artificial Sequence
  Description of Artificial Sequence: Synthetic oligonucleotide
gcgguugacggcguuggga

SEQ ID NO: 2895261 - RNA, 19 nt, Artificial Sequence
  Description of Artificial Sequence: Synthetic oligonucleotide
ggaucgggcgccucccgaa

SEQ ID NO: 2895262 - RNA, 19 nt, Artificial Sequence
  Description of Artificial Sequence: Synthetic oligonucleotide
caguguguccaggaagccu

SEQ ID NO: 2895263 - RNA, 19 nt, Artificial Sequence
  Description of Artificial Sequence: Synthetic oligonucleotide
cgagccgcaucgugcacag

SEQ ID NO: 2895264 - RNA, 19 nt, Artificial Sequence
  Description of Artificial Sequence: Synthetic oligonucleotide
cacgcacauccagccgcgc

SEQ ID NO: 2895265 - RNA, 19 nt, Artificial Sequence
  Description of Artificial Sequence: Synthetic oligonucleotide
gugcacaggucuggugaga

SEQ ID NO: 2895266 - RNA, 19 nt, Artificial Sequence
  Description of Artificial Sequence: Synthetic oligonucleotide
guguguccaggaagccuuc

SEQ ID NO: 2895267 - RNA, 19 nt, Artificial Sequence
  Description of Artificial Sequence: Synthetic oligonucleotide
aggcggccccaggugucac

SEQ ID NO: 2895268 - RNA, 19 nt, Artificial Sequence
  Description of Artificial Sequence: Synthetic oligonucleotide
gcacauccagccgcgcccc

SEQ ID NO: 2895269 - RNA, 19 nt, Artificial Sequence
  Description of Artificial Sequence: Synthetic oligonucleotide
ugacggcguugggaucuac

SEQ ID NO: 2895270 - RNA, 19 nt, Artificial Sequence
  Description of Artificial Sequence: Synthetic oligonucleotide
ccuggaucgggcgccuccc

SEQ ID NO: 2895271 - RNA, 19 nt, Artificial Sequence
  Description of Artificial Sequence: Synthetic oligonucleotide
ggccaggcccgcgucacug

SEQ ID NO: 2895272 - RNA, 19 nt, Artificial Sequence
  Description of Artificial Sequence: Synthetic oligonucleotide
ccaggcccgcgucacugcc

SEQ ID NO: 2895273 - RNA, 19 nt, Artificial Sequence
  Description of Artificial Sequence: Synthetic oligonucleotide
uaccugggugcugcccauc

SEQ ID NO: 2895274 - RNA, 19 nt, Artificial Sequence
  Description of Artificial Sequence: Synthetic oligonucleotide
gagccgcaucgugcacagg

SEQ ID NO: 2895275 - RNA, 19 nt, Artificial Sequence
  Description of Artificial Sequence: Synthetic oligonucleotide
gggaaccugccaucagucu

SEQ ID NO: 2895276 - RNA, 19 nt, Artificial Sequence
  Description of Artificial Sequence: Synthetic oligonucleotide
uugacggcguugggaucua

SEQ ID NO: 2895277 - RNA, 19 nt, Artificial Sequence
  Description of Artificial Sequence: Synthetic oligonucleotide
gguggccaggcccgcguca

SEQ ID NO: 2895278 - RNA, 19 nt, Artificial Sequence
  Description of Artificial Sequence: Synthetic oligonucleotide
gcagcaccaccaguguguc

SEQ ID NO: 2895279 - RNA, 19 nt, Artificial Sequence
  Description of Artificial Sequence: Synthetic oligonucleotide
gcggccccaggugucacgc

SEQ ID NO: 2895280 - RNA, 19 nt, Artificial Sequence
  Description of Artificial Sequence: Synthetic oligonucleotide
cccugcccugugcagcacc

SEQ ID NO: 2895281 - RNA, 19 nt, Artificial Sequence
  Description of Artificial Sequence: Synthetic oligonucleotide
cugcccugugcagcaccac

SEQ ID NO: 2895282 - RNA, 19 nt, Artificial Sequence
  Description of Artificial Sequence: Synthetic oligonucleotide
ggguuccgcuccgugcagc

SEQ ID NO: 2895283 - RNA, 19 nt, Artificial Sequence
  Description of Artificial Sequence: Synthetic oligonucleotide
gccaggcccgcgucacugc

SEQ ID NO: 2895284 - RNA, 19 nt, Artificial Sequence
  Description of Artificial Sequence: Synthetic oligonucleotide
gggucugcgcaguuggguu

SEQ ID NO: 2895285 - RNA, 19 nt, Artificial Sequence
  Description of Artificial Sequence: Synthetic oligonucleotide
guggcagcaugcagauaua

SEQ ID NO: 2895286 - RNA, 19 nt, Artificial Sequence
  Description of Artificial Sequence: Synthetic oligonucleotide
gguccaccggcaggcggcc

SEQ ID NO: 2895287 - RNA, 19 nt, Artificial Sequence
  Description of Artificial Sequence: Synthetic oligonucleotide
ccgugcagcagcagcagcu

SEQ ID NO: 2895288 - RNA, 19 nt, Artificial Sequence
  Description of Artificial Sequence: Synthetic oligonucleotide
gccgcaucgugcacagguc

SEQ ID NO: 2895289 - RNA, 19 nt, Artificial Sequence
  Description of Artificial Sequence: Synthetic oligonucleotide
caucgugcacaggucuggu

SEQ ID NO: 2895290 - RNA, 19 nt, Artificial Sequence
  Description of Artificial Sequence: Synthetic oligonucleotide
gccgcaccgucuccaccug

SEQ ID NO: 2895291 - RNA, 19 nt, Artificial Sequence
  Description of Artificial Sequence: Synthetic oligonucleotide
ccaguggcagcaugcagau

SEQ ID NO: 2895292 - RNA, 19 nt, Artificial Sequence
  Description of Artificial Sequence: Synthetic oligonucleotide
caggcggccccagguguca

SEQ ID NO: 2895293 - RNA, 19 nt, Artificial Sequence
  Description of Artificial Sequence: Synthetic oligonucleotide
agccgcgccccugcccugu

SEQ ID NO: 2895294 - RNA, 19 nt, Artificial Sequence
  Description of Artificial Sequence: Synthetic oligonucleotide
cccgcgucacugccgccgc

SEQ ID NO: 2895295 - RNA, 19 nt, Artificial Sequence
  Description of Artificial Sequence: Synthetic oligonucleotide
gaccuggaucgggcgccuc

SEQ ID NO: 2895296 - RNA, 19 nt, Artificial Sequence
  Description of Artificial Sequence: Synthetic oligonucleotide
ggcagcaugcagauauauu

SEQ ID NO: 2895297 - RNA, 19 nt, Artificial Sequence
  Description of Artificial Sequence: Synthetic oligonucleotide
cuaccugggugcugcccau

SEQ ID NO: 2895298 - RNA, 19 nt, Artificial Sequence
  Description of Artificial Sequence: Synthetic oligonucleotide
ggcgguggccaggcccgcg

SEQ ID NO: 2895299 - RNA, 19 nt, Artificial Sequence
  Description of Artificial Sequence: Synthetic oligonucleotide
gcgccucccgaagcgguug

SEQ ID NO: 2895300 - RNA, 19 nt, Artificial Sequence
  Description of Artificial Sequence: Synthetic oligonucleotide
ccaccaguguguccaggaa

SEQ ID NO: 2895301 - RNA, 19 nt, Artificial Sequence
  Description of Artificial Sequence: Synthetic oligonucleotide
gcuugcagucugccuagau

SEQ ID NO: 2895302 - RNA, 19 nt, Artificial Sequence
  Description of Artificial Sequence: Synthetic oligonucleotide
ggggucugcgcaguugggu

SEQ ID NO: 2895303 - RNA, 19 nt, Artificial Sequence
  Description of Artificial Sequence: Synthetic oligonucleotide
ccagguccaccggcaggcg

SEQ ID NO: 2895304 - RNA, 19 nt, Artificial Sequence
  Description of Artificial Sequence: Synthetic oligonucleotide
ugccgccgcccagcaugcc

SEQ ID NO: 2895305 - RNA, 19 nt, Artificial Sequence
  Description of Artificial Sequence: Synthetic oligonucleotide
cguugggaucuacgccggc

SEQ ID NO: 2895306 - RNA, 19 nt, Artificial Sequence
  Description of Artificial Sequence: Synthetic oligonucleotide
gcgccccugcccugugcag

SEQ ID NO: 2895307 - RNA, 19 nt, Artificial Sequence
  Description of Artificial Sequence: Synthetic oligonucleotide
ccuagauggugcugggauu

SEQ ID NO: 2895308 - RNA, 19 nt, Artificial Sequence
  Description of Artificial Sequence: Synthetic oligonucleotide
ccgcaccgucuccaccugc

SEQ ID NO: 2895309 - RNA, 19 nt, Artificial Sequence
  Description of Artificial Sequence: Synthetic oligonucleotide
guccaccggcaggcggccc

SEQ ID NO: 2895310 - RNA, 19 nt, Artificial Sequence
  Description of Artificial Sequence: Synthetic oligonucleotide
cagccgcgccccugcccug

SEQ ID NO: 2895311 - RNA, 19 nt, Artificial Sequence
  Description of Artificial Sequence: Synthetic oligonucleotide
cgcgucacugccgccgccc

SEQ ID NO: 2895312 - RNA, 19 nt, Artificial Sequence
  Description of Artificial Sequence: Synthetic oligonucleotide
gcacaggucuggugagagu

SEQ ID NO: 2895313 - RNA, 19 nt, Artificial Sequence
  Description of Artificial Sequence: Synthetic oligonucleotide
gcgucacugccgccgccca

SEQ ID NO: 2895314 - RNA, 19 nt, Artificial Sequence
  Description of Artificial Sequence: Synthetic oligonucleotide
ccgcaucgugcacaggucu

SEQ ID NO: 2895315 - RNA, 19 nt, Artificial Sequence
  Description of Artificial Sequence: Synthetic oligonucleotide
gcaggcggccccagguguc

SEQ ID NO: 2895316 - RNA, 19 nt, Artificial Sequence
  Description of Artificial Sequence: Synthetic oligonucleotide
cgguugacggcguugggau

SEQ ID NO: 2895317 - RNA, 19 nt, Artificial Sequence
  Description of Artificial Sequence: Synthetic oligonucleotide
gccccaggugucacgcaca

SEQ ID NO: 2895318 - RNA, 19 nt, Artificial Sequence
  Description of Artificial Sequence: Synthetic oligonucleotide
ccaucaucaugaccuggau

SEQ ID NO: 2895319 - RNA, 19 nt, Artificial Sequence
  Description of Artificial Sequence: Synthetic oligonucleotide
cgucacugccgccgcccag

SEQ ID NO: 2895320 - RNA, 19 nt, Artificial Sequence
  Description of Artificial Sequence: Synthetic oligonucleotide
ccagccgcgccccugcccu

SEQ ID NO: 2895321 - RNA, 19 nt, Artificial Sequence
  Description of Artificial Sequence: Synthetic oligonucleotide
ccccgcgccgcggcggugg

SEQ ID NO: 2895322 - RNA, 19 nt, Artificial Sequence
  Description of Artificial Sequence: Synthetic oligonucleotide
caccggcaggcggccccag

SEQ ID NO: 2895323 - RNA, 19 nt, Artificial Sequence
  Description of Artificial Sequence: Synthetic oligonucleotide
ccugugcagcaccaccagu

SEQ ID NO: 2895324 - RNA, 19 nt, Artificial Sequence
  Description of Artificial Sequence: Synthetic oligonucleotide
gggugcugcccaucaucau

SEQ ID NO: 2895325 - RNA, 19 nt, Artificial Sequence
  Description of Artificial Sequence: Synthetic oligonucleotide
cggcaggcggccccaggug

SEQ ID NO: 2895326 - RNA, 19 nt, Artificial Sequence
  Description of Artificial Sequence: Synthetic oligonucleotide
gccucccgaagcgguugac

SEQ ID NO: 2895327 - RNA, 19 nt, Artificial Sequence
  Description of Artificial Sequence: Synthetic oligonucleotide
ggcccgcgucacugccgcc

SEQ ID NO: 2895328 - RNA, 19 nt, Artificial Sequence
  Description of Artificial Sequence: Synthetic oligonucleotide
cccaucucuucagccaggu

SEQ ID NO: 2895329 - RNA, 19 nt, Artificial Sequence
  Description of Artificial Sequence: Synthetic oligonucleotide
gccgcccagcaugcccuug

SEQ ID NO: 2895330 - RNA, 19 nt, Artificial Sequence
  Description of Artificial Sequence: Synthetic oligonucleotide
gcgguggccaggcccgcgu

SEQ ID NO: 2895331 - RNA, 19 nt, Artificial Sequence
  Description of Artificial Sequence: Synthetic oligonucleotide
cgggcgccucccgaagcgg

SEQ ID NO: 2895332 - RNA, 19 nt, Artificial Sequence
  Description of Artificial Sequence: Synthetic oligonucleotide
ccgcgucacugccgccgcc

SEQ ID NO: 2895333 - RNA, 19 nt, Artificial Sequence
  Description of Artificial Sequence: Synthetic oligonucleotide
cacauccagccgcgccccu

SEQ ID NO: 2895334 - RNA, 19 nt, Artificial Sequence
  Description of Artificial Sequence: Synthetic oligonucleotide
cgcgccccugcccugugca

SEQ ID NO: 2895335 - RNA, 19 nt, Artificial Sequence
  Description of Artificial Sequence: Synthetic oligonucleotide
ccgcgccccugcccugugc

SEQ ID NO: 2895336 - RNA, 19 nt, Artificial Sequence
  Description of Artificial Sequence: Synthetic oligonucleotide
ccggcaggcggccccaggu

SEQ ID NO: 2895337 - RNA, 19 nt, Artificial Sequence
  Description of Artificial Sequence: Synthetic oligonucleotide
gcucugcuaccugggugcu

SEQ ID NO: 2895338 - RNA, 19 nt, Artificial Sequence
  Description of Artificial Sequence: Synthetic oligonucleotide
gccgcgccccugcccugug

SEQ ID NO: 2895339 - RNA, 19 nt, Artificial Sequence
  Description of Artificial Sequence: Synthetic oligonucleotide
caguuggguuccgcuccgu

SEQ ID NO: 2895340 - RNA, 19 nt, Artificial Sequence
  Description of Artificial Sequence: Synthetic oligonucleotide
cagucuccaguggcagcau

SEQ ID NO: 2895341 - RNA, 19 nt, Artificial Sequence
  Description of Artificial Sequence: Synthetic oligonucleotide
gggcgccucccgaagcggu

SEQ ID NO: 2895342 - RNA, 19 nt, Artificial Sequence
  Description of Artificial Sequence: Synthetic oligonucleotide
ccgcccagcaugcccuugu

SEQ ID NO: 2895343 - RNA, 19 nt, Artificial Sequence
  Description of Artificial Sequence: Synthetic oligonucleotide
ccccaggugucacgcacau

SEQ ID NO: 2895344 - RNA, 19 nt, Artificial Sequence
  Description of Artificial Sequence: Synthetic oligonucleotide
cccgcgccgcggcgguggc

SEQ ID NO: 2895345 - RNA, 19 nt, Artificial Sequence
  Description of Artificial Sequence: Synthetic oligonucleotide
ccuucucgagccgcaucgu

SEQ ID NO: 2895346 - RNA, 19 nt, Artificial Sequence
  Description of Artificial Sequence: Synthetic oligonucleotide
ccgaagcgguugacggcgu

SEQ ID NO: 2895347 - RNA, 19 nt, Artificial Sequence
  Description of Artificial Sequence: Synthetic oligonucleotide
ccgcuccgugcagcagcag

SEQ ID NO: 2895348 - RNA, 19 nt, Artificial Sequence
  Description of Artificial Sequence: Synthetic oligonucleotide
cgccucccgaagcgguuga

SEQ ID NO: 2895349 - RNA, 19 nt, Artificial Sequence
  Description of Artificial Sequence: Synthetic oligonucleotide
ccaggagcugccgcaccgu

SEQ ID NO: 2895350 - RNA, 19 nt, Artificial Sequence
  Description of Artificial Sequence: Synthetic oligonucleotide
cacugccgccgcccagcau

SEQ ID NO: 2895351 - RNA, 19 nt, Artificial Sequence
  Description of Artificial Sequence: Synthetic oligonucleotide
ccaccggcaggcggcccca

SEQ ID NO: 2895352 - RNA, 19 nt, Artificial Sequence
  Description of Artificial Sequence: Synthetic oligonucleotide
ggcgccucccgaagcgguu

SEQ ID NO: 2895353 - RNA, 19 nt, Artificial Sequence
  Description of Artificial Sequence: Synthetic oligonucleotide
ccgcggcgguggccaggcc

SEQ ID NO: 2895354 - RNA, 19 nt, Artificial Sequence
  Description of Artificial Sequence: Synthetic oligonucleotide
ccgcgccgcggcgguggcc

SEQ ID NO: 2895355 - RNA, 19 nt, Artificial Sequence
  Description of Artificial Sequence: Synthetic oligonucleotide
cggccccaggugucacgca

SEQ ID NO: 2895356 - RNA, 19 nt, Artificial Sequence
  Description of Artificial Sequence: Synthetic oligonucleotide
cggcgguggccaggcccgc

SEQ ID NO: 2895357 - RNA, 19 nt, Artificial Sequence
  Description of Artificial Sequence: Synthetic oligonucleotide
cgaagcgguugacggcguu

SEQ ID NO: 2895358 - RNA, 19 nt, Artificial Sequence
  Description of Artificial Sequence: Synthetic oligonucleotide
cgccggcuuccaggagcug

SEQ ID NO: 2895359 - RNA, 19 nt, Artificial Sequence
  Description of Artificial Sequence: Synthetic oligonucleotide
cgccgcccagcaugcccuu

SEQ ID NO: 2895360 - RNA, 19 nt, Artificial Sequence
  Description of Artificial Sequence: Synthetic oligonucleotide
uuuauuauaaucaacauau

SEQ ID NO: 2895361 - RNA, 19 nt, Artificial Sequence
  Description of Artificial Sequence: Synthetic oligonucleotide
uucauuuaagaaaacaugu

SEQ ID NO: 2895362 - RNA, 19 nt, Artificial Sequence
  Description of Artificial Sequence: Synthetic oligonucleotide
uauuauaaucaacauauuc

SEQ ID NO: 2895363 - RNA, 19 nt, Artificial Sequence
  Description of Artificial Sequence: Synthetic oligonucleotide
uguucuuggagaaacaugu

SEQ ID NO: 2895364 - RNA, 19 nt, Artificial Sequence
  Description of Artificial Sequence: Synthetic oligonucleotide
uuaagaaauucauuuaaga

SEQ ID NO: 2895365 - RNA, 19 nt, Artificial Sequence
  Description of Artificial Sequence: Synthetic oligonucleotide
gaaaacaugucacauucag

SEQ ID NO: 2895366 - RNA, 19 nt, Artificial Sequence
  Description of Artificial Sequence: Synthetic oligonucleotide
acacuguugguuuaggugg

SEQ ID NO: 2895367 - RNA, 19 nt, Artificial Sequence
  Description of Artificial Sequence: Synthetic oligonucleotide
uuauaaucaacauauucuc

SEQ ID NO: 2895368 - RNA, 19 nt, Artificial Sequence
  Description of Artificial Sequence: Synthetic oligonucleotide
ucaaugucaaugauuaaga

SEQ ID NO: 2895369 - RNA, 19 nt, Artificial Sequence
  Description of Artificial Sequence: Synthetic oligonucleotide
auuauaaucaacauauucu

SEQ ID NO: 2895370 - RNA, 19 nt, Artificial Sequence
  Description of Artificial Sequence: Synthetic oligonucleotide
aaucaacauauucucaaug

SEQ ID NO: 2895371 - RNA, 19 nt, Artificial Sequence
  Description of Artificial Sequence: Synthetic oligonucleotide
aaugucaaugauuaagaaa

SEQ ID NO: 2895372 - RNA, 19 nt, Artificial Sequence
  Description of Artificial Sequence: Synthetic oligonucleotide
ucuuggagaaacauguuug

SEQ ID NO: 2895373 - RNA, 19 nt, Artificial Sequence
  Description of Artificial Sequence: Synthetic oligonucleotide
uuuaagaaaacaugucaca

SEQ ID NO: 2895374 - RNA, 19 nt, Artificial Sequence
  Description of Artificial Sequence: Synthetic oligonucleotide
uucucaaugucaaugauua

SEQ ID NO: 2895375 - RNA, 19 nt, Artificial Sequence
  Description of Artificial Sequence: Synthetic oligonucleotide
uggagaaacauguuugucc

SEQ ID NO: 2895376 - RNA, 19 nt, Artificial Sequence
  Description of Artificial Sequence: Synthetic oligonucleotide
aaauucauuuaagaaaaca

SEQ ID NO: 2895377 - RNA, 19 nt, Artificial Sequence
  Description of Artificial Sequence: Synthetic oligonucleotide
uguccauggaagcaugugg

SEQ ID NO: 2895378 - RNA, 19 nt, Artificial Sequence
  Description of Artificial Sequence: Synthetic oligonucleotide
uaugcuguguucuuggaga

SEQ ID NO: 2895379 - RNA, 19 nt, Artificial Sequence
  Description of Artificial Sequence: Synthetic oligonucleotide
augucaaugauuaagaaau

SEQ ID NO: 2895380 - RNA, 19 nt, Artificial Sequence
  Description of Artificial Sequence: Synthetic oligonucleotide
auaaucaacauauucucaa

SEQ ID NO: 2895381 - RNA, 19 nt, Artificial Sequence
  Description of Artificial Sequence: Synthetic oligonucleotide
uauaaucaacauauucuca

SEQ ID NO: 2895382 - RNA, 19 nt, Artificial Sequence
  Description of Artificial Sequence: Synthetic oligonucleotide
aucaacauauucucaaugu

SEQ ID NO: 2895383 - RNA, 19 nt, Artificial Sequence
  Description of Artificial Sequence: Synthetic oligonucleotide
gucuuugucaccccgagcc

SEQ ID NO: 2895384 - RNA, 19 nt, Artificial Sequence
  Description of Artificial Sequence: Synthetic oligonucleotide
cagagaugaacacuguugg

SEQ ID NO: 2895385 - RNA, 19 nt, Artificial Sequence
  Description of Artificial Sequence: Synthetic oligonucleotide
aaugcaggagcuuuauuau

SEQ ID NO: 2895386 - RNA, 19 nt, Artificial Sequence
  Description of Artificial Sequence: Synthetic oligonucleotide
ucauuuaagaaaacauguc

SEQ ID NO: 2895387 - RNA, 19 nt, Artificial Sequence
  Description of Artificial Sequence: Synthetic oligonucleotide
cucaaugucaaugauuaag

SEQ ID NO: 2895388 - RNA, 19 nt, Artificial Sequence
  Description of Artificial Sequence: Synthetic oligonucleotide
cauuuaagaaaacauguca

SEQ ID NO: 2895389 - RNA, 19 nt, Artificial Sequence
  Description of Artificial Sequence: Synthetic oligonucleotide
aacauguuuguccauggaa

SEQ ID NO: 2895390 - RNA, 19 nt, Artificial Sequence
  Description of Artificial Sequence: Synthetic oligonucleotide
cauauucucaaugucaaug

SEQ ID NO: 2895391 - RNA, 19 nt, Artificial Sequence
  Description of Artificial Sequence: Synthetic oligonucleotide
auucauuuaagaaaacaug

SEQ ID NO: 2895392 - RNA, 19 nt, Artificial Sequence
  Description of Artificial Sequence: Synthetic oligonucleotide
cauuccaccagccuucacg

SEQ ID NO: 2895393 - RNA, 19 nt, Artificial Sequence
  Description of Artificial Sequence: Synthetic oligonucleotide
auauucucaaugucaauga

SEQ ID NO: 2895394 - RNA, 19 nt, Artificial Sequence
  Description of Artificial Sequence: Synthetic oligonucleotide
agcuuuauuauaaucaaca

SEQ ID NO: 2895395 - RNA, 19 nt, Artificial Sequence
  Description of Artificial Sequence: Synthetic oligonucleotide
auuccaccagccuucacgg

SEQ ID NO: 2895396 - RNA, 19 nt, Artificial Sequence
  Description of Artificial Sequence: Synthetic oligonucleotide
gucacauucagugaccggg

SEQ ID NO: 2895397 - RNA, 19 nt, Artificial Sequence
  Description of Artificial Sequence: Synthetic oligonucleotide
auuaagaaauucauuuaag

SEQ ID NO: 2895398 - RNA, 19 nt, Artificial Sequence
  Description of Artificial Sequence: Synthetic oligonucleotide
cauaacaccagagaugaac

SEQ ID NO: 2895399 - RNA, 19 nt, Artificial Sequence
  Description of Artificial Sequence: Synthetic oligonucleotide
agcaugugguuucuggugg

SEQ ID NO: 2895400 - RNA, 19 nt, Artificial Sequence
  Description of Artificial Sequence: Synthetic oligonucleotide
uuaagaaaacaugucacau

SEQ ID NO: 2895401 - RNA, 19 nt, Artificial Sequence
  Description of Artificial Sequence: Synthetic oligonucleotide
gaaugcaggagcuuuauua

SEQ ID NO: 2895402 - RNA, 19 nt, Artificial Sequence
  Description of Artificial Sequence: Synthetic oligonucleotide
gaggcgaagacauggcggg

SEQ ID NO: 2895403 - RNA, 19 nt, Artificial Sequence
  Description of Artificial Sequence: Synthetic oligonucleotide
ugauuaagaaauucauuua

SEQ ID NO: 2895404 - RNA, 19 nt, Artificial Sequence
  Description of Artificial Sequence: Synthetic oligonucleotide
aagcaugugguuucuggug

SEQ ID NO: 2895405 - RNA, 19 nt, Artificial Sequence
  Description of Artificial Sequence: Synthetic oligonucleotide
ugcaggagcuuuauuauaa

SEQ ID NO: 2895406 - RNA, 19 nt, Artificial Sequence
  Description of Artificial Sequence: Synthetic oligonucleotide
cauguuuguccauggaagc

SEQ ID NO: 2895407 - RNA, 19 nt, Artificial Sequence
  Description of Artificial Sequence: Synthetic oligonucleotide
aagucuuugucaccccgag

SEQ ID NO: 2895408 - RNA, 19 nt, Artificial Sequence
  Description of Artificial Sequence: Synthetic oligonucleotide
ucacuugcggggcugcugg

SEQ ID NO: 2895409 - RNA, 19 nt, Artificial Sequence
  Description of Artificial Sequence: Synthetic oligonucleotide
aacauauucucaaugucaa

SEQ ID NO: 2895410 - RNA, 19 nt, Artificial Sequence
  Description of Artificial Sequence: Synthetic oligonucleotide
ugcacaauccgcauuccac

SEQ ID NO: 2895411 - RNA, 19 nt, Artificial Sequence
  Description of Artificial Sequence: Synthetic oligonucleotide
caacauauucucaauguca

SEQ ID NO: 2895412 - RNA, 19 nt, Artificial Sequence
  Description of Artificial Sequence: Synthetic oligonucleotide
acauguuuguccauggaag

SEQ ID NO: 2895413 - RNA, 19 nt, Artificial Sequence
  Description of Artificial Sequence: Synthetic oligonucleotide
aggagcuuuauuauaauca

SEQ ID NO: 2895414 - RNA, 19 nt, Artificial Sequence
  Description of Artificial Sequence: Synthetic oligonucleotide
uucugcacaauccgcauuc

SEQ ID NO: 2895415 - RNA, 19 nt, Artificial Sequence
  Description of Artificial Sequence: Synthetic oligonucleotide
uucuugcucgucuuugucc

SEQ ID NO: 2895416 - RNA, 19 nt, Artificial Sequence
  Description of Artificial Sequence: Synthetic oligonucleotide
uucuuggagaaacauguuu

SEQ ID NO: 2895417 - RNA, 19 nt, Artificial Sequence
  Description of Artificial Sequence: Synthetic oligonucleotide
auaugcuguguucuuggag

SEQ ID NO: 2895418 - RNA, 19 nt, Artificial Sequence
  Description of Artificial Sequence: Synthetic oligonucleotide
aacaccagagaugaacacu

SEQ ID NO: 2895419 - RNA, 19 nt, Artificial Sequence
  Description of Artificial Sequence: Synthetic oligonucleotide
uggaggcgaagacauggcg

SEQ ID NO: 2895420 - RNA, 19 nt, Artificial Sequence
  Description of Artificial Sequence: Synthetic oligonucleotide
ucuugcucgucuuuguccu

SEQ ID NO: 2895421 - RNA, 19 nt, Artificial Sequence
  Description of Artificial Sequence: Synthetic oligonucleotide
uuucuggugggccaccugu

SEQ ID NO: 2895422 - RNA, 19 nt, Artificial Sequence
  Description of Artificial Sequence: Synthetic oligonucleotide
uaagaaaacaugucacauu

SEQ ID NO: 2895423 - RNA, 19 nt, Artificial Sequence
  Description of Artificial Sequence: Synthetic oligonucleotide
gucuuuguccuucucuucc

SEQ ID NO: 2895424 - RNA, 19 nt, Artificial Sequence
  Description of Artificial Sequence: Synthetic oligonucleotide
aaacauguuuguccaugga

SEQ ID NO: 2895425 - RNA, 19 nt, Artificial Sequence
  Description of Artificial Sequence: Synthetic oligonucleotide
uguugguuuaggugggcug

SEQ ID NO: 2895426 - RNA, 19 nt, Artificial Sequence
  Description of Artificial Sequence: Synthetic oligonucleotide
guugguuuaggugggcugg

SEQ ID NO: 2895427 - RNA, 19 nt, Artificial Sequence
  Description of Artificial Sequence: Synthetic oligonucleotide
ggugcuuucccauucuugc

SEQ ID NO: 2895428 - RNA, 19 nt, Artificial Sequence
  Description of Artificial Sequence: Synthetic oligonucleotide
uuuccgaggggcgacggcg

SEQ ID NO: 2895429 - RNA, 19 nt, Artificial Sequence
  Description of Artificial Sequence: Synthetic oligonucleotide
uaaucaacauauucucaau

SEQ ID NO: 2895430 - RNA, 19 nt, Artificial Sequence
  Description of Artificial Sequence: Synthetic oligonucleotide
auucuugcucgucuuuguc

SEQ ID NO: 2895431 - RNA, 19 nt, Artificial Sequence
  Description of Artificial Sequence: Synthetic oligonucleotide
ggaagcaugugguuucugg

SEQ ID NO: 2895432 - RNA, 19 nt, Artificial Sequence
  Description of Artificial Sequence: Synthetic oligonucleotide
ucuuccuucccgucucccg

SEQ ID NO: 2895433 - RNA, 19 nt, Artificial Sequence
  Description of Artificial Sequence: Synthetic oligonucleotide
ggauaugcuguguucuugg

SEQ ID NO: 2895434 - RNA, 19 nt, Artificial Sequence
  Description of Artificial Sequence: Synthetic oligonucleotide
agaugaacacuguugguuu

SEQ ID NO: 2895435 - RNA, 19 nt, Artificial Sequence
  Description of Artificial Sequence: Synthetic oligonucleotide
uccagcuucccuucuggag

SEQ ID NO: 2895436 - RNA, 19 nt, Artificial Sequence
  Description of Artificial Sequence: Synthetic oligonucleotide
agucuuugucaccccgagc

SEQ ID NO: 2895437 - RNA, 19 nt, Artificial Sequence
  Description of Artificial Sequence: Synthetic oligonucleotide
auaacaccagagaugaaca

SEQ ID NO: 2895438 - RNA, 19 nt, Artificial Sequence
  Description of Artificial Sequence: Synthetic oligonucleotide
cauggaagcaugugguuuc

SEQ ID NO: 2895439 - RNA, 19 nt, Artificial Sequence
  Description of Artificial Sequence: Synthetic oligonucleotide
ucagugaccgggucugugc

SEQ ID NO: 2895440 - RNA, 19 nt, Artificial Sequence
  Description of Artificial Sequence: Synthetic oligonucleotide
gaagacauggcgggagccg

SEQ ID NO: 2895441 - RNA, 19 nt, Artificial Sequence
  Description of Artificial Sequence: Synthetic oligonucleotide
uuauuauaaucaacauauu

SEQ ID NO: 2895442 - RNA, 19 nt, Artificial Sequence
  Description of Artificial Sequence: Synthetic oligonucleotide
gucaaugauuaagaaauuc

SEQ ID NO: 2895443 - RNA, 19 nt, Artificial Sequence
  Description of Artificial Sequence: Synthetic oligonucleotide
ugcgcaggucacuugcggg

SEQ ID NO: 2895444 - RNA, 19 nt, Artificial Sequence
  Description of Artificial Sequence: Synthetic oligonucleotide
ugcuuucccauucuugcuc

SEQ ID NO: 2895445 - RNA, 19 nt, Artificial Sequence
  Description of Artificial Sequence: Synthetic oligonucleotide
aauccgcauuccaccagcc

SEQ ID NO: 2895446 - RNA, 19 nt, Artificial Sequence
  Description of Artificial Sequence: Synthetic oligonucleotide
acaccagagaugaacacug

SEQ ID NO: 2895447 - RNA, 19 nt, Artificial Sequence
  Description of Artificial Sequence: Synthetic oligonucleotide
ggagaaacauguuugucca

SEQ ID NO: 2895448 - RNA, 19 nt, Artificial Sequence
  Description of Artificial Sequence: Synthetic oligonucleotide
uggugcuuucccauucuug

SEQ ID NO: 2895449 - RNA, 19 nt, Artificial Sequence
  Description of Artificial Sequence: Synthetic oligonucleotide
ugucacauucagugaccgg

SEQ ID NO: 2895450 - RNA, 19 nt, Artificial Sequence
  Description of Artificial Sequence: Synthetic oligonucleotide
ugaacacuguugguuuagg

SEQ ID NO: 2895451 - RNA, 19 nt, Artificial Sequence
  Description of Artificial Sequence: Synthetic oligonucleotide
ugugcgcaggucacuugcg

SEQ ID NO: 2895452 - RNA, 19 nt, Artificial Sequence
  Description of Artificial Sequence: Synthetic oligonucleotide
augucacauucagugaccg

SEQ ID NO: 2895453 - RNA, 19 nt, Artificial Sequence
  Description of Artificial Sequence: Synthetic oligonucleotide
uguguucuuggagaaacau

SEQ ID NO: 2895454 - RNA, 19 nt, Artificial Sequence
  Description of Artificial Sequence: Synthetic oligonucleotide
acauucagugaccgggucu

SEQ ID NO: 2895455 - RNA, 19 nt, Artificial Sequence
  Description of Artificial Sequence: Synthetic oligonucleotide
ucccgucucccguaugugg

SEQ ID NO: 2895456 - RNA, 19 nt, Artificial Sequence
  Description of Artificial Sequence: Synthetic oligonucleotide
uggguguuucugcacaauc

SEQ ID NO: 2895457 - RNA, 19 nt, Artificial Sequence
  Description of Artificial Sequence: Synthetic oligonucleotide
uaacaccagagaugaacac

SEQ ID NO: 2895458 - RNA, 19 nt, Artificial Sequence
  Description of Artificial Sequence: Synthetic oligonucleotide
ucacauucagugaccgggu

SEQ ID NO: 2895459 - RNA, 19 nt, Artificial Sequence
  Description of Artificial Sequence: Synthetic oligonucleotide
uguuuguccauggaagcau

SEQ ID NO: 2895460 - RNA, 19 nt, Artificial Sequence
  Description of Artificial Sequence: Synthetic oligonucleotide
uccgcauuccaccagccuu

SEQ ID NO: 2895461 - RNA, 19 nt, Artificial Sequence
  Description of Artificial Sequence: Synthetic oligonucleotide
uccggcuuuggucuccagc

SEQ ID NO: 2895462 - RNA, 19 nt, Artificial Sequence
  Description of Artificial Sequence: Synthetic oligonucleotide
caauccgcauuccaccagc

SEQ ID NO: 2895463 - RNA, 19 nt, Artificial Sequence
  Description of Artificial Sequence: Synthetic oligonucleotide
uguccuucucuuccuuccc

SEQ ID NO: 2895464 - RNA, 19 nt, Artificial Sequence
  Description of Artificial Sequence: Synthetic oligonucleotide
caggagcuuuauuauaauc

SEQ ID NO: 2895465 - RNA, 19 nt, Artificial Sequence
  Description of Artificial Sequence: Synthetic oligonucleotide
ccagagaugaacacuguug

SEQ ID NO: 2895466 - RNA, 19 nt, Artificial Sequence
  Description of Artificial Sequence: Synthetic oligonucleotide
agugaccgggucugugcgc

SEQ ID NO: 2895467 - RNA, 19 nt, Artificial Sequence
  Description of Artificial Sequence: Synthetic oligonucleotide
cacuguugguuuagguggg

SEQ ID NO: 2895468 - RNA, 19 nt, Artificial Sequence
  Description of Artificial Sequence: Synthetic oligonucleotide
agagaugaacacuguuggu

SEQ ID NO: 2895469 - RNA, 19 nt, Artificial Sequence
  Description of Artificial Sequence: Synthetic oligonucleotide
ucuuugucaccccgagcca

SEQ ID NO: 2895470 - RNA, 19 nt, Artificial Sequence
  Description of Artificial Sequence: Synthetic oligonucleotide
uuuggucuccagcuucccu

SEQ ID NO: 2895471 - RNA, 19 nt, Artificial Sequence
  Description of Artificial Sequence: Synthetic oligonucleotide
aaagucuuugucaccccga

SEQ ID NO: 2895472 - RNA, 19 nt, Artificial Sequence
  Description of Artificial Sequence: Synthetic oligonucleotide
auguggguguuucugcaca

SEQ ID NO: 2895473 - RNA, 19 nt, Artificial Sequence
  Description of Artificial Sequence: Synthetic oligonucleotide
uauguggguguuucugcac

SEQ ID NO: 2895474 - RNA, 19 nt, Artificial Sequence
  Description of Artificial Sequence: Synthetic oligonucleotide
uggauaugcuguguucuug

SEQ ID NO: 2895475 - RNA, 19 nt, Artificial Sequence
  Description of Artificial Sequence: Synthetic oligonucleotide
gucaccccgagccauaaca

SEQ ID NO: 2895476 - RNA, 19 nt, Artificial Sequence
  Description of Artificial Sequence: Synthetic oligonucleotide
cauucagugaccgggucug

SEQ ID NO: 2895477 - RNA, 19 nt, Artificial Sequence
  Description of Artificial Sequence: Synthetic oligonucleotide
acaauccgcauuccaccag

SEQ ID NO: 2895478 - RNA, 19 nt, Artificial Sequence
  Description of Artificial Sequence: Synthetic oligonucleotide
gggaaagucuuugucaccc

SEQ ID NO: 2895479 - RNA, 19 nt, Artificial Sequence
  Description of Artificial Sequence: Synthetic oligonucleotide
gagcuuuauuauaaucaac

SEQ ID NO: 2895480 - RNA, 19 nt, Artificial Sequence
  Description of Artificial Sequence: Synthetic oligonucleotide
ucgucuuuguccuucucuu

SEQ ID NO: 2895481 - RNA, 19 nt, Artificial Sequence
  Description of Artificial Sequence: Synthetic oligonucleotide
ucaccccgagccauaacac

SEQ ID NO: 2895482 - RNA, 19 nt, Artificial Sequence
  Description of Artificial Sequence: Synthetic oligonucleotide
cugugcgcaggucacuugc

SEQ ID NO: 2895483 - RNA, 19 nt, Artificial Sequence
  Description of Artificial Sequence: Synthetic oligonucleotide
agccauaacaccagagaug

SEQ ID NO: 2895484 - RNA, 19 nt, Artificial Sequence
  Description of Artificial Sequence: Synthetic oligonucleotide
ggagcuuuauuauaaucaa

SEQ ID NO: 2895485 - RNA, 19 nt, Artificial Sequence
  Description of Artificial Sequence: Synthetic oligonucleotide
augaacacuguugguuuag

SEQ ID NO: 2895486 - RNA, 19 nt, Artificial Sequence
  Description of Artificial Sequence: Synthetic oligonucleotide
ccagcuucccuucuggagg

SEQ ID NO: 2895487 - RNA, 19 nt, Artificial Sequence
  Description of Artificial Sequence: Synthetic oligonucleotide
gauaugcuguguucuugga

SEQ ID NO: 2895488 - RNA, 19 nt, Artificial Sequence
  Description of Artificial Sequence: Synthetic oligonucleotide
gcuuucccauucuugcucg

SEQ ID NO: 2895489 - RNA, 19 nt, Artificial Sequence
  Description of Artificial Sequence: Synthetic oligonucleotide
gccauaacaccagagauga

SEQ ID NO: 2895490 - RNA, 19 nt, Artificial Sequence
  Description of Artificial Sequence: Synthetic oligonucleotide
guauguggguguuucugca

SEQ ID NO: 2895491 - RNA, 19 nt, Artificial Sequence
  Description of Artificial Sequence: Synthetic oligonucleotide
gcacaauccgcauuccacc

SEQ ID NO: 2895492 - RNA, 19 nt, Artificial Sequence
  Description of Artificial Sequence: Synthetic oligonucleotide
ggaggcgaagacauggcgg

SEQ ID NO: 2895493 - RNA, 19 nt, Artificial Sequence
  Description of Artificial Sequence: Synthetic oligonucleotide
guguucuuggagaaacaug

SEQ ID NO: 2895494 - RNA, 19 nt, Artificial Sequence
  Description of Artificial Sequence: Synthetic oligonucleotide
ugcuggauaugcuguguuc

SEQ ID NO: 2895495 - RNA, 19 nt, Artificial Sequence
  Description of Artificial Sequence: Synthetic oligonucleotide
acuguugguuuaggugggc

SEQ ID NO: 2895496 - RNA, 19 nt, Artificial Sequence
  Description of Artificial Sequence: Synthetic oligonucleotide
gagccauaacaccagagau

SEQ ID NO: 2895497 - RNA, 19 nt, Artificial Sequence
  Description of Artificial Sequence: Synthetic oligonucleotide
cagugaccgggucugugcg

SEQ ID NO: 2895498 - RNA, 19 nt, Artificial Sequence
  Description of Artificial Sequence: Synthetic oligonucleotide
gguuuaggugggcuggugc

SEQ ID NO: 2895499 - RNA, 19 nt, Artificial Sequence
  Description of Artificial Sequence: Synthetic oligonucleotide
caaugucaaugauuaagaa

SEQ ID NO: 2895500 - RNA, 19 nt, Artificial Sequence
  Description of Artificial Sequence: Synthetic oligonucleotide
auguuuguccauggaagca

SEQ ID NO: 2895501 - RNA, 19 nt, Artificial Sequence
  Description of Artificial Sequence: Synthetic oligonucleotide
uuucugcacaauccgcauu

SEQ ID NO: 2895502 - RNA, 19 nt, Artificial Sequence
  Description of Artificial Sequence: Synthetic oligonucleotide
uccuucucuuccuucccgu

SEQ ID NO: 2895503 - RNA, 19 nt, Artificial Sequence
  Description of Artificial Sequence: Synthetic oligonucleotide
gagccgcuggcuuuccgag

SEQ ID NO: 2895504 - RNA, 19 nt, Artificial Sequence
  Description of Artificial Sequence: Synthetic oligonucleotide
cuggaggcgaagacauggc

SEQ ID NO: 2895505 - RNA, 19 nt, Artificial Sequence
  Description of Artificial Sequence: Synthetic oligonucleotide
accagagaugaacacuguu

SEQ ID NO: 2895506 - RNA, 19 nt, Artificial Sequence
  Description of Artificial Sequence: Synthetic oligonucleotide
uguggguguuucugcacaa

SEQ ID NO: 2895507 - RNA, 19 nt, Artificial Sequence
  Description of Artificial Sequence: Synthetic oligonucleotide
caccccgagccauaacacc

SEQ ID NO: 2895508 - RNA, 19 nt, Artificial Sequence
  Description of Artificial Sequence: Synthetic oligonucleotide
ucucaaugucaaugauuaa

SEQ ID NO: 2895509 - RNA, 19 nt, Artificial Sequence
  Description of Artificial Sequence: Synthetic oligonucleotide
gaugaacacuguugguuua

SEQ ID NO: 2895510 - RNA, 19 nt, Artificial Sequence
  Description of Artificial Sequence: Synthetic oligonucleotide
cagcuucccuucuggaggc

SEQ ID NO: 2895511 - RNA, 19 nt, Artificial Sequence
  Description of Artificial Sequence: Synthetic oligonucleotide
gugcgcaggucacuugcgg

SEQ ID NO: 2895512 - RNA, 19 nt, Artificial Sequence
  Description of Artificial Sequence: Synthetic oligonucleotide
ucugugcgcaggucacuug

SEQ ID NO: 2895513 - RNA, 19 nt, Artificial Sequence
  Description of Artificial Sequence: Synthetic oligonucleotide
guuuguccauggaagcaug

SEQ ID NO: 2895514 - RNA, 19 nt, Artificial Sequence
  Description of Artificial Sequence: Synthetic oligonucleotide
ggguguuucugcacaaucc

SEQ ID NO: 2895515 - RNA, 19 nt, Artificial Sequence
  Description of Artificial Sequence: Synthetic oligonucleotide
gagaugaacacuguugguu

SEQ ID NO: 2895516 - RNA, 19 nt, Artificial Sequence
  Description of Artificial Sequence: Synthetic oligonucleotide
uuugucaccccgagccaua

SEQ ID NO: 2895517 - RNA, 19 nt, Artificial Sequence
  Description of Artificial Sequence: Synthetic oligonucleotide
uucagugaccgggucugug

SEQ ID NO: 2895518 - RNA, 19 nt, Artificial Sequence
  Description of Artificial Sequence: Synthetic oligonucleotide
cuuggagaaacauguuugu

SEQ ID NO: 2895519 - RNA, 19 nt, Artificial Sequence
  Description of Artificial Sequence: Synthetic oligonucleotide
ugggcuggugcuuucccau

SEQ ID NO: 2895520 - RNA, 19 nt, Artificial Sequence
  Description of Artificial Sequence: Synthetic oligonucleotide
cacaauccgcauuccacca

SEQ ID NO: 2895521 - RNA, 19 nt, Artificial Sequence
  Description of Artificial Sequence: Synthetic oligonucleotide
ucugcacaauccgcauucc

SEQ ID NO: 2895522 - RNA, 19 nt, Artificial Sequence
  Description of Artificial Sequence: Synthetic oligonucleotide
ugggccaccugugcagccg

SEQ ID NO: 2895523 - RNA, 19 nt, Artificial Sequence
  Description of Artificial Sequence: Synthetic oligonucleotide
uccauggaagcaugugguu

SEQ ID NO: 2895524 - RNA, 19 nt, Artificial Sequence
  Description of Artificial Sequence: Synthetic oligonucleotide
gaacacuguugguuuaggu

SEQ ID NO: 2895525 - RNA, 19 nt, Artificial Sequence
  Description of Artificial Sequence: Synthetic oligonucleotide
augcuguguucuuggagaa

SEQ ID NO: 2895526 - RNA, 19 nt, Artificial Sequence
  Description of Artificial Sequence: Synthetic oligonucleotide
gccgcuggcuuuccgaggg

SEQ ID NO: 2895527 - RNA, 19 nt, Artificial Sequence
  Description of Artificial Sequence: Synthetic oligonucleotide
guuuaggugggcuggugcu

SEQ ID NO: 2895528 - RNA, 19 nt, Artificial Sequence
  Description of Artificial Sequence: Synthetic oligonucleotide
ucccguauguggguguuuc

SEQ ID NO: 2895529 - RNA, 19 nt, Artificial Sequence
  Description of Artificial Sequence: Synthetic oligonucleotide
aggggcgacggcgacggcg

SEQ ID NO: 2895530 - RNA, 19 nt, Artificial Sequence
  Description of Artificial Sequence: Synthetic oligonucleotide
augcaggagcuuuauuaua

SEQ ID NO: 2895531 - RNA, 19 nt, Artificial Sequence
  Description of Artificial Sequence: Synthetic oligonucleotide
cuucuggaggcgaagacau

SEQ ID NO: 2895532 - RNA, 19 nt, Artificial Sequence
  Description of Artificial Sequence: Synthetic oligonucleotide
gacggcgacggcggggugg

SEQ ID NO: 2895533 - RNA, 19 nt, Artificial Sequence
  Description of Artificial Sequence: Synthetic oligonucleotide
accccgagccauaacacca

SEQ ID NO: 2895534 - RNA, 19 nt, Artificial Sequence
  Description of Artificial Sequence: Synthetic oligonucleotide
ggaaagucuuugucacccc

SEQ ID NO: 2895535 - RNA, 19 nt, Artificial Sequence
  Description of Artificial Sequence: Synthetic oligonucleotide
agaaugcaggagcuuuauu

SEQ ID NO: 2895536 - RNA, 19 nt, Artificial Sequence
  Description of Artificial Sequence: Synthetic oligonucleotide
uuccgaggggcgacggcga

SEQ ID NO: 2895537 - RNA, 19 nt, Artificial Sequence
  Description of Artificial Sequence: Synthetic oligonucleotide
gcgcaggucacuugcgggg

SEQ ID NO: 2895538 - RNA, 19 nt, Artificial Sequence
  Description of Artificial Sequence: Synthetic oligonucleotide
acauggcgggagccgcugg

SEQ ID NO: 2895539 - RNA, 19 nt, Artificial Sequence
  Description of Artificial Sequence: Synthetic oligonucleotide
cauggcgggagccgcuggc

SEQ ID NO: 2895540 - RNA, 19 nt, Artificial Sequence
  Description of Artificial Sequence: Synthetic oligonucleotide
accugugcagccgccgggg

SEQ ID NO: 2895541 - RNA, 19 nt, Artificial Sequence
  Description of Artificial Sequence: Synthetic oligonucleotide
cguauguggguguuucugc

SEQ ID NO: 2895542 - RNA, 19 nt, Artificial Sequence
  Description of Artificial Sequence: Synthetic oligonucleotide
aggugggcuggugcuuucc

SEQ ID NO: 2895543 - RNA, 19 nt, Artificial Sequence
  Description of Artificial Sequence: Synthetic oligonucleotide
auccgcauuccaccagccu

SEQ ID NO: 2895544 - RNA, 19 nt, Artificial Sequence
  Description of Artificial Sequence: Synthetic oligonucleotide
uucccuucuggaggcgaag

SEQ ID NO: 2895545 - RNA, 19 nt, Artificial Sequence
  Description of Artificial Sequence: Synthetic oligonucleotide
aggucacuugcggggcugc

SEQ ID NO: 2895546 - RNA, 19 nt, Artificial Sequence
  Description of Artificial Sequence: Synthetic oligonucleotide
cacauucagugaccggguc

SEQ ID NO: 2895547 - RNA, 19 nt, Artificial Sequence
  Description of Artificial Sequence: Synthetic oligonucleotide
cuuuccgaggggcgacggc

SEQ ID NO: 2895548 - RNA, 19 nt, Artificial Sequence
  Description of Artificial Sequence: Synthetic oligonucleotide
ucccuucuggaggcgaaga

SEQ ID NO: 2895549 - RNA, 19 nt, Artificial Sequence
  Description of Artificial Sequence: Synthetic oligonucleotide
guuucuggugggccaccug

SEQ ID NO: 2895550 - RNA, 19 nt, Artificial Sequence
  Description of Artificial Sequence: Synthetic oligonucleotide
uuuaggugggcuggugcuu

SEQ ID NO: 2895551 - RNA, 19 nt, Artificial Sequence
  Description of Artificial Sequence: Synthetic oligonucleotide
gucuccagcuucccuucug

SEQ ID NO: 2895552 - RNA, 19 nt, Artificial Sequence
  Description of Artificial Sequence: Synthetic oligonucleotide
cccgucucccguauguggg

SEQ ID NO: 2895553 - RNA, 19 nt, Artificial Sequence
  Description of Artificial Sequence: Synthetic oligonucleotide
uuaggugggcuggugcuuu

SEQ ID NO: 2895554 - RNA, 19 nt, Artificial Sequence
  Description of Artificial Sequence: Synthetic oligonucleotide
ugguuuaggugggcuggug

SEQ ID NO: 2895555 - RNA, 19 nt, Artificial Sequence
  Description of Artificial Sequence: Synthetic oligonucleotide
uuccaccagccuucacggc

SEQ ID NO: 2895556 - RNA, 19 nt, Artificial Sequence
  Description of Artificial Sequence: Synthetic oligonucleotide
uugguuuaggugggcuggu

SEQ ID NO: 2895557 - RNA, 19 nt, Artificial Sequence
  Description of Artificial Sequence: Synthetic oligonucleotide
cuuuggucuccagcuuccc

SEQ ID NO: 2895558 - RNA, 19 nt, Artificial Sequence
  Description of Artificial Sequence: Synthetic oligonucleotide
ggcuuuggucuccagcuuc

SEQ ID NO: 2895559 - RNA, 19 nt, Artificial Sequence
  Description of Artificial Sequence: Synthetic oligonucleotide
ggggaaagucuuugucacc

SEQ ID NO: 2895560 - RNA, 19 nt, Artificial Sequence
  Description of Artificial Sequence: Synthetic oligonucleotide
uugcggggcugcuggauau

SEQ ID NO: 2895561 - RNA, 19 nt, Artificial Sequence
  Description of Artificial Sequence: Synthetic oligonucleotide
ucccauucuugcucgucuu

SEQ ID NO: 2895562 - RNA, 19 nt, Artificial Sequence
  Description of Artificial Sequence: Synthetic oligonucleotide
gaccgggucugugcgcagg

SEQ ID NO: 2895563 - RNA, 19 nt, Artificial Sequence
  Description of Artificial Sequence: Synthetic oligonucleotide
ggcgaagacauggcgggag

SEQ ID NO: 2895564 - RNA, 19 nt, Artificial Sequence
  Description of Artificial Sequence: Synthetic oligonucleotide
ccagccuucacggcgggcg

SEQ ID NO: 2895565 - RNA, 19 nt, Artificial Sequence
  Description of Artificial Sequence: Synthetic oligonucleotide
gacauggcgggagccgcug

SEQ ID NO: 2895566 - RNA, 19 nt, Artificial Sequence
  Description of Artificial Sequence: Synthetic oligonucleotide
uucccgucucccguaugug

SEQ ID NO: 2895567 - RNA, 19 nt, Artificial Sequence
  Description of Artificial Sequence: Synthetic oligonucleotide
uggaagcaugugguuucug

SEQ ID NO: 2895568 - RNA, 19 nt, Artificial Sequence
  Description of Artificial Sequence: Synthetic oligonucleotide
guccauggaagcauguggu

SEQ ID NO: 2895569 - RNA, 19 nt, Artificial Sequence
  Description of Artificial Sequence: Synthetic oligonucleotide
ugucaccccgagccauaac

SEQ ID NO: 2895570 - RNA, 19 nt, Artificial Sequence
  Description of Artificial Sequence: Synthetic oligonucleotide
cagccuucacggcgggcgg

SEQ ID NO: 2895571 - RNA, 19 nt, Artificial Sequence
  Description of Artificial Sequence: Synthetic oligonucleotide
auggaagcaugugguuucu

SEQ ID NO: 2895572 - RNA, 19 nt, Artificial Sequence
  Description of Artificial Sequence: Synthetic oligonucleotide
ccaccagccuucacggcgg

SEQ ID NO: 2895573 - RNA, 19 nt, Artificial Sequence
  Description of Artificial Sequence: Synthetic oligonucleotide
cugcacaauccgcauucca

SEQ ID NO: 2895574 - RNA, 19 nt, Artificial Sequence
  Description of Artificial Sequence: Synthetic oligonucleotide
cauucuugcucgucuuugu

SEQ ID NO: 2895575 - RNA, 19 nt, Artificial Sequence
  Description of Artificial Sequence: Synthetic oligonucleotide
gucacuugcggggcugcug

SEQ ID NO: 2895576 - RNA, 19 nt, Artificial Sequence
  Description of Artificial Sequence: Synthetic oligonucleotide
cucuuccuucccgucuccc

SEQ ID NO: 2895577 - RNA, 19 nt, Artificial Sequence
  Description of Artificial Sequence: Synthetic oligonucleotide
ggugggcuggugcuuuccc

SEQ ID NO: 2895578 - RNA, 19 nt, Artificial Sequence
  Description of Artificial Sequence: Synthetic oligonucleotide
ggcugcuggauaugcugug

SEQ ID NO: 2895579 - RNA, 19 nt, Artificial Sequence
  Description of Artificial Sequence: Synthetic oligonucleotide
accgggucugugcgcaggu

SEQ ID NO: 2895580 - RNA, 19 nt, Artificial Sequence
  Description of Artificial Sequence: Synthetic oligonucleotide
acggcgacggcgggguggg

SEQ ID NO: 2895581 - RNA, 19 nt, Artificial Sequence
  Description of Artificial Sequence: Synthetic oligonucleotide
gcuuuggucuccagcuucc

SEQ ID NO: 2895582 - RNA, 19 nt, Artificial Sequence
  Description of Artificial Sequence: Synthetic oligonucleotide
ccgagccauaacaccagag

SEQ ID NO: 2895583 - RNA, 19 nt, Artificial Sequence
  Description of Artificial Sequence: Synthetic oligonucleotide
gugggcuggugcuuuccca

SEQ ID NO: 2895584 - RNA, 19 nt, Artificial Sequence
  Description of Artificial Sequence: Synthetic oligonucleotide
uccuucccgucucccguau

SEQ ID NO: 2895585 - RNA, 19 nt, Artificial Sequence
  Description of Artificial Sequence: Synthetic oligonucleotide
uugucaccccgagccauaa

SEQ ID NO: 2895586 - RNA, 19 nt, Artificial Sequence
  Description of Artificial Sequence: Synthetic oligonucleotide
uuccuucccgucucccgua

SEQ ID NO: 2895587 - RNA, 19 nt, Artificial Sequence
  Description of Artificial Sequence: Synthetic oligonucleotide
cuggugggccaccugugca

SEQ ID NO: 2895588 - RNA, 19 nt, Artificial Sequence
  Description of Artificial Sequence: Synthetic oligonucleotide
uucacggcgggcggguguc

SEQ ID NO: 2895589 - RNA, 19 nt, Artificial Sequence
  Description of Artificial Sequence: Synthetic oligonucleotide
ugaccgggucugugcgcag

SEQ ID NO: 2895590 - RNA, 19 nt, Artificial Sequence
  Description of Artificial Sequence: Synthetic oligonucleotide
gcgaagacauggcgggagc

SEQ ID NO: 2895591 - RNA, 19 nt, Artificial Sequence
  Description of Artificial Sequence: Synthetic oligonucleotide
gugaccgggucugugcgca

SEQ ID NO: 2895592 - RNA, 19 nt, Artificial Sequence
  Description of Artificial Sequence: Synthetic oligonucleotide
uccgaggggcgacggcgac

SEQ ID NO: 2895593 - RNA, 19 nt, Artificial Sequence
  Description of Artificial Sequence: Synthetic oligonucleotide
ccauucuugcucgucuuug

SEQ ID NO: 2895594 - RNA, 19 nt, Artificial Sequence
  Description of Artificial Sequence: Synthetic oligonucleotide
uggcuuuccgaggggcgac

SEQ ID NO: 2895595 - RNA, 19 nt, Artificial Sequence
  Description of Artificial Sequence: Synthetic oligonucleotide
gcuggcuuuccgaggggcg

SEQ ID NO: 2895596 - RNA, 19 nt, Artificial Sequence
  Description of Artificial Sequence: Synthetic oligonucleotide
accagccuucacggcgggc

SEQ ID NO: 2895597 - RNA, 19 nt, Artificial Sequence
  Description of Artificial Sequence: Synthetic oligonucleotide
cuucccgucucccguaugu

SEQ ID NO: 2895598 - RNA, 19 nt, Artificial Sequence
  Description of Artificial Sequence: Synthetic oligonucleotide
ugggcggcggugcgcgcgc

SEQ ID NO: 2895599 - RNA, 19 nt, Artificial Sequence
  Description of Artificial Sequence: Synthetic oligonucleotide
ggagccgcuggcuuuccga

SEQ ID NO: 2895600 - RNA, 19 nt, Artificial Sequence
  Description of Artificial Sequence: Synthetic oligonucleotide
uguccggcuuuggucucca

SEQ ID NO: 2895601 - RNA, 19 nt, Artificial Sequence
  Description of Artificial Sequence: Synthetic oligonucleotide
cuuccuucccgucucccgu

SEQ ID NO: 2895602 - RNA, 19 nt, Artificial Sequence
  Description of Artificial Sequence: Synthetic oligonucleotide
ggggcgacggcgacggcgg

SEQ ID NO: 2895603 - RNA, 19 nt, Artificial Sequence
  Description of Artificial Sequence: Synthetic oligonucleotide
cuucccuucuggaggcgaa

SEQ ID NO: 2895604 - RNA, 19 nt, Artificial Sequence
  Description of Artificial Sequence: Synthetic oligonucleotide
acggcgggcggguguccgg

SEQ ID NO: 2895605 - RNA, 19 nt, Artificial Sequence
  Description of Artificial Sequence: Synthetic oligonucleotide
ggguguccggcuuuggucu

SEQ ID NO: 2895606 - RNA, 19 nt, Artificial Sequence
  Description of Artificial Sequence: Synthetic oligonucleotide
gcuggauaugcuguguucu

SEQ ID NO: 2895607 - RNA, 19 nt, Artificial Sequence
  Description of Artificial Sequence: Synthetic oligonucleotide
agccuucacggcgggcggg

SEQ ID NO: 2895608 - RNA, 19 nt, Artificial Sequence
  Description of Artificial Sequence: Synthetic oligonucleotide
gugcuuucccauucuugcu

SEQ ID NO: 2895609 - RNA, 19 nt, Artificial Sequence
  Description of Artificial Sequence: Synthetic oligonucleotide
cgagccauaacaccagaga

SEQ ID NO: 2895610 - RNA, 19 nt, Artificial Sequence
  Description of Artificial Sequence: Synthetic oligonucleotide
ccguauguggguguuucug

SEQ ID NO: 2895611 - RNA, 19 nt, Artificial Sequence
  Description of Artificial Sequence: Synthetic oligonucleotide
ccgcauuccaccagccuuc

SEQ ID NO: 2895612 - RNA, 19 nt, Artificial Sequence
  Description of Artificial Sequence: Synthetic oligonucleotide
gugggcggcggugcgcgcg

SEQ ID NO: 2895613 - RNA, 19 nt, Artificial Sequence
  Description of Artificial Sequence: Synthetic oligonucleotide
ucucccguauguggguguu

SEQ ID NO: 2895614 - RNA, 19 nt, Artificial Sequence
  Description of Artificial Sequence: Synthetic oligonucleotide
agcuucccuucuggaggcg

SEQ ID NO: 2895615 - RNA, 19 nt, Artificial Sequence
  Description of Artificial Sequence: Synthetic oligonucleotide
ggcgacggcggggugggcg

SEQ ID NO: 2895616 - RNA, 19 nt, Artificial Sequence
  Description of Artificial Sequence: Synthetic oligonucleotide
cuccagcuucccuucugga

SEQ ID NO: 2895617 - RNA, 19 nt, Artificial Sequence
  Description of Artificial Sequence: Synthetic oligonucleotide
uaggugggcuggugcuuuc

SEQ ID NO: 2895618 - RNA, 19 nt, Artificial Sequence
  Description of Artificial Sequence: Synthetic oligonucleotide
caggucacuugcggggcug

SEQ ID NO: 2895619 - RNA, 19 nt, Artificial Sequence
  Description of Artificial Sequence: Synthetic oligonucleotide
cuggcuuuccgaggggcga

SEQ ID NO: 2895620 - RNA, 19 nt, Artificial Sequence
  Description of Artificial Sequence: Synthetic oligonucleotide
cuugcggggcugcuggaua

SEQ ID NO: 2895621 - RNA, 19 nt, Artificial Sequence
  Description of Artificial Sequence: Synthetic oligonucleotide
ugcggggcugcuggauaug

SEQ ID NO: 2895622 - RNA, 19 nt, Artificial Sequence
  Description of Artificial Sequence: Synthetic oligonucleotide
gcgacggcggggugggcgg

SEQ ID NO: 2895623 - RNA, 19 nt, Artificial Sequence
  Description of Artificial Sequence: Synthetic oligonucleotide
auucagugaccgggucugu

SEQ ID NO: 2895624 - RNA, 19 nt, Artificial Sequence
  Description of Artificial Sequence: Synthetic oligonucleotide
acuugcggggcugcuggau

SEQ ID NO: 2895625 - RNA, 19 nt, Artificial Sequence
  Description of Artificial Sequence: Synthetic oligonucleotide
uggcgggagccgcuggcuu

SEQ ID NO: 2895626 - RNA, 19 nt, Artificial Sequence
  Description of Artificial Sequence: Synthetic oligonucleotide
gacggcggggugggcggcg

SEQ ID NO: 2895627 - RNA, 19 nt, Artificial Sequence
  Description of Artificial Sequence: Synthetic oligonucleotide
auggcgggagccgcuggcu

SEQ ID NO: 2895628 - RNA, 19 nt, Artificial Sequence
  Description of Artificial Sequence: Synthetic oligonucleotide
gcuuuccgaggggcgacgg

SEQ ID NO: 2895629 - RNA, 19 nt, Artificial Sequence
  Description of Artificial Sequence: Synthetic oligonucleotide
guguccggcuuuggucucc

SEQ ID NO: 2895630 - RNA, 19 nt, Artificial Sequence
  Description of Artificial Sequence: Synthetic oligonucleotide
ccuucuggaggcgaagaca

SEQ ID NO: 2895631 - RNA, 19 nt, Artificial Sequence
  Description of Artificial Sequence: Synthetic oligonucleotide
gggugggcggcggugcgcg

SEQ ID NO: 2895632 - RNA, 19 nt, Artificial Sequence
  Description of Artificial Sequence: Synthetic oligonucleotide
cacggcgggcggguguccg

SEQ ID NO: 2895633 - RNA, 19 nt, Artificial Sequence
  Description of Artificial Sequence: Synthetic oligonucleotide
agacauggcgggagccgcu

SEQ ID NO: 2895634 - RNA, 19 nt, Artificial Sequence
  Description of Artificial Sequence: Synthetic oligonucleotide
cccuucuggaggcgaagac

SEQ ID NO: 2895635 - RNA, 19 nt, Artificial Sequence
  Description of Artificial Sequence: Synthetic oligonucleotide
ggcuuuccgaggggcgacg

SEQ ID NO: 2895636 - RNA, 19 nt, Artificial Sequence
  Description of Artificial Sequence: Synthetic oligonucleotide
ccggcuuuggucuccagcu

SEQ ID NO: 2895637 - RNA, 19 nt, Artificial Sequence
  Description of Artificial Sequence: Synthetic oligonucleotide
aggcgaagacauggcggga

SEQ ID NO: 2895638 - RNA, 19 nt, Artificial Sequence
  Description of Artificial Sequence: Synthetic oligonucleotide
cuggauaugcuguguucuu

SEQ ID NO: 2895639 - RNA, 19 nt, Artificial Sequence
  Description of Artificial Sequence: Synthetic oligonucleotide
gggucugugcgcaggucac

SEQ ID NO: 2895640 - RNA, 19 nt, Artificial Sequence
  Description of Artificial Sequence: Synthetic oligonucleotide
cgaggggcgacggcgacgg

SEQ ID NO: 2895641 - RNA, 19 nt, Artificial Sequence
  Description of Artificial Sequence: Synthetic oligonucleotide
cuuugucaccccgagccau

SEQ ID NO: 2895642 - RNA, 19 nt, Artificial Sequence
  Description of Artificial Sequence: Synthetic oligonucleotide
gggagccgcuggcuuuccg

SEQ ID NO: 2895643 - RNA, 19 nt, Artificial Sequence
  Description of Artificial Sequence: Synthetic oligonucleotide
gggccaccugugcagccgc

SEQ ID NO: 2895644 - RNA, 19 nt, Artificial Sequence
  Description of Artificial Sequence: Synthetic oligonucleotide
cggguguccggcuuugguc

SEQ ID NO: 2895645 - RNA, 19 nt, Artificial Sequence
  Description of Artificial Sequence: Synthetic oligonucleotide
cuguugguuuaggugggcu

SEQ ID NO: 2895646 - RNA, 19 nt, Artificial Sequence
  Description of Artificial Sequence: Synthetic oligonucleotide
gucucccguaugugggugu

SEQ ID NO: 2895647 - RNA, 19 nt, Artificial Sequence
  Description of Artificial Sequence: Synthetic oligonucleotide
gguguccggcuuuggucuc

SEQ ID NO: 2895648 - RNA, 19 nt, Artificial Sequence
  Description of Artificial Sequence: Synthetic oligonucleotide
caccagagaugaacacugu

SEQ ID NO: 2895649 - RNA, 19 nt, Artificial Sequence
  Description of Artificial Sequence: Synthetic oligonucleotide
gcggggcugcuggauaugc

SEQ ID NO: 2895650 - RNA, 19 nt, Artificial Sequence
  Description of Artificial Sequence: Synthetic oligonucleotide
ggcgacggcgacggcgggg

SEQ ID NO: 2895651 - RNA, 19 nt, Artificial Sequence
  Description of Artificial Sequence: Synthetic oligonucleotide
guccggcuuuggucuccag

SEQ ID NO: 2895652 - RNA, 19 nt, Artificial Sequence
  Description of Artificial Sequence: Synthetic oligonucleotide
guucuuggagaaacauguu

SEQ ID NO: 2895653 - RNA, 19 nt, Artificial Sequence
  Description of Artificial Sequence: Synthetic oligonucleotide
cagaaugcaggagcuuuau

SEQ ID NO: 2895654 - RNA, 19 nt, Artificial Sequence
  Description of Artificial Sequence: Synthetic oligonucleotide
ucacggcgggcgggugucc

SEQ ID NO: 2895655 - RNA, 19 nt, Artificial Sequence
  Description of Artificial Sequence: Synthetic oligonucleotide
gcagaaugcaggagcuuua

SEQ ID NO: 2895656 - RNA, 19 nt, Artificial Sequence
  Description of Artificial Sequence: Synthetic oligonucleotide
cugcuggauaugcuguguu

SEQ ID NO: 2895657 - RNA, 19 nt, Artificial Sequence
  Description of Artificial Sequence: Synthetic oligonucleotide
cuucacggcgggcgggugu

SEQ ID NO: 2895658 - RNA, 19 nt, Artificial Sequence
  Description of Artificial Sequence: Synthetic oligonucleotide
cacuugcggggcugcugga

SEQ ID NO: 2895659 - RNA, 19 nt, Artificial Sequence
  Description of Artificial Sequence: Synthetic oligonucleotide
gucugugcgcaggucacuu

SEQ ID NO: 2895660 - RNA, 19 nt, Artificial Sequence
  Description of Artificial Sequence: Synthetic oligonucleotide
cgggucugugcgcagguca

SEQ ID NO: 2895661 - RNA, 19 nt, Artificial Sequence
  Description of Artificial Sequence: Synthetic oligonucleotide
cgcaggucacuugcggggc

SEQ ID NO: 2895662 - RNA, 19 nt, Artificial Sequence
  Description of Artificial Sequence: Synthetic oligonucleotide
gaggggcgacggcgacggc

SEQ ID NO: 2895663 - RNA, 19 nt, Artificial Sequence
  Description of Artificial Sequence: Synthetic oligonucleotide
gcauuccaccagccuucac

SEQ ID NO: 2895664 - RNA, 19 nt, Artificial Sequence
  Description of Artificial Sequence: Synthetic oligonucleotide
gcugcuggauaugcugugu

SEQ ID NO: 2895665 - RNA, 19 nt, Artificial Sequence
  Description of Artificial Sequence: Synthetic oligonucleotide
gggcugcuggauaugcugu

SEQ ID NO: 2895666 - RNA, 19 nt, Artificial Sequence
  Description of Artificial Sequence: Synthetic oligonucleotide
cuggugcuuucccauucuu

SEQ ID NO: 2895667 - RNA, 19 nt, Artificial Sequence
  Description of Artificial Sequence: Synthetic oligonucleotide
ggcggguguccggcuuugg

SEQ ID NO: 2895668 - RNA, 19 nt, Artificial Sequence
  Description of Artificial Sequence: Synthetic oligonucleotide
guggguguuucugcacaau

SEQ ID NO: 2895669 - RNA, 19 nt, Artificial Sequence
  Description of Artificial Sequence: Synthetic oligonucleotide
ccuucccgucucccguaug

SEQ ID NO: 2895670 - RNA, 19 nt, Artificial Sequence
  Description of Artificial Sequence: Synthetic oligonucleotide
ccgaggggcgacggcgacg

SEQ ID NO: 2895671 - RNA, 19 nt, Artificial Sequence
  Description of Artificial Sequence: Synthetic oligonucleotide
ggcggggugggcggcggug

SEQ ID NO: 2895672 - RNA, 19 nt, Artificial Sequence
  Description of Artificial Sequence: Synthetic oligonucleotide
ccgcuggcuuuccgagggg

SEQ ID NO: 2895673 - RNA, 19 nt, Artificial Sequence
  Description of Artificial Sequence: Synthetic oligonucleotide
gguuucuggugggccaccu

SEQ ID NO: 2895674 - RNA, 19 nt, Artificial Sequence
  Description of Artificial Sequence: Synthetic oligonucleotide
gcggggugggcggcggugc

SEQ ID NO: 2895675 - RNA, 19 nt, Artificial Sequence
  Description of Artificial Sequence: Synthetic oligonucleotide
ccauggaagcaugugguuu

SEQ ID NO: 2895676 - RNA, 19 nt, Artificial Sequence
  Description of Artificial Sequence: Synthetic oligonucleotide
cccgagccauaacaccaga

SEQ ID NO: 2895677 - RNA, 19 nt, Artificial Sequence
  Description of Artificial Sequence: Synthetic oligonucleotide
cgucucccguaugugggug

SEQ ID NO: 2895678 - RNA, 19 nt, Artificial Sequence
  Description of Artificial Sequence: Synthetic oligonucleotide
gcggguguccggcuuuggu

SEQ ID NO: 2895679 - RNA, 19 nt, Artificial Sequence
  Description of Artificial Sequence: Synthetic oligonucleotide
ggugggcggcggugcgcgc

SEQ ID NO: 2895680 - RNA, 19 nt, Artificial Sequence
  Description of Artificial Sequence: Synthetic oligonucleotide
ggggugggcggcggugcgc

SEQ ID NO: 2895681 - RNA, 19 nt, Artificial Sequence
  Description of Artificial Sequence: Synthetic oligonucleotide
ggucuccagcuucccuucu

SEQ ID NO: 2895682 - RNA, 19 nt, Artificial Sequence
  Description of Artificial Sequence: Synthetic oligonucleotide
ccauaacaccagagaugaa

SEQ ID NO: 2895683 - RNA, 19 nt, Artificial Sequence
  Description of Artificial Sequence: Synthetic oligonucleotide
gcgggagccgcuggcuuuc

SEQ ID NO: 2895684 - RNA, 19 nt, Artificial Sequence
  Description of Artificial Sequence: Synthetic oligonucleotide
gggcggguguccggcuuug

SEQ ID NO: 2895685 - RNA, 19 nt, Artificial Sequence
  Description of Artificial Sequence: Synthetic oligonucleotide
gcaggucacuugcggggcu

SEQ ID NO: 2895686 - RNA, 19 nt, Artificial Sequence
  Description of Artificial Sequence: Synthetic oligonucleotide
ggucugugcgcaggucacu

SEQ ID NO: 2895687 - RNA, 19 nt, Artificial Sequence
  Description of Artificial Sequence: Synthetic oligonucleotide
gcgacggcgacggcggggu

SEQ ID NO: 2895688 - RNA, 19 nt, Artificial Sequence
  Description of Artificial Sequence: Synthetic oligonucleotide
ggcgggagccgcuggcuuu

SEQ ID NO: 2895689 - RNA, 19 nt, Artificial Sequence
  Description of Artificial Sequence: Synthetic oligonucleotide
cggggugggcggcggugcg

SEQ ID NO: 2895690 - RNA, 19 nt, Artificial Sequence
  Description of Artificial Sequence: Synthetic oligonucleotide
ccuucacggcgggcgggug

SEQ ID NO: 2895691 - RNA, 19 nt, Artificial Sequence
  Description of Artificial Sequence: Synthetic oligonucleotide
cccguauguggguguuucu

SEQ ID NO: 2895692 - RNA, 19 nt, Artificial Sequence
  Description of Artificial Sequence: Synthetic oligonucleotide
gggcuggugcuuucccauu

SEQ ID NO: 2895693 - RNA, 19 nt, Artificial Sequence
  Description of Artificial Sequence: Synthetic oligonucleotide
ggucacuugcggggcugcu

SEQ ID NO: 2895694 - RNA, 19 nt, Artificial Sequence
  Description of Artificial Sequence: Synthetic oligonucleotide
ccgucucccguaugugggu

SEQ ID NO: 2895695 - RNA, 19 nt, Artificial Sequence
  Description of Artificial Sequence: Synthetic oligonucleotide
cccauucuugcucgucuuu

SEQ ID NO: 2895696 - RNA, 19 nt, Artificial Sequence
  Description of Artificial Sequence: Synthetic oligonucleotide
ccgggucugugcgcagguc

SEQ ID NO: 2895697 - RNA, 19 nt, Artificial Sequence
  Description of Artificial Sequence: Synthetic oligonucleotide
gggcggcggugcgcgcgcg

SEQ ID NO: 2895698 - RNA, 19 nt, Artificial Sequence
  Description of Artificial Sequence: Synthetic oligonucleotide
cgcauuccaccagccuuca

SEQ ID NO: 2895699 - RNA, 19 nt, Artificial Sequence
  Description of Artificial Sequence: Synthetic oligonucleotide
gccuucacggcgggcgggu

SEQ ID NO: 2895700 - RNA, 19 nt, Artificial Sequence
  Description of Artificial Sequence: Synthetic oligonucleotide
cggcgggcggguguccggc

SEQ ID NO: 2895701 - RNA, 19 nt, Artificial Sequence
  Description of Artificial Sequence: Synthetic oligonucleotide
cucccguauguggguguuu

SEQ ID NO: 2895702 - RNA, 19 nt, Artificial Sequence
  Description of Artificial Sequence: Synthetic oligonucleotide
ggcgggcggguguccggcu

SEQ ID NO: 2895703 - RNA, 19 nt, Artificial Sequence
  Description of Artificial Sequence: Synthetic oligonucleotide
cgggagccgcuggcuuucc

SEQ ID NO: 2895704 - RNA, 19 nt, Artificial Sequence
  Description of Artificial Sequence: Synthetic oligonucleotide
cggggcugcuggauaugcu

SEQ ID NO: 2895705 - RNA, 19 nt, Artificial Sequence
  Description of Artificial Sequence: Synthetic oligonucleotide
cgacggcggggugggcggc

SEQ ID NO: 2895706 - RNA, 19 nt, Artificial Sequence
  Description of Artificial Sequence: Synthetic oligonucleotide
gcgggcggguguccggcuu

SEQ ID NO: 2895707 - RNA, 19 nt, Artificial Sequence
  Description of Artificial Sequence: Synthetic oligonucleotide
cgacggcgacggcggggug

SEQ ID NO: 2895708 - RNA, 19 nt, Artificial Sequence
  Description of Artificial Sequence: Synthetic oligonucleotide
cgggcggguguccggcuuu

SEQ ID NO: 2895709 - RNA, 19 nt, Artificial Sequence
  Description of Artificial Sequence: Synthetic oligonucleotide
cggcgacggcggggugggc

SEQ ID NO: 2895710 - RNA, 19 nt, Artificial Sequence
  Description of Artificial Sequence: Synthetic oligonucleotide
cggcggggugggcggcggu

SEQ ID NO: 2895711 - RNA, 19 nt, Artificial Sequence
  Description of Artificial Sequence: Synthetic oligonucleotide
aaaagucugggacacaagg

SEQ ID NO: 2895712 - RNA, 19 nt, Artificial Sequence
  Description of Artificial Sequence: Synthetic oligonucleotide
aauuuggacggcucgagac

SEQ ID NO: 2895713 - RNA, 19 nt, Artificial Sequence
  Description of Artificial Sequence: Synthetic oligonucleotide
guugguucuaauuuggacg

SEQ ID NO: 2895714 - RNA, 19 nt, Artificial Sequence
  Description of Artificial Sequence: Synthetic oligonucleotide
aaaacgagauccaaguugg

SEQ ID NO: 2895715 - RNA, 19 nt, Artificial Sequence
  Description of Artificial Sequence: Synthetic oligonucleotide
augaguugagaagagaugc

SEQ ID NO: 2895716 - RNA, 19 nt, Artificial Sequence
  Description of Artificial Sequence: Synthetic oligonucleotide
aaugucacccagcccagcc

SEQ ID NO: 2895717 - RNA, 19 nt, Artificial Sequence
  Description of Artificial Sequence: Synthetic oligonucleotide
agaaaggucggccuugacc

SEQ ID NO: 2895718 - RNA, 19 nt, Artificial Sequence
  Description of Artificial Sequence: Synthetic oligonucleotide
agaacaaguagccaaaagu

SEQ ID NO: 2895719 - RNA, 19 nt, Artificial Sequence
  Description of Artificial Sequence: Synthetic oligonucleotide
aagaagaacaaguagccaa

SEQ ID NO: 2895720 - RNA, 19 nt, Artificial Sequence
  Description of Artificial Sequence: Synthetic oligonucleotide
aagucugggacacaagguc

SEQ ID NO: 2895721 - RNA, 19 nt, Artificial Sequence
  Description of Artificial Sequence: Synthetic oligonucleotide
auugauagaaaggucggcc

SEQ ID NO: 2895722 - RNA, 19 nt, Artificial Sequence
  Description of Artificial Sequence: Synthetic oligonucleotide
uugguucuaauuuggacgg

SEQ ID NO: 2895723 - RNA, 19 nt, Artificial Sequence
  Description of Artificial Sequence: Synthetic oligonucleotide
agaagaagaacaaguagcc

SEQ ID NO: 2895724 - RNA, 19 nt, Artificial Sequence
  Description of Artificial Sequence: Synthetic oligonucleotide
gagaagaagaacaaguagc

SEQ ID NO: 2895725 - RNA, 19 nt, Artificial Sequence
  Description of Artificial Sequence: Synthetic oligonucleotide
uuggagaagaagaacaagu

SEQ ID NO: 2895726 - RNA, 19 nt, Artificial Sequence
  Description of Artificial Sequence: Synthetic oligonucleotide
acacauagcagguucacag

SEQ ID NO: 2895727 - RNA, 19 nt, Artificial Sequence
  Description of Artificial Sequence: Synthetic oligonucleotide
acgagauccaaguugguuc

SEQ ID NO: 2895728 - RNA, 19 nt, Artificial Sequence
  Description of Artificial Sequence: Synthetic oligonucleotide
aguugguucuaauuuggac

SEQ ID NO: 2895729 - RNA, 19 nt, Artificial Sequence
  Description of Artificial Sequence: Synthetic oligonucleotide
accauugauagaaaggucg

SEQ ID NO: 2895730 - RNA, 19 nt, Artificial Sequence
  Description of Artificial Sequence: Synthetic oligonucleotide
uucuaauuuggacggcucg

SEQ ID NO: 2895731 - RNA, 19 nt, Artificial Sequence
  Description of Artificial Sequence: Synthetic oligonucleotide
aagaacaaguagccaaaag

SEQ ID NO: 2895732 - RNA, 19 nt, Artificial Sequence
  Description of Artificial Sequence: Synthetic oligonucleotide
uccaaaacgagauccaagu

SEQ ID NO: 2895733 - RNA, 19 nt, Artificial Sequence
  Description of Artificial Sequence: Synthetic oligonucleotide
caaaacgagauccaaguug

SEQ ID NO: 2895734 - RNA, 19 nt, Artificial Sequence
  Description of Artificial Sequence: Synthetic oligonucleotide
guugagaagagaugcauug

SEQ ID NO: 2895735 - RNA, 19 nt, Artificial Sequence
  Description of Artificial Sequence: Synthetic oligonucleotide
uaggccugaguccaggugg

SEQ ID NO: 2895736 - RNA, 19 nt, Artificial Sequence
  Description of Artificial Sequence: Synthetic oligonucleotide
aauggagaguuuccggaag

SEQ ID NO: 2895737 - RNA, 19 nt, Artificial Sequence
  Description of Artificial Sequence: Synthetic oligonucleotide
gaugcauuggagaagaaga

SEQ ID NO: 2895738 - RNA, 19 nt, Artificial Sequence
  Description of Artificial Sequence: Synthetic oligonucleotide
uuccggaagaacucggugg

SEQ ID NO: 2895739 - RNA, 19 nt, Artificial Sequence
  Description of Artificial Sequence: Synthetic oligonucleotide
auuuggacggcucgagacc

SEQ ID NO: 2895740 - RNA, 19 nt, Artificial Sequence
  Description of Artificial Sequence: Synthetic oligonucleotide
guagccaaaagucugggac

SEQ ID NO: 2895741 - RNA, 19 nt, Artificial Sequence
  Description of Artificial Sequence: Synthetic oligonucleotide
aaggguuacuguccaagag

SEQ ID NO: 2895742 - RNA, 19 nt, Artificial Sequence
  Description of Artificial Sequence: Synthetic oligonucleotide
uccaaguugguucuaauuu

SEQ ID NO: 2895743 - RNA, 19 nt, Artificial Sequence
  Description of Artificial Sequence: Synthetic oligonucleotide
caaguugguucuaauuugg

SEQ ID NO: 2895744 - RNA, 19 nt, Artificial Sequence
  Description of Artificial Sequence: Synthetic oligonucleotide
gaacaaguagccaaaaguc

SEQ ID NO: 2895745 - RNA, 19 nt, Artificial Sequence
  Description of Artificial Sequence: Synthetic oligonucleotide
gagaccauugauagaaagg

SEQ ID NO: 2895746 - RNA, 19 nt, Artificial Sequence
  Description of Artificial Sequence: Synthetic oligonucleotide
agaagagaugcauuggaga

SEQ ID NO: 2895747 - RNA, 19 nt, Artificial Sequence
  Description of Artificial Sequence: Synthetic oligonucleotide
uccaucaaugaguugagaa

SEQ ID NO: 2895748 - RNA, 19 nt, Artificial Sequence
  Description of Artificial Sequence: Synthetic oligonucleotide
uguccaagagagcuggcag

SEQ ID NO: 2895749 - RNA, 19 nt, Artificial Sequence
  Description of Artificial Sequence: Synthetic oligonucleotide
gaugguggagcugagcagg

SEQ ID NO: 2895750 - RNA, 19 nt, Artificial Sequence
  Description of Artificial Sequence: Synthetic oligonucleotide
aacucgguggcaaugucac

SEQ ID NO: 2895751 - RNA, 19 nt, Artificial Sequence
  Description of Artificial Sequence: Synthetic oligonucleotide
gaagccuugagcagggagg

SEQ ID NO: 2895752 - RNA, 19 nt, Artificial Sequence
  Description of Artificial Sequence: Synthetic oligonucleotide
aaugaguugagaagagaug

SEQ ID NO: 2895753 - RNA, 19 nt, Artificial Sequence
  Description of Artificial Sequence: Synthetic oligonucleotide
agaccauugauagaaaggu

SEQ ID NO: 2895754 - RNA, 19 nt, Artificial Sequence
  Description of Artificial Sequence: Synthetic oligonucleotide
uggguagucaguccucagg

SEQ ID NO: 2895755 - RNA, 19 nt, Artificial Sequence
  Description of Artificial Sequence: Synthetic oligonucleotide
gaagagaugcauuggagaa

SEQ ID NO: 2895756 - RNA, 19 nt, Artificial Sequence
  Description of Artificial Sequence: Synthetic oligonucleotide
caaguagccaaaagucugg

SEQ ID NO: 2895757 - RNA, 19 nt, Artificial Sequence
  Description of Artificial Sequence: Synthetic oligonucleotide
aacacacccaggguaggcc

SEQ ID NO: 2895758 - RNA, 19 nt, Artificial Sequence
  Description of Artificial Sequence: Synthetic oligonucleotide
aacaaguagccaaaagucu

SEQ ID NO: 2895759 - RNA, 19 nt, Artificial Sequence
  Description of Artificial Sequence: Synthetic oligonucleotide
aaaggguuacuguccaaga

SEQ ID NO: 2895760 - RNA, 19 nt, Artificial Sequence
  Description of Artificial Sequence: Synthetic oligonucleotide
agcagguucacagcaaugg

SEQ ID NO: 2895761 - RNA, 19 nt, Artificial Sequence
  Description of Artificial Sequence: Synthetic oligonucleotide
agcaauggagaguuuccgg

SEQ ID NO: 2895762 - RNA, 19 nt, Artificial Sequence
  Description of Artificial Sequence: Synthetic oligonucleotide
gaaaggucggccuugaccu

SEQ ID NO: 2895763 - RNA, 19 nt, Artificial Sequence
  Description of Artificial Sequence: Synthetic oligonucleotide
ucggccuugaccucguucc

SEQ ID NO: 2895764 - RNA, 19 nt, Artificial Sequence
  Description of Artificial Sequence: Synthetic oligonucleotide
uugauagaaaggucggccu

SEQ ID NO: 2895765 - RNA, 19 nt, Artificial Sequence
  Description of Artificial Sequence: Synthetic oligonucleotide
ucaguccucaggcugcucc

SEQ ID NO: 2895766 - RNA, 19 nt, Artificial Sequence
  Description of Artificial Sequence: Synthetic oligonucleotide
gagaugguggagcugagca

SEQ ID NO: 2895767 - RNA, 19 nt, Artificial Sequence
  Description of Artificial Sequence: Synthetic oligonucleotide
uggagaagaagaacaagua

SEQ ID NO: 2895768 - RNA, 19 nt, Artificial Sequence
  Description of Artificial Sequence: Synthetic oligonucleotide
ucaguucuagagcugccug

SEQ ID NO: 2895769 - RNA, 19 nt, Artificial Sequence
  Description of Artificial Sequence: Synthetic oligonucleotide
uugagaagagaugcauugg

SEQ ID NO: 2895770 - RNA, 19 nt, Artificial Sequence
  Description of Artificial Sequence: Synthetic oligonucleotide
uucuagagcugccuggaac

SEQ ID NO: 2895771 - RNA, 19 nt, Artificial Sequence
  Description of Artificial Sequence: Synthetic oligonucleotide
uccggaagaacucgguggc

SEQ ID NO: 2895772 - RNA, 19 nt, Artificial Sequence
  Description of Artificial Sequence: Synthetic oligonucleotide
uuuccggaagaacucggug

SEQ ID NO: 2895773 - RNA, 19 nt, Artificial Sequence
  Description of Artificial Sequence: Synthetic oligonucleotide
uucacagcaauggagaguu

SEQ ID NO: 2895774 - RNA, 19 nt, Artificial Sequence
  Description of Artificial Sequence: Synthetic oligonucleotide
acauagcagguucacagca

SEQ ID NO: 2895775 - RNA, 19 nt, Artificial Sequence
  Description of Artificial Sequence: Synthetic oligonucleotide
acagcaauggagaguuucc

SEQ ID NO: 2895776 - RNA, 19 nt, Artificial Sequence
  Description of Artificial Sequence: Synthetic oligonucleotide
cuccaugaagccuugagca

SEQ ID NO: 2895777 - RNA, 19 nt, Artificial Sequence
  Description of Artificial Sequence: Synthetic oligonucleotide
aagagaugcauuggagaag

SEQ ID NO: 2895778 - RNA, 19 nt, Artificial Sequence
  Description of Artificial Sequence: Synthetic oligonucleotide
ugcuccaugaagccuugag

SEQ ID NO: 2895779 - RNA, 19 nt, Artificial Sequence
  Description of Artificial Sequence: Synthetic oligonucleotide
ugaguugagaagagaugca

SEQ ID NO: 2895780 - RNA, 19 nt, Artificial Sequence
  Description of Artificial Sequence: Synthetic oligonucleotide
acaaguagccaaaagucug

SEQ ID NO: 2895781 - RNA, 19 nt, Artificial Sequence
  Description of Artificial Sequence: Synthetic oligonucleotide
guagucaguccucaggcug

SEQ ID NO: 2895782 - RNA, 19 nt, Artificial Sequence
  Description of Artificial Sequence: Synthetic oligonucleotide
cagguucacagcaauggag

SEQ ID NO: 2895783 - RNA, 19 nt, Artificial Sequence
  Description of Artificial Sequence: Synthetic oligonucleotide
auuggagaagaagaacaag

SEQ ID NO: 2895784 - RNA, 19 nt, Artificial Sequence
  Description of Artificial Sequence: Synthetic oligonucleotide
caugaagccuugagcaggg

SEQ ID NO: 2895785 - RNA, 19 nt, Artificial Sequence
  Description of Artificial Sequence: Synthetic oligonucleotide
aaguagccaaaagucuggg

SEQ ID NO: 2895786 - RNA, 19 nt, Artificial Sequence
  Description of Artificial Sequence: Synthetic oligonucleotide
agaugcauuggagaagaag

SEQ ID NO: 2895787 - RNA, 19 nt, Artificial Sequence
  Description of Artificial Sequence: Synthetic oligonucleotide
uccaugaagccuugagcag

SEQ ID NO: 2895788 - RNA, 19 nt, Artificial Sequence
  Description of Artificial Sequence: Synthetic oligonucleotide
accucguuccaucaaugag

SEQ ID NO: 2895789 - RNA, 19 nt, Artificial Sequence
  Description of Artificial Sequence: Synthetic oligonucleotide
agagaugcauuggagaaga

SEQ ID NO: 2895790 - RNA, 19 nt, Artificial Sequence
  Description of Artificial Sequence: Synthetic oligonucleotide
ugcagccaauccaaaacga

SEQ ID NO: 2895791 - RNA, 19 nt, Artificial Sequence
  Description of Artificial Sequence: Synthetic oligonucleotide
ugagcaggggucaggguug

SEQ ID NO: 2895792 - RNA, 19 nt, Artificial Sequence
  Description of Artificial Sequence: Synthetic oligonucleotide
uagccaaaagucugggaca

SEQ ID NO: 2895793 - RNA, 19 nt, Artificial Sequence
  Description of Artificial Sequence: Synthetic oligonucleotide
ggcucgagaccauugauag

SEQ ID NO: 2895794 - RNA, 19 nt, Artificial Sequence
  Description of Artificial Sequence: Synthetic oligonucleotide
ucuaauuuggacggcucga

SEQ ID NO: 2895795 - RNA, 19 nt, Artificial Sequence
  Description of Artificial Sequence: Synthetic oligonucleotide
aggugcggggcacacauag

SEQ ID NO: 2895796 - RNA, 19 nt, Artificial Sequence
  Description of Artificial Sequence: Synthetic oligonucleotide
aaagucugggacacaaggu

SEQ ID NO: 2895797 - RNA, 19 nt, Artificial Sequence
  Description of Artificial Sequence: Synthetic oligonucleotide
ugcagcucacacuggcugg

SEQ ID NO: 2895798 - RNA, 19 nt, Artificial Sequence
  Description of Artificial Sequence: Synthetic oligonucleotide
uagucaguccucaggcugc

SEQ ID NO: 2895799 - RNA, 19 nt, Artificial Sequence
  Description of Artificial Sequence: Synthetic oligonucleotide
agaguuuccggaagaacuc

SEQ ID NO: 2895800 - RNA, 19 nt, Artificial Sequence
  Description of Artificial Sequence: Synthetic oligonucleotide
ugccccagcggugaaaggg

SEQ ID NO: 2895801 - RNA, 19 nt, Artificial Sequence
  Description of Artificial Sequence: Synthetic oligonucleotide
guuacuguccaagagagcu

SEQ ID NO: 2895802 - RNA, 19 nt, Artificial Sequence
  Description of Artificial Sequence: Synthetic oligonucleotide
uaauuuggacggcucgaga

SEQ ID NO: 2895803 - RNA, 19 nt, Artificial Sequence
  Description of Artificial Sequence: Synthetic oligonucleotide
cucgguggcaaugucaccc

SEQ ID NO: 2895804 - RNA, 19 nt, Artificial Sequence
  Description of Artificial Sequence: Synthetic oligonucleotide
cagggugcagcucacacug

SEQ ID NO: 2895805 - RNA, 19 nt, Artificial Sequence
  Description of Artificial Sequence: Synthetic oligonucleotide
uuacuguccaagagagcug

SEQ ID NO: 2895806 - RNA, 19 nt, Artificial Sequence
  Description of Artificial Sequence: Synthetic oligonucleotide
ugucacccagcccagcccc

SEQ ID NO: 2895807 - RNA, 19 nt, Artificial Sequence
  Description of Artificial Sequence: Synthetic oligonucleotide
caucaaugaguugagaaga

SEQ ID NO: 2895808 - RNA, 19 nt, Artificial Sequence
  Description of Artificial Sequence: Synthetic oligonucleotide
agccaaaagucugggacac

SEQ ID NO: 2895809 - RNA, 19 nt, Artificial Sequence
  Description of Artificial Sequence: Synthetic oligonucleotide
augucacccagcccagccc

SEQ ID NO: 2895810 - RNA, 19 nt, Artificial Sequence
  Description of Artificial Sequence: Synthetic oligonucleotide
ugagcagggaggugcgggg

SEQ ID NO: 2895811 - RNA, 19 nt, Artificial Sequence
  Description of Artificial Sequence: Synthetic oligonucleotide
gucaggguuggguagucag

SEQ ID NO: 2895812 - RNA, 19 nt, Artificial Sequence
  Description of Artificial Sequence: Synthetic oligonucleotide
gaguuuccggaagaacucg

SEQ ID NO: 2895813 - RNA, 19 nt, Artificial Sequence
  Description of Artificial Sequence: Synthetic oligonucleotide
ccaauccaaaacgagaucc

SEQ ID NO: 2895814 - RNA, 19 nt, Artificial Sequence
  Description of Artificial Sequence: Synthetic oligonucleotide
aggguuggguagucagucc

SEQ ID NO: 2895815 - RNA, 19 nt, Artificial Sequence
  Description of Artificial Sequence: Synthetic oligonucleotide
ucaaugaguugagaagaga

SEQ ID NO: 2895816 - RNA, 19 nt, Artificial Sequence
  Description of Artificial Sequence: Synthetic oligonucleotide
ugcauuggagaagaagaac

SEQ ID NO: 2895817 - RNA, 19 nt, Artificial Sequence
  Description of Artificial Sequence: Synthetic oligonucleotide
aaggucggccuugaccucg

SEQ ID NO: 2895818 - RNA, 19 nt, Artificial Sequence
  Description of Artificial Sequence: Synthetic oligonucleotide
uugagcagggaggugcggg

SEQ ID NO: 2895819 - RNA, 19 nt, Artificial Sequence
  Description of Artificial Sequence: Synthetic oligonucleotide
ugaccucguuccaucaaug

SEQ ID NO: 2895820 - RNA, 19 nt, Artificial Sequence
  Description of Artificial Sequence: Synthetic oligonucleotide
ccaucaaugaguugagaag

SEQ ID NO: 2895821 - RNA, 19 nt, Artificial Sequence
  Description of Artificial Sequence: Synthetic oligonucleotide
aagaacucgguggcaaugu

SEQ ID NO: 2895822 - RNA, 19 nt, Artificial Sequence
  Description of Artificial Sequence: Synthetic oligonucleotide
cacauagcagguucacagc

SEQ ID NO: 2895823 - RNA, 19 nt, Artificial Sequence
  Description of Artificial Sequence: Synthetic oligonucleotide
agaugguggagcugagcag

SEQ ID NO: 2895824 - RNA, 19 nt, Artificial Sequence
  Description of Artificial Sequence: Synthetic oligonucleotide
aaaggucggccuugaccuc

SEQ ID NO: 2895825 - RNA, 19 nt, Artificial Sequence
  Description of Artificial Sequence: Synthetic oligonucleotide
uuuggacggcucgagacca

SEQ ID NO: 2895826 - RNA, 19 nt, Artificial Sequence
  Description of Artificial Sequence: Synthetic oligonucleotide
uugaccucguuccaucaau

SEQ ID NO: 2895827 - RNA, 19 nt, Artificial Sequence
  Description of Artificial Sequence: Synthetic oligonucleotide
uccaagagagcuggcagug

SEQ ID NO: 2895828 - RNA, 19 nt, Artificial Sequence
  Description of Artificial Sequence: Synthetic oligonucleotide
uggucaguucuagagcugc

SEQ ID NO: 2895829 - RNA, 19 nt, Artificial Sequence
  Description of Artificial Sequence: Synthetic oligonucleotide
ugauagaaaggucggccuu

SEQ ID NO: 2895830 - RNA, 19 nt, Artificial Sequence
  Description of Artificial Sequence: Synthetic oligonucleotide
gagaguuuccggaagaacu

SEQ ID NO: 2895831 - RNA, 19 nt, Artificial Sequence
  Description of Artificial Sequence: Synthetic oligonucleotide
cuaauuuggacggcucgag

SEQ ID NO: 2895832 - RNA, 19 nt, Artificial Sequence
  Description of Artificial Sequence: Synthetic oligonucleotide
cucgagaccauugauagaa

SEQ ID NO: 2895833 - RNA, 19 nt, Artificial Sequence
  Description of Artificial Sequence: Synthetic oligonucleotide
agaacucgguggcaauguc

SEQ ID NO: 2895834 - RNA, 19 nt, Artificial Sequence
  Description of Artificial Sequence: Synthetic oligonucleotide
aggaccuggcagcucugcc

SEQ ID NO: 2895835 - RNA, 19 nt, Artificial Sequence
  Description of Artificial Sequence: Synthetic oligonucleotide
uggcauggccuccagcucu

SEQ ID NO: 2895836 - RNA, 19 nt, Artificial Sequence
  Description of Artificial Sequence: Synthetic oligonucleotide
acacuggcuggucaguucu

SEQ ID NO: 2895837 - RNA, 19 nt, Artificial Sequence
  Description of Artificial Sequence: Synthetic oligonucleotide
cacaaggucagggugcagc

SEQ ID NO: 2895838 - RNA, 19 nt, Artificial Sequence
  Description of Artificial Sequence: Synthetic oligonucleotide
ucugccccagcggugaaag

SEQ ID NO: 2895839 - RNA, 19 nt, Artificial Sequence
  Description of Artificial Sequence: Synthetic oligonucleotide
ccauugauagaaaggucgg

SEQ ID NO: 2895840 - RNA, 19 nt, Artificial Sequence
  Description of Artificial Sequence: Synthetic oligonucleotide
gaggagaugguggagcuga

SEQ ID NO: 2895841 - RNA, 19 nt, Artificial Sequence
  Description of Artificial Sequence: Synthetic oligonucleotide
gaagaacucgguggcaaug

SEQ ID NO: 2895842 - RNA, 19 nt, Artificial Sequence
  Description of Artificial Sequence: Synthetic oligonucleotide
cauugauagaaaggucggc

SEQ ID NO: 2895843 - RNA, 19 nt, Artificial Sequence
  Description of Artificial Sequence: Synthetic oligonucleotide
aucaaugaguugagaagag

SEQ ID NO: 2895844 - RNA, 19 nt, Artificial Sequence
  Description of Artificial Sequence: Synthetic oligonucleotide
acaaggucagggugcagcu

SEQ ID NO: 2895845 - RNA, 19 nt, Artificial Sequence
  Description of Artificial Sequence: Synthetic oligonucleotide
gaagaagaacaaguagcca

SEQ ID NO: 2895846 - RNA, 19 nt, Artificial Sequence
  Description of Artificial Sequence: Synthetic oligonucleotide
cugccuggaacacacccag

SEQ ID NO: 2895847 - RNA, 19 nt, Artificial Sequence
  Description of Artificial Sequence: Synthetic oligonucleotide
ugggacacaaggucagggu

SEQ ID NO: 2895848 - RNA, 19 nt, Artificial Sequence
  Description of Artificial Sequence: Synthetic oligonucleotide
aacgagauccaaguugguu

SEQ ID NO: 2895849 - RNA, 19 nt, Artificial Sequence
  Description of Artificial Sequence: Synthetic oligonucleotide
gaguccagguggcauggcc

SEQ ID NO: 2895850 - RNA, 19 nt, Artificial Sequence
  Description of Artificial Sequence: Synthetic oligonucleotide
caaaagucugggacacaag

SEQ ID NO: 2895851 - RNA, 19 nt, Artificial Sequence
  Description of Artificial Sequence: Synthetic oligonucleotide
auggagaguuuccggaaga

SEQ ID NO: 2895852 - RNA, 19 nt, Artificial Sequence
  Description of Artificial Sequence: Synthetic oligonucleotide
ugcggggcacacauagcag

SEQ ID NO: 2895853 - RNA, 19 nt, Artificial Sequence
  Description of Artificial Sequence: Synthetic oligonucleotide
gccuggaacacacccaggg

SEQ ID NO: 2895854 - RNA, 19 nt, Artificial Sequence
  Description of Artificial Sequence: Synthetic oligonucleotide
agguucacagcaauggaga

SEQ ID NO: 2895855 - RNA, 19 nt, Artificial Sequence
  Description of Artificial Sequence: Synthetic oligonucleotide
ggugaaaggguuacugucc

SEQ ID NO: 2895856 - RNA, 19 nt, Artificial Sequence
  Description of Artificial Sequence: Synthetic oligonucleotide
ggguagucaguccucaggc

SEQ ID NO: 2895857 - RNA, 19 nt, Artificial Sequence
  Description of Artificial Sequence: Synthetic oligonucleotide
ucaggguuggguagucagu

SEQ ID NO: 2895858 - RNA, 19 nt, Artificial Sequence
  Description of Artificial Sequence: Synthetic oligonucleotide
auccaaaacgagauccaag

SEQ ID NO: 2895859 - RNA, 19 nt, Artificial Sequence
  Description of Artificial Sequence: Synthetic oligonucleotide
aagccuugagcagggaggu

SEQ ID NO: 2895860 - RNA, 19 nt, Artificial Sequence
  Description of Artificial Sequence: Synthetic oligonucleotide
agcggugaaaggguuacug

SEQ ID NO: 2895861 - RNA, 19 nt, Artificial Sequence
  Description of Artificial Sequence: Synthetic oligonucleotide
ucagggugcagcucacacu

SEQ ID NO: 2895862 - RNA, 19 nt, Artificial Sequence
  Description of Artificial Sequence: Synthetic oligonucleotide
ggguuacuguccaagagag

SEQ ID NO: 2895863 - RNA, 19 nt, Artificial Sequence
  Description of Artificial Sequence: Synthetic oligonucleotide
aguagccaaaagucuggga

SEQ ID NO: 2895864 - RNA, 19 nt, Artificial Sequence
  Description of Artificial Sequence: Synthetic oligonucleotide
uagcagguucacagcaaug

SEQ ID NO: 2895865 - RNA, 19 nt, Artificial Sequence
  Description of Artificial Sequence: Synthetic oligonucleotide
caaugaguugagaagagau

SEQ ID NO: 2895866 - RNA, 19 nt, Artificial Sequence
  Description of Artificial Sequence: Synthetic oligonucleotide
cauuggagaagaagaacaa

SEQ ID NO: 2895867 - RNA, 19 nt, Artificial Sequence
  Description of Artificial Sequence: Synthetic oligonucleotide
ccaaguugguucuaauuug

SEQ ID NO: 2895868 - RNA, 19 nt, Artificial Sequence
  Description of Artificial Sequence: Synthetic oligonucleotide
aguuuccggaagaacucgg

SEQ ID NO: 2895869 - RNA, 19 nt, Artificial Sequence
  Description of Artificial Sequence: Synthetic oligonucleotide
gcauuggagaagaagaaca

SEQ ID NO: 2895870 - RNA, 19 nt, Artificial Sequence
  Description of Artificial Sequence: Synthetic oligonucleotide
auccaaguugguucuaauu

SEQ ID NO: 2895871 - RNA, 19 nt, Artificial Sequence
  Description of Artificial Sequence: Synthetic oligonucleotide
cacagcaauggagaguuuc

SEQ ID NO: 2895872 - RNA, 19 nt, Artificial Sequence
  Description of Artificial Sequence: Synthetic oligonucleotide
agaagaacaaguagccaaa

SEQ ID NO: 2895873 - RNA, 19 nt, Artificial Sequence
  Description of Artificial Sequence: Synthetic oligonucleotide
cagccaauccaaaacgaga

SEQ ID NO: 2895874 - RNA, 19 nt, Artificial Sequence
  Description of Artificial Sequence: Synthetic oligonucleotide
gugaaaggguuacugucca

SEQ ID NO: 2895875 - RNA, 19 nt, Artificial Sequence
  Description of Artificial Sequence: Synthetic oligonucleotide
agccaauccaaaacgagau

SEQ ID NO: 2895876 - RNA, 19 nt, Artificial Sequence
  Description of Artificial Sequence: Synthetic oligonucleotide
cugggacacaaggucaggg

SEQ ID NO: 2895877 - RNA, 19 nt, Artificial Sequence
  Description of Artificial Sequence: Synthetic oligonucleotide
cagcaauggagaguuuccg

SEQ ID NO: 2895878 - RNA, 19 nt, Artificial Sequence
  Description of Artificial Sequence: Synthetic oligonucleotide
caauccaaaacgagaucca

SEQ ID NO: 2895879 - RNA, 19 nt, Artificial Sequence
  Description of Artificial Sequence: Synthetic oligonucleotide
acucgguggcaaugucacc

SEQ ID NO: 2895880 - RNA, 19 nt, Artificial Sequence
  Description of Artificial Sequence: Synthetic oligonucleotide
aaguugguucuaauuugga

SEQ ID NO: 2895881 - RNA, 19 nt, Artificial Sequence
  Description of Artificial Sequence: Synthetic oligonucleotide
gguucacagcaauggagag

SEQ ID NO: 2895882 - RNA, 19 nt, Artificial Sequence
  Description of Artificial Sequence: Synthetic oligonucleotide
aagagagcuggcaguguug

SEQ ID NO: 2895883 - RNA, 19 nt, Artificial Sequence
  Description of Artificial Sequence: Synthetic oligonucleotide
ucugcaccaggaccuggca

SEQ ID NO: 2895884 - RNA, 19 nt, Artificial Sequence
  Description of Artificial Sequence: Synthetic oligonucleotide
aggggucaggguuggguag

SEQ ID NO: 2895885 - RNA, 19 nt, Artificial Sequence
  Description of Artificial Sequence: Synthetic oligonucleotide
cucaggcugcuccaugaag

SEQ ID NO: 2895886 - RNA, 19 nt, Artificial Sequence
  Description of Artificial Sequence: Synthetic oligonucleotide
gcuccaugaagccuugagc

SEQ ID NO: 2895887 - RNA, 19 nt, Artificial Sequence
  Description of Artificial Sequence: Synthetic oligonucleotide
ucugggacacaaggucagg

SEQ ID NO: 2895888 - RNA, 19 nt, Artificial Sequence
  Description of Artificial Sequence: Synthetic oligonucleotide
uuggguagucaguccucag

SEQ ID NO: 2895889 - RNA, 19 nt, Artificial Sequence
  Description of Artificial Sequence: Synthetic oligonucleotide
gucagggugcagcucacac

SEQ ID NO: 2895890 - RNA, 19 nt, Artificial Sequence
  Description of Artificial Sequence: Synthetic oligonucleotide
gaccucguuccaucaauga

SEQ ID NO: 2895891 - RNA, 19 nt, Artificial Sequence
  Description of Artificial Sequence: Synthetic oligonucleotide
agagagcuggcaguguuga

SEQ ID NO: 2895892 - RNA, 19 nt, Artificial Sequence
  Description of Artificial Sequence: Synthetic oligonucleotide
uccagcucugcaccaggac

SEQ ID NO: 2895893 - RNA, 19 nt, Artificial Sequence
  Description of Artificial Sequence: Synthetic oligonucleotide
gggacacaaggucagggug

SEQ ID NO: 2895894 - RNA, 19 nt, Artificial Sequence
  Description of Artificial Sequence: Synthetic oligonucleotide
gcaauggagaguuuccgga

SEQ ID NO: 2895895 - RNA, 19 nt, Artificial Sequence
  Description of Artificial Sequence: Synthetic oligonucleotide
gugcggggcacacauagca

SEQ ID NO: 2895896 - RNA, 19 nt, Artificial Sequence
  Description of Artificial Sequence: Synthetic oligonucleotide
agucugggacacaagguca

SEQ ID NO: 2895897 - RNA, 19 nt, Artificial Sequence
  Description of Artificial Sequence: Synthetic oligonucleotide
guaggccugaguccaggug

SEQ ID NO: 2895898 - RNA, 19 nt, Artificial Sequence
  Description of Artificial Sequence: Synthetic oligonucleotide
ugccuggaacacacccagg

SEQ ID NO: 2895899 - RNA, 19 nt, Artificial Sequence
  Description of Artificial Sequence: Synthetic oligonucleotide
acacacccaggguaggccu

SEQ ID NO: 2895900 - RNA, 19 nt, Artificial Sequence
  Description of Artificial Sequence: Synthetic oligonucleotide
gaccauugauagaaagguc

SEQ ID NO: 2895901 - RNA, 19 nt, Artificial Sequence
  Description of Artificial Sequence: Synthetic oligonucleotide
cugaguccagguggcaugg

SEQ ID NO: 2895902 - RNA, 19 nt, Artificial Sequence
  Description of Artificial Sequence: Synthetic oligonucleotide
gaacucgguggcaauguca

SEQ ID NO: 2895903 - RNA, 19 nt, Artificial Sequence
  Description of Artificial Sequence: Synthetic oligonucleotide
agguggcauggccuccagc

SEQ ID NO: 2895904 - RNA, 19 nt, Artificial Sequence
  Description of Artificial Sequence: Synthetic oligonucleotide
cuggaacacacccagggua

SEQ ID NO: 2895905 - RNA, 19 nt, Artificial Sequence
  Description of Artificial Sequence: Synthetic oligonucleotide
gcggggcacacauagcagg

SEQ ID NO: 2895906 - RNA, 19 nt, Artificial Sequence
  Description of Artificial Sequence: Synthetic oligonucleotide
acuggcuggucaguucuag

SEQ ID NO: 2895907 - RNA, 19 nt, Artificial Sequence
  Description of Artificial Sequence: Synthetic oligonucleotide
ucgguggcaaugucaccca

SEQ ID NO: 2895908 - RNA, 19 nt, Artificial Sequence
  Description of Artificial Sequence: Synthetic oligonucleotide
gacggcucgagaccauuga

SEQ ID NO: 2895909 - RNA, 19 nt, Artificial Sequence
  Description of Artificial Sequence: Synthetic oligonucleotide
agcucacacuggcugguca

SEQ ID NO: 2895910 - RNA, 19 nt, Artificial Sequence
  Description of Artificial Sequence: Synthetic oligonucleotide
ccaugaagccuugagcagg

SEQ ID NO: 2895911 - RNA, 19 nt, Artificial Sequence
  Description of Artificial Sequence: Synthetic oligonucleotide
gaagaacaaguagccaaaa

SEQ ID NO: 2895912 - RNA, 19 nt, Artificial Sequence
  Description of Artificial Sequence: Synthetic oligonucleotide
ggcuggucaguucuagagc

SEQ ID NO: 2895913 - RNA, 19 nt, Artificial Sequence
  Description of Artificial Sequence: Synthetic oligonucleotide
ucgagaccauugauagaaa

SEQ ID NO: 2895914 - RNA, 19 nt, Artificial Sequence
  Description of Artificial Sequence: Synthetic oligonucleotide
ccagcucugcaccaggacc

SEQ ID NO: 2895915 - RNA, 19 nt, Artificial Sequence
  Description of Artificial Sequence: Synthetic oligonucleotide
caggguuggguagucaguc

SEQ ID NO: 2895916 - RNA, 19 nt, Artificial Sequence
  Description of Artificial Sequence: Synthetic oligonucleotide
ggacacaaggucagggugc

SEQ ID NO: 2895917 - RNA, 19 nt, Artificial Sequence
  Description of Artificial Sequence: Synthetic oligonucleotide
uggagcugagcagggguca

SEQ ID NO: 2895918 - RNA, 19 nt, Artificial Sequence
  Description of Artificial Sequence: Synthetic oligonucleotide
caauggagaguuuccggaa

SEQ ID NO: 2895919 - RNA, 19 nt, Artificial Sequence
  Description of Artificial Sequence: Synthetic oligonucleotide
ggaccuggcagcucugccc

SEQ ID NO: 2895920 - RNA, 19 nt, Artificial Sequence
  Description of Artificial Sequence: Synthetic oligonucleotide
gacacaaggucagggugca

SEQ ID NO: 2895921 - RNA, 19 nt, Artificial Sequence
  Description of Artificial Sequence: Synthetic oligonucleotide
aguugagaagagaugcauu

SEQ ID NO: 2895922 - RNA, 19 nt, Artificial Sequence
  Description of Artificial Sequence: Synthetic oligonucleotide
uggagaguuuccggaagaa

SEQ ID NO: 2895923 - RNA, 19 nt, Artificial Sequence
  Description of Artificial Sequence: Synthetic oligonucleotide
aggccugaguccagguggc

SEQ ID NO: 2895924 - RNA, 19 nt, Artificial Sequence
  Description of Artificial Sequence: Synthetic oligonucleotide
guucuaauuuggacggcuc

SEQ ID NO: 2895925 - RNA, 19 nt, Artificial Sequence
  Description of Artificial Sequence: Synthetic oligonucleotide
augcauuggagaagaagaa

SEQ ID NO: 2895926 - RNA, 19 nt, Artificial Sequence
  Description of Artificial Sequence: Synthetic oligonucleotide
cuggucaguucuagagcug

SEQ ID NO: 2895927 - RNA, 19 nt, Artificial Sequence
  Description of Artificial Sequence: Synthetic oligonucleotide
ugaggagaugguggagcug

SEQ ID NO: 2895928 - RNA, 19 nt, Artificial Sequence
  Description of Artificial Sequence: Synthetic oligonucleotide
aguccagguggcauggccu

SEQ ID NO: 2895929 - RNA, 19 nt, Artificial Sequence
  Description of Artificial Sequence: Synthetic oligonucleotide
uuccaucaaugaguugaga

SEQ ID NO: 2895930 - RNA, 19 nt, Artificial Sequence
  Description of Artificial Sequence: Synthetic oligonucleotide
agauccaaguugguucuaa

SEQ ID NO: 2895931 - RNA, 19 nt, Artificial Sequence
  Description of Artificial Sequence: Synthetic oligonucleotide
cauagcagguucacagcaa

SEQ ID NO: 2895932 - RNA, 19 nt, Artificial Sequence
  Description of Artificial Sequence: Synthetic oligonucleotide
gguggcauggccuccagcu

SEQ ID NO: 2895933 - RNA, 19 nt, Artificial Sequence
  Description of Artificial Sequence: Synthetic oligonucleotide
cgagaccauugauagaaag

SEQ ID NO: 2895934 - RNA, 19 nt, Artificial Sequence
  Description of Artificial Sequence: Synthetic oligonucleotide
gccuugagcagggaggugc

SEQ ID NO: 2895935 - RNA, 19 nt, Artificial Sequence
  Description of Artificial Sequence: Synthetic oligonucleotide
ugguggagcugagcagggg

SEQ ID NO: 2895936 - RNA, 19 nt, Artificial Sequence
  Description of Artificial Sequence: Synthetic oligonucleotide
guuggguagucaguccuca

SEQ ID NO: 2895937 - RNA, 19 nt, Artificial Sequence
  Description of Artificial Sequence: Synthetic oligonucleotide
cacacuggcuggucaguuc

SEQ ID NO: 2895938 - RNA, 19 nt, Artificial Sequence
  Description of Artificial Sequence: Synthetic oligonucleotide
ugguucuaauuuggacggc

SEQ ID NO: 2895939 - RNA, 19 nt, Artificial Sequence
  Description of Artificial Sequence: Synthetic oligonucleotide
aaacgagauccaaguuggu

SEQ ID NO: 2895940 - RNA, 19 nt, Artificial Sequence
  Description of Artificial Sequence: Synthetic oligonucleotide
gaguugagaagagaugcau

SEQ ID NO: 2895941 - RNA, 19 nt, Artificial Sequence
  Description of Artificial Sequence: Synthetic oligonucleotide
gcuggucaguucuagagcu

SEQ ID NO: 2895942 - RNA, 19 nt, Artificial Sequence
  Description of Artificial Sequence: Synthetic oligonucleotide
gcucacacuggcuggucag

SEQ ID NO: 2895943 - RNA, 19 nt, Artificial Sequence
  Description of Artificial Sequence: Synthetic oligonucleotide
cuagagcugccuggaacac

SEQ ID NO: 2895944 - RNA, 19 nt, Artificial Sequence
  Description of Artificial Sequence: Synthetic oligonucleotide
acggcucgagaccauugau

SEQ ID NO: 2895945 - RNA, 19 nt, Artificial Sequence
  Description of Artificial Sequence: Synthetic oligonucleotide
agcagggaggugcggggca

SEQ ID NO: 2895946 - RNA, 19 nt, Artificial Sequence
  Description of Artificial Sequence: Synthetic oligonucleotide
gggcacacauagcagguuc

SEQ ID NO: 2895947 - RNA, 19 nt, Artificial Sequence
  Description of Artificial Sequence: Synthetic oligonucleotide
ccaggguaggccugagucc

SEQ ID NO: 2895948 - RNA, 19 nt, Artificial Sequence
  Description of Artificial Sequence: Synthetic oligonucleotide
ucguuccaucaaugaguug

SEQ ID NO: 2895949 - RNA, 19 nt, Artificial Sequence
  Description of Artificial Sequence: Synthetic oligonucleotide
caggguaggccugagucca

SEQ ID NO: 2895950 - RNA, 19 nt, Artificial Sequence
  Description of Artificial Sequence: Synthetic oligonucleotide
gagcugagcaggggucagg

SEQ ID NO: 2895951 - RNA, 19 nt, Artificial Sequence
  Description of Artificial Sequence: Synthetic oligonucleotide
cuugagcagggaggugcgg

SEQ ID NO: 2895952 - RNA, 19 nt, Artificial Sequence
  Description of Artificial Sequence: Synthetic oligonucleotide
ccuugagcagggaggugcg

SEQ ID NO: 2895953 - RNA, 19 nt, Artificial Sequence
  Description of Artificial Sequence: Synthetic oligonucleotide
ggagaguuuccggaagaac

SEQ ID NO: 2895954 - RNA, 19 nt, Artificial Sequence
  Description of Artificial Sequence: Synthetic oligonucleotide
guccagguggcauggccuc

SEQ ID NO: 2895955 - RNA, 19 nt, Artificial Sequence
  Description of Artificial Sequence: Synthetic oligonucleotide
gagcaggggucaggguugg

SEQ ID NO: 2895956 - RNA, 19 nt, Artificial Sequence
  Description of Artificial Sequence: Synthetic oligonucleotide
ccugaguccagguggcaug

SEQ ID NO: 2895957 - RNA, 19 nt, Artificial Sequence
  Description of Artificial Sequence: Synthetic oligonucleotide
agcucugccccagcgguga

SEQ ID NO: 2895958 - RNA, 19 nt, Artificial Sequence
  Description of Artificial Sequence: Synthetic oligonucleotide
gauccaaguugguucuaau

SEQ ID NO: 2895959 - RNA, 19 nt, Artificial Sequence
  Description of Artificial Sequence: Synthetic oligonucleotide
gucggccuugaccucguuc

SEQ ID NO: 2895960 - RNA, 19 nt, Artificial Sequence
  Description of Artificial Sequence: Synthetic oligonucleotide
agggaggugcggggcacac

SEQ ID NO: 2895961 - RNA, 19 nt, Artificial Sequence
  Description of Artificial Sequence: Synthetic oligonucleotide
gguggcaaugucacccagc

SEQ ID NO: 2895962 - RNA, 19 nt, Artificial Sequence
  Description of Artificial Sequence: Synthetic oligonucleotide
gcagguucacagcaaugga

SEQ ID NO: 2895963 - RNA, 19 nt, Artificial Sequence
  Description of Artificial Sequence: Synthetic oligonucleotide
cucguuccaucaaugaguu

SEQ ID NO: 2895964 - RNA, 19 nt, Artificial Sequence
  Description of Artificial Sequence: Synthetic oligonucleotide
ucacacuggcuggucaguu

SEQ ID NO: 2895965 - RNA, 19 nt, Artificial Sequence
  Description of Artificial Sequence: Synthetic oligonucleotide
guccaagagagcuggcagu

SEQ ID NO: 2895966 - RNA, 19 nt, Artificial Sequence
  Description of Artificial Sequence: Synthetic oligonucleotide
uccagguggcauggccucc

SEQ ID NO: 2895967 - RNA, 19 nt, Artificial Sequence
  Description of Artificial Sequence: Synthetic oligonucleotide
gagcagggaggugcggggc

SEQ ID NO: 2895968 - RNA, 19 nt, Artificial Sequence
  Description of Artificial Sequence: Synthetic oligonucleotide
cggugaaaggguuacuguc

SEQ ID NO: 2895969 - RNA, 19 nt, Artificial Sequence
  Description of Artificial Sequence: Synthetic oligonucleotide
cuugaccucguuccaucaa

SEQ ID NO: 2895970 - RNA, 19 nt, Artificial Sequence
  Description of Artificial Sequence: Synthetic oligonucleotide
cagcucugcaccaggaccu

SEQ ID NO: 2895971 - RNA, 19 nt, Artificial Sequence
  Description of Artificial Sequence: Synthetic oligonucleotide
ccucguuccaucaaugagu

SEQ ID NO: 2895972 - RNA, 19 nt, Artificial Sequence
  Description of Artificial Sequence: Synthetic oligonucleotide
cacacauagcagguucaca

SEQ ID NO: 2895973 - RNA, 19 nt, Artificial Sequence
  Description of Artificial Sequence: Synthetic oligonucleotide
caaugucacccagcccagc

SEQ ID NO: 2895974 - RNA, 19 nt, Artificial Sequence
  Description of Artificial Sequence: Synthetic oligonucleotide
guggcauggccuccagcuc

SEQ ID NO: 2895975 - RNA, 19 nt, Artificial Sequence
  Description of Artificial Sequence: Synthetic oligonucleotide
guucacagcaauggagagu

SEQ ID NO: 2895976 - RNA, 19 nt, Artificial Sequence
  Description of Artificial Sequence: Synthetic oligonucleotide
guggagcugagcagggguc

SEQ ID NO: 2895977 - RNA, 19 nt, Artificial Sequence
  Description of Artificial Sequence: Synthetic oligonucleotide
gguuacuguccaagagagc

SEQ ID NO: 2895978 - RNA, 19 nt, Artificial Sequence
  Description of Artificial Sequence: Synthetic oligonucleotide
cuggcuggucaguucuaga

SEQ ID NO: 2895979 - RNA, 19 nt, Artificial Sequence
  Description of Artificial Sequence: Synthetic oligonucleotide
gguucuaauuuggacggcu

SEQ ID NO: 2895980 - RNA, 19 nt, Artificial Sequence
  Description of Artificial Sequence: Synthetic oligonucleotide
gguggagcugagcaggggu

SEQ ID NO: 2895981 - RNA, 19 nt, Artificial Sequence
  Description of Artificial Sequence: Synthetic oligonucleotide
caggaccuggcagcucugc

SEQ ID NO: 2895982 - RNA, 19 nt, Artificial Sequence
  Description of Artificial Sequence: Synthetic oligonucleotide
caggggucaggguugggua

SEQ ID NO: 2895983 - RNA, 19 nt, Artificial Sequence
  Description of Artificial Sequence: Synthetic oligonucleotide
agucaguccucaggcugcu

SEQ ID NO: 2895984 - RNA, 19 nt, Artificial Sequence
  Description of Artificial Sequence: Synthetic oligonucleotide
cugccccagcggugaaagg

SEQ ID NO: 2895985 - RNA, 19 nt, Artificial Sequence
  Description of Artificial Sequence: Synthetic oligonucleotide
guucuagagcugccuggaa

SEQ ID NO: 2895986 - RNA, 19 nt, Artificial Sequence
  Description of Artificial Sequence: Synthetic oligonucleotide
gucaguucuagagcugccu

SEQ ID NO: 2895987 - RNA, 19 nt, Artificial Sequence
  Description of Artificial Sequence: Synthetic oligonucleotide
ccaaaagucugggacacaa

SEQ ID NO: 2895988 - RNA, 19 nt, Artificial Sequence
  Description of Artificial Sequence: Synthetic oligonucleotide
caguccucaggcugcucca

SEQ ID NO: 2895989 - RNA, 19 nt, Artificial Sequence
  Description of Artificial Sequence: Synthetic oligonucleotide
ccagcggugaaaggguuac

SEQ ID NO: 2895990 - RNA, 19 nt, Artificial Sequence
  Description of Artificial Sequence: Synthetic oligonucleotide
uuggacggcucgagaccau

SEQ ID NO: 2895991 - RNA, 19 nt, Artificial Sequence
  Description of Artificial Sequence: Synthetic oligonucleotide
cuccagcucugcaccagga

SEQ ID NO: 2895992 - RNA, 19 nt, Artificial Sequence
  Description of Artificial Sequence: Synthetic oligonucleotide
ggucaguucuagagcugcc

SEQ ID NO: 2895993 - RNA, 19 nt, Artificial Sequence
  Description of Artificial Sequence: Synthetic oligonucleotide
ggguuggguagucaguccu

SEQ ID NO: 2895994 - RNA, 19 nt, Artificial Sequence
  Description of Artificial Sequence: Synthetic oligonucleotide
gccuugaccucguuccauc

SEQ ID NO: 2895995 - RNA, 19 nt, Artificial Sequence
  Description of Artificial Sequence: Synthetic oligonucleotide
ggguaggccugaguccagg

SEQ ID NO: 2895996 - RNA, 19 nt, Artificial Sequence
  Description of Artificial Sequence: Synthetic oligonucleotide
gagagcuggcaguguugaa

SEQ ID NO: 2895997 - RNA, 19 nt, Artificial Sequence
  Description of Artificial Sequence: Synthetic oligonucleotide
caagagagcuggcaguguu

SEQ ID NO: 2895998 - RNA, 19 nt, Artificial Sequence
  Description of Artificial Sequence: Synthetic oligonucleotide
agcucugcaccaggaccug

SEQ ID NO: 2895999 - RNA, 19 nt, Artificial Sequence
  Description of Artificial Sequence: Synthetic oligonucleotide
acccaggguaggccugagu

SEQ ID NO: 2896000 - RNA, 19 nt, Artificial Sequence
  Description of Artificial Sequence: Synthetic oligonucleotide
cagcucugccccagcggug

SEQ ID NO: 2896001 - RNA, 19 nt, Artificial Sequence
  Description of Artificial Sequence: Synthetic oligonucleotide
ucacagcaauggagaguuu

SEQ ID NO: 2896002 - RNA, 19 nt, Artificial Sequence
  Description of Artificial Sequence: Synthetic oligonucleotide
guuuccggaagaacucggu

SEQ ID NO: 2896003 - RNA, 19 nt, Artificial Sequence
  Description of Artificial Sequence: Synthetic oligonucleotide
acacccaggguaggccuga

SEQ ID NO: 2896004 - RNA, 19 nt, Artificial Sequence
  Description of Artificial Sequence: Synthetic oligonucleotide
ggaggugcggggcacacau

SEQ ID NO: 2896005 - RNA, 19 nt, Artificial Sequence
  Description of Artificial Sequence: Synthetic oligonucleotide
gguagucaguccucaggcu

SEQ ID NO: 2896006 - RNA, 19 nt, Artificial Sequence
  Description of Artificial Sequence: Synthetic oligonucleotide
gcacacauagcagguucac

SEQ ID NO: 2896007 - RNA, 19 nt, Artificial Sequence
  Description of Artificial Sequence: Synthetic oligonucleotide
uggacggcucgagaccauu

SEQ ID NO: 2896008 - RNA, 19 nt, Artificial Sequence
  Description of Artificial Sequence: Synthetic oligonucleotide
ggagcugagcaggggucag

SEQ ID NO: 2896009 - RNA, 19 nt, Artificial Sequence
  Description of Artificial Sequence: Synthetic oligonucleotide
cagguggcauggccuccag

SEQ ID NO: 2896010 - RNA, 19 nt, Artificial Sequence
  Description of Artificial Sequence: Synthetic oligonucleotide
acacaaggucagggugcag

SEQ ID NO: 2896011 - RNA, 19 nt, Artificial Sequence
  Description of Artificial Sequence: Synthetic oligonucleotide
gguuggguagucaguccuc

SEQ ID NO: 2896012 - RNA, 19 nt, Artificial Sequence
  Description of Artificial Sequence: Synthetic oligonucleotide
ggacggcucgagaccauug

SEQ ID NO: 2896013 - RNA, 19 nt, Artificial Sequence
  Description of Artificial Sequence: Synthetic oligonucleotide
gcagcucugccccagcggu

SEQ ID NO: 2896014 - RNA, 19 nt, Artificial Sequence
  Description of Artificial Sequence: Synthetic oligonucleotide
gagaugcauuggagaagaa

SEQ ID NO: 2896015 - RNA, 19 nt, Artificial Sequence
  Description of Artificial Sequence: Synthetic oligonucleotide
gagcugccuggaacacacc

SEQ ID NO: 2896016 - RNA, 19 nt, Artificial Sequence
  Description of Artificial Sequence: Synthetic oligonucleotide
gcucgagaccauugauaga

SEQ ID NO: 2896017 - RNA, 19 nt, Artificial Sequence
  Description of Artificial Sequence: Synthetic oligonucleotide
gcggugaaaggguuacugu

SEQ ID NO: 2896018 - RNA, 19 nt, Artificial Sequence
  Description of Artificial Sequence: Synthetic oligonucleotide
augaagccuugagcaggga

SEQ ID NO: 2896019 - RNA, 19 nt, Artificial Sequence
  Description of Artificial Sequence: Synthetic oligonucleotide
agccuugagcagggaggug

SEQ ID NO: 2896020 - RNA, 19 nt, Artificial Sequence
  Description of Artificial Sequence: Synthetic oligonucleotide
aggguaggccugaguccag

SEQ ID NO: 2896021 - RNA, 19 nt, Artificial Sequence
  Description of Artificial Sequence: Synthetic oligonucleotide
ggugcggggcacacauagc

SEQ ID NO: 2896022 - RNA, 19 nt, Artificial Sequence
  Description of Artificial Sequence: Synthetic oligonucleotide
ccuugaccucguuccauca

SEQ ID NO: 2896023 - RNA, 19 nt, Artificial Sequence
  Description of Artificial Sequence: Synthetic oligonucleotide
agcaggggucaggguuggg

SEQ ID NO: 2896024 - RNA, 19 nt, Artificial Sequence
  Description of Artificial Sequence: Synthetic oligonucleotide
gcucugcaccaggaccugg

SEQ ID NO: 2896025 - RNA, 19 nt, Artificial Sequence
  Description of Artificial Sequence: Synthetic oligonucleotide
gagauccaaguugguucua

SEQ ID NO: 2896026 - RNA, 19 nt, Artificial Sequence
  Description of Artificial Sequence: Synthetic oligonucleotide
ggaagaacucgguggcaau

SEQ ID NO: 2896027 - RNA, 19 nt, Artificial Sequence
  Description of Artificial Sequence: Synthetic oligonucleotide
gguaggccugaguccaggu

SEQ ID NO: 2896028 - RNA, 19 nt, Artificial Sequence
  Description of Artificial Sequence: Synthetic oligonucleotide
gccuccagcucugcaccag

SEQ ID NO: 2896029 - RNA, 19 nt, Artificial Sequence
  Description of Artificial Sequence: Synthetic oligonucleotide
cgagauccaaguugguucu

SEQ ID NO: 2896030 - RNA, 19 nt, Artificial Sequence
  Description of Artificial Sequence: Synthetic oligonucleotide
cccugcagccaauccaaaa

SEQ ID NO: 2896031 - RNA, 19 nt, Artificial Sequence
  Description of Artificial Sequence: Synthetic oligonucleotide
aggucggccuugaccucgu

SEQ ID NO: 2896032 - RNA, 19 nt, Artificial Sequence
  Description of Artificial Sequence: Synthetic oligonucleotide
cucacacuggcuggucagu

SEQ ID NO: 2896033 - RNA, 19 nt, Artificial Sequence
  Description of Artificial Sequence: Synthetic oligonucleotide
gcaggggucaggguugggu

SEQ ID NO: 2896034 - RNA, 19 nt, Artificial Sequence
  Description of Artificial Sequence: Synthetic oligonucleotide
gcagggaggugcggggcac

SEQ ID NO: 2896035 - RNA, 19 nt, Artificial Sequence
  Description of Artificial Sequence: Synthetic oligonucleotide
gucaguccucaggcugcuc

SEQ ID NO: 2896036 - RNA, 19 nt, Artificial Sequence
  Description of Artificial Sequence: Synthetic oligonucleotide
ccuggaacacacccagggu

SEQ ID NO: 2896037 - RNA, 19 nt, Artificial Sequence
  Description of Artificial Sequence: Synthetic oligonucleotide
ccaggaccuggcagcucug

SEQ ID NO: 2896038 - RNA, 19 nt, Artificial Sequence
  Description of Artificial Sequence: Synthetic oligonucleotide
caccaggaccuggcagcuc

SEQ ID NO: 2896039 - RNA, 19 nt, Artificial Sequence
  Description of Artificial Sequence: Synthetic oligonucleotide
ccaaaacgagauccaaguu

SEQ ID NO: 2896040 - RNA, 19 nt, Artificial Sequence
  Description of Artificial Sequence: Synthetic oligonucleotide
ggucagggugcagcucaca

SEQ ID NO: 2896041 - RNA, 19 nt, Artificial Sequence
  Description of Artificial Sequence: Synthetic oligonucleotide
gccaaaagucugggacaca

SEQ ID NO: 2896042 - RNA, 19 nt, Artificial Sequence
  Description of Artificial Sequence: Synthetic oligonucleotide
gggucaggguuggguaguc

SEQ ID NO: 2896043 - RNA, 19 nt, Artificial Sequence
  Description of Artificial Sequence: Synthetic oligonucleotide
cggcucgagaccauugaua

SEQ ID NO: 2896044 - RNA, 19 nt, Artificial Sequence
  Description of Artificial Sequence: Synthetic oligonucleotide
cggaagaacucgguggcaa

SEQ ID NO: 2896045 - RNA, 19 nt, Artificial Sequence
  Description of Artificial Sequence: Synthetic oligonucleotide
gaggugcggggcacacaua

SEQ ID NO: 2896046 - RNA, 19 nt, Artificial Sequence
  Description of Artificial Sequence: Synthetic oligonucleotide
cucugccccagcggugaaa

SEQ ID NO: 2896047 - RNA, 19 nt, Artificial Sequence
  Description of Artificial Sequence: Synthetic oligonucleotide
cagggaggugcggggcaca

SEQ ID NO: 2896048 - RNA, 19 nt, Artificial Sequence
  Description of Artificial Sequence: Synthetic oligonucleotide
gcagcucacacuggcuggu

SEQ ID NO: 2896049 - RNA, 19 nt, Artificial Sequence
  Description of Artificial Sequence: Synthetic oligonucleotide
cugcuccaugaagccuuga

SEQ ID NO: 2896050 - RNA, 19 nt, Artificial Sequence
  Description of Artificial Sequence: Synthetic oligonucleotide
ggggucaggguuggguagu

SEQ ID NO: 2896051 - RNA, 19 nt, Artificial Sequence
  Description of Artificial Sequence: Synthetic oligonucleotide
cccagcggugaaaggguua

SEQ ID NO: 2896052 - RNA, 19 nt, Artificial Sequence
  Description of Artificial Sequence: Synthetic oligonucleotide
ccagguggcauggccucca

SEQ ID NO: 2896053 - RNA, 19 nt, Artificial Sequence
  Description of Artificial Sequence: Synthetic oligonucleotide
gccccagcggugaaagggu

SEQ ID NO: 2896054 - RNA, 19 nt, Artificial Sequence
  Description of Artificial Sequence: Synthetic oligonucleotide
gggaggugcggggcacaca

SEQ ID NO: 2896055 - RNA, 19 nt, Artificial Sequence
  Description of Artificial Sequence: Synthetic oligonucleotide
gcaccaggaccuggcagcu

SEQ ID NO: 2896056 - RNA, 19 nt, Artificial Sequence
  Description of Artificial Sequence: Synthetic oligonucleotide
gccugaguccagguggcau

SEQ ID NO: 2896057 - RNA, 19 nt, Artificial Sequence
  Description of Artificial Sequence: Synthetic oligonucleotide
ggccugaguccagguggca

SEQ ID NO: 2896058 - RNA, 19 nt, Artificial Sequence
  Description of Artificial Sequence: Synthetic oligonucleotide
ccggaagaacucgguggca

SEQ ID NO: 2896059 - RNA, 19 nt, Artificial Sequence
  Description of Artificial Sequence: Synthetic oligonucleotide
ggccuugaccucguuccau

SEQ ID NO: 2896060 - RNA, 19 nt, Artificial Sequence
  Description of Artificial Sequence: Synthetic oligonucleotide
cggggcacacauagcaggu

SEQ ID NO: 2896061 - RNA, 19 nt, Artificial Sequence
  Description of Artificial Sequence: Synthetic oligonucleotide
cagcggugaaaggguuacu

SEQ ID NO: 2896062 - RNA, 19 nt, Artificial Sequence
  Description of Artificial Sequence: Synthetic oligonucleotide
ccaagagagcuggcagugu

SEQ ID NO: 2896063 - RNA, 19 nt, Artificial Sequence
  Description of Artificial Sequence: Synthetic oligonucleotide
ggggcacacauagcagguu

SEQ ID NO: 2896064 - RNA, 19 nt, Artificial Sequence
  Description of Artificial Sequence: Synthetic oligonucleotide
gcucugccccagcggugaa

SEQ ID NO: 2896065 - RNA, 19 nt, Artificial Sequence
  Description of Artificial Sequence: Synthetic oligonucleotide
ccccugcagccaauccaaa

SEQ ID NO: 2896066 - RNA, 19 nt, Artificial Sequence
  Description of Artificial Sequence: Synthetic oligonucleotide
cggccuugaccucguucca

SEQ ID NO: 2896067 - RNA, 19 nt, Artificial Sequence
  Description of Artificial Sequence: Synthetic oligonucleotide
ccccagcggugaaaggguu

SEQ ID NO: 2896068 - RNA, 19 nt, Artificial Sequence
  Description of Artificial Sequence: Synthetic oligonucleotide
ggucggccuugaccucguu

SEQ ID NO: 2896069 - RNA, 19 nt, Artificial Sequence
  Description of Artificial Sequence: Synthetic oligonucleotide
ucuagaaacacuaaugccc

SEQ ID NO: 2896070 - RNA, 19 nt, Artificial Sequence
  Description of Artificial Sequence: Synthetic oligonucleotide
aagguuucuagcaagaaac

SEQ ID NO: 2896071 - RNA, 19 nt, Artificial Sequence
  Description of Artificial Sequence: Synthetic oligonucleotide
agagcuucuuuucauaugc

SEQ ID NO: 2896072 - RNA, 19 nt, Artificial Sequence
  Description of Artificial Sequence: Synthetic oligonucleotide
auaaagacagccucggccc

SEQ ID NO: 2896073 - RNA, 19 nt, Artificial Sequence
  Description of Artificial Sequence: Synthetic oligonucleotide
aauugggauguccacaaac

SEQ ID NO: 2896074 - RNA, 19 nt, Artificial Sequence
  Description of Artificial Sequence: Synthetic oligonucleotide
uuuguucucaucaaggaug

SEQ ID NO: 2896075 - RNA, 19 nt, Artificial Sequence
  Description of Artificial Sequence: Synthetic oligonucleotide
uugauuguaacuuuguucu

SEQ ID NO: 2896076 - RNA, 19 nt, Artificial Sequence
  Description of Artificial Sequence: Synthetic oligonucleotide
guaaccuucauguauaaag

SEQ ID NO: 2896077 - RNA, 19 nt, Artificial Sequence
  Description of Artificial Sequence: Synthetic oligonucleotide
uuguucuugaguuugauca

SEQ ID NO: 2896078 - RNA, 19 nt, Artificial Sequence
  Description of Artificial Sequence: Synthetic oligonucleotide
auugauuguaacuuuguuc

SEQ ID NO: 2896079 - RNA, 19 nt, Artificial Sequence
  Description of Artificial Sequence: Synthetic oligonucleotide
uugauggucaacaauuggg

SEQ ID NO: 2896080 - RNA, 19 nt, Artificial Sequence
  Description of Artificial Sequence: Synthetic oligonucleotide
augauuguaaccuucaugu

SEQ ID NO: 2896081 - RNA, 19 nt, Artificial Sequence
  Description of Artificial Sequence: Synthetic oligonucleotide
uauaaagacagccucggcc

SEQ ID NO: 2896082 - RNA, 19 nt, Artificial Sequence
  Description of Artificial Sequence: Synthetic oligonucleotide
ugucuagaaacacuaaugc

SEQ ID NO: 2896083 - RNA, 19 nt, Artificial Sequence
  Description of Artificial Sequence: Synthetic oligonucleotide
aaaaccggcaccaugauug

SEQ ID NO: 2896084 - RNA, 19 nt, Artificial Sequence
  Description of Artificial Sequence: Synthetic oligonucleotide
aaccuucauguauaaagac

SEQ ID NO: 2896085 - RNA, 19 nt, Artificial Sequence
  Description of Artificial Sequence: Synthetic oligonucleotide
uuucauaugcagaaguaca

SEQ ID NO: 2896086 - RNA, 19 nt, Artificial Sequence
  Description of Artificial Sequence: Synthetic oligonucleotide
uuucuuggcaggcaaacag

SEQ ID NO: 2896087 - RNA, 19 nt, Artificial Sequence
  Description of Artificial Sequence: Synthetic oligonucleotide
uuugauggucaacaauugg

SEQ ID NO: 2896088 - RNA, 19 nt, Artificial Sequence
  Description of Artificial Sequence: Synthetic oligonucleotide
uugucuagaaacacuaaug

SEQ ID NO: 2896089 - RNA, 19 nt, Artificial Sequence
  Description of Artificial Sequence: Synthetic oligonucleotide
aacacuaaugccccuccac

SEQ ID NO: 2896090 - RNA, 19 nt, Artificial Sequence
  Description of Artificial Sequence: Synthetic oligonucleotide
uuugaucagugcuauauca

SEQ ID NO: 2896091 - RNA, 19 nt, Artificial Sequence
  Description of Artificial Sequence: Synthetic oligonucleotide
ucuucuauugauuguaacu

SEQ ID NO: 2896092 - RNA, 19 nt, Artificial Sequence
  Description of Artificial Sequence: Synthetic oligonucleotide
ucuauugauuguaacuuug

SEQ ID NO: 2896093 - RNA, 19 nt, Artificial Sequence
  Description of Artificial Sequence: Synthetic oligonucleotide
cuugccaccaguuucuagg

SEQ ID NO: 2896094 - RNA, 19 nt, Artificial Sequence
  Description of Artificial Sequence: Synthetic oligonucleotide
ucaacaauugggaugucca

SEQ ID NO: 2896095 - RNA, 19 nt, Artificial Sequence
  Description of Artificial Sequence: Synthetic oligonucleotide
ucuuuucauaugcagaagu

SEQ ID NO: 2896096 - RNA, 19 nt, Artificial Sequence
  Description of Artificial Sequence: Synthetic oligonucleotide
uucauguauaaagacagcc

SEQ ID NO: 2896097 - RNA, 19 nt, Artificial Sequence
  Description of Artificial Sequence: Synthetic oligonucleotide
uguaacuuuguucuugagu

SEQ ID NO: 2896098 - RNA, 19 nt, Artificial Sequence
  Description of Artificial Sequence: Synthetic oligonucleotide
cuagaaacacuaaugcccc

SEQ ID NO: 2896099 - RNA, 19 nt, Artificial Sequence
  Description of Artificial Sequence: Synthetic oligonucleotide
ugcuauaucauugucaaaa

SEQ ID NO: 2896100 - RNA, 19 nt, Artificial Sequence
  Description of Artificial Sequence: Synthetic oligonucleotide
uguauaaagacagccucgg

SEQ ID NO: 2896101 - RNA, 19 nt, Artificial Sequence
  Description of Artificial Sequence: Synthetic oligonucleotide
uucucaucaaggaugcugc

SEQ ID NO: 2896102 - RNA, 19 nt, Artificial Sequence
  Description of Artificial Sequence: Synthetic oligonucleotide
uguagucaggugaaagccg

SEQ ID NO: 2896103 - RNA, 19 nt, Artificial Sequence
  Description of Artificial Sequence: Synthetic oligonucleotide
uaaccuucauguauaaaga

SEQ ID NO: 2896104 - RNA, 19 nt, Artificial Sequence
  Description of Artificial Sequence: Synthetic oligonucleotide
aaacgcaagguuucuagca

SEQ ID NO: 2896105 - RNA, 19 nt, Artificial Sequence
  Description of Artificial Sequence: Synthetic oligonucleotide
ucauguauaaagacagccu

SEQ ID NO: 2896106 - RNA, 19 nt, Artificial Sequence
  Description of Artificial Sequence: Synthetic oligonucleotide
uuuugauggucaacaauug

SEQ ID NO: 2896107 - RNA, 19 nt, Artificial Sequence
  Description of Artificial Sequence: Synthetic oligonucleotide
ugauggucaacaauuggga

SEQ ID NO: 2896108 - RNA, 19 nt, Artificial Sequence
  Description of Artificial Sequence: Synthetic oligonucleotide
ucuagcaagaaacccacuc

SEQ ID NO: 2896109 - RNA, 19 nt, Artificial Sequence
  Description of Artificial Sequence: Synthetic oligonucleotide
ucuaggccagcacagagca

SEQ ID NO: 2896110 - RNA, 19 nt, Artificial Sequence
  Description of Artificial Sequence: Synthetic oligonucleotide
agugcuauaucauugucaa

SEQ ID NO: 2896111 - RNA, 19 nt, Artificial Sequence
  Description of Artificial Sequence: Synthetic oligonucleotide
augacucuucuauugauug

SEQ ID NO: 2896112 - RNA, 19 nt, Artificial Sequence
  Description of Artificial Sequence: Synthetic oligonucleotide
uuucuagcaagaaacccac

SEQ ID NO: 2896113 - RNA, 19 nt, Artificial Sequence
  Description of Artificial Sequence: Synthetic oligonucleotide
cauguauaaagacagccuc

SEQ ID NO: 2896114 - RNA, 19 nt, Artificial Sequence
  Description of Artificial Sequence: Synthetic oligonucleotide
acaggaaugacucuucuau

SEQ ID NO: 2896115 - RNA, 19 nt, Artificial Sequence
  Description of Artificial Sequence: Synthetic oligonucleotide
ucauugucuagaaacacua

SEQ ID NO: 2896116 - RNA, 19 nt, Artificial Sequence
  Description of Artificial Sequence: Synthetic oligonucleotide
acaaacgcaagguuucuag

SEQ ID NO: 2896117 - RNA, 19 nt, Artificial Sequence
  Description of Artificial Sequence: Synthetic oligonucleotide
ucaucaaggaugcugcuuc

SEQ ID NO: 2896118 - RNA, 19 nt, Artificial Sequence
  Description of Artificial Sequence: Synthetic oligonucleotide
uuagcaguuacucucccuc

SEQ ID NO: 2896119 - RNA, 19 nt, Artificial Sequence
  Description of Artificial Sequence: Synthetic oligonucleotide
aggaaugacucuucuauug

SEQ ID NO: 2896120 - RNA, 19 nt, Artificial Sequence
  Description of Artificial Sequence: Synthetic oligonucleotide
auaucauugucaaaaccgg

SEQ ID NO: 2896121 - RNA, 19 nt, Artificial Sequence
  Description of Artificial Sequence: Synthetic oligonucleotide
aacuuuguucuugaguuug

SEQ ID NO: 2896122 - RNA, 19 nt, Artificial Sequence
  Description of Artificial Sequence: Synthetic oligonucleotide
uucuuggcaggcaaacagg

SEQ ID NO: 2896123 - RNA, 19 nt, Artificial Sequence
  Description of Artificial Sequence: Synthetic oligonucleotide
uucauugucuagaaacacu

SEQ ID NO: 2896124 - RNA, 19 nt, Artificial Sequence
  Description of Artificial Sequence: Synthetic oligonucleotide
aagaaacccacucuggguu

SEQ ID NO: 2896125 - RNA, 19 nt, Artificial Sequence
  Description of Artificial Sequence: Synthetic oligonucleotide
agagcauguuagcaguuac

SEQ ID NO: 2896126 - RNA, 19 nt, Artificial Sequence
  Description of Artificial Sequence: Synthetic oligonucleotide
uuucuaggccagcacagag

SEQ ID NO: 2896127 - RNA, 19 nt, Artificial Sequence
  Description of Artificial Sequence: Synthetic oligonucleotide
uuuucauaugcagaaguac

SEQ ID NO: 2896128 - RNA, 19 nt, Artificial Sequence
  Description of Artificial Sequence: Synthetic oligonucleotide
uuguucucaucaaggaugc

SEQ ID NO: 2896129 - RNA, 19 nt, Artificial Sequence
  Description of Artificial Sequence: Synthetic oligonucleotide
gaugcugcuucuuuucuug

SEQ ID NO: 2896130 - RNA, 19 nt, Artificial Sequence
  Description of Artificial Sequence: Synthetic oligonucleotide
aucgcuguguuucauuguc

SEQ ID NO: 2896131 - RNA, 19 nt, Artificial Sequence
  Description of Artificial Sequence: Synthetic oligonucleotide
gauguccacaaacgcaagg

SEQ ID NO: 2896132 - RNA, 19 nt, Artificial Sequence
  Description of Artificial Sequence: Synthetic oligonucleotide
auggucaacaauugggaug

SEQ ID NO: 2896133 - RNA, 19 nt, Artificial Sequence
  Description of Artificial Sequence: Synthetic oligonucleotide
ccuucauguauaaagacag

SEQ ID NO: 2896134 - RNA, 19 nt, Artificial Sequence
  Description of Artificial Sequence: Synthetic oligonucleotide
gauuguaacuuuguucuug

SEQ ID NO: 2896135 - RNA, 19 nt, Artificial Sequence
  Description of Artificial Sequence: Synthetic oligonucleotide
auugucuagaaacacuaau

SEQ ID NO: 2896136 - RNA, 19 nt, Artificial Sequence
  Description of Artificial Sequence: Synthetic oligonucleotide
agcauguuagcaguuacuc

SEQ ID NO: 2896137 - RNA, 19 nt, Artificial Sequence
  Description of Artificial Sequence: Synthetic oligonucleotide
auugggauguccacaaacg

SEQ ID NO: 2896138 - RNA, 19 nt, Artificial Sequence
  Description of Artificial Sequence: Synthetic oligonucleotide
caugauuguaaccuucaug

SEQ ID NO: 2896139 - RNA, 19 nt, Artificial Sequence
  Description of Artificial Sequence: Synthetic oligonucleotide
uucauaugcagaaguacau

SEQ ID NO: 2896140 - RNA, 19 nt, Artificial Sequence
  Description of Artificial Sequence: Synthetic oligonucleotide
gucuagaaacacuaaugcc

SEQ ID NO: 2896141 - RNA, 19 nt, Artificial Sequence
  Description of Artificial Sequence: Synthetic oligonucleotide
aaggccauuuguucucauc

SEQ ID NO: 2896142 - RNA, 19 nt, Artificial Sequence
  Description of Artificial Sequence: Synthetic oligonucleotide
agcuucuuuucauaugcag

SEQ ID NO: 2896143 - RNA, 19 nt, Artificial Sequence
  Description of Artificial Sequence: Synthetic oligonucleotide
aaugccccuccacugucac

SEQ ID NO: 2896144 - RNA, 19 nt, Artificial Sequence
  Description of Artificial Sequence: Synthetic oligonucleotide
uugggauguccacaaacgc

SEQ ID NO: 2896145 - RNA, 19 nt, Artificial Sequence
  Description of Artificial Sequence: Synthetic oligonucleotide
ugggauguccacaaacgca

SEQ ID NO: 2896146 - RNA, 19 nt, Artificial Sequence
  Description of Artificial Sequence: Synthetic oligonucleotide
uuggcaggcaaacaggaau

SEQ ID NO: 2896147 - RNA, 19 nt, Artificial Sequence
  Description of Artificial Sequence: Synthetic oligonucleotide
ucuuggcaggcaaacagga

SEQ ID NO: 2896148 - RNA, 19 nt, Artificial Sequence
  Description of Artificial Sequence: Synthetic oligonucleotide
auuguaacuuuguucuuga

SEQ ID NO: 2896149 - RNA, 19 nt, Artificial Sequence
  Description of Artificial Sequence: Synthetic oligonucleotide
caaaccaucgcuguguuuc

SEQ ID NO: 2896150 - RNA, 19 nt, Artificial Sequence
  Description of Artificial Sequence: Synthetic oligonucleotide
uggucaacaauugggaugu

SEQ ID NO: 2896151 - RNA, 19 nt, Artificial Sequence
  Description of Artificial Sequence: Synthetic oligonucleotide
gaaacacuaaugccccucc

SEQ ID NO: 2896152 - RNA, 19 nt, Artificial Sequence
  Description of Artificial Sequence: Synthetic oligonucleotide
uucuugaguuugaucagug

SEQ ID NO: 2896153 - RNA, 19 nt, Artificial Sequence
  Description of Artificial Sequence: Synthetic oligonucleotide
aggcaaacaggaaugacuc

SEQ ID NO: 2896154 - RNA, 19 nt, Artificial Sequence
  Description of Artificial Sequence: Synthetic oligonucleotide
aaacaggaaugacucuucu

SEQ ID NO: 2896155 - RNA, 19 nt, Artificial Sequence
  Description of Artificial Sequence: Synthetic oligonucleotide
ugucaaaaccggcaccaug

SEQ ID NO: 2896156 - RNA, 19 nt, Artificial Sequence
  Description of Artificial Sequence: Synthetic oligonucleotide
uugaguuugaucagugcua

SEQ ID NO: 2896157 - RNA, 19 nt, Artificial Sequence
  Description of Artificial Sequence: Synthetic oligonucleotide
acccacucuggguuaaccc

SEQ ID NO: 2896158 - RNA, 19 nt, Artificial Sequence
  Description of Artificial Sequence: Synthetic oligonucleotide
aguuugaucagugcuauau

SEQ ID NO: 2896159 - RNA, 19 nt, Artificial Sequence
  Description of Artificial Sequence: Synthetic oligonucleotide
guaacuuuguucuugaguu

SEQ ID NO: 2896160 - RNA, 19 nt, Artificial Sequence
  Description of Artificial Sequence: Synthetic oligonucleotide
aggccauuuguucucauca

SEQ ID NO: 2896161 - RNA, 19 nt, Artificial Sequence
  Description of Artificial Sequence: Synthetic oligonucleotide
uauugauuguaacuuuguu

SEQ ID NO: 2896162 - RNA, 19 nt, Artificial Sequence
  Description of Artificial Sequence: Synthetic oligonucleotide
auguauaaagacagccucg

SEQ ID NO: 2896163 - RNA, 19 nt, Artificial Sequence
  Description of Artificial Sequence: Synthetic oligonucleotide
uguccuugccaccaguuuc

SEQ ID NO: 2896164 - RNA, 19 nt, Artificial Sequence
  Description of Artificial Sequence: Synthetic oligonucleotide
aacgcaagguuucuagcaa

SEQ ID NO: 2896165 - RNA, 19 nt, Artificial Sequence
  Description of Artificial Sequence: Synthetic oligonucleotide
uuucauugucuagaaacac

SEQ ID NO: 2896166 - RNA, 19 nt, Artificial Sequence
  Description of Artificial Sequence: Synthetic oligonucleotide
uguguuucauugucuagaa

SEQ ID NO: 2896167 - RNA, 19 nt, Artificial Sequence
  Description of Artificial Sequence: Synthetic oligonucleotide
auugucaaaaccggcacca

SEQ ID NO: 2896168 - RNA, 19 nt, Artificial Sequence
  Description of Artificial Sequence: Synthetic oligonucleotide
ucuugaguuugaucagugc

SEQ ID NO: 2896169 - RNA, 19 nt, Artificial Sequence
  Description of Artificial Sequence: Synthetic oligonucleotide
uucuaggccagcacagagc

SEQ ID NO: 2896170 - RNA, 19 nt, Artificial Sequence
  Description of Artificial Sequence: Synthetic oligonucleotide
agaaacacuaaugccccuc

SEQ ID NO: 2896171 - RNA, 19 nt, Artificial Sequence
  Description of Artificial Sequence: Synthetic oligonucleotide
gauuguaaccuucauguau

SEQ ID NO: 2896172 - RNA, 19 nt, Artificial Sequence
  Description of Artificial Sequence: Synthetic oligonucleotide
uugaucagugcuauaucau

SEQ ID NO: 2896173 - RNA, 19 nt, Artificial Sequence
  Description of Artificial Sequence: Synthetic oligonucleotide
uuuguucuugaguuugauc

SEQ ID NO: 2896174 - RNA, 19 nt, Artificial Sequence
  Description of Artificial Sequence: Synthetic oligonucleotide
uaggccagcacagagcaug

SEQ ID NO: 2896175 - RNA, 19 nt, Artificial Sequence
  Description of Artificial Sequence: Synthetic oligonucleotide
guuucuagcaagaaaccca

SEQ ID NO: 2896176 - RNA, 19 nt, Artificial Sequence
  Description of Artificial Sequence: Synthetic oligonucleotide
aacccacucuggguuaacc

SEQ ID NO: 2896177 - RNA, 19 nt, Artificial Sequence
  Description of Artificial Sequence: Synthetic oligonucleotide
guucucaucaaggaugcug

SEQ ID NO: 2896178 - RNA, 19 nt, Artificial Sequence
  Description of Artificial Sequence: Synthetic oligonucleotide
uucuuuucuuggcaggcaa

SEQ ID NO: 2896179 - RNA, 19 nt, Artificial Sequence
  Description of Artificial Sequence: Synthetic oligonucleotide
aguuacucucccuccuggg

SEQ ID NO: 2896180 - RNA, 19 nt, Artificial Sequence
  Description of Artificial Sequence: Synthetic oligonucleotide
cuucauguauaaagacagc

SEQ ID NO: 2896181 - RNA, 19 nt, Artificial Sequence
  Description of Artificial Sequence: Synthetic oligonucleotide
agguuucuagcaagaaacc

SEQ ID NO: 2896182 - RNA, 19 nt, Artificial Sequence
  Description of Artificial Sequence: Synthetic oligonucleotide
ucaggugaaagccgccuga

SEQ ID NO: 2896183 - RNA, 19 nt, Artificial Sequence
  Description of Artificial Sequence: Synthetic oligonucleotide
uuccaaggccauuuguucu

SEQ ID NO: 2896184 - RNA, 19 nt, Artificial Sequence
  Description of Artificial Sequence: Synthetic oligonucleotide
caaacgcaagguuucuagc

SEQ ID NO: 2896185 - RNA, 19 nt, Artificial Sequence
  Description of Artificial Sequence: Synthetic oligonucleotide
guguagucaggugaaagcc

SEQ ID NO: 2896186 - RNA, 19 nt, Artificial Sequence
  Description of Artificial Sequence: Synthetic oligonucleotide
uagagcuucuuuucauaug

SEQ ID NO: 2896187 - RNA, 19 nt, Artificial Sequence
  Description of Artificial Sequence: Synthetic oligonucleotide
gguguagucaggugaaagc

SEQ ID NO: 2896188 - RNA, 19 nt, Artificial Sequence
  Description of Artificial Sequence: Synthetic oligonucleotide
acacuaaugccccuccacu

SEQ ID NO: 2896189 - RNA, 19 nt, Artificial Sequence
  Description of Artificial Sequence: Synthetic oligonucleotide
uggguagagcuucuuuuca

SEQ ID NO: 2896190 - RNA, 19 nt, Artificial Sequence
  Description of Artificial Sequence: Synthetic oligonucleotide
aucauugucaaaaccggca

SEQ ID NO: 2896191 - RNA, 19 nt, Artificial Sequence
  Description of Artificial Sequence: Synthetic oligonucleotide
cuuggguguagucagguga

SEQ ID NO: 2896192 - RNA, 19 nt, Artificial Sequence
  Description of Artificial Sequence: Synthetic oligonucleotide
cauugucaaaaccggcacc

SEQ ID NO: 2896193 - RNA, 19 nt, Artificial Sequence
  Description of Artificial Sequence: Synthetic oligonucleotide
caggcuuggguguagucag

SEQ ID NO: 2896194 - RNA, 19 nt, Artificial Sequence
  Description of Artificial Sequence: Synthetic oligonucleotide
gcaagaaacccacucuggg

SEQ ID NO: 2896195 - RNA, 19 nt, Artificial Sequence
  Description of Artificial Sequence: Synthetic oligonucleotide
acuaaugccccuccacugu

SEQ ID NO: 2896196 - RNA, 19 nt, Artificial Sequence
  Description of Artificial Sequence: Synthetic oligonucleotide
uguuagcaguuacucuccc

SEQ ID NO: 2896197 - RNA, 19 nt, Artificial Sequence
  Description of Artificial Sequence: Synthetic oligonucleotide
uucuuuucauaugcagaag

SEQ ID NO: 2896198 - RNA, 19 nt, Artificial Sequence
  Description of Artificial Sequence: Synthetic oligonucleotide
uucuauugauuguaacuuu

SEQ ID NO: 2896199 - RNA, 19 nt, Artificial Sequence
  Description of Artificial Sequence: Synthetic oligonucleotide
guuucauugucuagaaaca

SEQ ID NO: 2896200 - RNA, 19 nt, Artificial Sequence
  Description of Artificial Sequence: Synthetic oligonucleotide
ccugaggauacccaggcgg

SEQ ID NO: 2896201 - RNA, 19 nt, Artificial Sequence
  Description of Artificial Sequence: Synthetic oligonucleotide
aaacacuaaugccccucca

SEQ ID NO: 2896202 - RNA, 19 nt, Artificial Sequence
  Description of Artificial Sequence: Synthetic oligonucleotide
ucagugcuauaucauuguc

SEQ ID NO: 2896203 - RNA, 19 nt, Artificial Sequence
  Description of Artificial Sequence: Synthetic oligonucleotide
guuccaaggccauuuguuc

SEQ ID NO: 2896204 - RNA, 19 nt, Artificial Sequence
  Description of Artificial Sequence: Synthetic oligonucleotide
ucaaggaugcugcuucuuu

SEQ ID NO: 2896205 - RNA, 19 nt, Artificial Sequence
  Description of Artificial Sequence: Synthetic oligonucleotide
cucuucuauugauuguaac

SEQ ID NO: 2896206 - RNA, 19 nt, Artificial Sequence
  Description of Artificial Sequence: Synthetic oligonucleotide
aacaggaaugacucuucua

SEQ ID NO: 2896207 - RNA, 19 nt, Artificial Sequence
  Description of Artificial Sequence: Synthetic oligonucleotide
gucaaaaccggcaccauga

SEQ ID NO: 2896208 - RNA, 19 nt, Artificial Sequence
  Description of Artificial Sequence: Synthetic oligonucleotide
aguuucuaggccagcacag

SEQ ID NO: 2896209 - RNA, 19 nt, Artificial Sequence
  Description of Artificial Sequence: Synthetic oligonucleotide
caaacaggaaugacucuuc

SEQ ID NO: 2896210 - RNA, 19 nt, Artificial Sequence
  Description of Artificial Sequence: Synthetic oligonucleotide
uuggguguagucaggugaa

SEQ ID NO: 2896211 - RNA, 19 nt, Artificial Sequence
  Description of Artificial Sequence: Synthetic oligonucleotide
guagucaggugaaagccgc

SEQ ID NO: 2896212 - RNA, 19 nt, Artificial Sequence
  Description of Artificial Sequence: Synthetic oligonucleotide
ggugaaagccgccugagga

SEQ ID NO: 2896213 - RNA, 19 nt, Artificial Sequence
  Description of Artificial Sequence: Synthetic oligonucleotide
aaaccaucgcuguguuuca

SEQ ID NO: 2896214 - RNA, 19 nt, Artificial Sequence
  Description of Artificial Sequence: Synthetic oligonucleotide
uuacucucccuccugggua

SEQ ID NO: 2896215 - RNA, 19 nt, Artificial Sequence
  Description of Artificial Sequence: Synthetic oligonucleotide
aaugacucuucuauugauu

SEQ ID NO: 2896216 - RNA, 19 nt, Artificial Sequence
  Description of Artificial Sequence: Synthetic oligonucleotide
aaagccgccugaggauacc

SEQ ID NO: 2896217 - RNA, 19 nt, Artificial Sequence
  Description of Artificial Sequence: Synthetic oligonucleotide
gauacccaggcggaugucc

SEQ ID NO: 2896218 - RNA, 19 nt, Artificial Sequence
  Description of Artificial Sequence: Synthetic oligonucleotide
uacucucccuccuggguag

SEQ ID NO: 2896219 - RNA, 19 nt, Artificial Sequence
  Description of Artificial Sequence: Synthetic oligonucleotide
cuuuucuuggcaggcaaac

SEQ ID NO: 2896220 - RNA, 19 nt, Artificial Sequence
  Description of Artificial Sequence: Synthetic oligonucleotide
ugaguuugaucagugcuau

SEQ ID NO: 2896221 - RNA, 19 nt, Artificial Sequence
  Description of Artificial Sequence: Synthetic oligonucleotide
auuguaaccuucauguaua

SEQ ID NO: 2896222 - RNA, 19 nt, Artificial Sequence
  Description of Artificial Sequence: Synthetic oligonucleotide
agcaagaaacccacucugg

SEQ ID NO: 2896223 - RNA, 19 nt, Artificial Sequence
  Description of Artificial Sequence: Synthetic oligonucleotide
accuucauguauaaagaca

SEQ ID NO: 2896224 - RNA, 19 nt, Artificial Sequence
  Description of Artificial Sequence: Synthetic oligonucleotide
uuguaacuuuguucuugag

SEQ ID NO: 2896225 - RNA, 19 nt, Artificial Sequence
  Description of Artificial Sequence: Synthetic oligonucleotide
cuugaguuugaucagugcu

SEQ ID NO: 2896226 - RNA, 19 nt, Artificial Sequence
  Description of Artificial Sequence: Synthetic oligonucleotide
acgcaagguuucuagcaag

SEQ ID NO: 2896227 - RNA, 19 nt, Artificial Sequence
  Description of Artificial Sequence: Synthetic oligonucleotide
ugacucuucuauugauugu

SEQ ID NO: 2896228 - RNA, 19 nt, Artificial Sequence
  Description of Artificial Sequence: Synthetic oligonucleotide
aagccgccugaggauaccc

SEQ ID NO: 2896229 - RNA, 19 nt, Artificial Sequence
  Description of Artificial Sequence: Synthetic oligonucleotide
cacuaaugccccuccacug

SEQ ID NO: 2896230 - RNA, 19 nt, Artificial Sequence
  Description of Artificial Sequence: Synthetic oligonucleotide
uaaagacagccucggccca

SEQ ID NO: 2896231 - RNA, 19 nt, Artificial Sequence
  Description of Artificial Sequence: Synthetic oligonucleotide
uagcaguuacucucccucc

SEQ ID NO: 2896232 - RNA, 19 nt, Artificial Sequence
  Description of Artificial Sequence: Synthetic oligonucleotide
caacaauugggauguccac

SEQ ID NO: 2896233 - RNA, 19 nt, Artificial Sequence
  Description of Artificial Sequence: Synthetic oligonucleotide
uugccaccaguuucuaggc

SEQ ID NO: 2896234 - RNA, 19 nt, Artificial Sequence
  Description of Artificial Sequence: Synthetic oligonucleotide
auguccacaaacgcaaggu

SEQ ID NO: 2896235 - RNA, 19 nt, Artificial Sequence
  Description of Artificial Sequence: Synthetic oligonucleotide
gucaacaauugggaugucc

SEQ ID NO: 2896236 - RNA, 19 nt, Artificial Sequence
  Description of Artificial Sequence: Synthetic oligonucleotide
caguuacucucccuccugg

SEQ ID NO: 2896237 - RNA, 19 nt, Artificial Sequence
  Description of Artificial Sequence: Synthetic oligonucleotide
ucuuuucuuggcaggcaaa

SEQ ID NO: 2896238 - RNA, 19 nt, Artificial Sequence
  Description of Artificial Sequence: Synthetic oligonucleotide
agcacagagcauguuagca

SEQ ID NO: 2896239 - RNA, 19 nt, Artificial Sequence
  Description of Artificial Sequence: Synthetic oligonucleotide
cugcuucuuuucuuggcag

SEQ ID NO: 2896240 - RNA, 19 nt, Artificial Sequence
  Description of Artificial Sequence: Synthetic oligonucleotide
cagugcuauaucauuguca

SEQ ID NO: 2896241 - RNA, 19 nt, Artificial Sequence
  Description of Artificial Sequence: Synthetic oligonucleotide
gguuucuagcaagaaaccc

SEQ ID NO: 2896242 - RNA, 19 nt, Artificial Sequence
  Description of Artificial Sequence: Synthetic oligonucleotide
uguccagggaggacacugc

SEQ ID NO: 2896243 - RNA, 19 nt, Artificial Sequence
  Description of Artificial Sequence: Synthetic oligonucleotide
guauaaagacagccucggc

SEQ ID NO: 2896244 - RNA, 19 nt, Artificial Sequence
  Description of Artificial Sequence: Synthetic oligonucleotide
uccaaggccauuuguucuc

SEQ ID NO: 2896245 - RNA, 19 nt, Artificial Sequence
  Description of Artificial Sequence: Synthetic oligonucleotide
aggauacccaggcggaugu

SEQ ID NO: 2896246 - RNA, 19 nt, Artificial Sequence
  Description of Artificial Sequence: Synthetic oligonucleotide
cuuuucauaugcagaagua

SEQ ID NO: 2896247 - RNA, 19 nt, Artificial Sequence
  Description of Artificial Sequence: Synthetic oligonucleotide
uguccacaaacgcaagguu

SEQ ID NO: 2896248 - RNA, 19 nt, Artificial Sequence
  Description of Artificial Sequence: Synthetic oligonucleotide
acagccucggcccaggcuu

SEQ ID NO: 2896249 - RNA, 19 nt, Artificial Sequence
  Description of Artificial Sequence: Synthetic oligonucleotide
aaaccggcaccaugauugu

SEQ ID NO: 2896250 - RNA, 19 nt, Artificial Sequence
  Description of Artificial Sequence: Synthetic oligonucleotide
augcugcuucuuuucuugg

SEQ ID NO: 2896251 - RNA, 19 nt, Artificial Sequence
  Description of Artificial Sequence: Synthetic oligonucleotide
gcuauaucauugucaaaac

SEQ ID NO: 2896252 - RNA, 19 nt, Artificial Sequence
  Description of Artificial Sequence: Synthetic oligonucleotide
aaagacagccucggcccag

SEQ ID NO: 2896253 - RNA, 19 nt, Artificial Sequence
  Description of Artificial Sequence: Synthetic oligonucleotide
agcaguuacucucccuccu

SEQ ID NO: 2896254 - RNA, 19 nt, Artificial Sequence
  Description of Artificial Sequence: Synthetic oligonucleotide
gcacagagcauguuagcag

SEQ ID NO: 2896255 - RNA, 19 nt, Artificial Sequence
  Description of Artificial Sequence: Synthetic oligonucleotide
ucaaaaccggcaccaugau

SEQ ID NO: 2896256 - RNA, 19 nt, Artificial Sequence
  Description of Artificial Sequence: Synthetic oligonucleotide
gacucuucuauugauugua

SEQ ID NO: 2896257 - RNA, 19 nt, Artificial Sequence
  Description of Artificial Sequence: Synthetic oligonucleotide
cuguguuucauugucuaga

SEQ ID NO: 2896258 - RNA, 19 nt, Artificial Sequence
  Description of Artificial Sequence: Synthetic oligonucleotide
caccaugauuguaaccuuc

SEQ ID NO: 2896259 - RNA, 19 nt, Artificial Sequence
  Description of Artificial Sequence: Synthetic oligonucleotide
acaguuccaaggccauuug

SEQ ID NO: 2896260 - RNA, 19 nt, Artificial Sequence
  Description of Artificial Sequence: Synthetic oligonucleotide
uuguaaccuucauguauaa

SEQ ID NO: 2896261 - RNA, 19 nt, Artificial Sequence
  Description of Artificial Sequence: Synthetic oligonucleotide
uaaugccccuccacuguca

SEQ ID NO: 2896262 - RNA, 19 nt, Artificial Sequence
  Description of Artificial Sequence: Synthetic oligonucleotide
caagguuucuagcaagaaa

SEQ ID NO: 2896263 - RNA, 19 nt, Artificial Sequence
  Description of Artificial Sequence: Synthetic oligonucleotide
ucaccucugcagcuguccu

SEQ ID NO: 2896264 - RNA, 19 nt, Artificial Sequence
  Description of Artificial Sequence: Synthetic oligonucleotide
aagacagccucggcccagg

SEQ ID NO: 2896265 - RNA, 19 nt, Artificial Sequence
  Description of Artificial Sequence: Synthetic oligonucleotide
uagucaggugaaagccgcc

SEQ ID NO: 2896266 - RNA, 19 nt, Artificial Sequence
  Description of Artificial Sequence: Synthetic oligonucleotide
ucgcuguguuucauugucu

SEQ ID NO: 2896267 - RNA, 19 nt, Artificial Sequence
  Description of Artificial Sequence: Synthetic oligonucleotide
ugccaccaguuucuaggcc

SEQ ID NO: 2896268 - RNA, 19 nt, Artificial Sequence
  Description of Artificial Sequence: Synthetic oligonucleotide
uucuagcaagaaacccacu

SEQ ID NO: 2896269 - RNA, 19 nt, Artificial Sequence
  Description of Artificial Sequence: Synthetic oligonucleotide
aguuccaaggccauuuguu

SEQ ID NO: 2896270 - RNA, 19 nt, Artificial Sequence
  Description of Artificial Sequence: Synthetic oligonucleotide
aaacccacucuggguuaac

SEQ ID NO: 2896271 - RNA, 19 nt, Artificial Sequence
  Description of Artificial Sequence: Synthetic oligonucleotide
ugaaagccgccugaggaua

SEQ ID NO: 2896272 - RNA, 19 nt, Artificial Sequence
  Description of Artificial Sequence: Synthetic oligonucleotide
accaugauuguaaccuuca

SEQ ID NO: 2896273 - RNA, 19 nt, Artificial Sequence
  Description of Artificial Sequence: Synthetic oligonucleotide
uguaaccuucauguauaaa

SEQ ID NO: 2896274 - RNA, 19 nt, Artificial Sequence
  Description of Artificial Sequence: Synthetic oligonucleotide
ucucaucaaggaugcugcu

SEQ ID NO: 2896275 - RNA, 19 nt, Artificial Sequence
  Description of Artificial Sequence: Synthetic oligonucleotide
uagaaacacuaaugccccu

SEQ ID NO: 2896276 - RNA, 19 nt, Artificial Sequence
  Description of Artificial Sequence: Synthetic oligonucleotide
gucaggugaaagccgccug

SEQ ID NO: 2896277 - RNA, 19 nt, Artificial Sequence
  Description of Artificial Sequence: Synthetic oligonucleotide
gauggucaacaauugggau

SEQ ID NO: 2896278 - RNA, 19 nt, Artificial Sequence
  Description of Artificial Sequence: Synthetic oligonucleotide
cagcacagagcauguuagc

SEQ ID NO: 2896279 - RNA, 19 nt, Artificial Sequence
  Description of Artificial Sequence: Synthetic oligonucleotide
cuauugauuguaacuuugu

SEQ ID NO: 2896280 - RNA, 19 nt, Artificial Sequence
  Description of Artificial Sequence: Synthetic oligonucleotide
cuaaugccccuccacuguc

SEQ ID NO: 2896281 - RNA, 19 nt, Artificial Sequence
  Description of Artificial Sequence: Synthetic oligonucleotide
ccagccacaguuccaaggc

SEQ ID NO: 2896282 - RNA, 19 nt, Artificial Sequence
  Description of Artificial Sequence: Synthetic oligonucleotide
ugauuguaacuuuguucuu

SEQ ID NO: 2896283 - RNA, 19 nt, Artificial Sequence
  Description of Artificial Sequence: Synthetic oligonucleotide
cuagcaagaaacccacucu

SEQ ID NO: 2896284 - RNA, 19 nt, Artificial Sequence
  Description of Artificial Sequence: Synthetic oligonucleotide
gccagccacaguuccaagg

SEQ ID NO: 2896285 - RNA, 19 nt, Artificial Sequence
  Description of Artificial Sequence: Synthetic oligonucleotide
accaguuucuaggccagca

SEQ ID NO: 2896286 - RNA, 19 nt, Artificial Sequence
  Description of Artificial Sequence: Synthetic oligonucleotide
cuucuauugauuguaacuu

SEQ ID NO: 2896287 - RNA, 19 nt, Artificial Sequence
  Description of Artificial Sequence: Synthetic oligonucleotide
acugucaccucugcagcug

SEQ ID NO: 2896288 - RNA, 19 nt, Artificial Sequence
  Description of Artificial Sequence: Synthetic oligonucleotide
auaugcagaaguacauuuu

SEQ ID NO: 2896289 - RNA, 19 nt, Artificial Sequence
  Description of Artificial Sequence: Synthetic oligonucleotide
ggcaccaugauuguaaccu

SEQ ID NO: 2896290 - RNA, 19 nt, Artificial Sequence
  Description of Artificial Sequence: Synthetic oligonucleotide
cccacucuggguuaacccc

SEQ ID NO: 2896291 - RNA, 19 nt, Artificial Sequence
  Description of Artificial Sequence: Synthetic oligonucleotide
cugaggauacccaggcgga

SEQ ID NO: 2896292 - RNA, 19 nt, Artificial Sequence
  Description of Artificial Sequence: Synthetic oligonucleotide
agucaggugaaagccgccu

SEQ ID NO: 2896293 - RNA, 19 nt, Artificial Sequence
  Description of Artificial Sequence: Synthetic oligonucleotide
gcuguguuucauugucuag

SEQ ID NO: 2896294 - RNA, 19 nt, Artificial Sequence
  Description of Artificial Sequence: Synthetic oligonucleotide
agaaacccacucuggguua

SEQ ID NO: 2896295 - RNA, 19 nt, Artificial Sequence
  Description of Artificial Sequence: Synthetic oligonucleotide
uccuggguagagcuucuuu

SEQ ID NO: 2896296 - RNA, 19 nt, Artificial Sequence
  Description of Artificial Sequence: Synthetic oligonucleotide
guagagcuucuuuucauau

SEQ ID NO: 2896297 - RNA, 19 nt, Artificial Sequence
  Description of Artificial Sequence: Synthetic oligonucleotide
agacagccucggcccaggc

SEQ ID NO: 2896298 - RNA, 19 nt, Artificial Sequence
  Description of Artificial Sequence: Synthetic oligonucleotide
cucggcccaggcuugggug

SEQ ID NO: 2896299 - RNA, 19 nt, Artificial Sequence
  Description of Artificial Sequence: Synthetic oligonucleotide
cauugucuagaaacacuaa

SEQ ID NO: 2896300 - RNA, 19 nt, Artificial Sequence
  Description of Artificial Sequence: Synthetic oligonucleotide
ccaucgcuguguuucauug

SEQ ID NO: 2896301 - RNA, 19 nt, Artificial Sequence
  Description of Artificial Sequence: Synthetic oligonucleotide
caagaaacccacucugggu

SEQ ID NO: 2896302 - RNA, 19 nt, Artificial Sequence
  Description of Artificial Sequence: Synthetic oligonucleotide
cacagagcauguuagcagu

SEQ ID NO: 2896303 - RNA, 19 nt, Artificial Sequence
  Description of Artificial Sequence: Synthetic oligonucleotide
gucaccucugcagcugucc

SEQ ID NO: 2896304 - RNA, 19 nt, Artificial Sequence
  Description of Artificial Sequence: Synthetic oligonucleotide
gccaccaguuucuaggcca

SEQ ID NO: 2896305 - RNA, 19 nt, Artificial Sequence
  Description of Artificial Sequence: Synthetic oligonucleotide
ggguguagucaggugaaag

SEQ ID NO: 2896306 - RNA, 19 nt, Artificial Sequence
  Description of Artificial Sequence: Synthetic oligonucleotide
aggcggauguccagggagg

SEQ ID NO: 2896307 - RNA, 19 nt, Artificial Sequence
  Description of Artificial Sequence: Synthetic oligonucleotide
gcuucuuuucuuggcaggc

SEQ ID NO: 2896308 - RNA, 19 nt, Artificial Sequence
  Description of Artificial Sequence: Synthetic oligonucleotide
accggcaccaugauuguaa

SEQ ID NO: 2896309 - RNA, 19 nt, Artificial Sequence
  Description of Artificial Sequence: Synthetic oligonucleotide
gaaagccgccugaggauac

SEQ ID NO: 2896310 - RNA, 19 nt, Artificial Sequence
  Description of Artificial Sequence: Synthetic oligonucleotide
ucucccuccuggguagagc

SEQ ID NO: 2896311 - RNA, 19 nt, Artificial Sequence
  Description of Artificial Sequence: Synthetic oligonucleotide
ucggcccaggcuugggugu

SEQ ID NO: 2896312 - RNA, 19 nt, Artificial Sequence
  Description of Artificial Sequence: Synthetic oligonucleotide
caggugaaagccgccugag

SEQ ID NO: 2896313 - RNA, 19 nt, Artificial Sequence
  Description of Artificial Sequence: Synthetic oligonucleotide
gggauguccacaaacgcaa

SEQ ID NO: 2896314 - RNA, 19 nt, Artificial Sequence
  Description of Artificial Sequence: Synthetic oligonucleotide
acuuuguucuugaguuuga

SEQ ID NO: 2896315 - RNA, 19 nt, Artificial Sequence
  Description of Artificial Sequence: Synthetic oligonucleotide
guuacucucccuccugggu

SEQ ID NO: 2896316 - RNA, 19 nt, Artificial Sequence
  Description of Artificial Sequence: Synthetic oligonucleotide
accaucgcuguguuucauu

SEQ ID NO: 2896317 - RNA, 19 nt, Artificial Sequence
  Description of Artificial Sequence: Synthetic oligonucleotide
gguagagcuucuuuucaua

SEQ ID NO: 2896318 - RNA, 19 nt, Artificial Sequence
  Description of Artificial Sequence: Synthetic oligonucleotide
guuucuaggccagcacaga

SEQ ID NO: 2896319 - RNA, 19 nt, Artificial Sequence
  Description of Artificial Sequence: Synthetic oligonucleotide
guuagcaguuacucucccu

SEQ ID NO: 2896320 - RNA, 19 nt, Artificial Sequence
  Description of Artificial Sequence: Synthetic oligonucleotide
acucuucuauugauuguaa

SEQ ID NO: 2896321 - RNA, 19 nt, Artificial Sequence
  Description of Artificial Sequence: Synthetic oligonucleotide
gagcuucuuuucauaugca

SEQ ID NO: 2896322 - RNA, 19 nt, Artificial Sequence
  Description of Artificial Sequence: Synthetic oligonucleotide
agcuguccuugccaccagu

SEQ ID NO: 2896323 - RNA, 19 nt, Artificial Sequence
  Description of Artificial Sequence: Synthetic oligonucleotide
gcaguuacucucccuccug

SEQ ID NO: 2896324 - RNA, 19 nt, Artificial Sequence
  Description of Artificial Sequence: Synthetic oligonucleotide
ccacugucaccucugcagc

SEQ ID NO: 2896325 - RNA, 19 nt, Artificial Sequence
  Description of Artificial Sequence: Synthetic oligonucleotide
cuuggcaggcaaacaggaa

SEQ ID NO: 2896326 - RNA, 19 nt, Artificial Sequence
  Description of Artificial Sequence: Synthetic oligonucleotide
ugaggauacccaggcggau

SEQ ID NO: 2896327 - RNA, 19 nt, Artificial Sequence
  Description of Artificial Sequence: Synthetic oligonucleotide
ugucaccucugcagcuguc

SEQ ID NO: 2896328 - RNA, 19 nt, Artificial Sequence
  Description of Artificial Sequence: Synthetic oligonucleotide
acaaaccaucgcuguguuu

SEQ ID NO: 2896329 - RNA, 19 nt, Artificial Sequence
  Description of Artificial Sequence: Synthetic oligonucleotide
guguuucauugucuagaaa

SEQ ID NO: 2896330 - RNA, 19 nt, Artificial Sequence
  Description of Artificial Sequence: Synthetic oligonucleotide
guucuugaguuugaucagu

SEQ ID NO: 2896331 - RNA, 19 nt, Artificial Sequence
  Description of Artificial Sequence: Synthetic oligonucleotide
uugucaaaaccggcaccau

SEQ ID NO: 2896332 - RNA, 19 nt, Artificial Sequence
  Description of Artificial Sequence: Synthetic oligonucleotide
gaaacccacucuggguuaa

SEQ ID NO: 2896333 - RNA, 19 nt, Artificial Sequence
  Description of Artificial Sequence: Synthetic oligonucleotide
agccagccacaguuccaag

SEQ ID NO: 2896334 - RNA, 19 nt, Artificial Sequence
  Description of Artificial Sequence: Synthetic oligonucleotide
uguucucaucaaggaugcu

SEQ ID NO: 2896335 - RNA, 19 nt, Artificial Sequence
  Description of Artificial Sequence: Synthetic oligonucleotide
aaccaucgcuguguuucau

SEQ ID NO: 2896336 - RNA, 19 nt, Artificial Sequence
  Description of Artificial Sequence: Synthetic oligonucleotide
gugaaagccgccugaggau

SEQ ID NO: 2896337 - RNA, 19 nt, Artificial Sequence
  Description of Artificial Sequence: Synthetic oligonucleotide
ccaguuucuaggccagcac

SEQ ID NO: 2896338 - RNA, 19 nt, Artificial Sequence
  Description of Artificial Sequence: Synthetic oligonucleotide
gagcauguuagcaguuacu

SEQ ID NO: 2896339 - RNA, 19 nt, Artificial Sequence
  Description of Artificial Sequence: Synthetic oligonucleotide
ccaccaguuucuaggccag

SEQ ID NO: 2896340 - RNA, 19 nt, Artificial Sequence
  Description of Artificial Sequence: Synthetic oligonucleotide
gcuuggguguagucaggug

SEQ ID NO: 2896341 - RNA, 19 nt, Artificial Sequence
  Description of Artificial Sequence: Synthetic oligonucleotide
gccugaggauacccaggcg

SEQ ID NO: 2896342 - RNA, 19 nt, Artificial Sequence
  Description of Artificial Sequence: Synthetic oligonucleotide
ggauguccacaaacgcaag

SEQ ID NO: 2896343 - RNA, 19 nt, Artificial Sequence
  Description of Artificial Sequence: Synthetic oligonucleotide
cucccuccuggguagagcu

SEQ ID NO: 2896344 - RNA, 19 nt, Artificial Sequence
  Description of Artificial Sequence: Synthetic oligonucleotide
cccagccagccacaguucc

SEQ ID NO: 2896345 - RNA, 19 nt, Artificial Sequence
  Description of Artificial Sequence: Synthetic oligonucleotide
aucaaggaugcugcuucuu

SEQ ID NO: 2896346 - RNA, 19 nt, Artificial Sequence
  Description of Artificial Sequence: Synthetic oligonucleotide
gcauguuagcaguuacucu

SEQ ID NO: 2896347 - RNA, 19 nt, Artificial Sequence
  Description of Artificial Sequence: Synthetic oligonucleotide
guccacaaacgcaagguuu

SEQ ID NO: 2896348 - RNA, 19 nt, Artificial Sequence
  Description of Artificial Sequence: Synthetic oligonucleotide
gaguuugaucagugcuaua

SEQ ID NO: 2896349 - RNA, 19 nt, Artificial Sequence
  Description of Artificial Sequence: Synthetic oligonucleotide
uggguguagucaggugaaa

SEQ ID NO: 2896350 - RNA, 19 nt, Artificial Sequence
  Description of Artificial Sequence: Synthetic oligonucleotide
aggcuuggguguagucagg

SEQ ID NO: 2896351 - RNA, 19 nt, Artificial Sequence
  Description of Artificial Sequence: Synthetic oligonucleotide
caaggaugcugcuucuuuu

SEQ ID NO: 2896352 - RNA, 19 nt, Artificial Sequence
  Description of Artificial Sequence: Synthetic oligonucleotide
gugcuauaucauugucaaa

SEQ ID NO: 2896353 - RNA, 19 nt, Artificial Sequence
  Description of Artificial Sequence: Synthetic oligonucleotide
acagagcauguuagcaguu

SEQ ID NO: 2896354 - RNA, 19 nt, Artificial Sequence
  Description of Artificial Sequence: Synthetic oligonucleotide
gcaggcaaacaggaaugac

SEQ ID NO: 2896355 - RNA, 19 nt, Artificial Sequence
  Description of Artificial Sequence: Synthetic oligonucleotide
ggauguccagggaggacac

SEQ ID NO: 2896356 - RNA, 19 nt, Artificial Sequence
  Description of Artificial Sequence: Synthetic oligonucleotide
ccgccugaggauacccagg

SEQ ID NO: 2896357 - RNA, 19 nt, Artificial Sequence
  Description of Artificial Sequence: Synthetic oligonucleotide
gcaaacaggaaugacucuu

SEQ ID NO: 2896358 - RNA, 19 nt, Artificial Sequence
  Description of Artificial Sequence: Synthetic oligonucleotide
ccuugccaccaguuucuag

SEQ ID NO: 2896359 - RNA, 19 nt, Artificial Sequence
  Description of Artificial Sequence: Synthetic oligonucleotide
cgccugaggauacccaggc

SEQ ID NO: 2896360 - RNA, 19 nt, Artificial Sequence
  Description of Artificial Sequence: Synthetic oligonucleotide
gacagccucggcccaggcu

SEQ ID NO: 2896361 - RNA, 19 nt, Artificial Sequence
  Description of Artificial Sequence: Synthetic oligonucleotide
aaccggcaccaugauugua

SEQ ID NO: 2896362 - RNA, 19 nt, Artificial Sequence
  Description of Artificial Sequence: Synthetic oligonucleotide
cucucccuccuggguagag

SEQ ID NO: 2896363 - RNA, 19 nt, Artificial Sequence
  Description of Artificial Sequence: Synthetic oligonucleotide
caccaguuucuaggccagc

SEQ ID NO: 2896364 - RNA, 19 nt, Artificial Sequence
  Description of Artificial Sequence: Synthetic oligonucleotide
caauugggauguccacaaa

SEQ ID NO: 2896365 - RNA, 19 nt, Artificial Sequence
  Description of Artificial Sequence: Synthetic oligonucleotide
cagagcauguuagcaguua

SEQ ID NO: 2896366 - RNA, 19 nt, Artificial Sequence
  Description of Artificial Sequence: Synthetic oligonucleotide
caucaaggaugcugcuucu

SEQ ID NO: 2896367 - RNA, 19 nt, Artificial Sequence
  Description of Artificial Sequence: Synthetic oligonucleotide
cacaguuccaaggccauuu

SEQ ID NO: 2896368 - RNA, 19 nt, Artificial Sequence
  Description of Artificial Sequence: Synthetic oligonucleotide
ggcaggcaaacaggaauga

SEQ ID NO: 2896369 - RNA, 19 nt, Artificial Sequence
  Description of Artificial Sequence: Synthetic oligonucleotide
ucccuccuggguagagcuu

SEQ ID NO: 2896370 - RNA, 19 nt, Artificial Sequence
  Description of Artificial Sequence: Synthetic oligonucleotide
caggaaugacucuucuauu

SEQ ID NO: 2896371 - RNA, 19 nt, Artificial Sequence
  Description of Artificial Sequence: Synthetic oligonucleotide
caucgcuguguuucauugu

SEQ ID NO: 2896372 - RNA, 19 nt, Artificial Sequence
  Description of Artificial Sequence: Synthetic oligonucleotide
cagccucggcccaggcuug

SEQ ID NO: 2896373 - RNA, 19 nt, Artificial Sequence
  Description of Artificial Sequence: Synthetic oligonucleotide
ccggcaccaugauuguaac

SEQ ID NO: 2896374 - RNA, 19 nt, Artificial Sequence
  Description of Artificial Sequence: Synthetic oligonucleotide
ccaggcuuggguguaguca

SEQ ID NO: 2896375 - RNA, 19 nt, Artificial Sequence
  Description of Artificial Sequence: Synthetic oligonucleotide
caguuccaaggccauuugu

SEQ ID NO: 2896376 - RNA, 19 nt, Artificial Sequence
  Description of Artificial Sequence: Synthetic oligonucleotide
cagccagccacaguuccaa

SEQ ID NO: 2896377 - RNA, 19 nt, Artificial Sequence
  Description of Artificial Sequence: Synthetic oligonucleotide
gcaagguuucuagcaagaa

SEQ ID NO: 2896378 - RNA, 19 nt, Artificial Sequence
  Description of Artificial Sequence: Synthetic oligonucleotide
cacaaacgcaagguuucua

SEQ ID NO: 2896379 - RNA, 19 nt, Artificial Sequence
  Description of Artificial Sequence: Synthetic oligonucleotide
cacugucaccucugcagcu

SEQ ID NO: 2896380 - RNA, 19 nt, Artificial Sequence
  Description of Artificial Sequence: Synthetic oligonucleotide
ggguagagcuucuuuucau

SEQ ID NO: 2896381 - RNA, 19 nt, Artificial Sequence
  Description of Artificial Sequence: Synthetic oligonucleotide
agccucggcccaggcuugg

SEQ ID NO: 2896382 - RNA, 19 nt, Artificial Sequence
  Description of Artificial Sequence: Synthetic oligonucleotide
uccuugccaccaguuucua

SEQ ID NO: 2896383 - RNA, 19 nt, Artificial Sequence
  Description of Artificial Sequence: Synthetic oligonucleotide
caaaaccggcaccaugauu

SEQ ID NO: 2896384 - RNA, 19 nt, Artificial Sequence
  Description of Artificial Sequence: Synthetic oligonucleotide
agccgccugaggauaccca

SEQ ID NO: 2896385 - RNA, 19 nt, Artificial Sequence
  Description of Artificial Sequence: Synthetic oligonucleotide
cccuccuggguagagcuuc

SEQ ID NO: 2896386 - RNA, 19 nt, Artificial Sequence
  Description of Artificial Sequence: Synthetic oligonucleotide
cgcaagguuucuagcaaga

SEQ ID NO: 2896387 - RNA, 19 nt, Artificial Sequence
  Description of Artificial Sequence: Synthetic oligonucleotide
cugucaccucugcagcugu

SEQ ID NO: 2896388 - RNA, 19 nt, Artificial Sequence
  Description of Artificial Sequence: Synthetic oligonucleotide
cggauguccagggaggaca

SEQ ID NO: 2896389 - RNA, 19 nt, Artificial Sequence
  Description of Artificial Sequence: Synthetic oligonucleotide
cggcaccaugauuguaacc

SEQ ID NO: 2896390 - RNA, 19 nt, Artificial Sequence
  Description of Artificial Sequence: Synthetic oligonucleotide
ggcggauguccagggagga

SEQ ID NO: 2896391 - RNA, 19 nt, Artificial Sequence
  Description of Artificial Sequence: Synthetic oligonucleotide
gauguccagggaggacacu

SEQ ID NO: 2896392 - RNA, 19 nt, Artificial Sequence
  Description of Artificial Sequence: Synthetic oligonucleotide
cuguccuugccaccaguuu

SEQ ID NO: 2896393 - RNA, 19 nt, Artificial Sequence
  Description of Artificial Sequence: Synthetic oligonucleotide
ccagccagccacaguucca

SEQ ID NO: 2896394 - RNA, 19 nt, Artificial Sequence
  Description of Artificial Sequence: Synthetic oligonucleotide
cgcuguguuucauugucua

SEQ ID NO: 2896395 - RNA, 19 nt, Artificial Sequence
  Description of Artificial Sequence: Synthetic oligonucleotide
ggcuuggguguagucaggu

SEQ ID NO: 2896396 - RNA, 19 nt, Artificial Sequence
  Description of Artificial Sequence: Synthetic oligonucleotide
gcggauguccagggaggac

SEQ ID NO: 2896397 - RNA, 19 nt, Artificial Sequence
  Description of Artificial Sequence: Synthetic oligonucleotide
gcaccaugauuguaaccuu

SEQ ID NO: 2896398 - RNA, 19 nt, Artificial Sequence
  Description of Artificial Sequence: Synthetic oligonucleotide
ccaaggccauuuguucuca

SEQ ID NO: 2896399 - RNA, 19 nt, Artificial Sequence
  Description of Artificial Sequence: Synthetic oligonucleotide
caaggccauuuguucucau

SEQ ID NO: 2896400 - RNA, 19 nt, Artificial Sequence
  Description of Artificial Sequence: Synthetic oligonucleotide
ggauacccaggcggauguc

SEQ ID NO: 2896401 - RNA, 19 nt, Artificial Sequence
  Description of Artificial Sequence: Synthetic oligonucleotide
ccccagccagccacaguuc

SEQ ID NO: 2896402 - RNA, 19 nt, Artificial Sequence
  Description of Artificial Sequence: Synthetic oligonucleotide
ggcccaggcuuggguguag

SEQ ID NO: 2896403 - RNA, 19 nt, Artificial Sequence
  Description of Artificial Sequence: Synthetic oligonucleotide
cuaggccagcacagagcau

SEQ ID NO: 2896404 - RNA, 19 nt, Artificial Sequence
  Description of Artificial Sequence: Synthetic oligonucleotide
gccucggcccaggcuuggg

SEQ ID NO: 2896405 - RNA, 19 nt, Artificial Sequence
  Description of Artificial Sequence: Synthetic oligonucleotide
ggucaacaauugggauguc

SEQ ID NO: 2896406 - RNA, 19 nt, Artificial Sequence
  Description of Artificial Sequence: Synthetic oligonucleotide
gcuguccuugccaccaguu

SEQ ID NO: 2896407 - RNA, 19 nt, Artificial Sequence
  Description of Artificial Sequence: Synthetic oligonucleotide
ccucggcccaggcuugggu

SEQ ID NO: 2896408 - RNA, 19 nt, Artificial Sequence
  Description of Artificial Sequence: Synthetic oligonucleotide
cuccuggguagagcuucuu

SEQ ID NO: 2896409 - RNA, 19 nt, Artificial Sequence
  Description of Artificial Sequence: Synthetic oligonucleotide
gcccaggcuuggguguagu

SEQ ID NO: 2896410 - RNA, 19 nt, Artificial Sequence
  Description of Artificial Sequence: Synthetic oligonucleotide
ccacaguuccaaggccauu

SEQ ID NO: 2896411 - RNA, 19 nt, Artificial Sequence
  Description of Artificial Sequence: Synthetic oligonucleotide
cggcccaggcuugggugua

SEQ ID NO: 2896412 - RNA, 19 nt, Artificial Sequence
  Description of Artificial Sequence: Synthetic oligonucleotide
aaugcuugaacuucgaaug

SEQ ID NO: 2896413 - RNA, 19 nt, Artificial Sequence
  Description of Artificial Sequence: Synthetic oligonucleotide
ugugauacggcucucacgg

SEQ ID NO: 2896414 - RNA, 19 nt, Artificial Sequence
  Description of Artificial Sequence: Synthetic oligonucleotide
aaguccaagagcuggaagg

SEQ ID NO: 2896415 - RNA, 19 nt, Artificial Sequence
  Description of Artificial Sequence: Synthetic oligonucleotide
aagaggaaaugcuugaacu

SEQ ID NO: 2896416 - RNA, 19 nt, Artificial Sequence
  Description of Artificial Sequence: Synthetic oligonucleotide
ucuagggcaaggaagacca

SEQ ID NO: 2896417 - RNA, 19 nt, Artificial Sequence
  Description of Artificial Sequence: Synthetic oligonucleotide
aaaugcuugaacuucgaau

SEQ ID NO: 2896418 - RNA, 19 nt, Artificial Sequence
  Description of Artificial Sequence: Synthetic oligonucleotide
accaccuucauccagggag

SEQ ID NO: 2896419 - RNA, 19 nt, Artificial Sequence
  Description of Artificial Sequence: Synthetic oligonucleotide
aaagcaaaggcaauggcug

SEQ ID NO: 2896420 - RNA, 19 nt, Artificial Sequence
  Description of Artificial Sequence: Synthetic oligonucleotide
cuuguaagggacuggagcc

SEQ ID NO: 2896421 - RNA, 19 nt, Artificial Sequence
  Description of Artificial Sequence: Synthetic oligonucleotide
gaugaaguccaagagcugg

SEQ ID NO: 2896422 - RNA, 19 nt, Artificial Sequence
  Description of Artificial Sequence: Synthetic oligonucleotide
aauauccagacagggacgg

SEQ ID NO: 2896423 - RNA, 19 nt, Artificial Sequence
  Description of Artificial Sequence: Synthetic oligonucleotide
aaugcugccacuggcgggc

SEQ ID NO: 2896424 - RNA, 19 nt, Artificial Sequence
  Description of Artificial Sequence: Synthetic oligonucleotide
agaaagcaaaggcaauggc

SEQ ID NO: 2896425 - RNA, 19 nt, Artificial Sequence
  Description of Artificial Sequence: Synthetic oligonucleotide
gaagcuacaggccacauaa

SEQ ID NO: 2896426 - RNA, 19 nt, Artificial Sequence
  Description of Artificial Sequence: Synthetic oligonucleotide
aagcaaaggcaauggcugc

SEQ ID NO: 2896427 - RNA, 19 nt, Artificial Sequence
  Description of Artificial Sequence: Synthetic oligonucleotide
cauaauugcugugaggacg

SEQ ID NO: 2896428 - RNA, 19 nt, Artificial Sequence
  Description of Artificial Sequence: Synthetic oligonucleotide
uaggaugaaguccaagagc

SEQ ID NO: 2896429 - RNA, 19 nt, Artificial Sequence
  Description of Artificial Sequence: Synthetic oligonucleotide
gaagcagaaggccacaaac

SEQ ID NO: 2896430 - RNA, 19 nt, Artificial Sequence
  Description of Artificial Sequence: Synthetic oligonucleotide
aaggcugucuuaaagcggg

SEQ ID NO: 2896431 - RNA, 19 nt, Artificial Sequence
  Description of Artificial Sequence: Synthetic oligonucleotide
ugugguaggaggauuggca

SEQ ID NO: 2896432 - RNA, 19 nt, Artificial Sequence
  Description of Artificial Sequence: Synthetic oligonucleotide
cuacaggccacauaauugc

SEQ ID NO: 2896433 - RNA, 19 nt, Artificial Sequence
  Description of Artificial Sequence: Synthetic oligonucleotide
auaauugcugugaggacgc

SEQ ID NO: 2896434 - RNA, 19 nt, Artificial Sequence
  Description of Artificial Sequence: Synthetic oligonucleotide
aggaagaccaagcagcuga

SEQ ID NO: 2896435 - RNA, 19 nt, Artificial Sequence
  Description of Artificial Sequence: Synthetic oligonucleotide
aaaccagacaccugcccag

SEQ ID NO: 2896436 - RNA, 19 nt, Artificial Sequence
  Description of Artificial Sequence: Synthetic oligonucleotide
acaaaccagacaccugccc

SEQ ID NO: 2896437 - RNA, 19 nt, Artificial Sequence
  Description of Artificial Sequence: Synthetic oligonucleotide
uggaaggcugucuuaaagc

SEQ ID NO: 2896438 - RNA, 19 nt, Artificial Sequence
  Description of Artificial Sequence: Synthetic oligonucleotide
ggaauauccagacagggac

SEQ ID NO: 2896439 - RNA, 19 nt, Artificial Sequence
  Description of Artificial Sequence: Synthetic oligonucleotide
aaggcaauggcugccuugg

SEQ ID NO: 2896440 - RNA, 19 nt, Artificial Sequence
  Description of Artificial Sequence: Synthetic oligonucleotide
ucgaaugcugccacuggcg

SEQ ID NO: 2896441 - RNA, 19 nt, Artificial Sequence
  Description of Artificial Sequence: Synthetic oligonucleotide
agaguguucagcaccacac

SEQ ID NO: 2896442 - RNA, 19 nt, Artificial Sequence
  Description of Artificial Sequence: Synthetic oligonucleotide
cuaggaugaaguccaagag

SEQ ID NO: 2896443 - RNA, 19 nt, Artificial Sequence
  Description of Artificial Sequence: Synthetic oligonucleotide
augcuugaacuucgaaugc

SEQ ID NO: 2896444 - RNA, 19 nt, Artificial Sequence
  Description of Artificial Sequence: Synthetic oligonucleotide
uguucagcaccacaccacc

SEQ ID NO: 2896445 - RNA, 19 nt, Artificial Sequence
  Description of Artificial Sequence: Synthetic oligonucleotide
aagcgggugccugugauac

SEQ ID NO: 2896446 - RNA, 19 nt, Artificial Sequence
  Description of Artificial Sequence: Synthetic oligonucleotide
ggaaggcugucuuaaagcg

SEQ ID NO: 2896447 - RNA, 19 nt, Artificial Sequence
  Description of Artificial Sequence: Synthetic oligonucleotide
acauaauugcugugaggac

SEQ ID NO: 2896448 - RNA, 19 nt, Artificial Sequence
  Description of Artificial Sequence: Synthetic oligonucleotide
ugauacggcucucacgggc

SEQ ID NO: 2896449 - RNA, 19 nt, Artificial Sequence
  Description of Artificial Sequence: Synthetic oligonucleotide
ucucggagguccuggaagg

SEQ ID NO: 2896450 - RNA, 19 nt, Artificial Sequence
  Description of Artificial Sequence: Synthetic oligonucleotide
aaaggcaauggcugccuug

SEQ ID NO: 2896451 - RNA, 19 nt, Artificial Sequence
  Description of Artificial Sequence: Synthetic oligonucleotide
aggaugaaguccaagagcu

SEQ ID NO: 2896452 - RNA, 19 nt, Artificial Sequence
  Description of Artificial Sequence: Synthetic oligonucleotide
ugaacuucgaaugcugcca

SEQ ID NO: 2896453 - RNA, 19 nt, Artificial Sequence
  Description of Artificial Sequence: Synthetic oligonucleotide
uggaaggccagguaggccu

SEQ ID NO: 2896454 - RNA, 19 nt, Artificial Sequence
  Description of Artificial Sequence: Synthetic oligonucleotide
cuugaacuucgaaugcugc

SEQ ID NO: 2896455 - RNA, 19 nt, Artificial Sequence
  Description of Artificial Sequence: Synthetic oligonucleotide
uggaauauccagacaggga

SEQ ID NO: 2896456 - RNA, 19 nt, Artificial Sequence
  Description of Artificial Sequence: Synthetic oligonucleotide
aggccuggaauauccagac

SEQ ID NO: 2896457 - RNA, 19 nt, Artificial Sequence
  Description of Artificial Sequence: Synthetic oligonucleotide
uggagccucaucucggagg

SEQ ID NO: 2896458 - RNA, 19 nt, Artificial Sequence
  Description of Artificial Sequence: Synthetic oligonucleotide
cacauaauugcugugagga

SEQ ID NO: 2896459 - RNA, 19 nt, Artificial Sequence
  Description of Artificial Sequence: Synthetic oligonucleotide
gaauauccagacagggacg

SEQ ID NO: 2896460 - RNA, 19 nt, Artificial Sequence
  Description of Artificial Sequence: Synthetic oligonucleotide
uucgaaugcugccacuggc

SEQ ID NO: 2896461 - RNA, 19 nt, Artificial Sequence
  Description of Artificial Sequence: Synthetic oligonucleotide
ugaggaaggacaggaagcc

SEQ ID NO: 2896462 - RNA, 19 nt, Artificial Sequence
  Description of Artificial Sequence: Synthetic oligonucleotide
acagggacggagaagaaag

SEQ ID NO: 2896463 - RNA, 19 nt, Artificial Sequence
  Description of Artificial Sequence: Synthetic oligonucleotide
gacagcuaggaugaagucc

SEQ ID NO: 2896464 - RNA, 19 nt, Artificial Sequence
  Description of Artificial Sequence: Synthetic oligonucleotide
aacugcgaagcuacaggcc

SEQ ID NO: 2896465 - RNA, 19 nt, Artificial Sequence
  Description of Artificial Sequence: Synthetic oligonucleotide
uccuggaaggccagguagg

SEQ ID NO: 2896466 - RNA, 19 nt, Artificial Sequence
  Description of Artificial Sequence: Synthetic oligonucleotide
agccucaucucggaggucc

SEQ ID NO: 2896467 - RNA, 19 nt, Artificial Sequence
  Description of Artificial Sequence: Synthetic oligonucleotide
caacugcgaagcuacaggc

SEQ ID NO: 2896468 - RNA, 19 nt, Artificial Sequence
  Description of Artificial Sequence: Synthetic oligonucleotide
aguguucagcaccacacca

SEQ ID NO: 2896469 - RNA, 19 nt, Artificial Sequence
  Description of Artificial Sequence: Synthetic oligonucleotide
cuggaauauccagacaggg

SEQ ID NO: 2896470 - RNA, 19 nt, Artificial Sequence
  Description of Artificial Sequence: Synthetic oligonucleotide
gccuggaauauccagacag

SEQ ID NO: 2896471 - RNA, 19 nt, Artificial Sequence
  Description of Artificial Sequence: Synthetic oligonucleotide
acggagaagaaagcaaagg

SEQ ID NO: 2896472 - RNA, 19 nt, Artificial Sequence
  Description of Artificial Sequence: Synthetic oligonucleotide
aucucggagguccuggaag

SEQ ID NO: 2896473 - RNA, 19 nt, Artificial Sequence
  Description of Artificial Sequence: Synthetic oligonucleotide
uuccccaagaggaaaugcu

SEQ ID NO: 2896474 - RNA, 19 nt, Artificial Sequence
  Description of Artificial Sequence: Synthetic oligonucleotide
gacgcaguggagcugagga

SEQ ID NO: 2896475 - RNA, 19 nt, Artificial Sequence
  Description of Artificial Sequence: Synthetic oligonucleotide
aguggagcugaggagacuc

SEQ ID NO: 2896476 - RNA, 19 nt, Artificial Sequence
  Description of Artificial Sequence: Synthetic oligonucleotide
uaggccuggaauauccaga

SEQ ID NO: 2896477 - RNA, 19 nt, Artificial Sequence
  Description of Artificial Sequence: Synthetic oligonucleotide
uauccagacagggacggag

SEQ ID NO: 2896478 - RNA, 19 nt, Artificial Sequence
  Description of Artificial Sequence: Synthetic oligonucleotide
agggcaaggaagaccaagc

SEQ ID NO: 2896479 - RNA, 19 nt, Artificial Sequence
  Description of Artificial Sequence: Synthetic oligonucleotide
gaaguccaagagcuggaag

SEQ ID NO: 2896480 - RNA, 19 nt, Artificial Sequence
  Description of Artificial Sequence: Synthetic oligonucleotide
acagcuaggaugaagucca

SEQ ID NO: 2896481 - RNA, 19 nt, Artificial Sequence
  Description of Artificial Sequence: Synthetic oligonucleotide
agguaggccuggaauaucc

SEQ ID NO: 2896482 - RNA, 19 nt, Artificial Sequence
  Description of Artificial Sequence: Synthetic oligonucleotide
ugguaggaggauuggcagg

SEQ ID NO: 2896483 - RNA, 19 nt, Artificial Sequence
  Description of Artificial Sequence: Synthetic oligonucleotide
cuaggaagcagaaggccac

SEQ ID NO: 2896484 - RNA, 19 nt, Artificial Sequence
  Description of Artificial Sequence: Synthetic oligonucleotide
gaaggcugucuuaaagcgg

SEQ ID NO: 2896485 - RNA, 19 nt, Artificial Sequence
  Description of Artificial Sequence: Synthetic oligonucleotide
caagaggaaaugcuugaac

SEQ ID NO: 2896486 - RNA, 19 nt, Artificial Sequence
  Description of Artificial Sequence: Synthetic oligonucleotide
gcaaggaagaccaagcagc

SEQ ID NO: 2896487 - RNA, 19 nt, Artificial Sequence
  Description of Artificial Sequence: Synthetic oligonucleotide
ugguggaugauggggagag

SEQ ID NO: 2896488 - RNA, 19 nt, Artificial Sequence
  Description of Artificial Sequence: Synthetic oligonucleotide
gugguaggaggauuggcag

SEQ ID NO: 2896489 - RNA, 19 nt, Artificial Sequence
  Description of Artificial Sequence: Synthetic oligonucleotide
acaggaagccagcuccaac

SEQ ID NO: 2896490 - RNA, 19 nt, Artificial Sequence
  Description of Artificial Sequence: Synthetic oligonucleotide
gcuuguaagggacuggagc

SEQ ID NO: 2896491 - RNA, 19 nt, Artificial Sequence
  Description of Artificial Sequence: Synthetic oligonucleotide
aggaaaugcuugaacuucg

SEQ ID NO: 2896492 - RNA, 19 nt, Artificial Sequence
  Description of Artificial Sequence: Synthetic oligonucleotide
gauacggcucucacgggcg

SEQ ID NO: 2896493 - RNA, 19 nt, Artificial Sequence
  Description of Artificial Sequence: Synthetic oligonucleotide
cuggaaggcugucuuaaag

SEQ ID NO: 2896494 - RNA, 19 nt, Artificial Sequence
  Description of Artificial Sequence: Synthetic oligonucleotide
ggagagaguguucagcacc

SEQ ID NO: 2896495 - RNA, 19 nt, Artificial Sequence
  Description of Artificial Sequence: Synthetic oligonucleotide
gaaugcugccacuggcggg

SEQ ID NO: 2896496 - RNA, 19 nt, Artificial Sequence
  Description of Artificial Sequence: Synthetic oligonucleotide
uccagggagcgcuuguaag

SEQ ID NO: 2896497 - RNA, 19 nt, Artificial Sequence
  Description of Artificial Sequence: Synthetic oligonucleotide
guggaugauggggagagag

SEQ ID NO: 2896498 - RNA, 19 nt, Artificial Sequence
  Description of Artificial Sequence: Synthetic oligonucleotide
gaaagcaaaggcaauggcu

SEQ ID NO: 2896499 - RNA, 19 nt, Artificial Sequence
  Description of Artificial Sequence: Synthetic oligonucleotide
guaggccuggaauauccag

SEQ ID NO: 2896500 - RNA, 19 nt, Artificial Sequence
  Description of Artificial Sequence: Synthetic oligonucleotide
cugugauacggcucucacg

SEQ ID NO: 2896501 - RNA, 19 nt, Artificial Sequence
  Description of Artificial Sequence: Synthetic oligonucleotide
cagaggacagcuaggauga

SEQ ID NO: 2896502 - RNA, 19 nt, Artificial Sequence
  Description of Artificial Sequence: Synthetic oligonucleotide
ucuuaaagcgggugccugu

SEQ ID NO: 2896503 - RNA, 19 nt, Artificial Sequence
  Description of Artificial Sequence: Synthetic oligonucleotide
aggaaggacaggaagccag

SEQ ID NO: 2896504 - RNA, 19 nt, Artificial Sequence
  Description of Artificial Sequence: Synthetic oligonucleotide
cugcuguuccccaagagga

SEQ ID NO: 2896505 - RNA, 19 nt, Artificial Sequence
  Description of Artificial Sequence: Synthetic oligonucleotide
gaguguucagcaccacacc

SEQ ID NO: 2896506 - RNA, 19 nt, Artificial Sequence
  Description of Artificial Sequence: Synthetic oligonucleotide
gcugcuguuccccaagagg

SEQ ID NO: 2896507 - RNA, 19 nt, Artificial Sequence
  Description of Artificial Sequence: Synthetic oligonucleotide
uagggcaaggaagaccaag

SEQ ID NO: 2896508 - RNA, 19 nt, Artificial Sequence
  Description of Artificial Sequence: Synthetic oligonucleotide
gauggggagagaguguuca

SEQ ID NO: 2896509 - RNA, 19 nt, Artificial Sequence
  Description of Artificial Sequence: Synthetic oligonucleotide
gacggagaagaaagcaaag

SEQ ID NO: 2896510 - RNA, 19 nt, Artificial Sequence
  Description of Artificial Sequence: Synthetic oligonucleotide
gguaggaggauuggcaggg

SEQ ID NO: 2896511 - RNA, 19 nt, Artificial Sequence
  Description of Artificial Sequence: Synthetic oligonucleotide
aggacagcuaggaugaagu

SEQ ID NO: 2896512 - RNA, 19 nt, Artificial Sequence
  Description of Artificial Sequence: Synthetic oligonucleotide
gaacuucgaaugcugccac

SEQ ID NO: 2896513 - RNA, 19 nt, Artificial Sequence
  Description of Artificial Sequence: Synthetic oligonucleotide
ccagaggacagcuaggaug

SEQ ID NO: 2896514 - RNA, 19 nt, Artificial Sequence
  Description of Artificial Sequence: Synthetic oligonucleotide
cuucgaaugcugccacugg

SEQ ID NO: 2896515 - RNA, 19 nt, Artificial Sequence
  Description of Artificial Sequence: Synthetic oligonucleotide
agcuacaggccacauaauu

SEQ ID NO: 2896516 - RNA, 19 nt, Artificial Sequence
  Description of Artificial Sequence: Synthetic oligonucleotide
ggcaaggaagaccaagcag

SEQ ID NO: 2896517 - RNA, 19 nt, Artificial Sequence
  Description of Artificial Sequence: Synthetic oligonucleotide
uaaagcgggugccugugau

SEQ ID NO: 2896518 - RNA, 19 nt, Artificial Sequence
  Description of Artificial Sequence: Synthetic oligonucleotide
gcuaggaugaaguccaaga

SEQ ID NO: 2896519 - RNA, 19 nt, Artificial Sequence
  Description of Artificial Sequence: Synthetic oligonucleotide
uggaugauggggagagagu

SEQ ID NO: 2896520 - RNA, 19 nt, Artificial Sequence
  Description of Artificial Sequence: Synthetic oligonucleotide
acuucgaaugcugccacug

SEQ ID NO: 2896521 - RNA, 19 nt, Artificial Sequence
  Description of Artificial Sequence: Synthetic oligonucleotide
cugucuuaaagcgggugcc

SEQ ID NO: 2896522 - RNA, 19 nt, Artificial Sequence
  Description of Artificial Sequence: Synthetic oligonucleotide
cugcccagaggacagcuag

SEQ ID NO: 2896523 - RNA, 19 nt, Artificial Sequence
  Description of Artificial Sequence: Synthetic oligonucleotide
uucagcaccacaccaccuu

SEQ ID NO: 2896524 - RNA, 19 nt, Artificial Sequence
  Description of Artificial Sequence: Synthetic oligonucleotide
uacaggccacauaauugcu

SEQ ID NO: 2896525 - RNA, 19 nt, Artificial Sequence
  Description of Artificial Sequence: Synthetic oligonucleotide
ugcugugaggacgcagugg

SEQ ID NO: 2896526 - RNA, 19 nt, Artificial Sequence
  Description of Artificial Sequence: Synthetic oligonucleotide
ugcuugaacuucgaaugcu

SEQ ID NO: 2896527 - RNA, 19 nt, Artificial Sequence
  Description of Artificial Sequence: Synthetic oligonucleotide
ucucacgggcgucuagggc

SEQ ID NO: 2896528 - RNA, 19 nt, Artificial Sequence
  Description of Artificial Sequence: Synthetic oligonucleotide
ggaugauggggagagagug

SEQ ID NO: 2896529 - RNA, 19 nt, Artificial Sequence
  Description of Artificial Sequence: Synthetic oligonucleotide
cucacgggcgucuagggca

SEQ ID NO: 2896530 - RNA, 19 nt, Artificial Sequence
  Description of Artificial Sequence: Synthetic oligonucleotide
cgggcuaggaagcagaagg

SEQ ID NO: 2896531 - RNA, 19 nt, Artificial Sequence
  Description of Artificial Sequence: Synthetic oligonucleotide
ggcaauggcugccuuggcg

SEQ ID NO: 2896532 - RNA, 19 nt, Artificial Sequence
  Description of Artificial Sequence: Synthetic oligonucleotide
auugcugugaggacgcagu

SEQ ID NO: 2896533 - RNA, 19 nt, Artificial Sequence
  Description of Artificial Sequence: Synthetic oligonucleotide
gcaauggcugccuuggcgc

SEQ ID NO: 2896534 - RNA, 19 nt, Artificial Sequence
  Description of Artificial Sequence: Synthetic oligonucleotide
gacuggagccucaucucgg

SEQ ID NO: 2896535 - RNA, 19 nt, Artificial Sequence
  Description of Artificial Sequence: Synthetic oligonucleotide
gcugucuuaaagcgggugc

SEQ ID NO: 2896536 - RNA, 19 nt, Artificial Sequence
  Description of Artificial Sequence: Synthetic oligonucleotide
uuaaagcgggugccuguga

SEQ ID NO: 2896537 - RNA, 19 nt, Artificial Sequence
  Description of Artificial Sequence: Synthetic oligonucleotide
cacaaaccagacaccugcc

SEQ ID NO: 2896538 - RNA, 19 nt, Artificial Sequence
  Description of Artificial Sequence: Synthetic oligonucleotide
aacuucgaaugcugccacu

SEQ ID NO: 2896539 - RNA, 19 nt, Artificial Sequence
  Description of Artificial Sequence: Synthetic oligonucleotide
aggagacucuguccuguuc

SEQ ID NO: 2896540 - RNA, 19 nt, Artificial Sequence
  Description of Artificial Sequence: Synthetic oligonucleotide
caaaccagacaccugccca

SEQ ID NO: 2896541 - RNA, 19 nt, Artificial Sequence
  Description of Artificial Sequence: Synthetic oligonucleotide
uggggagagaguguucagc

SEQ ID NO: 2896542 - RNA, 19 nt, Artificial Sequence
  Description of Artificial Sequence: Synthetic oligonucleotide
gaaaugcuugaacuucgaa

SEQ ID NO: 2896543 - RNA, 19 nt, Artificial Sequence
  Description of Artificial Sequence: Synthetic oligonucleotide
gaggacagcuaggaugaag

SEQ ID NO: 2896544 - RNA, 19 nt, Artificial Sequence
  Description of Artificial Sequence: Synthetic oligonucleotide
ccaacugcgaagcuacagg

SEQ ID NO: 2896545 - RNA, 19 nt, Artificial Sequence
  Description of Artificial Sequence: Synthetic oligonucleotide
agagcuggaaggcugucuu

SEQ ID NO: 2896546 - RNA, 19 nt, Artificial Sequence
  Description of Artificial Sequence: Synthetic oligonucleotide
uuggcagggcugguggugg

SEQ ID NO: 2896547 - RNA, 19 nt, Artificial Sequence
  Description of Artificial Sequence: Synthetic oligonucleotide
gagaguguucagcaccaca

SEQ ID NO: 2896548 - RNA, 19 nt, Artificial Sequence
  Description of Artificial Sequence: Synthetic oligonucleotide
aggaagccagcuccaacug

SEQ ID NO: 2896549 - RNA, 19 nt, Artificial Sequence
  Description of Artificial Sequence: Synthetic oligonucleotide
uccccaagaggaaaugcuu

SEQ ID NO: 2896550 - RNA, 19 nt, Artificial Sequence
  Description of Artificial Sequence: Synthetic oligonucleotide
gaagaccaagcagcugagg

SEQ ID NO: 2896551 - RNA, 19 nt, Artificial Sequence
  Description of Artificial Sequence: Synthetic oligonucleotide
ugaggagacucuguccugu

SEQ ID NO: 2896552 - RNA, 19 nt, Artificial Sequence
  Description of Artificial Sequence: Synthetic oligonucleotide
cagacagggacggagaaga

SEQ ID NO: 2896553 - RNA, 19 nt, Artificial Sequence
  Description of Artificial Sequence: Synthetic oligonucleotide
gcuacaggccacauaauug

SEQ ID NO: 2896554 - RNA, 19 nt, Artificial Sequence
  Description of Artificial Sequence: Synthetic oligonucleotide
uugcugugaggacgcagug

SEQ ID NO: 2896555 - RNA, 19 nt, Artificial Sequence
  Description of Artificial Sequence: Synthetic oligonucleotide
aagagcuggaaggcugucu

SEQ ID NO: 2896556 - RNA, 19 nt, Artificial Sequence
  Description of Artificial Sequence: Synthetic oligonucleotide
cuuaaagcgggugccugug

SEQ ID NO: 2896557 - RNA, 19 nt, Artificial Sequence
  Description of Artificial Sequence: Synthetic oligonucleotide
aaggaagaccaagcagcug

SEQ ID NO: 2896558 - RNA, 19 nt, Artificial Sequence
  Description of Artificial Sequence: Synthetic oligonucleotide
cucucacgggcgucuaggg

SEQ ID NO: 2896559 - RNA, 19 nt, Artificial Sequence
  Description of Artificial Sequence: Synthetic oligonucleotide
gucuagggcaaggaagacc

SEQ ID NO: 2896560 - RNA, 19 nt, Artificial Sequence
  Description of Artificial Sequence: Synthetic oligonucleotide
agggacggagaagaaagca

SEQ ID NO: 2896561 - RNA, 19 nt, Artificial Sequence
  Description of Artificial Sequence: Synthetic oligonucleotide
uuguaagggacuggagccu

SEQ ID NO: 2896562 - RNA, 19 nt, Artificial Sequence
  Description of Artificial Sequence: Synthetic oligonucleotide
ccuggaauauccagacagg

SEQ ID NO: 2896563 - RNA, 19 nt, Artificial Sequence
  Description of Artificial Sequence: Synthetic oligonucleotide
ucauccagggagcgcuugu

SEQ ID NO: 2896564 - RNA, 19 nt, Artificial Sequence
  Description of Artificial Sequence: Synthetic oligonucleotide
gagagaguguucagcacca

SEQ ID NO: 2896565 - RNA, 19 nt, Artificial Sequence
  Description of Artificial Sequence: Synthetic oligonucleotide
ugucuuaaagcgggugccu

SEQ ID NO: 2896566 - RNA, 19 nt, Artificial Sequence
  Description of Artificial Sequence: Synthetic oligonucleotide
agaaggccacaaaccagac

SEQ ID NO: 2896567 - RNA, 19 nt, Artificial Sequence
  Description of Artificial Sequence: Synthetic oligonucleotide
aaagcgggugccugugaua

SEQ ID NO: 2896568 - RNA, 19 nt, Artificial Sequence
  Description of Artificial Sequence: Synthetic oligonucleotide
gccacauaauugcugugag

SEQ ID NO: 2896569 - RNA, 19 nt, Artificial Sequence
  Description of Artificial Sequence: Synthetic oligonucleotide
gaaggccacaaaccagaca

SEQ ID NO: 2896570 - RNA, 19 nt, Artificial Sequence
  Description of Artificial Sequence: Synthetic oligonucleotide
guuccccaagaggaaaugc

SEQ ID NO: 2896571 - RNA, 19 nt, Artificial Sequence
  Description of Artificial Sequence: Synthetic oligonucleotide
uggcgggcuaggaagcaga

SEQ ID NO: 2896572 - RNA, 19 nt, Artificial Sequence
  Description of Artificial Sequence: Synthetic oligonucleotide
uguaagggacuggagccuc

SEQ ID NO: 2896573 - RNA, 19 nt, Artificial Sequence
  Description of Artificial Sequence: Synthetic oligonucleotide
ggaggauuggcagggcugg

SEQ ID NO: 2896574 - RNA, 19 nt, Artificial Sequence
  Description of Artificial Sequence: Synthetic oligonucleotide
gcugugaggacgcagugga

SEQ ID NO: 2896575 - RNA, 19 nt, Artificial Sequence
  Description of Artificial Sequence: Synthetic oligonucleotide
ggcgucuagggcaaggaag

SEQ ID NO: 2896576 - RNA, 19 nt, Artificial Sequence
  Description of Artificial Sequence: Synthetic oligonucleotide
cagggacggagaagaaagc

SEQ ID NO: 2896577 - RNA, 19 nt, Artificial Sequence
  Description of Artificial Sequence: Synthetic oligonucleotide
acuggagccucaucucgga

SEQ ID NO: 2896578 - RNA, 19 nt, Artificial Sequence
  Description of Artificial Sequence: Synthetic oligonucleotide
ugcuguuccccaagaggaa

SEQ ID NO: 2896579 - RNA, 19 nt, Artificial Sequence
  Description of Artificial Sequence: Synthetic oligonucleotide
ucaucucggagguccugga

SEQ ID NO: 2896580 - RNA, 19 nt, Artificial Sequence
  Description of Artificial Sequence: Synthetic oligonucleotide
acgcaguggagcugaggag

SEQ ID NO: 2896581 - RNA, 19 nt, Artificial Sequence
  Description of Artificial Sequence: Synthetic oligonucleotide
ugaaguccaagagcuggaa

SEQ ID NO: 2896582 - RNA, 19 nt, Artificial Sequence
  Description of Artificial Sequence: Synthetic oligonucleotide
ucggagguccuggaaggcc

SEQ ID NO: 2896583 - RNA, 19 nt, Artificial Sequence
  Description of Artificial Sequence: Synthetic oligonucleotide
caagcagcugaggaaggac

SEQ ID NO: 2896584 - RNA, 19 nt, Artificial Sequence
  Description of Artificial Sequence: Synthetic oligonucleotide
accuucauccagggagcgc

SEQ ID NO: 2896585 - RNA, 19 nt, Artificial Sequence
  Description of Artificial Sequence: Synthetic oligonucleotide
cuuggcgcugcuguucccc

SEQ ID NO: 2896586 - RNA, 19 nt, Artificial Sequence
  Description of Artificial Sequence: Synthetic oligonucleotide
auggggagagaguguucag

SEQ ID NO: 2896587 - RNA, 19 nt, Artificial Sequence
  Description of Artificial Sequence: Synthetic oligonucleotide
acaggccacauaauugcug

SEQ ID NO: 2896588 - RNA, 19 nt, Artificial Sequence
  Description of Artificial Sequence: Synthetic oligonucleotide
ggggagagaguguucagca

SEQ ID NO: 2896589 - RNA, 19 nt, Artificial Sequence
  Description of Artificial Sequence: Synthetic oligonucleotide
cacuggcgggcuaggaagc

SEQ ID NO: 2896590 - RNA, 19 nt, Artificial Sequence
  Description of Artificial Sequence: Synthetic oligonucleotide
gucuuaaagcgggugccug

SEQ ID NO: 2896591 - RNA, 19 nt, Artificial Sequence
  Description of Artificial Sequence: Synthetic oligonucleotide
augauggggagagaguguu

SEQ ID NO: 2896592 - RNA, 19 nt, Artificial Sequence
  Description of Artificial Sequence: Synthetic oligonucleotide
agcuaggaugaaguccaag

SEQ ID NO: 2896593 - RNA, 19 nt, Artificial Sequence
  Description of Artificial Sequence: Synthetic oligonucleotide
ccacauaauugcugugagg

SEQ ID NO: 2896594 - RNA, 19 nt, Artificial Sequence
  Description of Artificial Sequence: Synthetic oligonucleotide
gugauacggcucucacggg

SEQ ID NO: 2896595 - RNA, 19 nt, Artificial Sequence
  Description of Artificial Sequence: Synthetic oligonucleotide
auuggcagggcugguggug

SEQ ID NO: 2896596 - RNA, 19 nt, Artificial Sequence
  Description of Artificial Sequence: Synthetic oligonucleotide
aggaggauuggcagggcug

SEQ ID NO: 2896597 - RNA, 19 nt, Artificial Sequence
  Description of Artificial Sequence: Synthetic oligonucleotide
ugauggggagagaguguuc

SEQ ID NO: 2896598 - RNA, 19 nt, Artificial Sequence
  Description of Artificial Sequence: Synthetic oligonucleotide
cugugguaggaggauuggc

SEQ ID NO: 2896599 - RNA, 19 nt, Artificial Sequence
  Description of Artificial Sequence: Synthetic oligonucleotide
agcgcuuguaagggacugg

SEQ ID NO: 2896600 - RNA, 19 nt, Artificial Sequence
  Description of Artificial Sequence: Synthetic oligonucleotide
accagacaccugcccagag

SEQ ID NO: 2896601 - RNA, 19 nt, Artificial Sequence
  Description of Artificial Sequence: Synthetic oligonucleotide
agagaguguucagcaccac

SEQ ID NO: 2896602 - RNA, 19 nt, Artificial Sequence
  Description of Artificial Sequence: Synthetic oligonucleotide
gaggacgcaguggagcuga

SEQ ID NO: 2896603 - RNA, 19 nt, Artificial Sequence
  Description of Artificial Sequence: Synthetic oligonucleotide
aggccacaaaccagacacc

SEQ ID NO: 2896604 - RNA, 19 nt, Artificial Sequence
  Description of Artificial Sequence: Synthetic oligonucleotide
uucauccagggagcgcuug

SEQ ID NO: 2896605 - RNA, 19 nt, Artificial Sequence
  Description of Artificial Sequence: Synthetic oligonucleotide
gccagcuccaacugcgaag

SEQ ID NO: 2896606 - RNA, 19 nt, Artificial Sequence
  Description of Artificial Sequence: Synthetic oligonucleotide
gagcgcuuguaagggacug

SEQ ID NO: 2896607 - RNA, 19 nt, Artificial Sequence
  Description of Artificial Sequence: Synthetic oligonucleotide
agcuggaaggcugucuuaa

SEQ ID NO: 2896608 - RNA, 19 nt, Artificial Sequence
  Description of Artificial Sequence: Synthetic oligonucleotide
caggaagccagcuccaacu

SEQ ID NO: 2896609 - RNA, 19 nt, Artificial Sequence
  Description of Artificial Sequence: Synthetic oligonucleotide
ugcgaagcuacaggccaca

SEQ ID NO: 2896610 - RNA, 19 nt, Artificial Sequence
  Description of Artificial Sequence: Synthetic oligonucleotide
cugaggagacucuguccug

SEQ ID NO: 2896611 - RNA, 19 nt, Artificial Sequence
  Description of Artificial Sequence: Synthetic oligonucleotide
ccacuggcgggcuaggaag

SEQ ID NO: 2896612 - RNA, 19 nt, Artificial Sequence
  Description of Artificial Sequence: Synthetic oligonucleotide
gcuugaacuucgaaugcug

SEQ ID NO: 2896613 - RNA, 19 nt, Artificial Sequence
  Description of Artificial Sequence: Synthetic oligonucleotide
augaaguccaagagcugga

SEQ ID NO: 2896614 - RNA, 19 nt, Artificial Sequence
  Description of Artificial Sequence: Synthetic oligonucleotide
ggcuaggaagcagaaggcc

SEQ ID NO: 2896615 - RNA, 19 nt, Artificial Sequence
  Description of Artificial Sequence: Synthetic oligonucleotide
aaccagacaccugcccaga

SEQ ID NO: 2896616 - RNA, 19 nt, Artificial Sequence
  Description of Artificial Sequence: Synthetic oligonucleotide
agcaccacaccaccuucau

SEQ ID NO: 2896617 - RNA, 19 nt, Artificial Sequence
  Description of Artificial Sequence: Synthetic oligonucleotide
gcuccaacugcgaagcuac

SEQ ID NO: 2896618 - RNA, 19 nt, Artificial Sequence
  Description of Artificial Sequence: Synthetic oligonucleotide
uaggaagcagaaggccaca

SEQ ID NO: 2896619 - RNA, 19 nt, Artificial Sequence
  Description of Artificial Sequence: Synthetic oligonucleotide
gacagggacggagaagaaa

SEQ ID NO: 2896620 - RNA, 19 nt, Artificial Sequence
  Description of Artificial Sequence: Synthetic oligonucleotide
ccagcuccaacugcgaagc

SEQ ID NO: 2896621 - RNA, 19 nt, Artificial Sequence
  Description of Artificial Sequence: Synthetic oligonucleotide
ucacgggcgucuagggcaa

SEQ ID NO: 2896622 - RNA, 19 nt, Artificial Sequence
  Description of Artificial Sequence: Synthetic oligonucleotide
aggauuggcagggcuggug

SEQ ID NO: 2896623 - RNA, 19 nt, Artificial Sequence
  Description of Artificial Sequence: Synthetic oligonucleotide
cugcgaagcuacaggccac

SEQ ID NO: 2896624 - RNA, 19 nt, Artificial Sequence
  Description of Artificial Sequence: Synthetic oligonucleotide
aggccacauaauugcugug

SEQ ID NO: 2896625 - RNA, 19 nt, Artificial Sequence
  Description of Artificial Sequence: Synthetic oligonucleotide
gcuaggaagcagaaggcca

SEQ ID NO: 2896626 - RNA, 19 nt, Artificial Sequence
  Description of Artificial Sequence: Synthetic oligonucleotide
auccagggagcgcuuguaa

SEQ ID NO: 2896627 - RNA, 19 nt, Artificial Sequence
  Description of Artificial Sequence: Synthetic oligonucleotide
caaggaagaccaagcagcu

SEQ ID NO: 2896628 - RNA, 19 nt, Artificial Sequence
  Description of Artificial Sequence: Synthetic oligonucleotide
gcagaaggccacaaaccag

SEQ ID NO: 2896629 - RNA, 19 nt, Artificial Sequence
  Description of Artificial Sequence: Synthetic oligonucleotide
caggccacauaauugcugu

SEQ ID NO: 2896630 - RNA, 19 nt, Artificial Sequence
  Description of Artificial Sequence: Synthetic oligonucleotide
gcgggugccugugauacgg

SEQ ID NO: 2896631 - RNA, 19 nt, Artificial Sequence
  Description of Artificial Sequence: Synthetic oligonucleotide
ccccaagaggaaaugcuug

SEQ ID NO: 2896632 - RNA, 19 nt, Artificial Sequence
  Description of Artificial Sequence: Synthetic oligonucleotide
cugugaggacgcaguggag

SEQ ID NO: 2896633 - RNA, 19 nt, Artificial Sequence
  Description of Artificial Sequence: Synthetic oligonucleotide
uuggcgcugcuguucccca

SEQ ID NO: 2896634 - RNA, 19 nt, Artificial Sequence
  Description of Artificial Sequence: Synthetic oligonucleotide
cagcugaggaaggacagga

SEQ ID NO: 2896635 - RNA, 19 nt, Artificial Sequence
  Description of Artificial Sequence: Synthetic oligonucleotide
ccaccuucauccagggagc

SEQ ID NO: 2896636 - RNA, 19 nt, Artificial Sequence
  Description of Artificial Sequence: Synthetic oligonucleotide
agcgggugccugugauacg

SEQ ID NO: 2896637 - RNA, 19 nt, Artificial Sequence
  Description of Artificial Sequence: Synthetic oligonucleotide
ugaggacgcaguggagcug

SEQ ID NO: 2896638 - RNA, 19 nt, Artificial Sequence
  Description of Artificial Sequence: Synthetic oligonucleotide
cuggagccucaucucggag

SEQ ID NO: 2896639 - RNA, 19 nt, Artificial Sequence
  Description of Artificial Sequence: Synthetic oligonucleotide
caccuucauccagggagcg

SEQ ID NO: 2896640 - RNA, 19 nt, Artificial Sequence
  Description of Artificial Sequence: Synthetic oligonucleotide
agggagcgcuuguaaggga

SEQ ID NO: 2896641 - RNA, 19 nt, Artificial Sequence
  Description of Artificial Sequence: Synthetic oligonucleotide
gugccugugauacggcucu

SEQ ID NO: 2896642 - RNA, 19 nt, Artificial Sequence
  Description of Artificial Sequence: Synthetic oligonucleotide
ggacggagaagaaagcaaa

SEQ ID NO: 2896643 - RNA, 19 nt, Artificial Sequence
  Description of Artificial Sequence: Synthetic oligonucleotide
auacggcucucacgggcgu

SEQ ID NO: 2896644 - RNA, 19 nt, Artificial Sequence
  Description of Artificial Sequence: Synthetic oligonucleotide
gugaggacgcaguggagcu

SEQ ID NO: 2896645 - RNA, 19 nt, Artificial Sequence
  Description of Artificial Sequence: Synthetic oligonucleotide
agacaccugcccagaggac

SEQ ID NO: 2896646 - RNA, 19 nt, Artificial Sequence
  Description of Artificial Sequence: Synthetic oligonucleotide
ggaagaccaagcagcugag

SEQ ID NO: 2896647 - RNA, 19 nt, Artificial Sequence
  Description of Artificial Sequence: Synthetic oligonucleotide
cgaaugcugccacuggcgg

SEQ ID NO: 2896648 - RNA, 19 nt, Artificial Sequence
  Description of Artificial Sequence: Synthetic oligonucleotide
gaugauggggagagagugu

SEQ ID NO: 2896649 - RNA, 19 nt, Artificial Sequence
  Description of Artificial Sequence: Synthetic oligonucleotide
agcuccaacugcgaagcua

SEQ ID NO: 2896650 - RNA, 19 nt, Artificial Sequence
  Description of Artificial Sequence: Synthetic oligonucleotide
ggccacauaauugcuguga

SEQ ID NO: 2896651 - RNA, 19 nt, Artificial Sequence
  Description of Artificial Sequence: Synthetic oligonucleotide
uaauugcugugaggacgca

SEQ ID NO: 2896652 - RNA, 19 nt, Artificial Sequence
  Description of Artificial Sequence: Synthetic oligonucleotide
gggcaaggaagaccaagca

SEQ ID NO: 2896653 - RNA, 19 nt, Artificial Sequence
  Description of Artificial Sequence: Synthetic oligonucleotide
auccagacagggacggaga

SEQ ID NO: 2896654 - RNA, 19 nt, Artificial Sequence
  Description of Artificial Sequence: Synthetic oligonucleotide
uaagggacuggagccucau

SEQ ID NO: 2896655 - RNA, 19 nt, Artificial Sequence
  Description of Artificial Sequence: Synthetic oligonucleotide
gggagagaguguucagcac

SEQ ID NO: 2896656 - RNA, 19 nt, Artificial Sequence
  Description of Artificial Sequence: Synthetic oligonucleotide
agccagcuccaacugcgaa

SEQ ID NO: 2896657 - RNA, 19 nt, Artificial Sequence
  Description of Artificial Sequence: Synthetic oligonucleotide
cucggagguccuggaaggc

SEQ ID NO: 2896658 - RNA, 19 nt, Artificial Sequence
  Description of Artificial Sequence: Synthetic oligonucleotide
acgggcgucuagggcaagg

SEQ ID NO: 2896659 - RNA, 19 nt, Artificial Sequence
  Description of Artificial Sequence: Synthetic oligonucleotide
ugccuuggcgcugcuguuc

SEQ ID NO: 2896660 - RNA, 19 nt, Artificial Sequence
  Description of Artificial Sequence: Synthetic oligonucleotide
ggacagcuaggaugaaguc

SEQ ID NO: 2896661 - RNA, 19 nt, Artificial Sequence
  Description of Artificial Sequence: Synthetic oligonucleotide
aagccagcuccaacugcga

SEQ ID NO: 2896662 - RNA, 19 nt, Artificial Sequence
  Description of Artificial Sequence: Synthetic oligonucleotide
gggcuaggaagcagaaggc

SEQ ID NO: 2896663 - RNA, 19 nt, Artificial Sequence
  Description of Artificial Sequence: Synthetic oligonucleotide
gcgucuagggcaaggaaga

SEQ ID NO: 2896664 - RNA, 19 nt, Artificial Sequence
  Description of Artificial Sequence: Synthetic oligonucleotide
ggcgcugcuguuccccaag

SEQ ID NO: 2896665 - RNA, 19 nt, Artificial Sequence
  Description of Artificial Sequence: Synthetic oligonucleotide
gggagcgcuuguaagggac

SEQ ID NO: 2896666 - RNA, 19 nt, Artificial Sequence
  Description of Artificial Sequence: Synthetic oligonucleotide
gcagcugaggaaggacagg

SEQ ID NO: 2896667 - RNA, 19 nt, Artificial Sequence
  Description of Artificial Sequence: Synthetic oligonucleotide
aaggccagguaggccugga

SEQ ID NO: 2896668 - RNA, 19 nt, Artificial Sequence
  Description of Artificial Sequence: Synthetic oligonucleotide
gaaggacaggaagccagcu

SEQ ID NO: 2896669 - RNA, 19 nt, Artificial Sequence
  Description of Artificial Sequence: Synthetic oligonucleotide
cccaagaggaaaugcuuga

SEQ ID NO: 2896670 - RNA, 19 nt, Artificial Sequence
  Description of Artificial Sequence: Synthetic oligonucleotide
aggaagcagaaggccacaa

SEQ ID NO: 2896671 - RNA, 19 nt, Artificial Sequence
  Description of Artificial Sequence: Synthetic oligonucleotide
accugcccagaggacagcu

SEQ ID NO: 2896672 - RNA, 19 nt, Artificial Sequence
  Description of Artificial Sequence: Synthetic oligonucleotide
guaggaggauuggcagggc

SEQ ID NO: 2896673 - RNA, 19 nt, Artificial Sequence
  Description of Artificial Sequence: Synthetic oligonucleotide
gauuggcagggcugguggu

SEQ ID NO: 2896674 - RNA, 19 nt, Artificial Sequence
  Description of Artificial Sequence: Synthetic oligonucleotide
ggcugucuuaaagcgggug

SEQ ID NO: 2896675 - RNA, 19 nt, Artificial Sequence
  Description of Artificial Sequence: Synthetic oligonucleotide
aagcuacaggccacauaau

SEQ ID NO: 2896676 - RNA, 19 nt, Artificial Sequence
  Description of Artificial Sequence: Synthetic oligonucleotide
ggaagcagaaggccacaaa

SEQ ID NO: 2896677 - RNA, 19 nt, Artificial Sequence
  Description of Artificial Sequence: Synthetic oligonucleotide
ggaugaaguccaagagcug

SEQ ID NO: 2896678 - RNA, 19 nt, Artificial Sequence
  Description of Artificial Sequence: Synthetic oligonucleotide
gccugugguaggaggauug

SEQ ID NO: 2896679 - RNA, 19 nt, Artificial Sequence
  Description of Artificial Sequence: Synthetic oligonucleotide
ggagccucaucucggaggu

SEQ ID NO: 2896680 - RNA, 19 nt, Artificial Sequence
  Description of Artificial Sequence: Synthetic oligonucleotide
auauccagacagggacgga

SEQ ID NO: 2896681 - RNA, 19 nt, Artificial Sequence
  Description of Artificial Sequence: Synthetic oligonucleotide
cuggcgggcuaggaagcag

SEQ ID NO: 2896682 - RNA, 19 nt, Artificial Sequence
  Description of Artificial Sequence: Synthetic oligonucleotide
cagggcuggugguggauga

SEQ ID NO: 2896683 - RNA, 19 nt, Artificial Sequence
  Description of Artificial Sequence: Synthetic oligonucleotide
ggaaaugcuugaacuucga

SEQ ID NO: 2896684 - RNA, 19 nt, Artificial Sequence
  Description of Artificial Sequence: Synthetic oligonucleotide
gggacggagaagaaagcaa

SEQ ID NO: 2896685 - RNA, 19 nt, Artificial Sequence
  Description of Artificial Sequence: Synthetic oligonucleotide
gcugccuuggcgcugcugu

SEQ ID NO: 2896686 - RNA, 19 nt, Artificial Sequence
  Description of Artificial Sequence: Synthetic oligonucleotide
gacaggaagccagcuccaa

SEQ ID NO: 2896687 - RNA, 19 nt, Artificial Sequence
  Description of Artificial Sequence: Synthetic oligonucleotide
acuggcgggcuaggaagca

SEQ ID NO: 2896688 - RNA, 19 nt, Artificial Sequence
  Description of Artificial Sequence: Synthetic oligonucleotide
ccugugguaggaggauugg

SEQ ID NO: 2896689 - RNA, 19 nt, Artificial Sequence
  Description of Artificial Sequence: Synthetic oligonucleotide
ggugccugugauacggcuc

SEQ ID NO: 2896690 - RNA, 19 nt, Artificial Sequence
  Description of Artificial Sequence: Synthetic oligonucleotide
gcugccacuggcgggcuag

SEQ ID NO: 2896691 - RNA, 19 nt, Artificial Sequence
  Description of Artificial Sequence: Synthetic oligonucleotide
cagguaggccuggaauauc

SEQ ID NO: 2896692 - RNA, 19 nt, Artificial Sequence
  Description of Artificial Sequence: Synthetic oligonucleotide
guaagggacuggagccuca

SEQ ID NO: 2896693 - RNA, 19 nt, Artificial Sequence
  Description of Artificial Sequence: Synthetic oligonucleotide
caagagcuggaaggcuguc

SEQ ID NO: 2896694 - RNA, 19 nt, Artificial Sequence
  Description of Artificial Sequence: Synthetic oligonucleotide
agcugaggaaggacaggaa

SEQ ID NO: 2896695 - RNA, 19 nt, Artificial Sequence
  Description of Artificial Sequence: Synthetic oligonucleotide
gugguggaugauggggaga

SEQ ID NO: 2896696 - RNA, 19 nt, Artificial Sequence
  Description of Artificial Sequence: Synthetic oligonucleotide
ggacgcaguggagcugagg

SEQ ID NO: 2896697 - RNA, 19 nt, Artificial Sequence
  Description of Artificial Sequence: Synthetic oligonucleotide
aggccagguaggccuggaa

SEQ ID NO: 2896698 - RNA, 19 nt, Artificial Sequence
  Description of Artificial Sequence: Synthetic oligonucleotide
gccacaaaccagacaccug

SEQ ID NO: 2896699 - RNA, 19 nt, Artificial Sequence
  Description of Artificial Sequence: Synthetic oligonucleotide
ugccacuggcgggcuagga

SEQ ID NO: 2896700 - RNA, 19 nt, Artificial Sequence
  Description of Artificial Sequence: Synthetic oligonucleotide
caucucggagguccuggaa

SEQ ID NO: 2896701 - RNA, 19 nt, Artificial Sequence
  Description of Artificial Sequence: Synthetic oligonucleotide
ccagacagggacggagaag

SEQ ID NO: 2896702 - RNA, 19 nt, Artificial Sequence
  Description of Artificial Sequence: Synthetic oligonucleotide
gcaguggagcugaggagac

SEQ ID NO: 2896703 - RNA, 19 nt, Artificial Sequence
  Description of Artificial Sequence: Synthetic oligonucleotide
uggcgcugcuguuccccaa

SEQ ID NO: 2896704 - RNA, 19 nt, Artificial Sequence
  Description of Artificial Sequence: Synthetic oligonucleotide
ggccacaaaccagacaccu

SEQ ID NO: 2896705 - RNA, 19 nt, Artificial Sequence
  Description of Artificial Sequence: Synthetic oligonucleotide
gcuguuccccaagaggaaa

SEQ ID NO: 2896706 - RNA, 19 nt, Artificial Sequence
  Description of Artificial Sequence: Synthetic oligonucleotide
uacggcucucacgggcguc

SEQ ID NO: 2896707 - RNA, 19 nt, Artificial Sequence
  Description of Artificial Sequence: Synthetic oligonucleotide
ggaaggccagguaggccug

SEQ ID NO: 2896708 - RNA, 19 nt, Artificial Sequence
  Description of Artificial Sequence: Synthetic oligonucleotide
gcgcuuguaagggacugga

SEQ ID NO: 2896709 - RNA, 19 nt, Artificial Sequence
  Description of Artificial Sequence: Synthetic oligonucleotide
gguaggccuggaauaucca

SEQ ID NO: 2896710 - RNA, 19 nt, Artificial Sequence
  Description of Artificial Sequence: Synthetic oligonucleotide
ggcucucacgggcgucuag

SEQ ID NO: 2896711 - RNA, 19 nt, Artificial Sequence
  Description of Artificial Sequence: Synthetic oligonucleotide
cuccaacugcgaagcuaca

SEQ ID NO: 2896712 - RNA, 19 nt, Artificial Sequence
  Description of Artificial Sequence: Synthetic oligonucleotide
caauggcugccuuggcgcu

SEQ ID NO: 2896713 - RNA, 19 nt, Artificial Sequence
  Description of Artificial Sequence: Synthetic oligonucleotide
gcagggcuggugguggaug

SEQ ID NO: 2896714 - RNA, 19 nt, Artificial Sequence
  Description of Artificial Sequence: Synthetic oligonucleotide
cuagggcaaggaagaccaa

SEQ ID NO: 2896715 - RNA, 19 nt, Artificial Sequence
  Description of Artificial Sequence: Synthetic oligonucleotide
gcuggaaggcugucuuaaa

SEQ ID NO: 2896716 - RNA, 19 nt, Artificial Sequence
  Description of Artificial Sequence: Synthetic oligonucleotide
agacagggacggagaagaa

SEQ ID NO: 2896717 - RNA, 19 nt, Artificial Sequence
  Description of Artificial Sequence: Synthetic oligonucleotide
cugccacuggcgggcuagg

SEQ ID NO: 2896718 - RNA, 19 nt, Artificial Sequence
  Description of Artificial Sequence: Synthetic oligonucleotide
ggggccugugguaggagga

SEQ ID NO: 2896719 - RNA, 19 nt, Artificial Sequence
  Description of Artificial Sequence: Synthetic oligonucleotide
cgcuuguaagggacuggag

SEQ ID NO: 2896720 - RNA, 19 nt, Artificial Sequence
  Description of Artificial Sequence: Synthetic oligonucleotide
ccuucauccagggagcgcu

SEQ ID NO: 2896721 - RNA, 19 nt, Artificial Sequence
  Description of Artificial Sequence: Synthetic oligonucleotide
ggccuggaauauccagaca

SEQ ID NO: 2896722 - RNA, 19 nt, Artificial Sequence
  Description of Artificial Sequence: Synthetic oligonucleotide
guucagcaccacaccaccu

SEQ ID NO: 2896723 - RNA, 19 nt, Artificial Sequence
  Description of Artificial Sequence: Synthetic oligonucleotide
ggccagguaggccuggaau

SEQ ID NO: 2896724 - RNA, 19 nt, Artificial Sequence
  Description of Artificial Sequence: Synthetic oligonucleotide
gaggagacucuguccuguu

SEQ ID NO: 2896725 - RNA, 19 nt, Artificial Sequence
  Description of Artificial Sequence: Synthetic oligonucleotide
gcaccacaccaccuucauc

SEQ ID NO: 2896726 - RNA, 19 nt, Artificial Sequence
  Description of Artificial Sequence: Synthetic oligonucleotide
aggcugucuuaaagcgggu

SEQ ID NO: 2896727 - RNA, 19 nt, Artificial Sequence
  Description of Artificial Sequence: Synthetic oligonucleotide
gcgggcuaggaagcagaag

SEQ ID NO: 2896728 - RNA, 19 nt, Artificial Sequence
  Description of Artificial Sequence: Synthetic oligonucleotide
caccugcccagaggacagc

SEQ ID NO: 2896729 - RNA, 19 nt, Artificial Sequence
  Description of Artificial Sequence: Synthetic oligonucleotide
cgcaguggagcugaggaga

SEQ ID NO: 2896730 - RNA, 19 nt, Artificial Sequence
  Description of Artificial Sequence: Synthetic oligonucleotide
agaggacagcuaggaugaa

SEQ ID NO: 2896731 - RNA, 19 nt, Artificial Sequence
  Description of Artificial Sequence: Synthetic oligonucleotide
cauccagggagcgcuugua

SEQ ID NO: 2896732 - RNA, 19 nt, Artificial Sequence
  Description of Artificial Sequence: Synthetic oligonucleotide
agggcuggugguggaugau

SEQ ID NO: 2896733 - RNA, 19 nt, Artificial Sequence
  Description of Artificial Sequence: Synthetic oligonucleotide
ugccugugauacggcucuc

SEQ ID NO: 2896734 - RNA, 19 nt, Artificial Sequence
  Description of Artificial Sequence: Synthetic oligonucleotide
ccaagaggaaaugcuugaa

SEQ ID NO: 2896735 - RNA, 19 nt, Artificial Sequence
  Description of Artificial Sequence: Synthetic oligonucleotide
gggcgucuagggcaaggaa

SEQ ID NO: 2896736 - RNA, 19 nt, Artificial Sequence
  Description of Artificial Sequence: Synthetic oligonucleotide
caccaccuucauccaggga

SEQ ID NO: 2896737 - RNA, 19 nt, Artificial Sequence
  Description of Artificial Sequence: Synthetic oligonucleotide
aggacgcaguggagcugag

SEQ ID NO: 2896738 - RNA, 19 nt, Artificial Sequence
  Description of Artificial Sequence: Synthetic oligonucleotide
ggagcugaggagacucugu

SEQ ID NO: 2896739 - RNA, 19 nt, Artificial Sequence
  Description of Artificial Sequence: Synthetic oligonucleotide
gggugccugugauacggcu

SEQ ID NO: 2896740 - RNA, 19 nt, Artificial Sequence
  Description of Artificial Sequence: Synthetic oligonucleotide
gccugugauacggcucuca

SEQ ID NO: 2896741 - RNA, 19 nt, Artificial Sequence
  Description of Artificial Sequence: Synthetic oligonucleotide
ccaagcagcugaggaagga

SEQ ID NO: 2896742 - RNA, 19 nt, Artificial Sequence
  Description of Artificial Sequence: Synthetic oligonucleotide
cagcuaggaugaaguccaa

SEQ ID NO: 2896743 - RNA, 19 nt, Artificial Sequence
  Description of Artificial Sequence: Synthetic oligonucleotide
gagccucaucucggagguc

SEQ ID NO: 2896744 - RNA, 19 nt, Artificial Sequence
  Description of Artificial Sequence: Synthetic oligonucleotide
guggagcugaggagacucu

SEQ ID NO: 2896745 - RNA, 19 nt, Artificial Sequence
  Description of Artificial Sequence: Synthetic oligonucleotide
ccuuggcgcugcuguuccc

SEQ ID NO: 2896746 - RNA, 19 nt, Artificial Sequence
  Description of Artificial Sequence: Synthetic oligonucleotide
gaggauuggcagggcuggu

SEQ ID NO: 2896747 - RNA, 19 nt, Artificial Sequence
  Description of Artificial Sequence: Synthetic oligonucleotide
gguggaugauggggagaga

SEQ ID NO: 2896748 - RNA, 19 nt, Artificial Sequence
  Description of Artificial Sequence: Synthetic oligonucleotide
ggagcgcuuguaagggacu

SEQ ID NO: 2896749 - RNA, 19 nt, Artificial Sequence
  Description of Artificial Sequence: Synthetic oligonucleotide
ccucaucucggagguccug

SEQ ID NO: 2896750 - RNA, 19 nt, Artificial Sequence
  Description of Artificial Sequence: Synthetic oligonucleotide
cgucuagggcaaggaagac

SEQ ID NO: 2896751 - RNA, 19 nt, Artificial Sequence
  Description of Artificial Sequence: Synthetic oligonucleotide
cacgggcgucuagggcaag

SEQ ID NO: 2896752 - RNA, 19 nt, Artificial Sequence
  Description of Artificial Sequence: Synthetic oligonucleotide
ggcgggcuaggaagcagaa

SEQ ID NO: 2896753 - RNA, 19 nt, Artificial Sequence
  Description of Artificial Sequence: Synthetic oligonucleotide
cgggugccugugauacggc

SEQ ID NO: 2896754 - RNA, 19 nt, Artificial Sequence
  Description of Artificial Sequence: Synthetic oligonucleotide
ggcugccuuggcgcugcug

SEQ ID NO: 2896755 - RNA, 19 nt, Artificial Sequence
  Description of Artificial Sequence: Synthetic oligonucleotide
cgaagcuacaggccacaua

SEQ ID NO: 2896756 - RNA, 19 nt, Artificial Sequence
  Description of Artificial Sequence: Synthetic oligonucleotide
ccagguaggccuggaauau

SEQ ID NO: 2896757 - RNA, 19 nt, Artificial Sequence
  Description of Artificial Sequence: Synthetic oligonucleotide
caguggagcugaggagacu

SEQ ID NO: 2896758 - RNA, 19 nt, Artificial Sequence
  Description of Artificial Sequence: Synthetic oligonucleotide
ccugcccagaggacagcua

SEQ ID NO: 2896759 - RNA, 19 nt, Artificial Sequence
  Description of Artificial Sequence: Synthetic oligonucleotide
cagcuccaacugcgaagcu

SEQ ID NO: 2896760 - RNA, 19 nt, Artificial Sequence
  Description of Artificial Sequence: Synthetic oligonucleotide
gggccugugguaggaggau

SEQ ID NO: 2896761 - RNA, 19 nt, Artificial Sequence
  Description of Artificial Sequence: Synthetic oligonucleotide
ggccugugguaggaggauu

SEQ ID NO: 2896762 - RNA, 19 nt, Artificial Sequence
  Description of Artificial Sequence: Synthetic oligonucleotide
cgggcgucuagggcaagga

SEQ ID NO: 2896763 - RNA, 19 nt, Artificial Sequence
  Description of Artificial Sequence: Synthetic oligonucleotide
gccucaucucggagguccu

SEQ ID NO: 2896764 - RNA, 19 nt, Artificial Sequence
  Description of Artificial Sequence: Synthetic oligonucleotide
gcgaagcuacaggccacau

SEQ ID NO: 2896765 - RNA, 19 nt, Artificial Sequence
  Description of Artificial Sequence: Synthetic oligonucleotide
aaugcugaggcccacuugg

SEQ ID NO: 2896766 - RNA, 19 nt, Artificial Sequence
  Description of Artificial Sequence: Synthetic oligonucleotide
ugaagcuccaguuacagca

SEQ ID NO: 2896767 - RNA, 19 nt, Artificial Sequence
  Description of Artificial Sequence: Synthetic oligonucleotide
acuuuugagacacuugcac

SEQ ID NO: 2896768 - RNA, 19 nt, Artificial Sequence
  Description of Artificial Sequence: Synthetic oligonucleotide
gaacuuuugagacacuugc

SEQ ID NO: 2896769 - RNA, 19 nt, Artificial Sequence
  Description of Artificial Sequence: Synthetic oligonucleotide
agcuucagaugcuugaagc

SEQ ID NO: 2896770 - RNA, 19 nt, Artificial Sequence
  Description of Artificial Sequence: Synthetic oligonucleotide
uuuugagacacuugcaccc

SEQ ID NO: 2896771 - RNA, 19 nt, Artificial Sequence
  Description of Artificial Sequence: Synthetic oligonucleotide
guaaccaggauagaguucg

SEQ ID NO: 2896772 - RNA, 19 nt, Artificial Sequence
  Description of Artificial Sequence: Synthetic oligonucleotide
cacaggaugaaguagccgg

SEQ ID NO: 2896773 - RNA, 19 nt, Artificial Sequence
  Description of Artificial Sequence: Synthetic oligonucleotide
aguuccaaugcugaggccc

SEQ ID NO: 2896774 - RNA, 19 nt, Artificial Sequence
  Description of Artificial Sequence: Synthetic oligonucleotide
ugaguuccaaugcugaggc

SEQ ID NO: 2896775 - RNA, 19 nt, Artificial Sequence
  Description of Artificial Sequence: Synthetic oligonucleotide
aucugagccacugaguucc

SEQ ID NO: 2896776 - RNA, 19 nt, Artificial Sequence
  Description of Artificial Sequence: Synthetic oligonucleotide
ugugauucacccucugugg

SEQ ID NO: 2896777 - RNA, 19 nt, Artificial Sequence
  Description of Artificial Sequence: Synthetic oligonucleotide
gaaguuguaagcgccaggg

SEQ ID NO: 2896778 - RNA, 19 nt, Artificial Sequence
  Description of Artificial Sequence: Synthetic oligonucleotide
gaugcuggaaguuguaagc

SEQ ID NO: 2896779 - RNA, 19 nt, Artificial Sequence
  Description of Artificial Sequence: Synthetic oligonucleotide
aaccacuccagucccaggg

SEQ ID NO: 2896780 - RNA, 19 nt, Artificial Sequence
  Description of Artificial Sequence: Synthetic oligonucleotide
acgcuguagcuucagaugc

SEQ ID NO: 2896781 - RNA, 19 nt, Artificial Sequence
  Description of Artificial Sequence: Synthetic oligonucleotide
cucauuagagggaugcugg

SEQ ID NO: 2896782 - RNA, 19 nt, Artificial Sequence
  Description of Artificial Sequence: Synthetic oligonucleotide
uugugauucacccucugug

SEQ ID NO: 2896783 - RNA, 19 nt, Artificial Sequence
  Description of Artificial Sequence: Synthetic oligonucleotide
uuuauggugguguugcacu

SEQ ID NO: 2896784 - RNA, 19 nt, Artificial Sequence
  Description of Artificial Sequence: Synthetic oligonucleotide
aacgcuguagcuucagaug

SEQ ID NO: 2896785 - RNA, 19 nt, Artificial Sequence
  Description of Artificial Sequence: Synthetic oligonucleotide
cuuuugagacacuugcacc

SEQ ID NO: 2896786 - RNA, 19 nt, Artificial Sequence
  Description of Artificial Sequence: Synthetic oligonucleotide
uucagaugcuugaagcucc

SEQ ID NO: 2896787 - RNA, 19 nt, Artificial Sequence
  Description of Artificial Sequence: Synthetic oligonucleotide
uauucagcauuacuugcgc

SEQ ID NO: 2896788 - RNA, 19 nt, Artificial Sequence
  Description of Artificial Sequence: Synthetic oligonucleotide
uucuuuauggugguguugc

SEQ ID NO: 2896789 - RNA, 19 nt, Artificial Sequence
  Description of Artificial Sequence: Synthetic oligonucleotide
cuuggcaacacuccuagac

SEQ ID NO: 2896790 - RNA, 19 nt, Artificial Sequence
  Description of Artificial Sequence: Synthetic oligonucleotide
aguuguaagcgccaggggu

SEQ ID NO: 2896791 - RNA, 19 nt, Artificial Sequence
  Description of Artificial Sequence: Synthetic oligonucleotide
ugcgcagcucccaagagcc

SEQ ID NO: 2896792 - RNA, 19 nt, Artificial Sequence
  Description of Artificial Sequence: Synthetic oligonucleotide
uagaccaacguaaccagga

SEQ ID NO: 2896793 - RNA, 19 nt, Artificial Sequence
  Description of Artificial Sequence: Synthetic oligonucleotide
uucagcauuacuugcgcca

SEQ ID NO: 2896794 - RNA, 19 nt, Artificial Sequence
  Description of Artificial Sequence: Synthetic oligonucleotide
uguagcuucagaugcuuga

SEQ ID NO: 2896795 - RNA, 19 nt, Artificial Sequence
  Description of Artificial Sequence: Synthetic oligonucleotide
uuggcaacacuccuagacc

SEQ ID NO: 2896796 - RNA, 19 nt, Artificial Sequence
  Description of Artificial Sequence: Synthetic oligonucleotide
agggguuccgaacuccugc

SEQ ID NO: 2896797 - RNA, 19 nt, Artificial Sequence
  Description of Artificial Sequence: Synthetic oligonucleotide
gugguguugcacuugaccc

SEQ ID NO: 2896798 - RNA, 19 nt, Artificial Sequence
  Description of Artificial Sequence: Synthetic oligonucleotide
uccuagaccaacguaacca

SEQ ID NO: 2896799 - RNA, 19 nt, Artificial Sequence
  Description of Artificial Sequence: Synthetic oligonucleotide
auucagcauuacuugcgcc

SEQ ID NO: 2896800 - RNA, 19 nt, Artificial Sequence
  Description of Artificial Sequence: Synthetic oligonucleotide
accaacguaaccaggauag

SEQ ID NO: 2896801 - RNA, 19 nt, Artificial Sequence
  Description of Artificial Sequence: Synthetic oligonucleotide
acguauucagcauuacuug

SEQ ID NO: 2896802 - RNA, 19 nt, Artificial Sequence
  Description of Artificial Sequence: Synthetic oligonucleotide
agccuuugugcgcagcucc

SEQ ID NO: 2896803 - RNA, 19 nt, Artificial Sequence
  Description of Artificial Sequence: Synthetic oligonucleotide
aagagcaucgugaggcccc

SEQ ID NO: 2896804 - RNA, 19 nt, Artificial Sequence
  Description of Artificial Sequence: Synthetic oligonucleotide
uuacagcacaggaugaagu

SEQ ID NO: 2896805 - RNA, 19 nt, Artificial Sequence
  Description of Artificial Sequence: Synthetic oligonucleotide
uaucagccgaacuucgucc

SEQ ID NO: 2896806 - RNA, 19 nt, Artificial Sequence
  Description of Artificial Sequence: Synthetic oligonucleotide
auuacuugcgccaacgcug

SEQ ID NO: 2896807 - RNA, 19 nt, Artificial Sequence
  Description of Artificial Sequence: Synthetic oligonucleotide
ugcuugaagcuccaguuac

SEQ ID NO: 2896808 - RNA, 19 nt, Artificial Sequence
  Description of Artificial Sequence: Synthetic oligonucleotide
uagaguucgggaaaccacu

SEQ ID NO: 2896809 - RNA, 19 nt, Artificial Sequence
  Description of Artificial Sequence: Synthetic oligonucleotide
aaguuguaagcgccagggg

SEQ ID NO: 2896810 - RNA, 19 nt, Artificial Sequence
  Description of Artificial Sequence: Synthetic oligonucleotide
gacacuugcacccugggaa

SEQ ID NO: 2896811 - RNA, 19 nt, Artificial Sequence
  Description of Artificial Sequence: Synthetic oligonucleotide
agccucauuagagggaugc

SEQ ID NO: 2896812 - RNA, 19 nt, Artificial Sequence
  Description of Artificial Sequence: Synthetic oligonucleotide
agccacugaguuccaaugc

SEQ ID NO: 2896813 - RNA, 19 nt, Artificial Sequence
  Description of Artificial Sequence: Synthetic oligonucleotide
ugaaguagccggcgaagag

SEQ ID NO: 2896814 - RNA, 19 nt, Artificial Sequence
  Description of Artificial Sequence: Synthetic oligonucleotide
aucagccgaacuucguccc

SEQ ID NO: 2896815 - RNA, 19 nt, Artificial Sequence
  Description of Artificial Sequence: Synthetic oligonucleotide
guauucagcauuacuugcg

SEQ ID NO: 2896816 - RNA, 19 nt, Artificial Sequence
  Description of Artificial Sequence: Synthetic oligonucleotide
acaccgcucuucuuuaugg

SEQ ID NO: 2896817 - RNA, 19 nt, Artificial Sequence
  Description of Artificial Sequence: Synthetic oligonucleotide
ugagacacuugcacccugg

SEQ ID NO: 2896818 - RNA, 19 nt, Artificial Sequence
  Description of Artificial Sequence: Synthetic oligonucleotide
caaggaacuuuugagacac

SEQ ID NO: 2896819 - RNA, 19 nt, Artificial Sequence
  Description of Artificial Sequence: Synthetic oligonucleotide
uugacccagccuuugugcg

SEQ ID NO: 2896820 - RNA, 19 nt, Artificial Sequence
  Description of Artificial Sequence: Synthetic oligonucleotide
uucguccccaccaaggaac

SEQ ID NO: 2896821 - RNA, 19 nt, Artificial Sequence
  Description of Artificial Sequence: Synthetic oligonucleotide
aacacuccuagaccaacgu

SEQ ID NO: 2896822 - RNA, 19 nt, Artificial Sequence
  Description of Artificial Sequence: Synthetic oligonucleotide
aacuccugcuaucagccga

SEQ ID NO: 2896823 - RNA, 19 nt, Artificial Sequence
  Description of Artificial Sequence: Synthetic oligonucleotide
ugcuaucagccgaacuucg

SEQ ID NO: 2896824 - RNA, 19 nt, Artificial Sequence
  Description of Artificial Sequence: Synthetic oligonucleotide
auagaguucgggaaaccac

SEQ ID NO: 2896825 - RNA, 19 nt, Artificial Sequence
  Description of Artificial Sequence: Synthetic oligonucleotide
aacguaaccaggauagagu

SEQ ID NO: 2896826 - RNA, 19 nt, Artificial Sequence
  Description of Artificial Sequence: Synthetic oligonucleotide
aacuucguccccaccaagg

SEQ ID NO: 2896827 - RNA, 19 nt, Artificial Sequence
  Description of Artificial Sequence: Synthetic oligonucleotide
uguugcacuugacccagcc

SEQ ID NO: 2896828 - RNA, 19 nt, Artificial Sequence
  Description of Artificial Sequence: Synthetic oligonucleotide
uuugugauucacccucugu

SEQ ID NO: 2896829 - RNA, 19 nt, Artificial Sequence
  Description of Artificial Sequence: Synthetic oligonucleotide
uugcacuugacccagccuu

SEQ ID NO: 2896830 - RNA, 19 nt, Artificial Sequence
  Description of Artificial Sequence: Synthetic oligonucleotide
uggcaacacuccuagacca

SEQ ID NO: 2896831 - RNA, 19 nt, Artificial Sequence
  Description of Artificial Sequence: Synthetic oligonucleotide
cagcacaggaugaaguagc

SEQ ID NO: 2896832 - RNA, 19 nt, Artificial Sequence
  Description of Artificial Sequence: Synthetic oligonucleotide
aguucgggaaaccacucca

SEQ ID NO: 2896833 - RNA, 19 nt, Artificial Sequence
  Description of Artificial Sequence: Synthetic oligonucleotide
gaaguagccggcgaagagc

SEQ ID NO: 2896834 - RNA, 19 nt, Artificial Sequence
  Description of Artificial Sequence: Synthetic oligonucleotide
uccaguuacagcacaggau

SEQ ID NO: 2896835 - RNA, 19 nt, Artificial Sequence
  Description of Artificial Sequence: Synthetic oligonucleotide
uagccggcgaagagcaucg

SEQ ID NO: 2896836 - RNA, 19 nt, Artificial Sequence
  Description of Artificial Sequence: Synthetic oligonucleotide
agcauuacuugcgccaacg

SEQ ID NO: 2896837 - RNA, 19 nt, Artificial Sequence
  Description of Artificial Sequence: Synthetic oligonucleotide
cugaguuccaaugcugagg

SEQ ID NO: 2896838 - RNA, 19 nt, Artificial Sequence
  Description of Artificial Sequence: Synthetic oligonucleotide
accaggauagaguucggga

SEQ ID NO: 2896839 - RNA, 19 nt, Artificial Sequence
  Description of Artificial Sequence: Synthetic oligonucleotide
cuagaccaacguaaccagg

SEQ ID NO: 2896840 - RNA, 19 nt, Artificial Sequence
  Description of Artificial Sequence: Synthetic oligonucleotide
ugcuggaaguuguaagcgc

SEQ ID NO: 2896841 - RNA, 19 nt, Artificial Sequence
  Description of Artificial Sequence: Synthetic oligonucleotide
aaccaggauagaguucggg

SEQ ID NO: 2896842 - RNA, 19 nt, Artificial Sequence
  Description of Artificial Sequence: Synthetic oligonucleotide
uagcuucagaugcuugaag

SEQ ID NO: 2896843 - RNA, 19 nt, Artificial Sequence
  Description of Artificial Sequence: Synthetic oligonucleotide
uuuugugauucacccucug

SEQ ID NO: 2896844 - RNA, 19 nt, Artificial Sequence
  Description of Artificial Sequence: Synthetic oligonucleotide
cuugaagcuccaguuacag

SEQ ID NO: 2896845 - RNA, 19 nt, Artificial Sequence
  Description of Artificial Sequence: Synthetic oligonucleotide
agucccagggaucugggga

SEQ ID NO: 2896846 - RNA, 19 nt, Artificial Sequence
  Description of Artificial Sequence: Synthetic oligonucleotide
acugaguuccaaugcugag

SEQ ID NO: 2896847 - RNA, 19 nt, Artificial Sequence
  Description of Artificial Sequence: Synthetic oligonucleotide
caacguaaccaggauagag

SEQ ID NO: 2896848 - RNA, 19 nt, Artificial Sequence
  Description of Artificial Sequence: Synthetic oligonucleotide
aggcaucugagccacugag

SEQ ID NO: 2896849 - RNA, 19 nt, Artificial Sequence
  Description of Artificial Sequence: Synthetic oligonucleotide
augcuggaaguuguaagcg

SEQ ID NO: 2896850 - RNA, 19 nt, Artificial Sequence
  Description of Artificial Sequence: Synthetic oligonucleotide
caacacuccuagaccaacg

SEQ ID NO: 2896851 - RNA, 19 nt, Artificial Sequence
  Description of Artificial Sequence: Synthetic oligonucleotide
uuacuugcgccaacgcugu

SEQ ID NO: 2896852 - RNA, 19 nt, Artificial Sequence
  Description of Artificial Sequence: Synthetic oligonucleotide
ccaguuacagcacaggaug

SEQ ID NO: 2896853 - RNA, 19 nt, Artificial Sequence
  Description of Artificial Sequence: Synthetic oligonucleotide
agacguauucagcauuacu

SEQ ID NO: 2896854 - RNA, 19 nt, Artificial Sequence
  Description of Artificial Sequence: Synthetic oligonucleotide
cacuuggcaacacuccuag

SEQ ID NO: 2896855 - RNA, 19 nt, Artificial Sequence
  Description of Artificial Sequence: Synthetic oligonucleotide
aaaccacuccagucccagg

SEQ ID NO: 2896856 - RNA, 19 nt, Artificial Sequence
  Description of Artificial Sequence: Synthetic oligonucleotide
gagccacugaguuccaaug

SEQ ID NO: 2896857 - RNA, 19 nt, Artificial Sequence
  Description of Artificial Sequence: Synthetic oligonucleotide
gaaaccacuccagucccag

SEQ ID NO: 2896858 - RNA, 19 nt, Artificial Sequence
  Description of Artificial Sequence: Synthetic oligonucleotide
aaguagccggcgaagagca

SEQ ID NO: 2896859 - RNA, 19 nt, Artificial Sequence
  Description of Artificial Sequence: Synthetic oligonucleotide
acaggaugaaguagccggc

SEQ ID NO: 2896860 - RNA, 19 nt, Artificial Sequence
  Description of Artificial Sequence: Synthetic oligonucleotide
guuacagcacaggaugaag

SEQ ID NO: 2896861 - RNA, 19 nt, Artificial Sequence
  Description of Artificial Sequence: Synthetic oligonucleotide
gugauucacccucuguggc

SEQ ID NO: 2896862 - RNA, 19 nt, Artificial Sequence
  Description of Artificial Sequence: Synthetic oligonucleotide
ucccaagagccucauuaga

SEQ ID NO: 2896863 - RNA, 19 nt, Artificial Sequence
  Description of Artificial Sequence: Synthetic oligonucleotide
ugauucacccucuguggcu

SEQ ID NO: 2896864 - RNA, 19 nt, Artificial Sequence
  Description of Artificial Sequence: Synthetic oligonucleotide
acguaaccaggauagaguu

SEQ ID NO: 2896865 - RNA, 19 nt, Artificial Sequence
  Description of Artificial Sequence: Synthetic oligonucleotide
uacagcacaggaugaagua

SEQ ID NO: 2896866 - RNA, 19 nt, Artificial Sequence
  Description of Artificial Sequence: Synthetic oligonucleotide
gaagaggcaucugagccac

SEQ ID NO: 2896867 - RNA, 19 nt, Artificial Sequence
  Description of Artificial Sequence: Synthetic oligonucleotide
ggaugcuggaaguuguaag

SEQ ID NO: 2896868 - RNA, 19 nt, Artificial Sequence
  Description of Artificial Sequence: Synthetic oligonucleotide
ggugguguugcacuugacc

SEQ ID NO: 2896869 - RNA, 19 nt, Artificial Sequence
  Description of Artificial Sequence: Synthetic oligonucleotide
ugguguugcacuugaccca

SEQ ID NO: 2896870 - RNA, 19 nt, Artificial Sequence
  Description of Artificial Sequence: Synthetic oligonucleotide
acacuugcacccugggaag

SEQ ID NO: 2896871 - RNA, 19 nt, Artificial Sequence
  Description of Artificial Sequence: Synthetic oligonucleotide
uugugcgcagcucccaaga

SEQ ID NO: 2896872 - RNA, 19 nt, Artificial Sequence
  Description of Artificial Sequence: Synthetic oligonucleotide
uccagucccagggaucugg

SEQ ID NO: 2896873 - RNA, 19 nt, Artificial Sequence
  Description of Artificial Sequence: Synthetic oligonucleotide
cuugcgccaacgcuguagc

SEQ ID NO: 2896874 - RNA, 19 nt, Artificial Sequence
  Description of Artificial Sequence: Synthetic oligonucleotide
ucauuagagggaugcugga

SEQ ID NO: 2896875 - RNA, 19 nt, Artificial Sequence
  Description of Artificial Sequence: Synthetic oligonucleotide
agcacaggaugaaguagcc

SEQ ID NO: 2896876 - RNA, 19 nt, Artificial Sequence
  Description of Artificial Sequence: Synthetic oligonucleotide
caggaagaggcaucugagc

SEQ ID NO: 2896877 - RNA, 19 nt, Artificial Sequence
  Description of Artificial Sequence: Synthetic oligonucleotide
gagacacuugcacccuggg

SEQ ID NO: 2896878 - RNA, 19 nt, Artificial Sequence
  Description of Artificial Sequence: Synthetic oligonucleotide
acagcacaggaugaaguag

SEQ ID NO: 2896879 - RNA, 19 nt, Artificial Sequence
  Description of Artificial Sequence: Synthetic oligonucleotide
uuugugcgcagcucccaag

SEQ ID NO: 2896880 - RNA, 19 nt, Artificial Sequence
  Description of Artificial Sequence: Synthetic oligonucleotide
uucgggaaaccacuccagu

SEQ ID NO: 2896881 - RNA, 19 nt, Artificial Sequence
  Description of Artificial Sequence: Synthetic oligonucleotide
aacuuuugagacacuugca

SEQ ID NO: 2896882 - RNA, 19 nt, Artificial Sequence
  Description of Artificial Sequence: Synthetic oligonucleotide
agcgccagggguuccgaac

SEQ ID NO: 2896883 - RNA, 19 nt, Artificial Sequence
  Description of Artificial Sequence: Synthetic oligonucleotide
cuaucagccgaacuucguc

SEQ ID NO: 2896884 - RNA, 19 nt, Artificial Sequence
  Description of Artificial Sequence: Synthetic oligonucleotide
uugaagcuccaguuacagc

SEQ ID NO: 2896885 - RNA, 19 nt, Artificial Sequence
  Description of Artificial Sequence: Synthetic oligonucleotide
cacuccuagaccaacguaa

SEQ ID NO: 2896886 - RNA, 19 nt, Artificial Sequence
  Description of Artificial Sequence: Synthetic oligonucleotide
accgcucuucuuuauggug

SEQ ID NO: 2896887 - RNA, 19 nt, Artificial Sequence
  Description of Artificial Sequence: Synthetic oligonucleotide
gaguucgggaaaccacucc

SEQ ID NO: 2896888 - RNA, 19 nt, Artificial Sequence
  Description of Artificial Sequence: Synthetic oligonucleotide
ucgggaaaccacuccaguc

SEQ ID NO: 2896889 - RNA, 19 nt, Artificial Sequence
  Description of Artificial Sequence: Synthetic oligonucleotide
acuccuagaccaacguaac

SEQ ID NO: 2896890 - RNA, 19 nt, Artificial Sequence
  Description of Artificial Sequence: Synthetic oligonucleotide
gaugcuugaagcuccaguu

SEQ ID NO: 2896891 - RNA, 19 nt, Artificial Sequence
  Description of Artificial Sequence: Synthetic oligonucleotide
ugugcgcagcucccaagag

SEQ ID NO: 2896892 - RNA, 19 nt, Artificial Sequence
  Description of Artificial Sequence: Synthetic oligonucleotide
cuucagaugcuugaagcuc

SEQ ID NO: 2896893 - RNA, 19 nt, Artificial Sequence
  Description of Artificial Sequence: Synthetic oligonucleotide
gaacuccugcuaucagccg

SEQ ID NO: 2896894 - RNA, 19 nt, Artificial Sequence
  Description of Artificial Sequence: Synthetic oligonucleotide
cuuuauggugguguugcac

SEQ ID NO: 2896895 - RNA, 19 nt, Artificial Sequence
  Description of Artificial Sequence: Synthetic oligonucleotide
uggaaguuguaagcgccag

SEQ ID NO: 2896896 - RNA, 19 nt, Artificial Sequence
  Description of Artificial Sequence: Synthetic oligonucleotide
acuucguccccaccaagga

SEQ ID NO: 2896897 - RNA, 19 nt, Artificial Sequence
  Description of Artificial Sequence: Synthetic oligonucleotide
ccaagagccucauuagagg

SEQ ID NO: 2896898 - RNA, 19 nt, Artificial Sequence
  Description of Artificial Sequence: Synthetic oligonucleotide
uaaccaggauagaguucgg

SEQ ID NO: 2896899 - RNA, 19 nt, Artificial Sequence
  Description of Artificial Sequence: Synthetic oligonucleotide
gacaccgcucuucuuuaug

SEQ ID NO: 2896900 - RNA, 19 nt, Artificial Sequence
  Description of Artificial Sequence: Synthetic oligonucleotide
agagggaugcuggaaguug

SEQ ID NO: 2896901 - RNA, 19 nt, Artificial Sequence
  Description of Artificial Sequence: Synthetic oligonucleotide
ucuucuuuauggugguguu

SEQ ID NO: 2896902 - RNA, 19 nt, Artificial Sequence
  Description of Artificial Sequence: Synthetic oligonucleotide
gacguauucagcauuacuu

SEQ ID NO: 2896903 - RNA, 19 nt, Artificial Sequence
  Description of Artificial Sequence: Synthetic oligonucleotide
caccaaggaacuuuugaga

SEQ ID NO: 2896904 - RNA, 19 nt, Artificial Sequence
  Description of Artificial Sequence: Synthetic oligonucleotide
cucccagacguauucagca

SEQ ID NO: 2896905 - RNA, 19 nt, Artificial Sequence
  Description of Artificial Sequence: Synthetic oligonucleotide
uugagacacuugcacccug

SEQ ID NO: 2896906 - RNA, 19 nt, Artificial Sequence
  Description of Artificial Sequence: Synthetic oligonucleotide
ucagaugcuugaagcucca

SEQ ID NO: 2896907 - RNA, 19 nt, Artificial Sequence
  Description of Artificial Sequence: Synthetic oligonucleotide
ugagccacugaguuccaau

SEQ ID NO: 2896908 - RNA, 19 nt, Artificial Sequence
  Description of Artificial Sequence: Synthetic oligonucleotide
uccgaacuccugcuaucag

SEQ ID NO: 2896909 - RNA, 19 nt, Artificial Sequence
  Description of Artificial Sequence: Synthetic oligonucleotide
gaucuggggagcagcaccc

SEQ ID NO: 2896910 - RNA, 19 nt, Artificial Sequence
  Description of Artificial Sequence: Synthetic oligonucleotide
ccaccaaggaacuuuugag

SEQ ID NO: 2896911 - RNA, 19 nt, Artificial Sequence
  Description of Artificial Sequence: Synthetic oligonucleotide
gaacuucguccccaccaag

SEQ ID NO: 2896912 - RNA, 19 nt, Artificial Sequence
  Description of Artificial Sequence: Synthetic oligonucleotide
gaagagcaucgugaggccc

SEQ ID NO: 2896913 - RNA, 19 nt, Artificial Sequence
  Description of Artificial Sequence: Synthetic oligonucleotide
ugcugaggcccacuuggca

SEQ ID NO: 2896914 - RNA, 19 nt, Artificial Sequence
  Description of Artificial Sequence: Synthetic oligonucleotide
auucacccucuguggcucc

SEQ ID NO: 2896915 - RNA, 19 nt, Artificial Sequence
  Description of Artificial Sequence: Synthetic oligonucleotide
uuugagacacuugcacccu

SEQ ID NO: 2896916 - RNA, 19 nt, Artificial Sequence
  Description of Artificial Sequence: Synthetic oligonucleotide
ggaucuggggagcagcacc

SEQ ID NO: 2896917 - RNA, 19 nt, Artificial Sequence
  Description of Artificial Sequence: Synthetic oligonucleotide
ucuuuauggugguguugca

SEQ ID NO: 2896918 - RNA, 19 nt, Artificial Sequence
  Description of Artificial Sequence: Synthetic oligonucleotide
acuugcgccaacgcuguag

SEQ ID NO: 2896919 - RNA, 19 nt, Artificial Sequence
  Description of Artificial Sequence: Synthetic oligonucleotide
auggugguguugcacuuga

SEQ ID NO: 2896920 - RNA, 19 nt, Artificial Sequence
  Description of Artificial Sequence: Synthetic oligonucleotide
uuccgaacuccugcuauca

SEQ ID NO: 2896921 - RNA, 19 nt, Artificial Sequence
  Description of Artificial Sequence: Synthetic oligonucleotide
ggaaguuguaagcgccagg

SEQ ID NO: 2896922 - RNA, 19 nt, Artificial Sequence
  Description of Artificial Sequence: Synthetic oligonucleotide
ucagccgaacuucgucccc

SEQ ID NO: 2896923 - RNA, 19 nt, Artificial Sequence
  Description of Artificial Sequence: Synthetic oligonucleotide
aguggcaggaagaggcauc

SEQ ID NO: 2896924 - RNA, 19 nt, Artificial Sequence
  Description of Artificial Sequence: Synthetic oligonucleotide
ucagcauuacuugcgccaa

SEQ ID NO: 2896925 - RNA, 19 nt, Artificial Sequence
  Description of Artificial Sequence: Synthetic oligonucleotide
ugacccagccuuugugcgc

SEQ ID NO: 2896926 - RNA, 19 nt, Artificial Sequence
  Description of Artificial Sequence: Synthetic oligonucleotide
agaggcaucugagccacug

SEQ ID NO: 2896927 - RNA, 19 nt, Artificial Sequence
  Description of Artificial Sequence: Synthetic oligonucleotide
cuccuagaccaacguaacc

SEQ ID NO: 2896928 - RNA, 19 nt, Artificial Sequence
  Description of Artificial Sequence: Synthetic oligonucleotide
agaguucgggaaaccacuc

SEQ ID NO: 2896929 - RNA, 19 nt, Artificial Sequence
  Description of Artificial Sequence: Synthetic oligonucleotide
uccugcuaucagccgaacu

SEQ ID NO: 2896930 - RNA, 19 nt, Artificial Sequence
  Description of Artificial Sequence: Synthetic oligonucleotide
aggaugaaguagccggcga

SEQ ID NO: 2896931 - RNA, 19 nt, Artificial Sequence
  Description of Artificial Sequence: Synthetic oligonucleotide
ucuggggagcagcacccga

SEQ ID NO: 2896932 - RNA, 19 nt, Artificial Sequence
  Description of Artificial Sequence: Synthetic oligonucleotide
gauucacccucuguggcuc

SEQ ID NO: 2896933 - RNA, 19 nt, Artificial Sequence
  Description of Artificial Sequence: Synthetic oligonucleotide
cacugaguuccaaugcuga

SEQ ID NO: 2896934 - RNA, 19 nt, Artificial Sequence
  Description of Artificial Sequence: Synthetic oligonucleotide
caggaugaaguagccggcg

SEQ ID NO: 2896935 - RNA, 19 nt, Artificial Sequence
  Description of Artificial Sequence: Synthetic oligonucleotide
ccgcucuucuuuauggugg

SEQ ID NO: 2896936 - RNA, 19 nt, Artificial Sequence
  Description of Artificial Sequence: Synthetic oligonucleotide
agacacuugcacccuggga

SEQ ID NO: 2896937 - RNA, 19 nt, Artificial Sequence
  Description of Artificial Sequence: Synthetic oligonucleotide
agagccucauuagagggau

SEQ ID NO: 2896938 - RNA, 19 nt, Artificial Sequence
  Description of Artificial Sequence: Synthetic oligonucleotide
cagcacccgagucagcagc

SEQ ID NO: 2896939 - RNA, 19 nt, Artificial Sequence
  Description of Artificial Sequence: Synthetic oligonucleotide
cgaacuccugcuaucagcc

SEQ ID NO: 2896940 - RNA, 19 nt, Artificial Sequence
  Description of Artificial Sequence: Synthetic oligonucleotide
acuccagucccagggaucu

SEQ ID NO: 2896941 - RNA, 19 nt, Artificial Sequence
  Description of Artificial Sequence: Synthetic oligonucleotide
uuauggugguguugcacuu

SEQ ID NO: 2896942 - RNA, 19 nt, Artificial Sequence
  Description of Artificial Sequence: Synthetic oligonucleotide
ccuagaccaacguaaccag

SEQ ID NO: 2896943 - RNA, 19 nt, Artificial Sequence
  Description of Artificial Sequence: Synthetic oligonucleotide
cguauucagcauuacuugc

SEQ ID NO: 2896944 - RNA, 19 nt, Artificial Sequence
  Description of Artificial Sequence: Synthetic oligonucleotide
cuggggagcagcacccgag

SEQ ID NO: 2896945 - RNA, 19 nt, Artificial Sequence
  Description of Artificial Sequence: Synthetic oligonucleotide
gaagcuccaguuacagcac

SEQ ID NO: 2896946 - RNA, 19 nt, Artificial Sequence
  Description of Artificial Sequence: Synthetic oligonucleotide
uugcacccugggaaguggc

SEQ ID NO: 2896947 - RNA, 19 nt, Artificial Sequence
  Description of Artificial Sequence: Synthetic oligonucleotide
aggaacuuuugagacacuu

SEQ ID NO: 2896948 - RNA, 19 nt, Artificial Sequence
  Description of Artificial Sequence: Synthetic oligonucleotide
agcagcacccgagucagca

SEQ ID NO: 2896949 - RNA, 19 nt, Artificial Sequence
  Description of Artificial Sequence: Synthetic oligonucleotide
cuucuuuauggugguguug

SEQ ID NO: 2896950 - RNA, 19 nt, Artificial Sequence
  Description of Artificial Sequence: Synthetic oligonucleotide
ggaacuuuugagacacuug

SEQ ID NO: 2896951 - RNA, 19 nt, Artificial Sequence
  Description of Artificial Sequence: Synthetic oligonucleotide
cuccaguuacagcacagga

SEQ ID NO: 2896952 - RNA, 19 nt, Artificial Sequence
  Description of Artificial Sequence: Synthetic oligonucleotide
agaccaacguaaccaggau

SEQ ID NO: 2896953 - RNA, 19 nt, Artificial Sequence
  Description of Artificial Sequence: Synthetic oligonucleotide
gcuggaaguuguaagcgcc

SEQ ID NO: 2896954 - RNA, 19 nt, Artificial Sequence
  Description of Artificial Sequence: Synthetic oligonucleotide
augaaguagccggcgaaga

SEQ ID NO: 2896955 - RNA, 19 nt, Artificial Sequence
  Description of Artificial Sequence: Synthetic oligonucleotide
cugggaaguggcaggaaga

SEQ ID NO: 2896956 - RNA, 19 nt, Artificial Sequence
  Description of Artificial Sequence: Synthetic oligonucleotide
gggaaaccacuccaguccc

SEQ ID NO: 2896957 - RNA, 19 nt, Artificial Sequence
  Description of Artificial Sequence: Synthetic oligonucleotide
gugcgcagcucccaagagc

SEQ ID NO: 2896958 - RNA, 19 nt, Artificial Sequence
  Description of Artificial Sequence: Synthetic oligonucleotide
aguuacagcacaggaugaa

SEQ ID NO: 2896959 - RNA, 19 nt, Artificial Sequence
  Description of Artificial Sequence: Synthetic oligonucleotide
guucgggaaaccacuccag

SEQ ID NO: 2896960 - RNA, 19 nt, Artificial Sequence
  Description of Artificial Sequence: Synthetic oligonucleotide
gaccaacguaaccaggaua

SEQ ID NO: 2896961 - RNA, 19 nt, Artificial Sequence
  Description of Artificial Sequence: Synthetic oligonucleotide
caucugagccacugaguuc

SEQ ID NO: 2896962 - RNA, 19 nt, Artificial Sequence
  Description of Artificial Sequence: Synthetic oligonucleotide
ggcaggaagaggcaucuga

SEQ ID NO: 2896963 - RNA, 19 nt, Artificial Sequence
  Description of Artificial Sequence: Synthetic oligonucleotide
ugcacccugggaaguggca

SEQ ID NO: 2896964 - RNA, 19 nt, Artificial Sequence
  Description of Artificial Sequence: Synthetic oligonucleotide
gguguugcacuugacccag

SEQ ID NO: 2896965 - RNA, 19 nt, Artificial Sequence
  Description of Artificial Sequence: Synthetic oligonucleotide
cugcuaucagccgaacuuc

SEQ ID NO: 2896966 - RNA, 19 nt, Artificial Sequence
  Description of Artificial Sequence: Synthetic oligonucleotide
augcuugaagcuccaguua

SEQ ID NO: 2896967 - RNA, 19 nt, Artificial Sequence
  Description of Artificial Sequence: Synthetic oligonucleotide
agccgaacuucguccccac

SEQ ID NO: 2896968 - RNA, 19 nt, Artificial Sequence
  Description of Artificial Sequence: Synthetic oligonucleotide
uggggagcagcacccgagu

SEQ ID NO: 2896969 - RNA, 19 nt, Artificial Sequence
  Description of Artificial Sequence: Synthetic oligonucleotide
aaguggcaggaagaggcau

SEQ ID NO: 2896970 - RNA, 19 nt, Artificial Sequence
  Description of Artificial Sequence: Synthetic oligonucleotide
ugcacuugacccagccuuu

SEQ ID NO: 2896971 - RNA, 19 nt, Artificial Sequence
  Description of Artificial Sequence: Synthetic oligonucleotide
ucguccccaccaaggaacu

SEQ ID NO: 2896972 - RNA, 19 nt, Artificial Sequence
  Description of Artificial Sequence: Synthetic oligonucleotide
caaugcugaggcccacuug

SEQ ID NO: 2896973 - RNA, 19 nt, Artificial Sequence
  Description of Artificial Sequence: Synthetic oligonucleotide
guaagcgccagggguuccg

SEQ ID NO: 2896974 - RNA, 19 nt, Artificial Sequence
  Description of Artificial Sequence: Synthetic oligonucleotide
ggagcagcacccgagucag

SEQ ID NO: 2896975 - RNA, 19 nt, Artificial Sequence
  Description of Artificial Sequence: Synthetic oligonucleotide
gcucccaagagccucauua

SEQ ID NO: 2896976 - RNA, 19 nt, Artificial Sequence
  Description of Artificial Sequence: Synthetic oligonucleotide
guggcucccagacguauuc

SEQ ID NO: 2896977 - RNA, 19 nt, Artificial Sequence
  Description of Artificial Sequence: Synthetic oligonucleotide
ccgaacuccugcuaucagc

SEQ ID NO: 2896978 - RNA, 19 nt, Artificial Sequence
  Description of Artificial Sequence: Synthetic oligonucleotide
caggauagaguucgggaaa

SEQ ID NO: 2896979 - RNA, 19 nt, Artificial Sequence
  Description of Artificial Sequence: Synthetic oligonucleotide
gaguuccaaugcugaggcc

SEQ ID NO: 2896980 - RNA, 19 nt, Artificial Sequence
  Description of Artificial Sequence: Synthetic oligonucleotide
gcaggaagaggcaucugag

SEQ ID NO: 2896981 - RNA, 19 nt, Artificial Sequence
  Description of Artificial Sequence: Synthetic oligonucleotide
cauuacuugcgccaacgcu

SEQ ID NO: 2896982 - RNA, 19 nt, Artificial Sequence
  Description of Artificial Sequence: Synthetic oligonucleotide
cgggaaaccacuccagucc

SEQ ID NO: 2896983 - RNA, 19 nt, Artificial Sequence
  Description of Artificial Sequence: Synthetic oligonucleotide
ucccagacguauucagcau

SEQ ID NO: 2896984 - RNA, 19 nt, Artificial Sequence
  Description of Artificial Sequence: Synthetic oligonucleotide
guuccgaacuccugcuauc

SEQ ID NO: 2896985 - RNA, 19 nt, Artificial Sequence
  Description of Artificial Sequence: Synthetic oligonucleotide
ugcgccaacgcuguagcuu

SEQ ID NO: 2896986 - RNA, 19 nt, Artificial Sequence
  Description of Artificial Sequence: Synthetic oligonucleotide
cuggaaguuguaagcgcca

SEQ ID NO: 2896987 - RNA, 19 nt, Artificial Sequence
  Description of Artificial Sequence: Synthetic oligonucleotide
accacuccagucccaggga

SEQ ID NO: 2896988 - RNA, 19 nt, Artificial Sequence
  Description of Artificial Sequence: Synthetic oligonucleotide
augcugaggcccacuuggc

SEQ ID NO: 2896989 - RNA, 19 nt, Artificial Sequence
  Description of Artificial Sequence: Synthetic oligonucleotide
caguuacagcacaggauga

SEQ ID NO: 2896990 - RNA, 19 nt, Artificial Sequence
  Description of Artificial Sequence: Synthetic oligonucleotide
ggcucccagacguauucag

SEQ ID NO: 2896991 - RNA, 19 nt, Artificial Sequence
  Description of Artificial Sequence: Synthetic oligonucleotide
uuguaagcgccagggguuc

SEQ ID NO: 2896992 - RNA, 19 nt, Artificial Sequence
  Description of Artificial Sequence: Synthetic oligonucleotide
acacuccuagaccaacgua

SEQ ID NO: 2896993 - RNA, 19 nt, Artificial Sequence
  Description of Artificial Sequence: Synthetic oligonucleotide
cucuguggcucccagacgu

SEQ ID NO: 2896994 - RNA, 19 nt, Artificial Sequence
  Description of Artificial Sequence: Synthetic oligonucleotide
cagggaucuggggagcagc

SEQ ID NO: 2896995 - RNA, 19 nt, Artificial Sequence
  Description of Artificial Sequence: Synthetic oligonucleotide
guagccggcgaagagcauc

SEQ ID NO: 2896996 - RNA, 19 nt, Artificial Sequence
  Description of Artificial Sequence: Synthetic oligonucleotide
ggcgaagagcaucgugagg

SEQ ID NO: 2896997 - RNA, 19 nt, Artificial Sequence
  Description of Artificial Sequence: Synthetic oligonucleotide
gaaguggcaggaagaggca

SEQ ID NO: 2896998 - RNA, 19 nt, Artificial Sequence
  Description of Artificial Sequence: Synthetic oligonucleotide
uccccaccaaggaacuuuu

SEQ ID NO: 2896999 - RNA, 19 nt, Artificial Sequence
  Description of Artificial Sequence: Synthetic oligonucleotide
cacccgagucagcagcagc

SEQ ID NO: 2897000 - RNA, 19 nt, Artificial Sequence
  Description of Artificial Sequence: Synthetic oligonucleotide
cagucccagggaucugggg

SEQ ID NO: 2897001 - RNA, 19 nt, Artificial Sequence
  Description of Artificial Sequence: Synthetic oligonucleotide
uguggcucccagacguauu

SEQ ID NO: 2897002 - RNA, 19 nt, Artificial Sequence
  Description of Artificial Sequence: Synthetic oligonucleotide
gaggcaucugagccacuga

SEQ ID NO: 2897003 - RNA, 19 nt, Artificial Sequence
  Description of Artificial Sequence: Synthetic oligonucleotide
gcauuacuugcgccaacgc

SEQ ID NO: 2897004 - RNA, 19 nt, Artificial Sequence
  Description of Artificial Sequence: Synthetic oligonucleotide
guagcuucagaugcuugaa

SEQ ID NO: 2897005 - RNA, 19 nt, Artificial Sequence
  Description of Artificial Sequence: Synthetic oligonucleotide
cacuccagucccagggauc

SEQ ID NO: 2897006 - RNA, 19 nt, Artificial Sequence
  Description of Artificial Sequence: Synthetic oligonucleotide
ccucauuagagggaugcug

SEQ ID NO: 2897007 - RNA, 19 nt, Artificial Sequence
  Description of Artificial Sequence: Synthetic oligonucleotide
uguaagcgccagggguucc

SEQ ID NO: 2897008 - RNA, 19 nt, Artificial Sequence
  Description of Artificial Sequence: Synthetic oligonucleotide
gacccagccuuugugcgca

SEQ ID NO: 2897009 - RNA, 19 nt, Artificial Sequence
  Description of Artificial Sequence: Synthetic oligonucleotide
gcuccaguuacagcacagg

SEQ ID NO: 2897010 - RNA, 19 nt, Artificial Sequence
  Description of Artificial Sequence: Synthetic oligonucleotide
guuccaaugcugaggccca

SEQ ID NO: 2897011 - RNA, 19 nt, Artificial Sequence
  Description of Artificial Sequence: Synthetic oligonucleotide
uccaaugcugaggcccacu

SEQ ID NO: 2897012 - RNA, 19 nt, Artificial Sequence
  Description of Artificial Sequence: Synthetic oligonucleotide
cccucuguggcucccagac

SEQ ID NO: 2897013 - RNA, 19 nt, Artificial Sequence
  Description of Artificial Sequence: Synthetic oligonucleotide
acuuggcaacacuccuaga

SEQ ID NO: 2897014 - RNA, 19 nt, Artificial Sequence
  Description of Artificial Sequence: Synthetic oligonucleotide
ccacugaguuccaaugcug

SEQ ID NO: 2897015 - RNA, 19 nt, Artificial Sequence
  Description of Artificial Sequence: Synthetic oligonucleotide
caacgcuguagcuucagau

SEQ ID NO: 2897016 - RNA, 19 nt, Artificial Sequence
  Description of Artificial Sequence: Synthetic oligonucleotide
gggagcagcacccgaguca

SEQ ID NO: 2897017 - RNA, 19 nt, Artificial Sequence
  Description of Artificial Sequence: Synthetic oligonucleotide
ucuguggcucccagacgua

SEQ ID NO: 2897018 - RNA, 19 nt, Artificial Sequence
  Description of Artificial Sequence: Synthetic oligonucleotide
aggcccacuuggcaacacu

SEQ ID NO: 2897019 - RNA, 19 nt, Artificial Sequence
  Description of Artificial Sequence: Synthetic oligonucleotide
gcacaggaugaaguagccg

SEQ ID NO: 2897020 - RNA, 19 nt, Artificial Sequence
  Description of Artificial Sequence: Synthetic oligonucleotide
uggugguguugcacuugac

SEQ ID NO: 2897021 - RNA, 19 nt, Artificial Sequence
  Description of Artificial Sequence: Synthetic oligonucleotide
ggaugaaguagccggcgaa

SEQ ID NO: 2897022 - RNA, 19 nt, Artificial Sequence
  Description of Artificial Sequence: Synthetic oligonucleotide
cauuagagggaugcuggaa

SEQ ID NO: 2897023 - RNA, 19 nt, Artificial Sequence
  Description of Artificial Sequence: Synthetic oligonucleotide
ccaggauagaguucgggaa

SEQ ID NO: 2897024 - RNA, 19 nt, Artificial Sequence
  Description of Artificial Sequence: Synthetic oligonucleotide
aucuggggagcagcacccg

SEQ ID NO: 2897025 - RNA, 19 nt, Artificial Sequence
  Description of Artificial Sequence: Synthetic oligonucleotide
cagggguuccgaacuccug

SEQ ID NO: 2897026 - RNA, 19 nt, Artificial Sequence
  Description of Artificial Sequence: Synthetic oligonucleotide
cagacguauucagcauuac

SEQ ID NO: 2897027 - RNA, 19 nt, Artificial Sequence
  Description of Artificial Sequence: Synthetic oligonucleotide
gcuucagaugcuugaagcu

SEQ ID NO: 2897028 - RNA, 19 nt, Artificial Sequence
  Description of Artificial Sequence: Synthetic oligonucleotide
ggauagaguucgggaaacc

SEQ ID NO: 2897029 - RNA, 19 nt, Artificial Sequence
  Description of Artificial Sequence: Synthetic oligonucleotide
gcugaggcccacuuggcaa

SEQ ID NO: 2897030 - RNA, 19 nt, Artificial Sequence
  Description of Artificial Sequence: Synthetic oligonucleotide
uucacccucuguggcuccc

SEQ ID NO: 2897031 - RNA, 19 nt, Artificial Sequence
  Description of Artificial Sequence: Synthetic oligonucleotide
ugaggcccacuuggcaaca

SEQ ID NO: 2897032 - RNA, 19 nt, Artificial Sequence
  Description of Artificial Sequence: Synthetic oligonucleotide
aaggaacuuuugagacacu

SEQ ID NO: 2897033 - RNA, 19 nt, Artificial Sequence
  Description of Artificial Sequence: Synthetic oligonucleotide
gagggaugcuggaaguugu

SEQ ID NO: 2897034 - RNA, 19 nt, Artificial Sequence
  Description of Artificial Sequence: Synthetic oligonucleotide
ccggcgaagagcaucguga

SEQ ID NO: 2897035 - RNA, 19 nt, Artificial Sequence
  Description of Artificial Sequence: Synthetic oligonucleotide
uugcgccaacgcuguagcu

SEQ ID NO: 2897036 - RNA, 19 nt, Artificial Sequence
  Description of Artificial Sequence: Synthetic oligonucleotide
cuuugugcgcagcucccaa

SEQ ID NO: 2897037 - RNA, 19 nt, Artificial Sequence
  Description of Artificial Sequence: Synthetic oligonucleotide
uaagcgccagggguuccga

SEQ ID NO: 2897038 - RNA, 19 nt, Artificial Sequence
  Description of Artificial Sequence: Synthetic oligonucleotide
cagcauuacuugcgccaac

SEQ ID NO: 2897039 - RNA, 19 nt, Artificial Sequence
  Description of Artificial Sequence: Synthetic oligonucleotide
aagcgccagggguuccgaa

SEQ ID NO: 2897040 - RNA, 19 nt, Artificial Sequence
  Description of Artificial Sequence: Synthetic oligonucleotide
cuucguccccaccaaggaa

SEQ ID NO: 2897041 - RNA, 19 nt, Artificial Sequence
  Description of Artificial Sequence: Synthetic oligonucleotide
guuguaagcgccagggguu

SEQ ID NO: 2897042 - RNA, 19 nt, Artificial Sequence
  Description of Artificial Sequence: Synthetic oligonucleotide
uggcucccagacguauuca

SEQ ID NO: 2897043 - RNA, 19 nt, Artificial Sequence
  Description of Artificial Sequence: Synthetic oligonucleotide
cccaccaaggaacuuuuga

SEQ ID NO: 2897044 - RNA, 19 nt, Artificial Sequence
  Description of Artificial Sequence: Synthetic oligonucleotide
agggaucuggggagcagca

SEQ ID NO: 2897045 - RNA, 19 nt, Artificial Sequence
  Description of Artificial Sequence: Synthetic oligonucleotide
gcgccaacgcuguagcuuc

SEQ ID NO: 2897046 - RNA, 19 nt, Artificial Sequence
  Description of Artificial Sequence: Synthetic oligonucleotide
ucccagggaucuggggagc

SEQ ID NO: 2897047 - RNA, 19 nt, Artificial Sequence
  Description of Artificial Sequence: Synthetic oligonucleotide
gcaucugagccacugaguu

SEQ ID NO: 2897048 - RNA, 19 nt, Artificial Sequence
  Description of Artificial Sequence: Synthetic oligonucleotide
ccgaacuucguccccacca

SEQ ID NO: 2897049 - RNA, 19 nt, Artificial Sequence
  Description of Artificial Sequence: Synthetic oligonucleotide
gcaacacuccuagaccaac

SEQ ID NO: 2897050 - RNA, 19 nt, Artificial Sequence
  Description of Artificial Sequence: Synthetic oligonucleotide
cagaugcuugaagcuccag

SEQ ID NO: 2897051 - RNA, 19 nt, Artificial Sequence
  Description of Artificial Sequence: Synthetic oligonucleotide
cacccucuguggcucccag

SEQ ID NO: 2897052 - RNA, 19 nt, Artificial Sequence
  Description of Artificial Sequence: Synthetic oligonucleotide
gcucccagacguauucagc

SEQ ID NO: 2897053 - RNA, 19 nt, Artificial Sequence
  Description of Artificial Sequence: Synthetic oligonucleotide
acccugggaaguggcagga

SEQ ID NO: 2897054 - RNA, 19 nt, Artificial Sequence
  Description of Artificial Sequence: Synthetic oligonucleotide
agcacccgagucagcagca

SEQ ID NO: 2897055 - RNA, 19 nt, Artificial Sequence
  Description of Artificial Sequence: Synthetic oligonucleotide
gcagcacccgagucagcag

SEQ ID NO: 2897056 - RNA, 19 nt, Artificial Sequence
  Description of Artificial Sequence: Synthetic oligonucleotide
ccagucccagggaucuggg

SEQ ID NO: 2897057 - RNA, 19 nt, Artificial Sequence
  Description of Artificial Sequence: Synthetic oligonucleotide
gccacugaguuccaaugcu

SEQ ID NO: 2897058 - RNA, 19 nt, Artificial Sequence
  Description of Artificial Sequence: Synthetic oligonucleotide
acccucuguggcucccaga

SEQ ID NO: 2897059 - RNA, 19 nt, Artificial Sequence
  Description of Artificial Sequence: Synthetic oligonucleotide
uuccaaugcugaggcccac

SEQ ID NO: 2897060 - RNA, 19 nt, Artificial Sequence
  Description of Artificial Sequence: Synthetic oligonucleotide
cgaagagcaucgugaggcc

SEQ ID NO: 2897061 - RNA, 19 nt, Artificial Sequence
  Description of Artificial Sequence: Synthetic oligonucleotide
ucacccucuguggcuccca

SEQ ID NO: 2897062 - RNA, 19 nt, Artificial Sequence
  Description of Artificial Sequence: Synthetic oligonucleotide
gguuccgaacuccugcuau

SEQ ID NO: 2897063 - RNA, 19 nt, Artificial Sequence
  Description of Artificial Sequence: Synthetic oligonucleotide
gcccacuuggcaacacucc

SEQ ID NO: 2897064 - RNA, 19 nt, Artificial Sequence
  Description of Artificial Sequence: Synthetic oligonucleotide
guggcaggaagaggcaucu

SEQ ID NO: 2897065 - RNA, 19 nt, Artificial Sequence
  Description of Artificial Sequence: Synthetic oligonucleotide
gagccucauuagagggaug

SEQ ID NO: 2897066 - RNA, 19 nt, Artificial Sequence
  Description of Artificial Sequence: Synthetic oligonucleotide
gccggcgaagagcaucgug

SEQ ID NO: 2897067 - RNA, 19 nt, Artificial Sequence
  Description of Artificial Sequence: Synthetic oligonucleotide
cagccuuugugcgcagcuc

SEQ ID NO: 2897068 - RNA, 19 nt, Artificial Sequence
  Description of Artificial Sequence: Synthetic oligonucleotide
ccugcuaucagccgaacuu

SEQ ID NO: 2897069 - RNA, 19 nt, Artificial Sequence
  Description of Artificial Sequence: Synthetic oligonucleotide
cguaaccaggauagaguuc

SEQ ID NO: 2897070 - RNA, 19 nt, Artificial Sequence
  Description of Artificial Sequence: Synthetic oligonucleotide
ggcccacuuggcaacacuc

SEQ ID NO: 2897071 - RNA, 19 nt, Artificial Sequence
  Description of Artificial Sequence: Synthetic oligonucleotide
ccagacguauucagcauua

SEQ ID NO: 2897072 - RNA, 19 nt, Artificial Sequence
  Description of Artificial Sequence: Synthetic oligonucleotide
ccucuguggcucccagacg

SEQ ID NO: 2897073 - RNA, 19 nt, Artificial Sequence
  Description of Artificial Sequence: Synthetic oligonucleotide
gcuugaagcuccaguuaca

SEQ ID NO: 2897074 - RNA, 19 nt, Artificial Sequence
  Description of Artificial Sequence: Synthetic oligonucleotide
gaggcccacuuggcaacac

SEQ ID NO: 2897075 - RNA, 19 nt, Artificial Sequence
  Description of Artificial Sequence: Synthetic oligonucleotide
cggcgaagagcaucgugag

SEQ ID NO: 2897076 - RNA, 19 nt, Artificial Sequence
  Description of Artificial Sequence: Synthetic oligonucleotide
gccagggguuccgaacucc

SEQ ID NO: 2897077 - RNA, 19 nt, Artificial Sequence
  Description of Artificial Sequence: Synthetic oligonucleotide
uacuugcgccaacgcugua

SEQ ID NO: 2897078 - RNA, 19 nt, Artificial Sequence
  Description of Artificial Sequence: Synthetic oligonucleotide
cagccgaacuucgucccca

SEQ ID NO: 2897079 - RNA, 19 nt, Artificial Sequence
  Description of Artificial Sequence: Synthetic oligonucleotide
ggggagcagcacccgaguc

SEQ ID NO: 2897080 - RNA, 19 nt, Artificial Sequence
  Description of Artificial Sequence: Synthetic oligonucleotide
gggaugcuggaaguuguaa

SEQ ID NO: 2897081 - RNA, 19 nt, Artificial Sequence
  Description of Artificial Sequence: Synthetic oligonucleotide
aagaggcaucugagccacu

SEQ ID NO: 2897082 - RNA, 19 nt, Artificial Sequence
  Description of Artificial Sequence: Synthetic oligonucleotide
gcacuugacccagccuuug

SEQ ID NO: 2897083 - RNA, 19 nt, Artificial Sequence
  Description of Artificial Sequence: Synthetic oligonucleotide
gccuuugugcgcagcuccc

SEQ ID NO: 2897084 - RNA, 19 nt, Artificial Sequence
  Description of Artificial Sequence: Synthetic oligonucleotide
acccagccuuugugcgcag

SEQ ID NO: 2897085 - RNA, 19 nt, Artificial Sequence
  Description of Artificial Sequence: Synthetic oligonucleotide
agggaugcuggaaguugua

SEQ ID NO: 2897086 - RNA, 19 nt, Artificial Sequence
  Description of Artificial Sequence: Synthetic oligonucleotide
gccaacgcuguagcuucag

SEQ ID NO: 2897087 - RNA, 19 nt, Artificial Sequence
  Description of Artificial Sequence: Synthetic oligonucleotide
cuccugcuaucagccgaac

SEQ ID NO: 2897088 - RNA, 19 nt, Artificial Sequence
  Description of Artificial Sequence: Synthetic oligonucleotide
guccccaccaaggaacuuu

SEQ ID NO: 2897089 - RNA, 19 nt, Artificial Sequence
  Description of Artificial Sequence: Synthetic oligonucleotide
guguugcacuugacccagc

SEQ ID NO: 2897090 - RNA, 19 nt, Artificial Sequence
  Description of Artificial Sequence: Synthetic oligonucleotide
gccgaacuucguccccacc

SEQ ID NO: 2897091 - RNA, 19 nt, Artificial Sequence
  Description of Artificial Sequence: Synthetic oligonucleotide
ggaaaccacuccaguccca

SEQ ID NO: 2897092 - RNA, 19 nt, Artificial Sequence
  Description of Artificial Sequence: Synthetic oligonucleotide
agcucccaagagccucauu

SEQ ID NO: 2897093 - RNA, 19 nt, Artificial Sequence
  Description of Artificial Sequence: Synthetic oligonucleotide
gggguuccgaacuccugcu

SEQ ID NO: 2897094 - RNA, 19 nt, Artificial Sequence
  Description of Artificial Sequence: Synthetic oligonucleotide
ggcaacacuccuagaccaa

SEQ ID NO: 2897095 - RNA, 19 nt, Artificial Sequence
  Description of Artificial Sequence: Synthetic oligonucleotide
gcagcucccaagagccuca

SEQ ID NO: 2897096 - RNA, 19 nt, Artificial Sequence
  Description of Artificial Sequence: Synthetic oligonucleotide
ggcaucugagccacugagu

SEQ ID NO: 2897097 - RNA, 19 nt, Artificial Sequence
  Description of Artificial Sequence: Synthetic oligonucleotide
ccacuuggcaacacuccua

SEQ ID NO: 2897098 - RNA, 19 nt, Artificial Sequence
  Description of Artificial Sequence: Synthetic oligonucleotide
gcacccgagucagcagcag

SEQ ID NO: 2897099 - RNA, 19 nt, Artificial Sequence
  Description of Artificial Sequence: Synthetic oligonucleotide
ccagggaucuggggagcag

SEQ ID NO: 2897100 - RNA, 19 nt, Artificial Sequence
  Description of Artificial Sequence: Synthetic oligonucleotide
ccaacgcuguagcuucaga

SEQ ID NO: 2897101 - RNA, 19 nt, Artificial Sequence
  Description of Artificial Sequence: Synthetic oligonucleotide
aguagccggcgaagagcau

SEQ ID NO: 2897102 - RNA, 19 nt, Artificial Sequence
  Description of Artificial Sequence: Synthetic oligonucleotide
gcgccagggguuccgaacu

SEQ ID NO: 2897103 - RNA, 19 nt, Artificial Sequence
  Description of Artificial Sequence: Synthetic oligonucleotide
cccacuuggcaacacuccu

SEQ ID NO: 2897104 - RNA, 19 nt, Artificial Sequence
  Description of Artificial Sequence: Synthetic oligonucleotide
ggguuccgaacuccugcua

SEQ ID NO: 2897105 - RNA, 19 nt, Artificial Sequence
  Description of Artificial Sequence: Synthetic oligonucleotide
gcuaucagccgaacuucgu

SEQ ID NO: 2897106 - RNA, 19 nt, Artificial Sequence
  Description of Artificial Sequence: Synthetic oligonucleotide
ccccaccaaggaacuuuug

SEQ ID NO: 2897107 - RNA, 19 nt, Artificial Sequence
  Description of Artificial Sequence: Synthetic oligonucleotide
cgaacuucguccccaccaa

SEQ ID NO: 2897108 - RNA, 19 nt, Artificial Sequence
  Description of Artificial Sequence: Synthetic oligonucleotide
cugagccacugaguuccaa

SEQ ID NO: 2897109 - RNA, 19 nt, Artificial Sequence
  Description of Artificial Sequence: Synthetic oligonucleotide
cgcagcucccaagagccuc

SEQ ID NO: 2897110 - RNA, 19 nt, Artificial Sequence
  Description of Artificial Sequence: Synthetic oligonucleotide
cacuugcacccugggaagu

SEQ ID NO: 2897111 - RNA, 19 nt, Artificial Sequence
  Description of Artificial Sequence: Synthetic oligonucleotide
ccaacguaaccaggauaga

SEQ ID NO: 2897112 - RNA, 19 nt, Artificial Sequence
  Description of Artificial Sequence: Synthetic oligonucleotide
ccagccuuugugcgcagcu

SEQ ID NO: 2897113 - RNA, 19 nt, Artificial Sequence
  Description of Artificial Sequence: Synthetic oligonucleotide
cuguggcucccagacguau

SEQ ID NO: 2897114 - RNA, 19 nt, Artificial Sequence
  Description of Artificial Sequence: Synthetic oligonucleotide
cccgacaccgcucuucuuu

SEQ ID NO: 2897115 - RNA, 19 nt, Artificial Sequence
  Description of Artificial Sequence: Synthetic oligonucleotide
ccgacaccgcucuucuuua

SEQ ID NO: 2897116 - RNA, 19 nt, Artificial Sequence
  Description of Artificial Sequence: Synthetic oligonucleotide
ccuuugugcgcagcuccca

SEQ ID NO: 2897117 - RNA, 19 nt, Artificial Sequence
  Description of Artificial Sequence: Synthetic oligonucleotide
ccagggguuccgaacuccu

SEQ ID NO: 2897118 - RNA, 19 nt, Artificial Sequence
  Description of Artificial Sequence: Synthetic oligonucleotide
cccagacguauucagcauu

SEQ ID NO: 2897119 - RNA, 19 nt, Artificial Sequence
  Description of Artificial Sequence: Synthetic oligonucleotide
gccucauuagagggaugcu

SEQ ID NO: 2897120 - RNA, 19 nt, Artificial Sequence
  Description of Artificial Sequence: Synthetic oligonucleotide
cgcucuucuuuaugguggu

SEQ ID NO: 2897121 - RNA, 19 nt, Artificial Sequence
  Description of Artificial Sequence: Synthetic oligonucleotide
ccacuccagucccagggau

SEQ ID NO: 2897122 - RNA, 19 nt, Artificial Sequence
  Description of Artificial Sequence: Synthetic oligonucleotide
cgccagggguuccgaacuc

SEQ ID NO: 2897123 - RNA, 19 nt, Artificial Sequence
  Description of Artificial Sequence: Synthetic oligonucleotide
cgccaacgcuguagcuuca

SEQ ID NO: 2897124 - RNA, 19 nt, Artificial Sequence
  Description of Artificial Sequence: Synthetic oligonucleotide
cccugggaaguggcaggaa

SEQ ID NO: 2897125 - RNA, 19 nt, Artificial Sequence
  Description of Artificial Sequence: Synthetic oligonucleotide
gcgcagcucccaagagccu

SEQ ID NO: 2897126 - RNA, 19 nt, Artificial Sequence
  Description of Artificial Sequence: Synthetic oligonucleotide
cgacaccgcucuucuuuau

SEQ ID NO: 2897127 - RNA, 19 nt, Artificial Sequence
  Description of Artificial Sequence: Synthetic oligonucleotide
ccccgacaccgcucuucuu

SEQ ID NO: 2897128 - RNA, 19 nt, Artificial Sequence
  Description of Artificial Sequence: Synthetic oligonucleotide
cguccccaccaaggaacuu

SEQ ID NO: 2897129 - RNA, 19 nt, Artificial Sequence
  Description of Artificial Sequence: Synthetic oligonucleotide
acugaacugggccagaucc

SEQ ID NO: 2897130 - RNA, 19 nt, Artificial Sequence
  Description of Artificial Sequence: Synthetic oligonucleotide
uguuaaugaccucugaacc

SEQ ID NO: 2897131 - RNA, 19 nt, Artificial Sequence
  Description of Artificial Sequence: Synthetic oligonucleotide
ugcauguugcgguagaugg

SEQ ID NO: 2897132 - RNA, 19 nt, Artificial Sequence
  Description of Artificial Sequence: Synthetic oligonucleotide
uauguguuggaucucugag

SEQ ID NO: 2897133 - RNA, 19 nt, Artificial Sequence
  Description of Artificial Sequence: Synthetic oligonucleotide
agcuugaucacauaugugu

SEQ ID NO: 2897134 - RNA, 19 nt, Artificial Sequence
  Description of Artificial Sequence: Synthetic oligonucleotide
uguguuggaucucugagga

SEQ ID NO: 2897135 - RNA, 19 nt, Artificial Sequence
  Description of Artificial Sequence: Synthetic oligonucleotide
ucacauauguguuggaucu

SEQ ID NO: 2897136 - RNA, 19 nt, Artificial Sequence
  Description of Artificial Sequence: Synthetic oligonucleotide
aacugggccagauccacac

SEQ ID NO: 2897137 - RNA, 19 nt, Artificial Sequence
  Description of Artificial Sequence: Synthetic oligonucleotide
acuuuugcuguuaaugacc

SEQ ID NO: 2897138 - RNA, 19 nt, Artificial Sequence
  Description of Artificial Sequence: Synthetic oligonucleotide
aucacauauguguuggauc

SEQ ID NO: 2897139 - RNA, 19 nt, Artificial Sequence
  Description of Artificial Sequence: Synthetic oligonucleotide
uugaucacauauguguugg

SEQ ID NO: 2897140 - RNA, 19 nt, Artificial Sequence
  Description of Artificial Sequence: Synthetic oligonucleotide
uuugcuguuaaugaccucu

SEQ ID NO: 2897141 - RNA, 19 nt, Artificial Sequence
  Description of Artificial Sequence: Synthetic oligonucleotide
uguuggaucucugaggacc

SEQ ID NO: 2897142 - RNA, 19 nt, Artificial Sequence
  Description of Artificial Sequence: Synthetic oligonucleotide
cacaucacgacuuuugcug

SEQ ID NO: 2897143 - RNA, 19 nt, Artificial Sequence
  Description of Artificial Sequence: Synthetic oligonucleotide
uuuccaacguugcauguug

SEQ ID NO: 2897144 - RNA, 19 nt, Artificial Sequence
  Description of Artificial Sequence: Synthetic oligonucleotide
aaacagcuugaucacauau

SEQ ID NO: 2897145 - RNA, 19 nt, Artificial Sequence
  Description of Artificial Sequence: Synthetic oligonucleotide
agggagacgguucaggcuc

SEQ ID NO: 2897146 - RNA, 19 nt, Artificial Sequence
  Description of Artificial Sequence: Synthetic oligonucleotide
cuguuaaugaccucugaac

SEQ ID NO: 2897147 - RNA, 19 nt, Artificial Sequence
  Description of Artificial Sequence: Synthetic oligonucleotide
guagauggaguguggaggg

SEQ ID NO: 2897148 - RNA, 19 nt, Artificial Sequence
  Description of Artificial Sequence: Synthetic oligonucleotide
acuccggucaaacagcuug

SEQ ID NO: 2897149 - RNA, 19 nt, Artificial Sequence
  Description of Artificial Sequence: Synthetic oligonucleotide
auguguuggaucucugagg

SEQ ID NO: 2897150 - RNA, 19 nt, Artificial Sequence
  Description of Artificial Sequence: Synthetic oligonucleotide
uacacaucacgacuuuugc

SEQ ID NO: 2897151 - RNA, 19 nt, Artificial Sequence
  Description of Artificial Sequence: Synthetic oligonucleotide
  modified_base (17)..(17): a, c, u, g, unknown or other
ugagaagccuccuuccncc

SEQ ID NO: 2897152 - RNA, 19 nt, Artificial Sequence
  Description of Artificial Sequence: Synthetic oligonucleotide
cucgcucucgcacugaggg

SEQ ID NO: 2897153 - RNA, 19 nt, Artificial Sequence
  Description of Artificial Sequence: Synthetic oligonucleotide
uaugcguuuccaacguugc

SEQ ID NO: 2897154 - RNA, 19 nt, Artificial Sequence
  Description of Artificial Sequence: Synthetic oligonucleotide
  modified_base (18)..(18): a, c, u, g, unknown or other
augagaagccuccuuccnc

SEQ ID NO: 2897155 - RNA, 19 nt, Artificial Sequence
  Description of Artificial Sequence: Synthetic oligonucleotide
uguuacgcauccaggcacg

SEQ ID NO: 2897156 - RNA, 19 nt, Artificial Sequence
  Description of Artificial Sequence: Synthetic oligonucleotide
agcuuguacacaucacgac

SEQ ID NO: 2897157 - RNA, 19 nt, Artificial Sequence
  Description of Artificial Sequence: Synthetic oligonucleotide
uguggguggaggcagcuug

SEQ ID NO: 2897158 - RNA, 19 nt, Artificial Sequence
  Description of Artificial Sequence: Synthetic oligonucleotide
gacgguucaggcucggagg

SEQ ID NO: 2897159 - RNA, 19 nt, Artificial Sequence
  Description of Artificial Sequence: Synthetic oligonucleotide
uuaaugaccucugaacccu

SEQ ID NO: 2897160 - RNA, 19 nt, Artificial Sequence
  Description of Artificial Sequence: Synthetic oligonucleotide
gaccucugaacccuccucg

SEQ ID NO: 2897161 - RNA, 19 nt, Artificial Sequence
  Description of Artificial Sequence: Synthetic oligonucleotide
uacgcauccaggcacggca

SEQ ID NO: 2897162 - RNA, 19 nt, Artificial Sequence
  Description of Artificial Sequence: Synthetic oligonucleotide
gacuuuugcuguuaaugac

SEQ ID NO: 2897163 - RNA, 19 nt, Artificial Sequence
  Description of Artificial Sequence: Synthetic oligonucleotide
acgacuuuugcuguuaaug

SEQ ID NO: 2897164 - RNA, 19 nt, Artificial Sequence
  Description of Artificial Sequence: Synthetic oligonucleotide
cucggaggguucaucaucg

SEQ ID NO: 2897165 - RNA, 19 nt, Artificial Sequence
  Description of Artificial Sequence: Synthetic oligonucleotide
guucucacugaacugggcc

SEQ ID NO: 2897166 - RNA, 19 nt, Artificial Sequence
  Description of Artificial Sequence: Synthetic oligonucleotide
cuugaucacauauguguug

SEQ ID NO: 2897167 - RNA, 19 nt, Artificial Sequence
  Description of Artificial Sequence: Synthetic oligonucleotide
uccaacguugcauguugcg

SEQ ID NO: 2897168 - RNA, 19 nt, Artificial Sequence
  Description of Artificial Sequence: Synthetic oligonucleotide
uguugcgguagauggagug

SEQ ID NO: 2897169 - RNA, 19 nt, Artificial Sequence
  Description of Artificial Sequence: Synthetic oligonucleotide
auccaggcacggcagaugg

SEQ ID NO: 2897170 - RNA, 19 nt, Artificial Sequence
  Description of Artificial Sequence: Synthetic oligonucleotide
aaugaccucugaacccucc

SEQ ID NO: 2897171 - RNA, 19 nt, Artificial Sequence
  Description of Artificial Sequence: Synthetic oligonucleotide
aauggcguguucucacuga

SEQ ID NO: 2897172 - RNA, 19 nt, Artificial Sequence
  Description of Artificial Sequence: Synthetic oligonucleotide
aacagcuugaucacauaug

SEQ ID NO: 2897173 - RNA, 19 nt, Artificial Sequence
  Description of Artificial Sequence: Synthetic oligonucleotide
cagaugggguacaauggcg

SEQ ID NO: 2897174 - RNA, 19 nt, Artificial Sequence
  Description of Artificial Sequence: Synthetic oligonucleotide
uucucacugaacugggcca

SEQ ID NO: 2897175 - RNA, 19 nt, Artificial Sequence
  Description of Artificial Sequence: Synthetic oligonucleotide
cucugaacccuccucgucc

SEQ ID NO: 2897176 - RNA, 19 nt, Artificial Sequence
  Description of Artificial Sequence: Synthetic oligonucleotide
uguggagggagacgguuca

SEQ ID NO: 2897177 - RNA, 19 nt, Artificial Sequence
  Description of Artificial Sequence: Synthetic oligonucleotide
ucguccaucucccuccucu

SEQ ID NO: 2897178 - RNA, 19 nt, Artificial Sequence
  Description of Artificial Sequence: Synthetic oligonucleotide
uacaauggcguguucucac

SEQ ID NO: 2897179 - RNA, 19 nt, Artificial Sequence
  Description of Artificial Sequence: Synthetic oligonucleotide
auauguguuggaucucuga

SEQ ID NO: 2897180 - RNA, 19 nt, Artificial Sequence
  Description of Artificial Sequence: Synthetic oligonucleotide
cauguugcgguagauggag

SEQ ID NO: 2897181 - RNA, 19 nt, Artificial Sequence
  Description of Artificial Sequence: Synthetic oligonucleotide
agacgguucaggcucggag

SEQ ID NO: 2897182 - RNA, 19 nt, Artificial Sequence
  Description of Artificial Sequence: Synthetic oligonucleotide
ugggauucgggaucugcag

SEQ ID NO: 2897183 - RNA, 19 nt, Artificial Sequence
  Description of Artificial Sequence: Synthetic oligonucleotide
ugcaggcaucuccaagugg

SEQ ID NO: 2897184 - RNA, 19 nt, Artificial Sequence
  Description of Artificial Sequence: Synthetic oligonucleotide
cagcccaucguccaucucc

SEQ ID NO: 2897185 - RNA, 19 nt, Artificial Sequence
  Description of Artificial Sequence: Synthetic oligonucleotide
acgguucaggcucggaggg

SEQ ID NO: 2897186 - RNA, 19 nt, Artificial Sequence
  Description of Artificial Sequence: Synthetic oligonucleotide
ggaggguucaucaucgggg

SEQ ID NO: 2897187 - RNA, 19 nt, Artificial Sequence
  Description of Artificial Sequence: Synthetic oligonucleotide
gcugguuccgaugagaagc

SEQ ID NO: 2897188 - RNA, 19 nt, Artificial Sequence
  Description of Artificial Sequence: Synthetic oligonucleotide
cacacuccggucaaacagc

SEQ ID NO: 2897189 - RNA, 19 nt, Artificial Sequence
  Description of Artificial Sequence: Synthetic oligonucleotide
uccaucucccuccucuucu

SEQ ID NO: 2897190 - RNA, 19 nt, Artificial Sequence
  Description of Artificial Sequence: Synthetic oligonucleotide
ggcguaugcguuuccaacg

SEQ ID NO: 2897191 - RNA, 19 nt, Artificial Sequence
  Description of Artificial Sequence: Synthetic oligonucleotide
  modified_base (19)..(19): a, c, u, g, unknown or other
gaugagaagccuccuuccn

SEQ ID NO: 2897192 - RNA, 19 nt, Artificial Sequence
  Description of Artificial Sequence: Synthetic oligonucleotide
ugcgguagauggagugugg

SEQ ID NO: 2897193 - RNA, 19 nt, Artificial Sequence
  Description of Artificial Sequence: Synthetic oligonucleotide
cuguuacgcauccaggcac

SEQ ID NO: 2897194 - RNA, 19 nt, Artificial Sequence
  Description of Artificial Sequence: Synthetic oligonucleotide
aggcaucuccaaguggucc

SEQ ID NO: 2897195 - RNA, 19 nt, Artificial Sequence
  Description of Artificial Sequence: Synthetic oligonucleotide
gaugggguacaauggcgug

SEQ ID NO: 2897196 - RNA, 19 nt, Artificial Sequence
  Description of Artificial Sequence: Synthetic oligonucleotide
ugaacccuccucguccucg

SEQ ID NO: 2897197 - RNA, 19 nt, Artificial Sequence
  Description of Artificial Sequence: Synthetic oligonucleotide
ggaguguggagggagacgg

SEQ ID NO: 2897198 - RNA, 19 nt, Artificial Sequence
  Description of Artificial Sequence: Synthetic oligonucleotide
uguucucacugaacugggc

SEQ ID NO: 2897199 - RNA, 19 nt, Artificial Sequence
  Description of Artificial Sequence: Synthetic oligonucleotide
uugcuguuaaugaccucug

SEQ ID NO: 2897200 - RNA, 19 nt, Artificial Sequence
  Description of Artificial Sequence: Synthetic oligonucleotide
guacacaucacgacuuuug

SEQ ID NO: 2897201 - RNA, 19 nt, Artificial Sequence
  Description of Artificial Sequence: Synthetic oligonucleotide
  modified_base (4)..(4): a, c, u, g, unknown or other
uccnccucuggcguaugcg

SEQ ID NO: 2897202 - RNA, 19 nt, Artificial Sequence
  Description of Artificial Sequence: Synthetic oligonucleotide
acacaucacgacuuuugcu

SEQ ID NO: 2897203 - RNA, 19 nt, Artificial Sequence
  Description of Artificial Sequence: Synthetic oligonucleotide
guaugcguuuccaacguug

SEQ ID NO: 2897204 - RNA, 19 nt, Artificial Sequence
  Description of Artificial Sequence: Synthetic oligonucleotide
uggcguaugcguuuccaac

SEQ ID NO: 2897205 - RNA, 19 nt, Artificial Sequence
  Description of Artificial Sequence: Synthetic oligonucleotide
acauauguguuggaucucu

SEQ ID NO: 2897206 - RNA, 19 nt, Artificial Sequence
  Description of Artificial Sequence: Synthetic oligonucleotide
acaucacgacuuuugcugu

SEQ ID NO: 2897207 - RNA, 19 nt, Artificial Sequence
  Description of Artificial Sequence: Synthetic oligonucleotide
gaugggauucgggaucugc

SEQ ID NO: 2897208 - RNA, 19 nt, Artificial Sequence
  Description of Artificial Sequence: Synthetic oligonucleotide
cugguuccgaugagaagcc

SEQ ID NO: 2897209 - RNA, 19 nt, Artificial Sequence
  Description of Artificial Sequence: Synthetic oligonucleotide
ugcguuuccaacguugcau

SEQ ID NO: 2897210 - RNA, 19 nt, Artificial Sequence
  Description of Artificial Sequence: Synthetic oligonucleotide
ucucacugaacugggccag

SEQ ID NO: 2897211 - RNA, 19 nt, Artificial Sequence
  Description of Artificial Sequence: Synthetic oligonucleotide
agauggaguguggagggag

SEQ ID NO: 2897212 - RNA, 19 nt, Artificial Sequence
  Description of Artificial Sequence: Synthetic oligonucleotide
gguacccugggucucaggc

SEQ ID NO: 2897213 - RNA, 19 nt, Artificial Sequence
  Description of Artificial Sequence: Synthetic oligonucleotide
ugggucucaggcugcagug

SEQ ID NO: 2897214 - RNA, 19 nt, Artificial Sequence
  Description of Artificial Sequence: Synthetic oligonucleotide
guuccgaugagaagccucc

SEQ ID NO: 2897215 - RNA, 19 nt, Artificial Sequence
  Description of Artificial Sequence: Synthetic oligonucleotide
uccaagugguccaggggcu

SEQ ID NO: 2897216 - RNA, 19 nt, Artificial Sequence
  Description of Artificial Sequence: Synthetic oligonucleotide
ugcuguuaaugaccucuga

SEQ ID NO: 2897217 - RNA, 19 nt, Artificial Sequence
  Description of Artificial Sequence: Synthetic oligonucleotide
  modified_base (10)..(10): a, c, u, g, unknown or other
ccuccuuccnccucuggcg

SEQ ID NO: 2897218 - RNA, 19 nt, Artificial Sequence
  Description of Artificial Sequence: Synthetic oligonucleotide
uuccaacguugcauguugc

SEQ ID NO: 2897219 - RNA, 19 nt, Artificial Sequence
  Description of Artificial Sequence: Synthetic oligonucleotide
aggcagcuuguacacauca

SEQ ID NO: 2897220 - RNA, 19 nt, Artificial Sequence
  Description of Artificial Sequence: Synthetic oligonucleotide
ggcuguuacgcauccaggc

SEQ ID NO: 2897221 - RNA, 19 nt, Artificial Sequence
  Description of Artificial Sequence: Synthetic oligonucleotide
ucugaacccuccucguccu

SEQ ID NO: 2897222 - RNA, 19 nt, Artificial Sequence
  Description of Artificial Sequence: Synthetic oligonucleotide
ugggccagauccacacucc

SEQ ID NO: 2897223 - RNA, 19 nt, Artificial Sequence
  Description of Artificial Sequence: Synthetic oligonucleotide
ggauucgggaucugcaggc

SEQ ID NO: 2897224 - RNA, 19 nt, Artificial Sequence
  Description of Artificial Sequence: Synthetic oligonucleotide
uugcgguagauggagugug

SEQ ID NO: 2897225 - RNA, 19 nt, Artificial Sequence
  Description of Artificial Sequence: Synthetic oligonucleotide
auccacacuccggucaaac

SEQ ID NO: 2897226 - RNA, 19 nt, Artificial Sequence
  Description of Artificial Sequence: Synthetic oligonucleotide
ucucgcucucgcacugagg

SEQ ID NO: 2897227 - RNA, 19 nt, Artificial Sequence
  Description of Artificial Sequence: Synthetic oligonucleotide
cauauguguuggaucucug

SEQ ID NO: 2897228 - RNA, 19 nt, Artificial Sequence
  Description of Artificial Sequence: Synthetic oligonucleotide
aacguugcauguugcggua

SEQ ID NO: 2897229 - RNA, 19 nt, Artificial Sequence
  Description of Artificial Sequence: Synthetic oligonucleotide
cggucaaacagcuugauca

SEQ ID NO: 2897230 - RNA, 19 nt, Artificial Sequence
  Description of Artificial Sequence: Synthetic oligonucleotide
cagcuuguacacaucacga

SEQ ID NO: 2897231 - RNA, 19 nt, Artificial Sequence
  Description of Artificial Sequence: Synthetic oligonucleotide
gguggaggcagcuuguaca

SEQ ID NO: 2897232 - RNA, 19 nt, Artificial Sequence
  Description of Artificial Sequence: Synthetic oligonucleotide
  modified_base (15)..(15): a, c, u, g, unknown or other
agaagccuccuuccnccuc

SEQ ID NO: 2897233 - RNA, 19 nt, Artificial Sequence
  Description of Artificial Sequence: Synthetic oligonucleotide
gaacccuccucguccucgg

SEQ ID NO: 2897234 - RNA, 19 nt, Artificial Sequence
  Description of Artificial Sequence: Synthetic oligonucleotide
uugcauguugcgguagaug

SEQ ID NO: 2897235 - RNA, 19 nt, Artificial Sequence
  Description of Artificial Sequence: Synthetic oligonucleotide
cacugaggggcuguuacgc

SEQ ID NO: 2897236 - RNA, 19 nt, Artificial Sequence
  Description of Artificial Sequence: Synthetic oligonucleotide
agcccaucguccaucuccc

SEQ ID NO: 2897237 - RNA, 19 nt, Artificial Sequence
  Description of Artificial Sequence: Synthetic oligonucleotide
uucgggaucugcaggcauc

SEQ ID NO: 2897238 - RNA, 19 nt, Artificial Sequence
  Description of Artificial Sequence: Synthetic oligonucleotide
uccacacuccggucaaaca

SEQ ID NO: 2897239 - RNA, 19 nt, Artificial Sequence
  Description of Artificial Sequence: Synthetic oligonucleotide
  modified_base (14)..(14): a, c, u, g, unknown or other
gaagccuccuuccnccucu

SEQ ID NO: 2897240 - RNA, 19 nt, Artificial Sequence
  Description of Artificial Sequence: Synthetic oligonucleotide
ugaucacauauguguugga

SEQ ID NO: 2897241 - RNA, 19 nt, Artificial Sequence
  Description of Artificial Sequence: Synthetic oligonucleotide
gggauucgggaucugcagg

SEQ ID NO: 2897242 - RNA, 19 nt, Artificial Sequence
  Description of Artificial Sequence: Synthetic oligonucleotide
ugcaguggggaugggauuc

SEQ ID NO: 2897243 - RNA, 19 nt, Artificial Sequence
  Description of Artificial Sequence: Synthetic oligonucleotide
guggaggcagcuuguacac

SEQ ID NO: 2897244 - RNA, 19 nt, Artificial Sequence
  Description of Artificial Sequence: Synthetic oligonucleotide
acaauggcguguucucacu

SEQ ID NO: 2897245 - RNA, 19 nt, Artificial Sequence
  Description of Artificial Sequence: Synthetic oligonucleotide
cuuuugcuguuaaugaccu

SEQ ID NO: 2897246 - RNA, 19 nt, Artificial Sequence
  Description of Artificial Sequence: Synthetic oligonucleotide
ggggcuguuacgcauccag

SEQ ID NO: 2897247 - RNA, 19 nt, Artificial Sequence
  Description of Artificial Sequence: Synthetic oligonucleotide
gggaucugcaggcaucucc

SEQ ID NO: 2897248 - RNA, 19 nt, Artificial Sequence
  Description of Artificial Sequence: Synthetic oligonucleotide
ucucaggcugcagugggga

SEQ ID NO: 2897249 - RNA, 19 nt, Artificial Sequence
  Description of Artificial Sequence: Synthetic oligonucleotide
agaugggguacaauggcgu

SEQ ID NO: 2897250 - RNA, 19 nt, Artificial Sequence
  Description of Artificial Sequence: Synthetic oligonucleotide
guuggaucucugaggaccc

SEQ ID NO: 2897251 - RNA, 19 nt, Artificial Sequence
  Description of Artificial Sequence: Synthetic oligonucleotide
ugaccucugaacccuccuc

SEQ ID NO: 2897252 - RNA, 19 nt, Artificial Sequence
  Description of Artificial Sequence: Synthetic oligonucleotide
guguucucacugaacuggg

SEQ ID NO: 2897253 - RNA, 19 nt, Artificial Sequence
  Description of Artificial Sequence: Synthetic oligonucleotide
gguacaauggcguguucuc

SEQ ID NO: 2897254 - RNA, 19 nt, Artificial Sequence
  Description of Artificial Sequence: Synthetic oligonucleotide
cugggccagauccacacuc

SEQ ID NO: 2897255 - RNA, 19 nt, Artificial Sequence
  Description of Artificial Sequence: Synthetic oligonucleotide
ggucaaacagcuugaucac

SEQ ID NO: 2897256 - RNA, 19 nt, Artificial Sequence
  Description of Artificial Sequence: Synthetic oligonucleotide
agcugguuccgaugagaag

SEQ ID NO: 2897257 - RNA, 19 nt, Artificial Sequence
  Description of Artificial Sequence: Synthetic oligonucleotide
gaagcugguuccgaugaga

SEQ ID NO: 2897258 - RNA, 19 nt, Artificial Sequence
  Description of Artificial Sequence: Synthetic oligonucleotide
ccacacuccggucaaacag

SEQ ID NO: 2897259 - RNA, 19 nt, Artificial Sequence
  Description of Artificial Sequence: Synthetic oligonucleotide
ugaggggcuguuacgcauc

SEQ ID NO: 2897260 - RNA, 19 nt, Artificial Sequence
  Description of Artificial Sequence: Synthetic oligonucleotide
ucuggcguaugcguuucca

SEQ ID NO: 2897261 - RNA, 19 nt, Artificial Sequence
  Description of Artificial Sequence: Synthetic oligonucleotide
uuguacacaucacgacuuu

SEQ ID NO: 2897262 - RNA, 19 nt, Artificial Sequence
  Description of Artificial Sequence: Synthetic oligonucleotide
aagcugguuccgaugagaa

SEQ ID NO: 2897263 - RNA, 19 nt, Artificial Sequence
  Description of Artificial Sequence: Synthetic oligonucleotide
caauggcguguucucacug

SEQ ID NO: 2897264 - RNA, 19 nt, Artificial Sequence
  Description of Artificial Sequence: Synthetic oligonucleotide
ucggaggguucaucaucgg

SEQ ID NO: 2897265 - RNA, 19 nt, Artificial Sequence
  Description of Artificial Sequence: Synthetic oligonucleotide
uccaggcacggcagauggg

SEQ ID NO: 2897266 - RNA, 19 nt, Artificial Sequence
  Description of Artificial Sequence: Synthetic oligonucleotide
ucacgacuuuugcuguuaa

SEQ ID NO: 2897267 - RNA, 19 nt, Artificial Sequence
  Description of Artificial Sequence: Synthetic oligonucleotide
  modified_base (5)..(5): a, c, u, g, unknown or other
uuccnccucuggcguaugc

SEQ ID NO: 2897268 - RNA, 19 nt, Artificial Sequence
  Description of Artificial Sequence: Synthetic oligonucleotide
aggcucggaggguucauca

SEQ ID NO: 2897269 - RNA, 19 nt, Artificial Sequence
  Description of Artificial Sequence: Synthetic oligonucleotide
cagcuugaucacauaugug

SEQ ID NO: 2897270 - RNA, 19 nt, Artificial Sequence
  Description of Artificial Sequence: Synthetic oligonucleotide
cucugccagcccaucgucc

SEQ ID NO: 2897271 - RNA, 19 nt, Artificial Sequence
  Description of Artificial Sequence: Synthetic oligonucleotide
agauccacacuccggucaa

SEQ ID NO: 2897272 - RNA, 19 nt, Artificial Sequence
  Description of Artificial Sequence: Synthetic oligonucleotide
ccaucguccaucucccucc

SEQ ID NO: 2897273 - RNA, 19 nt, Artificial Sequence
  Description of Artificial Sequence: Synthetic oligonucleotide
cguguucucacugaacugg

SEQ ID NO: 2897274 - RNA, 19 nt, Artificial Sequence
  Description of Artificial Sequence: Synthetic oligonucleotide
ucgcucucgcacugagggg

SEQ ID NO: 2897275 - RNA, 19 nt, Artificial Sequence
  Description of Artificial Sequence: Synthetic oligonucleotide
acugaggggcuguuacgca

SEQ ID NO: 2897276 - RNA, 19 nt, Artificial Sequence
  Description of Artificial Sequence: Synthetic oligonucleotide
gaggggcuguuacgcaucc

SEQ ID NO: 2897277 - RNA, 19 nt, Artificial Sequence
  Description of Artificial Sequence: Synthetic oligonucleotide
augaccucugaacccuccu

SEQ ID NO: 2897278 - RNA, 19 nt, Artificial Sequence
  Description of Artificial Sequence: Synthetic oligonucleotide
uccgaugagaagccuccuu

SEQ ID NO: 2897279 - RNA, 19 nt, Artificial Sequence
  Description of Artificial Sequence: Synthetic oligonucleotide
aguggugagcugggcgagc

SEQ ID NO: 2897280 - RNA, 19 nt, Artificial Sequence
  Description of Artificial Sequence: Synthetic oligonucleotide
uuuugcuguuaaugaccuc

SEQ ID NO: 2897281 - RNA, 19 nt, Artificial Sequence
  Description of Artificial Sequence: Synthetic oligonucleotide
gcuguuaaugaccucugaa

SEQ ID NO: 2897282 - RNA, 19 nt, Artificial Sequence
  Description of Artificial Sequence: Synthetic oligonucleotide
aguggggaugggauucggg

SEQ ID NO: 2897283 - RNA, 19 nt, Artificial Sequence
  Description of Artificial Sequence: Synthetic oligonucleotide
guggugagcugggcgagcg

SEQ ID NO: 2897284 - RNA, 19 nt, Artificial Sequence
  Description of Artificial Sequence: Synthetic oligonucleotide
ugagcugggcgagcgcucc

SEQ ID NO: 2897285 - RNA, 19 nt, Artificial Sequence
  Description of Artificial Sequence: Synthetic oligonucleotide
cuuguacacaucacgacuu

SEQ ID NO: 2897286 - RNA, 19 nt, Artificial Sequence
  Description of Artificial Sequence: Synthetic oligonucleotide
auucgggaucugcaggcau

SEQ ID NO: 2897287 - RNA, 19 nt, Artificial Sequence
  Description of Artificial Sequence: Synthetic oligonucleotide
uguacacaucacgacuuuu

SEQ ID NO: 2897288 - RNA, 19 nt, Artificial Sequence
  Description of Artificial Sequence: Synthetic oligonucleotide
accucugaacccuccucgu

SEQ ID NO: 2897289 - RNA, 19 nt, Artificial Sequence
  Description of Artificial Sequence: Synthetic oligonucleotide
ucgggaucugcaggcaucu

SEQ ID NO: 2897290 - RNA, 19 nt, Artificial Sequence
  Description of Artificial Sequence: Synthetic oligonucleotide
ccaacguugcauguugcgg

SEQ ID NO: 2897291 - RNA, 19 nt, Artificial Sequence
  Description of Artificial Sequence: Synthetic oligonucleotide
augggauucgggaucugca

SEQ ID NO: 2897292 - RNA, 19 nt, Artificial Sequence
  Description of Artificial Sequence: Synthetic oligonucleotide
auggcguguucucacugaa

SEQ ID NO: 2897293 - RNA, 19 nt, Artificial Sequence
  Description of Artificial Sequence: Synthetic oligonucleotide
uggcguguucucacugaac

SEQ ID NO: 2897294 - RNA, 19 nt, Artificial Sequence
  Description of Artificial Sequence: Synthetic oligonucleotide
augcguuuccaacguugca

SEQ ID NO: 2897295 - RNA, 19 nt, Artificial Sequence
  Description of Artificial Sequence: Synthetic oligonucleotide
cugcaggcaucuccaagug

SEQ ID NO: 2897296 - RNA, 19 nt, Artificial Sequence
  Description of Artificial Sequence: Synthetic oligonucleotide
guuacgcauccaggcacgg

SEQ ID NO: 2897297 - RNA, 19 nt, Artificial Sequence
  Description of Artificial Sequence: Synthetic oligonucleotide
caacguugcauguugcggu

SEQ ID NO: 2897298 - RNA, 19 nt, Artificial Sequence
  Description of Artificial Sequence: Synthetic oligonucleotide
gcguuuccaacguugcaug

SEQ ID NO: 2897299 - RNA, 19 nt, Artificial Sequence
  Description of Artificial Sequence: Synthetic oligonucleotide
gauggaguguggagggaga

SEQ ID NO: 2897300 - RNA, 19 nt, Artificial Sequence
  Description of Artificial Sequence: Synthetic oligonucleotide
uuacgcauccaggcacggc

SEQ ID NO: 2897301 - RNA, 19 nt, Artificial Sequence
  Description of Artificial Sequence: Synthetic oligonucleotide
ugggcgagcgcucccgcuc

SEQ ID NO: 2897302 - RNA, 19 nt, Artificial Sequence
  Description of Artificial Sequence: Synthetic oligonucleotide
gcuuguacacaucacgacu

SEQ ID NO: 2897303 - RNA, 19 nt, Artificial Sequence
  Description of Artificial Sequence: Synthetic oligonucleotide
ggcguguucucacugaacu

SEQ ID NO: 2897304 - RNA, 19 nt, Artificial Sequence
  Description of Artificial Sequence: Synthetic oligonucleotide
ugggguacaauggcguguu

SEQ ID NO: 2897305 - RNA, 19 nt, Artificial Sequence
  Description of Artificial Sequence: Synthetic oligonucleotide
aagugguccaggggcugug

SEQ ID NO: 2897306 - RNA, 19 nt, Artificial Sequence
  Description of Artificial Sequence: Synthetic oligonucleotide
gcuguuacgcauccaggca

SEQ ID NO: 2897307 - RNA, 19 nt, Artificial Sequence
  Description of Artificial Sequence: Synthetic oligonucleotide
guacaauggcguguucuca

SEQ ID NO: 2897308 - RNA, 19 nt, Artificial Sequence
  Description of Artificial Sequence: Synthetic oligonucleotide
agugguccaggggcugugg

SEQ ID NO: 2897309 - RNA, 19 nt, Artificial Sequence
  Description of Artificial Sequence: Synthetic oligonucleotide
gucaaacagcuugaucaca

SEQ ID NO: 2897310 - RNA, 19 nt, Artificial Sequence
  Description of Artificial Sequence: Synthetic oligonucleotide
aguguggagggagacgguu

SEQ ID NO: 2897311 - RNA, 19 nt, Artificial Sequence
  Description of Artificial Sequence: Synthetic oligonucleotide
uagauggaguguggaggga

SEQ ID NO: 2897312 - RNA, 19 nt, Artificial Sequence
  Description of Artificial Sequence: Synthetic oligonucleotide
gcaguggugagcugggcga

SEQ ID NO: 2897313 - RNA, 19 nt, Artificial Sequence
  Description of Artificial Sequence: Synthetic oligonucleotide
guccaggggcugugggugg

SEQ ID NO: 2897314 - RNA, 19 nt, Artificial Sequence
  Description of Artificial Sequence: Synthetic oligonucleotide
gcacugaggggcuguuacg

SEQ ID NO: 2897315 - RNA, 19 nt, Artificial Sequence
  Description of Artificial Sequence: Synthetic oligonucleotide
gggccagauccacacuccg

SEQ ID NO: 2897316 - RNA, 19 nt, Artificial Sequence
  Description of Artificial Sequence: Synthetic oligonucleotide
gauucgggaucugcaggca

SEQ ID NO: 2897317 - RNA, 19 nt, Artificial Sequence
  Description of Artificial Sequence: Synthetic oligonucleotide
ccgaugagaagccuccuuc

SEQ ID NO: 2897318 - RNA, 19 nt, Artificial Sequence
  Description of Artificial Sequence: Synthetic oligonucleotide
ggggaugggauucgggauc

SEQ ID NO: 2897319 - RNA, 19 nt, Artificial Sequence
  Description of Artificial Sequence: Synthetic oligonucleotide
  modified_base (12)..(12): a, c, u, g, unknown or other
agccuccuuccnccucugg

SEQ ID NO: 2897320 - RNA, 19 nt, Artificial Sequence
  Description of Artificial Sequence: Synthetic oligonucleotide
uuggaucucugaggacccc

SEQ ID NO: 2897321 - RNA, 19 nt, Artificial Sequence
  Description of Artificial Sequence: Synthetic oligonucleotide
gagggagacgguucaggcu

SEQ ID NO: 2897322 - RNA, 19 nt, Artificial Sequence
  Description of Artificial Sequence: Synthetic oligonucleotide
uggugagcugggcgagcgc

SEQ ID NO: 2897323 - RNA, 19 nt, Artificial Sequence
  Description of Artificial Sequence: Synthetic oligonucleotide
cgaugagaagccuccuucc

SEQ ID NO: 2897324 - RNA, 19 nt, Artificial Sequence
  Description of Artificial Sequence: Synthetic oligonucleotide
acacuccggucaaacagcu

SEQ ID NO: 2897325 - RNA, 19 nt, Artificial Sequence
  Description of Artificial Sequence: Synthetic oligonucleotide
ucacugaacugggccagau

SEQ ID NO: 2897326 - RNA, 19 nt, Artificial Sequence
  Description of Artificial Sequence: Synthetic oligonucleotide
  modified_base (16)..(16): a, c, u, g, unknown or other
gagaagccuccuuccnccu

SEQ ID NO: 2897327 - RNA, 19 nt, Artificial Sequence
  Description of Artificial Sequence: Synthetic oligonucleotide
caggcaucuccaagugguc

SEQ ID NO: 2897328 - RNA, 19 nt, Artificial Sequence
  Description of Artificial Sequence: Synthetic oligonucleotide
cacugaacugggccagauc

SEQ ID NO: 2897329 - RNA, 19 nt, Artificial Sequence
  Description of Artificial Sequence: Synthetic oligonucleotide
cggcagaugggguacaaug

SEQ ID NO: 2897330 - RNA, 19 nt, Artificial Sequence
  Description of Artificial Sequence: Synthetic oligonucleotide
agcugggcgagcgcucccg

SEQ ID NO: 2897331 - RNA, 19 nt, Artificial Sequence
  Description of Artificial Sequence: Synthetic oligonucleotide
cuccggucaaacagcuuga

SEQ ID NO: 2897332 - RNA, 19 nt, Artificial Sequence
  Description of Artificial Sequence: Synthetic oligonucleotide
cgacuuuugcuguuaauga

SEQ ID NO: 2897333 - RNA, 19 nt, Artificial Sequence
  Description of Artificial Sequence: Synthetic oligonucleotide
acguugcauguugcgguag

SEQ ID NO: 2897334 - RNA, 19 nt, Artificial Sequence
  Description of Artificial Sequence: Synthetic oligonucleotide
cauccaggcacggcagaug

SEQ ID NO: 2897335 - RNA, 19 nt, Artificial Sequence
  Description of Artificial Sequence: Synthetic oligonucleotide
aucguccaucucccuccuc

SEQ ID NO: 2897336 - RNA, 19 nt, Artificial Sequence
  Description of Artificial Sequence: Synthetic oligonucleotide
aucacgacuuuugcuguua

SEQ ID NO: 2897337 - RNA, 19 nt, Artificial Sequence
  Description of Artificial Sequence: Synthetic oligonucleotide
gcguguucucacugaacug

SEQ ID NO: 2897338 - RNA, 19 nt, Artificial Sequence
  Description of Artificial Sequence: Synthetic oligonucleotide
gaucugcaggcaucuccaa

SEQ ID NO: 2897339 - RNA, 19 nt, Artificial Sequence
  Description of Artificial Sequence: Synthetic oligonucleotide
cacauauguguuggaucuc

SEQ ID NO: 2897340 - RNA, 19 nt, Artificial Sequence
  Description of Artificial Sequence: Synthetic oligonucleotide
gguuccgaugagaagccuc

SEQ ID NO: 2897341 - RNA, 19 nt, Artificial Sequence
  Description of Artificial Sequence: Synthetic oligonucleotide
ucucgcacugaggggcugu

SEQ ID NO: 2897342 - RNA, 19 nt, Artificial Sequence
  Description of Artificial Sequence: Synthetic oligonucleotide
caaacagcuugaucacaua

SEQ ID NO: 2897343 - RNA, 19 nt, Artificial Sequence
  Description of Artificial Sequence: Synthetic oligonucleotide
gcucggaggguucaucauc

SEQ ID NO: 2897344 - RNA, 19 nt, Artificial Sequence
  Description of Artificial Sequence: Synthetic oligonucleotide
gggcuguuacgcauccagg

SEQ ID NO: 2897345 - RNA, 19 nt, Artificial Sequence
  Description of Artificial Sequence: Synthetic oligonucleotide
aggcacggcagauggggua

SEQ ID NO: 2897346 - RNA, 19 nt, Artificial Sequence
  Description of Artificial Sequence: Synthetic oligonucleotide
uggaggcagcuuguacaca

SEQ ID NO: 2897347 - RNA, 19 nt, Artificial Sequence
  Description of Artificial Sequence: Synthetic oligonucleotide
uuccgaugagaagccuccu

SEQ ID NO: 2897348 - RNA, 19 nt, Artificial Sequence
  Description of Artificial Sequence: Synthetic oligonucleotide
uccggucaaacagcuugau

SEQ ID NO: 2897349 - RNA, 19 nt, Artificial Sequence
  Description of Artificial Sequence: Synthetic oligonucleotide
cuggcguaugcguuuccaa

SEQ ID NO: 2897350 - RNA, 19 nt, Artificial Sequence
  Description of Artificial Sequence: Synthetic oligonucleotide
guguggagggagacgguuc

SEQ ID NO: 2897351 - RNA, 19 nt, Artificial Sequence
  Description of Artificial Sequence: Synthetic oligonucleotide
gcaggcaucuccaaguggu

SEQ ID NO: 2897352 - RNA, 19 nt, Artificial Sequence
  Description of Artificial Sequence: Synthetic oligonucleotide
ugguuccgaugagaagccu

SEQ ID NO: 2897353 - RNA, 19 nt, Artificial Sequence
  Description of Artificial Sequence: Synthetic oligonucleotide
ggaggcagcuuguacacau

SEQ ID NO: 2897354 - RNA, 19 nt, Artificial Sequence
  Description of Artificial Sequence: Synthetic oligonucleotide
acgcauccaggcacggcag

SEQ ID NO: 2897355 - RNA, 19 nt, Artificial Sequence
  Description of Artificial Sequence: Synthetic oligonucleotide
  modified_base (13)..(13): a, c, u, g, unknown or other
aagccuccuuccnccucug

SEQ ID NO: 2897356 - RNA, 19 nt, Artificial Sequence
  Description of Artificial Sequence: Synthetic oligonucleotide
caguggggaugggauucgg

SEQ ID NO: 2897357 - RNA, 19 nt, Artificial Sequence
  Description of Artificial Sequence: Synthetic oligonucleotide
cucuggcguaugcguuucc

SEQ ID NO: 2897358 - RNA, 19 nt, Artificial Sequence
  Description of Artificial Sequence: Synthetic oligonucleotide
  modified_base (8)..(8): a, c, u, g, unknown or other
uccuuccnccucuggcgua

SEQ ID NO: 2897359 - RNA, 19 nt, Artificial Sequence
  Description of Artificial Sequence: Synthetic oligonucleotide
guugcgguagauggagugu

SEQ ID NO: 2897360 - RNA, 19 nt, Artificial Sequence
  Description of Artificial Sequence: Synthetic oligonucleotide
gaggcagcuuguacacauc

SEQ ID NO: 2897361 - RNA, 19 nt, Artificial Sequence
  Description of Artificial Sequence: Synthetic oligonucleotide
ugccagcccaucguccauc

SEQ ID NO: 2897362 - RNA, 19 nt, Artificial Sequence
  Description of Artificial Sequence: Synthetic oligonucleotide
ggguggaggcagcuuguac

SEQ ID NO: 2897363 - RNA, 19 nt, Artificial Sequence
  Description of Artificial Sequence: Synthetic oligonucleotide
guacccugggucucaggcu

SEQ ID NO: 2897364 - RNA, 19 nt, Artificial Sequence
  Description of Artificial Sequence: Synthetic oligonucleotide
cgcacugaggggcuguuac

SEQ ID NO: 2897365 - RNA, 19 nt, Artificial Sequence
  Description of Artificial Sequence: Synthetic oligonucleotide
ucccgcucucgcucucgca

SEQ ID NO: 2897366 - RNA, 19 nt, Artificial Sequence
  Description of Artificial Sequence: Synthetic oligonucleotide
uccaggggcugugggugga

SEQ ID NO: 2897367 - RNA, 19 nt, Artificial Sequence
  Description of Artificial Sequence: Synthetic oligonucleotide
gcaguggggaugggauucg

SEQ ID NO: 2897368 - RNA, 19 nt, Artificial Sequence
  Description of Artificial Sequence: Synthetic oligonucleotide
cugggucucaggcugcagu

SEQ ID NO: 2897369 - RNA, 19 nt, Artificial Sequence
  Description of Artificial Sequence: Synthetic oligonucleotide
auguugcgguagauggagu

SEQ ID NO: 2897370 - RNA, 19 nt, Artificial Sequence
  Description of Artificial Sequence: Synthetic oligonucleotide
cccgcucucgcucucgcac

SEQ ID NO: 2897371 - RNA, 19 nt, Artificial Sequence
  Description of Artificial Sequence: Synthetic oligonucleotide
gagcugggcgagcgcuccc

SEQ ID NO: 2897372 - RNA, 19 nt, Artificial Sequence
  Description of Artificial Sequence: Synthetic oligonucleotide
ggggcaguggugagcuggg

SEQ ID NO: 2897373 - RNA, 19 nt, Artificial Sequence
  Description of Artificial Sequence: Synthetic oligonucleotide
cgcucucgcacugaggggc

SEQ ID NO: 2897374 - RNA, 19 nt, Artificial Sequence
  Description of Artificial Sequence: Synthetic oligonucleotide
cccaucguccaucucccuc

SEQ ID NO: 2897375 - RNA, 19 nt, Artificial Sequence
  Description of Artificial Sequence: Synthetic oligonucleotide
gggagacgguucaggcucg

SEQ ID NO: 2897376 - RNA, 19 nt, Artificial Sequence
  Description of Artificial Sequence: Synthetic oligonucleotide
gggcuguggguggaggcag

SEQ ID NO: 2897377 - RNA, 19 nt, Artificial Sequence
  Description of Artificial Sequence: Synthetic oligonucleotide
ggguacaauggcguguucu

SEQ ID NO: 2897378 - RNA, 19 nt, Artificial Sequence
  Description of Artificial Sequence: Synthetic oligonucleotide
guuuccaacguugcauguu

SEQ ID NO: 2897379 - RNA, 19 nt, Artificial Sequence
  Description of Artificial Sequence: Synthetic oligonucleotide
cugaggggcuguuacgcau

SEQ ID NO: 2897380 - RNA, 19 nt, Artificial Sequence
  Description of Artificial Sequence: Synthetic oligonucleotide
uggguggaggcagcuugua

SEQ ID NO: 2897381 - RNA, 19 nt, Artificial Sequence
  Description of Artificial Sequence: Synthetic oligonucleotide
ucaggcucggaggguucau

SEQ ID NO: 2897382 - RNA, 19 nt, Artificial Sequence
  Description of Artificial Sequence: Synthetic oligonucleotide
  modified_base (9)..(9): a, c, u, g, unknown or other
cuccuuccnccucuggcgu

SEQ ID NO: 2897383 - RNA, 19 nt, Artificial Sequence
  Description of Artificial Sequence: Synthetic oligonucleotide
ccagauccacacuccgguc

SEQ ID NO: 2897384 - RNA, 19 nt, Artificial Sequence
  Description of Artificial Sequence: Synthetic oligonucleotide
ccggucaaacagcuugauc

SEQ ID NO: 2897385 - RNA, 19 nt, Artificial Sequence
  Description of Artificial Sequence: Synthetic oligonucleotide
guucaggcucggaggguuc

SEQ ID NO: 2897386 - RNA, 19 nt, Artificial Sequence
  Description of Artificial Sequence: Synthetic oligonucleotide
gagacgguucaggcucgga

SEQ ID NO: 2897387 - RNA, 19 nt, Artificial Sequence
  Description of Artificial Sequence: Synthetic oligonucleotide
cugaacccuccucguccuc

SEQ ID NO: 2897388 - RNA, 19 nt, Artificial Sequence
  Description of Artificial Sequence: Synthetic oligonucleotide
caggcucggaggguucauc

SEQ ID NO: 2897389 - RNA, 19 nt, Artificial Sequence
  Description of Artificial Sequence: Synthetic oligonucleotide
acggcagaugggguacaau

SEQ ID NO: 2897390 - RNA, 19 nt, Artificial Sequence
  Description of Artificial Sequence: Synthetic oligonucleotide
gcauguugcgguagaugga

SEQ ID NO: 2897391 - RNA, 19 nt, Artificial Sequence
  Description of Artificial Sequence: Synthetic oligonucleotide
ggguacccugggucucagg

SEQ ID NO: 2897392 - RNA, 19 nt, Artificial Sequence
  Description of Artificial Sequence: Synthetic oligonucleotide
ggagacgguucaggcucgg

SEQ ID NO: 2897393 - RNA, 19 nt, Artificial Sequence
  Description of Artificial Sequence: Synthetic oligonucleotide
ccucugaacccuccucguc

SEQ ID NO: 2897394 - RNA, 19 nt, Artificial Sequence
  Description of Artificial Sequence: Synthetic oligonucleotide
gcguaugcguuuccaacgu

SEQ ID NO: 2897395 - RNA, 19 nt, Artificial Sequence
  Description of Artificial Sequence: Synthetic oligonucleotide
  modified_base (6)..(6): a, c, u, g, unknown or other
cuuccnccucuggcguaug

SEQ ID NO: 2897396 - RNA, 19 nt, Artificial Sequence
  Description of Artificial Sequence: Synthetic oligonucleotide
guugcauguugcgguagau

SEQ ID NO: 2897397 - RNA, 19 nt, Artificial Sequence
  Description of Artificial Sequence: Synthetic oligonucleotide
ccccucugccagcccaucg

SEQ ID NO: 2897398 - RNA, 19 nt, Artificial Sequence
  Description of Artificial Sequence: Synthetic oligonucleotide
gcuugaucacauauguguu

SEQ ID NO: 2897399 - RNA, 19 nt, Artificial Sequence
  Description of Artificial Sequence: Synthetic oligonucleotide
gcgguagauggagugugga

SEQ ID NO: 2897400 - RNA, 19 nt, Artificial Sequence
  Description of Artificial Sequence: Synthetic oligonucleotide
gauccacacuccggucaaa

SEQ ID NO: 2897401 - RNA, 19 nt, Artificial Sequence
  Description of Artificial Sequence: Synthetic oligonucleotide
cucacugaacugggccaga

SEQ ID NO: 2897402 - RNA, 19 nt, Artificial Sequence
  Description of Artificial Sequence: Synthetic oligonucleotide
gcugcaguggggaugggau

SEQ ID NO: 2897403 - RNA, 19 nt, Artificial Sequence
  Description of Artificial Sequence: Synthetic oligonucleotide
ccucugccagcccaucguc

SEQ ID NO: 2897404 - RNA, 19 nt, Artificial Sequence
  Description of Artificial Sequence: Synthetic oligonucleotide
cucucgcacugaggggcug

SEQ ID NO: 2897405 - RNA, 19 nt, Artificial Sequence
  Description of Artificial Sequence: Synthetic oligonucleotide
ucgcacugaggggcuguua

SEQ ID NO: 2897406 - RNA, 19 nt, Artificial Sequence
  Description of Artificial Sequence: Synthetic oligonucleotide
cacgacuuuugcuguuaau

SEQ ID NO: 2897407 - RNA, 19 nt, Artificial Sequence
  Description of Artificial Sequence: Synthetic oligonucleotide
ggggcuguggguggaggca

SEQ ID NO: 2897408 - RNA, 19 nt, Artificial Sequence
  Description of Artificial Sequence: Synthetic oligonucleotide
cgaagcugguuccgaugag

SEQ ID NO: 2897409 - RNA, 19 nt, Artificial Sequence
  Description of Artificial Sequence: Synthetic oligonucleotide
aggggcuguuacgcaucca

SEQ ID NO: 2897410 - RNA, 19 nt, Artificial Sequence
  Description of Artificial Sequence: Synthetic oligonucleotide
gagcgcucccgcucucgcu

SEQ ID NO: 2897411 - RNA, 19 nt, Artificial Sequence
  Description of Artificial Sequence: Synthetic oligonucleotide
gcugggcgagcgcucccgc

SEQ ID NO: 2897412 - RNA, 19 nt, Artificial Sequence
  Description of Artificial Sequence: Synthetic oligonucleotide
ccaagugguccaggggcug

SEQ ID NO: 2897413 - RNA, 19 nt, Artificial Sequence
  Description of Artificial Sequence: Synthetic oligonucleotide
caucacgacuuuugcuguu

SEQ ID NO: 2897414 - RNA, 19 nt, Artificial Sequence
  Description of Artificial Sequence: Synthetic oligonucleotide
gcgagcgcucccgcucucg

SEQ ID NO: 2897415 - RNA, 19 nt, Artificial Sequence
  Description of Artificial Sequence: Synthetic oligonucleotide
  modified_base (2)..(2): a, c, u, g, unknown or other
cnccucuggcguaugcguu

SEQ ID NO: 2897416 - RNA, 19 nt, Artificial Sequence
  Description of Artificial Sequence: Synthetic oligonucleotide
caggcacggcagauggggu

SEQ ID NO: 2897417 - RNA, 19 nt, Artificial Sequence
  Description of Artificial Sequence: Synthetic oligonucleotide
  modified_base (3)..(3): a, c, u, g, unknown or other
ccnccucuggcguaugcgu

SEQ ID NO: 2897418 - RNA, 19 nt, Artificial Sequence
  Description of Artificial Sequence: Synthetic oligonucleotide
gaguguggagggagacggu

SEQ ID NO: 2897419 - RNA, 19 nt, Artificial Sequence
  Description of Artificial Sequence: Synthetic oligonucleotide
caucguccaucucccuccu

SEQ ID NO: 2897420 - RNA, 19 nt, Artificial Sequence
  Description of Artificial Sequence: Synthetic oligonucleotide
guggguggaggcagcuugu

SEQ ID NO: 2897421 - RNA, 19 nt, Artificial Sequence
  Description of Artificial Sequence: Synthetic oligonucleotide
caagugguccaggggcugu

SEQ ID NO: 2897422 - RNA, 19 nt, Artificial Sequence
  Description of Artificial Sequence: Synthetic oligonucleotide
gguucaggcucggaggguu

SEQ ID NO: 2897423 - RNA, 19 nt, Artificial Sequence
  Description of Artificial Sequence: Synthetic oligonucleotide
cguugcauguugcgguaga

SEQ ID NO: 2897424 - RNA, 19 nt, Artificial Sequence
  Description of Artificial Sequence: Synthetic oligonucleotide
gggguacaauggcguguuc

SEQ ID NO: 2897425 - RNA, 19 nt, Artificial Sequence
  Description of Artificial Sequence: Synthetic oligonucleotide
ccucuggcguaugcguuuc

SEQ ID NO: 2897426 - RNA, 19 nt, Artificial Sequence
  Description of Artificial Sequence: Synthetic oligonucleotide
cacggcagaugggguacaa

SEQ ID NO: 2897427 - RNA, 19 nt, Artificial Sequence
  Description of Artificial Sequence: Synthetic oligonucleotide
cgagcgcucccgcucucgc

SEQ ID NO: 2897428 - RNA, 19 nt, Artificial Sequence
  Description of Artificial Sequence: Synthetic oligonucleotide
cucaggcugcaguggggau

SEQ ID NO: 2897429 - RNA, 19 nt, Artificial Sequence
  Description of Artificial Sequence: Synthetic oligonucleotide
ggcucggaggguucaucau

SEQ ID NO: 2897430 - RNA, 19 nt, Artificial Sequence
  Description of Artificial Sequence: Synthetic oligonucleotide
cugggcgagcgcucccgcu

SEQ ID NO: 2897431 - RNA, 19 nt, Artificial Sequence
  Description of Artificial Sequence: Synthetic oligonucleotide
gccagcccaucguccaucu

SEQ ID NO: 2897432 - RNA, 19 nt, Artificial Sequence
  Description of Artificial Sequence: Synthetic oligonucleotide
ccugggucucaggcugcag

SEQ ID NO: 2897433 - RNA, 19 nt, Artificial Sequence
  Description of Artificial Sequence: Synthetic oligonucleotide
gcauccaggcacggcagau

SEQ ID NO: 2897434 - RNA, 19 nt, Artificial Sequence
  Description of Artificial Sequence: Synthetic oligonucleotide
cguuuccaacguugcaugu

SEQ ID NO: 2897435 - RNA, 19 nt, Artificial Sequence
  Description of Artificial Sequence: Synthetic oligonucleotide
gggcgagcgcucccgcucu

SEQ ID NO: 2897436 - RNA, 19 nt, Artificial Sequence
  Description of Artificial Sequence: Synthetic oligonucleotide
gcucucgcucucgcacuga

SEQ ID NO: 2897437 - RNA, 19 nt, Artificial Sequence
  Description of Artificial Sequence: Synthetic oligonucleotide
cacuccggucaaacagcuu

SEQ ID NO: 2897438 - RNA, 19 nt, Artificial Sequence
  Description of Artificial Sequence: Synthetic oligonucleotide
ccagcccaucguccaucuc

SEQ ID NO: 2897439 - RNA, 19 nt, Artificial Sequence
  Description of Artificial Sequence: Synthetic oligonucleotide
cugccagcccaucguccau

SEQ ID NO: 2897440 - RNA, 19 nt, Artificial Sequence
  Description of Artificial Sequence: Synthetic oligonucleotide
ggcgagcgcucccgcucuc

SEQ ID NO: 2897441 - RNA, 19 nt, Artificial Sequence
  Description of Artificial Sequence: Synthetic oligonucleotide
  modified_base (7)..(7): a, c, u, g, unknown or other
ccuuccnccucuggcguau

SEQ ID NO: 2897442 - RNA, 19 nt, Artificial Sequence
  Description of Artificial Sequence: Synthetic oligonucleotide
cgcauccaggcacggcaga

SEQ ID NO: 2897443 - RNA, 19 nt, Artificial Sequence
  Description of Artificial Sequence: Synthetic oligonucleotide
gcucucgcacugaggggcu

SEQ ID NO: 2897444 - RNA, 19 nt, Artificial Sequence
  Description of Artificial Sequence: Synthetic oligonucleotide
cucgcacugaggggcuguu

SEQ ID NO: 2897445 - RNA, 19 nt, Artificial Sequence
  Description of Artificial Sequence: Synthetic oligonucleotide
cccugggucucaggcugca

SEQ ID NO: 2897446 - RNA, 19 nt, Artificial Sequence
  Description of Artificial Sequence: Synthetic oligonucleotide
gcccaucguccaucucccu

SEQ ID NO: 2897447 - RNA, 19 nt, Artificial Sequence
  Description of Artificial Sequence: Synthetic oligonucleotide
cguaugcguuuccaacguu

SEQ ID NO: 2897448 - RNA, 19 nt, Artificial Sequence
  Description of Artificial Sequence: Synthetic oligonucleotide
cgggaucugcaggcaucuc

SEQ ID NO: 2897449 - RNA, 19 nt, Artificial Sequence
  Description of Artificial Sequence: Synthetic oligonucleotide
cgguucaggcucggagggu

SEQ ID NO: 2897450 - RNA, 19 nt, Artificial Sequence
  Description of Artificial Sequence: Synthetic oligonucleotide
  modified_base (1)..(1): a, c, u, g, unknown or other
nccucuggcguaugcguuu

SEQ ID NO: 2897451 - RNA, 19 nt, Artificial Sequence
  Description of Artificial Sequence: Synthetic oligonucleotide
uguguaauuggcaagaagg

SEQ ID NO: 2897452 - RNA, 19 nt, Artificial Sequence
  Description of Artificial Sequence: Synthetic oligonucleotide
aaugcugacacccugagca

SEQ ID NO: 2897453 - RNA, 19 nt, Artificial Sequence
  Description of Artificial Sequence: Synthetic oligonucleotide
auuuuauucucacucaugg

SEQ ID NO: 2897454 - RNA, 19 nt, Artificial Sequence
  Description of Artificial Sequence: Synthetic oligonucleotide
uuuauucucacucauggcu

SEQ ID NO: 2897455 - RNA, 19 nt, Artificial Sequence
  Description of Artificial Sequence: Synthetic oligonucleotide
aauacuaaaguaguuagga

SEQ ID NO: 2897456 - RNA, 19 nt, Artificial Sequence
  Description of Artificial Sequence: Synthetic oligonucleotide
ucaauacuaaaguaguuag

SEQ ID NO: 2897457 - RNA, 19 nt, Artificial Sequence
  Description of Artificial Sequence: Synthetic oligonucleotide
aauggcaaugguuuggcag

SEQ ID NO: 2897458 - RNA, 19 nt, Artificial Sequence
  Description of Artificial Sequence: Synthetic oligonucleotide
aaaguaguuaggaucauuc

SEQ ID NO: 2897459 - RNA, 19 nt, Artificial Sequence
  Description of Artificial Sequence: Synthetic oligonucleotide
uaggaaaacucuucaaugg

SEQ ID NO: 2897460 - RNA, 19 nt, Artificial Sequence
  Description of Artificial Sequence: Synthetic oligonucleotide
aucuguuugagguucuucc

SEQ ID NO: 2897461 - RNA, 19 nt, Artificial Sequence
  Description of Artificial Sequence: Synthetic oligonucleotide
auggcuucaaugcugacac

SEQ ID NO: 2897462 - RNA, 19 nt, Artificial Sequence
  Description of Artificial Sequence: Synthetic oligonucleotide
aaaguugggauccuuaaau

SEQ ID NO: 2897463 - RNA, 19 nt, Artificial Sequence
  Description of Artificial Sequence: Synthetic oligonucleotide
aauguaggaaaacucuuca

SEQ ID NO: 2897464 - RNA, 19 nt, Artificial Sequence
  Description of Artificial Sequence: Synthetic oligonucleotide
aagaaggcccgaaacaucc

SEQ ID NO: 2897465 - RNA, 19 nt, Artificial Sequence
  Description of Artificial Sequence: Synthetic oligonucleotide
aguugggauccuuaaaugg

SEQ ID NO: 2897466 - RNA, 19 nt, Artificial Sequence
  Description of Artificial Sequence: Synthetic oligonucleotide
uacuaaaguaguuaggauc

SEQ ID NO: 2897467 - RNA, 19 nt, Artificial Sequence
  Description of Artificial Sequence: Synthetic oligonucleotide
auggcaaugcccuuucagc

SEQ ID NO: 2897468 - RNA, 19 nt, Artificial Sequence
  Description of Artificial Sequence: Synthetic oligonucleotide
cuggcuuaaaagauggagg

SEQ ID NO: 2897469 - RNA, 19 nt, Artificial Sequence
  Description of Artificial Sequence: Synthetic oligonucleotide
ucuuagcuggcuuaaaaga

SEQ ID NO: 2897470 - RNA, 19 nt, Artificial Sequence
  Description of Artificial Sequence: Synthetic oligonucleotide
ucgaauguaggaaaacucu

SEQ ID NO: 2897471 - RNA, 19 nt, Artificial Sequence
  Description of Artificial Sequence: Synthetic oligonucleotide
uuaaauggcaaugguuugg

SEQ ID NO: 2897472 - RNA, 19 nt, Artificial Sequence
  Description of Artificial Sequence: Synthetic oligonucleotide
uauucuucuugccagcuac

SEQ ID NO: 2897473 - RNA, 19 nt, Artificial Sequence
  Description of Artificial Sequence: Synthetic oligonucleotide
uagcuggcuuaaaagaugg

SEQ ID NO: 2897474 - RNA, 19 nt, Artificial Sequence
  Description of Artificial Sequence: Synthetic oligonucleotide
auuccuacuacauccccac

SEQ ID NO: 2897475 - RNA, 19 nt, Artificial Sequence
  Description of Artificial Sequence: Synthetic oligonucleotide
guaggaaaacucuucaaug

SEQ ID NO: 2897476 - RNA, 19 nt, Artificial Sequence
  Description of Artificial Sequence: Synthetic oligonucleotide
uucuuagcuggcuuaaaag

SEQ ID NO: 2897477 - RNA, 19 nt, Artificial Sequence
  Description of Artificial Sequence: Synthetic oligonucleotide
uaauuggcaagaaggcccg

SEQ ID NO: 2897478 - RNA, 19 nt, Artificial Sequence
  Description of Artificial Sequence: Synthetic oligonucleotide
agcaucaauacuaaaguag

SEQ ID NO: 2897479 - RNA, 19 nt, Artificial Sequence
  Description of Artificial Sequence: Synthetic oligonucleotide
gaucauucaguugccaugg

SEQ ID NO: 2897480 - RNA, 19 nt, Artificial Sequence
  Description of Artificial Sequence: Synthetic oligonucleotide
gaaaacucuucaauggugc

SEQ ID NO: 2897481 - RNA, 19 nt, Artificial Sequence
  Description of Artificial Sequence: Synthetic oligonucleotide
gaaccaaauucagaggacg

SEQ ID NO: 2897482 - RNA, 19 nt, Artificial Sequence
  Description of Artificial Sequence: Synthetic oligonucleotide
uguuugagguucuuccagg

SEQ ID NO: 2897483 - RNA, 19 nt, Artificial Sequence
  Description of Artificial Sequence: Synthetic oligonucleotide
guaauuggcaagaaggccc

SEQ ID NO: 2897484 - RNA, 19 nt, Artificial Sequence
  Description of Artificial Sequence: Synthetic oligonucleotide
gauccuuaaauggcaaugg

SEQ ID NO: 2897485 - RNA, 19 nt, Artificial Sequence
  Description of Artificial Sequence: Synthetic oligonucleotide
uuagcuggcuuaaaagaug

SEQ ID NO: 2897486 - RNA, 19 nt, Artificial Sequence
  Description of Artificial Sequence: Synthetic oligonucleotide
aaguugggauccuuaaaug

SEQ ID NO: 2897487 - RNA, 19 nt, Artificial Sequence
  Description of Artificial Sequence: Synthetic oligonucleotide
uggcuuaaaagauggagga

SEQ ID NO: 2897488 - RNA, 19 nt, Artificial Sequence
  Description of Artificial Sequence: Synthetic oligonucleotide
aaccaaauucagaggacgc

SEQ ID NO: 2897489 - RNA, 19 nt, Artificial Sequence
  Description of Artificial Sequence: Synthetic oligonucleotide
acuaaaguaguuaggauca

SEQ ID NO: 2897490 - RNA, 19 nt, Artificial Sequence
  Description of Artificial Sequence: Synthetic oligonucleotide
uucgaauguaggaaaacuc

SEQ ID NO: 2897491 - RNA, 19 nt, Artificial Sequence
  Description of Artificial Sequence: Synthetic oligonucleotide
uggaggagcaucaauacua

SEQ ID NO: 2897492 - RNA, 19 nt, Artificial Sequence
  Description of Artificial Sequence: Synthetic oligonucleotide
caauacuaaaguaguuagg

SEQ ID NO: 2897493 - RNA, 19 nt, Artificial Sequence
  Description of Artificial Sequence: Synthetic oligonucleotide
uugagguucuuccagguuc

SEQ ID NO: 2897494 - RNA, 19 nt, Artificial Sequence
  Description of Artificial Sequence: Synthetic oligonucleotide
uguaauuggcaagaaggcc

SEQ ID NO: 2897495 - RNA, 19 nt, Artificial Sequence
  Description of Artificial Sequence: Synthetic oligonucleotide
ugagggucuguguaauugg

SEQ ID NO: 2897496 - RNA, 19 nt, Artificial Sequence
  Description of Artificial Sequence: Synthetic oligonucleotide
aaguaguuaggaucauuca

SEQ ID NO: 2897497 - RNA, 19 nt, Artificial Sequence
  Description of Artificial Sequence: Synthetic oligonucleotide
uaaaagauggaggagcauc

SEQ ID NO: 2897498 - RNA, 19 nt, Artificial Sequence
  Description of Artificial Sequence: Synthetic oligonucleotide
uuuuauucucacucauggc

SEQ ID NO: 2897499 - RNA, 19 nt, Artificial Sequence
  Description of Artificial Sequence: Synthetic oligonucleotide
gaucagggaacgaugcucg

SEQ ID NO: 2897500 - RNA, 19 nt, Artificial Sequence
  Description of Artificial Sequence: Synthetic oligonucleotide
aggagcaucaauacuaaag

SEQ ID NO: 2897501 - RNA, 19 nt, Artificial Sequence
  Description of Artificial Sequence: Synthetic oligonucleotide
gauggaggagcaucaauac

SEQ ID NO: 2897502 - RNA, 19 nt, Artificial Sequence
  Description of Artificial Sequence: Synthetic oligonucleotide
aacucuucaauggugcuga

SEQ ID NO: 2897503 - RNA, 19 nt, Artificial Sequence
  Description of Artificial Sequence: Synthetic oligonucleotide
auccgaauacuucuuagcu

SEQ ID NO: 2897504 - RNA, 19 nt, Artificial Sequence
  Description of Artificial Sequence: Synthetic oligonucleotide
aaaagauggaggagcauca

SEQ ID NO: 2897505 - RNA, 19 nt, Artificial Sequence
  Description of Artificial Sequence: Synthetic oligonucleotide
ucaggaucagggaacgaug

SEQ ID NO: 2897506 - RNA, 19 nt, Artificial Sequence
  Description of Artificial Sequence: Synthetic oligonucleotide
ugcccuuucagcagcgagg

SEQ ID NO: 2897507 - RNA, 19 nt, Artificial Sequence
  Description of Artificial Sequence: Synthetic oligonucleotide
agaggacgccauuuuauuc

SEQ ID NO: 2897508 - RNA, 19 nt, Artificial Sequence
  Description of Artificial Sequence: Synthetic oligonucleotide
uugggauccuuaaauggca

SEQ ID NO: 2897509 - RNA, 19 nt, Artificial Sequence
  Description of Artificial Sequence: Synthetic oligonucleotide
accaaauucagaggacgcc

SEQ ID NO: 2897510 - RNA, 19 nt, Artificial Sequence
  Description of Artificial Sequence: Synthetic oligonucleotide
gacacccugagcaaagccg

SEQ ID NO: 2897511 - RNA, 19 nt, Artificial Sequence
  Description of Artificial Sequence: Synthetic oligonucleotide
uccgaauacuucuuagcug

SEQ ID NO: 2897512 - RNA, 19 nt, Artificial Sequence
  Description of Artificial Sequence: Synthetic oligonucleotide
cuuaaauggcaaugguuug

SEQ ID NO: 2897513 - RNA, 19 nt, Artificial Sequence
  Description of Artificial Sequence: Synthetic oligonucleotide
ugagcaaagccggagccgg

SEQ ID NO: 2897514 - RNA, 19 nt, Artificial Sequence
  Description of Artificial Sequence: Synthetic oligonucleotide
ccgaauacuucuuagcugg

SEQ ID NO: 2897515 - RNA, 19 nt, Artificial Sequence
  Description of Artificial Sequence: Synthetic oligonucleotide
ucaaugcugacacccugag

SEQ ID NO: 2897516 - RNA, 19 nt, Artificial Sequence
  Description of Artificial Sequence: Synthetic oligonucleotide
ucauucaguugccauggca

SEQ ID NO: 2897517 - RNA, 19 nt, Artificial Sequence
  Description of Artificial Sequence: Synthetic oligonucleotide
acuacauccccacuucuca

SEQ ID NO: 2897518 - RNA, 19 nt, Artificial Sequence
  Description of Artificial Sequence: Synthetic oligonucleotide
ccagagugcacaaaguugg

SEQ ID NO: 2897519 - RNA, 19 nt, Artificial Sequence
  Description of Artificial Sequence: Synthetic oligonucleotide
ucaauggugcugaaccgca

SEQ ID NO: 2897520 - RNA, 19 nt, Artificial Sequence
  Description of Artificial Sequence: Synthetic oligonucleotide
acauccgaauacuucuuag

SEQ ID NO: 2897521 - RNA, 19 nt, Artificial Sequence
  Description of Artificial Sequence: Synthetic oligonucleotide
aauggugcugaaccgcagu

SEQ ID NO: 2897522 - RNA, 19 nt, Artificial Sequence
  Description of Artificial Sequence: Synthetic oligonucleotide
ucuucuugccagcuacugc

SEQ ID NO: 2897523 - RNA, 19 nt, Artificial Sequence
  Description of Artificial Sequence: Synthetic oligonucleotide
auccccacuucucaggauc

SEQ ID NO: 2897524 - RNA, 19 nt, Artificial Sequence
  Description of Artificial Sequence: Synthetic oligonucleotide
aggaaaacucuucaauggu

SEQ ID NO: 2897525 - RNA, 19 nt, Artificial Sequence
  Description of Artificial Sequence: Synthetic oligonucleotide
cuucaauggugcugaaccg

SEQ ID NO: 2897526 - RNA, 19 nt, Artificial Sequence
  Description of Artificial Sequence: Synthetic oligonucleotide
cauccgaauacuucuuagc

SEQ ID NO: 2897527 - RNA, 19 nt, Artificial Sequence
  Description of Artificial Sequence: Synthetic oligonucleotide
cauuuuauucucacucaug

SEQ ID NO: 2897528 - RNA, 19 nt, Artificial Sequence
  Description of Artificial Sequence: Synthetic oligonucleotide
uuuuccacaggcccagaac

SEQ ID NO: 2897529 - RNA, 19 nt, Artificial Sequence
  Description of Artificial Sequence: Synthetic oligonucleotide
cagggaacgaugcucgugg

SEQ ID NO: 2897530 - RNA, 19 nt, Artificial Sequence
  Description of Artificial Sequence: Synthetic oligonucleotide
uaaauggcaaugguuuggc

SEQ ID NO: 2897531 - RNA, 19 nt, Artificial Sequence
  Description of Artificial Sequence: Synthetic oligonucleotide
uuaggaucauucaguugcc

SEQ ID NO: 2897532 - RNA, 19 nt, Artificial Sequence
  Description of Artificial Sequence: Synthetic oligonucleotide
cuuaaaagauggaggagca

SEQ ID NO: 2897533 - RNA, 19 nt, Artificial Sequence
  Description of Artificial Sequence: Synthetic oligonucleotide
uucaaugcugacacccuga

SEQ ID NO: 2897534 - RNA, 19 nt, Artificial Sequence
  Description of Artificial Sequence: Synthetic oligonucleotide
uuauucucacucauggcuu

SEQ ID NO: 2897535 - RNA, 19 nt, Artificial Sequence
  Description of Artificial Sequence: Synthetic oligonucleotide
aaacucuucaauggugcug

SEQ ID NO: 2897536 - RNA, 19 nt, Artificial Sequence
  Description of Artificial Sequence: Synthetic oligonucleotide
agguucuauucuucuugcc

SEQ ID NO: 2897537 - RNA, 19 nt, Artificial Sequence
  Description of Artificial Sequence: Synthetic oligonucleotide
ucuguuugagguucuucca

SEQ ID NO: 2897538 - RNA, 19 nt, Artificial Sequence
  Description of Artificial Sequence: Synthetic oligonucleotide
cagaaccaaauucagagga

SEQ ID NO: 2897539 - RNA, 19 nt, Artificial Sequence
  Description of Artificial Sequence: Synthetic oligonucleotide
guugggauccuuaaauggc

SEQ ID NO: 2897540 - RNA, 19 nt, Artificial Sequence
  Description of Artificial Sequence: Synthetic oligonucleotide
uccuuaaauggcaaugguu

SEQ ID NO: 2897541 - RNA, 19 nt, Artificial Sequence
  Description of Artificial Sequence: Synthetic oligonucleotide
ucagaggacgccauuuuau

SEQ ID NO: 2897542 - RNA, 19 nt, Artificial Sequence
  Description of Artificial Sequence: Synthetic oligonucleotide
uggcaaugcccuuucagca

SEQ ID NO: 2897543 - RNA, 19 nt, Artificial Sequence
  Description of Artificial Sequence: Synthetic oligonucleotide
aucaauacuaaaguaguua

SEQ ID NO: 2897544 - RNA, 19 nt, Artificial Sequence
  Description of Artificial Sequence: Synthetic oligonucleotide
gcuuaaaagauggaggagc

SEQ ID NO: 2897545 - RNA, 19 nt, Artificial Sequence
  Description of Artificial Sequence: Synthetic oligonucleotide
ggccauuccuacuacaucc

SEQ ID NO: 2897546 - RNA, 19 nt, Artificial Sequence
  Description of Artificial Sequence: Synthetic oligonucleotide
uucaauggugcugaaccgc

SEQ ID NO: 2897547 - RNA, 19 nt, Artificial Sequence
  Description of Artificial Sequence: Synthetic oligonucleotide
uacugcaccaccguggcca

SEQ ID NO: 2897548 - RNA, 19 nt, Artificial Sequence
  Description of Artificial Sequence: Synthetic oligonucleotide
agcagcgaggaucuguuug

SEQ ID NO: 2897549 - RNA, 19 nt, Artificial Sequence
  Description of Artificial Sequence: Synthetic oligonucleotide
cuucucaggaucagggaac

SEQ ID NO: 2897550 - RNA, 19 nt, Artificial Sequence
  Description of Artificial Sequence: Synthetic oligonucleotide
acuucucaggaucagggaa

SEQ ID NO: 2897551 - RNA, 19 nt, Artificial Sequence
  Description of Artificial Sequence: Synthetic oligonucleotide
cuucuugccagcuacugca

SEQ ID NO: 2897552 - RNA, 19 nt, Artificial Sequence
  Description of Artificial Sequence: Synthetic oligonucleotide
gaauguaggaaaacucuuc

SEQ ID NO: 2897553 - RNA, 19 nt, Artificial Sequence
  Description of Artificial Sequence: Synthetic oligonucleotide
cugugaccacgucagaggg

SEQ ID NO: 2897554 - RNA, 19 nt, Artificial Sequence
  Description of Artificial Sequence: Synthetic oligonucleotide
caggaucagggaacgaugc

SEQ ID NO: 2897555 - RNA, 19 nt, Artificial Sequence
  Description of Artificial Sequence: Synthetic oligonucleotide
guggccagagugcacaaag

SEQ ID NO: 2897556 - RNA, 19 nt, Artificial Sequence
  Description of Artificial Sequence: Synthetic oligonucleotide
agaaccaaauucagaggac

SEQ ID NO: 2897557 - RNA, 19 nt, Artificial Sequence
  Description of Artificial Sequence: Synthetic oligonucleotide
auacuaaaguaguuaggau

SEQ ID NO: 2897558 - RNA, 19 nt, Artificial Sequence
  Description of Artificial Sequence: Synthetic oligonucleotide
cauggcaaugcccuuucag

SEQ ID NO: 2897559 - RNA, 19 nt, Artificial Sequence
  Description of Artificial Sequence: Synthetic oligonucleotide
aagauggaggagcaucaau

SEQ ID NO: 2897560 - RNA, 19 nt, Artificial Sequence
  Description of Artificial Sequence: Synthetic oligonucleotide
uucuauucuucuugccagc

SEQ ID NO: 2897561 - RNA, 19 nt, Artificial Sequence
  Description of Artificial Sequence: Synthetic oligonucleotide
uucucaggaucagggaacg

SEQ ID NO: 2897562 - RNA, 19 nt, Artificial Sequence
  Description of Artificial Sequence: Synthetic oligonucleotide
ugagguucuuccagguucu

SEQ ID NO: 2897563 - RNA, 19 nt, Artificial Sequence
  Description of Artificial Sequence: Synthetic oligonucleotide
guguaauuggcaagaaggc

SEQ ID NO: 2897564 - RNA, 19 nt, Artificial Sequence
  Description of Artificial Sequence: Synthetic oligonucleotide
gacgccauuuuauucucac

SEQ ID NO: 2897565 - RNA, 19 nt, Artificial Sequence
  Description of Artificial Sequence: Synthetic oligonucleotide
aauucagaggacgccauuu

SEQ ID NO: 2897566 - RNA, 19 nt, Artificial Sequence
  Description of Artificial Sequence: Synthetic oligonucleotide
cuguuugagguucuuccag

SEQ ID NO: 2897567 - RNA, 19 nt, Artificial Sequence
  Description of Artificial Sequence: Synthetic oligonucleotide
acaaaguugggauccuuaa

SEQ ID NO: 2897568 - RNA, 19 nt, Artificial Sequence
  Description of Artificial Sequence: Synthetic oligonucleotide
aguuaggaucauucaguug

SEQ ID NO: 2897569 - RNA, 19 nt, Artificial Sequence
  Description of Artificial Sequence: Synthetic oligonucleotide
cagguucuauucuucuugc

SEQ ID NO: 2897570 - RNA, 19 nt, Artificial Sequence
  Description of Artificial Sequence: Synthetic oligonucleotide
cauucaguugccauggcaa

SEQ ID NO: 2897571 - RNA, 19 nt, Artificial Sequence
  Description of Artificial Sequence: Synthetic oligonucleotide
uccuacuacauccccacuu

SEQ ID NO: 2897572 - RNA, 19 nt, Artificial Sequence
  Description of Artificial Sequence: Synthetic oligonucleotide
cucguggccuuccucaggg

SEQ ID NO: 2897573 - RNA, 19 nt, Artificial Sequence
  Description of Artificial Sequence: Synthetic oligonucleotide
ucagagggcagccuucgaa

SEQ ID NO: 2897574 - RNA, 19 nt, Artificial Sequence
  Description of Artificial Sequence: Synthetic oligonucleotide
aacauccgaauacuucuua

SEQ ID NO: 2897575 - RNA, 19 nt, Artificial Sequence
  Description of Artificial Sequence: Synthetic oligonucleotide
aaauggcaaugguuuggca

SEQ ID NO: 2897576 - RNA, 19 nt, Artificial Sequence
  Description of Artificial Sequence: Synthetic oligonucleotide
uaguuaggaucauucaguu

SEQ ID NO: 2897577 - RNA, 19 nt, Artificial Sequence
  Description of Artificial Sequence: Synthetic oligonucleotide
ugaaccgcaguuugcucug

SEQ ID NO: 2897578 - RNA, 19 nt, Artificial Sequence
  Description of Artificial Sequence: Synthetic oligonucleotide
cucagggccagguagccug

SEQ ID NO: 2897579 - RNA, 19 nt, Artificial Sequence
  Description of Artificial Sequence: Synthetic oligonucleotide
cuguguaauuggcaagaag

SEQ ID NO: 2897580 - RNA, 19 nt, Artificial Sequence
  Description of Artificial Sequence: Synthetic oligonucleotide
aucauucaguugccauggc

SEQ ID NO: 2897581 - RNA, 19 nt, Artificial Sequence
  Description of Artificial Sequence: Synthetic oligonucleotide
uuugcucugagggucugug

SEQ ID NO: 2897582 - RNA, 19 nt, Artificial Sequence
  Description of Artificial Sequence: Synthetic oligonucleotide
ggaucauucaguugccaug

SEQ ID NO: 2897583 - RNA, 19 nt, Artificial Sequence
  Description of Artificial Sequence: Synthetic oligonucleotide
uacuacauccccacuucuc

SEQ ID NO: 2897584 - RNA, 19 nt, Artificial Sequence
  Description of Artificial Sequence: Synthetic oligonucleotide
uucuuccagguucuauucu

SEQ ID NO: 2897585 - RNA, 19 nt, Artificial Sequence
  Description of Artificial Sequence: Synthetic oligonucleotide
aggacgccauuuuauucuc

SEQ ID NO: 2897586 - RNA, 19 nt, Artificial Sequence
  Description of Artificial Sequence: Synthetic oligonucleotide
ucuuccagguucuauucuu

SEQ ID NO: 2897587 - RNA, 19 nt, Artificial Sequence
  Description of Artificial Sequence: Synthetic oligonucleotide
auccuuaaauggcaauggu

SEQ ID NO: 2897588 - RNA, 19 nt, Artificial Sequence
  Description of Artificial Sequence: Synthetic oligonucleotide
ucuugccagcuacugcacc

SEQ ID NO: 2897589 - RNA, 19 nt, Artificial Sequence
  Description of Artificial Sequence: Synthetic oligonucleotide
ucuauucuucuugccagcu

SEQ ID NO: 2897590 - RNA, 19 nt, Artificial Sequence
  Description of Artificial Sequence: Synthetic oligonucleotide
uauucucacucauggcuuc

SEQ ID NO: 2897591 - RNA, 19 nt, Artificial Sequence
  Description of Artificial Sequence: Synthetic oligonucleotide
agcgaggaucuguuugagg

SEQ ID NO: 2897592 - RNA, 19 nt, Artificial Sequence
  Description of Artificial Sequence: Synthetic oligonucleotide
gaggacgccauuuuauucu

SEQ ID NO: 2897593 - RNA, 19 nt, Artificial Sequence
  Description of Artificial Sequence: Synthetic oligonucleotide
gugcacaaaguugggaucc

SEQ ID NO: 2897594 - RNA, 19 nt, Artificial Sequence
  Description of Artificial Sequence: Synthetic oligonucleotide
acacccugagcaaagccgg

SEQ ID NO: 2897595 - RNA, 19 nt, Artificial Sequence
  Description of Artificial Sequence: Synthetic oligonucleotide
aggaucauucaguugccau

SEQ ID NO: 2897596 - RNA, 19 nt, Artificial Sequence
  Description of Artificial Sequence: Synthetic oligonucleotide
uuccucagggccagguagc

SEQ ID NO: 2897597 - RNA, 19 nt, Artificial Sequence
  Description of Artificial Sequence: Synthetic oligonucleotide
agcuacugcaccaccgugg

SEQ ID NO: 2897598 - RNA, 19 nt, Artificial Sequence
  Description of Artificial Sequence: Synthetic oligonucleotide
uucagaggacgccauuuua

SEQ ID NO: 2897599 - RNA, 19 nt, Artificial Sequence
  Description of Artificial Sequence: Synthetic oligonucleotide
gaggaucuguuugagguuc

SEQ ID NO: 2897600 - RNA, 19 nt, Artificial Sequence
  Description of Artificial Sequence: Synthetic oligonucleotide
gcuggcuuaaaagauggag

SEQ ID NO: 2897601 - RNA, 19 nt, Artificial Sequence
  Description of Artificial Sequence: Synthetic oligonucleotide
auggaggagcaucaauacu

SEQ ID NO: 2897602 - RNA, 19 nt, Artificial Sequence
  Description of Artificial Sequence: Synthetic oligonucleotide
accgcaguuugcucugagg

SEQ ID NO: 2897603 - RNA, 19 nt, Artificial Sequence
  Description of Artificial Sequence: Synthetic oligonucleotide
uuccacaggcccagaacca

SEQ ID NO: 2897604 - RNA, 19 nt, Artificial Sequence
  Description of Artificial Sequence: Synthetic oligonucleotide
cuucaaugcugacacccug

SEQ ID NO: 2897605 - RNA, 19 nt, Artificial Sequence
  Description of Artificial Sequence: Synthetic oligonucleotide
uucuucuugccagcuacug

SEQ ID NO: 2897606 - RNA, 19 nt, Artificial Sequence
  Description of Artificial Sequence: Synthetic oligonucleotide
aaauucagaggacgccauu

SEQ ID NO: 2897607 - RNA, 19 nt, Artificial Sequence
  Description of Artificial Sequence: Synthetic oligonucleotide
ugugaccacgucagagggc

SEQ ID NO: 2897608 - RNA, 19 nt, Artificial Sequence
  Description of Artificial Sequence: Synthetic oligonucleotide
uucaguugccauggcaaug

SEQ ID NO: 2897609 - RNA, 19 nt, Artificial Sequence
  Description of Artificial Sequence: Synthetic oligonucleotide
uuccagguucuauucuucu

SEQ ID NO: 2897610 - RNA, 19 nt, Artificial Sequence
  Description of Artificial Sequence: Synthetic oligonucleotide
ggugcugaaccgcaguuug

SEQ ID NO: 2897611 - RNA, 19 nt, Artificial Sequence
  Description of Artificial Sequence: Synthetic oligonucleotide
accaccguggccagagugc

SEQ ID NO: 2897612 - RNA, 19 nt, Artificial Sequence
  Description of Artificial Sequence: Synthetic oligonucleotide
guagccugugaccacguca

SEQ ID NO: 2897613 - RNA, 19 nt, Artificial Sequence
  Description of Artificial Sequence: Synthetic oligonucleotide
cugagggucuguguaauug

SEQ ID NO: 2897614 - RNA, 19 nt, Artificial Sequence
  Description of Artificial Sequence: Synthetic oligonucleotide
augcucguggccuuccuca

SEQ ID NO: 2897615 - RNA, 19 nt, Artificial Sequence
  Description of Artificial Sequence: Synthetic oligonucleotide
ucagcagcgaggaucuguu

SEQ ID NO: 2897616 - RNA, 19 nt, Artificial Sequence
  Description of Artificial Sequence: Synthetic oligonucleotide
uuggcaagaaggcccgaaa

SEQ ID NO: 2897617 - RNA, 19 nt, Artificial Sequence
  Description of Artificial Sequence: Synthetic oligonucleotide
agggaacgaugcucguggc

SEQ ID NO: 2897618 - RNA, 19 nt, Artificial Sequence
  Description of Artificial Sequence: Synthetic oligonucleotide
guucuuccagguucuauuc

SEQ ID NO: 2897619 - RNA, 19 nt, Artificial Sequence
  Description of Artificial Sequence: Synthetic oligonucleotide
ggaaaacucuucaauggug

SEQ ID NO: 2897620 - RNA, 19 nt, Artificial Sequence
  Description of Artificial Sequence: Synthetic oligonucleotide
agagggcagccuucgaaug

SEQ ID NO: 2897621 - RNA, 19 nt, Artificial Sequence
  Description of Artificial Sequence: Synthetic oligonucleotide
cuacauccccacuucucag

SEQ ID NO: 2897622 - RNA, 19 nt, Artificial Sequence
  Description of Artificial Sequence: Synthetic oligonucleotide
ccacuucucaggaucaggg

SEQ ID NO: 2897623 - RNA, 19 nt, Artificial Sequence
  Description of Artificial Sequence: Synthetic oligonucleotide
ugcaccaccguggccagag

SEQ ID NO: 2897624 - RNA, 19 nt, Artificial Sequence
  Description of Artificial Sequence: Synthetic oligonucleotide
ugcugaaccgcaguuugcu

SEQ ID NO: 2897625 - RNA, 19 nt, Artificial Sequence
  Description of Artificial Sequence: Synthetic oligonucleotide
agauggaggagcaucaaua

SEQ ID NO: 2897626 - RNA, 19 nt, Artificial Sequence
  Description of Artificial Sequence: Synthetic oligonucleotide
ggcuucaaugcugacaccc

SEQ ID NO: 2897627 - RNA, 19 nt, Artificial Sequence
  Description of Artificial Sequence: Synthetic oligonucleotide
augcccuuucagcagcgag

SEQ ID NO: 2897628 - RNA, 19 nt, Artificial Sequence
  Description of Artificial Sequence: Synthetic oligonucleotide
aaccgcaguuugcucugag

SEQ ID NO: 2897629 - RNA, 19 nt, Artificial Sequence
  Description of Artificial Sequence: Synthetic oligonucleotide
gagcaucaauacuaaagua

SEQ ID NO: 2897630 - RNA, 19 nt, Artificial Sequence
  Description of Artificial Sequence: Synthetic oligonucleotide
accacgucagagggcagcc

SEQ ID NO: 2897631 - RNA, 19 nt, Artificial Sequence
  Description of Artificial Sequence: Synthetic oligonucleotide
ggauccuuaaauggcaaug

SEQ ID NO: 2897632 - RNA, 19 nt, Artificial Sequence
  Description of Artificial Sequence: Synthetic oligonucleotide
cagagugcacaaaguuggg

SEQ ID NO: 2897633 - RNA, 19 nt, Artificial Sequence
  Description of Artificial Sequence: Synthetic oligonucleotide
guaguuaggaucauucagu

SEQ ID NO: 2897634 - RNA, 19 nt, Artificial Sequence
  Description of Artificial Sequence: Synthetic oligonucleotide
uuugagguucuuccagguu

SEQ ID NO: 2897635 - RNA, 19 nt, Artificial Sequence
  Description of Artificial Sequence: Synthetic oligonucleotide
uucagcagcgaggaucugu

SEQ ID NO: 2897636 - RNA, 19 nt, Artificial Sequence
  Description of Artificial Sequence: Synthetic oligonucleotide
caagaaggcccgaaacauc

SEQ ID NO: 2897637 - RNA, 19 nt, Artificial Sequence
  Description of Artificial Sequence: Synthetic oligonucleotide
auucaguugccauggcaau

SEQ ID NO: 2897638 - RNA, 19 nt, Artificial Sequence
  Description of Artificial Sequence: Synthetic oligonucleotide
ugggauccuuaaauggcaa

SEQ ID NO: 2897639 - RNA, 19 nt, Artificial Sequence
  Description of Artificial Sequence: Synthetic oligonucleotide
cuuccagguucuauucuuc

SEQ ID NO: 2897640 - RNA, 19 nt, Artificial Sequence
  Description of Artificial Sequence: Synthetic oligonucleotide
gaaggcccgaaacauccga

SEQ ID NO: 2897641 - RNA, 19 nt, Artificial Sequence
  Description of Artificial Sequence: Synthetic oligonucleotide
gagugcacaaaguugggau

SEQ ID NO: 2897642 - RNA, 19 nt, Artificial Sequence
  Description of Artificial Sequence: Synthetic oligonucleotide
acauccccacuucucagga

SEQ ID NO: 2897643 - RNA, 19 nt, Artificial Sequence
  Description of Artificial Sequence: Synthetic oligonucleotide
cauuccuacuacaucccca

SEQ ID NO: 2897644 - RNA, 19 nt, Artificial Sequence
  Description of Artificial Sequence: Synthetic oligonucleotide
auacuucuuagcuggcuua

SEQ ID NO: 2897645 - RNA, 19 nt, Artificial Sequence
  Description of Artificial Sequence: Synthetic oligonucleotide
ccgcaguuugcucugaggg

SEQ ID NO: 2897646 - RNA, 19 nt, Artificial Sequence
  Description of Artificial Sequence: Synthetic oligonucleotide
acucauggcuucaaugcug

SEQ ID NO: 2897647 - RNA, 19 nt, Artificial Sequence
  Description of Artificial Sequence: Synthetic oligonucleotide
ccugugaccacgucagagg

SEQ ID NO: 2897648 - RNA, 19 nt, Artificial Sequence
  Description of Artificial Sequence: Synthetic oligonucleotide
uaaaguaguuaggaucauu

SEQ ID NO: 2897649 - RNA, 19 nt, Artificial Sequence
  Description of Artificial Sequence: Synthetic oligonucleotide
cuugccagcuacugcacca

SEQ ID NO: 2897650 - RNA, 19 nt, Artificial Sequence
  Description of Artificial Sequence: Synthetic oligonucleotide
ccagaaccaaauucagagg

SEQ ID NO: 2897651 - RNA, 19 nt, Artificial Sequence
  Description of Artificial Sequence: Synthetic oligonucleotide
ucagggaacgaugcucgug

SEQ ID NO: 2897652 - RNA, 19 nt, Artificial Sequence
  Description of Artificial Sequence: Synthetic oligonucleotide
uccccacuucucaggauca

SEQ ID NO: 2897653 - RNA, 19 nt, Artificial Sequence
  Description of Artificial Sequence: Synthetic oligonucleotide
agccuucgaauguaggaaa

SEQ ID NO: 2897654 - RNA, 19 nt, Artificial Sequence
  Description of Artificial Sequence: Synthetic oligonucleotide
aggcccagaaccaaauuca

SEQ ID NO: 2897655 - RNA, 19 nt, Artificial Sequence
  Description of Artificial Sequence: Synthetic oligonucleotide
gucuguguaauuggcaaga

SEQ ID NO: 2897656 - RNA, 19 nt, Artificial Sequence
  Description of Artificial Sequence: Synthetic oligonucleotide
cuuagcuggcuuaaaagau

SEQ ID NO: 2897657 - RNA, 19 nt, Artificial Sequence
  Description of Artificial Sequence: Synthetic oligonucleotide
cucauggcuucaaugcuga

SEQ ID NO: 2897658 - RNA, 19 nt, Artificial Sequence
  Description of Artificial Sequence: Synthetic oligonucleotide
aacgaugcucguggccuuc

SEQ ID NO: 2897659 - RNA, 19 nt, Artificial Sequence
  Description of Artificial Sequence: Synthetic oligonucleotide
uuaaaagauggaggagcau

SEQ ID NO: 2897660 - RNA, 19 nt, Artificial Sequence
  Description of Artificial Sequence: Synthetic oligonucleotide
cuucuuagcuggcuuaaaa

SEQ ID NO: 2897661 - RNA, 19 nt, Artificial Sequence
  Description of Artificial Sequence: Synthetic oligonucleotide
aaagauggaggagcaucaa

SEQ ID NO: 2897662 - RNA, 19 nt, Artificial Sequence
  Description of Artificial Sequence: Synthetic oligonucleotide
ccagguucuauucuucuug

SEQ ID NO: 2897663 - RNA, 19 nt, Artificial Sequence
  Description of Artificial Sequence: Synthetic oligonucleotide
ggucuguguaauuggcaag

SEQ ID NO: 2897664 - RNA, 19 nt, Artificial Sequence
  Description of Artificial Sequence: Synthetic oligonucleotide
caaugcccuuucagcagcg

SEQ ID NO: 2897665 - RNA, 19 nt, Artificial Sequence
  Description of Artificial Sequence: Synthetic oligonucleotide
ggcaaugcccuuucagcag

SEQ ID NO: 2897666 - RNA, 19 nt, Artificial Sequence
  Description of Artificial Sequence: Synthetic oligonucleotide
gugaccacgucagagggca

SEQ ID NO: 2897667 - RNA, 19 nt, Artificial Sequence
  Description of Artificial Sequence: Synthetic oligonucleotide
auucagaggacgccauuuu

SEQ ID NO: 2897668 - RNA, 19 nt, Artificial Sequence
  Description of Artificial Sequence: Synthetic oligonucleotide
cuuucagcagcgaggaucu

SEQ ID NO: 2897669 - RNA, 19 nt, Artificial Sequence
  Description of Artificial Sequence: Synthetic oligonucleotide
cagguagccugugaccacg

SEQ ID NO: 2897670 - RNA, 19 nt, Artificial Sequence
  Description of Artificial Sequence: Synthetic oligonucleotide
uggccagagugcacaaagu

SEQ ID NO: 2897671 - RNA, 19 nt, Artificial Sequence
  Description of Artificial Sequence: Synthetic oligonucleotide
aggaucagggaacgaugcu

SEQ ID NO: 2897672 - RNA, 19 nt, Artificial Sequence
  Description of Artificial Sequence: Synthetic oligonucleotide
agagugcacaaaguuggga

SEQ ID NO: 2897673 - RNA, 19 nt, Artificial Sequence
  Description of Artificial Sequence: Synthetic oligonucleotide
caaugcugacacccugagc

SEQ ID NO: 2897674 - RNA, 19 nt, Artificial Sequence
  Description of Artificial Sequence: Synthetic oligonucleotide
ucuguguaauuggcaagaa

SEQ ID NO: 2897675 - RNA, 19 nt, Artificial Sequence
  Description of Artificial Sequence: Synthetic oligonucleotide
caauggugcugaaccgcag

SEQ ID NO: 2897676 - RNA, 19 nt, Artificial Sequence
  Description of Artificial Sequence: Synthetic oligonucleotide
uacuucuuagcuggcuuaa

SEQ ID NO: 2897677 - RNA, 19 nt, Artificial Sequence
  Description of Artificial Sequence: Synthetic oligonucleotide
ugcucguggccuuccucag

SEQ ID NO: 2897678 - RNA, 19 nt, Artificial Sequence
  Description of Artificial Sequence: Synthetic oligonucleotide
cauggcuucaaugcugaca

SEQ ID NO: 2897679 - RNA, 19 nt, Artificial Sequence
  Description of Artificial Sequence: Synthetic oligonucleotide
uccagguucuauucuucuu

SEQ ID NO: 2897680 - RNA, 19 nt, Artificial Sequence
  Description of Artificial Sequence: Synthetic oligonucleotide
gcaaugcccuuucagcagc

SEQ ID NO: 2897681 - RNA, 19 nt, Artificial Sequence
  Description of Artificial Sequence: Synthetic oligonucleotide
uaggaucauucaguugcca

SEQ ID NO: 2897682 - RNA, 19 nt, Artificial Sequence
  Description of Artificial Sequence: Synthetic oligonucleotide
gaugcucguggccuuccuc

SEQ ID NO: 2897683 - RNA, 19 nt, Artificial Sequence
  Description of Artificial Sequence: Synthetic oligonucleotide
gcuacugcaccaccguggc

SEQ ID NO: 2897684 - RNA, 19 nt, Artificial Sequence
  Description of Artificial Sequence: Synthetic oligonucleotide
gccauuuuauucucacuca

SEQ ID NO: 2897685 - RNA, 19 nt, Artificial Sequence
  Description of Artificial Sequence: Synthetic oligonucleotide
acgccauuuuauucucacu

SEQ ID NO: 2897686 - RNA, 19 nt, Artificial Sequence
  Description of Artificial Sequence: Synthetic oligonucleotide
gaccacgucagagggcagc

SEQ ID NO: 2897687 - RNA, 19 nt, Artificial Sequence
  Description of Artificial Sequence: Synthetic oligonucleotide
gcccgaaacauccgaauac

SEQ ID NO: 2897688 - RNA, 19 nt, Artificial Sequence
  Description of Artificial Sequence: Synthetic oligonucleotide
ugccagcuacugcaccacc

SEQ ID NO: 2897689 - RNA, 19 nt, Artificial Sequence
  Description of Artificial Sequence: Synthetic oligonucleotide
gcgaggaucuguuugaggu

SEQ ID NO: 2897690 - RNA, 19 nt, Artificial Sequence
  Description of Artificial Sequence: Synthetic oligonucleotide
gcagccuucgaauguagga

SEQ ID NO: 2897691 - RNA, 19 nt, Artificial Sequence
  Description of Artificial Sequence: Synthetic oligonucleotide
ccuuucagcagcgaggauc

SEQ ID NO: 2897692 - RNA, 19 nt, Artificial Sequence
  Description of Artificial Sequence: Synthetic oligonucleotide
cuucgaauguaggaaaacu

SEQ ID NO: 2897693 - RNA, 19 nt, Artificial Sequence
  Description of Artificial Sequence: Synthetic oligonucleotide
ccugagcaaagccggagcc

SEQ ID NO: 2897694 - RNA, 19 nt, Artificial Sequence
  Description of Artificial Sequence: Synthetic oligonucleotide
ggcuuaaaagauggaggag

SEQ ID NO: 2897695 - RNA, 19 nt, Artificial Sequence
  Description of Artificial Sequence: Synthetic oligonucleotide
gccagagugcacaaaguug

SEQ ID NO: 2897696 - RNA, 19 nt, Artificial Sequence
  Description of Artificial Sequence: Synthetic oligonucleotide
uuccuacuacauccccacu

SEQ ID NO: 2897697 - RNA, 19 nt, Artificial Sequence
  Description of Artificial Sequence: Synthetic oligonucleotide
cacaaaguugggauccuua

SEQ ID NO: 2897698 - RNA, 19 nt, Artificial Sequence
  Description of Artificial Sequence: Synthetic oligonucleotide
auggugcugaaccgcaguu

SEQ ID NO: 2897699 - RNA, 19 nt, Artificial Sequence
  Description of Artificial Sequence: Synthetic oligonucleotide
agaaggcccgaaacauccg

SEQ ID NO: 2897700 - RNA, 19 nt, Artificial Sequence
  Description of Artificial Sequence: Synthetic oligonucleotide
cugaaccgcaguuugcucu

SEQ ID NO: 2897701 - RNA, 19 nt, Artificial Sequence
  Description of Artificial Sequence: Synthetic oligonucleotide
caccaccguggccagagug

SEQ ID NO: 2897702 - RNA, 19 nt, Artificial Sequence
  Description of Artificial Sequence: Synthetic oligonucleotide
acugcaccaccguggccag

SEQ ID NO: 2897703 - RNA, 19 nt, Artificial Sequence
  Description of Artificial Sequence: Synthetic oligonucleotide
acgaugcucguggccuucc

SEQ ID NO: 2897704 - RNA, 19 nt, Artificial Sequence
  Description of Artificial Sequence: Synthetic oligonucleotide
accguggccagagugcaca

SEQ ID NO: 2897705 - RNA, 19 nt, Artificial Sequence
  Description of Artificial Sequence: Synthetic oligonucleotide
ggaucagggaacgaugcuc

SEQ ID NO: 2897706 - RNA, 19 nt, Artificial Sequence
  Description of Artificial Sequence: Synthetic oligonucleotide
guuugagguucuuccaggu

SEQ ID NO: 2897707 - RNA, 19 nt, Artificial Sequence
  Description of Artificial Sequence: Synthetic oligonucleotide
ccuacuacauccccacuuc

SEQ ID NO: 2897708 - RNA, 19 nt, Artificial Sequence
  Description of Artificial Sequence: Synthetic oligonucleotide
aaugcccuuucagcagcga

SEQ ID NO: 2897709 - RNA, 19 nt, Artificial Sequence
  Description of Artificial Sequence: Synthetic oligonucleotide
uugcucugagggucugugu

SEQ ID NO: 2897710 - RNA, 19 nt, Artificial Sequence
  Description of Artificial Sequence: Synthetic oligonucleotide
gcaucaauacuaaaguagu

SEQ ID NO: 2897711 - RNA, 19 nt, Artificial Sequence
  Description of Artificial Sequence: Synthetic oligonucleotide
gcaguuugcucugaggguc

SEQ ID NO: 2897712 - RNA, 19 nt, Artificial Sequence
  Description of Artificial Sequence: Synthetic oligonucleotide
uccucagggccagguagcc

SEQ ID NO: 2897713 - RNA, 19 nt, Artificial Sequence
  Description of Artificial Sequence: Synthetic oligonucleotide
uccacaggcccagaaccaa

SEQ ID NO: 2897714 - RNA, 19 nt, Artificial Sequence
  Description of Artificial Sequence: Synthetic oligonucleotide
ugcacaaaguugggauccu

SEQ ID NO: 2897715 - RNA, 19 nt, Artificial Sequence
  Description of Artificial Sequence: Synthetic oligonucleotide
aggcccgaaacauccgaau

SEQ ID NO: 2897716 - RNA, 19 nt, Artificial Sequence
  Description of Artificial Sequence: Synthetic oligonucleotide
cacuucucaggaucaggga

SEQ ID NO: 2897717 - RNA, 19 nt, Artificial Sequence
  Description of Artificial Sequence: Synthetic oligonucleotide
aaggcccgaaacauccgaa

SEQ ID NO: 2897718 - RNA, 19 nt, Artificial Sequence
  Description of Artificial Sequence: Synthetic oligonucleotide
uggcaaugguuuggcagcu

SEQ ID NO: 2897719 - RNA, 19 nt, Artificial Sequence
  Description of Artificial Sequence: Synthetic oligonucleotide
aucagggaacgaugcucgu

SEQ ID NO: 2897720 - RNA, 19 nt, Artificial Sequence
  Description of Artificial Sequence: Synthetic oligonucleotide
ucagggccagguagccugu

SEQ ID NO: 2897721 - RNA, 19 nt, Artificial Sequence
  Description of Artificial Sequence: Synthetic oligonucleotide
ucugagggucuguguaauu

SEQ ID NO: 2897722 - RNA, 19 nt, Artificial Sequence
  Description of Artificial Sequence: Synthetic oligonucleotide
gaggagcaucaauacuaaa

SEQ ID NO: 2897723 - RNA, 19 nt, Artificial Sequence
  Description of Artificial Sequence: Synthetic oligonucleotide
aauuggcaagaaggcccga

SEQ ID NO: 2897724 - RNA, 19 nt, Artificial Sequence
  Description of Artificial Sequence: Synthetic oligonucleotide
gggaacgaugcucguggcc

SEQ ID NO: 2897725 - RNA, 19 nt, Artificial Sequence
  Description of Artificial Sequence: Synthetic oligonucleotide
ugaccacgucagagggcag

SEQ ID NO: 2897726 - RNA, 19 nt, Artificial Sequence
  Description of Artificial Sequence: Synthetic oligonucleotide
uggcuucaaugcugacacc

SEQ ID NO: 2897727 - RNA, 19 nt, Artificial Sequence
  Description of Artificial Sequence: Synthetic oligonucleotide
gcagcgaggaucuguuuga

SEQ ID NO: 2897728 - RNA, 19 nt, Artificial Sequence
  Description of Artificial Sequence: Synthetic oligonucleotide
ucauggcuucaaugcugac

SEQ ID NO: 2897729 - RNA, 19 nt, Artificial Sequence
  Description of Artificial Sequence: Synthetic oligonucleotide
augcugacacccugagcaa

SEQ ID NO: 2897730 - RNA, 19 nt, Artificial Sequence
  Description of Artificial Sequence: Synthetic oligonucleotide
cagcuacugcaccaccgug

SEQ ID NO: 2897731 - RNA, 19 nt, Artificial Sequence
  Description of Artificial Sequence: Synthetic oligonucleotide
caguugccauggcaaugcc

SEQ ID NO: 2897732 - RNA, 19 nt, Artificial Sequence
  Description of Artificial Sequence: Synthetic oligonucleotide
acgucagagggcagccuuc

SEQ ID NO: 2897733 - RNA, 19 nt, Artificial Sequence
  Description of Artificial Sequence: Synthetic oligonucleotide
uucucacucauggcuucaa

SEQ ID NO: 2897734 - RNA, 19 nt, Artificial Sequence
  Description of Artificial Sequence: Synthetic oligonucleotide
auucuucuugccagcuacu

SEQ ID NO: 2897735 - RNA, 19 nt, Artificial Sequence
  Description of Artificial Sequence: Synthetic oligonucleotide
gccagcuacugcaccaccg

SEQ ID NO: 2897736 - RNA, 19 nt, Artificial Sequence
  Description of Artificial Sequence: Synthetic oligonucleotide
ggccagguagccugugacc

SEQ ID NO: 2897737 - RNA, 19 nt, Artificial Sequence
  Description of Artificial Sequence: Synthetic oligonucleotide
ccauuccuacuacaucccc

SEQ ID NO: 2897738 - RNA, 19 nt, Artificial Sequence
  Description of Artificial Sequence: Synthetic oligonucleotide
cagccuucgaauguaggaa

SEQ ID NO: 2897739 - RNA, 19 nt, Artificial Sequence
  Description of Artificial Sequence: Synthetic oligonucleotide
gagggcagccuucgaaugu

SEQ ID NO: 2897740 - RNA, 19 nt, Artificial Sequence
  Description of Artificial Sequence: Synthetic oligonucleotide
agggccagguagccuguga

SEQ ID NO: 2897741 - RNA, 19 nt, Artificial Sequence
  Description of Artificial Sequence: Synthetic oligonucleotide
ccaaauucagaggacgcca

SEQ ID NO: 2897742 - RNA, 19 nt, Artificial Sequence
  Description of Artificial Sequence: Synthetic oligonucleotide
caucaauacuaaaguaguu

SEQ ID NO: 2897743 - RNA, 19 nt, Artificial Sequence
  Description of Artificial Sequence: Synthetic oligonucleotide
ggaacgaugcucguggccu

SEQ ID NO: 2897744 - RNA, 19 nt, Artificial Sequence
  Description of Artificial Sequence: Synthetic oligonucleotide
cuacugcaccaccguggcc

SEQ ID NO: 2897745 - RNA, 19 nt, Artificial Sequence
  Description of Artificial Sequence: Synthetic oligonucleotide
ucucaggaucagggaacga

SEQ ID NO: 2897746 - RNA, 19 nt, Artificial Sequence
  Description of Artificial Sequence: Synthetic oligonucleotide
ggcccagaaccaaauucag

SEQ ID NO: 2897747 - RNA, 19 nt, Artificial Sequence
  Description of Artificial Sequence: Synthetic oligonucleotide
gguucuuccagguucuauu

SEQ ID NO: 2897748 - RNA, 19 nt, Artificial Sequence
  Description of Artificial Sequence: Synthetic oligonucleotide
aguuugcucugagggucug

SEQ ID NO: 2897749 - RNA, 19 nt, Artificial Sequence
  Description of Artificial Sequence: Synthetic oligonucleotide
ugccauggcaaugcccuuu

SEQ ID NO: 2897750 - RNA, 19 nt, Artificial Sequence
  Description of Artificial Sequence: Synthetic oligonucleotide
ggcagccuucgaauguagg

SEQ ID NO: 2897751 - RNA, 19 nt, Artificial Sequence
  Description of Artificial Sequence: Synthetic oligonucleotide
agguucuuccagguucuau

SEQ ID NO: 2897752 - RNA, 19 nt, Artificial Sequence
  Description of Artificial Sequence: Synthetic oligonucleotide
caaauucagaggacgccau

SEQ ID NO: 2897753 - RNA, 19 nt, Artificial Sequence
  Description of Artificial Sequence: Synthetic oligonucleotide
cuauucuucuugccagcua

SEQ ID NO: 2897754 - RNA, 19 nt, Artificial Sequence
  Description of Artificial Sequence: Synthetic oligonucleotide
gccagguagccugugacca

SEQ ID NO: 2897755 - RNA, 19 nt, Artificial Sequence
  Description of Artificial Sequence: Synthetic oligonucleotide
ucguggccuuccucagggc

SEQ ID NO: 2897756 - RNA, 19 nt, Artificial Sequence
  Description of Artificial Sequence: Synthetic oligonucleotide
cagcgaggaucuguuugag

SEQ ID NO: 2897757 - RNA, 19 nt, Artificial Sequence
  Description of Artificial Sequence: Synthetic oligonucleotide
acuucuuagcuggcuuaaa

SEQ ID NO: 2897758 - RNA, 19 nt, Artificial Sequence
  Description of Artificial Sequence: Synthetic oligonucleotide
ccuucgaauguaggaaaac

SEQ ID NO: 2897759 - RNA, 19 nt, Artificial Sequence
  Description of Artificial Sequence: Synthetic oligonucleotide
gugcugaaccgcaguuugc

SEQ ID NO: 2897760 - RNA, 19 nt, Artificial Sequence
  Description of Artificial Sequence: Synthetic oligonucleotide
cacucauggcuucaaugcu

SEQ ID NO: 2897761 - RNA, 19 nt, Artificial Sequence
  Description of Artificial Sequence: Synthetic oligonucleotide
gccauuccuacuacauccc

SEQ ID NO: 2897762 - RNA, 19 nt, Artificial Sequence
  Description of Artificial Sequence: Synthetic oligonucleotide
cccugagcaaagccggagc

SEQ ID NO: 2897763 - RNA, 19 nt, Artificial Sequence
  Description of Artificial Sequence: Synthetic oligonucleotide
cucaggaucagggaacgau

SEQ ID NO: 2897764 - RNA, 19 nt, Artificial Sequence
  Description of Artificial Sequence: Synthetic oligonucleotide
gcucguggccuuccucagg

SEQ ID NO: 2897765 - RNA, 19 nt, Artificial Sequence
  Description of Artificial Sequence: Synthetic oligonucleotide
aggaucuguuugagguucu

SEQ ID NO: 2897766 - RNA, 19 nt, Artificial Sequence
  Description of Artificial Sequence: Synthetic oligonucleotide
ggaggagcaucaauacuaa

SEQ ID NO: 2897767 - RNA, 19 nt, Artificial Sequence
  Description of Artificial Sequence: Synthetic oligonucleotide
agggcagccuucgaaugua

SEQ ID NO: 2897768 - RNA, 19 nt, Artificial Sequence
  Description of Artificial Sequence: Synthetic oligonucleotide
cguggccuuccucagggcc

SEQ ID NO: 2897769 - RNA, 19 nt, Artificial Sequence
  Description of Artificial Sequence: Synthetic oligonucleotide
cagagggcagccuucgaau

SEQ ID NO: 2897770 - RNA, 19 nt, Artificial Sequence
  Description of Artificial Sequence: Synthetic oligonucleotide
gcaagaaggcccgaaacau

SEQ ID NO: 2897771 - RNA, 19 nt, Artificial Sequence
  Description of Artificial Sequence: Synthetic oligonucleotide
gcugaaccgcaguuugcuc

SEQ ID NO: 2897772 - RNA, 19 nt, Artificial Sequence
  Description of Artificial Sequence: Synthetic oligonucleotide
uuucagcagcgaggaucug

SEQ ID NO: 2897773 - RNA, 19 nt, Artificial Sequence
  Description of Artificial Sequence: Synthetic oligonucleotide
cgaauacuucuuagcuggc

SEQ ID NO: 2897774 - RNA, 19 nt, Artificial Sequence
  Description of Artificial Sequence: Synthetic oligonucleotide
uugccauggcaaugcccuu

SEQ ID NO: 2897775 - RNA, 19 nt, Artificial Sequence
  Description of Artificial Sequence: Synthetic oligonucleotide
ggcccgaaacauccgaaua

SEQ ID NO: 2897776 - RNA, 19 nt, Artificial Sequence
  Description of Artificial Sequence: Synthetic oligonucleotide
agccugugaccacgucaga

SEQ ID NO: 2897777 - RNA, 19 nt, Artificial Sequence
  Description of Artificial Sequence: Synthetic oligonucleotide
agcuggcuuaaaagaugga

SEQ ID NO: 2897778 - RNA, 19 nt, Artificial Sequence
  Description of Artificial Sequence: Synthetic oligonucleotide
gccauggcaaugcccuuuc

SEQ ID NO: 2897779 - RNA, 19 nt, Artificial Sequence
  Description of Artificial Sequence: Synthetic oligonucleotide
gcccuuucagcagcgagga

SEQ ID NO: 2897780 - RNA, 19 nt, Artificial Sequence
  Description of Artificial Sequence: Synthetic oligonucleotide
cagaggacgccauuuuauu

SEQ ID NO: 2897781 - RNA, 19 nt, Artificial Sequence
  Description of Artificial Sequence: Synthetic oligonucleotide
gcucugagggucuguguaa

SEQ ID NO: 2897782 - RNA, 19 nt, Artificial Sequence
  Description of Artificial Sequence: Synthetic oligonucleotide
gucagagggcagccuucga

SEQ ID NO: 2897783 - RNA, 19 nt, Artificial Sequence
  Description of Artificial Sequence: Synthetic oligonucleotide
caccguggccagagugcac

SEQ ID NO: 2897784 - RNA, 19 nt, Artificial Sequence
  Description of Artificial Sequence: Synthetic oligonucleotide
caguuugcucugagggucu

SEQ ID NO: 2897785 - RNA, 19 nt, Artificial Sequence
  Description of Artificial Sequence: Synthetic oligonucleotide
ccagguagccugugaccac

SEQ ID NO: 2897786 - RNA, 19 nt, Artificial Sequence
  Description of Artificial Sequence: Synthetic oligonucleotide
cacaggcccagaaccaaau

SEQ ID NO: 2897787 - RNA, 19 nt, Artificial Sequence
  Description of Artificial Sequence: Synthetic oligonucleotide
gaaccgcaguuugcucuga

SEQ ID NO: 2897788 - RNA, 19 nt, Artificial Sequence
  Description of Artificial Sequence: Synthetic oligonucleotide
cacccugagcaaagccgga

SEQ ID NO: 2897789 - RNA, 19 nt, Artificial Sequence
  Description of Artificial Sequence: Synthetic oligonucleotide
caaugguuuggcagcuuuu

SEQ ID NO: 2897790 - RNA, 19 nt, Artificial Sequence
  Description of Artificial Sequence: Synthetic oligonucleotide
gguagccugugaccacguc

SEQ ID NO: 2897791 - RNA, 19 nt, Artificial Sequence
  Description of Artificial Sequence: Synthetic oligonucleotide
gcaaugguuuggcagcuuu

SEQ ID NO: 2897792 - RNA, 19 nt, Artificial Sequence
  Description of Artificial Sequence: Synthetic oligonucleotide
agguagccugugaccacgu

SEQ ID NO: 2897793 - RNA, 19 nt, Artificial Sequence
  Description of Artificial Sequence: Synthetic oligonucleotide
gagcaaagccggagccgga

SEQ ID NO: 2897794 - RNA, 19 nt, Artificial Sequence
  Description of Artificial Sequence: Synthetic oligonucleotide
ccauuuuauucucacucau

SEQ ID NO: 2897795 - RNA, 19 nt, Artificial Sequence
  Description of Artificial Sequence: Synthetic oligonucleotide
gaacgaugcucguggccuu

SEQ ID NO: 2897796 - RNA, 19 nt, Artificial Sequence
  Description of Artificial Sequence: Synthetic oligonucleotide
cgucagagggcagccuucg

SEQ ID NO: 2897797 - RNA, 19 nt, Artificial Sequence
  Description of Artificial Sequence: Synthetic oligonucleotide
cuaaaguaguuaggaucau

SEQ ID NO: 2897798 - RNA, 19 nt, Artificial Sequence
  Description of Artificial Sequence: Synthetic oligonucleotide
cacgucagagggcagccuu

SEQ ID NO: 2897799 - RNA, 19 nt, Artificial Sequence
  Description of Artificial Sequence: Synthetic oligonucleotide
gccuucgaauguaggaaaa

SEQ ID NO: 2897800 - RNA, 19 nt, Artificial Sequence
  Description of Artificial Sequence: Synthetic oligonucleotide
gggcagccuucgaauguag

SEQ ID NO: 2897801 - RNA, 19 nt, Artificial Sequence
  Description of Artificial Sequence: Synthetic oligonucleotide
gggauccuuaaauggcaau

SEQ ID NO: 2897802 - RNA, 19 nt, Artificial Sequence
  Description of Artificial Sequence: Synthetic oligonucleotide
gcuucaaugcugacacccu

SEQ ID NO: 2897803 - RNA, 19 nt, Artificial Sequence
  Description of Artificial Sequence: Synthetic oligonucleotide
ggacgccauuuuauucuca

SEQ ID NO: 2897804 - RNA, 19 nt, Artificial Sequence
  Description of Artificial Sequence: Synthetic oligonucleotide
cucugagggucuguguaau

SEQ ID NO: 2897805 - RNA, 19 nt, Artificial Sequence
  Description of Artificial Sequence: Synthetic oligonucleotide
cgaauguaggaaaacucuu

SEQ ID NO: 2897806 - RNA, 19 nt, Artificial Sequence
  Description of Artificial Sequence: Synthetic oligonucleotide
guuugcucugagggucugu

SEQ ID NO: 2897807 - RNA, 19 nt, Artificial Sequence
  Description of Artificial Sequence: Synthetic oligonucleotide
gagguucuuccagguucua

SEQ ID NO: 2897808 - RNA, 19 nt, Artificial Sequence
  Description of Artificial Sequence: Synthetic oligonucleotide
cccgaaacauccgaauacu

SEQ ID NO: 2897809 - RNA, 19 nt, Artificial Sequence
  Description of Artificial Sequence: Synthetic oligonucleotide
cagggccagguagccugug

SEQ ID NO: 2897810 - RNA, 19 nt, Artificial Sequence
  Description of Artificial Sequence: Synthetic oligonucleotide
ccagcuacugcaccaccgu

SEQ ID NO: 2897811 - RNA, 19 nt, Artificial Sequence
  Description of Artificial Sequence: Synthetic oligonucleotide
cauccccacuucucaggau

SEQ ID NO: 2897812 - RNA, 19 nt, Artificial Sequence
  Description of Artificial Sequence: Synthetic oligonucleotide
ccacaggcccagaaccaaa

SEQ ID NO: 2897813 - RNA, 19 nt, Artificial Sequence
  Description of Artificial Sequence: Synthetic oligonucleotide
ccccacuucucaggaucag

SEQ ID NO: 2897814 - RNA, 19 nt, Artificial Sequence
  Description of Artificial Sequence: Synthetic oligonucleotide
ccaccguggccagagugca

SEQ ID NO: 2897815 - RNA, 19 nt, Artificial Sequence
  Description of Artificial Sequence: Synthetic oligonucleotide
ccgaaacauccgaauacuu

SEQ ID NO: 2897816 - RNA, 19 nt, Artificial Sequence
  Description of Artificial Sequence: Synthetic oligonucleotide
cgcaguuugcucugagggu

SEQ ID NO: 2897817 - RNA, 19 nt, Artificial Sequence
  Description of Artificial Sequence: Synthetic oligonucleotide
ccauggcaaugcccuuuca

SEQ ID NO: 2897818 - RNA, 19 nt, Artificial Sequence
  Description of Artificial Sequence: Synthetic oligonucleotide
ccuuccucagggccaggua

SEQ ID NO: 2897819 - RNA, 19 nt, Artificial Sequence
  Description of Artificial Sequence: Synthetic oligonucleotide
ggaucuguuugagguucuu

SEQ ID NO: 2897820 - RNA, 19 nt, Artificial Sequence
  Description of Artificial Sequence: Synthetic oligonucleotide
cagcagcgaggaucuguuu

SEQ ID NO: 2897821 - RNA, 19 nt, Artificial Sequence
  Description of Artificial Sequence: Synthetic oligonucleotide
gcacaaaguugggauccuu

SEQ ID NO: 2897822 - RNA, 19 nt, Artificial Sequence
  Description of Artificial Sequence: Synthetic oligonucleotide
cgaggaucuguuugagguu

SEQ ID NO: 2897823 - RNA, 19 nt, Artificial Sequence
  Description of Artificial Sequence: Synthetic oligonucleotide
cugcaccaccguggccaga

SEQ ID NO: 2897824 - RNA, 19 nt, Artificial Sequence
  Description of Artificial Sequence: Synthetic oligonucleotide
ccguggccagagugcacaa

SEQ ID NO: 2897825 - RNA, 19 nt, Artificial Sequence
  Description of Artificial Sequence: Synthetic oligonucleotide
ggcaaugguuuggcagcuu

SEQ ID NO: 2897826 - RNA, 19 nt, Artificial Sequence
  Description of Artificial Sequence: Synthetic oligonucleotide
gcaccaccguggccagagu

SEQ ID NO: 2897827 - RNA, 19 nt, Artificial Sequence
  Description of Artificial Sequence: Synthetic oligonucleotide
cguggccagagugcacaaa

SEQ ID NO: 2897828 - RNA, 19 nt, Artificial Sequence
  Description of Artificial Sequence: Synthetic oligonucleotide
ccucagggccagguagccu

SEQ ID NO: 2897829 - RNA, 19 nt, Artificial Sequence
  Description of Artificial Sequence: Synthetic oligonucleotide
ccacgucagagggcagccu

SEQ ID NO: 2897830 - RNA, 19 nt, Artificial Sequence
  Description of Artificial Sequence: Synthetic oligonucleotide
cgaugcucguggccuuccu

SEQ ID NO: 2897831 - RNA, 19 nt, Artificial Sequence
  Description of Artificial Sequence: Synthetic oligonucleotide
cccuuucagcagcgaggau

SEQ ID NO: 2897832 - RNA, 19 nt, Artificial Sequence
  Description of Artificial Sequence: Synthetic oligonucleotide
aauacuguuauuguuaccc

SEQ ID NO: 2897833 - RNA, 19 nt, Artificial Sequence
  Description of Artificial Sequence: Synthetic oligonucleotide
uuuaaagccaacaugacca

SEQ ID NO: 2897834 - RNA, 19 nt, Artificial Sequence
  Description of Artificial Sequence: Synthetic oligonucleotide
aauguauccaucauucggc

SEQ ID NO: 2897835 - RNA, 19 nt, Artificial Sequence
  Description of Artificial Sequence: Synthetic oligonucleotide
aguaaaagacuuuaaaugu

SEQ ID NO: 2897836 - RNA, 19 nt, Artificial Sequence
  Description of Artificial Sequence: Synthetic oligonucleotide
aaauguagcaguggaaagc

SEQ ID NO: 2897837 - RNA, 19 nt, Artificial Sequence
  Description of Artificial Sequence: Synthetic oligonucleotide
agaauugucaaaucauugg

SEQ ID NO: 2897838 - RNA, 19 nt, Artificial Sequence
  Description of Artificial Sequence: Synthetic oligonucleotide
gaauguauccaucauucgg

SEQ ID NO: 2897839 - RNA, 19 nt, Artificial Sequence
  Description of Artificial Sequence: Synthetic oligonucleotide
ugauugacuaguaaaagac

SEQ ID NO: 2897840 - RNA, 19 nt, Artificial Sequence
  Description of Artificial Sequence: Synthetic oligonucleotide
aagaauguauccaucauuc

SEQ ID NO: 2897841 - RNA, 19 nt, Artificial Sequence
  Description of Artificial Sequence: Synthetic oligonucleotide
guuguuauuauucuuguug

SEQ ID NO: 2897842 - RNA, 19 nt, Artificial Sequence
  Description of Artificial Sequence: Synthetic oligonucleotide
aaagacuuuaaauguagca

SEQ ID NO: 2897843 - RNA, 19 nt, Artificial Sequence
  Description of Artificial Sequence: Synthetic oligonucleotide
ucaacucuaacaaaccuga

SEQ ID NO: 2897844 - RNA, 19 nt, Artificial Sequence
  Description of Artificial Sequence: Synthetic oligonucleotide
aacguugcaucccugguuc

SEQ ID NO: 2897845 - RNA, 19 nt, Artificial Sequence
  Description of Artificial Sequence: Synthetic oligonucleotide
aaaguuguuauuauucuug

SEQ ID NO: 2897846 - RNA, 19 nt, Artificial Sequence
  Description of Artificial Sequence: Synthetic oligonucleotide
agauaagaggcuuuucaac

SEQ ID NO: 2897847 - RNA, 19 nt, Artificial Sequence
  Description of Artificial Sequence: Synthetic oligonucleotide
uugguggucauuaaaguug

SEQ ID NO: 2897848 - RNA, 19 nt, Artificial Sequence
  Description of Artificial Sequence: Synthetic oligonucleotide
uuacccauauguuuaaagc

SEQ ID NO: 2897849 - RNA, 19 nt, Artificial Sequence
  Description of Artificial Sequence: Synthetic oligonucleotide
uuguuauuauucuuguugc

SEQ ID NO: 2897850 - RNA, 19 nt, Artificial Sequence
  Description of Artificial Sequence: Synthetic oligonucleotide
aaugauugacuaguaaaag

SEQ ID NO: 2897851 - RNA, 19 nt, Artificial Sequence
  Description of Artificial Sequence: Synthetic oligonucleotide
uuuucaacucuaacaaacc

SEQ ID NO: 2897852 - RNA, 19 nt, Artificial Sequence
  Description of Artificial Sequence: Synthetic oligonucleotide
gaaaugauugacuaguaaa

SEQ ID NO: 2897853 - RNA, 19 nt, Artificial Sequence
  Description of Artificial Sequence: Synthetic oligonucleotide
uucaacucuaacaaaccug

SEQ ID NO: 2897854 - RNA, 19 nt, Artificial Sequence
  Description of Artificial Sequence: Synthetic oligonucleotide
aguuacuugaaguccauug

SEQ ID NO: 2897855 - RNA, 19 nt, Artificial Sequence
  Description of Artificial Sequence: Synthetic oligonucleotide
ucugaaaugauugacuagu

SEQ ID NO: 2897856 - RNA, 19 nt, Artificial Sequence
  Description of Artificial Sequence: Synthetic oligonucleotide
accuugaacucccaagugc

SEQ ID NO: 2897857 - RNA, 19 nt, Artificial Sequence
  Description of Artificial Sequence: Synthetic oligonucleotide
caacaugaccacaaaacgg

SEQ ID NO: 2897858 - RNA, 19 nt, Artificial Sequence
  Description of Artificial Sequence: Synthetic oligonucleotide
uacccauauguuuaaagcc

SEQ ID NO: 2897859 - RNA, 19 nt, Artificial Sequence
  Description of Artificial Sequence: Synthetic oligonucleotide
ucccauauccagauaagag

SEQ ID NO: 2897860 - RNA, 19 nt, Artificial Sequence
  Description of Artificial Sequence: Synthetic oligonucleotide
uauuauucuuguugcacag

SEQ ID NO: 2897861 - RNA, 19 nt, Artificial Sequence
  Description of Artificial Sequence: Synthetic oligonucleotide
uuaaauguagcaguggaaa

SEQ ID NO: 2897862 - RNA, 19 nt, Artificial Sequence
  Description of Artificial Sequence: Synthetic oligonucleotide
aaagaauguauccaucauu

SEQ ID NO: 2897863 - RNA, 19 nt, Artificial Sequence
  Description of Artificial Sequence: Synthetic oligonucleotide
uuacuugaaguccauugug

SEQ ID NO: 2897864 - RNA, 19 nt, Artificial Sequence
  Description of Artificial Sequence: Synthetic oligonucleotide
agacuuuaaauguagcagu

SEQ ID NO: 2897865 - RNA, 19 nt, Artificial Sequence
  Description of Artificial Sequence: Synthetic oligonucleotide
uaaauguagcaguggaaag

SEQ ID NO: 2897866 - RNA, 19 nt, Artificial Sequence
  Description of Artificial Sequence: Synthetic oligonucleotide
aacaugaccacaaaacgga

SEQ ID NO: 2897867 - RNA, 19 nt, Artificial Sequence
  Description of Artificial Sequence: Synthetic oligonucleotide
acuaguaaaagacuuuaaa

SEQ ID NO: 2897868 - RNA, 19 nt, Artificial Sequence
  Description of Artificial Sequence: Synthetic oligonucleotide
auuguagguuugcacuucc

SEQ ID NO: 2897869 - RNA, 19 nt, Artificial Sequence
  Description of Artificial Sequence: Synthetic oligonucleotide
aacaaaccugauuuaaaau

SEQ ID NO: 2897870 - RNA, 19 nt, Artificial Sequence
  Description of Artificial Sequence: Synthetic oligonucleotide
auguuuaaagccaacauga

SEQ ID NO: 2897871 - RNA, 19 nt, Artificial Sequence
  Description of Artificial Sequence: Synthetic oligonucleotide
uuucaacucuaacaaaccu

SEQ ID NO: 2897872 - RNA, 19 nt, Artificial Sequence
  Description of Artificial Sequence: Synthetic oligonucleotide
uucaguuacuugaagucca

SEQ ID NO: 2897873 - RNA, 19 nt, Artificial Sequence
  Description of Artificial Sequence: Synthetic oligonucleotide
uuaaaauuucugaaaugau

SEQ ID NO: 2897874 - RNA, 19 nt, Artificial Sequence
  Description of Artificial Sequence: Synthetic oligonucleotide
auaagaggcuuuucaacuc

SEQ ID NO: 2897875 - RNA, 19 nt, Artificial Sequence
  Description of Artificial Sequence: Synthetic oligonucleotide
aaaugauugacuaguaaaa

SEQ ID NO: 2897876 - RNA, 19 nt, Artificial Sequence
  Description of Artificial Sequence: Synthetic oligonucleotide
aauguagcaguggaaagca

SEQ ID NO: 2897877 - RNA, 19 nt, Artificial Sequence
  Description of Artificial Sequence: Synthetic oligonucleotide
aaguuguuauuauucuugu

SEQ ID NO: 2897878 - RNA, 19 nt, Artificial Sequence
  Description of Artificial Sequence: Synthetic oligonucleotide
aaagcaacguugcaucccu

SEQ ID NO: 2897879 - RNA, 19 nt, Artificial Sequence
  Description of Artificial Sequence: Synthetic oligonucleotide
augauugacuaguaaaaga

SEQ ID NO: 2897880 - RNA, 19 nt, Artificial Sequence
  Description of Artificial Sequence: Synthetic oligonucleotide
ugcuguauagcccaggcua

SEQ ID NO: 2897881 - RNA, 19 nt, Artificial Sequence
  Description of Artificial Sequence: Synthetic oligonucleotide
uguagcaguggaaagcaac

SEQ ID NO: 2897882 - RNA, 19 nt, Artificial Sequence
  Description of Artificial Sequence: Synthetic oligonucleotide
aggauuguagguuugcacu

SEQ ID NO: 2897883 - RNA, 19 nt, Artificial Sequence
  Description of Artificial Sequence: Synthetic oligonucleotide
aaacggaugagaauuguca

SEQ ID NO: 2897884 - RNA, 19 nt, Artificial Sequence
  Description of Artificial Sequence: Synthetic oligonucleotide
uuuaaauguagcaguggaa

SEQ ID NO: 2897885 - RNA, 19 nt, Artificial Sequence
  Description of Artificial Sequence: Synthetic oligonucleotide
uuucugaaaugauugacua

SEQ ID NO: 2897886 - RNA, 19 nt, Artificial Sequence
  Description of Artificial Sequence: Synthetic oligonucleotide
guuacccauauguuuaaag

SEQ ID NO: 2897887 - RNA, 19 nt, Artificial Sequence
  Description of Artificial Sequence: Synthetic oligonucleotide
agcuccugaguccuggacc

SEQ ID NO: 2897888 - RNA, 19 nt, Artificial Sequence
  Description of Artificial Sequence: Synthetic oligonucleotide
uguguggaaagaauguauc

SEQ ID NO: 2897889 - RNA, 19 nt, Artificial Sequence
  Description of Artificial Sequence: Synthetic oligonucleotide
uguggaaagaauguaucca

SEQ ID NO: 2897890 - RNA, 19 nt, Artificial Sequence
  Description of Artificial Sequence: Synthetic oligonucleotide
uggucauuaaaguuguuau

SEQ ID NO: 2897891 - RNA, 19 nt, Artificial Sequence
  Description of Artificial Sequence: Synthetic oligonucleotide
uauuguuacccauauguuu

SEQ ID NO: 2897892 - RNA, 19 nt, Artificial Sequence
  Description of Artificial Sequence: Synthetic oligonucleotide
uguagguuugcacuuccca

SEQ ID NO: 2897893 - RNA, 19 nt, Artificial Sequence
  Description of Artificial Sequence: Synthetic oligonucleotide
auauguuuaaagccaacau

SEQ ID NO: 2897894 - RNA, 19 nt, Artificial Sequence
  Description of Artificial Sequence: Synthetic oligonucleotide
ugaaaugauugacuaguaa

SEQ ID NO: 2897895 - RNA, 19 nt, Artificial Sequence
  Description of Artificial Sequence: Synthetic oligonucleotide
agaauguauccaucauucg

SEQ ID NO: 2897896 - RNA, 19 nt, Artificial Sequence
  Description of Artificial Sequence: Synthetic oligonucleotide
aacucuaacaaaccugauu

SEQ ID NO: 2897897 - RNA, 19 nt, Artificial Sequence
  Description of Artificial Sequence: Synthetic oligonucleotide
cacagguguaggaagagag

SEQ ID NO: 2897898 - RNA, 19 nt, Artificial Sequence
  Description of Artificial Sequence: Synthetic oligonucleotide
aaaacggaugagaauuguc

SEQ ID NO: 2897899 - RNA, 19 nt, Artificial Sequence
  Description of Artificial Sequence: Synthetic oligonucleotide
aaaccugauuuaaaauuuc

SEQ ID NO: 2897900 - RNA, 19 nt, Artificial Sequence
  Description of Artificial Sequence: Synthetic oligonucleotide
aggcuuuucaacucuaaca

SEQ ID NO: 2897901 - RNA, 19 nt, Artificial Sequence
  Description of Artificial Sequence: Synthetic oligonucleotide
gagaauugucaaaucauug

SEQ ID NO: 2897902 - RNA, 19 nt, Artificial Sequence
  Description of Artificial Sequence: Synthetic oligonucleotide
uacuugaaguccauugugu

SEQ ID NO: 2897903 - RNA, 19 nt, Artificial Sequence
  Description of Artificial Sequence: Synthetic oligonucleotide
uccgauagcgcaauacugu

SEQ ID NO: 2897904 - RNA, 19 nt, Artificial Sequence
  Description of Artificial Sequence: Synthetic oligonucleotide
gaagagaggccccagguca

SEQ ID NO: 2897905 - RNA, 19 nt, Artificial Sequence
  Description of Artificial Sequence: Synthetic oligonucleotide
aaaucauugguggucauua

SEQ ID NO: 2897906 - RNA, 19 nt, Artificial Sequence
  Description of Artificial Sequence: Synthetic oligonucleotide
ugagaauugucaaaucauu

SEQ ID NO: 2897907 - RNA, 19 nt, Artificial Sequence
  Description of Artificial Sequence: Synthetic oligonucleotide
uuuggugacaggcuuccga

SEQ ID NO: 2897908 - RNA, 19 nt, Artificial Sequence
  Description of Artificial Sequence: Synthetic oligonucleotide
ucuaacaaaccugauuuaa

SEQ ID NO: 2897909 - RNA, 19 nt, Artificial Sequence
  Description of Artificial Sequence: Synthetic oligonucleotide
uucugaaaugauugacuag

SEQ ID NO: 2897910 - RNA, 19 nt, Artificial Sequence
  Description of Artificial Sequence: Synthetic oligonucleotide
ucugcuguauagcccaggc

SEQ ID NO: 2897911 - RNA, 19 nt, Artificial Sequence
  Description of Artificial Sequence: Synthetic oligonucleotide
cuuuaaauguagcagugga

SEQ ID NO: 2897912 - RNA, 19 nt, Artificial Sequence
  Description of Artificial Sequence: Synthetic oligonucleotide
acuucccauauccagauaa

SEQ ID NO: 2897913 - RNA, 19 nt, Artificial Sequence
  Description of Artificial Sequence: Synthetic oligonucleotide
uuccgauagcgcaauacug

SEQ ID NO: 2897914 - RNA, 19 nt, Artificial Sequence
  Description of Artificial Sequence: Synthetic oligonucleotide
caucauucggcuuugguga

SEQ ID NO: 2897915 - RNA, 19 nt, Artificial Sequence
  Description of Artificial Sequence: Synthetic oligonucleotide
uggaaagcaacguugcauc

SEQ ID NO: 2897916 - RNA, 19 nt, Artificial Sequence
  Description of Artificial Sequence: Synthetic oligonucleotide
aacggaugagaauugucaa

SEQ ID NO: 2897917 - RNA, 19 nt, Artificial Sequence
  Description of Artificial Sequence: Synthetic oligonucleotide
uguuuaaagccaacaugac

SEQ ID NO: 2897918 - RNA, 19 nt, Artificial Sequence
  Description of Artificial Sequence: Synthetic oligonucleotide
uguuauuauucuuguugca

SEQ ID NO: 2897919 - RNA, 19 nt, Artificial Sequence
  Description of Artificial Sequence: Synthetic oligonucleotide
guuauuauucuuguugcac

SEQ ID NO: 2897920 - RNA, 19 nt, Artificial Sequence
  Description of Artificial Sequence: Synthetic oligonucleotide
ugguucaguuacuugaagu

SEQ ID NO: 2897921 - RNA, 19 nt, Artificial Sequence
  Description of Artificial Sequence: Synthetic oligonucleotide
uaagaggcuuuucaacucu

SEQ ID NO: 2897922 - RNA, 19 nt, Artificial Sequence
  Description of Artificial Sequence: Synthetic oligonucleotide
ugagucugcuguauagccc

SEQ ID NO: 2897923 - RNA, 19 nt, Artificial Sequence
  Description of Artificial Sequence: Synthetic oligonucleotide
cugagucugcuguauagcc

SEQ ID NO: 2897924 - RNA, 19 nt, Artificial Sequence
  Description of Artificial Sequence: Synthetic oligonucleotide
uccacagauacugaagcug

SEQ ID NO: 2897925 - RNA, 19 nt, Artificial Sequence
  Description of Artificial Sequence: Synthetic oligonucleotide
acuuuaaauguagcagugg

SEQ ID NO: 2897926 - RNA, 19 nt, Artificial Sequence
  Description of Artificial Sequence: Synthetic oligonucleotide
ucauuaaaguuguuauuau

SEQ ID NO: 2897927 - RNA, 19 nt, Artificial Sequence
  Description of Artificial Sequence: Synthetic oligonucleotide
ugcacuucccauauccaga

SEQ ID NO: 2897928 - RNA, 19 nt, Artificial Sequence
  Description of Artificial Sequence: Synthetic oligonucleotide
uagcgcaauacuguuauug

SEQ ID NO: 2897929 - RNA, 19 nt, Artificial Sequence
  Description of Artificial Sequence: Synthetic oligonucleotide
ccauauccagauaagaggc

SEQ ID NO: 2897930 - RNA, 19 nt, Artificial Sequence
  Description of Artificial Sequence: Synthetic oligonucleotide
ugaacucccaagugcuagg

SEQ ID NO: 2897931 - RNA, 19 nt, Artificial Sequence
  Description of Artificial Sequence: Synthetic oligonucleotide
uuauuguuacccauauguu

SEQ ID NO: 2897932 - RNA, 19 nt, Artificial Sequence
  Description of Artificial Sequence: Synthetic oligonucleotide
gaauugucaaaucauuggu

SEQ ID NO: 2897933 - RNA, 19 nt, Artificial Sequence
  Description of Artificial Sequence: Synthetic oligonucleotide
guguggaaagaauguaucc

SEQ ID NO: 2897934 - RNA, 19 nt, Artificial Sequence
  Description of Artificial Sequence: Synthetic oligonucleotide
agcaacguugcaucccugg

SEQ ID NO: 2897935 - RNA, 19 nt, Artificial Sequence
  Description of Artificial Sequence: Synthetic oligonucleotide
cccauauccagauaagagg

SEQ ID NO: 2897936 - RNA, 19 nt, Artificial Sequence
  Description of Artificial Sequence: Synthetic oligonucleotide
ugacaggcuuccgauagcg

SEQ ID NO: 2897937 - RNA, 19 nt, Artificial Sequence
  Description of Artificial Sequence: Synthetic oligonucleotide
auuucugaaaugauugacu

SEQ ID NO: 2897938 - RNA, 19 nt, Artificial Sequence
  Description of Artificial Sequence: Synthetic oligonucleotide
gacuuuaaauguagcagug

SEQ ID NO: 2897939 - RNA, 19 nt, Artificial Sequence
  Description of Artificial Sequence: Synthetic oligonucleotide
uugaacucccaagugcuag

SEQ ID NO: 2897940 - RNA, 19 nt, Artificial Sequence
  Description of Artificial Sequence: Synthetic oligonucleotide
uaggauuguagguuugcac

SEQ ID NO: 2897941 - RNA, 19 nt, Artificial Sequence
  Description of Artificial Sequence: Synthetic oligonucleotide
uauucuuguugcacaggug

SEQ ID NO: 2897942 - RNA, 19 nt, Artificial Sequence
  Description of Artificial Sequence: Synthetic oligonucleotide
aaagccaacaugaccacaa

SEQ ID NO: 2897943 - RNA, 19 nt, Artificial Sequence
  Description of Artificial Sequence: Synthetic oligonucleotide
auugguggucauuaaaguu

SEQ ID NO: 2897944 - RNA, 19 nt, Artificial Sequence
  Description of Artificial Sequence: Synthetic oligonucleotide
uucggcuuuggugacaggc

SEQ ID NO: 2897945 - RNA, 19 nt, Artificial Sequence
  Description of Artificial Sequence: Synthetic oligonucleotide
uguuauuguuacccauaug

SEQ ID NO: 2897946 - RNA, 19 nt, Artificial Sequence
  Description of Artificial Sequence: Synthetic oligonucleotide
ccaacaugaccacaaaacg

SEQ ID NO: 2897947 - RNA, 19 nt, Artificial Sequence
  Description of Artificial Sequence: Synthetic oligonucleotide
cagguguaggaagagaggc

SEQ ID NO: 2897948 - RNA, 19 nt, Artificial Sequence
  Description of Artificial Sequence: Synthetic oligonucleotide
acaggcuuccgauagcgca

SEQ ID NO: 2897949 - RNA, 19 nt, Artificial Sequence
  Description of Artificial Sequence: Synthetic oligonucleotide
cuaguaaaagacuuuaaau

SEQ ID NO: 2897950 - RNA, 19 nt, Artificial Sequence
  Description of Artificial Sequence: Synthetic oligonucleotide
auugacuaguaaaagacuu

SEQ ID NO: 2897951 - RNA, 19 nt, Artificial Sequence
  Description of Artificial Sequence: Synthetic oligonucleotide
gagucugcuguauagccca

SEQ ID NO: 2897952 - RNA, 19 nt, Artificial Sequence
  Description of Artificial Sequence: Synthetic oligonucleotide
gucauuaaaguuguuauua

SEQ ID NO: 2897953 - RNA, 19 nt, Artificial Sequence
  Description of Artificial Sequence: Synthetic oligonucleotide
ugucaaaucauuggugguc

SEQ ID NO: 2897954 - RNA, 19 nt, Artificial Sequence
  Description of Artificial Sequence: Synthetic oligonucleotide
aaccugauuuaaaauuucu

SEQ ID NO: 2897955 - RNA, 19 nt, Artificial Sequence
  Description of Artificial Sequence: Synthetic oligonucleotide
ggaaagaauguauccauca

SEQ ID NO: 2897956 - RNA, 19 nt, Artificial Sequence
  Description of Artificial Sequence: Synthetic oligonucleotide
uggaaagaauguauccauc

SEQ ID NO: 2897957 - RNA, 19 nt, Artificial Sequence
  Description of Artificial Sequence: Synthetic oligonucleotide
agcgcaauacuguuauugu

SEQ ID NO: 2897958 - RNA, 19 nt, Artificial Sequence
  Description of Artificial Sequence: Synthetic oligonucleotide
uugacuaguaaaagacuuu

SEQ ID NO: 2897959 - RNA, 19 nt, Artificial Sequence
  Description of Artificial Sequence: Synthetic oligonucleotide
auuguuacccauauguuua

SEQ ID NO: 2897960 - RNA, 19 nt, Artificial Sequence
  Description of Artificial Sequence: Synthetic oligonucleotide
caguggaaagcaacguugc

SEQ ID NO: 2897961 - RNA, 19 nt, Artificial Sequence
  Description of Artificial Sequence: Synthetic oligonucleotide
uccuggaccuuccacagau

SEQ ID NO: 2897962 - RNA, 19 nt, Artificial Sequence
  Description of Artificial Sequence: Synthetic oligonucleotide
ugacuaguaaaagacuuua

SEQ ID NO: 2897963 - RNA, 19 nt, Artificial Sequence
  Description of Artificial Sequence: Synthetic oligonucleotide
gaaagcaacguugcauccc

SEQ ID NO: 2897964 - RNA, 19 nt, Artificial Sequence
  Description of Artificial Sequence: Synthetic oligonucleotide
caggcuaccuugaacuccc

SEQ ID NO: 2897965 - RNA, 19 nt, Artificial Sequence
  Description of Artificial Sequence: Synthetic oligonucleotide
aguccuggaccuuccacag

SEQ ID NO: 2897966 - RNA, 19 nt, Artificial Sequence
  Description of Artificial Sequence: Synthetic oligonucleotide
ggugacaggcuuccgauag

SEQ ID NO: 2897967 - RNA, 19 nt, Artificial Sequence
  Description of Artificial Sequence: Synthetic oligonucleotide
uaccuugaacucccaagug

SEQ ID NO: 2897968 - RNA, 19 nt, Artificial Sequence
  Description of Artificial Sequence: Synthetic oligonucleotide
ucugagucugcuguauagc

SEQ ID NO: 2897969 - RNA, 19 nt, Artificial Sequence
  Description of Artificial Sequence: Synthetic oligonucleotide
cuggccacacugaugacug

SEQ ID NO: 2897970 - RNA, 19 nt, Artificial Sequence
  Description of Artificial Sequence: Synthetic oligonucleotide
ccugauuuaaaauuucuga

SEQ ID NO: 2897971 - RNA, 19 nt, Artificial Sequence
  Description of Artificial Sequence: Synthetic oligonucleotide
uugucaaaucauugguggu

SEQ ID NO: 2897972 - RNA, 19 nt, Artificial Sequence
  Description of Artificial Sequence: Synthetic oligonucleotide
gauagcgcaauacuguuau

SEQ ID NO: 2897973 - RNA, 19 nt, Artificial Sequence
  Description of Artificial Sequence: Synthetic oligonucleotide
uugcacagguguaggaaga

SEQ ID NO: 2897974 - RNA, 19 nt, Artificial Sequence
  Description of Artificial Sequence: Synthetic oligonucleotide
cuucccauauccagauaag

SEQ ID NO: 2897975 - RNA, 19 nt, Artificial Sequence
  Description of Artificial Sequence: Synthetic oligonucleotide
gcuaccuugaacucccaag

SEQ ID NO: 2897976 - RNA, 19 nt, Artificial Sequence
  Description of Artificial Sequence: Synthetic oligonucleotide
ggaccuuccacagauacug

SEQ ID NO: 2897977 - RNA, 19 nt, Artificial Sequence
  Description of Artificial Sequence: Synthetic oligonucleotide
ucagcgcgcucacagcucc

SEQ ID NO: 2897978 - RNA, 19 nt, Artificial Sequence
  Description of Artificial Sequence: Synthetic oligonucleotide
aucauugguggucauuaaa

SEQ ID NO: 2897979 - RNA, 19 nt, Artificial Sequence
  Description of Artificial Sequence: Synthetic oligonucleotide
uacuguuauuguuacccau

SEQ ID NO: 2897980 - RNA, 19 nt, Artificial Sequence
  Description of Artificial Sequence: Synthetic oligonucleotide
gaggccccaggucagcgcg

SEQ ID NO: 2897981 - RNA, 19 nt, Artificial Sequence
  Description of Artificial Sequence: Synthetic oligonucleotide
gaguccuggaccuuccaca

SEQ ID NO: 2897982 - RNA, 19 nt, Artificial Sequence
  Description of Artificial Sequence: Synthetic oligonucleotide
agugcuaggauuguagguu

SEQ ID NO: 2897983 - RNA, 19 nt, Artificial Sequence
  Description of Artificial Sequence: Synthetic oligonucleotide
uucccauauccagauaaga

SEQ ID NO: 2897984 - RNA, 19 nt, Artificial Sequence
  Description of Artificial Sequence: Synthetic oligonucleotide
agguguaggaagagaggcc

SEQ ID NO: 2897985 - RNA, 19 nt, Artificial Sequence
  Description of Artificial Sequence: Synthetic oligonucleotide
acccauauguuuaaagcca

SEQ ID NO: 2897986 - RNA, 19 nt, Artificial Sequence
  Description of Artificial Sequence: Synthetic oligonucleotide
augagaauugucaaaucau

SEQ ID NO: 2897987 - RNA, 19 nt, Artificial Sequence
  Description of Artificial Sequence: Synthetic oligonucleotide
uuccacagauacugaagcu

SEQ ID NO: 2897988 - RNA, 19 nt, Artificial Sequence
  Description of Artificial Sequence: Synthetic oligonucleotide
auguauccaucauucggcu

SEQ ID NO: 2897989 - RNA, 19 nt, Artificial Sequence
  Description of Artificial Sequence: Synthetic oligonucleotide
uccaucauucggcuuuggu

SEQ ID NO: 2897990 - RNA, 19 nt, Artificial Sequence
  Description of Artificial Sequence: Synthetic oligonucleotide
aaguccauuguguguggaa

SEQ ID NO: 2897991 - RNA, 19 nt, Artificial Sequence
  Description of Artificial Sequence: Synthetic oligonucleotide
caauacuguuauuguuacc

SEQ ID NO: 2897992 - RNA, 19 nt, Artificial Sequence
  Description of Artificial Sequence: Synthetic oligonucleotide
uagguuugcacuucccaua

SEQ ID NO: 2897993 - RNA, 19 nt, Artificial Sequence
  Description of Artificial Sequence: Synthetic oligonucleotide
gguguaggaagagaggccc

SEQ ID NO: 2897994 - RNA, 19 nt, Artificial Sequence
  Description of Artificial Sequence: Synthetic oligonucleotide
ugaguccuggaccuuccac

SEQ ID NO: 2897995 - RNA, 19 nt, Artificial Sequence
  Description of Artificial Sequence: Synthetic oligonucleotide
uguugcacagguguaggaa

SEQ ID NO: 2897996 - RNA, 19 nt, Artificial Sequence
  Description of Artificial Sequence: Synthetic oligonucleotide
uccauuguguguggaaaga

SEQ ID NO: 2897997 - RNA, 19 nt, Artificial Sequence
  Description of Artificial Sequence: Synthetic oligonucleotide
uuguagguuugcacuuccc

SEQ ID NO: 2897998 - RNA, 19 nt, Artificial Sequence
  Description of Artificial Sequence: Synthetic oligonucleotide
ucggcuuuggugacaggcu

SEQ ID NO: 2897999 - RNA, 19 nt, Artificial Sequence
  Description of Artificial Sequence: Synthetic oligonucleotide
guuacuugaaguccauugu

SEQ ID NO: 2898000 - RNA, 19 nt, Artificial Sequence
  Description of Artificial Sequence: Synthetic oligonucleotide
caggucagcgcgcucacag

SEQ ID NO: 2898001 - RNA, 19 nt, Artificial Sequence
  Description of Artificial Sequence: Synthetic oligonucleotide
uguaggaagagaggcccca

SEQ ID NO: 2898002 - RNA, 19 nt, Artificial Sequence
  Description of Artificial Sequence: Synthetic oligonucleotide
gcaauacuguuauuguuac

SEQ ID NO: 2898003 - RNA, 19 nt, Artificial Sequence
  Description of Artificial Sequence: Synthetic oligonucleotide
acagguguaggaagagagg

SEQ ID NO: 2898004 - RNA, 19 nt, Artificial Sequence
  Description of Artificial Sequence: Synthetic oligonucleotide
accacaaaacggaugagaa

SEQ ID NO: 2898005 - RNA, 19 nt, Artificial Sequence
  Description of Artificial Sequence: Synthetic oligonucleotide
agcccaggcuaccuugaac

SEQ ID NO: 2898006 - RNA, 19 nt, Artificial Sequence
  Description of Artificial Sequence: Synthetic oligonucleotide
ugcuaggauuguagguuug

SEQ ID NO: 2898007 - RNA, 19 nt, Artificial Sequence
  Description of Artificial Sequence: Synthetic oligonucleotide
gaccacaaaacggaugaga

SEQ ID NO: 2898008 - RNA, 19 nt, Artificial Sequence
  Description of Artificial Sequence: Synthetic oligonucleotide
ccaucauucggcuuuggug

SEQ ID NO: 2898009 - RNA, 19 nt, Artificial Sequence
  Description of Artificial Sequence: Synthetic oligonucleotide
aggucagcgcgcucacagc

SEQ ID NO: 2898010 - RNA, 19 nt, Artificial Sequence
  Description of Artificial Sequence: Synthetic oligonucleotide
uauccagauaagaggcuuu

SEQ ID NO: 2898011 - RNA, 19 nt, Artificial Sequence
  Description of Artificial Sequence: Synthetic oligonucleotide
acaaaacggaugagaauug

SEQ ID NO: 2898012 - RNA, 19 nt, Artificial Sequence
  Description of Artificial Sequence: Synthetic oligonucleotide
acuuacuggccacacugau

SEQ ID NO: 2898013 - RNA, 19 nt, Artificial Sequence
  Description of Artificial Sequence: Synthetic oligonucleotide
uguauagcccaggcuaccu

SEQ ID NO: 2898014 - RNA, 19 nt, Artificial Sequence
  Description of Artificial Sequence: Synthetic oligonucleotide
uggaccuuccacagauacu

SEQ ID NO: 2898015 - RNA, 19 nt, Artificial Sequence
  Description of Artificial Sequence: Synthetic oligonucleotide
ucaguuacuugaaguccau

SEQ ID NO: 2898016 - RNA, 19 nt, Artificial Sequence
  Description of Artificial Sequence: Synthetic oligonucleotide
gauacugaagcugggcaaa

SEQ ID NO: 2898017 - RNA, 19 nt, Artificial Sequence
  Description of Artificial Sequence: Synthetic oligonucleotide
acggaugagaauugucaaa

SEQ ID NO: 2898018 - RNA, 19 nt, Artificial Sequence
  Description of Artificial Sequence: Synthetic oligonucleotide
gucaaaucauuggugguca

SEQ ID NO: 2898019 - RNA, 19 nt, Artificial Sequence
  Description of Artificial Sequence: Synthetic oligonucleotide
uuguuacccauauguuuaa

SEQ ID NO: 2898020 - RNA, 19 nt, Artificial Sequence
  Description of Artificial Sequence: Synthetic oligonucleotide
agguuugcacuucccauau

SEQ ID NO: 2898021 - RNA, 19 nt, Artificial Sequence
  Description of Artificial Sequence: Synthetic oligonucleotide
cagauaagaggcuuuucaa

SEQ ID NO: 2898022 - RNA, 19 nt, Artificial Sequence
  Description of Artificial Sequence: Synthetic oligonucleotide
auacugaagcugggcaaac

SEQ ID NO: 2898023 - RNA, 19 nt, Artificial Sequence
  Description of Artificial Sequence: Synthetic oligonucleotide
agcaguggaaagcaacguu

SEQ ID NO: 2898024 - RNA, 19 nt, Artificial Sequence
  Description of Artificial Sequence: Synthetic oligonucleotide
aguuguuauuauucuuguu

SEQ ID NO: 2898025 - RNA, 19 nt, Artificial Sequence
  Description of Artificial Sequence: Synthetic oligonucleotide
uucuuguugcacaggugua

SEQ ID NO: 2898026 - RNA, 19 nt, Artificial Sequence
  Description of Artificial Sequence: Synthetic oligonucleotide
gauugacuaguaaaagacu

SEQ ID NO: 2898027 - RNA, 19 nt, Artificial Sequence
  Description of Artificial Sequence: Synthetic oligonucleotide
ugcacagguguaggaagag

SEQ ID NO: 2898028 - RNA, 19 nt, Artificial Sequence
  Description of Artificial Sequence: Synthetic oligonucleotide
cauucggcuuuggugacag

SEQ ID NO: 2898029 - RNA, 19 nt, Artificial Sequence
  Description of Artificial Sequence: Synthetic oligonucleotide
gauuguagguuugcacuuc

SEQ ID NO: 2898030 - RNA, 19 nt, Artificial Sequence
  Description of Artificial Sequence: Synthetic oligonucleotide
ggaaagcaacguugcaucc

SEQ ID NO: 2898031 - RNA, 19 nt, Artificial Sequence
  Description of Artificial Sequence: Synthetic oligonucleotide
aguccauuguguguggaaa

SEQ ID NO: 2898032 - RNA, 19 nt, Artificial Sequence
  Description of Artificial Sequence: Synthetic oligonucleotide
gcaguggaaagcaacguug

SEQ ID NO: 2898033 - RNA, 19 nt, Artificial Sequence
  Description of Artificial Sequence: Synthetic oligonucleotide
gcugggcaaacuuacuggc

SEQ ID NO: 2898034 - RNA, 19 nt, Artificial Sequence
  Description of Artificial Sequence: Synthetic oligonucleotide
aacuuacuggccacacuga

SEQ ID NO: 2898035 - RNA, 19 nt, Artificial Sequence
  Description of Artificial Sequence: Synthetic oligonucleotide
acuggccacacugaugacu

SEQ ID NO: 2898036 - RNA, 19 nt, Artificial Sequence
  Description of Artificial Sequence: Synthetic oligonucleotide
cacaaaacggaugagaauu

SEQ ID NO: 2898037 - RNA, 19 nt, Artificial Sequence
  Description of Artificial Sequence: Synthetic oligonucleotide
guggaaagaauguauccau

SEQ ID NO: 2898038 - RNA, 19 nt, Artificial Sequence
  Description of Artificial Sequence: Synthetic oligonucleotide
uagcaguggaaagcaacgu

SEQ ID NO: 2898039 - RNA, 19 nt, Artificial Sequence
  Description of Artificial Sequence: Synthetic oligonucleotide
ccagauaagaggcuuuuca

SEQ ID NO: 2898040 - RNA, 19 nt, Artificial Sequence
  Description of Artificial Sequence: Synthetic oligonucleotide
cuaccuugaacucccaagu

SEQ ID NO: 2898041 - RNA, 19 nt, Artificial Sequence
  Description of Artificial Sequence: Synthetic oligonucleotide
ucccugguucaguuacuug

SEQ ID NO: 2898042 - RNA, 19 nt, Artificial Sequence
  Description of Artificial Sequence: Synthetic oligonucleotide
guggucauuaaaguuguua

SEQ ID NO: 2898043 - RNA, 19 nt, Artificial Sequence
  Description of Artificial Sequence: Synthetic oligonucleotide
ugaccacaaaacggaugag

SEQ ID NO: 2898044 - RNA, 19 nt, Artificial Sequence
  Description of Artificial Sequence: Synthetic oligonucleotide
gacuaguaaaagacuuuaa

SEQ ID NO: 2898045 - RNA, 19 nt, Artificial Sequence
  Description of Artificial Sequence: Synthetic oligonucleotide
cauugguggucauuaaagu

SEQ ID NO: 2898046 - RNA, 19 nt, Artificial Sequence
  Description of Artificial Sequence: Synthetic oligonucleotide
ucaaaucauugguggucau

SEQ ID NO: 2898047 - RNA, 19 nt, Artificial Sequence
  Description of Artificial Sequence: Synthetic oligonucleotide
gagaggccccaggucagcg

SEQ ID NO: 2898048 - RNA, 19 nt, Artificial Sequence
  Description of Artificial Sequence: Synthetic oligonucleotide
uacugaagcugggcaaacu

SEQ ID NO: 2898049 - RNA, 19 nt, Artificial Sequence
  Description of Artificial Sequence: Synthetic oligonucleotide
cauuaaaguuguuauuauu

SEQ ID NO: 2898050 - RNA, 19 nt, Artificial Sequence
  Description of Artificial Sequence: Synthetic oligonucleotide
guagguuugcacuucccau

SEQ ID NO: 2898051 - RNA, 19 nt, Artificial Sequence
  Description of Artificial Sequence: Synthetic oligonucleotide
cuguauagcccaggcuacc

SEQ ID NO: 2898052 - RNA, 19 nt, Artificial Sequence
  Description of Artificial Sequence: Synthetic oligonucleotide
uguuacccauauguuuaaa

SEQ ID NO: 2898053 - RNA, 19 nt, Artificial Sequence
  Description of Artificial Sequence: Synthetic oligonucleotide
cuuccgauagcgcaauacu

SEQ ID NO: 2898054 - RNA, 19 nt, Artificial Sequence
  Description of Artificial Sequence: Synthetic oligonucleotide
cugaaaugauugacuagua

SEQ ID NO: 2898055 - RNA, 19 nt, Artificial Sequence
  Description of Artificial Sequence: Synthetic oligonucleotide
ggaugagaauugucaaauc

SEQ ID NO: 2898056 - RNA, 19 nt, Artificial Sequence
  Description of Artificial Sequence: Synthetic oligonucleotide
uccagauaagaggcuuuuc

SEQ ID NO: 2898057 - RNA, 19 nt, Artificial Sequence
  Description of Artificial Sequence: Synthetic oligonucleotide
gugacaggcuuccgauagc

SEQ ID NO: 2898058 - RNA, 19 nt, Artificial Sequence
  Description of Artificial Sequence: Synthetic oligonucleotide
uugcaucccugguucaguu

SEQ ID NO: 2898059 - RNA, 19 nt, Artificial Sequence
  Description of Artificial Sequence: Synthetic oligonucleotide
cuaggauuguagguuugca

SEQ ID NO: 2898060 - RNA, 19 nt, Artificial Sequence
  Description of Artificial Sequence: Synthetic oligonucleotide
guaggaagagaggccccag

SEQ ID NO: 2898061 - RNA, 19 nt, Artificial Sequence
  Description of Artificial Sequence: Synthetic oligonucleotide
gcucacagcuccugagucc

SEQ ID NO: 2898062 - RNA, 19 nt, Artificial Sequence
  Description of Artificial Sequence: Synthetic oligonucleotide
ggaagagaggccccagguc

SEQ ID NO: 2898063 - RNA, 19 nt, Artificial Sequence
  Description of Artificial Sequence: Synthetic oligonucleotide
cauuguguguggaaagaau

SEQ ID NO: 2898064 - RNA, 19 nt, Artificial Sequence
  Description of Artificial Sequence: Synthetic oligonucleotide
gucugcuguauagcccagg

SEQ ID NO: 2898065 - RNA, 19 nt, Artificial Sequence
  Description of Artificial Sequence: Synthetic oligonucleotide
gacaggcuuccgauagcgc

SEQ ID NO: 2898066 - RNA, 19 nt, Artificial Sequence
  Description of Artificial Sequence: Synthetic oligonucleotide
cucuaacaaaccugauuua

SEQ ID NO: 2898067 - RNA, 19 nt, Artificial Sequence
  Description of Artificial Sequence: Synthetic oligonucleotide
gaaguccauugugugugga

SEQ ID NO: 2898068 - RNA, 19 nt, Artificial Sequence
  Description of Artificial Sequence: Synthetic oligonucleotide
gcuaggauuguagguuugc

SEQ ID NO: 2898069 - RNA, 19 nt, Artificial Sequence
  Description of Artificial Sequence: Synthetic oligonucleotide
aagaggcuuuucaacucua

SEQ ID NO: 2898070 - RNA, 19 nt, Artificial Sequence
  Description of Artificial Sequence: Synthetic oligonucleotide
cauauccagauaagaggcu

SEQ ID NO: 2898071 - RNA, 19 nt, Artificial Sequence
  Description of Artificial Sequence: Synthetic oligonucleotide
ugcaucccugguucaguua

SEQ ID NO: 2898072 - RNA, 19 nt, Artificial Sequence
  Description of Artificial Sequence: Synthetic oligonucleotide
cuuuggugacaggcuuccg

SEQ ID NO: 2898073 - RNA, 19 nt, Artificial Sequence
  Description of Artificial Sequence: Synthetic oligonucleotide
auccagauaagaggcuuuu

SEQ ID NO: 2898074 - RNA, 19 nt, Artificial Sequence
  Description of Artificial Sequence: Synthetic oligonucleotide
guguaggaagagaggcccc

SEQ ID NO: 2898075 - RNA, 19 nt, Artificial Sequence
  Description of Artificial Sequence: Synthetic oligonucleotide
guggaaagcaacguugcau

SEQ ID NO: 2898076 - RNA, 19 nt, Artificial Sequence
  Description of Artificial Sequence: Synthetic oligonucleotide
uggugacaggcuuccgaua

SEQ ID NO: 2898077 - RNA, 19 nt, Artificial Sequence
  Description of Artificial Sequence: Synthetic oligonucleotide
gcuuccgauagcgcaauac

SEQ ID NO: 2898078 - RNA, 19 nt, Artificial Sequence
  Description of Artificial Sequence: Synthetic oligonucleotide
acaugaccacaaaacggau

SEQ ID NO: 2898079 - RNA, 19 nt, Artificial Sequence
  Description of Artificial Sequence: Synthetic oligonucleotide
ucacagcuccugaguccug

SEQ ID NO: 2898080 - RNA, 19 nt, Artificial Sequence
  Description of Artificial Sequence: Synthetic oligonucleotide
caggcuuccgauagcgcaa

SEQ ID NO: 2898081 - RNA, 19 nt, Artificial Sequence
  Description of Artificial Sequence: Synthetic oligonucleotide
auagcccaggcuaccuuga

SEQ ID NO: 2898082 - RNA, 19 nt, Artificial Sequence
  Description of Artificial Sequence: Synthetic oligonucleotide
gcaaacuuacuggccacac

SEQ ID NO: 2898083 - RNA, 19 nt, Artificial Sequence
  Description of Artificial Sequence: Synthetic oligonucleotide
cagcuccugaguccuggac

SEQ ID NO: 2898084 - RNA, 19 nt, Artificial Sequence
  Description of Artificial Sequence: Synthetic oligonucleotide
ccaggcuaccuugaacucc

SEQ ID NO: 2898085 - RNA, 19 nt, Artificial Sequence
  Description of Artificial Sequence: Synthetic oligonucleotide
gcuguauagcccaggcuac

SEQ ID NO: 2898086 - RNA, 19 nt, Artificial Sequence
  Description of Artificial Sequence: Synthetic oligonucleotide
guguguggaaagaauguau

SEQ ID NO: 2898087 - RNA, 19 nt, Artificial Sequence
  Description of Artificial Sequence: Synthetic oligonucleotide
aagcaacguugcaucccug

SEQ ID NO: 2898088 - RNA, 19 nt, Artificial Sequence
  Description of Artificial Sequence: Synthetic oligonucleotide
gcccaggcuaccuugaacu

SEQ ID NO: 2898089 - RNA, 19 nt, Artificial Sequence
  Description of Artificial Sequence: Synthetic oligonucleotide
acguugcaucccugguuca

SEQ ID NO: 2898090 - RNA, 19 nt, Artificial Sequence
  Description of Artificial Sequence: Synthetic oligonucleotide
auagcgcaauacuguuauu

SEQ ID NO: 2898091 - RNA, 19 nt, Artificial Sequence
  Description of Artificial Sequence: Synthetic oligonucleotide
cgcaauacuguuauuguua

SEQ ID NO: 2898092 - RNA, 19 nt, Artificial Sequence
  Description of Artificial Sequence: Synthetic oligonucleotide
ccuugaacucccaagugcu

SEQ ID NO: 2898093 - RNA, 19 nt, Artificial Sequence
  Description of Artificial Sequence: Synthetic oligonucleotide
caaaacggaugagaauugu

SEQ ID NO: 2898094 - RNA, 19 nt, Artificial Sequence
  Description of Artificial Sequence: Synthetic oligonucleotide
caaacuuacuggccacacu

SEQ ID NO: 2898095 - RNA, 19 nt, Artificial Sequence
  Description of Artificial Sequence: Synthetic oligonucleotide
ggucauuaaaguuguuauu

SEQ ID NO: 2898096 - RNA, 19 nt, Artificial Sequence
  Description of Artificial Sequence: Synthetic oligonucleotide
cccauauguuuaaagccaa

SEQ ID NO: 2898097 - RNA, 19 nt, Artificial Sequence
  Description of Artificial Sequence: Synthetic oligonucleotide
agucugcuguauagcccag

SEQ ID NO: 2898098 - RNA, 19 nt, Artificial Sequence
  Description of Artificial Sequence: Synthetic oligonucleotide
ggauuguagguuugcacuu

SEQ ID NO: 2898099 - RNA, 19 nt, Artificial Sequence
  Description of Artificial Sequence: Synthetic oligonucleotide
agcgcgcucacagcuccug

SEQ ID NO: 2898100 - RNA, 19 nt, Artificial Sequence
  Description of Artificial Sequence: Synthetic oligonucleotide
uggccacacugaugacugu

SEQ ID NO: 2898101 - RNA, 19 nt, Artificial Sequence
  Description of Artificial Sequence: Synthetic oligonucleotide
gcuccugaguccuggaccu

SEQ ID NO: 2898102 - RNA, 19 nt, Artificial Sequence
  Description of Artificial Sequence: Synthetic oligonucleotide
ggucagcgcgcucacagcu

SEQ ID NO: 2898103 - RNA, 19 nt, Artificial Sequence
  Description of Artificial Sequence: Synthetic oligonucleotide
guugcaucccugguucagu

SEQ ID NO: 2898104 - RNA, 19 nt, Artificial Sequence
  Description of Artificial Sequence: Synthetic oligonucleotide
auguagcaguggaaagcaa

SEQ ID NO: 2898105 - RNA, 19 nt, Artificial Sequence
  Description of Artificial Sequence: Synthetic oligonucleotide
aggcuuccgauagcgcaau

SEQ ID NO: 2898106 - RNA, 19 nt, Artificial Sequence
  Description of Artificial Sequence: Synthetic oligonucleotide
ggcuuuggugacaggcuuc

SEQ ID NO: 2898107 - RNA, 19 nt, Artificial Sequence
  Description of Artificial Sequence: Synthetic oligonucleotide
caacguugcaucccugguu

SEQ ID NO: 2898108 - RNA, 19 nt, Artificial Sequence
  Description of Artificial Sequence: Synthetic oligonucleotide
cacacugaugacugugcuu

SEQ ID NO: 2898109 - RNA, 19 nt, Artificial Sequence
  Description of Artificial Sequence: Synthetic oligonucleotide
gucagcgcgcucacagcuc

SEQ ID NO: 2898110 - RNA, 19 nt, Artificial Sequence
  Description of Artificial Sequence: Synthetic oligonucleotide
guauagcccaggcuaccuu

SEQ ID NO: 2898111 - RNA, 19 nt, Artificial Sequence
  Description of Artificial Sequence: Synthetic oligonucleotide
gcacuucccauauccagau

SEQ ID NO: 2898112 - RNA, 19 nt, Artificial Sequence
  Description of Artificial Sequence: Synthetic oligonucleotide
cugcuguauagcccaggcu

SEQ ID NO: 2898113 - RNA, 19 nt, Artificial Sequence
  Description of Artificial Sequence: Synthetic oligonucleotide
gcaacguugcaucccuggu

SEQ ID NO: 2898114 - RNA, 19 nt, Artificial Sequence
  Description of Artificial Sequence: Synthetic oligonucleotide
cccaggcuaccuugaacuc

SEQ ID NO: 2898115 - RNA, 19 nt, Artificial Sequence
  Description of Artificial Sequence: Synthetic oligonucleotide
caaaucauugguggucauu

SEQ ID NO: 2898116 - RNA, 19 nt, Artificial Sequence
  Description of Artificial Sequence: Synthetic oligonucleotide
gcacagguguaggaagaga

SEQ ID NO: 2898117 - RNA, 19 nt, Artificial Sequence
  Description of Artificial Sequence: Synthetic oligonucleotide
ggcuaccuugaacucccaa

SEQ ID NO: 2898118 - RNA, 19 nt, Artificial Sequence
  Description of Artificial Sequence: Synthetic oligonucleotide
cgcucacagcuccugaguc

SEQ ID NO: 2898119 - RNA, 19 nt, Artificial Sequence
  Description of Artificial Sequence: Synthetic oligonucleotide
cgcgcucacagcuccugag

SEQ ID NO: 2898120 - RNA, 19 nt, Artificial Sequence
  Description of Artificial Sequence: Synthetic oligonucleotide
ccauuguguguggaaagaa

SEQ ID NO: 2898121 - RNA, 19 nt, Artificial Sequence
  Description of Artificial Sequence: Synthetic oligonucleotide
cguugcaucccugguucag

SEQ ID NO: 2898122 - RNA, 19 nt, Artificial Sequence
  Description of Artificial Sequence: Synthetic oligonucleotide
gcgcaauacuguuauuguu

SEQ ID NO: 2898123 - RNA, 19 nt, Artificial Sequence
  Description of Artificial Sequence: Synthetic oligonucleotide
cacuucccauauccagaua

SEQ ID NO: 2898124 - RNA, 19 nt, Artificial Sequence
  Description of Artificial Sequence: Synthetic oligonucleotide
ccacaaaacggaugagaau

SEQ ID NO: 2898125 - RNA, 19 nt, Artificial Sequence
  Description of Artificial Sequence: Synthetic oligonucleotide
cggaugagaauugucaaau

SEQ ID NO: 2898126 - RNA, 19 nt, Artificial Sequence
  Description of Artificial Sequence: Synthetic oligonucleotide
cccaggucagcgcgcucac

SEQ ID NO: 2898127 - RNA, 19 nt, Artificial Sequence
  Description of Artificial Sequence: Synthetic oligonucleotide
gcgcucacagcuccugagu

SEQ ID NO: 2898128 - RNA, 19 nt, Artificial Sequence
  Description of Artificial Sequence: Synthetic oligonucleotide
cgauagcgcaauacuguua

SEQ ID NO: 2898129 - RNA, 19 nt, Artificial Sequence
  Description of Artificial Sequence: Synthetic oligonucleotide
aggcuaccuugaacuccca

SEQ ID NO: 2898130 - RNA, 19 nt, Artificial Sequence
  Description of Artificial Sequence: Synthetic oligonucleotide
ccgauagcgcaauacuguu

SEQ ID NO: 2898131 - RNA, 19 nt, Artificial Sequence
  Description of Artificial Sequence: Synthetic oligonucleotide
gcgcgcucacagcuccuga

SEQ ID NO: 2898132 - RNA, 19 nt, Artificial Sequence
  Description of Artificial Sequence: Synthetic oligonucleotide
caguuacuugaaguccauu

SEQ ID NO: 2898133 - RNA, 19 nt, Artificial Sequence
  Description of Artificial Sequence: Synthetic oligonucleotide
ccuggaccuuccacagaua

SEQ ID NO: 2898134 - RNA, 19 nt, Artificial Sequence
  Description of Artificial Sequence: Synthetic oligonucleotide
ggcuuccgauagcgcaaua

SEQ ID NO: 2898135 - RNA, 19 nt, Artificial Sequence
  Description of Artificial Sequence: Synthetic oligonucleotide
cagcgcgcucacagcuccu

SEQ ID NO: 2898136 - RNA, 19 nt, Artificial Sequence
  Description of Artificial Sequence: Synthetic oligonucleotide
ccaggucagcgcgcucaca

SEQ ID NO: 2898137 - RNA, 19 nt, Artificial Sequence
  Description of Artificial Sequence: Synthetic oligonucleotide
aaacauaaaacaugcacac

SEQ ID NO: 2898138 - RNA, 19 nt, Artificial Sequence
  Description of Artificial Sequence: Synthetic oligonucleotide
ucuuaauuuugacauaucg

SEQ ID NO: 2898139 - RNA, 19 nt, Artificial Sequence
  Description of Artificial Sequence: Synthetic oligonucleotide
uuaaacauaaaacaugcac

SEQ ID NO: 2898140 - RNA, 19 nt, Artificial Sequence
  Description of Artificial Sequence: Synthetic oligonucleotide
auuuaaacauaaaacaugc

SEQ ID NO: 2898141 - RNA, 19 nt, Artificial Sequence
  Description of Artificial Sequence: Synthetic oligonucleotide
uauuuaaacauaaaacaug

SEQ ID NO: 2898142 - RNA, 19 nt, Artificial Sequence
  Description of Artificial Sequence: Synthetic oligonucleotide
uuaauuuugacauaucggu

SEQ ID NO: 2898143 - RNA, 19 nt, Artificial Sequence
  Description of Artificial Sequence: Synthetic oligonucleotide
uaaacauaaaacaugcaca

SEQ ID NO: 2898144 - RNA, 19 nt, Artificial Sequence
  Description of Artificial Sequence: Synthetic oligonucleotide
gacauugugaaccagaaac

SEQ ID NO: 2898145 - RNA, 19 nt, Artificial Sequence
  Description of Artificial Sequence: Synthetic oligonucleotide
aauuuugacauaucggucu

SEQ ID NO: 2898146 - RNA, 19 nt, Artificial Sequence
  Description of Artificial Sequence: Synthetic oligonucleotide
ugacauaucggucugacug

SEQ ID NO: 2898147 - RNA, 19 nt, Artificial Sequence
  Description of Artificial Sequence: Synthetic oligonucleotide
cuuaauuuugacauaucgg

SEQ ID NO: 2898148 - RNA, 19 nt, Artificial Sequence
  Description of Artificial Sequence: Synthetic oligonucleotide
aauguugggcaucaggauc

SEQ ID NO: 2898149 - RNA, 19 nt, Artificial Sequence
  Description of Artificial Sequence: Synthetic oligonucleotide
uaagauuuguugcacauca

SEQ ID NO: 2898150 - RNA, 19 nt, Artificial Sequence
  Description of Artificial Sequence: Synthetic oligonucleotide
gaugccgcaaaagagaugg

SEQ ID NO: 2898151 - RNA, 19 nt, Artificial Sequence
  Description of Artificial Sequence: Synthetic oligonucleotide
uuucucuuaauuuugacau

SEQ ID NO: 2898152 - RNA, 19 nt, Artificial Sequence
  Description of Artificial Sequence: Synthetic oligonucleotide
uaaaacaugcacaccagcc

SEQ ID NO: 2898153 - RNA, 19 nt, Artificial Sequence
  Description of Artificial Sequence: Synthetic oligonucleotide
aauaccucuggguuuccgc

SEQ ID NO: 2898154 - RNA, 19 nt, Artificial Sequence
  Description of Artificial Sequence: Synthetic oligonucleotide
ucuacaauggcuuuucggu

SEQ ID NO: 2898155 - RNA, 19 nt, Artificial Sequence
  Description of Artificial Sequence: Synthetic oligonucleotide
ggauuggugauucugaugg

SEQ ID NO: 2898156 - RNA, 19 nt, Artificial Sequence
  Description of Artificial Sequence: Synthetic oligonucleotide
auuuucuucgcugcgaagc

SEQ ID NO: 2898157 - RNA, 19 nt, Artificial Sequence
  Description of Artificial Sequence: Synthetic oligonucleotide
auugugagcaaucucagca

SEQ ID NO: 2898158 - RNA, 19 nt, Artificial Sequence
  Description of Artificial Sequence: Synthetic oligonucleotide
auaucggucugacuggugc

SEQ ID NO: 2898159 - RNA, 19 nt, Artificial Sequence
  Description of Artificial Sequence: Synthetic oligonucleotide
auaaaacaugcacaccagc

SEQ ID NO: 2898160 - RNA, 19 nt, Artificial Sequence
  Description of Artificial Sequence: Synthetic oligonucleotide
aacauugugagcaaucuca

SEQ ID NO: 2898161 - RNA, 19 nt, Artificial Sequence
  Description of Artificial Sequence: Synthetic oligonucleotide
accagaaacuuccggaagc

SEQ ID NO: 2898162 - RNA, 19 nt, Artificial Sequence
  Description of Artificial Sequence: Synthetic oligonucleotide
uuggaggaaacauugugag

SEQ ID NO: 2898163 - RNA, 19 nt, Artificial Sequence
  Description of Artificial Sequence: Synthetic oligonucleotide
agcacaguaagauuuguug

SEQ ID NO: 2898164 - RNA, 19 nt, Artificial Sequence
  Description of Artificial Sequence: Synthetic oligonucleotide
cuuggguuucaccagaggg

SEQ ID NO: 2898165 - RNA, 19 nt, Artificial Sequence
  Description of Artificial Sequence: Synthetic oligonucleotide
aaacauugugagcaaucuc

SEQ ID NO: 2898166 - RNA, 19 nt, Artificial Sequence
  Description of Artificial Sequence: Synthetic oligonucleotide
ugaaccagaaacuuccgga

SEQ ID NO: 2898167 - RNA, 19 nt, Artificial Sequence
  Description of Artificial Sequence: Synthetic oligonucleotide
ucuguugucaauaccucug

SEQ ID NO: 2898168 - RNA, 19 nt, Artificial Sequence
  Description of Artificial Sequence: Synthetic oligonucleotide
caucuacucauuuucuucg

SEQ ID NO: 2898169 - RNA, 19 nt, Artificial Sequence
  Description of Artificial Sequence: Synthetic oligonucleotide
uucguuuucuuguugcucc

SEQ ID NO: 2898170 - RNA, 19 nt, Artificial Sequence
  Description of Artificial Sequence: Synthetic oligonucleotide
uucuacaauggcuuuucgg

SEQ ID NO: 2898171 - RNA, 19 nt, Artificial Sequence
  Description of Artificial Sequence: Synthetic oligonucleotide
ugccggaugaacuucuugg

SEQ ID NO: 2898172 - RNA, 19 nt, Artificial Sequence
  Description of Artificial Sequence: Synthetic oligonucleotide
augcacaccagccaucuac

SEQ ID NO: 2898173 - RNA, 19 nt, Artificial Sequence
  Description of Artificial Sequence: Synthetic oligonucleotide
aacucuguugucaauaccu

SEQ ID NO: 2898174 - RNA, 19 nt, Artificial Sequence
  Description of Artificial Sequence: Synthetic oligonucleotide
uuuaaacauaaaacaugca

SEQ ID NO: 2898175 - RNA, 19 nt, Artificial Sequence
  Description of Artificial Sequence: Synthetic oligonucleotide
auuggugauucugauggcc

SEQ ID NO: 2898176 - RNA, 19 nt, Artificial Sequence
  Description of Artificial Sequence: Synthetic oligonucleotide
auaccucuggguuuccgcc

SEQ ID NO: 2898177 - RNA, 19 nt, Artificial Sequence
  Description of Artificial Sequence: Synthetic oligonucleotide
aguuucucuuaauuuugac

SEQ ID NO: 2898178 - RNA, 19 nt, Artificial Sequence
  Description of Artificial Sequence: Synthetic oligonucleotide
uuggguuucaccagagggc

SEQ ID NO: 2898179 - RNA, 19 nt, Artificial Sequence
  Description of Artificial Sequence: Synthetic oligonucleotide
gacauaucggucugacugg

SEQ ID NO: 2898180 - RNA, 19 nt, Artificial Sequence
  Description of Artificial Sequence: Synthetic oligonucleotide
agaaacuuccggaagccgc

SEQ ID NO: 2898181 - RNA, 19 nt, Artificial Sequence
  Description of Artificial Sequence: Synthetic oligonucleotide
uucaccagagggcggaggg

SEQ ID NO: 2898182 - RNA, 19 nt, Artificial Sequence
  Description of Artificial Sequence: Synthetic oligonucleotide
aaucucagcacaguaagau

SEQ ID NO: 2898183 - RNA, 19 nt, Artificial Sequence
  Description of Artificial Sequence: Synthetic oligonucleotide
ucucagcacaguaagauuu

SEQ ID NO: 2898184 - RNA, 19 nt, Artificial Sequence
  Description of Artificial Sequence: Synthetic oligonucleotide
acgaucuuggguuucacca

SEQ ID NO: 2898185 - RNA, 19 nt, Artificial Sequence
  Description of Artificial Sequence: Synthetic oligonucleotide
cuccuugacauugugaacc

SEQ ID NO: 2898186 - RNA, 19 nt, Artificial Sequence
  Description of Artificial Sequence: Synthetic oligonucleotide
aaccagaaacuuccggaag

SEQ ID NO: 2898187 - RNA, 19 nt, Artificial Sequence
  Description of Artificial Sequence: Synthetic oligonucleotide
aaacaugcacaccagccau

SEQ ID NO: 2898188 - RNA, 19 nt, Artificial Sequence
  Description of Artificial Sequence: Synthetic oligonucleotide
accaauguugggcaucagg

SEQ ID NO: 2898189 - RNA, 19 nt, Artificial Sequence
  Description of Artificial Sequence: Synthetic oligonucleotide
uuuucuucgcugcgaagcc

SEQ ID NO: 2898190 - RNA, 19 nt, Artificial Sequence
  Description of Artificial Sequence: Synthetic oligonucleotide
aaaagagauggcagccacc

SEQ ID NO: 2898191 - RNA, 19 nt, Artificial Sequence
  Description of Artificial Sequence: Synthetic oligonucleotide
uugucaauaccucuggguu

SEQ ID NO: 2898192 - RNA, 19 nt, Artificial Sequence
  Description of Artificial Sequence: Synthetic oligonucleotide
uacucauuuucuucgcugc

SEQ ID NO: 2898193 - RNA, 19 nt, Artificial Sequence
  Description of Artificial Sequence: Synthetic oligonucleotide
cauaaaacaugcacaccag

SEQ ID NO: 2898194 - RNA, 19 nt, Artificial Sequence
  Description of Artificial Sequence: Synthetic oligonucleotide
uguugucaauaccucuggg

SEQ ID NO: 2898195 - RNA, 19 nt, Artificial Sequence
  Description of Artificial Sequence: Synthetic oligonucleotide
auggcagccaccucguagg

SEQ ID NO: 2898196 - RNA, 19 nt, Artificial Sequence
  Description of Artificial Sequence: Synthetic oligonucleotide
ucuuguugcucccguaacc

SEQ ID NO: 2898197 - RNA, 19 nt, Artificial Sequence
  Description of Artificial Sequence: Synthetic oligonucleotide
aucuacucauuuucuucgc

SEQ ID NO: 2898198 - RNA, 19 nt, Artificial Sequence
  Description of Artificial Sequence: Synthetic oligonucleotide
uggcccuugaaucuucucc

SEQ ID NO: 2898199 - RNA, 19 nt, Artificial Sequence
  Description of Artificial Sequence: Synthetic oligonucleotide
uggguuucaccagagggcg

SEQ ID NO: 2898200 - RNA, 19 nt, Artificial Sequence
  Description of Artificial Sequence: Synthetic oligonucleotide
guuucucuuaauuuugaca

SEQ ID NO: 2898201 - RNA, 19 nt, Artificial Sequence
  Description of Artificial Sequence: Synthetic oligonucleotide
ucucuuaauuuugacauau

SEQ ID NO: 2898202 - RNA, 19 nt, Artificial Sequence
  Description of Artificial Sequence: Synthetic oligonucleotide
aguaagauuuguugcacau

SEQ ID NO: 2898203 - RNA, 19 nt, Artificial Sequence
  Description of Artificial Sequence: Synthetic oligonucleotide
uugacauugugaaccagaa

SEQ ID NO: 2898204 - RNA, 19 nt, Artificial Sequence
  Description of Artificial Sequence: Synthetic oligonucleotide
ugaaucuucuccgaacucu

SEQ ID NO: 2898205 - RNA, 19 nt, Artificial Sequence
  Description of Artificial Sequence: Synthetic oligonucleotide
gauggcagccaccucguag

SEQ ID NO: 2898206 - RNA, 19 nt, Artificial Sequence
  Description of Artificial Sequence: Synthetic oligonucleotide
ucuucuccgaacucuguug

SEQ ID NO: 2898207 - RNA, 19 nt, Artificial Sequence
  Description of Artificial Sequence: Synthetic oligonucleotide
ugugagcaaucucagcaca

SEQ ID NO: 2898208 - RNA, 19 nt, Artificial Sequence
  Description of Artificial Sequence: Synthetic oligonucleotide
ugcuucguuuucuuguugc

SEQ ID NO: 2898209 - RNA, 19 nt, Artificial Sequence
  Description of Artificial Sequence: Synthetic oligonucleotide
uccggaagccgcuaggcag

SEQ ID NO: 2898210 - RNA, 19 nt, Artificial Sequence
  Description of Artificial Sequence: Synthetic oligonucleotide
uuucuacaauggcuuuucg

SEQ ID NO: 2898211 - RNA, 19 nt, Artificial Sequence
  Description of Artificial Sequence: Synthetic oligonucleotide
auggcuuuucgguucuugg

SEQ ID NO: 2898212 - RNA, 19 nt, Artificial Sequence
  Description of Artificial Sequence: Synthetic oligonucleotide
uuggugauucugauggcca

SEQ ID NO: 2898213 - RNA, 19 nt, Artificial Sequence
  Description of Artificial Sequence: Synthetic oligonucleotide
agcuccuugacauugugaa

SEQ ID NO: 2898214 - RNA, 19 nt, Artificial Sequence
  Description of Artificial Sequence: Synthetic oligonucleotide
auuuugacauaucggucug

SEQ ID NO: 2898215 - RNA, 19 nt, Artificial Sequence
  Description of Artificial Sequence: Synthetic oligonucleotide
ugcugcucuuucuacaaug

SEQ ID NO: 2898216 - RNA, 19 nt, Artificial Sequence
  Description of Artificial Sequence: Synthetic oligonucleotide
acaucagcagcacuuccag

SEQ ID NO: 2898217 - RNA, 19 nt, Artificial Sequence
  Description of Artificial Sequence: Synthetic oligonucleotide
caugaugccgcaaaagaga

SEQ ID NO: 2898218 - RNA, 19 nt, Artificial Sequence
  Description of Artificial Sequence: Synthetic oligonucleotide
uacaauggcuuuucgguuc

SEQ ID NO: 2898219 - RNA, 19 nt, Artificial Sequence
  Description of Artificial Sequence: Synthetic oligonucleotide
ucugacuggugccggauga

SEQ ID NO: 2898220 - RNA, 19 nt, Artificial Sequence
  Description of Artificial Sequence: Synthetic oligonucleotide
augugcuucguuuucuugu

SEQ ID NO: 2898221 - RNA, 19 nt, Artificial Sequence
  Description of Artificial Sequence: Synthetic oligonucleotide
ucuuggguuucaccagagg

SEQ ID NO: 2898222 - RNA, 19 nt, Artificial Sequence
  Description of Artificial Sequence: Synthetic oligonucleotide
ggaggaaacauugugagca

SEQ ID NO: 2898223 - RNA, 19 nt, Artificial Sequence
  Description of Artificial Sequence: Synthetic oligonucleotide
cuacucauuuucuucgcug

SEQ ID NO: 2898224 - RNA, 19 nt, Artificial Sequence
  Description of Artificial Sequence: Synthetic oligonucleotide
acucauuuucuucgcugcg

SEQ ID NO: 2898225 - RNA, 19 nt, Artificial Sequence
  Description of Artificial Sequence: Synthetic oligonucleotide
gaagccgcuaggcagcaug

SEQ ID NO: 2898226 - RNA, 19 nt, Artificial Sequence
  Description of Artificial Sequence: Synthetic oligonucleotide
cuaggcagcaugugcuucg

SEQ ID NO: 2898227 - RNA, 19 nt, Artificial Sequence
  Description of Artificial Sequence: Synthetic oligonucleotide
agcacuuccagcuccuuga

SEQ ID NO: 2898228 - RNA, 19 nt, Artificial Sequence
  Description of Artificial Sequence: Synthetic oligonucleotide
gcaaucucagcacaguaag

SEQ ID NO: 2898229 - RNA, 19 nt, Artificial Sequence
  Description of Artificial Sequence: Synthetic oligonucleotide
ugcgaagccuggcauuggg

SEQ ID NO: 2898230 - RNA, 19 nt, Artificial Sequence
  Description of Artificial Sequence: Synthetic oligonucleotide
ucuacucauuuucuucgcu

SEQ ID NO: 2898231 - RNA, 19 nt, Artificial Sequence
  Description of Artificial Sequence: Synthetic oligonucleotide
ucauuuucuucgcugcgaa

SEQ ID NO: 2898232 - RNA, 19 nt, Artificial Sequence
  Description of Artificial Sequence: Synthetic oligonucleotide
caaaagagauggcagccac

SEQ ID NO: 2898233 - RNA, 19 nt, Artificial Sequence
  Description of Artificial Sequence: Synthetic oligonucleotide
uuugacauaucggucugac

SEQ ID NO: 2898234 - RNA, 19 nt, Artificial Sequence
  Description of Artificial Sequence: Synthetic oligonucleotide
ucugauggccagcugugcu

SEQ ID NO: 2898235 - RNA, 19 nt, Artificial Sequence
  Description of Artificial Sequence: Synthetic oligonucleotide
cucccguaaccaauguugg

SEQ ID NO: 2898236 - RNA, 19 nt, Artificial Sequence
  Description of Artificial Sequence: Synthetic oligonucleotide
uucuucgcugcgaagccug

SEQ ID NO: 2898237 - RNA, 19 nt, Artificial Sequence
  Description of Artificial Sequence: Synthetic oligonucleotide
cuugacauugugaaccaga

SEQ ID NO: 2898238 - RNA, 19 nt, Artificial Sequence
  Description of Artificial Sequence: Synthetic oligonucleotide
cuguugucaauaccucugg

SEQ ID NO: 2898239 - RNA, 19 nt, Artificial Sequence
  Description of Artificial Sequence: Synthetic oligonucleotide
uuguugcacaucagcagca

SEQ ID NO: 2898240 - RNA, 19 nt, Artificial Sequence
  Description of Artificial Sequence: Synthetic oligonucleotide
gauucugauggccagcugu

SEQ ID NO: 2898241 - RNA, 19 nt, Artificial Sequence
  Description of Artificial Sequence: Synthetic oligonucleotide
uugugagcaaucucagcac

SEQ ID NO: 2898242 - RNA, 19 nt, Artificial Sequence
  Description of Artificial Sequence: Synthetic oligonucleotide
uugcacaucagcagcacuu

SEQ ID NO: 2898243 - RNA, 19 nt, Artificial Sequence
  Description of Artificial Sequence: Synthetic oligonucleotide
gaacucuguugucaauacc

SEQ ID NO: 2898244 - RNA, 19 nt, Artificial Sequence
  Description of Artificial Sequence: Synthetic oligonucleotide
aauggcuuuucgguucuug

SEQ ID NO: 2898245 - RNA, 19 nt, Artificial Sequence
  Description of Artificial Sequence: Synthetic oligonucleotide
ugugcugcucuuucuacaa

SEQ ID NO: 2898246 - RNA, 19 nt, Artificial Sequence
  Description of Artificial Sequence: Synthetic oligonucleotide
agggcagccaugaugccgc

SEQ ID NO: 2898247 - RNA, 19 nt, Artificial Sequence
  Description of Artificial Sequence: Synthetic oligonucleotide
uggaggaaacauugugagc

SEQ ID NO: 2898248 - RNA, 19 nt, Artificial Sequence
  Description of Artificial Sequence: Synthetic oligonucleotide
acaccagccaucuacucau

SEQ ID NO: 2898249 - RNA, 19 nt, Artificial Sequence
  Description of Artificial Sequence: Synthetic oligonucleotide
gcacaguaagauuuguugc

SEQ ID NO: 2898250 - RNA, 19 nt, Artificial Sequence
  Description of Artificial Sequence: Synthetic oligonucleotide
ucuccgaacucuguuguca

SEQ ID NO: 2898251 - RNA, 19 nt, Artificial Sequence
  Description of Artificial Sequence: Synthetic oligonucleotide
gaaucuucuccgaacucug

SEQ ID NO: 2898252 - RNA, 19 nt, Artificial Sequence
  Description of Artificial Sequence: Synthetic oligonucleotide
gaaccagaaacuuccggaa

SEQ ID NO: 2898253 - RNA, 19 nt, Artificial Sequence
  Description of Artificial Sequence: Synthetic oligonucleotide
cuggguuuccgccaguuuc

SEQ ID NO: 2898254 - RNA, 19 nt, Artificial Sequence
  Description of Artificial Sequence: Synthetic oligonucleotide
uggugauucugauggccag

SEQ ID NO: 2898255 - RNA, 19 nt, Artificial Sequence
  Description of Artificial Sequence: Synthetic oligonucleotide
uucuuguugcucccguaac

SEQ ID NO: 2898256 - RNA, 19 nt, Artificial Sequence
  Description of Artificial Sequence: Synthetic oligonucleotide
gacgaucuuggguuucacc

SEQ ID NO: 2898257 - RNA, 19 nt, Artificial Sequence
  Description of Artificial Sequence: Synthetic oligonucleotide
aacuuccggaagccgcuag

SEQ ID NO: 2898258 - RNA, 19 nt, Artificial Sequence
  Description of Artificial Sequence: Synthetic oligonucleotide
cauugugagcaaucucagc

SEQ ID NO: 2898259 - RNA, 19 nt, Artificial Sequence
  Description of Artificial Sequence: Synthetic oligonucleotide
uucgcugcgaagccuggca

SEQ ID NO: 2898260 - RNA, 19 nt, Artificial Sequence
  Description of Artificial Sequence: Synthetic oligonucleotide
uaaccaauguugggcauca

SEQ ID NO: 2898261 - RNA, 19 nt, Artificial Sequence
  Description of Artificial Sequence: Synthetic oligonucleotide
uggguuuccgccaguuucu

SEQ ID NO: 2898262 - RNA, 19 nt, Artificial Sequence
  Description of Artificial Sequence: Synthetic oligonucleotide
ucccguaaccaauguuggg

SEQ ID NO: 2898263 - RNA, 19 nt, Artificial Sequence
  Description of Artificial Sequence: Synthetic oligonucleotide
ugggcaucaggaucuggcc

SEQ ID NO: 2898264 - RNA, 19 nt, Artificial Sequence
  Description of Artificial Sequence: Synthetic oligonucleotide
uguugcucccguaaccaau

SEQ ID NO: 2898265 - RNA, 19 nt, Artificial Sequence
  Description of Artificial Sequence: Synthetic oligonucleotide
ggcccuugaaucuucuccg

SEQ ID NO: 2898266 - RNA, 19 nt, Artificial Sequence
  Description of Artificial Sequence: Synthetic oligonucleotide
uaucggucugacuggugcc

SEQ ID NO: 2898267 - RNA, 19 nt, Artificial Sequence
  Description of Artificial Sequence: Synthetic oligonucleotide
ggcuuuucgguucuuggag

SEQ ID NO: 2898268 - RNA, 19 nt, Artificial Sequence
  Description of Artificial Sequence: Synthetic oligonucleotide
cuuucuacaauggcuuuuc

SEQ ID NO: 2898269 - RNA, 19 nt, Artificial Sequence
  Description of Artificial Sequence: Synthetic oligonucleotide
gauuggugauucugauggc

SEQ ID NO: 2898270 - RNA, 19 nt, Artificial Sequence
  Description of Artificial Sequence: Synthetic oligonucleotide
uucgguucuuggaggaaac

SEQ ID NO: 2898271 - RNA, 19 nt, Artificial Sequence
  Description of Artificial Sequence: Synthetic oligonucleotide
cagccaucuacucauuuuc

SEQ ID NO: 2898272 - RNA, 19 nt, Artificial Sequence
  Description of Artificial Sequence: Synthetic oligonucleotide
uggcuuuucgguucuugga

SEQ ID NO: 2898273 - RNA, 19 nt, Artificial Sequence
  Description of Artificial Sequence: Synthetic oligonucleotide
gaucuuggguuucaccaga

SEQ ID NO: 2898274 - RNA, 19 nt, Artificial Sequence
  Description of Artificial Sequence: Synthetic oligonucleotide
acuuccggaagccgcuagg

SEQ ID NO: 2898275 - RNA, 19 nt, Artificial Sequence
  Description of Artificial Sequence: Synthetic oligonucleotide
uucuuggaggaaacauugu

SEQ ID NO: 2898276 - RNA, 19 nt, Artificial Sequence
  Description of Artificial Sequence: Synthetic oligonucleotide
uugaaucuucuccgaacuc

SEQ ID NO: 2898277 - RNA, 19 nt, Artificial Sequence
  Description of Artificial Sequence: Synthetic oligonucleotide
uccuugacauugugaacca

SEQ ID NO: 2898278 - RNA, 19 nt, Artificial Sequence
  Description of Artificial Sequence: Synthetic oligonucleotide
aagauuuguugcacaucag

SEQ ID NO: 2898279 - RNA, 19 nt, Artificial Sequence
  Description of Artificial Sequence: Synthetic oligonucleotide
cucagcacaguaagauuug

SEQ ID NO: 2898280 - RNA, 19 nt, Artificial Sequence
  Description of Artificial Sequence: Synthetic oligonucleotide
acauugugaaccagaaacu

SEQ ID NO: 2898281 - RNA, 19 nt, Artificial Sequence
  Description of Artificial Sequence: Synthetic oligonucleotide
ugccgcaaaagagauggca

SEQ ID NO: 2898282 - RNA, 19 nt, Artificial Sequence
  Description of Artificial Sequence: Synthetic oligonucleotide
aacaugcacaccagccauc

SEQ ID NO: 2898283 - RNA, 19 nt, Artificial Sequence
  Description of Artificial Sequence: Synthetic oligonucleotide
ugucaauaccucuggguuu

SEQ ID NO: 2898284 - RNA, 19 nt, Artificial Sequence
  Description of Artificial Sequence: Synthetic oligonucleotide
gaaacauugugagcaaucu

SEQ ID NO: 2898285 - RNA, 19 nt, Artificial Sequence
  Description of Artificial Sequence: Synthetic oligonucleotide
ugacauugugaaccagaaa

SEQ ID NO: 2898286 - RNA, 19 nt, Artificial Sequence
  Description of Artificial Sequence: Synthetic oligonucleotide
gcuuuucgguucuuggagg

SEQ ID NO: 2898287 - RNA, 19 nt, Artificial Sequence
  Description of Artificial Sequence: Synthetic oligonucleotide
acauugugagcaaucucag

SEQ ID NO: 2898288 - RNA, 19 nt, Artificial Sequence
  Description of Artificial Sequence: Synthetic oligonucleotide
acaauggcuuuucgguucu

SEQ ID NO: 2898289 - RNA, 19 nt, Artificial Sequence
  Description of Artificial Sequence: Synthetic oligonucleotide
ugagcaaucucagcacagu

SEQ ID NO: 2898290 - RNA, 19 nt, Artificial Sequence
  Description of Artificial Sequence: Synthetic oligonucleotide
acucuguugucaauaccuc

SEQ ID NO: 2898291 - RNA, 19 nt, Artificial Sequence
  Description of Artificial Sequence: Synthetic oligonucleotide
guugucaauaccucugggu

SEQ ID NO: 2898292 - RNA, 19 nt, Artificial Sequence
  Description of Artificial Sequence: Synthetic oligonucleotide
ucuucgcugcgaagccugg

SEQ ID NO: 2898293 - RNA, 19 nt, Artificial Sequence
  Description of Artificial Sequence: Synthetic oligonucleotide
uuucgguucuuggaggaaa

SEQ ID NO: 2898294 - RNA, 19 nt, Artificial Sequence
  Description of Artificial Sequence: Synthetic oligonucleotide
ccaugaugccgcaaaagag

SEQ ID NO: 2898295 - RNA, 19 nt, Artificial Sequence
  Description of Artificial Sequence: Synthetic oligonucleotide
ugugcuucguuuucuuguu

SEQ ID NO: 2898296 - RNA, 19 nt, Artificial Sequence
  Description of Artificial Sequence: Synthetic oligonucleotide
auguugggcaucaggaucu

SEQ ID NO: 2898297 - RNA, 19 nt, Artificial Sequence
  Description of Artificial Sequence: Synthetic oligonucleotide
ucguuuucuuguugcuccc

SEQ ID NO: 2898298 - RNA, 19 nt, Artificial Sequence
  Description of Artificial Sequence: Synthetic oligonucleotide
caugugcuucguuuucuug

SEQ ID NO: 2898299 - RNA, 19 nt, Artificial Sequence
  Description of Artificial Sequence: Synthetic oligonucleotide
ugaugccgcaaaagagaug

SEQ ID NO: 2898300 - RNA, 19 nt, Artificial Sequence
  Description of Artificial Sequence: Synthetic oligonucleotide
uugacauaucggucugacu

SEQ ID NO: 2898301 - RNA, 19 nt, Artificial Sequence
  Description of Artificial Sequence: Synthetic oligonucleotide
uucucuuaauuuugacaua

SEQ ID NO: 2898302 - RNA, 19 nt, Artificial Sequence
  Description of Artificial Sequence: Synthetic oligonucleotide
cugcucuuucuacaauggc

SEQ ID NO: 2898303 - RNA, 19 nt, Artificial Sequence
  Description of Artificial Sequence: Synthetic oligonucleotide
uuucaccagagggcggagg

SEQ ID NO: 2898304 - RNA, 19 nt, Artificial Sequence
  Description of Artificial Sequence: Synthetic oligonucleotide
cuuuucgguucuuggagga

SEQ ID NO: 2898305 - RNA, 19 nt, Artificial Sequence
  Description of Artificial Sequence: Synthetic oligonucleotide
cauuuucuucgcugcgaag

SEQ ID NO: 2898306 - RNA, 19 nt, Artificial Sequence
  Description of Artificial Sequence: Synthetic oligonucleotide
cggaugaacuucuuggucc

SEQ ID NO: 2898307 - RNA, 19 nt, Artificial Sequence
  Description of Artificial Sequence: Synthetic oligonucleotide
ugggauuggugauucugau

SEQ ID NO: 2898308 - RNA, 19 nt, Artificial Sequence
  Description of Artificial Sequence: Synthetic oligonucleotide
cuugaaucuucuccgaacu

SEQ ID NO: 2898309 - RNA, 19 nt, Artificial Sequence
  Description of Artificial Sequence: Synthetic oligonucleotide
cucuuaauuuugacauauc

SEQ ID NO: 2898310 - RNA, 19 nt, Artificial Sequence
  Description of Artificial Sequence: Synthetic oligonucleotide
gucaauaccucuggguuuc

SEQ ID NO: 2898311 - RNA, 19 nt, Artificial Sequence
  Description of Artificial Sequence: Synthetic oligonucleotide
gcucccguaaccaauguug

SEQ ID NO: 2898312 - RNA, 19 nt, Artificial Sequence
  Description of Artificial Sequence: Synthetic oligonucleotide
uuccggaagccgcuaggca

SEQ ID NO: 2898313 - RNA, 19 nt, Artificial Sequence
  Description of Artificial Sequence: Synthetic oligonucleotide
aucggucugacuggugccg

SEQ ID NO: 2898314 - RNA, 19 nt, Artificial Sequence
  Description of Artificial Sequence: Synthetic oligonucleotide
uuuucuuguugcucccgua

SEQ ID NO: 2898315 - RNA, 19 nt, Artificial Sequence
  Description of Artificial Sequence: Synthetic oligonucleotide
ucagcagcacuuccagcuc

SEQ ID NO: 2898316 - RNA, 19 nt, Artificial Sequence
  Description of Artificial Sequence: Synthetic oligonucleotide
ccaauguugggcaucagga

SEQ ID NO: 2898317 - RNA, 19 nt, Artificial Sequence
  Description of Artificial Sequence: Synthetic oligonucleotide
ugauucugauggccagcug

SEQ ID NO: 2898318 - RNA, 19 nt, Artificial Sequence
  Description of Artificial Sequence: Synthetic oligonucleotide
guugcucccguaaccaaug

SEQ ID NO: 2898319 - RNA, 19 nt, Artificial Sequence
  Description of Artificial Sequence: Synthetic oligonucleotide
augaacuucuugguccucu

SEQ ID NO: 2898320 - RNA, 19 nt, Artificial Sequence
  Description of Artificial Sequence: Synthetic oligonucleotide
ucuuucuacaauggcuuuu

SEQ ID NO: 2898321 - RNA, 19 nt, Artificial Sequence
  Description of Artificial Sequence: Synthetic oligonucleotide
uuuugacauaucggucuga

SEQ ID NO: 2898322 - RNA, 19 nt, Artificial Sequence
  Description of Artificial Sequence: Synthetic oligonucleotide
uuuugacgaucuuggguuu

SEQ ID NO: 2898323 - RNA, 19 nt, Artificial Sequence
  Description of Artificial Sequence: Synthetic oligonucleotide
auucugauggccagcugug

SEQ ID NO: 2898324 - RNA, 19 nt, Artificial Sequence
  Description of Artificial Sequence: Synthetic oligonucleotide
acuggugccggaugaacuu

SEQ ID NO: 2898325 - RNA, 19 nt, Artificial Sequence
  Description of Artificial Sequence: Synthetic oligonucleotide
cuuguugcucccguaacca

SEQ ID NO: 2898326 - RNA, 19 nt, Artificial Sequence
  Description of Artificial Sequence: Synthetic oligonucleotide
cacaucagcagcacuucca

SEQ ID NO: 2898327 - RNA, 19 nt, Artificial Sequence
  Description of Artificial Sequence: Synthetic oligonucleotide
aucaggaucuggcccuuga

SEQ ID NO: 2898328 - RNA, 19 nt, Artificial Sequence
  Description of Artificial Sequence: Synthetic oligonucleotide
aucucagcacaguaagauu

SEQ ID NO: 2898329 - RNA, 19 nt, Artificial Sequence
  Description of Artificial Sequence: Synthetic oligonucleotide
cagaaacuuccggaagccg

SEQ ID NO: 2898330 - RNA, 19 nt, Artificial Sequence
  Description of Artificial Sequence: Synthetic oligonucleotide
acaugcacaccagccaucu

SEQ ID NO: 2898331 - RNA, 19 nt, Artificial Sequence
  Description of Artificial Sequence: Synthetic oligonucleotide
guaagauuuguugcacauc

SEQ ID NO: 2898332 - RNA, 19 nt, Artificial Sequence
  Description of Artificial Sequence: Synthetic oligonucleotide
cuucguuuucuuguugcuc

SEQ ID NO: 2898333 - RNA, 19 nt, Artificial Sequence
  Description of Artificial Sequence: Synthetic oligonucleotide
cuuccggaagccgcuaggc

SEQ ID NO: 2898334 - RNA, 19 nt, Artificial Sequence
  Description of Artificial Sequence: Synthetic oligonucleotide
aucuucuccgaacucuguu

SEQ ID NO: 2898335 - RNA, 19 nt, Artificial Sequence
  Description of Artificial Sequence: Synthetic oligonucleotide
caucagcagcacuuccagc

SEQ ID NO: 2898336 - RNA, 19 nt, Artificial Sequence
  Description of Artificial Sequence: Synthetic oligonucleotide
ccaucuacucauuuucuuc

SEQ ID NO: 2898337 - RNA, 19 nt, Artificial Sequence
  Description of Artificial Sequence: Synthetic oligonucleotide
gcugcucuuucuacaaugg

SEQ ID NO: 2898338 - RNA, 19 nt, Artificial Sequence
  Description of Artificial Sequence: Synthetic oligonucleotide
gugagcaaucucagcacag

SEQ ID NO: 2898339 - RNA, 19 nt, Artificial Sequence
  Description of Artificial Sequence: Synthetic oligonucleotide
uugacgaucuuggguuuca

SEQ ID NO: 2898340 - RNA, 19 nt, Artificial Sequence
  Description of Artificial Sequence: Synthetic oligonucleotide
accucuggguuuccgccag

SEQ ID NO: 2898341 - RNA, 19 nt, Artificial Sequence
  Description of Artificial Sequence: Synthetic oligonucleotide
agccaugaugccgcaaaag

SEQ ID NO: 2898342 - RNA, 19 nt, Artificial Sequence
  Description of Artificial Sequence: Synthetic oligonucleotide
gccaugaugccgcaaaaga

SEQ ID NO: 2898343 - RNA, 19 nt, Artificial Sequence
  Description of Artificial Sequence: Synthetic oligonucleotide
uggugccggaugaacuucu

SEQ ID NO: 2898344 - RNA, 19 nt, Artificial Sequence
  Description of Artificial Sequence: Synthetic oligonucleotide
uggccagcugugcugcucu

SEQ ID NO: 2898345 - RNA, 19 nt, Artificial Sequence
  Description of Artificial Sequence: Synthetic oligonucleotide
ccuugaaucuucuccgaac

SEQ ID NO: 2898346 - RNA, 19 nt, Artificial Sequence
  Description of Artificial Sequence: Synthetic oligonucleotide
aaucuucuccgaacucugu

SEQ ID NO: 2898347 - RNA, 19 nt, Artificial Sequence
  Description of Artificial Sequence: Synthetic oligonucleotide
caguuucucuuaauuuuga

SEQ ID NO: 2898348 - RNA, 19 nt, Artificial Sequence
  Description of Artificial Sequence: Synthetic oligonucleotide
guaaccaauguugggcauc

SEQ ID NO: 2898349 - RNA, 19 nt, Artificial Sequence
  Description of Artificial Sequence: Synthetic oligonucleotide
caguaagauuuguugcaca

SEQ ID NO: 2898350 - RNA, 19 nt, Artificial Sequence
  Description of Artificial Sequence: Synthetic oligonucleotide
cagcagcacuuccagcucc

SEQ ID NO: 2898351 - RNA, 19 nt, Artificial Sequence
  Description of Artificial Sequence: Synthetic oligonucleotide
ucuggcccuugaaucuucu

SEQ ID NO: 2898352 - RNA, 19 nt, Artificial Sequence
  Description of Artificial Sequence: Synthetic oligonucleotide
cccguaaccaauguugggc

SEQ ID NO: 2898353 - RNA, 19 nt, Artificial Sequence
  Description of Artificial Sequence: Synthetic oligonucleotide
augaugccgcaaaagagau

SEQ ID NO: 2898354 - RNA, 19 nt, Artificial Sequence
  Description of Artificial Sequence: Synthetic oligonucleotide
cacaccagccaucuacuca

SEQ ID NO: 2898355 - RNA, 19 nt, Artificial Sequence
  Description of Artificial Sequence: Synthetic oligonucleotide
ugcacaucagcagcacuuc

SEQ ID NO: 2898356 - RNA, 19 nt, Artificial Sequence
  Description of Artificial Sequence: Synthetic oligonucleotide
uuugacgaucuuggguuuc

SEQ ID NO: 2898357 - RNA, 19 nt, Artificial Sequence
  Description of Artificial Sequence: Synthetic oligonucleotide
ggaaacauugugagcaauc

SEQ ID NO: 2898358 - RNA, 19 nt, Artificial Sequence
  Description of Artificial Sequence: Synthetic oligonucleotide
gccgcaaaagagauggcag

SEQ ID NO: 2898359 - RNA, 19 nt, Artificial Sequence
  Description of Artificial Sequence: Synthetic oligonucleotide
cggagggcagccaugaugc

SEQ ID NO: 2898360 - RNA, 19 nt, Artificial Sequence
  Description of Artificial Sequence: Synthetic oligonucleotide
gaggaaacauugugagcaa

SEQ ID NO: 2898361 - RNA, 19 nt, Artificial Sequence
  Description of Artificial Sequence: Synthetic oligonucleotide
gagcaaucucagcacagua

SEQ ID NO: 2898362 - RNA, 19 nt, Artificial Sequence
  Description of Artificial Sequence: Synthetic oligonucleotide
uucugauggccagcugugc

SEQ ID NO: 2898363 - RNA, 19 nt, Artificial Sequence
  Description of Artificial Sequence: Synthetic oligonucleotide
uuucuucgcugcgaagccu

SEQ ID NO: 2898364 - RNA, 19 nt, Artificial Sequence
  Description of Artificial Sequence: Synthetic oligonucleotide
uuguugcucccguaaccaa

SEQ ID NO: 2898365 - RNA, 19 nt, Artificial Sequence
  Description of Artificial Sequence: Synthetic oligonucleotide
ugaacuucuugguccucuu

SEQ ID NO: 2898366 - RNA, 19 nt, Artificial Sequence
  Description of Artificial Sequence: Synthetic oligonucleotide
gggauuggugauucugaug

SEQ ID NO: 2898367 - RNA, 19 nt, Artificial Sequence
  Description of Artificial Sequence: Synthetic oligonucleotide
ucggucugacuggugccgg

SEQ ID NO: 2898368 - RNA, 19 nt, Artificial Sequence
  Description of Artificial Sequence: Synthetic oligonucleotide
agcaugugcuucguuuucu

SEQ ID NO: 2898369 - RNA, 19 nt, Artificial Sequence
  Description of Artificial Sequence: Synthetic oligonucleotide
caaucucagcacaguaaga

SEQ ID NO: 2898370 - RNA, 19 nt, Artificial Sequence
  Description of Artificial Sequence: Synthetic oligonucleotide
cauaucggucugacuggug

SEQ ID NO: 2898371 - RNA, 19 nt, Artificial Sequence
  Description of Artificial Sequence: Synthetic oligonucleotide
ugacuggugccggaugaac

SEQ ID NO: 2898372 - RNA, 19 nt, Artificial Sequence
  Description of Artificial Sequence: Synthetic oligonucleotide
caauaccucuggguuuccg

SEQ ID NO: 2898373 - RNA, 19 nt, Artificial Sequence
  Description of Artificial Sequence: Synthetic oligonucleotide
acauaucggucugacuggu

SEQ ID NO: 2898374 - RNA, 19 nt, Artificial Sequence
  Description of Artificial Sequence: Synthetic oligonucleotide
agcugugcugcucuuucua

SEQ ID NO: 2898375 - RNA, 19 nt, Artificial Sequence
  Description of Artificial Sequence: Synthetic oligonucleotide
ccgcaaaagagauggcagc

SEQ ID NO: 2898376 - RNA, 19 nt, Artificial Sequence
  Description of Artificial Sequence: Synthetic oligonucleotide
uugcucccguaaccaaugu

SEQ ID NO: 2898377 - RNA, 19 nt, Artificial Sequence
  Description of Artificial Sequence: Synthetic oligonucleotide
uuuucgguucuuggaggaa

SEQ ID NO: 2898378 - RNA, 19 nt, Artificial Sequence
  Description of Artificial Sequence: Synthetic oligonucleotide
gggcaucaggaucuggccc

SEQ ID NO: 2898379 - RNA, 19 nt, Artificial Sequence
  Description of Artificial Sequence: Synthetic oligonucleotide
cucauuuucuucgcugcga

SEQ ID NO: 2898380 - RNA, 19 nt, Artificial Sequence
  Description of Artificial Sequence: Synthetic oligonucleotide
gaaacuuccggaagccgcu

SEQ ID NO: 2898381 - RNA, 19 nt, Artificial Sequence
  Description of Artificial Sequence: Synthetic oligonucleotide
ucuggguuuccgccaguuu

SEQ ID NO: 2898382 - RNA, 19 nt, Artificial Sequence
  Description of Artificial Sequence: Synthetic oligonucleotide
aucuuggguuucaccagag

SEQ ID NO: 2898383 - RNA, 19 nt, Artificial Sequence
  Description of Artificial Sequence: Synthetic oligonucleotide
gugccggaugaacuucuug

SEQ ID NO: 2898384 - RNA, 19 nt, Artificial Sequence
  Description of Artificial Sequence: Synthetic oligonucleotide
ugcucccguaaccaauguu

SEQ ID NO: 2898385 - RNA, 19 nt, Artificial Sequence
  Description of Artificial Sequence: Synthetic oligonucleotide
uucuccgaacucuguuguc

SEQ ID NO: 2898386 - RNA, 19 nt, Artificial Sequence
  Description of Artificial Sequence: Synthetic oligonucleotide
ucgguucuuggaggaaaca

SEQ ID NO: 2898387 - RNA, 19 nt, Artificial Sequence
  Description of Artificial Sequence: Synthetic oligonucleotide
cugugcugcucuuucuaca

SEQ ID NO: 2898388 - RNA, 19 nt, Artificial Sequence
  Description of Artificial Sequence: Synthetic oligonucleotide
gccgcuaggcagcaugugc

SEQ ID NO: 2898389 - RNA, 19 nt, Artificial Sequence
  Description of Artificial Sequence: Synthetic oligonucleotide
ccuggcauugggauuggug

SEQ ID NO: 2898390 - RNA, 19 nt, Artificial Sequence
  Description of Artificial Sequence: Synthetic oligonucleotide
uuuccgccaguuucucuua

SEQ ID NO: 2898391 - RNA, 19 nt, Artificial Sequence
  Description of Artificial Sequence: Synthetic oligonucleotide
guuuccgccaguuucucuu

SEQ ID NO: 2898392 - RNA, 19 nt, Artificial Sequence
  Description of Artificial Sequence: Synthetic oligonucleotide
gugcuucguuuucuuguug

SEQ ID NO: 2898393 - RNA, 19 nt, Artificial Sequence
  Description of Artificial Sequence: Synthetic oligonucleotide
gucugacuggugccggaug

SEQ ID NO: 2898394 - RNA, 19 nt, Artificial Sequence
  Description of Artificial Sequence: Synthetic oligonucleotide
guuuucuuguugcucccgu

SEQ ID NO: 2898395 - RNA, 19 nt, Artificial Sequence
  Description of Artificial Sequence: Synthetic oligonucleotide
ucgcugcgaagccuggcau

SEQ ID NO: 2898396 - RNA, 19 nt, Artificial Sequence
  Description of Artificial Sequence: Synthetic oligonucleotide
aggaaacauugugagcaau

SEQ ID NO: 2898397 - RNA, 19 nt, Artificial Sequence
  Description of Artificial Sequence: Synthetic oligonucleotide
aagccgcuaggcagcaugu

SEQ ID NO: 2898398 - RNA, 19 nt, Artificial Sequence
  Description of Artificial Sequence: Synthetic oligonucleotide
agccaucuacucauuuucu

SEQ ID NO: 2898399 - RNA, 19 nt, Artificial Sequence
  Description of Artificial Sequence: Synthetic oligonucleotide
gcggagggcagccaugaug

SEQ ID NO: 2898400 - RNA, 19 nt, Artificial Sequence
  Description of Artificial Sequence: Synthetic oligonucleotide
cagcaugugcuucguuuuc

SEQ ID NO: 2898401 - RNA, 19 nt, Artificial Sequence
  Description of Artificial Sequence: Synthetic oligonucleotide
accagccaucuacucauuu

SEQ ID NO: 2898402 - RNA, 19 nt, Artificial Sequence
  Description of Artificial Sequence: Synthetic oligonucleotide
uuccgccaguuucucuuaa

SEQ ID NO: 2898403 - RNA, 19 nt, Artificial Sequence
  Description of Artificial Sequence: Synthetic oligonucleotide
cucuguugucaauaccucu

SEQ ID NO: 2898404 - RNA, 19 nt, Artificial Sequence
  Description of Artificial Sequence: Synthetic oligonucleotide
aaccaauguugggcaucag

SEQ ID NO: 2898405 - RNA, 19 nt, Artificial Sequence
  Description of Artificial Sequence: Synthetic oligonucleotide
ggugauucugauggccagc

SEQ ID NO: 2898406 - RNA, 19 nt, Artificial Sequence
  Description of Artificial Sequence: Synthetic oligonucleotide
ucaauaccucuggguuucc

SEQ ID NO: 2898407 - RNA, 19 nt, Artificial Sequence
  Description of Artificial Sequence: Synthetic oligonucleotide
uccgaacucuguugucaau

SEQ ID NO: 2898408 - RNA, 19 nt, Artificial Sequence
  Description of Artificial Sequence: Synthetic oligonucleotide
uguugggcaucaggaucug

SEQ ID NO: 2898409 - RNA, 19 nt, Artificial Sequence
  Description of Artificial Sequence: Synthetic oligonucleotide
uccgccaguuucucuuaau

SEQ ID NO: 2898410 - RNA, 19 nt, Artificial Sequence
  Description of Artificial Sequence: Synthetic oligonucleotide
cuucuccgaacucuguugu

SEQ ID NO: 2898411 - RNA, 19 nt, Artificial Sequence
  Description of Artificial Sequence: Synthetic oligonucleotide
aucuggcccuugaaucuuc

SEQ ID NO: 2898412 - RNA, 19 nt, Artificial Sequence
  Description of Artificial Sequence: Synthetic oligonucleotide
gcugugcugcucuuucuac

SEQ ID NO: 2898413 - RNA, 19 nt, Artificial Sequence
  Description of Artificial Sequence: Synthetic oligonucleotide
cgaacucuguugucaauac

SEQ ID NO: 2898414 - RNA, 19 nt, Artificial Sequence
  Description of Artificial Sequence: Synthetic oligonucleotide
ggaucuggcccuugaaucu

SEQ ID NO: 2898415 - RNA, 19 nt, Artificial Sequence
  Description of Artificial Sequence: Synthetic oligonucleotide
augccgcaaaagagauggc

SEQ ID NO: 2898416 - RNA, 19 nt, Artificial Sequence
  Description of Artificial Sequence: Synthetic oligonucleotide
ugacgaucuuggguuucac

SEQ ID NO: 2898417 - RNA, 19 nt, Artificial Sequence
  Description of Artificial Sequence: Synthetic oligonucleotide
gcugcgaagccuggcauug

SEQ ID NO: 2898418 - RNA, 19 nt, Artificial Sequence
  Description of Artificial Sequence: Synthetic oligonucleotide
gcacaucagcagcacuucc

SEQ ID NO: 2898419 - RNA, 19 nt, Artificial Sequence
  Description of Artificial Sequence: Synthetic oligonucleotide
cgcaaaagagauggcagcc

SEQ ID NO: 2898420 - RNA, 19 nt, Artificial Sequence
  Description of Artificial Sequence: Synthetic oligonucleotide
gguuucaccagagggcgga

SEQ ID NO: 2898421 - RNA, 19 nt, Artificial Sequence
  Description of Artificial Sequence: Synthetic oligonucleotide
gcagccaugaugccgcaaa

SEQ ID NO: 2898422 - RNA, 19 nt, Artificial Sequence
  Description of Artificial Sequence: Synthetic oligonucleotide
cgaucuuggguuucaccag

SEQ ID NO: 2898423 - RNA, 19 nt, Artificial Sequence
  Description of Artificial Sequence: Synthetic oligonucleotide
aaacuuccggaagccgcua

SEQ ID NO: 2898424 - RNA, 19 nt, Artificial Sequence
  Description of Artificial Sequence: Synthetic oligonucleotide
cuccgaacucuguugucaa

SEQ ID NO: 2898425 - RNA, 19 nt, Artificial Sequence
  Description of Artificial Sequence: Synthetic oligonucleotide
gacuggugccggaugaacu

SEQ ID NO: 2898426 - RNA, 19 nt, Artificial Sequence
  Description of Artificial Sequence: Synthetic oligonucleotide
cauugugaaccagaaacuu

SEQ ID NO: 2898427 - RNA, 19 nt, Artificial Sequence
  Description of Artificial Sequence: Synthetic oligonucleotide
cuucgcugcgaagccuggc

SEQ ID NO: 2898428 - RNA, 19 nt, Artificial Sequence
  Description of Artificial Sequence: Synthetic oligonucleotide
guuucaccagagggcggag

SEQ ID NO: 2898429 - RNA, 19 nt, Artificial Sequence
  Description of Artificial Sequence: Synthetic oligonucleotide
caauguugggcaucaggau

SEQ ID NO: 2898430 - RNA, 19 nt, Artificial Sequence
  Description of Artificial Sequence: Synthetic oligonucleotide
ggaugaacuucuugguccu

SEQ ID NO: 2898431 - RNA, 19 nt, Artificial Sequence
  Description of Artificial Sequence: Synthetic oligonucleotide
gcuccuugacauugugaac

SEQ ID NO: 2898432 - RNA, 19 nt, Artificial Sequence
  Description of Artificial Sequence: Synthetic oligonucleotide
gcaaaagagauggcagcca

SEQ ID NO: 2898433 - RNA, 19 nt, Artificial Sequence
  Description of Artificial Sequence: Synthetic oligonucleotide
cuacaauggcuuuucgguu

SEQ ID NO: 2898434 - RNA, 19 nt, Artificial Sequence
  Description of Artificial Sequence: Synthetic oligonucleotide
cagagggcggagggcagcc

SEQ ID NO: 2898435 - RNA, 19 nt, Artificial Sequence
  Description of Artificial Sequence: Synthetic oligonucleotide
gaagccuggcauugggauu

SEQ ID NO: 2898436 - RNA, 19 nt, Artificial Sequence
  Description of Artificial Sequence: Synthetic oligonucleotide
cuggugccggaugaacuuc

SEQ ID NO: 2898437 - RNA, 19 nt, Artificial Sequence
  Description of Artificial Sequence: Synthetic oligonucleotide
gcauugggauuggugauuc

SEQ ID NO: 2898438 - RNA, 19 nt, Artificial Sequence
  Description of Artificial Sequence: Synthetic oligonucleotide
caccagagggcggagggca

SEQ ID NO: 2898439 - RNA, 19 nt, Artificial Sequence
  Description of Artificial Sequence: Synthetic oligonucleotide
ccguaaccaauguugggca

SEQ ID NO: 2898440 - RNA, 19 nt, Artificial Sequence
  Description of Artificial Sequence: Synthetic oligonucleotide
cugcgaagccuggcauugg

SEQ ID NO: 2898441 - RNA, 19 nt, Artificial Sequence
  Description of Artificial Sequence: Synthetic oligonucleotide
cacuuccagcuccuugaca

SEQ ID NO: 2898442 - RNA, 19 nt, Artificial Sequence
  Description of Artificial Sequence: Synthetic oligonucleotide
ggcagcaugugcuucguuu

SEQ ID NO: 2898443 - RNA, 19 nt, Artificial Sequence
  Description of Artificial Sequence: Synthetic oligonucleotide
accagagggcggagggcag

SEQ ID NO: 2898444 - RNA, 19 nt, Artificial Sequence
  Description of Artificial Sequence: Synthetic oligonucleotide
agccgcuaggcagcaugug

SEQ ID NO: 2898445 - RNA, 19 nt, Artificial Sequence
  Description of Artificial Sequence: Synthetic oligonucleotide
gcacuuccagcuccuugac

SEQ ID NO: 2898446 - RNA, 19 nt, Artificial Sequence
  Description of Artificial Sequence: Synthetic oligonucleotide
gguucuuggaggaaacauu

SEQ ID NO: 2898447 - RNA, 19 nt, Artificial Sequence
  Description of Artificial Sequence: Synthetic oligonucleotide
ggguuucaccagagggcgg

SEQ ID NO: 2898448 - RNA, 19 nt, Artificial Sequence
  Description of Artificial Sequence: Synthetic oligonucleotide
gcuucguuuucuuguugcu

SEQ ID NO: 2898449 - RNA, 19 nt, Artificial Sequence
  Description of Artificial Sequence: Synthetic oligonucleotide
ggagggcagccaugaugcc

SEQ ID NO: 2898450 - RNA, 19 nt, Artificial Sequence
  Description of Artificial Sequence: Synthetic oligonucleotide
cguuuucuuguugcucccg

SEQ ID NO: 2898451 - RNA, 19 nt, Artificial Sequence
  Description of Artificial Sequence: Synthetic oligonucleotide
agauggcagccaccucgua

SEQ ID NO: 2898452 - RNA, 19 nt, Artificial Sequence
  Description of Artificial Sequence: Synthetic oligonucleotide
gcuaggcagcaugugcuuc

SEQ ID NO: 2898453 - RNA, 19 nt, Artificial Sequence
  Description of Artificial Sequence: Synthetic oligonucleotide
caucaggaucuggcccuug

SEQ ID NO: 2898454 - RNA, 19 nt, Artificial Sequence
  Description of Artificial Sequence: Synthetic oligonucleotide
gccggaugaacuucuuggu

SEQ ID NO: 2898455 - RNA, 19 nt, Artificial Sequence
  Description of Artificial Sequence: Synthetic oligonucleotide
ccuugacauugugaaccag

SEQ ID NO: 2898456 - RNA, 19 nt, Artificial Sequence
  Description of Artificial Sequence: Synthetic oligonucleotide
gaucuggcccuugaaucuu

SEQ ID NO: 2898457 - RNA, 19 nt, Artificial Sequence
  Description of Artificial Sequence: Synthetic oligonucleotide
cagccaugaugccgcaaaa

SEQ ID NO: 2898458 - RNA, 19 nt, Artificial Sequence
  Description of Artificial Sequence: Synthetic oligonucleotide
gcacaccagccaucuacuc

SEQ ID NO: 2898459 - RNA, 19 nt, Artificial Sequence
  Description of Artificial Sequence: Synthetic oligonucleotide
gcccuugaaucuucuccga

SEQ ID NO: 2898460 - RNA, 19 nt, Artificial Sequence
  Description of Artificial Sequence: Synthetic oligonucleotide
gagggcggagggcagccau

SEQ ID NO: 2898461 - RNA, 19 nt, Artificial Sequence
  Description of Artificial Sequence: Synthetic oligonucleotide
agggcggagggcagccaug

SEQ ID NO: 2898462 - RNA, 19 nt, Artificial Sequence
  Description of Artificial Sequence: Synthetic oligonucleotide
gccaucuacucauuuucuu

SEQ ID NO: 2898463 - RNA, 19 nt, Artificial Sequence
  Description of Artificial Sequence: Synthetic oligonucleotide
cauugggauuggugauucu

SEQ ID NO: 2898464 - RNA, 19 nt, Artificial Sequence
  Description of Artificial Sequence: Synthetic oligonucleotide
aggcagcaugugcuucguu

SEQ ID NO: 2898465 - RNA, 19 nt, Artificial Sequence
  Description of Artificial Sequence: Synthetic oligonucleotide
cugacuggugccggaugaa

SEQ ID NO: 2898466 - RNA, 19 nt, Artificial Sequence
  Description of Artificial Sequence: Synthetic oligonucleotide
gauggccagcugugcugcu

SEQ ID NO: 2898467 - RNA, 19 nt, Artificial Sequence
  Description of Artificial Sequence: Synthetic oligonucleotide
ccgaacucuguugucaaua

SEQ ID NO: 2898468 - RNA, 19 nt, Artificial Sequence
  Description of Artificial Sequence: Synthetic oligonucleotide
agagggcggagggcagcca

SEQ ID NO: 2898469 - RNA, 19 nt, Artificial Sequence
  Description of Artificial Sequence: Synthetic oligonucleotide
gguuuccgccaguuucucu

SEQ ID NO: 2898470 - RNA, 19 nt, Artificial Sequence
  Description of Artificial Sequence: Synthetic oligonucleotide
cccuugaaucuucuccgaa

SEQ ID NO: 2898471 - RNA, 19 nt, Artificial Sequence
  Description of Artificial Sequence: Synthetic oligonucleotide
gugcugcucuuucuacaau

SEQ ID NO: 2898472 - RNA, 19 nt, Artificial Sequence
  Description of Artificial Sequence: Synthetic oligonucleotide
ccagagggcggagggcagc

SEQ ID NO: 2898473 - RNA, 19 nt, Artificial Sequence
  Description of Artificial Sequence: Synthetic oligonucleotide
caugcacaccagccaucua

SEQ ID NO: 2898474 - RNA, 19 nt, Artificial Sequence
  Description of Artificial Sequence: Synthetic oligonucleotide
gcgaagccuggcauuggga

SEQ ID NO: 2898475 - RNA, 19 nt, Artificial Sequence
  Description of Artificial Sequence: Synthetic oligonucleotide
gggcggagggcagccauga

SEQ ID NO: 2898476 - RNA, 19 nt, Artificial Sequence
  Description of Artificial Sequence: Synthetic oligonucleotide
ggguuuccgccaguuucuc

SEQ ID NO: 2898477 - RNA, 19 nt, Artificial Sequence
  Description of Artificial Sequence: Synthetic oligonucleotide
ccagccaucuacucauuuu

SEQ ID NO: 2898478 - RNA, 19 nt, Artificial Sequence
  Description of Artificial Sequence: Synthetic oligonucleotide
cgaagccuggcauugggau

SEQ ID NO: 2898479 - RNA, 19 nt, Artificial Sequence
  Description of Artificial Sequence: Synthetic oligonucleotide
ggcauugggauuggugauu

SEQ ID NO: 2898480 - RNA, 19 nt, Artificial Sequence
  Description of Artificial Sequence: Synthetic oligonucleotide
cucuggguuuccgccaguu

SEQ ID NO: 2898481 - RNA, 19 nt, Artificial Sequence
  Description of Artificial Sequence: Synthetic oligonucleotide
ccgccaguuucucuuaauu

SEQ ID NO: 2898482 - RNA, 19 nt, Artificial Sequence
  Description of Artificial Sequence: Synthetic oligonucleotide
ggucugacuggugccggau

SEQ ID NO: 2898483 - RNA, 19 nt, Artificial Sequence
  Description of Artificial Sequence: Synthetic oligonucleotide
gggcagccaugaugccgca

SEQ ID NO: 2898484 - RNA, 19 nt, Artificial Sequence
  Description of Artificial Sequence: Synthetic oligonucleotide
ggcagccaugaugccgcaa

SEQ ID NO: 2898485 - RNA, 19 nt, Artificial Sequence
  Description of Artificial Sequence: Synthetic oligonucleotide
cguaaccaauguugggcau

SEQ ID NO: 2898486 - RNA, 19 nt, Artificial Sequence
  Description of Artificial Sequence: Synthetic oligonucleotide
cgguucuuggaggaaacau

SEQ ID NO: 2898487 - RNA, 19 nt, Artificial Sequence
  Description of Artificial Sequence: Synthetic oligonucleotide
caccagccaucuacucauu

SEQ ID NO: 2898488 - RNA, 19 nt, Artificial Sequence
  Description of Artificial Sequence: Synthetic oligonucleotide
cggucugacuggugccgga

SEQ ID NO: 2898489 - RNA, 19 nt, Artificial Sequence
  Description of Artificial Sequence: Synthetic oligonucleotide
ggugccggaugaacuucuu

SEQ ID NO: 2898490 - RNA, 19 nt, Artificial Sequence
  Description of Artificial Sequence: Synthetic oligonucleotide
caauggcuuuucgguucuu

SEQ ID NO: 2898491 - RNA, 19 nt, Artificial Sequence
  Description of Artificial Sequence: Synthetic oligonucleotide
ggcggagggcagccaugau

SEQ ID NO: 2898492 - RNA, 19 nt, Artificial Sequence
  Description of Artificial Sequence: Synthetic oligonucleotide
gcaucaggaucuggcccuu

SEQ ID NO: 2898493 - RNA, 19 nt, Artificial Sequence
  Description of Artificial Sequence: Synthetic oligonucleotide
gccagcugugcugcucuuu

SEQ ID NO: 2898494 - RNA, 19 nt, Artificial Sequence
  Description of Artificial Sequence: Synthetic oligonucleotide
cggaagccgcuaggcagca

SEQ ID NO: 2898495 - RNA, 19 nt, Artificial Sequence
  Description of Artificial Sequence: Synthetic oligonucleotide
cgcuaggcagcaugugcuu

SEQ ID NO: 2898496 - RNA, 19 nt, Artificial Sequence
  Description of Artificial Sequence: Synthetic oligonucleotide
ggaagccgcuaggcagcau

SEQ ID NO: 2898497 - RNA, 19 nt, Artificial Sequence
  Description of Artificial Sequence: Synthetic oligonucleotide
cgcugcgaagccuggcauu

SEQ ID NO: 2898498 - RNA, 19 nt, Artificial Sequence
  Description of Artificial Sequence: Synthetic oligonucleotide
ccucuggguuuccgccagu

SEQ ID NO: 2898499 - RNA, 19 nt, Artificial Sequence
  Description of Artificial Sequence: Synthetic oligonucleotide
auccauauuccuuagagag

SEQ ID NO: 2898500 - RNA, 19 nt, Artificial Sequence
  Description of Artificial Sequence: Synthetic oligonucleotide
gauaugcccauucucaggg

SEQ ID NO: 2898501 - RNA, 19 nt, Artificial Sequence
  Description of Artificial Sequence: Synthetic oligonucleotide
ucugugcuguacaugaccg

SEQ ID NO: 2898502 - RNA, 19 nt, Artificial Sequence
  Description of Artificial Sequence: Synthetic oligonucleotide
agcaccaugacaaagcugg

SEQ ID NO: 2898503 - RNA, 19 nt, Artificial Sequence
  Description of Artificial Sequence: Synthetic oligonucleotide
uauuccuuagagaggacag

SEQ ID NO: 2898504 - RNA, 19 nt, Artificial Sequence
  Description of Artificial Sequence: Synthetic oligonucleotide
gaugcuggaaagcagagca

SEQ ID NO: 2898505 - RNA, 19 nt, Artificial Sequence
  Description of Artificial Sequence: Synthetic oligonucleotide
ugcaguugaagauaugccc

SEQ ID NO: 2898506 - RNA, 19 nt, Artificial Sequence
  Description of Artificial Sequence: Synthetic oligonucleotide
aagcagagcacacaguugu

SEQ ID NO: 2898507 - RNA, 19 nt, Artificial Sequence
  Description of Artificial Sequence: Synthetic oligonucleotide
aggacagccaucuuggcuc

SEQ ID NO: 2898508 - RNA, 19 nt, Artificial Sequence
  Description of Artificial Sequence: Synthetic oligonucleotide
gaugcaguugaagauaugc

SEQ ID NO: 2898509 - RNA, 19 nt, Artificial Sequence
  Description of Artificial Sequence: Synthetic oligonucleotide
uggaaagcagagcacacag

SEQ ID NO: 2898510 - RNA, 19 nt, Artificial Sequence
  Description of Artificial Sequence: Synthetic oligonucleotide
aagauaugcccauucucag

SEQ ID NO: 2898511 - RNA, 19 nt, Artificial Sequence
  Description of Artificial Sequence: Synthetic oligonucleotide
ugguaaacaccucccacgg

SEQ ID NO: 2898512 - RNA, 19 nt, Artificial Sequence
  Description of Artificial Sequence: Synthetic oligonucleotide
caagccagaagcuaugcgc

SEQ ID NO: 2898513 - RNA, 19 nt, Artificial Sequence
  Description of Artificial Sequence: Synthetic oligonucleotide
uccauauuccuuagagagg

SEQ ID NO: 2898514 - RNA, 19 nt, Artificial Sequence
  Description of Artificial Sequence: Synthetic oligonucleotide
ucuaacccagccgagaugc

SEQ ID NO: 2898515 - RNA, 19 nt, Artificial Sequence
  Description of Artificial Sequence: Synthetic oligonucleotide
caaggagggcaauagaccc

SEQ ID NO: 2898516 - RNA, 19 nt, Artificial Sequence
  Description of Artificial Sequence: Synthetic oligonucleotide
agggcaauagaccccacgg

SEQ ID NO: 2898517 - RNA, 19 nt, Artificial Sequence
  Description of Artificial Sequence: Synthetic oligonucleotide
uacacuuccaacguguucu

SEQ ID NO: 2898518 - RNA, 19 nt, Artificial Sequence
  Description of Artificial Sequence: Synthetic oligonucleotide
cacguugauugcuaggugg

SEQ ID NO: 2898519 - RNA, 19 nt, Artificial Sequence
  Description of Artificial Sequence: Synthetic oligonucleotide
gugguaaacaccucccacg

SEQ ID NO: 2898520 - RNA, 19 nt, Artificial Sequence
  Description of Artificial Sequence: Synthetic oligonucleotide
uguaguagccauaugcgua

SEQ ID NO: 2898521 - RNA, 19 nt, Artificial Sequence
  Description of Artificial Sequence: Synthetic oligonucleotide
uugauugcuagguggagca

SEQ ID NO: 2898522 - RNA, 19 nt, Artificial Sequence
  Description of Artificial Sequence: Synthetic oligonucleotide
augcguagagaacucgccc

SEQ ID NO: 2898523 - RNA, 19 nt, Artificial Sequence
  Description of Artificial Sequence: Synthetic oligonucleotide
agagaggacagccaucuug

SEQ ID NO: 2898524 - RNA, 19 nt, Artificial Sequence
  Description of Artificial Sequence: Synthetic oligonucleotide
ugaagauaugcccauucuc

SEQ ID NO: 2898525 - RNA, 19 nt, Artificial Sequence
  Description of Artificial Sequence: Synthetic oligonucleotide
ugugcuguacaugaccggg

SEQ ID NO: 2898526 - RNA, 19 nt, Artificial Sequence
  Description of Artificial Sequence: Synthetic oligonucleotide
gaagauaugcccauucuca

SEQ ID NO: 2898527 - RNA, 19 nt, Artificial Sequence
  Description of Artificial Sequence: Synthetic oligonucleotide
acaguugugcccaucaagg

SEQ ID NO: 2898528 - RNA, 19 nt, Artificial Sequence
  Description of Artificial Sequence: Synthetic oligonucleotide
gaagggaggguacacuucc

SEQ ID NO: 2898529 - RNA, 19 nt, Artificial Sequence
  Description of Artificial Sequence: Synthetic oligonucleotide
caauagaccccacggaucc

SEQ ID NO: 2898530 - RNA, 19 nt, Artificial Sequence
  Description of Artificial Sequence: Synthetic oligonucleotide
uggagcaccaugacaaagc

SEQ ID NO: 2898531 - RNA, 19 nt, Artificial Sequence
  Description of Artificial Sequence: Synthetic oligonucleotide
uaugcguagagaacucgcc

SEQ ID NO: 2898532 - RNA, 19 nt, Artificial Sequence
  Description of Artificial Sequence: Synthetic oligonucleotide
agagcacacaguugugccc

SEQ ID NO: 2898533 - RNA, 19 nt, Artificial Sequence
  Description of Artificial Sequence: Synthetic oligonucleotide
uuagagaggacagccaucu

SEQ ID NO: 2898534 - RNA, 19 nt, Artificial Sequence
  Description of Artificial Sequence: Synthetic oligonucleotide
gagaggacagccaucuugg

SEQ ID NO: 2898535 - RNA, 19 nt, Artificial Sequence
  Description of Artificial Sequence: Synthetic oligonucleotide
aagccagaagcuaugcgcg

SEQ ID NO: 2898536 - RNA, 19 nt, Artificial Sequence
  Description of Artificial Sequence: Synthetic oligonucleotide
uccaccuuguacuucuugc

SEQ ID NO: 2898537 - RNA, 19 nt, Artificial Sequence
  Description of Artificial Sequence: Synthetic oligonucleotide
guaguagccauaugcguag

SEQ ID NO: 2898538 - RNA, 19 nt, Artificial Sequence
  Description of Artificial Sequence: Synthetic oligonucleotide
agauaugcccauucucagg

SEQ ID NO: 2898539 - RNA, 19 nt, Artificial Sequence
  Description of Artificial Sequence: Synthetic oligonucleotide
ggaggguacacuuccaacg

SEQ ID NO: 2898540 - RNA, 19 nt, Artificial Sequence
  Description of Artificial Sequence: Synthetic oligonucleotide
aaaauaggaagggagggua

SEQ ID NO: 2898541 - RNA, 19 nt, Artificial Sequence
  Description of Artificial Sequence: Synthetic oligonucleotide
ugacaaagcuggcagcgcc

SEQ ID NO: 2898542 - RNA, 19 nt, Artificial Sequence
  Description of Artificial Sequence: Synthetic oligonucleotide
accuuguacuucuugcggg

SEQ ID NO: 2898543 - RNA, 19 nt, Artificial Sequence
  Description of Artificial Sequence: Synthetic oligonucleotide
caugacaaagcuggcagcg

SEQ ID NO: 2898544 - RNA, 19 nt, Artificial Sequence
  Description of Artificial Sequence: Synthetic oligonucleotide
uuccaacguguucuggugg

SEQ ID NO: 2898545 - RNA, 19 nt, Artificial Sequence
  Description of Artificial Sequence: Synthetic oligonucleotide
cuugcuaggaucucccgug

SEQ ID NO: 2898546 - RNA, 19 nt, Artificial Sequence
  Description of Artificial Sequence: Synthetic oligonucleotide
uugaagauaugcccauucu

SEQ ID NO: 2898547 - RNA, 19 nt, Artificial Sequence
  Description of Artificial Sequence: Synthetic oligonucleotide
aaagcuggcagcgccagug

SEQ ID NO: 2898548 - RNA, 19 nt, Artificial Sequence
  Description of Artificial Sequence: Synthetic oligonucleotide
aaggcaaggagggcaauag

SEQ ID NO: 2898549 - RNA, 19 nt, Artificial Sequence
  Description of Artificial Sequence: Synthetic oligonucleotide
auaugcguagagaacucgc

SEQ ID NO: 2898550 - RNA, 19 nt, Artificial Sequence
  Description of Artificial Sequence: Synthetic oligonucleotide
ugcccaucaaggcaaggag

SEQ ID NO: 2898551 - RNA, 19 nt, Artificial Sequence
  Description of Artificial Sequence: Synthetic oligonucleotide
uacaugaccggguacucca

SEQ ID NO: 2898552 - RNA, 19 nt, Artificial Sequence
  Description of Artificial Sequence: Synthetic oligonucleotide
uagccauaugcguagagaa

SEQ ID NO: 2898553 - RNA, 19 nt, Artificial Sequence
  Description of Artificial Sequence: Synthetic oligonucleotide
uccaacguguucugguggg

SEQ ID NO: 2898554 - RNA, 19 nt, Artificial Sequence
  Description of Artificial Sequence: Synthetic oligonucleotide
aacguguucuggugggcuc

SEQ ID NO: 2898555 - RNA, 19 nt, Artificial Sequence
  Description of Artificial Sequence: Synthetic oligonucleotide
uuccuuagagaggacagcc

SEQ ID NO: 2898556 - RNA, 19 nt, Artificial Sequence
  Description of Artificial Sequence: Synthetic oligonucleotide
augcaguugaagauaugcc

SEQ ID NO: 2898557 - RNA, 19 nt, Artificial Sequence
  Description of Artificial Sequence: Synthetic oligonucleotide
aguugugcccaucaaggca

SEQ ID NO: 2898558 - RNA, 19 nt, Artificial Sequence
  Description of Artificial Sequence: Synthetic oligonucleotide
agaagcuaugcgcgggugg

SEQ ID NO: 2898559 - RNA, 19 nt, Artificial Sequence
  Description of Artificial Sequence: Synthetic oligonucleotide
cucgauuccgcuugcuagg

SEQ ID NO: 2898560 - RNA, 19 nt, Artificial Sequence
  Description of Artificial Sequence: Synthetic oligonucleotide
aaggagggcaauagacccc

SEQ ID NO: 2898561 - RNA, 19 nt, Artificial Sequence
  Description of Artificial Sequence: Synthetic oligonucleotide
auuccuuagagaggacagc

SEQ ID NO: 2898562 - RNA, 19 nt, Artificial Sequence
  Description of Artificial Sequence: Synthetic oligonucleotide
agaacucgcccaacaaucc

SEQ ID NO: 2898563 - RNA, 19 nt, Artificial Sequence
  Description of Artificial Sequence: Synthetic oligonucleotide
gauuccgcuugcuaggauc

SEQ ID NO: 2898564 - RNA, 19 nt, Artificial Sequence
  Description of Artificial Sequence: Synthetic oligonucleotide
ugcguagagaacucgccca

SEQ ID NO: 2898565 - RNA, 19 nt, Artificial Sequence
  Description of Artificial Sequence: Synthetic oligonucleotide
guugaagauaugcccauuc

SEQ ID NO: 2898566 - RNA, 19 nt, Artificial Sequence
  Description of Artificial Sequence: Synthetic oligonucleotide
acuuccaacguguucuggu

SEQ ID NO: 2898567 - RNA, 19 nt, Artificial Sequence
  Description of Artificial Sequence: Synthetic oligonucleotide
agcacgaauccauauuccu

SEQ ID NO: 2898568 - RNA, 19 nt, Artificial Sequence
  Description of Artificial Sequence: Synthetic oligonucleotide
gauugcuagguggagcacc

SEQ ID NO: 2898569 - RNA, 19 nt, Artificial Sequence
  Description of Artificial Sequence: Synthetic oligonucleotide
aaacaccucccacgguuag

SEQ ID NO: 2898570 - RNA, 19 nt, Artificial Sequence
  Description of Artificial Sequence: Synthetic oligonucleotide
uacuccaccuuguacuucu

SEQ ID NO: 2898571 - RNA, 19 nt, Artificial Sequence
  Description of Artificial Sequence: Synthetic oligonucleotide
gagaacucgcccaacaauc

SEQ ID NO: 2898572 - RNA, 19 nt, Artificial Sequence
  Description of Artificial Sequence: Synthetic oligonucleotide
ucgcccaacaauccaggcc

SEQ ID NO: 2898573 - RNA, 19 nt, Artificial Sequence
  Description of Artificial Sequence: Synthetic oligonucleotide
aacccagccgagaugcugg

SEQ ID NO: 2898574 - RNA, 19 nt, Artificial Sequence
  Description of Artificial Sequence: Synthetic oligonucleotide
gagggcaauagaccccacg

SEQ ID NO: 2898575 - RNA, 19 nt, Artificial Sequence
  Description of Artificial Sequence: Synthetic oligonucleotide
cacaguugugcccaucaag

SEQ ID NO: 2898576 - RNA, 19 nt, Artificial Sequence
  Description of Artificial Sequence: Synthetic oligonucleotide
ugcuagguggagcaccaug

SEQ ID NO: 2898577 - RNA, 19 nt, Artificial Sequence
  Description of Artificial Sequence: Synthetic oligonucleotide
agaugcuggaaagcagagc

SEQ ID NO: 2898578 - RNA, 19 nt, Artificial Sequence
  Description of Artificial Sequence: Synthetic oligonucleotide
uggaugcaguugaagauau

SEQ ID NO: 2898579 - RNA, 19 nt, Artificial Sequence
  Description of Artificial Sequence: Synthetic oligonucleotide
auauuccuuagagaggaca

SEQ ID NO: 2898580 - RNA, 19 nt, Artificial Sequence
  Description of Artificial Sequence: Synthetic oligonucleotide
caccuuguacuucuugcgg

SEQ ID NO: 2898581 - RNA, 19 nt, Artificial Sequence
  Description of Artificial Sequence: Synthetic oligonucleotide
uuugcucacguugauugcu

SEQ ID NO: 2898582 - RNA, 19 nt, Artificial Sequence
  Description of Artificial Sequence: Synthetic oligonucleotide
aaagcagagcacacaguug

SEQ ID NO: 2898583 - RNA, 19 nt, Artificial Sequence
  Description of Artificial Sequence: Synthetic oligonucleotide
uaugcccauucucaggguc

SEQ ID NO: 2898584 - RNA, 19 nt, Artificial Sequence
  Description of Artificial Sequence: Synthetic oligonucleotide
gucugugcuguacaugacc

SEQ ID NO: 2898585 - RNA, 19 nt, Artificial Sequence
  Description of Artificial Sequence: Synthetic oligonucleotide
ugcuggaaagcagagcaca

SEQ ID NO: 2898586 - RNA, 19 nt, Artificial Sequence
  Description of Artificial Sequence: Synthetic oligonucleotide
uagguggagcaccaugaca

SEQ ID NO: 2898587 - RNA, 19 nt, Artificial Sequence
  Description of Artificial Sequence: Synthetic oligonucleotide
gaaagcagagcacacaguu

SEQ ID NO: 2898588 - RNA, 19 nt, Artificial Sequence
  Description of Artificial Sequence: Synthetic oligonucleotide
ucagggucugugcuguaca

SEQ ID NO: 2898589 - RNA, 19 nt, Artificial Sequence
  Description of Artificial Sequence: Synthetic oligonucleotide
cauaugcguagagaacucg

SEQ ID NO: 2898590 - RNA, 19 nt, Artificial Sequence
  Description of Artificial Sequence: Synthetic oligonucleotide
agagaacucgcccaacaau

SEQ ID NO: 2898591 - RNA, 19 nt, Artificial Sequence
  Description of Artificial Sequence: Synthetic oligonucleotide
uguucuggugggcucgcug

SEQ ID NO: 2898592 - RNA, 19 nt, Artificial Sequence
  Description of Artificial Sequence: Synthetic oligonucleotide
uucuugcgggcuuugcuca

SEQ ID NO: 2898593 - RNA, 19 nt, Artificial Sequence
  Description of Artificial Sequence: Synthetic oligonucleotide
aguagccauaugcguagag

SEQ ID NO: 2898594 - RNA, 19 nt, Artificial Sequence
  Description of Artificial Sequence: Synthetic oligonucleotide
guugauugcuagguggagc

SEQ ID NO: 2898595 - RNA, 19 nt, Artificial Sequence
  Description of Artificial Sequence: Synthetic oligonucleotide
cuucuugcgggcuuugcuc

SEQ ID NO: 2898596 - RNA, 19 nt, Artificial Sequence
  Description of Artificial Sequence: Synthetic oligonucleotide
ccguguaguagccauaugc

SEQ ID NO: 2898597 - RNA, 19 nt, Artificial Sequence
  Description of Artificial Sequence: Synthetic oligonucleotide
ucacguugauugcuaggug

SEQ ID NO: 2898598 - RNA, 19 nt, Artificial Sequence
  Description of Artificial Sequence: Synthetic oligonucleotide
agaggacagccaucuuggc

SEQ ID NO: 2898599 - RNA, 19 nt, Artificial Sequence
  Description of Artificial Sequence: Synthetic oligonucleotide
agccgggucuaacccagcc

SEQ ID NO: 2898600 - RNA, 19 nt, Artificial Sequence
  Description of Artificial Sequence: Synthetic oligonucleotide
caacaauccaggccaggcc

SEQ ID NO: 2898601 - RNA, 19 nt, Artificial Sequence
  Description of Artificial Sequence: Synthetic oligonucleotide
uccuuagagaggacagcca

SEQ ID NO: 2898602 - RNA, 19 nt, Artificial Sequence
  Description of Artificial Sequence: Synthetic oligonucleotide
cuuccaacguguucuggug

SEQ ID NO: 2898603 - RNA, 19 nt, Artificial Sequence
  Description of Artificial Sequence: Synthetic oligonucleotide
acuucuugcgggcuuugcu

SEQ ID NO: 2898604 - RNA, 19 nt, Artificial Sequence
  Description of Artificial Sequence: Synthetic oligonucleotide
cuuugcucacguugauugc

SEQ ID NO: 2898605 - RNA, 19 nt, Artificial Sequence
  Description of Artificial Sequence: Synthetic oligonucleotide
acgaauccauauuccuuag

SEQ ID NO: 2898606 - RNA, 19 nt, Artificial Sequence
  Description of Artificial Sequence: Synthetic oligonucleotide
cccaucaaggcaaggaggg

SEQ ID NO: 2898607 - RNA, 19 nt, Artificial Sequence
  Description of Artificial Sequence: Synthetic oligonucleotide
augacaaagcuggcagcgc

SEQ ID NO: 2898608 - RNA, 19 nt, Artificial Sequence
  Description of Artificial Sequence: Synthetic oligonucleotide
auucucagggucugugcug

SEQ ID NO: 2898609 - RNA, 19 nt, Artificial Sequence
  Description of Artificial Sequence: Synthetic oligonucleotide
ggagcacgaauccauauuc

SEQ ID NO: 2898610 - RNA, 19 nt, Artificial Sequence
  Description of Artificial Sequence: Synthetic oligonucleotide
caagccgggucuaacccag

SEQ ID NO: 2898611 - RNA, 19 nt, Artificial Sequence
  Description of Artificial Sequence: Synthetic oligonucleotide
cuuagagaggacagccauc

SEQ ID NO: 2898612 - RNA, 19 nt, Artificial Sequence
  Description of Artificial Sequence: Synthetic oligonucleotide
ugcgcgggugguaaacacc

SEQ ID NO: 2898613 - RNA, 19 nt, Artificial Sequence
  Description of Artificial Sequence: Synthetic oligonucleotide
guagagaacucgcccaaca

SEQ ID NO: 2898614 - RNA, 19 nt, Artificial Sequence
  Description of Artificial Sequence: Synthetic oligonucleotide
cguguaguagccauaugcg

SEQ ID NO: 2898615 - RNA, 19 nt, Artificial Sequence
  Description of Artificial Sequence: Synthetic oligonucleotide
augcgcgggugguaaacac

SEQ ID NO: 2898616 - RNA, 19 nt, Artificial Sequence
  Description of Artificial Sequence: Synthetic oligonucleotide
caguugugcccaucaaggc

SEQ ID NO: 2898617 - RNA, 19 nt, Artificial Sequence
  Description of Artificial Sequence: Synthetic oligonucleotide
uagaccccacggauccucg

SEQ ID NO: 2898618 - RNA, 19 nt, Artificial Sequence
  Description of Artificial Sequence: Synthetic oligonucleotide
uaaacaccucccacgguua

SEQ ID NO: 2898619 - RNA, 19 nt, Artificial Sequence
  Description of Artificial Sequence: Synthetic oligonucleotide
aacaccucccacgguuagg

SEQ ID NO: 2898620 - RNA, 19 nt, Artificial Sequence
  Description of Artificial Sequence: Synthetic oligonucleotide
ucuuggcucuggcucaccu

SEQ ID NO: 2898621 - RNA, 19 nt, Artificial Sequence
  Description of Artificial Sequence: Synthetic oligonucleotide
ugcucacguugauugcuag

SEQ ID NO: 2898622 - RNA, 19 nt, Artificial Sequence
  Description of Artificial Sequence: Synthetic oligonucleotide
cagugaggagcacgaaucc

SEQ ID NO: 2898623 - RNA, 19 nt, Artificial Sequence
  Description of Artificial Sequence: Synthetic oligonucleotide
ggauccucgauuccgcuug

SEQ ID NO: 2898624 - RNA, 19 nt, Artificial Sequence
  Description of Artificial Sequence: Synthetic oligonucleotide
cacgaauccauauuccuua

SEQ ID NO: 2898625 - RNA, 19 nt, Artificial Sequence
  Description of Artificial Sequence: Synthetic oligonucleotide
auagaccccacggauccuc

SEQ ID NO: 2898626 - RNA, 19 nt, Artificial Sequence
  Description of Artificial Sequence: Synthetic oligonucleotide
agccauaugcguagagaac

SEQ ID NO: 2898627 - RNA, 19 nt, Artificial Sequence
  Description of Artificial Sequence: Synthetic oligonucleotide
ugcuguacaugaccgggua

SEQ ID NO: 2898628 - RNA, 19 nt, Artificial Sequence
  Description of Artificial Sequence: Synthetic oligonucleotide
ggaucucccguguaguagc

SEQ ID NO: 2898629 - RNA, 19 nt, Artificial Sequence
  Description of Artificial Sequence: Synthetic oligonucleotide
ucucccguguaguagccau

SEQ ID NO: 2898630 - RNA, 19 nt, Artificial Sequence
  Description of Artificial Sequence: Synthetic oligonucleotide
gagcacgaauccauauucc

SEQ ID NO: 2898631 - RNA, 19 nt, Artificial Sequence
  Description of Artificial Sequence: Synthetic oligonucleotide
agccagaagcuaugcgcgg

SEQ ID NO: 2898632 - RNA, 19 nt, Artificial Sequence
  Description of Artificial Sequence: Synthetic oligonucleotide
aggaucucccguguaguag

SEQ ID NO: 2898633 - RNA, 19 nt, Artificial Sequence
  Description of Artificial Sequence: Synthetic oligonucleotide
gcuaggaucucccguguag

SEQ ID NO: 2898634 - RNA, 19 nt, Artificial Sequence
  Description of Artificial Sequence: Synthetic oligonucleotide
aggaagggaggguacacuu

SEQ ID NO: 2898635 - RNA, 19 nt, Artificial Sequence
  Description of Artificial Sequence: Synthetic oligonucleotide
cugugcuguacaugaccgg

SEQ ID NO: 2898636 - RNA, 19 nt, Artificial Sequence
  Description of Artificial Sequence: Synthetic oligonucleotide
uucucagggucugugcugu

SEQ ID NO: 2898637 - RNA, 19 nt, Artificial Sequence
  Description of Artificial Sequence: Synthetic oligonucleotide
augaccggguacuccaccu

SEQ ID NO: 2898638 - RNA, 19 nt, Artificial Sequence
  Description of Artificial Sequence: Synthetic oligonucleotide
gaccggguacuccaccuug

SEQ ID NO: 2898639 - RNA, 19 nt, Artificial Sequence
  Description of Artificial Sequence: Synthetic oligonucleotide
ggugguaaacaccucccac

SEQ ID NO: 2898640 - RNA, 19 nt, Artificial Sequence
  Description of Artificial Sequence: Synthetic oligonucleotide
uaacccagccgagaugcug

SEQ ID NO: 2898641 - RNA, 19 nt, Artificial Sequence
  Description of Artificial Sequence: Synthetic oligonucleotide
uccgcuugcuaggaucucc

SEQ ID NO: 2898642 - RNA, 19 nt, Artificial Sequence
  Description of Artificial Sequence: Synthetic oligonucleotide
gaacucgcccaacaaucca

SEQ ID NO: 2898643 - RNA, 19 nt, Artificial Sequence
  Description of Artificial Sequence: Synthetic oligonucleotide
cacggauccucgauuccgc

SEQ ID NO: 2898644 - RNA, 19 nt, Artificial Sequence
  Description of Artificial Sequence: Synthetic oligonucleotide
agcgccagugaggagcacg

SEQ ID NO: 2898645 - RNA, 19 nt, Artificial Sequence
  Description of Artificial Sequence: Synthetic oligonucleotide
cagccgagaugcuggaaag

SEQ ID NO: 2898646 - RNA, 19 nt, Artificial Sequence
  Description of Artificial Sequence: Synthetic oligonucleotide
ugaggagcacgaauccaua

SEQ ID NO: 2898647 - RNA, 19 nt, Artificial Sequence
  Description of Artificial Sequence: Synthetic oligonucleotide
agccgagaugcuggaaagc

SEQ ID NO: 2898648 - RNA, 19 nt, Artificial Sequence
  Description of Artificial Sequence: Synthetic oligonucleotide
uggugggcucgcuggaugc

SEQ ID NO: 2898649 - RNA, 19 nt, Artificial Sequence
  Description of Artificial Sequence: Synthetic oligonucleotide
aggguacacuuccaacgug

SEQ ID NO: 2898650 - RNA, 19 nt, Artificial Sequence
  Description of Artificial Sequence: Synthetic oligonucleotide
guagccauaugcguagaga

SEQ ID NO: 2898651 - RNA, 19 nt, Artificial Sequence
  Description of Artificial Sequence: Synthetic oligonucleotide
cuagguggagcaccaugac

SEQ ID NO: 2898652 - RNA, 19 nt, Artificial Sequence
  Description of Artificial Sequence: Synthetic oligonucleotide
caucaaggcaaggagggca

SEQ ID NO: 2898653 - RNA, 19 nt, Artificial Sequence
  Description of Artificial Sequence: Synthetic oligonucleotide
guaaacaccucccacgguu

SEQ ID NO: 2898654 - RNA, 19 nt, Artificial Sequence
  Description of Artificial Sequence: Synthetic oligonucleotide
aggagcacgaauccauauu

SEQ ID NO: 2898655 - RNA, 19 nt, Artificial Sequence
  Description of Artificial Sequence: Synthetic oligonucleotide
guugugcccaucaaggcaa

SEQ ID NO: 2898656 - RNA, 19 nt, Artificial Sequence
  Description of Artificial Sequence: Synthetic oligonucleotide
caugaccggguacuccacc

SEQ ID NO: 2898657 - RNA, 19 nt, Artificial Sequence
  Description of Artificial Sequence: Synthetic oligonucleotide
ccucgauuccgcuugcuag

SEQ ID NO: 2898658 - RNA, 19 nt, Artificial Sequence
  Description of Artificial Sequence: Synthetic oligonucleotide
accucccacgguuaggaaa

SEQ ID NO: 2898659 - RNA, 19 nt, Artificial Sequence
  Description of Artificial Sequence: Synthetic oligonucleotide
gagcacacaguugugccca

SEQ ID NO: 2898660 - RNA, 19 nt, Artificial Sequence
  Description of Artificial Sequence: Synthetic oligonucleotide
ccaccuuguacuucuugcg

SEQ ID NO: 2898661 - RNA, 19 nt, Artificial Sequence
  Description of Artificial Sequence: Synthetic oligonucleotide
uugcuaggaucucccgugu

SEQ ID NO: 2898662 - RNA, 19 nt, Artificial Sequence
  Description of Artificial Sequence: Synthetic oligonucleotide
cacacaguugugcccauca

SEQ ID NO: 2898663 - RNA, 19 nt, Artificial Sequence
  Description of Artificial Sequence: Synthetic oligonucleotide
gccaucuuggcucuggcuc

SEQ ID NO: 2898664 - RNA, 19 nt, Artificial Sequence
  Description of Artificial Sequence: Synthetic oligonucleotide
agugaggagcacgaaucca

SEQ ID NO: 2898665 - RNA, 19 nt, Artificial Sequence
  Description of Artificial Sequence: Synthetic oligonucleotide
gcaaggagggcaauagacc

SEQ ID NO: 2898666 - RNA, 19 nt, Artificial Sequence
  Description of Artificial Sequence: Synthetic oligonucleotide
auugcuagguggagcacca

SEQ ID NO: 2898667 - RNA, 19 nt, Artificial Sequence
  Description of Artificial Sequence: Synthetic oligonucleotide
guggagcaccaugacaaag

SEQ ID NO: 2898668 - RNA, 19 nt, Artificial Sequence
  Description of Artificial Sequence: Synthetic oligonucleotide
uguacaugaccggguacuc

SEQ ID NO: 2898669 - RNA, 19 nt, Artificial Sequence
  Description of Artificial Sequence: Synthetic oligonucleotide
auuccgcuugcuaggaucu

SEQ ID NO: 2898670 - RNA, 19 nt, Artificial Sequence
  Description of Artificial Sequence: Synthetic oligonucleotide
acguguucuggugggcucg

SEQ ID NO: 2898671 - RNA, 19 nt, Artificial Sequence
  Description of Artificial Sequence: Synthetic oligonucleotide
gaggguacacuuccaacgu

SEQ ID NO: 2898672 - RNA, 19 nt, Artificial Sequence
  Description of Artificial Sequence: Synthetic oligonucleotide
cauauuccuuagagaggac

SEQ ID NO: 2898673 - RNA, 19 nt, Artificial Sequence
  Description of Artificial Sequence: Synthetic oligonucleotide
uaugcgcgggugguaaaca

SEQ ID NO: 2898674 - RNA, 19 nt, Artificial Sequence
  Description of Artificial Sequence: Synthetic oligonucleotide
aagcuggcagcgccaguga

SEQ ID NO: 2898675 - RNA, 19 nt, Artificial Sequence
  Description of Artificial Sequence: Synthetic oligonucleotide
acacuuccaacguguucug

SEQ ID NO: 2898676 - RNA, 19 nt, Artificial Sequence
  Description of Artificial Sequence: Synthetic oligonucleotide
uuguacuucuugcgggcuu

SEQ ID NO: 2898677 - RNA, 19 nt, Artificial Sequence
  Description of Artificial Sequence: Synthetic oligonucleotide
aggagggcaauagacccca

SEQ ID NO: 2898678 - RNA, 19 nt, Artificial Sequence
  Description of Artificial Sequence: Synthetic oligonucleotide
uaggaagggaggguacacu

SEQ ID NO: 2898679 - RNA, 19 nt, Artificial Sequence
  Description of Artificial Sequence: Synthetic oligonucleotide
uugcucacguugauugcua

SEQ ID NO: 2898680 - RNA, 19 nt, Artificial Sequence
  Description of Artificial Sequence: Synthetic oligonucleotide
cucgcccaacaauccaggc

SEQ ID NO: 2898681 - RNA, 19 nt, Artificial Sequence
  Description of Artificial Sequence: Synthetic oligonucleotide
guacacuuccaacguguuc

SEQ ID NO: 2898682 - RNA, 19 nt, Artificial Sequence
  Description of Artificial Sequence: Synthetic oligonucleotide
acucgcccaacaauccagg

SEQ ID NO: 2898683 - RNA, 19 nt, Artificial Sequence
  Description of Artificial Sequence: Synthetic oligonucleotide
uugugcccaucaaggcaag

SEQ ID NO: 2898684 - RNA, 19 nt, Artificial Sequence
  Description of Artificial Sequence: Synthetic oligonucleotide
ggcagcgccagugaggagc

SEQ ID NO: 2898685 - RNA, 19 nt, Artificial Sequence
  Description of Artificial Sequence: Synthetic oligonucleotide
ccauauuccuuagagagga

SEQ ID NO: 2898686 - RNA, 19 nt, Artificial Sequence
  Description of Artificial Sequence: Synthetic oligonucleotide
acaccucccacgguuagga

SEQ ID NO: 2898687 - RNA, 19 nt, Artificial Sequence
  Description of Artificial Sequence: Synthetic oligonucleotide
augcuggaaagcagagcac

SEQ ID NO: 2898688 - RNA, 19 nt, Artificial Sequence
  Description of Artificial Sequence: Synthetic oligonucleotide
gucuaacccagccgagaug

SEQ ID NO: 2898689 - RNA, 19 nt, Artificial Sequence
  Description of Artificial Sequence: Synthetic oligonucleotide
ccuuguacuucuugcgggc

SEQ ID NO: 2898690 - RNA, 19 nt, Artificial Sequence
  Description of Artificial Sequence: Synthetic oligonucleotide
gcaguugaagauaugccca

SEQ ID NO: 2898691 - RNA, 19 nt, Artificial Sequence
  Description of Artificial Sequence: Synthetic oligonucleotide
uaggaucucccguguagua

SEQ ID NO: 2898692 - RNA, 19 nt, Artificial Sequence
  Description of Artificial Sequence: Synthetic oligonucleotide
ugugcccaucaaggcaagg

SEQ ID NO: 2898693 - RNA, 19 nt, Artificial Sequence
  Description of Artificial Sequence: Synthetic oligonucleotide
guacaugaccggguacucc

SEQ ID NO: 2898694 - RNA, 19 nt, Artificial Sequence
  Description of Artificial Sequence: Synthetic oligonucleotide
gaggacagccaucuuggcu

SEQ ID NO: 2898695 - RNA, 19 nt, Artificial Sequence
  Description of Artificial Sequence: Synthetic oligonucleotide
uguacuucuugcgggcuuu

SEQ ID NO: 2898696 - RNA, 19 nt, Artificial Sequence
  Description of Artificial Sequence: Synthetic oligonucleotide
agggaggguacacuuccaa

SEQ ID NO: 2898697 - RNA, 19 nt, Artificial Sequence
  Description of Artificial Sequence: Synthetic oligonucleotide
aauagaccccacggauccu

SEQ ID NO: 2898698 - RNA, 19 nt, Artificial Sequence
  Description of Artificial Sequence: Synthetic oligonucleotide
ucgauuccgcuugcuagga

SEQ ID NO: 2898699 - RNA, 19 nt, Artificial Sequence
  Description of Artificial Sequence: Synthetic oligonucleotide
acguugauugcuaggugga

SEQ ID NO: 2898700 - RNA, 19 nt, Artificial Sequence
  Description of Artificial Sequence: Synthetic oligonucleotide
gauccucgauuccgcuugc

SEQ ID NO: 2898701 - RNA, 19 nt, Artificial Sequence
  Description of Artificial Sequence: Synthetic oligonucleotide
auaugcccauucucagggu

SEQ ID NO: 2898702 - RNA, 19 nt, Artificial Sequence
  Description of Artificial Sequence: Synthetic oligonucleotide
guguaguagccauaugcgu

SEQ ID NO: 2898703 - RNA, 19 nt, Artificial Sequence
  Description of Artificial Sequence: Synthetic oligonucleotide
gcucacguugauugcuagg

SEQ ID NO: 2898704 - RNA, 19 nt, Artificial Sequence
  Description of Artificial Sequence: Synthetic oligonucleotide
ucgcuggaugcaguugaag

SEQ ID NO: 2898705 - RNA, 19 nt, Artificial Sequence
  Description of Artificial Sequence: Synthetic oligonucleotide
gcgggugguaaacaccucc

SEQ ID NO: 2898706 - RNA, 19 nt, Artificial Sequence
  Description of Artificial Sequence: Synthetic oligonucleotide
ggguacuccaccuuguacu

SEQ ID NO: 2898707 - RNA, 19 nt, Artificial Sequence
  Description of Artificial Sequence: Synthetic oligonucleotide
gaucucccguguaguagcc

SEQ ID NO: 2898708 - RNA, 19 nt, Artificial Sequence
  Description of Artificial Sequence: Synthetic oligonucleotide
gcgggcuuugcucacguug

SEQ ID NO: 2898709 - RNA, 19 nt, Artificial Sequence
  Description of Artificial Sequence: Synthetic oligonucleotide
ucccguguaguagccauau

SEQ ID NO: 2898710 - RNA, 19 nt, Artificial Sequence
  Description of Artificial Sequence: Synthetic oligonucleotide
ccaacaauccaggccaggc

SEQ ID NO: 2898711 - RNA, 19 nt, Artificial Sequence
  Description of Artificial Sequence: Synthetic oligonucleotide
gagcaccaugacaaagcug

SEQ ID NO: 2898712 - RNA, 19 nt, Artificial Sequence
  Description of Artificial Sequence: Synthetic oligonucleotide
cuaugcgcgggugguaaac

SEQ ID NO: 2898713 - RNA, 19 nt, Artificial Sequence
  Description of Artificial Sequence: Synthetic oligonucleotide
uugcgggcuuugcucacgu

SEQ ID NO: 2898714 - RNA, 19 nt, Artificial Sequence
  Description of Artificial Sequence: Synthetic oligonucleotide
agccaucuuggcucuggcu

SEQ ID NO: 2898715 - RNA, 19 nt, Artificial Sequence
  Description of Artificial Sequence: Synthetic oligonucleotide
gacaaagcuggcagcgcca

SEQ ID NO: 2898716 - RNA, 19 nt, Artificial Sequence
  Description of Artificial Sequence: Synthetic oligonucleotide
uacuucuugcgggcuuugc

SEQ ID NO: 2898717 - RNA, 19 nt, Artificial Sequence
  Description of Artificial Sequence: Synthetic oligonucleotide
cucacguugauugcuaggu

SEQ ID NO: 2898718 - RNA, 19 nt, Artificial Sequence
  Description of Artificial Sequence: Synthetic oligonucleotide
ugcccauucucagggucug

SEQ ID NO: 2898719 - RNA, 19 nt, Artificial Sequence
  Description of Artificial Sequence: Synthetic oligonucleotide
cuccaccuuguacuucuug

SEQ ID NO: 2898720 - RNA, 19 nt, Artificial Sequence
  Description of Artificial Sequence: Synthetic oligonucleotide
gcccaucaaggcaaggagg

SEQ ID NO: 2898721 - RNA, 19 nt, Artificial Sequence
  Description of Artificial Sequence: Synthetic oligonucleotide
cuugcgggcuuugcucacg

SEQ ID NO: 2898722 - RNA, 19 nt, Artificial Sequence
  Description of Artificial Sequence: Synthetic oligonucleotide
ucuugcgggcuuugcucac

SEQ ID NO: 2898723 - RNA, 19 nt, Artificial Sequence
  Description of Artificial Sequence: Synthetic oligonucleotide
aauccaggccaggcccaag

SEQ ID NO: 2898724 - RNA, 19 nt, Artificial Sequence
  Description of Artificial Sequence: Synthetic oligonucleotide
ccaagccagaagcuaugcg

SEQ ID NO: 2898725 - RNA, 19 nt, Artificial Sequence
  Description of Artificial Sequence: Synthetic oligonucleotide
acaugaccggguacuccac

SEQ ID NO: 2898726 - RNA, 19 nt, Artificial Sequence
  Description of Artificial Sequence: Synthetic oligonucleotide
cuggugggcucgcuggaug

SEQ ID NO: 2898727 - RNA, 19 nt, Artificial Sequence
  Description of Artificial Sequence: Synthetic oligonucleotide
ugcuaggaucucccgugua

SEQ ID NO: 2898728 - RNA, 19 nt, Artificial Sequence
  Description of Artificial Sequence: Synthetic oligonucleotide
acacaguugugcccaucaa

SEQ ID NO: 2898729 - RNA, 19 nt, Artificial Sequence
  Description of Artificial Sequence: Synthetic oligonucleotide
gaagcuaugcgcggguggu

SEQ ID NO: 2898730 - RNA, 19 nt, Artificial Sequence
  Description of Artificial Sequence: Synthetic oligonucleotide
gugcccaucaaggcaagga

SEQ ID NO: 2898731 - RNA, 19 nt, Artificial Sequence
  Description of Artificial Sequence: Synthetic oligonucleotide
gggaggguacacuuccaac

SEQ ID NO: 2898732 - RNA, 19 nt, Artificial Sequence
  Description of Artificial Sequence: Synthetic oligonucleotide
ugggcucgcuggaugcagu

SEQ ID NO: 2898733 - RNA, 19 nt, Artificial Sequence
  Description of Artificial Sequence: Synthetic oligonucleotide
ugauugcuagguggagcac

SEQ ID NO: 2898734 - RNA, 19 nt, Artificial Sequence
  Description of Artificial Sequence: Synthetic oligonucleotide
ccaugacaaagcuggcagc

SEQ ID NO: 2898735 - RNA, 19 nt, Artificial Sequence
  Description of Artificial Sequence: Synthetic oligonucleotide
aagccgggucuaacccagc

SEQ ID NO: 2898736 - RNA, 19 nt, Artificial Sequence
  Description of Artificial Sequence: Synthetic oligonucleotide
gcuagguggagcaccauga

SEQ ID NO: 2898737 - RNA, 19 nt, Artificial Sequence
  Description of Artificial Sequence: Synthetic oligonucleotide
cuggcagcgccagugagga

SEQ ID NO: 2898738 - RNA, 19 nt, Artificial Sequence
  Description of Artificial Sequence: Synthetic oligonucleotide
acggauccucgauuccgcu

SEQ ID NO: 2898739 - RNA, 19 nt, Artificial Sequence
  Description of Artificial Sequence: Synthetic oligonucleotide
aucaaggcaaggagggcaa

SEQ ID NO: 2898740 - RNA, 19 nt, Artificial Sequence
  Description of Artificial Sequence: Synthetic oligonucleotide
agggucugugcuguacaug

SEQ ID NO: 2898741 - RNA, 19 nt, Artificial Sequence
  Description of Artificial Sequence: Synthetic oligonucleotide
cuggaugcaguugaagaua

SEQ ID NO: 2898742 - RNA, 19 nt, Artificial Sequence
  Description of Artificial Sequence: Synthetic oligonucleotide
aagggaggguacacuucca

SEQ ID NO: 2898743 - RNA, 19 nt, Artificial Sequence
  Description of Artificial Sequence: Synthetic oligonucleotide
cuggaaagcagagcacaca

SEQ ID NO: 2898744 - RNA, 19 nt, Artificial Sequence
  Description of Artificial Sequence: Synthetic oligonucleotide
gccauaugcguagagaacu

SEQ ID NO: 2898745 - RNA, 19 nt, Artificial Sequence
  Description of Artificial Sequence: Synthetic oligonucleotide
gcucgcuggaugcaguuga

SEQ ID NO: 2898746 - RNA, 19 nt, Artificial Sequence
  Description of Artificial Sequence: Synthetic oligonucleotide
cccaagccgggucuaaccc

SEQ ID NO: 2898747 - RNA, 19 nt, Artificial Sequence
  Description of Artificial Sequence: Synthetic oligonucleotide
agcuaugcgcgggugguaa

SEQ ID NO: 2898748 - RNA, 19 nt, Artificial Sequence
  Description of Artificial Sequence: Synthetic oligonucleotide
ugaccggguacuccaccuu

SEQ ID NO: 2898749 - RNA, 19 nt, Artificial Sequence
  Description of Artificial Sequence: Synthetic oligonucleotide
aucuuggcucuggcucacc

SEQ ID NO: 2898750 - RNA, 19 nt, Artificial Sequence
  Description of Artificial Sequence: Synthetic oligonucleotide
gccgggucuaacccagccg

SEQ ID NO: 2898751 - RNA, 19 nt, Artificial Sequence
  Description of Artificial Sequence: Synthetic oligonucleotide
ggcaauagaccccacggau

SEQ ID NO: 2898752 - RNA, 19 nt, Artificial Sequence
  Description of Artificial Sequence: Synthetic oligonucleotide
gccagaagcuaugcgcggg

SEQ ID NO: 2898753 - RNA, 19 nt, Artificial Sequence
  Description of Artificial Sequence: Synthetic oligonucleotide
uaguagccauaugcguaga

SEQ ID NO: 2898754 - RNA, 19 nt, Artificial Sequence
  Description of Artificial Sequence: Synthetic oligonucleotide
gaggagcacgaauccauau

SEQ ID NO: 2898755 - RNA, 19 nt, Artificial Sequence
  Description of Artificial Sequence: Synthetic oligonucleotide
ccgagaugcuggaaagcag

SEQ ID NO: 2898756 - RNA, 19 nt, Artificial Sequence
  Description of Artificial Sequence: Synthetic oligonucleotide
aguugaagauaugcccauu

SEQ ID NO: 2898757 - RNA, 19 nt, Artificial Sequence
  Description of Artificial Sequence: Synthetic oligonucleotide
cuguacaugaccggguacu

SEQ ID NO: 2898758 - RNA, 19 nt, Artificial Sequence
  Description of Artificial Sequence: Synthetic oligonucleotide
caccaugacaaagcuggca

SEQ ID NO: 2898759 - RNA, 19 nt, Artificial Sequence
  Description of Artificial Sequence: Synthetic oligonucleotide
gcaauagaccccacggauc

SEQ ID NO: 2898760 - RNA, 19 nt, Artificial Sequence
  Description of Artificial Sequence: Synthetic oligonucleotide
gcuggcagcgccagugagg

SEQ ID NO: 2898761 - RNA, 19 nt, Artificial Sequence
  Description of Artificial Sequence: Synthetic oligonucleotide
ccacggauccucgauuccg

SEQ ID NO: 2898762 - RNA, 19 nt, Artificial Sequence
  Description of Artificial Sequence: Synthetic oligonucleotide
ccauaugcguagagaacuc

SEQ ID NO: 2898763 - RNA, 19 nt, Artificial Sequence
  Description of Artificial Sequence: Synthetic oligonucleotide
agcagagcacacaguugug

SEQ ID NO: 2898764 - RNA, 19 nt, Artificial Sequence
  Description of Artificial Sequence: Synthetic oligonucleotide
gcuguacaugaccggguac

SEQ ID NO: 2898765 - RNA, 19 nt, Artificial Sequence
  Description of Artificial Sequence: Synthetic oligonucleotide
gccgagaugcuggaaagca

SEQ ID NO: 2898766 - RNA, 19 nt, Artificial Sequence
  Description of Artificial Sequence: Synthetic oligonucleotide
gugggcucgcuggaugcag

SEQ ID NO: 2898767 - RNA, 19 nt, Artificial Sequence
  Description of Artificial Sequence: Synthetic oligonucleotide
cagaagcuaugcgcgggug

SEQ ID NO: 2898768 - RNA, 19 nt, Artificial Sequence
  Description of Artificial Sequence: Synthetic oligonucleotide
gcccaagccgggucuaacc

SEQ ID NO: 2898769 - RNA, 19 nt, Artificial Sequence
  Description of Artificial Sequence: Synthetic oligonucleotide
gggcaauagaccccacgga

SEQ ID NO: 2898770 - RNA, 19 nt, Artificial Sequence
  Description of Artificial Sequence: Synthetic oligonucleotide
ggagcaccaugacaaagcu

SEQ ID NO: 2898771 - RNA, 19 nt, Artificial Sequence
  Description of Artificial Sequence: Synthetic oligonucleotide
cgagaugcuggaaagcaga

SEQ ID NO: 2898772 - RNA, 19 nt, Artificial Sequence
  Description of Artificial Sequence: Synthetic oligonucleotide
uagagaggacagccaucuu

SEQ ID NO: 2898773 - RNA, 19 nt, Artificial Sequence
  Description of Artificial Sequence: Synthetic oligonucleotide
gcuggaugcaguugaagau

SEQ ID NO: 2898774 - RNA, 19 nt, Artificial Sequence
  Description of Artificial Sequence: Synthetic oligonucleotide
cgcccaacaauccaggcca

SEQ ID NO: 2898775 - RNA, 19 nt, Artificial Sequence
  Description of Artificial Sequence: Synthetic oligonucleotide
agaccccacggauccucga

SEQ ID NO: 2898776 - RNA, 19 nt, Artificial Sequence
  Description of Artificial Sequence: Synthetic oligonucleotide
gugaggagcacgaauccau

SEQ ID NO: 2898777 - RNA, 19 nt, Artificial Sequence
  Description of Artificial Sequence: Synthetic oligonucleotide
accccacggauccucgauu

SEQ ID NO: 2898778 - RNA, 19 nt, Artificial Sequence
  Description of Artificial Sequence: Synthetic oligonucleotide
gcuggaaagcagagcacac

SEQ ID NO: 2898779 - RNA, 19 nt, Artificial Sequence
  Description of Artificial Sequence: Synthetic oligonucleotide
caucuuggcucuggcucac

SEQ ID NO: 2898780 - RNA, 19 nt, Artificial Sequence
  Description of Artificial Sequence: Synthetic oligonucleotide
ccgcuugcuaggaucuccc

SEQ ID NO: 2898781 - RNA, 19 nt, Artificial Sequence
  Description of Artificial Sequence: Synthetic oligonucleotide
guggcaggauuugggcccc

SEQ ID NO: 2898782 - RNA, 19 nt, Artificial Sequence
  Description of Artificial Sequence: Synthetic oligonucleotide
ucaaggcaaggagggcaau

SEQ ID NO: 2898783 - RNA, 19 nt, Artificial Sequence
  Description of Artificial Sequence: Synthetic oligonucleotide
ugcccaagccgggucuaac

SEQ ID NO: 2898784 - RNA, 19 nt, Artificial Sequence
  Description of Artificial Sequence: Synthetic oligonucleotide
cgggugguaaacaccuccc

SEQ ID NO: 2898785 - RNA, 19 nt, Artificial Sequence
  Description of Artificial Sequence: Synthetic oligonucleotide
ccucccacgguuaggaaaa

SEQ ID NO: 2898786 - RNA, 19 nt, Artificial Sequence
  Description of Artificial Sequence: Synthetic oligonucleotide
guacuucuugcgggcuuug

SEQ ID NO: 2898787 - RNA, 19 nt, Artificial Sequence
  Description of Artificial Sequence: Synthetic oligonucleotide
cgcuggaugcaguugaaga

SEQ ID NO: 2898788 - RNA, 19 nt, Artificial Sequence
  Description of Artificial Sequence: Synthetic oligonucleotide
ggaagggaggguacacuuc

SEQ ID NO: 2898789 - RNA, 19 nt, Artificial Sequence
  Description of Artificial Sequence: Synthetic oligonucleotide
cuaggaucucccguguagu

SEQ ID NO: 2898790 - RNA, 19 nt, Artificial Sequence
  Description of Artificial Sequence: Synthetic oligonucleotide
acccagccgagaugcugga

SEQ ID NO: 2898791 - RNA, 19 nt, Artificial Sequence
  Description of Artificial Sequence: Synthetic oligonucleotide
ccgggucuaacccagccga

SEQ ID NO: 2898792 - RNA, 19 nt, Artificial Sequence
  Description of Artificial Sequence: Synthetic oligonucleotide
aagcuaugcgcggguggua

SEQ ID NO: 2898793 - RNA, 19 nt, Artificial Sequence
  Description of Artificial Sequence: Synthetic oligonucleotide
aucucccguguaguagcca

SEQ ID NO: 2898794 - RNA, 19 nt, Artificial Sequence
  Description of Artificial Sequence: Synthetic oligonucleotide
ggucuaacccagccgagau

SEQ ID NO: 2898795 - RNA, 19 nt, Artificial Sequence
  Description of Artificial Sequence: Synthetic oligonucleotide
accggguacuccaccuugu

SEQ ID NO: 2898796 - RNA, 19 nt, Artificial Sequence
  Description of Artificial Sequence: Synthetic oligonucleotide
ggguacacuuccaacgugu

SEQ ID NO: 2898797 - RNA, 19 nt, Artificial Sequence
  Description of Artificial Sequence: Synthetic oligonucleotide
agcacacaguugugcccau

SEQ ID NO: 2898798 - RNA, 19 nt, Artificial Sequence
  Description of Artificial Sequence: Synthetic oligonucleotide
gcuugcuaggaucucccgu

SEQ ID NO: 2898799 - RNA, 19 nt, Artificial Sequence
  Description of Artificial Sequence: Synthetic oligonucleotide
ccccacggauccucgauuc

SEQ ID NO: 2898800 - RNA, 19 nt, Artificial Sequence
  Description of Artificial Sequence: Synthetic oligonucleotide
ccagccgagaugcuggaaa

SEQ ID NO: 2898801 - RNA, 19 nt, Artificial Sequence
  Description of Artificial Sequence: Synthetic oligonucleotide
cccauucucagggucugug

SEQ ID NO: 2898802 - RNA, 19 nt, Artificial Sequence
  Description of Artificial Sequence: Synthetic oligonucleotide
caaggcaaggagggcaaua

SEQ ID NO: 2898803 - RNA, 19 nt, Artificial Sequence
  Description of Artificial Sequence: Synthetic oligonucleotide
cucgcuggaugcaguugaa

SEQ ID NO: 2898804 - RNA, 19 nt, Artificial Sequence
  Description of Artificial Sequence: Synthetic oligonucleotide
ccaucaaggcaaggagggc

SEQ ID NO: 2898805 - RNA, 19 nt, Artificial Sequence
  Description of Artificial Sequence: Synthetic oligonucleotide
uggcagcgccagugaggag

SEQ ID NO: 2898806 - RNA, 19 nt, Artificial Sequence
  Description of Artificial Sequence: Synthetic oligonucleotide
ggaugcaguugaagauaug

SEQ ID NO: 2898807 - RNA, 19 nt, Artificial Sequence
  Description of Artificial Sequence: Synthetic oligonucleotide
gaccccacggauccucgau

SEQ ID NO: 2898808 - RNA, 19 nt, Artificial Sequence
  Description of Artificial Sequence: Synthetic oligonucleotide
gcguagagaacucgcccaa

SEQ ID NO: 2898809 - RNA, 19 nt, Artificial Sequence
  Description of Artificial Sequence: Synthetic oligonucleotide
uuccgcuugcuaggaucuc

SEQ ID NO: 2898810 - RNA, 19 nt, Artificial Sequence
  Description of Artificial Sequence: Synthetic oligonucleotide
cuuguacuucuugcgggcu

SEQ ID NO: 2898811 - RNA, 19 nt, Artificial Sequence
  Description of Artificial Sequence: Synthetic oligonucleotide
gggucuaacccagccgaga

SEQ ID NO: 2898812 - RNA, 19 nt, Artificial Sequence
  Description of Artificial Sequence: Synthetic oligonucleotide
cccacggauccucgauucc

SEQ ID NO: 2898813 - RNA, 19 nt, Artificial Sequence
  Description of Artificial Sequence: Synthetic oligonucleotide
gacagccaucuuggcucug

SEQ ID NO: 2898814 - RNA, 19 nt, Artificial Sequence
  Description of Artificial Sequence: Synthetic oligonucleotide
ccuuagagaggacagccau

SEQ ID NO: 2898815 - RNA, 19 nt, Artificial Sequence
  Description of Artificial Sequence: Synthetic oligonucleotide
auccucgauuccgcuugcu

SEQ ID NO: 2898816 - RNA, 19 nt, Artificial Sequence
  Description of Artificial Sequence: Synthetic oligonucleotide
cccaacaauccaggccagg

SEQ ID NO: 2898817 - RNA, 19 nt, Artificial Sequence
  Description of Artificial Sequence: Synthetic oligonucleotide
ccaagccgggucuaaccca

SEQ ID NO: 2898818 - RNA, 19 nt, Artificial Sequence
  Description of Artificial Sequence: Synthetic oligonucleotide
caacguguucuggugggcu

SEQ ID NO: 2898819 - RNA, 19 nt, Artificial Sequence
  Description of Artificial Sequence: Synthetic oligonucleotide
ggucugugcuguacaugac

SEQ ID NO: 2898820 - RNA, 19 nt, Artificial Sequence
  Description of Artificial Sequence: Synthetic oligonucleotide
gguaaacaccucccacggu

SEQ ID NO: 2898821 - RNA, 19 nt, Artificial Sequence
  Description of Artificial Sequence: Synthetic oligonucleotide
ccaacguguucuggugggc

SEQ ID NO: 2898822 - RNA, 19 nt, Artificial Sequence
  Description of Artificial Sequence: Synthetic oligonucleotide
gcccaagccagaagcuaug

SEQ ID NO: 2898823 - RNA, 19 nt, Artificial Sequence
  Description of Artificial Sequence: Synthetic oligonucleotide
cguugauugcuagguggag

SEQ ID NO: 2898824 - RNA, 19 nt, Artificial Sequence
  Description of Artificial Sequence: Synthetic oligonucleotide
uugcuagguggagcaccau

SEQ ID NO: 2898825 - RNA, 19 nt, Artificial Sequence
  Description of Artificial Sequence: Synthetic oligonucleotide
ggcucgcuggaugcaguug

SEQ ID NO: 2898826 - RNA, 19 nt, Artificial Sequence
  Description of Artificial Sequence: Synthetic oligonucleotide
cggguacuccaccuuguac

SEQ ID NO: 2898827 - RNA, 19 nt, Artificial Sequence
  Description of Artificial Sequence: Synthetic oligonucleotide
gccagugaggagcacgaau

SEQ ID NO: 2898828 - RNA, 19 nt, Artificial Sequence
  Description of Artificial Sequence: Synthetic oligonucleotide
gcaccaugacaaagcuggc

SEQ ID NO: 2898829 - RNA, 19 nt, Artificial Sequence
  Description of Artificial Sequence: Synthetic oligonucleotide
ugcgggcuuugcucacguu

SEQ ID NO: 2898830 - RNA, 19 nt, Artificial Sequence
  Description of Artificial Sequence: Synthetic oligonucleotide
cgcuugcuaggaucucccg

SEQ ID NO: 2898831 - RNA, 19 nt, Artificial Sequence
  Description of Artificial Sequence: Synthetic oligonucleotide
cgggcuuugcucacguuga

SEQ ID NO: 2898832 - RNA, 19 nt, Artificial Sequence
  Description of Artificial Sequence: Synthetic oligonucleotide
cucccguguaguagccaua

SEQ ID NO: 2898833 - RNA, 19 nt, Artificial Sequence
  Description of Artificial Sequence: Synthetic oligonucleotide
gugcuguacaugaccgggu

SEQ ID NO: 2898834 - RNA, 19 nt, Artificial Sequence
  Description of Artificial Sequence: Synthetic oligonucleotide
ggaaagcagagcacacagu

SEQ ID NO: 2898835 - RNA, 19 nt, Artificial Sequence
  Description of Artificial Sequence: Synthetic oligonucleotide
cuuggcucuggcucaccuu

SEQ ID NO: 2898836 - RNA, 19 nt, Artificial Sequence
  Description of Artificial Sequence: Synthetic oligonucleotide
cagggucugugcuguacau

SEQ ID NO: 2898837 - RNA, 19 nt, Artificial Sequence
  Description of Artificial Sequence: Synthetic oligonucleotide
cuaacccagccgagaugcu

SEQ ID NO: 2898838 - RNA, 19 nt, Artificial Sequence
  Description of Artificial Sequence: Synthetic oligonucleotide
gcgccagugaggagcacga

SEQ ID NO: 2898839 - RNA, 19 nt, Artificial Sequence
  Description of Artificial Sequence: Synthetic oligonucleotide
caauccaggccaggcccaa

SEQ ID NO: 2898840 - RNA, 19 nt, Artificial Sequence
  Description of Artificial Sequence: Synthetic oligonucleotide
gcagcgccagugaggagca

SEQ ID NO: 2898841 - RNA, 19 nt, Artificial Sequence
  Description of Artificial Sequence: Synthetic oligonucleotide
ggacagccaucuuggcucu

SEQ ID NO: 2898842 - RNA, 19 nt, Artificial Sequence
  Description of Artificial Sequence: Synthetic oligonucleotide
gcccaacaauccaggccag

SEQ ID NO: 2898843 - RNA, 19 nt, Artificial Sequence
  Description of Artificial Sequence: Synthetic oligonucleotide
gcgcgggugguaaacaccu

SEQ ID NO: 2898844 - RNA, 19 nt, Artificial Sequence
  Description of Artificial Sequence: Synthetic oligonucleotide
gcacgaauccauauuccuu

SEQ ID NO: 2898845 - RNA, 19 nt, Artificial Sequence
  Description of Artificial Sequence: Synthetic oligonucleotide
gcuaugcgcgggugguaaa

SEQ ID NO: 2898846 - RNA, 19 nt, Artificial Sequence
  Description of Artificial Sequence: Synthetic oligonucleotide
cguagagaacucgcccaac

SEQ ID NO: 2898847 - RNA, 19 nt, Artificial Sequence
  Description of Artificial Sequence: Synthetic oligonucleotide
cgggucuaacccagccgag

SEQ ID NO: 2898848 - RNA, 19 nt, Artificial Sequence
  Description of Artificial Sequence: Synthetic oligonucleotide
cccguguaguagccauaug

SEQ ID NO: 2898849 - RNA, 19 nt, Artificial Sequence
  Description of Artificial Sequence: Synthetic oligonucleotide
caccucccacgguuaggaa

SEQ ID NO: 2898850 - RNA, 19 nt, Artificial Sequence
  Description of Artificial Sequence: Synthetic oligonucleotide
ggugggcucgcuggaugca

SEQ ID NO: 2898851 - RNA, 19 nt, Artificial Sequence
  Description of Artificial Sequence: Synthetic oligonucleotide
ggcccaagccagaagcuau

SEQ ID NO: 2898852 - RNA, 19 nt, Artificial Sequence
  Description of Artificial Sequence: Synthetic oligonucleotide
aggccaggcccaagccaga

SEQ ID NO: 2898853 - RNA, 19 nt, Artificial Sequence
  Description of Artificial Sequence: Synthetic oligonucleotide
gguacacuuccaacguguu

SEQ ID NO: 2898854 - RNA, 19 nt, Artificial Sequence
  Description of Artificial Sequence: Synthetic oligonucleotide
acuccaccuuguacuucuu

SEQ ID NO: 2898855 - RNA, 19 nt, Artificial Sequence
  Description of Artificial Sequence: Synthetic oligonucleotide
gcacacaguugugcccauc

SEQ ID NO: 2898856 - RNA, 19 nt, Artificial Sequence
  Description of Artificial Sequence: Synthetic oligonucleotide
ccagaagcuaugcgcgggu

SEQ ID NO: 2898857 - RNA, 19 nt, Artificial Sequence
  Description of Artificial Sequence: Synthetic oligonucleotide
ggagggcaauagaccccac

SEQ ID NO: 2898858 - RNA, 19 nt, Artificial Sequence
  Description of Artificial Sequence: Synthetic oligonucleotide
ggcuuugcucacguugauu

SEQ ID NO: 2898859 - RNA, 19 nt, Artificial Sequence
  Description of Artificial Sequence: Synthetic oligonucleotide
cugcccaagccgggucuaa

SEQ ID NO: 2898860 - RNA, 19 nt, Artificial Sequence
  Description of Artificial Sequence: Synthetic oligonucleotide
ggccaggcccaagccagaa

SEQ ID NO: 2898861 - RNA, 19 nt, Artificial Sequence
  Description of Artificial Sequence: Synthetic oligonucleotide
ccccugcccaagccggguc

SEQ ID NO: 2898862 - RNA, 19 nt, Artificial Sequence
  Description of Artificial Sequence: Synthetic oligonucleotide
gggcuuugcucacguugau

SEQ ID NO: 2898863 - RNA, 19 nt, Artificial Sequence
  Description of Artificial Sequence: Synthetic oligonucleotide
cagcgccagugaggagcac

SEQ ID NO: 2898864 - RNA, 19 nt, Artificial Sequence
  Description of Artificial Sequence: Synthetic oligonucleotide
guguucuggugggcucgcu

SEQ ID NO: 2898865 - RNA, 19 nt, Artificial Sequence
  Description of Artificial Sequence: Synthetic oligonucleotide
ccggguacuccaccuugua

SEQ ID NO: 2898866 - RNA, 19 nt, Artificial Sequence
  Description of Artificial Sequence: Synthetic oligonucleotide
cgcgggugguaaacaccuc

SEQ ID NO: 2898867 - RNA, 19 nt, Artificial Sequence
  Description of Artificial Sequence: Synthetic oligonucleotide
gggcucgcuggaugcaguu

SEQ ID NO: 2898868 - RNA, 19 nt, Artificial Sequence
  Description of Artificial Sequence: Synthetic oligonucleotide
cccugcccaagccgggucu

SEQ ID NO: 2898869 - RNA, 19 nt, Artificial Sequence
  Description of Artificial Sequence: Synthetic oligonucleotide
ccugcccaagccgggucua

SEQ ID NO: 2898870 - RNA, 19 nt, Artificial Sequence
  Description of Artificial Sequence: Synthetic oligonucleotide
cggauccucgauuccgcuu

SEQ ID NO: 2898871 - RNA, 19 nt, Artificial Sequence
  Description of Artificial Sequence: Synthetic oligonucleotide
gcccauucucagggucugu

SEQ ID NO: 2898872 - RNA, 19 nt, Artificial Sequence
  Description of Artificial Sequence: Synthetic oligonucleotide
cccagccgagaugcuggaa

SEQ ID NO: 2898873 - RNA, 19 nt, Artificial Sequence
  Description of Artificial Sequence: Synthetic oligonucleotide
cgauuccgcuugcuaggau

SEQ ID NO: 2898874 - RNA, 19 nt, Artificial Sequence
  Description of Artificial Sequence: Synthetic oligonucleotide
cgccagugaggagcacgaa

SEQ ID NO: 2898875 - RNA, 19 nt, Artificial Sequence
  Description of Artificial Sequence: Synthetic oligonucleotide
aauaacggaugauaaagcc

SEQ ID NO: 2898876 - RNA, 19 nt, Artificial Sequence
  Description of Artificial Sequence: Synthetic oligonucleotide
aagaaaacauuuucuaugc

SEQ ID NO: 2898877 - RNA, 19 nt, Artificial Sequence
  Description of Artificial Sequence: Synthetic oligonucleotide
gaaaucuacaagcagaacg

SEQ ID NO: 2898878 - RNA, 19 nt, Artificial Sequence
  Description of Artificial Sequence: Synthetic oligonucleotide
aaagaaaacauuuucuaug

SEQ ID NO: 2898879 - RNA, 19 nt, Artificial Sequence
  Description of Artificial Sequence: Synthetic oligonucleotide
aaucuucaaauuuucuugc

SEQ ID NO: 2898880 - RNA, 19 nt, Artificial Sequence
  Description of Artificial Sequence: Synthetic oligonucleotide
uuaacaacaagauagcugu

SEQ ID NO: 2898881 - RNA, 19 nt, Artificial Sequence
  Description of Artificial Sequence: Synthetic oligonucleotide
aauaagagcauagcaacgc

SEQ ID NO: 2898882 - RNA, 19 nt, Artificial Sequence
  Description of Artificial Sequence: Synthetic oligonucleotide
aaagccucuggauugauuc

SEQ ID NO: 2898883 - RNA, 19 nt, Artificial Sequence
  Description of Artificial Sequence: Synthetic oligonucleotide
auccuugaaaucuacaagc

SEQ ID NO: 2898884 - RNA, 19 nt, Artificial Sequence
  Description of Artificial Sequence: Synthetic oligonucleotide
aaaccaguauucaaaaucc

SEQ ID NO: 2898885 - RNA, 19 nt, Artificial Sequence
  Description of Artificial Sequence: Synthetic oligonucleotide
uuaauaacggaugauaaag

SEQ ID NO: 2898886 - RNA, 19 nt, Artificial Sequence
  Description of Artificial Sequence: Synthetic oligonucleotide
aacgccauggacuugggac

SEQ ID NO: 2898887 - RNA, 19 nt, Artificial Sequence
  Description of Artificial Sequence: Synthetic oligonucleotide
uuaaaagaaaacauuuucu

SEQ ID NO: 2898888 - RNA, 19 nt, Artificial Sequence
  Description of Artificial Sequence: Synthetic oligonucleotide
uuucuaugcagaaagcagg

SEQ ID NO: 2898889 - RNA, 19 nt, Artificial Sequence
  Description of Artificial Sequence: Synthetic oligonucleotide
gaaaacauuuucuaugcag

SEQ ID NO: 2898890 - RNA, 19 nt, Artificial Sequence
  Description of Artificial Sequence: Synthetic oligonucleotide
acauuuucuaugcagaaag

SEQ ID NO: 2898891 - RNA, 19 nt, Artificial Sequence
  Description of Artificial Sequence: Synthetic oligonucleotide
uacaucuugacuacaaugc

SEQ ID NO: 2898892 - RNA, 19 nt, Artificial Sequence
  Description of Artificial Sequence: Synthetic oligonucleotide
uaaauaagagcauagcaac

SEQ ID NO: 2898893 - RNA, 19 nt, Artificial Sequence
  Description of Artificial Sequence: Synthetic oligonucleotide
accguuaacaacaagauag

SEQ ID NO: 2898894 - RNA, 19 nt, Artificial Sequence
  Description of Artificial Sequence: Synthetic oligonucleotide
uauucaaaauccuugaaau

SEQ ID NO: 2898895 - RNA, 19 nt, Artificial Sequence
  Description of Artificial Sequence: Synthetic oligonucleotide
auuccuuguucacaaagcc

SEQ ID NO: 2898896 - RNA, 19 nt, Artificial Sequence
  Description of Artificial Sequence: Synthetic oligonucleotide
aacaagauagcugugacgu

SEQ ID NO: 2898897 - RNA, 19 nt, Artificial Sequence
  Description of Artificial Sequence: Synthetic oligonucleotide
uacauaaauaagagcauag

SEQ ID NO: 2898898 - RNA, 19 nt, Artificial Sequence
  Description of Artificial Sequence: Synthetic oligonucleotide
auuaucauuguacaucuug

SEQ ID NO: 2898899 - RNA, 19 nt, Artificial Sequence
  Description of Artificial Sequence: Synthetic oligonucleotide
ucagcuuguauuuucagca

SEQ ID NO: 2898900 - RNA, 19 nt, Artificial Sequence
  Description of Artificial Sequence: Synthetic oligonucleotide
gaaagcaggauuaucauug

SEQ ID NO: 2898901 - RNA, 19 nt, Artificial Sequence
  Description of Artificial Sequence: Synthetic oligonucleotide
aaauccuugaaaucuacaa

SEQ ID NO: 2898902 - RNA, 19 nt, Artificial Sequence
  Description of Artificial Sequence: Synthetic oligonucleotide
ugugacguaaacaugccca

SEQ ID NO: 2898903 - RNA, 19 nt, Artificial Sequence
  Description of Artificial Sequence: Synthetic oligonucleotide
aaacaugcccacuaguucu

SEQ ID NO: 2898904 - RNA, 19 nt, Artificial Sequence
  Description of Artificial Sequence: Synthetic oligonucleotide
uacaaugcaaucuucaaau

SEQ ID NO: 2898905 - RNA, 19 nt, Artificial Sequence
  Description of Artificial Sequence: Synthetic oligonucleotide
aagccguacacaaauagac

SEQ ID NO: 2898906 - RNA, 19 nt, Artificial Sequence
  Description of Artificial Sequence: Synthetic oligonucleotide
uaaaagaaaacauuuucua

SEQ ID NO: 2898907 - RNA, 19 nt, Artificial Sequence
  Description of Artificial Sequence: Synthetic oligonucleotide
uucuccuuaagccacuucc

SEQ ID NO: 2898908 - RNA, 19 nt, Artificial Sequence
  Description of Artificial Sequence: Synthetic oligonucleotide
uucaaauuuucuugcagag

SEQ ID NO: 2898909 - RNA, 19 nt, Artificial Sequence
  Description of Artificial Sequence: Synthetic oligonucleotide
caaucuucaaauuuucuug

SEQ ID NO: 2898910 - RNA, 19 nt, Artificial Sequence
  Description of Artificial Sequence: Synthetic oligonucleotide
uucaguacccuuucgaagc

SEQ ID NO: 2898911 - RNA, 19 nt, Artificial Sequence
  Description of Artificial Sequence: Synthetic oligonucleotide
acaagcagaacguccaugg

SEQ ID NO: 2898912 - RNA, 19 nt, Artificial Sequence
  Description of Artificial Sequence: Synthetic oligonucleotide
ucauuguacaucuugacua

SEQ ID NO: 2898913 - RNA, 19 nt, Artificial Sequence
  Description of Artificial Sequence: Synthetic oligonucleotide
auagcugugacguaaacau

SEQ ID NO: 2898914 - RNA, 19 nt, Artificial Sequence
  Description of Artificial Sequence: Synthetic oligonucleotide
ucgaagcuccuuaauaacg

SEQ ID NO: 2898915 - RNA, 19 nt, Artificial Sequence
  Description of Artificial Sequence: Synthetic oligonucleotide
ucuucaaauuuucuugcag

SEQ ID NO: 2898916 - RNA, 19 nt, Artificial Sequence
  Description of Artificial Sequence: Synthetic oligonucleotide
aagcagaacguccaugguc

SEQ ID NO: 2898917 - RNA, 19 nt, Artificial Sequence
  Description of Artificial Sequence: Synthetic oligonucleotide
uuaucauuguacaucuuga

SEQ ID NO: 2898918 - RNA, 19 nt, Artificial Sequence
  Description of Artificial Sequence: Synthetic oligonucleotide
aucagcuuguauuuucagc

SEQ ID NO: 2898919 - RNA, 19 nt, Artificial Sequence
  Description of Artificial Sequence: Synthetic oligonucleotide
auaagagcauagcaacgcc

SEQ ID NO: 2898920 - RNA, 19 nt, Artificial Sequence
  Description of Artificial Sequence: Synthetic oligonucleotide
ugauaaagccucuggauug

SEQ ID NO: 2898921 - RNA, 19 nt, Artificial Sequence
  Description of Artificial Sequence: Synthetic oligonucleotide
ucuacaagcagaacgucca

SEQ ID NO: 2898922 - RNA, 19 nt, Artificial Sequence
  Description of Artificial Sequence: Synthetic oligonucleotide
uccauggucucccucaccg

SEQ ID NO: 2898923 - RNA, 19 nt, Artificial Sequence
  Description of Artificial Sequence: Synthetic oligonucleotide
uaauaacggaugauaaagc

SEQ ID NO: 2898924 - RNA, 19 nt, Artificial Sequence
  Description of Artificial Sequence: Synthetic oligonucleotide
acaaauagacaguguuucc

SEQ ID NO: 2898925 - RNA, 19 nt, Artificial Sequence
  Description of Artificial Sequence: Synthetic oligonucleotide
acauaaauaagagcauagc

SEQ ID NO: 2898926 - RNA, 19 nt, Artificial Sequence
  Description of Artificial Sequence: Synthetic oligonucleotide
aggauuaucauuguacauc

SEQ ID NO: 2898927 - RNA, 19 nt, Artificial Sequence
  Description of Artificial Sequence: Synthetic oligonucleotide
aaaacauuuucuaugcaga

SEQ ID NO: 2898928 - RNA, 19 nt, Artificial Sequence
  Description of Artificial Sequence: Synthetic oligonucleotide
acaacaagauagcugugac

SEQ ID NO: 2898929 - RNA, 19 nt, Artificial Sequence
  Description of Artificial Sequence: Synthetic oligonucleotide
cagagcuugaaauaucugc

SEQ ID NO: 2898930 - RNA, 19 nt, Artificial Sequence
  Description of Artificial Sequence: Synthetic oligonucleotide
ugaaauaucugcucaggac

SEQ ID NO: 2898931 - RNA, 19 nt, Artificial Sequence
  Description of Artificial Sequence: Synthetic oligonucleotide
uaacggaugauaaagccuc

SEQ ID NO: 2898932 - RNA, 19 nt, Artificial Sequence
  Description of Artificial Sequence: Synthetic oligonucleotide
aaauaagagcauagcaacg

SEQ ID NO: 2898933 - RNA, 19 nt, Artificial Sequence
  Description of Artificial Sequence: Synthetic oligonucleotide
cauaucuaaaccaguauuc

SEQ ID NO: 2898934 - RNA, 19 nt, Artificial Sequence
  Description of Artificial Sequence: Synthetic oligonucleotide
aaaucuacaagcagaacgu

SEQ ID NO: 2898935 - RNA, 19 nt, Artificial Sequence
  Description of Artificial Sequence: Synthetic oligonucleotide
uguuuccauaucuaaacca

SEQ ID NO: 2898936 - RNA, 19 nt, Artificial Sequence
  Description of Artificial Sequence: Synthetic oligonucleotide
uccuuguucacaaagccgu

SEQ ID NO: 2898937 - RNA, 19 nt, Artificial Sequence
  Description of Artificial Sequence: Synthetic oligonucleotide
uucagguuggccgaggacg

SEQ ID NO: 2898938 - RNA, 19 nt, Artificial Sequence
  Description of Artificial Sequence: Synthetic oligonucleotide
aauuuucuugcagagcuug

SEQ ID NO: 2898939 - RNA, 19 nt, Artificial Sequence
  Description of Artificial Sequence: Synthetic oligonucleotide
uaugcagaaagcaggauua

SEQ ID NO: 2898940 - RNA, 19 nt, Artificial Sequence
  Description of Artificial Sequence: Synthetic oligonucleotide
agcugugacguaaacaugc

SEQ ID NO: 2898941 - RNA, 19 nt, Artificial Sequence
  Description of Artificial Sequence: Synthetic oligonucleotide
cacuaguucuccuuaagcc

SEQ ID NO: 2898942 - RNA, 19 nt, Artificial Sequence
  Description of Artificial Sequence: Synthetic oligonucleotide
uacacaaauagacaguguu

SEQ ID NO: 2898943 - RNA, 19 nt, Artificial Sequence
  Description of Artificial Sequence: Synthetic oligonucleotide
uuccuuguucacaaagccg

SEQ ID NO: 2898944 - RNA, 19 nt, Artificial Sequence
  Description of Artificial Sequence: Synthetic oligonucleotide
uuccccgucaaucagcuug

SEQ ID NO: 2898945 - RNA, 19 nt, Artificial Sequence
  Description of Artificial Sequence: Synthetic oligonucleotide
cauaaauaagagcauagca

SEQ ID NO: 2898946 - RNA, 19 nt, Artificial Sequence
  Description of Artificial Sequence: Synthetic oligonucleotide
agcuuguauuuucagcagc

SEQ ID NO: 2898947 - RNA, 19 nt, Artificial Sequence
  Description of Artificial Sequence: Synthetic oligonucleotide
agcaggauuaucauuguac

SEQ ID NO: 2898948 - RNA, 19 nt, Artificial Sequence
  Description of Artificial Sequence: Synthetic oligonucleotide
uuucgaagcuccuuaauaa

SEQ ID NO: 2898949 - RNA, 19 nt, Artificial Sequence
  Description of Artificial Sequence: Synthetic oligonucleotide
auaaauaagagcauagcaa

SEQ ID NO: 2898950 - RNA, 19 nt, Artificial Sequence
  Description of Artificial Sequence: Synthetic oligonucleotide
ucuaaaccaguauucaaaa

SEQ ID NO: 2898951 - RNA, 19 nt, Artificial Sequence
  Description of Artificial Sequence: Synthetic oligonucleotide
aaauagacaguguuuccau

SEQ ID NO: 2898952 - RNA, 19 nt, Artificial Sequence
  Description of Artificial Sequence: Synthetic oligonucleotide
guuaacaacaagauagcug

SEQ ID NO: 2898953 - RNA, 19 nt, Artificial Sequence
  Description of Artificial Sequence: Synthetic oligonucleotide
uugaaauaucugcucagga

SEQ ID NO: 2898954 - RNA, 19 nt, Artificial Sequence
  Description of Artificial Sequence: Synthetic oligonucleotide
aagccucuggauugauucc

SEQ ID NO: 2898955 - RNA, 19 nt, Artificial Sequence
  Description of Artificial Sequence: Synthetic oligonucleotide
acuaguucuccuuaagcca

SEQ ID NO: 2898956 - RNA, 19 nt, Artificial Sequence
  Description of Artificial Sequence: Synthetic oligonucleotide
uguauuuucagcagccuuu

SEQ ID NO: 2898957 - RNA, 19 nt, Artificial Sequence
  Description of Artificial Sequence: Synthetic oligonucleotide
aaugcaaucuucaaauuuu

SEQ ID NO: 2898958 - RNA, 19 nt, Artificial Sequence
  Description of Artificial Sequence: Synthetic oligonucleotide
aaacauuuucuaugcagaa

SEQ ID NO: 2898959 - RNA, 19 nt, Artificial Sequence
  Description of Artificial Sequence: Synthetic oligonucleotide
uggauugauuccuuguuca

SEQ ID NO: 2898960 - RNA, 19 nt, Artificial Sequence
  Description of Artificial Sequence: Synthetic oligonucleotide
aaucagcuuguauuuucag

SEQ ID NO: 2898961 - RNA, 19 nt, Artificial Sequence
  Description of Artificial Sequence: Synthetic oligonucleotide
accgcguucagguuggccg

SEQ ID NO: 2898962 - RNA, 19 nt, Artificial Sequence
  Description of Artificial Sequence: Synthetic oligonucleotide
guacaucuugacuacaaug

SEQ ID NO: 2898963 - RNA, 19 nt, Artificial Sequence
  Description of Artificial Sequence: Synthetic oligonucleotide
uugacuacaaugcaaucuu

SEQ ID NO: 2898964 - RNA, 19 nt, Artificial Sequence
  Description of Artificial Sequence: Synthetic oligonucleotide
cuggcuuacacagucacgg

SEQ ID NO: 2898965 - RNA, 19 nt, Artificial Sequence
  Description of Artificial Sequence: Synthetic oligonucleotide
uaaacaugcccacuaguuc

SEQ ID NO: 2898966 - RNA, 19 nt, Artificial Sequence
  Description of Artificial Sequence: Synthetic oligonucleotide
auugauuccuuguucacaa

SEQ ID NO: 2898967 - RNA, 19 nt, Artificial Sequence
  Description of Artificial Sequence: Synthetic oligonucleotide
guuuccauaucuaaaccag

SEQ ID NO: 2898968 - RNA, 19 nt, Artificial Sequence
  Description of Artificial Sequence: Synthetic oligonucleotide
aucauuguacaucuugacu

SEQ ID NO: 2898969 - RNA, 19 nt, Artificial Sequence
  Description of Artificial Sequence: Synthetic oligonucleotide
ugcagagcuugaaauaucu

SEQ ID NO: 2898970 - RNA, 19 nt, Artificial Sequence
  Description of Artificial Sequence: Synthetic oligonucleotide
cuugggaccguuaacaaca

SEQ ID NO: 2898971 - RNA, 19 nt, Artificial Sequence
  Description of Artificial Sequence: Synthetic oligonucleotide
gagcauagcaacgccaugg

SEQ ID NO: 2898972 - RNA, 19 nt, Artificial Sequence
  Description of Artificial Sequence: Synthetic oligonucleotide
uaagccacuucccacuggc

SEQ ID NO: 2898973 - RNA, 19 nt, Artificial Sequence
  Description of Artificial Sequence: Synthetic oligonucleotide
aacaacaagauagcuguga

SEQ ID NO: 2898974 - RNA, 19 nt, Artificial Sequence
  Description of Artificial Sequence: Synthetic oligonucleotide
uucagcagccuuuagugcu

SEQ ID NO: 2898975 - RNA, 19 nt, Artificial Sequence
  Description of Artificial Sequence: Synthetic oligonucleotide
uucuaugcagaaagcagga

SEQ ID NO: 2898976 - RNA, 19 nt, Artificial Sequence
  Description of Artificial Sequence: Synthetic oligonucleotide
uccuugaaaucuacaagca

SEQ ID NO: 2898977 - RNA, 19 nt, Artificial Sequence
  Description of Artificial Sequence: Synthetic oligonucleotide
ucugcucaggacuuccccg

SEQ ID NO: 2898978 - RNA, 19 nt, Artificial Sequence
  Description of Artificial Sequence: Synthetic oligonucleotide
aucuacaagcagaacgucc

SEQ ID NO: 2898979 - RNA, 19 nt, Artificial Sequence
  Description of Artificial Sequence: Synthetic oligonucleotide
uaagagcauagcaacgcca

SEQ ID NO: 2898980 - RNA, 19 nt, Artificial Sequence
  Description of Artificial Sequence: Synthetic oligonucleotide
caaagccguacacaaauag

SEQ ID NO: 2898981 - RNA, 19 nt, Artificial Sequence
  Description of Artificial Sequence: Synthetic oligonucleotide
agaacguccauggucuccc

SEQ ID NO: 2898982 - RNA, 19 nt, Artificial Sequence
  Description of Artificial Sequence: Synthetic oligonucleotide
acgccauggacuugggacc

SEQ ID NO: 2898983 - RNA, 19 nt, Artificial Sequence
  Description of Artificial Sequence: Synthetic oligonucleotide
acuugggaccguuaacaac

SEQ ID NO: 2898984 - RNA, 19 nt, Artificial Sequence
  Description of Artificial Sequence: Synthetic oligonucleotide
cuaguucuccuuaagccac

SEQ ID NO: 2898985 - RNA, 19 nt, Artificial Sequence
  Description of Artificial Sequence: Synthetic oligonucleotide
cuugaaauaucugcucagg

SEQ ID NO: 2898986 - RNA, 19 nt, Artificial Sequence
  Description of Artificial Sequence: Synthetic oligonucleotide
uaucauuguacaucuugac

SEQ ID NO: 2898987 - RNA, 19 nt, Artificial Sequence
  Description of Artificial Sequence: Synthetic oligonucleotide
gauuccuuguucacaaagc

SEQ ID NO: 2898988 - RNA, 19 nt, Artificial Sequence
  Description of Artificial Sequence: Synthetic oligonucleotide
ucaaucagcuuguauuuuc

SEQ ID NO: 2898989 - RNA, 19 nt, Artificial Sequence
  Description of Artificial Sequence: Synthetic oligonucleotide
auagacaguguuuccauau

SEQ ID NO: 2898990 - RNA, 19 nt, Artificial Sequence
  Description of Artificial Sequence: Synthetic oligonucleotide
aucugcucaggacuucccc

SEQ ID NO: 2898991 - RNA, 19 nt, Artificial Sequence
  Description of Artificial Sequence: Synthetic oligonucleotide
guauucaaaauccuugaaa

SEQ ID NO: 2898992 - RNA, 19 nt, Artificial Sequence
  Description of Artificial Sequence: Synthetic oligonucleotide
aaucuacaagcagaacguc

SEQ ID NO: 2898993 - RNA, 19 nt, Artificial Sequence
  Description of Artificial Sequence: Synthetic oligonucleotide
uuguucacaaagccguaca

SEQ ID NO: 2898994 - RNA, 19 nt, Artificial Sequence
  Description of Artificial Sequence: Synthetic oligonucleotide
cacaaauagacaguguuuc

SEQ ID NO: 2898995 - RNA, 19 nt, Artificial Sequence
  Description of Artificial Sequence: Synthetic oligonucleotide
ucuccuuaagccacuuccc

SEQ ID NO: 2898996 - RNA, 19 nt, Artificial Sequence
  Description of Artificial Sequence: Synthetic oligonucleotide
cuuuagugcuucaguaccc

SEQ ID NO: 2898997 - RNA, 19 nt, Artificial Sequence
  Description of Artificial Sequence: Synthetic oligonucleotide
uuccauaucuaaaccagua

SEQ ID NO: 2898998 - RNA, 19 nt, Artificial Sequence
  Description of Artificial Sequence: Synthetic oligonucleotide
cuucaguacccuuucgaag

SEQ ID NO: 2898999 - RNA, 19 nt, Artificial Sequence
  Description of Artificial Sequence: Synthetic oligonucleotide
ucaaauuuucuugcagagc

SEQ ID NO: 2899000 - RNA, 19 nt, Artificial Sequence
  Description of Artificial Sequence: Synthetic oligonucleotide
caaauuuucuugcagagcu

SEQ ID NO: 2899001 - RNA, 19 nt, Artificial Sequence
  Description of Artificial Sequence: Synthetic oligonucleotide
augauaaagccucuggauu

SEQ ID NO: 2899002 - RNA, 19 nt, Artificial Sequence
  Description of Artificial Sequence: Synthetic oligonucleotide
cuucaaauuuucuugcaga

SEQ ID NO: 2899003 - RNA, 19 nt, Artificial Sequence
  Description of Artificial Sequence: Synthetic oligonucleotide
uucuugcagagcuugaaau

SEQ ID NO: 2899004 - RNA, 19 nt, Artificial Sequence
  Description of Artificial Sequence: Synthetic oligonucleotide
uuuccauaucuaaaccagu

SEQ ID NO: 2899005 - RNA, 19 nt, Artificial Sequence
  Description of Artificial Sequence: Synthetic oligonucleotide
aaagcaggauuaucauugu

SEQ ID NO: 2899006 - RNA, 19 nt, Artificial Sequence
  Description of Artificial Sequence: Synthetic oligonucleotide
uaucuaaaccaguauucaa

SEQ ID NO: 2899007 - RNA, 19 nt, Artificial Sequence
  Description of Artificial Sequence: Synthetic oligonucleotide
caacaagauagcugugacg

SEQ ID NO: 2899008 - RNA, 19 nt, Artificial Sequence
  Description of Artificial Sequence: Synthetic oligonucleotide
auaucugcucaggacuucc

SEQ ID NO: 2899009 - RNA, 19 nt, Artificial Sequence
  Description of Artificial Sequence: Synthetic oligonucleotide
aguacccuuucgaagcucc

SEQ ID NO: 2899010 - RNA, 19 nt, Artificial Sequence
  Description of Artificial Sequence: Synthetic oligonucleotide
ugcuucaguacccuuucga

SEQ ID NO: 2899011 - RNA, 19 nt, Artificial Sequence
  Description of Artificial Sequence: Synthetic oligonucleotide
cauuguacaucuugacuac

SEQ ID NO: 2899012 - RNA, 19 nt, Artificial Sequence
  Description of Artificial Sequence: Synthetic oligonucleotide
auaucuaaaccaguauuca

SEQ ID NO: 2899013 - RNA, 19 nt, Artificial Sequence
  Description of Artificial Sequence: Synthetic oligonucleotide
agacaguguuuccauaucu

SEQ ID NO: 2899014 - RNA, 19 nt, Artificial Sequence
  Description of Artificial Sequence: Synthetic oligonucleotide
uccauaucuaaaccaguau

SEQ ID NO: 2899015 - RNA, 19 nt, Artificial Sequence
  Description of Artificial Sequence: Synthetic oligonucleotide
aauaucugcucaggacuuc

SEQ ID NO: 2899016 - RNA, 19 nt, Artificial Sequence
  Description of Artificial Sequence: Synthetic oligonucleotide
ugcaaucuucaaauuuucu

SEQ ID NO: 2899017 - RNA, 19 nt, Artificial Sequence
  Description of Artificial Sequence: Synthetic oligonucleotide
uucgaagcuccuuaauaac

SEQ ID NO: 2899018 - RNA, 19 nt, Artificial Sequence
  Description of Artificial Sequence: Synthetic oligonucleotide
uuguacaucuugacuacaa

SEQ ID NO: 2899019 - RNA, 19 nt, Artificial Sequence
  Description of Artificial Sequence: Synthetic oligonucleotide
gccguacacaaauagacag

SEQ ID NO: 2899020 - RNA, 19 nt, Artificial Sequence
  Description of Artificial Sequence: Synthetic oligonucleotide
uccuuaauaacggaugaua

SEQ ID NO: 2899021 - RNA, 19 nt, Artificial Sequence
  Description of Artificial Sequence: Synthetic oligonucleotide
ucuggauugauuccuuguu

SEQ ID NO: 2899022 - RNA, 19 nt, Artificial Sequence
  Description of Artificial Sequence: Synthetic oligonucleotide
aaagccguacacaaauaga

SEQ ID NO: 2899023 - RNA, 19 nt, Artificial Sequence
  Description of Artificial Sequence: Synthetic oligonucleotide
uuucagcagccuuuagugc

SEQ ID NO: 2899024 - RNA, 19 nt, Artificial Sequence
  Description of Artificial Sequence: Synthetic oligonucleotide
acaucuugacuacaaugca

SEQ ID NO: 2899025 - RNA, 19 nt, Artificial Sequence
  Description of Artificial Sequence: Synthetic oligonucleotide
acuacaaugcaaucuucaa

SEQ ID NO: 2899026 - RNA, 19 nt, Artificial Sequence
  Description of Artificial Sequence: Synthetic oligonucleotide
uuaagccacuucccacugg

SEQ ID NO: 2899027 - RNA, 19 nt, Artificial Sequence
  Description of Artificial Sequence: Synthetic oligonucleotide
agagcuugaaauaucugcu

SEQ ID NO: 2899028 - RNA, 19 nt, Artificial Sequence
  Description of Artificial Sequence: Synthetic oligonucleotide
aauagacaguguuuccaua

SEQ ID NO: 2899029 - RNA, 19 nt, Artificial Sequence
  Description of Artificial Sequence: Synthetic oligonucleotide
cauggucucccucaccgcg

SEQ ID NO: 2899030 - RNA, 19 nt, Artificial Sequence
  Description of Artificial Sequence: Synthetic oligonucleotide
auagcaacgccauggacuu

SEQ ID NO: 2899031 - RNA, 19 nt, Artificial Sequence
  Description of Artificial Sequence: Synthetic oligonucleotide
aaaauccuugaaaucuaca

SEQ ID NO: 2899032 - RNA, 19 nt, Artificial Sequence
  Description of Artificial Sequence: Synthetic oligonucleotide
uguacaucuugacuacaau

SEQ ID NO: 2899033 - RNA, 19 nt, Artificial Sequence
  Description of Artificial Sequence: Synthetic oligonucleotide
agauagcugugacguaaac

SEQ ID NO: 2899034 - RNA, 19 nt, Artificial Sequence
  Description of Artificial Sequence: Synthetic oligonucleotide
ccaguauucaaaauccuug

SEQ ID NO: 2899035 - RNA, 19 nt, Artificial Sequence
  Description of Artificial Sequence: Synthetic oligonucleotide
aguauucaaaauccuugaa

SEQ ID NO: 2899036 - RNA, 19 nt, Artificial Sequence
  Description of Artificial Sequence: Synthetic oligonucleotide
ucagguuggccgaggacgc

SEQ ID NO: 2899037 - RNA, 19 nt, Artificial Sequence
  Description of Artificial Sequence: Synthetic oligonucleotide
agcaacgccauggacuugg

SEQ ID NO: 2899038 - RNA, 19 nt, Artificial Sequence
  Description of Artificial Sequence: Synthetic oligonucleotide
uuguauuuucagcagccuu

SEQ ID NO: 2899039 - RNA, 19 nt, Artificial Sequence
  Description of Artificial Sequence: Synthetic oligonucleotide
aacauuuucuaugcagaaa

SEQ ID NO: 2899040 - RNA, 19 nt, Artificial Sequence
  Description of Artificial Sequence: Synthetic oligonucleotide
gaugauaaagccucuggau

SEQ ID NO: 2899041 - RNA, 19 nt, Artificial Sequence
  Description of Artificial Sequence: Synthetic oligonucleotide
cuuaauaacggaugauaaa

SEQ ID NO: 2899042 - RNA, 19 nt, Artificial Sequence
  Description of Artificial Sequence: Synthetic oligonucleotide
ucuugcagagcuugaaaua

SEQ ID NO: 2899043 - RNA, 19 nt, Artificial Sequence
  Description of Artificial Sequence: Synthetic oligonucleotide
agaaaacauuuucuaugca

SEQ ID NO: 2899044 - RNA, 19 nt, Artificial Sequence
  Description of Artificial Sequence: Synthetic oligonucleotide
auaacggaugauaaagccu

SEQ ID NO: 2899045 - RNA, 19 nt, Artificial Sequence
  Description of Artificial Sequence: Synthetic oligonucleotide
gauagcugugacguaaaca

SEQ ID NO: 2899046 - RNA, 19 nt, Artificial Sequence
  Description of Artificial Sequence: Synthetic oligonucleotide
aggacuuccccgucaauca

SEQ ID NO: 2899047 - RNA, 19 nt, Artificial Sequence
  Description of Artificial Sequence: Synthetic oligonucleotide
acagucacggguuuauaau

SEQ ID NO: 2899048 - RNA, 19 nt, Artificial Sequence
  Description of Artificial Sequence: Synthetic oligonucleotide
agucacggguuuauaauuc

SEQ ID NO: 2899049 - RNA, 19 nt, Artificial Sequence
  Description of Artificial Sequence: Synthetic oligonucleotide
aucuaaaccaguauucaaa

SEQ ID NO: 2899050 - RNA, 19 nt, Artificial Sequence
  Description of Artificial Sequence: Synthetic oligonucleotide
uauuuucagcagccuuuag

SEQ ID NO: 2899051 - RNA, 19 nt, Artificial Sequence
  Description of Artificial Sequence: Synthetic oligonucleotide
agcagaacguccauggucu

SEQ ID NO: 2899052 - RNA, 19 nt, Artificial Sequence
  Description of Artificial Sequence: Synthetic oligonucleotide
cauagcaacgccauggacu

SEQ ID NO: 2899053 - RNA, 19 nt, Artificial Sequence
  Description of Artificial Sequence: Synthetic oligonucleotide
aucuucaaauuuucuugca

SEQ ID NO: 2899054 - RNA, 19 nt, Artificial Sequence
  Description of Artificial Sequence: Synthetic oligonucleotide
uccuuaagccacuucccac

SEQ ID NO: 2899055 - RNA, 19 nt, Artificial Sequence
  Description of Artificial Sequence: Synthetic oligonucleotide
aacguccauggucucccuc

SEQ ID NO: 2899056 - RNA, 19 nt, Artificial Sequence
  Description of Artificial Sequence: Synthetic oligonucleotide
gauugauuccuuguucaca

SEQ ID NO: 2899057 - RNA, 19 nt, Artificial Sequence
  Description of Artificial Sequence: Synthetic oligonucleotide
gacuacaaugcaaucuuca

SEQ ID NO: 2899058 - RNA, 19 nt, Artificial Sequence
  Description of Artificial Sequence: Synthetic oligonucleotide
acguaaacaugcccacuag

SEQ ID NO: 2899059 - RNA, 19 nt, Artificial Sequence
  Description of Artificial Sequence: Synthetic oligonucleotide
ucccucaccgcguucaggu

SEQ ID NO: 2899060 - RNA, 19 nt, Artificial Sequence
  Description of Artificial Sequence: Synthetic oligonucleotide
caguauucaaaauccuuga

SEQ ID NO: 2899061 - RNA, 19 nt, Artificial Sequence
  Description of Artificial Sequence: Synthetic oligonucleotide
ccuuuagugcuucaguacc

SEQ ID NO: 2899062 - RNA, 19 nt, Artificial Sequence
  Description of Artificial Sequence: Synthetic oligonucleotide
uuuagugcuucaguacccu

SEQ ID NO: 2899063 - RNA, 19 nt, Artificial Sequence
  Description of Artificial Sequence: Synthetic oligonucleotide
aagagcauagcaacgccau

SEQ ID NO: 2899064 - RNA, 19 nt, Artificial Sequence
  Description of Artificial Sequence: Synthetic oligonucleotide
agaaagcaggauuaucauu

SEQ ID NO: 2899065 - RNA, 19 nt, Artificial Sequence
  Description of Artificial Sequence: Synthetic oligonucleotide
uaacaacaagauagcugug

SEQ ID NO: 2899066 - RNA, 19 nt, Artificial Sequence
  Description of Artificial Sequence: Synthetic oligonucleotide
gagcuugaaauaucugcuc

SEQ ID NO: 2899067 - RNA, 19 nt, Artificial Sequence
  Description of Artificial Sequence: Synthetic oligonucleotide
gacguaaacaugcccacua

SEQ ID NO: 2899068 - RNA, 19 nt, Artificial Sequence
  Description of Artificial Sequence: Synthetic oligonucleotide
caaauagacaguguuucca

SEQ ID NO: 2899069 - RNA, 19 nt, Artificial Sequence
  Description of Artificial Sequence: Synthetic oligonucleotide
aaauaucugcucaggacuu

SEQ ID NO: 2899070 - RNA, 19 nt, Artificial Sequence
  Description of Artificial Sequence: Synthetic oligonucleotide
aacaugcccacuaguucuc

SEQ ID NO: 2899071 - RNA, 19 nt, Artificial Sequence
  Description of Artificial Sequence: Synthetic oligonucleotide
cuggauugauuccuuguuc

SEQ ID NO: 2899072 - RNA, 19 nt, Artificial Sequence
  Description of Artificial Sequence: Synthetic oligonucleotide
uagacaguguuuccauauc

SEQ ID NO: 2899073 - RNA, 19 nt, Artificial Sequence
  Description of Artificial Sequence: Synthetic oligonucleotide
agcuccuuaauaacggaug

SEQ ID NO: 2899074 - RNA, 19 nt, Artificial Sequence
  Description of Artificial Sequence: Synthetic oligonucleotide
ucaguacccuuucgaagcu

SEQ ID NO: 2899075 - RNA, 19 nt, Artificial Sequence
  Description of Artificial Sequence: Synthetic oligonucleotide
uggcuuacacagucacggg

SEQ ID NO: 2899076 - RNA, 19 nt, Artificial Sequence
  Description of Artificial Sequence: Synthetic oligonucleotide
gaagcuccuuaauaacgga

SEQ ID NO: 2899077 - RNA, 19 nt, Artificial Sequence
  Description of Artificial Sequence: Synthetic oligonucleotide
cucaccgcguucagguugg

SEQ ID NO: 2899078 - RNA, 19 nt, Artificial Sequence
  Description of Artificial Sequence: Synthetic oligonucleotide
ugacuacaaugcaaucuuc

SEQ ID NO: 2899079 - RNA, 19 nt, Artificial Sequence
  Description of Artificial Sequence: Synthetic oligonucleotide
uagcugugacguaaacaug

SEQ ID NO: 2899080 - RNA, 19 nt, Artificial Sequence
  Description of Artificial Sequence: Synthetic oligonucleotide
uaucugcucaggacuuccc

SEQ ID NO: 2899081 - RNA, 19 nt, Artificial Sequence
  Description of Artificial Sequence: Synthetic oligonucleotide
aucuugacuacaaugcaau

SEQ ID NO: 2899082 - RNA, 19 nt, Artificial Sequence
  Description of Artificial Sequence: Synthetic oligonucleotide
ucuugacuacaaugcaauc

SEQ ID NO: 2899083 - RNA, 19 nt, Artificial Sequence
  Description of Artificial Sequence: Synthetic oligonucleotide
cugugacguaaacaugccc

SEQ ID NO: 2899084 - RNA, 19 nt, Artificial Sequence
  Description of Artificial Sequence: Synthetic oligonucleotide
uacaagcagaacguccaug

SEQ ID NO: 2899085 - RNA, 19 nt, Artificial Sequence
  Description of Artificial Sequence: Synthetic oligonucleotide
gcagaaagcaggauuauca

SEQ ID NO: 2899086 - RNA, 19 nt, Artificial Sequence
  Description of Artificial Sequence: Synthetic oligonucleotide
acguccauggucucccuca

SEQ ID NO: 2899087 - RNA, 19 nt, Artificial Sequence
  Description of Artificial Sequence: Synthetic oligonucleotide
cuacaaugcaaucuucaaa

SEQ ID NO: 2899088 - RNA, 19 nt, Artificial Sequence
  Description of Artificial Sequence: Synthetic oligonucleotide
agccuuuagugcuucagua

SEQ ID NO: 2899089 - RNA, 19 nt, Artificial Sequence
  Description of Artificial Sequence: Synthetic oligonucleotide
uggacuugggaccguuaac

SEQ ID NO: 2899090 - RNA, 19 nt, Artificial Sequence
  Description of Artificial Sequence: Synthetic oligonucleotide
cuuaagccacuucccacug

SEQ ID NO: 2899091 - RNA, 19 nt, Artificial Sequence
  Description of Artificial Sequence: Synthetic oligonucleotide
gugacguaaacaugcccac

SEQ ID NO: 2899092 - RNA, 19 nt, Artificial Sequence
  Description of Artificial Sequence: Synthetic oligonucleotide
acggguuuauaauucuuuu

SEQ ID NO: 2899093 - RNA, 19 nt, Artificial Sequence
  Description of Artificial Sequence: Synthetic oligonucleotide
cuuucgaagcuccuuaaua

SEQ ID NO: 2899094 - RNA, 19 nt, Artificial Sequence
  Description of Artificial Sequence: Synthetic oligonucleotide
agcauagcaacgccaugga

SEQ ID NO: 2899095 - RNA, 19 nt, Artificial Sequence
  Description of Artificial Sequence: Synthetic oligonucleotide
aaccaguauucaaaauccu

SEQ ID NO: 2899096 - RNA, 19 nt, Artificial Sequence
  Description of Artificial Sequence: Synthetic oligonucleotide
gcaggauuaucauuguaca

SEQ ID NO: 2899097 - RNA, 19 nt, Artificial Sequence
  Description of Artificial Sequence: Synthetic oligonucleotide
caaucagcuuguauuuuca

SEQ ID NO: 2899098 - RNA, 19 nt, Artificial Sequence
  Description of Artificial Sequence: Synthetic oligonucleotide
ggaugauaaagccucugga

SEQ ID NO: 2899099 - RNA, 19 nt, Artificial Sequence
  Description of Artificial Sequence: Synthetic oligonucleotide
cuuguucacaaagccguac

SEQ ID NO: 2899100 - RNA, 19 nt, Artificial Sequence
  Description of Artificial Sequence: Synthetic oligonucleotide
ggauuaucauuguacaucu

SEQ ID NO: 2899101 - RNA, 19 nt, Artificial Sequence
  Description of Artificial Sequence: Synthetic oligonucleotide
gauaaagccucuggauuga

SEQ ID NO: 2899102 - RNA, 19 nt, Artificial Sequence
  Description of Artificial Sequence: Synthetic oligonucleotide
caucuugacuacaaugcaa

SEQ ID NO: 2899103 - RNA, 19 nt, Artificial Sequence
  Description of Artificial Sequence: Synthetic oligonucleotide
auggacuugggaccguuaa

SEQ ID NO: 2899104 - RNA, 19 nt, Artificial Sequence
  Description of Artificial Sequence: Synthetic oligonucleotide
uugcagagcuugaaauauc

SEQ ID NO: 2899105 - RNA, 19 nt, Artificial Sequence
  Description of Artificial Sequence: Synthetic oligonucleotide
cgaagcuccuuaauaacgg

SEQ ID NO: 2899106 - RNA, 19 nt, Artificial Sequence
  Description of Artificial Sequence: Synthetic oligonucleotide
aagcaggauuaucauugua

SEQ ID NO: 2899107 - RNA, 19 nt, Artificial Sequence
  Description of Artificial Sequence: Synthetic oligonucleotide
acaaugcaaucuucaaauu

SEQ ID NO: 2899108 - RNA, 19 nt, Artificial Sequence
  Description of Artificial Sequence: Synthetic oligonucleotide
gggaccguuaacaacaaga

SEQ ID NO: 2899109 - RNA, 19 nt, Artificial Sequence
  Description of Artificial Sequence: Synthetic oligonucleotide
gcuuguauuuucagcagcc

SEQ ID NO: 2899110 - RNA, 19 nt, Artificial Sequence
  Description of Artificial Sequence: Synthetic oligonucleotide
agagcauagcaacgccaug

SEQ ID NO: 2899111 - RNA, 19 nt, Artificial Sequence
  Description of Artificial Sequence: Synthetic oligonucleotide
cuugacuacaaugcaaucu

SEQ ID NO: 2899112 - RNA, 19 nt, Artificial Sequence
  Description of Artificial Sequence: Synthetic oligonucleotide
aagcuccuuaauaacggau

SEQ ID NO: 2899113 - RNA, 19 nt, Artificial Sequence
  Description of Artificial Sequence: Synthetic oligonucleotide
ccuugaaaucuacaagcag

SEQ ID NO: 2899114 - RNA, 19 nt, Artificial Sequence
  Description of Artificial Sequence: Synthetic oligonucleotide
caagauagcugugacguaa

SEQ ID NO: 2899115 - RNA, 19 nt, Artificial Sequence
  Description of Artificial Sequence: Synthetic oligonucleotide
ugcagaaagcaggauuauc

SEQ ID NO: 2899116 - RNA, 19 nt, Artificial Sequence
  Description of Artificial Sequence: Synthetic oligonucleotide
ucacggguuuauaauucuu

SEQ ID NO: 2899117 - RNA, 19 nt, Artificial Sequence
  Description of Artificial Sequence: Synthetic oligonucleotide
cuucccacuggcuuacaca

SEQ ID NO: 2899118 - RNA, 19 nt, Artificial Sequence
  Description of Artificial Sequence: Synthetic oligonucleotide
acaugcccacuaguucucc

SEQ ID NO: 2899119 - RNA, 19 nt, Artificial Sequence
  Description of Artificial Sequence: Synthetic oligonucleotide
uaaagccucuggauugauu

SEQ ID NO: 2899120 - RNA, 19 nt, Artificial Sequence
  Description of Artificial Sequence: Synthetic oligonucleotide
acuggcuuacacagucacg

SEQ ID NO: 2899121 - RNA, 19 nt, Artificial Sequence
  Description of Artificial Sequence: Synthetic oligonucleotide
uacacagucacggguuuau

SEQ ID NO: 2899122 - RNA, 19 nt, Artificial Sequence
  Description of Artificial Sequence: Synthetic oligonucleotide
gacuuccccgucaaucagc

SEQ ID NO: 2899123 - RNA, 19 nt, Artificial Sequence
  Description of Artificial Sequence: Synthetic oligonucleotide
ugggaccguuaacaacaag

SEQ ID NO: 2899124 - RNA, 19 nt, Artificial Sequence
  Description of Artificial Sequence: Synthetic oligonucleotide
uaguucuccuuaagccacu

SEQ ID NO: 2899125 - RNA, 19 nt, Artificial Sequence
  Description of Artificial Sequence: Synthetic oligonucleotide
caggacuuccccgucaauc

SEQ ID NO: 2899126 - RNA, 19 nt, Artificial Sequence
  Description of Artificial Sequence: Synthetic oligonucleotide
ccguuaacaacaagauagc

SEQ ID NO: 2899127 - RNA, 19 nt, Artificial Sequence
  Description of Artificial Sequence: Synthetic oligonucleotide
aaauuuucuugcagagcuu

SEQ ID NO: 2899128 - RNA, 19 nt, Artificial Sequence
  Description of Artificial Sequence: Synthetic oligonucleotide
gaccguuaacaacaagaua

SEQ ID NO: 2899129 - RNA, 19 nt, Artificial Sequence
  Description of Artificial Sequence: Synthetic oligonucleotide
cacaaagccguacacaaau

SEQ ID NO: 2899130 - RNA, 19 nt, Artificial Sequence
  Description of Artificial Sequence: Synthetic oligonucleotide
ccuuaauaacggaugauaa

SEQ ID NO: 2899131 - RNA, 19 nt, Artificial Sequence
  Description of Artificial Sequence: Synthetic oligonucleotide
ccacuaguucuccuuaagc

SEQ ID NO: 2899132 - RNA, 19 nt, Artificial Sequence
  Description of Artificial Sequence: Synthetic oligonucleotide
aagauagcugugacguaaa

SEQ ID NO: 2899133 - RNA, 19 nt, Artificial Sequence
  Description of Artificial Sequence: Synthetic oligonucleotide
cacagucacggguuuauaa

SEQ ID NO: 2899134 - RNA, 19 nt, Artificial Sequence
  Description of Artificial Sequence: Synthetic oligonucleotide
accaguauucaaaauccuu

SEQ ID NO: 2899135 - RNA, 19 nt, Artificial Sequence
  Description of Artificial Sequence: Synthetic oligonucleotide
ugacguaaacaugcccacu

SEQ ID NO: 2899136 - RNA, 19 nt, Artificial Sequence
  Description of Artificial Sequence: Synthetic oligonucleotide
ucagcagccuuuagugcuu

SEQ ID NO: 2899137 - RNA, 19 nt, Artificial Sequence
  Description of Artificial Sequence: Synthetic oligonucleotide
acccuuucgaagcuccuua

SEQ ID NO: 2899138 - RNA, 19 nt, Artificial Sequence
  Description of Artificial Sequence: Synthetic oligonucleotide
agguuggccgaggacgccg

SEQ ID NO: 2899139 - RNA, 19 nt, Artificial Sequence
  Description of Artificial Sequence: Synthetic oligonucleotide
gaggacgccgcgcccgcgg

SEQ ID NO: 2899140 - RNA, 19 nt, Artificial Sequence
  Description of Artificial Sequence: Synthetic oligonucleotide
ucuaugcagaaagcaggau

SEQ ID NO: 2899141 - RNA, 19 nt, Artificial Sequence
  Description of Artificial Sequence: Synthetic oligonucleotide
ggauugauuccuuguucac

SEQ ID NO: 2899142 - RNA, 19 nt, Artificial Sequence
  Description of Artificial Sequence: Synthetic oligonucleotide
ugcccacuaguucuccuua

SEQ ID NO: 2899143 - RNA, 19 nt, Artificial Sequence
  Description of Artificial Sequence: Synthetic oligonucleotide
agccacuucccacuggcuu

SEQ ID NO: 2899144 - RNA, 19 nt, Artificial Sequence
  Description of Artificial Sequence: Synthetic oligonucleotide
uugggaccguuaacaacaa

SEQ ID NO: 2899145 - RNA, 19 nt, Artificial Sequence
  Description of Artificial Sequence: Synthetic oligonucleotide
gcuccuuaauaacggauga

SEQ ID NO: 2899146 - RNA, 19 nt, Artificial Sequence
  Description of Artificial Sequence: Synthetic oligonucleotide
aacggaugauaaagccucu

SEQ ID NO: 2899147 - RNA, 19 nt, Artificial Sequence
  Description of Artificial Sequence: Synthetic oligonucleotide
gccuuuagugcuucaguac

SEQ ID NO: 2899148 - RNA, 19 nt, Artificial Sequence
  Description of Artificial Sequence: Synthetic oligonucleotide
cuccuuaagccacuuccca

SEQ ID NO: 2899149 - RNA, 19 nt, Artificial Sequence
  Description of Artificial Sequence: Synthetic oligonucleotide
uugauuccuuguucacaaa

SEQ ID NO: 2899150 - RNA, 19 nt, Artificial Sequence
  Description of Artificial Sequence: Synthetic oligonucleotide
caaugcaaucuucaaauuu

SEQ ID NO: 2899151 - RNA, 19 nt, Artificial Sequence
  Description of Artificial Sequence: Synthetic oligonucleotide
agccguacacaaauagaca

SEQ ID NO: 2899152 - RNA, 19 nt, Artificial Sequence
  Description of Artificial Sequence: Synthetic oligonucleotide
agccucuggauugauuccu

SEQ ID NO: 2899153 - RNA, 19 nt, Artificial Sequence
  Description of Artificial Sequence: Synthetic oligonucleotide
cguacacaaauagacagug

SEQ ID NO: 2899154 - RNA, 19 nt, Artificial Sequence
  Description of Artificial Sequence: Synthetic oligonucleotide
guaaacaugcccacuaguu

SEQ ID NO: 2899155 - RNA, 19 nt, Artificial Sequence
  Description of Artificial Sequence: Synthetic oligonucleotide
gugcuucaguacccuuucg

SEQ ID NO: 2899156 - RNA, 19 nt, Artificial Sequence
  Description of Artificial Sequence: Synthetic oligonucleotide
ucucccucaccgcguucag

SEQ ID NO: 2899157 - RNA, 19 nt, Artificial Sequence
  Description of Artificial Sequence: Synthetic oligonucleotide
cagaacguccauggucucc

SEQ ID NO: 2899158 - RNA, 19 nt, Artificial Sequence
  Description of Artificial Sequence: Synthetic oligonucleotide
cuaugcagaaagcaggauu

SEQ ID NO: 2899159 - RNA, 19 nt, Artificial Sequence
  Description of Artificial Sequence: Synthetic oligonucleotide
uuagugcuucaguacccuu

SEQ ID NO: 2899160 - RNA, 19 nt, Artificial Sequence
  Description of Artificial Sequence: Synthetic oligonucleotide
acuuccccgucaaucagcu

SEQ ID NO: 2899161 - RNA, 19 nt, Artificial Sequence
  Description of Artificial Sequence: Synthetic oligonucleotide
acggaugauaaagccucug

SEQ ID NO: 2899162 - RNA, 19 nt, Artificial Sequence
  Description of Artificial Sequence: Synthetic oligonucleotide
auuuucuugcagagcuuga

SEQ ID NO: 2899163 - RNA, 19 nt, Artificial Sequence
  Description of Artificial Sequence: Synthetic oligonucleotide
guucagguuggccgaggac

SEQ ID NO: 2899164 - RNA, 19 nt, Artificial Sequence
  Description of Artificial Sequence: Synthetic oligonucleotide
cggaugauaaagccucugg

SEQ ID NO: 2899165 - RNA, 19 nt, Artificial Sequence
  Description of Artificial Sequence: Synthetic oligonucleotide
gcaaucuucaaauuuucuu

SEQ ID NO: 2899166 - RNA, 19 nt, Artificial Sequence
  Description of Artificial Sequence: Synthetic oligonucleotide
cuugcagagcuugaaauau

SEQ ID NO: 2899167 - RNA, 19 nt, Artificial Sequence
  Description of Artificial Sequence: Synthetic oligonucleotide
acaagauagcugugacgua

SEQ ID NO: 2899168 - RNA, 19 nt, Artificial Sequence
  Description of Artificial Sequence: Synthetic oligonucleotide
gcuucaguacccuuucgaa

SEQ ID NO: 2899169 - RNA, 19 nt, Artificial Sequence
  Description of Artificial Sequence: Synthetic oligonucleotide
ggacuuccccgucaaucag

SEQ ID NO: 2899170 - RNA, 19 nt, Artificial Sequence
  Description of Artificial Sequence: Synthetic oligonucleotide
guauuuucagcagccuuua

SEQ ID NO: 2899171 - RNA, 19 nt, Artificial Sequence
  Description of Artificial Sequence: Synthetic oligonucleotide
augcccacuaguucuccuu

SEQ ID NO: 2899172 - RNA, 19 nt, Artificial Sequence
  Description of Artificial Sequence: Synthetic oligonucleotide
gucacggguuuauaauucu

SEQ ID NO: 2899173 - RNA, 19 nt, Artificial Sequence
  Description of Artificial Sequence: Synthetic oligonucleotide
cuaaaccaguauucaaaau

SEQ ID NO: 2899174 - RNA, 19 nt, Artificial Sequence
  Description of Artificial Sequence: Synthetic oligonucleotide
ucccacuggcuuacacagu

SEQ ID NO: 2899175 - RNA, 19 nt, Artificial Sequence
  Description of Artificial Sequence: Synthetic oligonucleotide
uuacacagucacggguuua

SEQ ID NO: 2899176 - RNA, 19 nt, Artificial Sequence
  Description of Artificial Sequence: Synthetic oligonucleotide
cucuggauugauuccuugu

SEQ ID NO: 2899177 - RNA, 19 nt, Artificial Sequence
  Description of Artificial Sequence: Synthetic oligonucleotide
cagaaagcaggauuaucau

SEQ ID NO: 2899178 - RNA, 19 nt, Artificial Sequence
  Description of Artificial Sequence: Synthetic oligonucleotide
guucuccuuaagccacuuc

SEQ ID NO: 2899179 - RNA, 19 nt, Artificial Sequence
  Description of Artificial Sequence: Synthetic oligonucleotide
gcagccuuuagugcuucag

SEQ ID NO: 2899180 - RNA, 19 nt, Artificial Sequence
  Description of Artificial Sequence: Synthetic oligonucleotide
ucaggacuuccccgucaau

SEQ ID NO: 2899181 - RNA, 19 nt, Artificial Sequence
  Description of Artificial Sequence: Synthetic oligonucleotide
gcugugacguaaacaugcc

SEQ ID NO: 2899182 - RNA, 19 nt, Artificial Sequence
  Description of Artificial Sequence: Synthetic oligonucleotide
guuggccgaggacgccgcg

SEQ ID NO: 2899183 - RNA, 19 nt, Artificial Sequence
  Description of Artificial Sequence: Synthetic oligonucleotide
gucucccucaccgcguuca

SEQ ID NO: 2899184 - RNA, 19 nt, Artificial Sequence
  Description of Artificial Sequence: Synthetic oligonucleotide
cccacuaguucuccuuaag

SEQ ID NO: 2899185 - RNA, 19 nt, Artificial Sequence
  Description of Artificial Sequence: Synthetic oligonucleotide
gcauagcaacgccauggac

SEQ ID NO: 2899186 - RNA, 19 nt, Artificial Sequence
  Description of Artificial Sequence: Synthetic oligonucleotide
cacggguuuauaauucuuu

SEQ ID NO: 2899187 - RNA, 19 nt, Artificial Sequence
  Description of Artificial Sequence: Synthetic oligonucleotide
auaaagccucuggauugau

SEQ ID NO: 2899188 - RNA, 19 nt, Artificial Sequence
  Description of Artificial Sequence: Synthetic oligonucleotide
caggauuaucauuguacau

SEQ ID NO: 2899189 - RNA, 19 nt, Artificial Sequence
  Description of Artificial Sequence: Synthetic oligonucleotide
augcagaaagcaggauuau

SEQ ID NO: 2899190 - RNA, 19 nt, Artificial Sequence
  Description of Artificial Sequence: Synthetic oligonucleotide
ccucaccgcguucagguug

SEQ ID NO: 2899191 - RNA, 19 nt, Artificial Sequence
  Description of Artificial Sequence: Synthetic oligonucleotide
acaaagccguacacaaaua

SEQ ID NO: 2899192 - RNA, 19 nt, Artificial Sequence
  Description of Artificial Sequence: Synthetic oligonucleotide
uggucucccucaccgcguu

SEQ ID NO: 2899193 - RNA, 19 nt, Artificial Sequence
  Description of Artificial Sequence: Synthetic oligonucleotide
cucaggacuuccccgucaa

SEQ ID NO: 2899194 - RNA, 19 nt, Artificial Sequence
  Description of Artificial Sequence: Synthetic oligonucleotide
ggcuuacacagucacgggu

SEQ ID NO: 2899195 - RNA, 19 nt, Artificial Sequence
  Description of Artificial Sequence: Synthetic oligonucleotide
gcagagcuugaaauaucug

SEQ ID NO: 2899196 - RNA, 19 nt, Artificial Sequence
  Description of Artificial Sequence: Synthetic oligonucleotide
cucccucaccgcguucagg

SEQ ID NO: 2899197 - RNA, 19 nt, Artificial Sequence
  Description of Artificial Sequence: Synthetic oligonucleotide
cagucacggguuuauaauu

SEQ ID NO: 2899198 - RNA, 19 nt, Artificial Sequence
  Description of Artificial Sequence: Synthetic oligonucleotide
guacacaaauagacagugu

SEQ ID NO: 2899199 - RNA, 19 nt, Artificial Sequence
  Description of Artificial Sequence: Synthetic oligonucleotide
ccucuggauugauuccuug

SEQ ID NO: 2899200 - RNA, 19 nt, Artificial Sequence
  Description of Artificial Sequence: Synthetic oligonucleotide
aguucuccuuaagccacuu

SEQ ID NO: 2899201 - RNA, 19 nt, Artificial Sequence
  Description of Artificial Sequence: Synthetic oligonucleotide
ggaccguuaacaacaagau

SEQ ID NO: 2899202 - RNA, 19 nt, Artificial Sequence
  Description of Artificial Sequence: Synthetic oligonucleotide
ccauaucuaaaccaguauu

SEQ ID NO: 2899203 - RNA, 19 nt, Artificial Sequence
  Description of Artificial Sequence: Synthetic oligonucleotide
ccgucaaucagcuuguauu

SEQ ID NO: 2899204 - RNA, 19 nt, Artificial Sequence
  Description of Artificial Sequence: Synthetic oligonucleotide
auggucucccucaccgcgu

SEQ ID NO: 2899205 - RNA, 19 nt, Artificial Sequence
  Description of Artificial Sequence: Synthetic oligonucleotide
ccuuaagccacuucccacu

SEQ ID NO: 2899206 - RNA, 19 nt, Artificial Sequence
  Description of Artificial Sequence: Synthetic oligonucleotide
cagccuuuagugcuucagu

SEQ ID NO: 2899207 - RNA, 19 nt, Artificial Sequence
  Description of Artificial Sequence: Synthetic oligonucleotide
cugcucaggacuuccccgu

SEQ ID NO: 2899208 - RNA, 19 nt, Artificial Sequence
  Description of Artificial Sequence: Synthetic oligonucleotide
caccgcguucagguuggcc

SEQ ID NO: 2899209 - RNA, 19 nt, Artificial Sequence
  Description of Artificial Sequence: Synthetic oligonucleotide
caguacccuuucgaagcuc

SEQ ID NO: 2899210 - RNA, 19 nt, Artificial Sequence
  Description of Artificial Sequence: Synthetic oligonucleotide
ccauggucucccucaccgc

SEQ ID NO: 2899211 - RNA, 19 nt, Artificial Sequence
  Description of Artificial Sequence: Synthetic oligonucleotide
gccacuucccacuggcuua

SEQ ID NO: 2899212 - RNA, 19 nt, Artificial Sequence
  Description of Artificial Sequence: Synthetic oligonucleotide
cuuacacagucacggguuu

SEQ ID NO: 2899213 - RNA, 19 nt, Artificial Sequence
  Description of Artificial Sequence: Synthetic oligonucleotide
cauggacuugggaccguua

SEQ ID NO: 2899214 - RNA, 19 nt, Artificial Sequence
  Description of Artificial Sequence: Synthetic oligonucleotide
uagcaacgccauggacuug

SEQ ID NO: 2899215 - RNA, 19 nt, Artificial Sequence
  Description of Artificial Sequence: Synthetic oligonucleotide
caacgccauggacuuggga

SEQ ID NO: 2899216 - RNA, 19 nt, Artificial Sequence
  Description of Artificial Sequence: Synthetic oligonucleotide
caagcagaacguccauggu

SEQ ID NO: 2899217 - RNA, 19 nt, Artificial Sequence
  Description of Artificial Sequence: Synthetic oligonucleotide
cagguuggccgaggacgcc

SEQ ID NO: 2899218 - RNA, 19 nt, Artificial Sequence
  Description of Artificial Sequence: Synthetic oligonucleotide
gauuaucauuguacaucuu

SEQ ID NO: 2899219 - RNA, 19 nt, Artificial Sequence
  Description of Artificial Sequence: Synthetic oligonucleotide
acacagucacggguuuaua

SEQ ID NO: 2899220 - RNA, 19 nt, Artificial Sequence
  Description of Artificial Sequence: Synthetic oligonucleotide
caugcccacuaguucuccu

SEQ ID NO: 2899221 - RNA, 19 nt, Artificial Sequence
  Description of Artificial Sequence: Synthetic oligonucleotide
gguuggccgaggacgccgc

SEQ ID NO: 2899222 - RNA, 19 nt, Artificial Sequence
  Description of Artificial Sequence: Synthetic oligonucleotide
cuacaagcagaacguccau

SEQ ID NO: 2899223 - RNA, 19 nt, Artificial Sequence
  Description of Artificial Sequence: Synthetic oligonucleotide
cagcagccuuuagugcuuc

SEQ ID NO: 2899224 - RNA, 19 nt, Artificial Sequence
  Description of Artificial Sequence: Synthetic oligonucleotide
gcuuacacagucacggguu

SEQ ID NO: 2899225 - RNA, 19 nt, Artificial Sequence
  Description of Artificial Sequence: Synthetic oligonucleotide
gaacguccauggucucccu

SEQ ID NO: 2899226 - RNA, 19 nt, Artificial Sequence
  Description of Artificial Sequence: Synthetic oligonucleotide
cuccuuaauaacggaugau

SEQ ID NO: 2899227 - RNA, 19 nt, Artificial Sequence
  Description of Artificial Sequence: Synthetic oligonucleotide
gcaacgccauggacuuggg

SEQ ID NO: 2899228 - RNA, 19 nt, Artificial Sequence
  Description of Artificial Sequence: Synthetic oligonucleotide
gcagaacguccauggucuc

SEQ ID NO: 2899229 - RNA, 19 nt, Artificial Sequence
  Description of Artificial Sequence: Synthetic oligonucleotide
ccguacacaaauagacagu

SEQ ID NO: 2899230 - RNA, 19 nt, Artificial Sequence
  Description of Artificial Sequence: Synthetic oligonucleotide
gcguucagguuggccgagg

SEQ ID NO: 2899231 - RNA, 19 nt, Artificial Sequence
  Description of Artificial Sequence: Synthetic oligonucleotide
cgccauggacuugggaccg

SEQ ID NO: 2899232 - RNA, 19 nt, Artificial Sequence
  Description of Artificial Sequence: Synthetic oligonucleotide
ccacuucccacuggcuuac

SEQ ID NO: 2899233 - RNA, 19 nt, Artificial Sequence
  Description of Artificial Sequence: Synthetic oligonucleotide
ucaccgcguucagguuggc

SEQ ID NO: 2899234 - RNA, 19 nt, Artificial Sequence
  Description of Artificial Sequence: Synthetic oligonucleotide
gcccacuaguucuccuuaa

SEQ ID NO: 2899235 - RNA, 19 nt, Artificial Sequence
  Description of Artificial Sequence: Synthetic oligonucleotide
cgucaaucagcuuguauuu

SEQ ID NO: 2899236 - RNA, 19 nt, Artificial Sequence
  Description of Artificial Sequence: Synthetic oligonucleotide
cguaaacaugcccacuagu

SEQ ID NO: 2899237 - RNA, 19 nt, Artificial Sequence
  Description of Artificial Sequence: Synthetic oligonucleotide
ccuuguucacaaagccgua

SEQ ID NO: 2899238 - RNA, 19 nt, Artificial Sequence
  Description of Artificial Sequence: Synthetic oligonucleotide
cccuuucgaagcuccuuaa

SEQ ID NO: 2899239 - RNA, 19 nt, Artificial Sequence
  Description of Artificial Sequence: Synthetic oligonucleotide
guacccuuucgaagcuccu

SEQ ID NO: 2899240 - RNA, 19 nt, Artificial Sequence
  Description of Artificial Sequence: Synthetic oligonucleotide
cguuaacaacaagauagcu

SEQ ID NO: 2899241 - RNA, 19 nt, Artificial Sequence
  Description of Artificial Sequence: Synthetic oligonucleotide
ccgcguucagguuggccga

SEQ ID NO: 2899242 - RNA, 19 nt, Artificial Sequence
  Description of Artificial Sequence: Synthetic oligonucleotide
cguucagguuggccgagga

SEQ ID NO: 2899243 - RNA, 19 nt, Artificial Sequence
  Description of Artificial Sequence: Synthetic oligonucleotide
ggacgccgcgcccgcggcc

SEQ ID NO: 2899244 - RNA, 19 nt, Artificial Sequence
  Description of Artificial Sequence: Synthetic oligonucleotide
ggccgaggacgccgcgccc

SEQ ID NO: 2899245 - RNA, 19 nt, Artificial Sequence
  Description of Artificial Sequence: Synthetic oligonucleotide
ggucucccucaccgcguuc

SEQ ID NO: 2899246 - RNA, 19 nt, Artificial Sequence
  Description of Artificial Sequence: Synthetic oligonucleotide
ccgaggacgccgcgcccgc

SEQ ID NO: 2899247 - RNA, 19 nt, Artificial Sequence
  Description of Artificial Sequence: Synthetic oligonucleotide
ccuuucgaagcuccuuaau

SEQ ID NO: 2899248 - RNA, 19 nt, Artificial Sequence
  Description of Artificial Sequence: Synthetic oligonucleotide
cacuucccacuggcuuaca

SEQ ID NO: 2899249 - RNA, 19 nt, Artificial Sequence
  Description of Artificial Sequence: Synthetic oligonucleotide
cccgucaaucagcuuguau

SEQ ID NO: 2899250 - RNA, 19 nt, Artificial Sequence
  Description of Artificial Sequence: Synthetic oligonucleotide
cgcguucagguuggccgag

SEQ ID NO: 2899251 - RNA, 19 nt, Artificial Sequence
  Description of Artificial Sequence: Synthetic oligonucleotide
cuuccccgucaaucagcuu

SEQ ID NO: 2899252 - RNA, 19 nt, Artificial Sequence
  Description of Artificial Sequence: Synthetic oligonucleotide
gccucuggauugauuccuu

SEQ ID NO: 2899253 - RNA, 19 nt, Artificial Sequence
  Description of Artificial Sequence: Synthetic oligonucleotide
cgaggacgccgcgcccgcg

SEQ ID NO: 2899254 - RNA, 19 nt, Artificial Sequence
  Description of Artificial Sequence: Synthetic oligonucleotide
ccauggacuugggaccguu

SEQ ID NO: 2899255 - RNA, 19 nt, Artificial Sequence
  Description of Artificial Sequence: Synthetic oligonucleotide
cccucaccgcguucagguu

SEQ ID NO: 2899256 - RNA, 19 nt, Artificial Sequence
  Description of Artificial Sequence: Synthetic oligonucleotide
aaaagagggaaggaacacc

SEQ ID NO: 2899257 - RNA, 19 nt, Artificial Sequence
  Description of Artificial Sequence: Synthetic oligonucleotide
gagacguugacgcacagag

SEQ ID NO: 2899258 - RNA, 19 nt, Artificial Sequence
  Description of Artificial Sequence: Synthetic oligonucleotide
gaaggaacaccuuucagug

SEQ ID NO: 2899259 - RNA, 19 nt, Artificial Sequence
  Description of Artificial Sequence: Synthetic oligonucleotide
gacguugacgcacagagug

SEQ ID NO: 2899260 - RNA, 19 nt, Artificial Sequence
  Description of Artificial Sequence: Synthetic oligonucleotide
auacuucugcagcugagcc

SEQ ID NO: 2899261 - RNA, 19 nt, Artificial Sequence
  Description of Artificial Sequence: Synthetic oligonucleotide
agcccagaaacccagauug

SEQ ID NO: 2899262 - RNA, 19 nt, Artificial Sequence
  Description of Artificial Sequence: Synthetic oligonucleotide
aacaccuuucaguguagac

SEQ ID NO: 2899263 - RNA, 19 nt, Artificial Sequence
  Description of Artificial Sequence: Synthetic oligonucleotide
ugcagcugagcccagaaac

SEQ ID NO: 2899264 - RNA, 19 nt, Artificial Sequence
  Description of Artificial Sequence: Synthetic oligonucleotide
uccauggcggcgcaggugg

SEQ ID NO: 2899265 - RNA, 19 nt, Artificial Sequence
  Description of Artificial Sequence: Synthetic oligonucleotide
aacggcgcggcuuacucgg

SEQ ID NO: 2899266 - RNA, 19 nt, Artificial Sequence
  Description of Artificial Sequence: Synthetic oligonucleotide
uggcgcaugagguaggcgg

SEQ ID NO: 2899267 - RNA, 19 nt, Artificial Sequence
  Description of Artificial Sequence: Synthetic oligonucleotide
cuugcaguacaccaggcag

SEQ ID NO: 2899268 - RNA, 19 nt, Artificial Sequence
  Description of Artificial Sequence: Synthetic oligonucleotide
acaccuuucaguguagacg

SEQ ID NO: 2899269 - RNA, 19 nt, Artificial Sequence
  Description of Artificial Sequence: Synthetic oligonucleotide
aaagagggaaggaacaccu

SEQ ID NO: 2899270 - RNA, 19 nt, Artificial Sequence
  Description of Artificial Sequence: Synthetic oligonucleotide
uugcaguacaccaggcagg

SEQ ID NO: 2899271 - RNA, 19 nt, Artificial Sequence
  Description of Artificial Sequence: Synthetic oligonucleotide
cuuacucgggcucagccgg

SEQ ID NO: 2899272 - RNA, 19 nt, Artificial Sequence
  Description of Artificial Sequence: Synthetic oligonucleotide
ucuucaccauaccuggaag

SEQ ID NO: 2899273 - RNA, 19 nt, Artificial Sequence
  Description of Artificial Sequence: Synthetic oligonucleotide
guucuugcaguacaccagg

SEQ ID NO: 2899274 - RNA, 19 nt, Artificial Sequence
  Description of Artificial Sequence: Synthetic oligonucleotide
agguaggcggugcagacgg

SEQ ID NO: 2899275 - RNA, 19 nt, Artificial Sequence
  Description of Artificial Sequence: Synthetic oligonucleotide
cuucaccauaccuggaagg

SEQ ID NO: 2899276 - RNA, 19 nt, Artificial Sequence
  Description of Artificial Sequence: Synthetic oligonucleotide
uuucaguguagacgucugg

SEQ ID NO: 2899277 - RNA, 19 nt, Artificial Sequence
  Description of Artificial Sequence: Synthetic oligonucleotide
uugacgcacagagugaugc

SEQ ID NO: 2899278 - RNA, 19 nt, Artificial Sequence
  Description of Artificial Sequence: Synthetic oligonucleotide
ugucugcucauacuucugc

SEQ ID NO: 2899279 - RNA, 19 nt, Artificial Sequence
  Description of Artificial Sequence: Synthetic oligonucleotide
caguacaccaggcaggcgc

SEQ ID NO: 2899280 - RNA, 19 nt, Artificial Sequence
  Description of Artificial Sequence: Synthetic oligonucleotide
ucaguguagacgucuggcc

SEQ ID NO: 2899281 - RNA, 19 nt, Artificial Sequence
  Description of Artificial Sequence: Synthetic oligonucleotide
auugggcucggcuaccggg

SEQ ID NO: 2899282 - RNA, 19 nt, Artificial Sequence
  Description of Artificial Sequence: Synthetic oligonucleotide
ucuugcaguacaccaggca

SEQ ID NO: 2899283 - RNA, 19 nt, Artificial Sequence
  Description of Artificial Sequence: Synthetic oligonucleotide
ucauacuucugcagcugag

SEQ ID NO: 2899284 - RNA, 19 nt, Artificial Sequence
  Description of Artificial Sequence: Synthetic oligonucleotide
agugucugcucauacuucu

SEQ ID NO: 2899285 - RNA, 19 nt, Artificial Sequence
  Description of Artificial Sequence: Synthetic oligonucleotide
uucaguguagacgucuggc

SEQ ID NO: 2899286 - RNA, 19 nt, Artificial Sequence
  Description of Artificial Sequence: Synthetic oligonucleotide
uucaccauaccuggaaggc

SEQ ID NO: 2899287 - RNA, 19 nt, Artificial Sequence
  Description of Artificial Sequence: Synthetic oligonucleotide
agggucaucgaacacggga

SEQ ID NO: 2899288 - RNA, 19 nt, Artificial Sequence
  Description of Artificial Sequence: Synthetic oligonucleotide
caccauaccuggaaggcgc

SEQ ID NO: 2899289 - RNA, 19 nt, Artificial Sequence
  Description of Artificial Sequence: Synthetic oligonucleotide
aacacgggaacgcgcagcu

SEQ ID NO: 2899290 - RNA, 19 nt, Artificial Sequence
  Description of Artificial Sequence: Synthetic oligonucleotide
cacgggaacgcgcagcucg

SEQ ID NO: 2899291 - RNA, 19 nt, Artificial Sequence
  Description of Artificial Sequence: Synthetic oligonucleotide
ucgaacacgggaacgcgca

SEQ ID NO: 2899292 - RNA, 19 nt, Artificial Sequence
  Description of Artificial Sequence: Synthetic oligonucleotide
ucaucgaacacgggaacgc

SEQ ID NO: 2899293 - RNA, 19 nt, Artificial Sequence
  Description of Artificial Sequence: Synthetic oligonucleotide
uggcgggagacguugacgc

SEQ ID NO: 2899294 - RNA, 19 nt, Artificial Sequence
  Description of Artificial Sequence: Synthetic oligonucleotide
aggaacaccuuucagugua

SEQ ID NO: 2899295 - RNA, 19 nt, Artificial Sequence
  Description of Artificial Sequence: Synthetic oligonucleotide
uucggcagggucaucgaac

SEQ ID NO: 2899296 - RNA, 19 nt, Artificial Sequence
  Description of Artificial Sequence: Synthetic oligonucleotide
uacuucugcagcugagccc

SEQ ID NO: 2899297 - RNA, 19 nt, Artificial Sequence
  Description of Artificial Sequence: Synthetic oligonucleotide
acuucugcagcugagccca

SEQ ID NO: 2899298 - RNA, 19 nt, Artificial Sequence
  Description of Artificial Sequence: Synthetic oligonucleotide
gaaggcgcgcuccaggcug

SEQ ID NO: 2899299 - RNA, 19 nt, Artificial Sequence
  Description of Artificial Sequence: Synthetic oligonucleotide
ugcgucagcaggucuucgg

SEQ ID NO: 2899300 - RNA, 19 nt, Artificial Sequence
  Description of Artificial Sequence: Synthetic oligonucleotide
aaggaacaccuuucagugu

SEQ ID NO: 2899301 - RNA, 19 nt, Artificial Sequence
  Description of Artificial Sequence: Synthetic oligonucleotide
acagagugaugcccgcgcg

SEQ ID NO: 2899302 - RNA, 19 nt, Artificial Sequence
  Description of Artificial Sequence: Synthetic oligonucleotide
cuuucaguguagacgucug

SEQ ID NO: 2899303 - RNA, 19 nt, Artificial Sequence
  Description of Artificial Sequence: Synthetic oligonucleotide
caccccagcagcugaacgg

SEQ ID NO: 2899304 - RNA, 19 nt, Artificial Sequence
  Description of Artificial Sequence: Synthetic oligonucleotide
cauacuucugcagcugagc

SEQ ID NO: 2899305 - RNA, 19 nt, Artificial Sequence
  Description of Artificial Sequence: Synthetic oligonucleotide
gucagcaggucuucggcag

SEQ ID NO: 2899306 - RNA, 19 nt, Artificial Sequence
  Description of Artificial Sequence: Synthetic oligonucleotide
agagggaaggaacaccuuu

SEQ ID NO: 2899307 - RNA, 19 nt, Artificial Sequence
  Description of Artificial Sequence: Synthetic oligonucleotide
agagugaugcccgcgcgcg

SEQ ID NO: 2899308 - RNA, 19 nt, Artificial Sequence
  Description of Artificial Sequence: Synthetic oligonucleotide
gucuucggcagggucaucg

SEQ ID NO: 2899309 - RNA, 19 nt, Artificial Sequence
  Description of Artificial Sequence: Synthetic oligonucleotide
agugaugcccgcgcgcgcc

SEQ ID NO: 2899310 - RNA, 19 nt, Artificial Sequence
  Description of Artificial Sequence: Synthetic oligonucleotide
ucggcagggucaucgaaca

SEQ ID NO: 2899311 - RNA, 19 nt, Artificial Sequence
  Description of Artificial Sequence: Synthetic oligonucleotide
agcgcucuucaccauaccu

SEQ ID NO: 2899312 - RNA, 19 nt, Artificial Sequence
  Description of Artificial Sequence: Synthetic oligonucleotide
aguacaccaggcaggcgcc

SEQ ID NO: 2899313 - RNA, 19 nt, Artificial Sequence
  Description of Artificial Sequence: Synthetic oligonucleotide
ugaacggcgcggcuuacuc

SEQ ID NO: 2899314 - RNA, 19 nt, Artificial Sequence
  Description of Artificial Sequence: Synthetic oligonucleotide
gacgcacagagugaugccc

SEQ ID NO: 2899315 - RNA, 19 nt, Artificial Sequence
  Description of Artificial Sequence: Synthetic oligonucleotide
agcucggccaccccgggag

SEQ ID NO: 2899316 - RNA, 19 nt, Artificial Sequence
  Description of Artificial Sequence: Synthetic oligonucleotide
gucaucgaacacgggaacg

SEQ ID NO: 2899317 - RNA, 19 nt, Artificial Sequence
  Description of Artificial Sequence: Synthetic oligonucleotide
aucgaacacgggaacgcgc

SEQ ID NO: 2899318 - RNA, 19 nt, Artificial Sequence
  Description of Artificial Sequence: Synthetic oligonucleotide
agggaaggaacaccuuuca

SEQ ID NO: 2899319 - RNA, 19 nt, Artificial Sequence
  Description of Artificial Sequence: Synthetic oligonucleotide
gaacggcgcggcuuacucg

SEQ ID NO: 2899320 - RNA, 19 nt, Artificial Sequence
  Description of Artificial Sequence: Synthetic oligonucleotide
cacagagugaugcccgcgc

SEQ ID NO: 2899321 - RNA, 19 nt, Artificial Sequence
  Description of Artificial Sequence: Synthetic oligonucleotide
uugggcucggcuaccgggc

SEQ ID NO: 2899322 - RNA, 19 nt, Artificial Sequence
  Description of Artificial Sequence: Synthetic oligonucleotide
uggagugucugcucauacu

SEQ ID NO: 2899323 - RNA, 19 nt, Artificial Sequence
  Description of Artificial Sequence: Synthetic oligonucleotide
ugagguaggcggugcagac

SEQ ID NO: 2899324 - RNA, 19 nt, Artificial Sequence
  Description of Artificial Sequence: Synthetic oligonucleotide
ugagcccagaaacccagau

SEQ ID NO: 2899325 - RNA, 19 nt, Artificial Sequence
  Description of Artificial Sequence: Synthetic oligonucleotide
accccagcagcugaacggc

SEQ ID NO: 2899326 - RNA, 19 nt, Artificial Sequence
  Description of Artificial Sequence: Synthetic oligonucleotide
auaccuggaaggcgcgcuc

SEQ ID NO: 2899327 - RNA, 19 nt, Artificial Sequence
  Description of Artificial Sequence: Synthetic oligonucleotide
ggcagggucaucgaacacg

SEQ ID NO: 2899328 - RNA, 19 nt, Artificial Sequence
  Description of Artificial Sequence: Synthetic oligonucleotide
agggccugggccuggagug

SEQ ID NO: 2899329 - RNA, 19 nt, Artificial Sequence
  Description of Artificial Sequence: Synthetic oligonucleotide
gauugggcucggcuaccgg

SEQ ID NO: 2899330 - RNA, 19 nt, Artificial Sequence
  Description of Artificial Sequence: Synthetic oligonucleotide
agcagcugaacggcgcggc

SEQ ID NO: 2899331 - RNA, 19 nt, Artificial Sequence
  Description of Artificial Sequence: Synthetic oligonucleotide
ugcagacggcggccgagcg

SEQ ID NO: 2899332 - RNA, 19 nt, Artificial Sequence
  Description of Artificial Sequence: Synthetic oligonucleotide
accgcagccuccauggcgg

SEQ ID NO: 2899333 - RNA, 19 nt, Artificial Sequence
  Description of Artificial Sequence: Synthetic oligonucleotide
ugacgcacagagugaugcc

SEQ ID NO: 2899334 - RNA, 19 nt, Artificial Sequence
  Description of Artificial Sequence: Synthetic oligonucleotide
ggaaggaacaccuuucagu

SEQ ID NO: 2899335 - RNA, 19 nt, Artificial Sequence
  Description of Artificial Sequence: Synthetic oligonucleotide
acaccaggcaggcgccgcc

SEQ ID NO: 2899336 - RNA, 19 nt, Artificial Sequence
  Description of Artificial Sequence: Synthetic oligonucleotide
ccagaaacccagauugggc

SEQ ID NO: 2899337 - RNA, 19 nt, Artificial Sequence
  Description of Artificial Sequence: Synthetic oligonucleotide
gcuuacucgggcucagccg

SEQ ID NO: 2899338 - RNA, 19 nt, Artificial Sequence
  Description of Artificial Sequence: Synthetic oligonucleotide
uuacucgggcucagccggg

SEQ ID NO: 2899339 - RNA, 19 nt, Artificial Sequence
  Description of Artificial Sequence: Synthetic oligonucleotide
caucgaacacgggaacgcg

SEQ ID NO: 2899340 - RNA, 19 nt, Artificial Sequence
  Description of Artificial Sequence: Synthetic oligonucleotide
guaggcggugcagacggcg

SEQ ID NO: 2899341 - RNA, 19 nt, Artificial Sequence
  Description of Artificial Sequence: Synthetic oligonucleotide
gagggaaggaacaccuuuc

SEQ ID NO: 2899342 - RNA, 19 nt, Artificial Sequence
  Description of Artificial Sequence: Synthetic oligonucleotide
caccgcagccuccauggcg

SEQ ID NO: 2899343 - RNA, 19 nt, Artificial Sequence
  Description of Artificial Sequence: Synthetic oligonucleotide
caccuuucaguguagacgu

SEQ ID NO: 2899344 - RNA, 19 nt, Artificial Sequence
  Description of Artificial Sequence: Synthetic oligonucleotide
ucggcuaccgggcgagcgc

SEQ ID NO: 2899345 - RNA, 19 nt, Artificial Sequence
  Description of Artificial Sequence: Synthetic oligonucleotide
cagcugagcccagaaaccc

SEQ ID NO: 2899346 - RNA, 19 nt, Artificial Sequence
  Description of Artificial Sequence: Synthetic oligonucleotide
gaacacgggaacgcgcagc

SEQ ID NO: 2899347 - RNA, 19 nt, Artificial Sequence
  Description of Artificial Sequence: Synthetic oligonucleotide
ucagccggguccccgggca

SEQ ID NO: 2899348 - RNA, 19 nt, Artificial Sequence
  Description of Artificial Sequence: Synthetic oligonucleotide
cuggagugucugcucauac

SEQ ID NO: 2899349 - RNA, 19 nt, Artificial Sequence
  Description of Artificial Sequence: Synthetic oligonucleotide
gagguaggcggugcagacg

SEQ ID NO: 2899350 - RNA, 19 nt, Artificial Sequence
  Description of Artificial Sequence: Synthetic oligonucleotide
ugggcucggcuaccgggcg

SEQ ID NO: 2899351 - RNA, 19 nt, Artificial Sequence
  Description of Artificial Sequence: Synthetic oligonucleotide
cagaaacccagauugggcu

SEQ ID NO: 2899352 - RNA, 19 nt, Artificial Sequence
  Description of Artificial Sequence: Synthetic oligonucleotide
cagacggcggccgagcggc

SEQ ID NO: 2899353 - RNA, 19 nt, Artificial Sequence
  Description of Artificial Sequence: Synthetic oligonucleotide
acccagauugggcucggcu

SEQ ID NO: 2899354 - RNA, 19 nt, Artificial Sequence
  Description of Artificial Sequence: Synthetic oligonucleotide
aaacccagauugggcucgg

SEQ ID NO: 2899355 - RNA, 19 nt, Artificial Sequence
  Description of Artificial Sequence: Synthetic oligonucleotide
acgcacagagugaugcccg

SEQ ID NO: 2899356 - RNA, 19 nt, Artificial Sequence
  Description of Artificial Sequence: Synthetic oligonucleotide
agauugggcucggcuaccg

SEQ ID NO: 2899357 - RNA, 19 nt, Artificial Sequence
  Description of Artificial Sequence: Synthetic oligonucleotide
gcagggucaucgaacacgg

SEQ ID NO: 2899358 - RNA, 19 nt, Artificial Sequence
  Description of Artificial Sequence: Synthetic oligonucleotide
ucuucggcagggucaucga

SEQ ID NO: 2899359 - RNA, 19 nt, Artificial Sequence
  Description of Artificial Sequence: Synthetic oligonucleotide
cucgggcucagccgggucc

SEQ ID NO: 2899360 - RNA, 19 nt, Artificial Sequence
  Description of Artificial Sequence: Synthetic oligonucleotide
acggcggccgagcggcugc

SEQ ID NO: 2899361 - RNA, 19 nt, Artificial Sequence
  Description of Artificial Sequence: Synthetic oligonucleotide
cagagugaugcccgcgcgc

SEQ ID NO: 2899362 - RNA, 19 nt, Artificial Sequence
  Description of Artificial Sequence: Synthetic oligonucleotide
caggucuucggcaggguca

SEQ ID NO: 2899363 - RNA, 19 nt, Artificial Sequence
  Description of Artificial Sequence: Synthetic oligonucleotide
caugagguaggcggugcag

SEQ ID NO: 2899364 - RNA, 19 nt, Artificial Sequence
  Description of Artificial Sequence: Synthetic oligonucleotide
ggcuuacucgggcucagcc

SEQ ID NO: 2899365 - RNA, 19 nt, Artificial Sequence
  Description of Artificial Sequence: Synthetic oligonucleotide
cucauacuucugcagcuga

SEQ ID NO: 2899366 - RNA, 19 nt, Artificial Sequence
  Description of Artificial Sequence: Synthetic oligonucleotide
gcugcggccguucuugcag

SEQ ID NO: 2899367 - RNA, 19 nt, Artificial Sequence
  Description of Artificial Sequence: Synthetic oligonucleotide
acgucuggccaccccagca

SEQ ID NO: 2899368 - RNA, 19 nt, Artificial Sequence
  Description of Artificial Sequence: Synthetic oligonucleotide
cuggcgggagacguugacg

SEQ ID NO: 2899369 - RNA, 19 nt, Artificial Sequence
  Description of Artificial Sequence: Synthetic oligonucleotide
cucuucaccauaccuggaa

SEQ ID NO: 2899370 - RNA, 19 nt, Artificial Sequence
  Description of Artificial Sequence: Synthetic oligonucleotide
caggugggcuccaggugcg

SEQ ID NO: 2899371 - RNA, 19 nt, Artificial Sequence
  Description of Artificial Sequence: Synthetic oligonucleotide
aacccagauugggcucggc

SEQ ID NO: 2899372 - RNA, 19 nt, Artificial Sequence
  Description of Artificial Sequence: Synthetic oligonucleotide
guagacgucuggccacccc

SEQ ID NO: 2899373 - RNA, 19 nt, Artificial Sequence
  Description of Artificial Sequence: Synthetic oligonucleotide
cgcucuucaccauaccugg

SEQ ID NO: 2899374 - RNA, 19 nt, Artificial Sequence
  Description of Artificial Sequence: Synthetic oligonucleotide
augagguaggcggugcaga

SEQ ID NO: 2899375 - RNA, 19 nt, Artificial Sequence
  Description of Artificial Sequence: Synthetic oligonucleotide
ugggccuggagugucugcu

SEQ ID NO: 2899376 - RNA, 19 nt, Artificial Sequence
  Description of Artificial Sequence: Synthetic oligonucleotide
gaacgcgcagcucggccac

SEQ ID NO: 2899377 - RNA, 19 nt, Artificial Sequence
  Description of Artificial Sequence: Synthetic oligonucleotide
accaggcaggcgccgccgc

SEQ ID NO: 2899378 - RNA, 19 nt, Artificial Sequence
  Description of Artificial Sequence: Synthetic oligonucleotide
cccagaaacccagauuggg

SEQ ID NO: 2899379 - RNA, 19 nt, Artificial Sequence
  Description of Artificial Sequence: Synthetic oligonucleotide
gagugucugcucauacuuc

SEQ ID NO: 2899380 - RNA, 19 nt, Artificial Sequence
  Description of Artificial Sequence: Synthetic oligonucleotide
uggccaccccagcagcuga

SEQ ID NO: 2899381 - RNA, 19 nt, Artificial Sequence
  Description of Artificial Sequence: Synthetic oligonucleotide
gccgccguggcgcaugagg

SEQ ID NO: 2899382 - RNA, 19 nt, Artificial Sequence
  Description of Artificial Sequence: Synthetic oligonucleotide
cguucuugcaguacaccag

SEQ ID NO: 2899383 - RNA, 19 nt, Artificial Sequence
  Description of Artificial Sequence: Synthetic oligonucleotide
gacgucuggccaccccagc

SEQ ID NO: 2899384 - RNA, 19 nt, Artificial Sequence
  Description of Artificial Sequence: Synthetic oligonucleotide
cucggcuaccgggcgagcg

SEQ ID NO: 2899385 - RNA, 19 nt, Artificial Sequence
  Description of Artificial Sequence: Synthetic oligonucleotide
ggucaucgaacacgggaac

SEQ ID NO: 2899386 - RNA, 19 nt, Artificial Sequence
  Description of Artificial Sequence: Synthetic oligonucleotide
gaacaccuuucaguguaga

SEQ ID NO: 2899387 - RNA, 19 nt, Artificial Sequence
  Description of Artificial Sequence: Synthetic oligonucleotide
ccagauugggcucggcuac

SEQ ID NO: 2899388 - RNA, 19 nt, Artificial Sequence
  Description of Artificial Sequence: Synthetic oligonucleotide
accauaccuggaaggcgcg

SEQ ID NO: 2899389 - RNA, 19 nt, Artificial Sequence
  Description of Artificial Sequence: Synthetic oligonucleotide
uguagacgucuggccaccc

SEQ ID NO: 2899390 - RNA, 19 nt, Artificial Sequence
  Description of Artificial Sequence: Synthetic oligonucleotide
agcugaacggcgcggcuua

SEQ ID NO: 2899391 - RNA, 19 nt, Artificial Sequence
  Description of Artificial Sequence: Synthetic oligonucleotide
gcugagcccagaaacccag

SEQ ID NO: 2899392 - RNA, 19 nt, Artificial Sequence
  Description of Artificial Sequence: Synthetic oligonucleotide
cgcaccgcagccuccaugg

SEQ ID NO: 2899393 - RNA, 19 nt, Artificial Sequence
  Description of Artificial Sequence: Synthetic oligonucleotide
gcagcugagcccagaaacc

SEQ ID NO: 2899394 - RNA, 19 nt, Artificial Sequence
  Description of Artificial Sequence: Synthetic oligonucleotide
gagcgcucuucaccauacc

SEQ ID NO: 2899395 - RNA, 19 nt, Artificial Sequence
  Description of Artificial Sequence: Synthetic oligonucleotide
acucgggcucagccggguc

SEQ ID NO: 2899396 - RNA, 19 nt, Artificial Sequence
  Description of Artificial Sequence: Synthetic oligonucleotide
gagugaugcccgcgcgcgc

SEQ ID NO: 2899397 - RNA, 19 nt, Artificial Sequence
  Description of Artificial Sequence: Synthetic oligonucleotide
guguagacgucuggccacc

SEQ ID NO: 2899398 - RNA, 19 nt, Artificial Sequence
  Description of Artificial Sequence: Synthetic oligonucleotide
guugacgcacagagugaug

SEQ ID NO: 2899399 - RNA, 19 nt, Artificial Sequence
  Description of Artificial Sequence: Synthetic oligonucleotide
gggcaggagggccugggcc

SEQ ID NO: 2899400 - RNA, 19 nt, Artificial Sequence
  Description of Artificial Sequence: Synthetic oligonucleotide
gcgucagcaggucuucggc

SEQ ID NO: 2899401 - RNA, 19 nt, Artificial Sequence
  Description of Artificial Sequence: Synthetic oligonucleotide
ucgggcucagccggguccc

SEQ ID NO: 2899402 - RNA, 19 nt, Artificial Sequence
  Description of Artificial Sequence: Synthetic oligonucleotide
ggagugucugcucauacuu

SEQ ID NO: 2899403 - RNA, 19 nt, Artificial Sequence
  Description of Artificial Sequence: Synthetic oligonucleotide
ggaacgcgcagcucggcca

SEQ ID NO: 2899404 - RNA, 19 nt, Artificial Sequence
  Description of Artificial Sequence: Synthetic oligonucleotide
cagggucaucgaacacggg

SEQ ID NO: 2899405 - RNA, 19 nt, Artificial Sequence
  Description of Artificial Sequence: Synthetic oligonucleotide
aagagggaaggaacaccuu

SEQ ID NO: 2899406 - RNA, 19 nt, Artificial Sequence
  Description of Artificial Sequence: Synthetic oligonucleotide
gcgcucuucaccauaccug

SEQ ID NO: 2899407 - RNA, 19 nt, Artificial Sequence
  Description of Artificial Sequence: Synthetic oligonucleotide
gugucugcucauacuucug

SEQ ID NO: 2899408 - RNA, 19 nt, Artificial Sequence
  Description of Artificial Sequence: Synthetic oligonucleotide
ugcuggcgggagacguuga

SEQ ID NO: 2899409 - RNA, 19 nt, Artificial Sequence
  Description of Artificial Sequence: Synthetic oligonucleotide
gcuguggccgccguggcgc

SEQ ID NO: 2899410 - RNA, 19 nt, Artificial Sequence
  Description of Artificial Sequence: Synthetic oligonucleotide
agacgucuggccaccccag

SEQ ID NO: 2899411 - RNA, 19 nt, Artificial Sequence
  Description of Artificial Sequence: Synthetic oligonucleotide
ccagcagcugaacggcgcg

SEQ ID NO: 2899412 - RNA, 19 nt, Artificial Sequence
  Description of Artificial Sequence: Synthetic oligonucleotide
gggaacgcgcagcucggcc

SEQ ID NO: 2899413 - RNA, 19 nt, Artificial Sequence
  Description of Artificial Sequence: Synthetic oligonucleotide
cagauugggcucggcuacc

SEQ ID NO: 2899414 - RNA, 19 nt, Artificial Sequence
  Description of Artificial Sequence: Synthetic oligonucleotide
cugggccuggagugucugc

SEQ ID NO: 2899415 - RNA, 19 nt, Artificial Sequence
  Description of Artificial Sequence: Synthetic oligonucleotide
ccguucuugcaguacacca

SEQ ID NO: 2899416 - RNA, 19 nt, Artificial Sequence
  Description of Artificial Sequence: Synthetic oligonucleotide
ggaacaccuuucaguguag

SEQ ID NO: 2899417 - RNA, 19 nt, Artificial Sequence
  Description of Artificial Sequence: Synthetic oligonucleotide
gccguggcgcaugagguag

SEQ ID NO: 2899418 - RNA, 19 nt, Artificial Sequence
  Description of Artificial Sequence: Synthetic oligonucleotide
agcugagcccagaaaccca

SEQ ID NO: 2899419 - RNA, 19 nt, Artificial Sequence
  Description of Artificial Sequence: Synthetic oligonucleotide
gagcgcgcggcccgggcug

SEQ ID NO: 2899420 - RNA, 19 nt, Artificial Sequence
  Description of Artificial Sequence: Synthetic oligonucleotide
acgggaacgcgcagcucgg

SEQ ID NO: 2899421 - RNA, 19 nt, Artificial Sequence
  Description of Artificial Sequence: Synthetic oligonucleotide
acguugacgcacagaguga

SEQ ID NO: 2899422 - RNA, 19 nt, Artificial Sequence
  Description of Artificial Sequence: Synthetic oligonucleotide
cucggccaccccgggagcg

SEQ ID NO: 2899423 - RNA, 19 nt, Artificial Sequence
  Description of Artificial Sequence: Synthetic oligonucleotide
cauggcggcgcaggugggc

SEQ ID NO: 2899424 - RNA, 19 nt, Artificial Sequence
  Description of Artificial Sequence: Synthetic oligonucleotide
aggucuucggcagggucau

SEQ ID NO: 2899425 - RNA, 19 nt, Artificial Sequence
  Description of Artificial Sequence: Synthetic oligonucleotide
accuuucaguguagacguc

SEQ ID NO: 2899426 - RNA, 19 nt, Artificial Sequence
  Description of Artificial Sequence: Synthetic oligonucleotide
gggucaucgaacacgggaa

SEQ ID NO: 2899427 - RNA, 19 nt, Artificial Sequence
  Description of Artificial Sequence: Synthetic oligonucleotide
guggcgcaugagguaggcg

SEQ ID NO: 2899428 - RNA, 19 nt, Artificial Sequence
  Description of Artificial Sequence: Synthetic oligonucleotide
agacguugacgcacagagu

SEQ ID NO: 2899429 - RNA, 19 nt, Artificial Sequence
  Description of Artificial Sequence: Synthetic oligonucleotide
gaugcccgcgcgcgccagc

SEQ ID NO: 2899430 - RNA, 19 nt, Artificial Sequence
  Description of Artificial Sequence: Synthetic oligonucleotide
cccagcagcugaacggcgc

SEQ ID NO: 2899431 - RNA, 19 nt, Artificial Sequence
  Description of Artificial Sequence: Synthetic oligonucleotide
gagggccugggccuggagu

SEQ ID NO: 2899432 - RNA, 19 nt, Artificial Sequence
  Description of Artificial Sequence: Synthetic oligonucleotide
ggcucagccggguccccgg

SEQ ID NO: 2899433 - RNA, 19 nt, Artificial Sequence
  Description of Artificial Sequence: Synthetic oligonucleotide
ccaccccagcagcugaacg

SEQ ID NO: 2899434 - RNA, 19 nt, Artificial Sequence
  Description of Artificial Sequence: Synthetic oligonucleotide
cagcagcugaacggcgcgg

SEQ ID NO: 2899435 - RNA, 19 nt, Artificial Sequence
  Description of Artificial Sequence: Synthetic oligonucleotide
gcagacggcggccgagcgg

SEQ ID NO: 2899436 - RNA, 19 nt, Artificial Sequence
  Description of Artificial Sequence: Synthetic oligonucleotide
cucagccggguccccgggc

SEQ ID NO: 2899437 - RNA, 19 nt, Artificial Sequence
  Description of Artificial Sequence: Synthetic oligonucleotide
uccaggcuguggccgccgu

SEQ ID NO: 2899438 - RNA, 19 nt, Artificial Sequence
  Description of Artificial Sequence: Synthetic oligonucleotide
ggcgcaggugggcuccagg

SEQ ID NO: 2899439 - RNA, 19 nt, Artificial Sequence
  Description of Artificial Sequence: Synthetic oligonucleotide
gggcgagcgcucuucacca

SEQ ID NO: 2899440 - RNA, 19 nt, Artificial Sequence
  Description of Artificial Sequence: Synthetic oligonucleotide
auggcggcgcaggugggcu

SEQ ID NO: 2899441 - RNA, 19 nt, Artificial Sequence
  Description of Artificial Sequence: Synthetic oligonucleotide
gcccagaaacccagauugg

SEQ ID NO: 2899442 - RNA, 19 nt, Artificial Sequence
  Description of Artificial Sequence: Synthetic oligonucleotide
gugcgucagcaggucuucg

SEQ ID NO: 2899443 - RNA, 19 nt, Artificial Sequence
  Description of Artificial Sequence: Synthetic oligonucleotide
gcacagagugaugcccgcg

SEQ ID NO: 2899444 - RNA, 19 nt, Artificial Sequence
  Description of Artificial Sequence: Synthetic oligonucleotide
gcagccuccauggcggcgc

SEQ ID NO: 2899445 - RNA, 19 nt, Artificial Sequence
  Description of Artificial Sequence: Synthetic oligonucleotide
ggcuguggccgccguggcg

SEQ ID NO: 2899446 - RNA, 19 nt, Artificial Sequence
  Description of Artificial Sequence: Synthetic oligonucleotide
acacgggaacgcgcagcuc

SEQ ID NO: 2899447 - RNA, 19 nt, Artificial Sequence
  Description of Artificial Sequence: Synthetic oligonucleotide
ugaugcccgcgcgcgccag

SEQ ID NO: 2899448 - RNA, 19 nt, Artificial Sequence
  Description of Artificial Sequence: Synthetic oligonucleotide
cuccauggcggcgcaggug

SEQ ID NO: 2899449 - RNA, 19 nt, Artificial Sequence
  Description of Artificial Sequence: Synthetic oligonucleotide
caccaggcaggcgccgccg

SEQ ID NO: 2899450 - RNA, 19 nt, Artificial Sequence
  Description of Artificial Sequence: Synthetic oligonucleotide
accgggcgagcgcucuuca

SEQ ID NO: 2899451 - RNA, 19 nt, Artificial Sequence
  Description of Artificial Sequence: Synthetic oligonucleotide
aaggcgcgcuccaggcugu

SEQ ID NO: 2899452 - RNA, 19 nt, Artificial Sequence
  Description of Artificial Sequence: Synthetic oligonucleotide
gagcccagaaacccagauu

SEQ ID NO: 2899453 - RNA, 19 nt, Artificial Sequence
  Description of Artificial Sequence: Synthetic oligonucleotide
uacucgggcucagccgggu

SEQ ID NO: 2899454 - RNA, 19 nt, Artificial Sequence
  Description of Artificial Sequence: Synthetic oligonucleotide
gcaggucuucggcaggguc

SEQ ID NO: 2899455 - RNA, 19 nt, Artificial Sequence
  Description of Artificial Sequence: Synthetic oligonucleotide
ggugcagacggcggccgag

SEQ ID NO: 2899456 - RNA, 19 nt, Artificial Sequence
  Description of Artificial Sequence: Synthetic oligonucleotide
gugcagacggcggccgagc

SEQ ID NO: 2899457 - RNA, 19 nt, Artificial Sequence
  Description of Artificial Sequence: Synthetic oligonucleotide
cauaccuggaaggcgcgcu

SEQ ID NO: 2899458 - RNA, 19 nt, Artificial Sequence
  Description of Artificial Sequence: Synthetic oligonucleotide
gccguucuugcaguacacc

SEQ ID NO: 2899459 - RNA, 19 nt, Artificial Sequence
  Description of Artificial Sequence: Synthetic oligonucleotide
agccggguccccgggcagg

SEQ ID NO: 2899460 - RNA, 19 nt, Artificial Sequence
  Description of Artificial Sequence: Synthetic oligonucleotide
cugagcccagaaacccaga

SEQ ID NO: 2899461 - RNA, 19 nt, Artificial Sequence
  Description of Artificial Sequence: Synthetic oligonucleotide
ggguccccgggcaggaggg

SEQ ID NO: 2899462 - RNA, 19 nt, Artificial Sequence
  Description of Artificial Sequence: Synthetic oligonucleotide
uaccgggcgagcgcucuuc

SEQ ID NO: 2899463 - RNA, 19 nt, Artificial Sequence
  Description of Artificial Sequence: Synthetic oligonucleotide
ucggccaccccgggagcgc

SEQ ID NO: 2899464 - RNA, 19 nt, Artificial Sequence
  Description of Artificial Sequence: Synthetic oligonucleotide
gcgggagacguugacgcac

SEQ ID NO: 2899465 - RNA, 19 nt, Artificial Sequence
  Description of Artificial Sequence: Synthetic oligonucleotide
cgagcgcucuucaccauac

SEQ ID NO: 2899466 - RNA, 19 nt, Artificial Sequence
  Description of Artificial Sequence: Synthetic oligonucleotide
ugcggccguucuugcagua

SEQ ID NO: 2899467 - RNA, 19 nt, Artificial Sequence
  Description of Artificial Sequence: Synthetic oligonucleotide
cgggcgagcgcucuucacc

SEQ ID NO: 2899468 - RNA, 19 nt, Artificial Sequence
  Description of Artificial Sequence: Synthetic oligonucleotide
gcggcugcggccguucuug

SEQ ID NO: 2899469 - RNA, 19 nt, Artificial Sequence
  Description of Artificial Sequence: Synthetic oligonucleotide
gggagacguugacgcacag

SEQ ID NO: 2899470 - RNA, 19 nt, Artificial Sequence
  Description of Artificial Sequence: Synthetic oligonucleotide
cuccaggcuguggccgccg

SEQ ID NO: 2899471 - RNA, 19 nt, Artificial Sequence
  Description of Artificial Sequence: Synthetic oligonucleotide
ugcccgcgcgcgccagcag

SEQ ID NO: 2899472 - RNA, 19 nt, Artificial Sequence
  Description of Artificial Sequence: Synthetic oligonucleotide
ggcucggcuaccgggcgag

SEQ ID NO: 2899473 - RNA, 19 nt, Artificial Sequence
  Description of Artificial Sequence: Synthetic oligonucleotide
gcaugagguaggcggugca

SEQ ID NO: 2899474 - RNA, 19 nt, Artificial Sequence
  Description of Artificial Sequence: Synthetic oligonucleotide
gacggcggccgagcggcug

SEQ ID NO: 2899475 - RNA, 19 nt, Artificial Sequence
  Description of Artificial Sequence: Synthetic oligonucleotide
uggccgccguggcgcauga

SEQ ID NO: 2899476 - RNA, 19 nt, Artificial Sequence
  Description of Artificial Sequence: Synthetic oligonucleotide
agcaggucuucggcagggu

SEQ ID NO: 2899477 - RNA, 19 nt, Artificial Sequence
  Description of Artificial Sequence: Synthetic oligonucleotide
gcuggcgggagacguugac

SEQ ID NO: 2899478 - RNA, 19 nt, Artificial Sequence
  Description of Artificial Sequence: Synthetic oligonucleotide
ggagacguugacgcacaga

SEQ ID NO: 2899479 - RNA, 19 nt, Artificial Sequence
  Description of Artificial Sequence: Synthetic oligonucleotide
cccagauugggcucggcua

SEQ ID NO: 2899480 - RNA, 19 nt, Artificial Sequence
  Description of Artificial Sequence: Synthetic oligonucleotide
ggcaggagggccugggccu

SEQ ID NO: 2899481 - RNA, 19 nt, Artificial Sequence
  Description of Artificial Sequence: Synthetic oligonucleotide
ggugcgucagcaggucuuc

SEQ ID NO: 2899482 - RNA, 19 nt, Artificial Sequence
  Description of Artificial Sequence: Synthetic oligonucleotide
gcgcuccaggcuguggccg

SEQ ID NO: 2899483 - RNA, 19 nt, Artificial Sequence
  Description of Artificial Sequence: Synthetic oligonucleotide
cgucuggccaccccagcag

SEQ ID NO: 2899484 - RNA, 19 nt, Artificial Sequence
  Description of Artificial Sequence: Synthetic oligonucleotide
gcucagccggguccccggg

SEQ ID NO: 2899485 - RNA, 19 nt, Artificial Sequence
  Description of Artificial Sequence: Synthetic oligonucleotide
guggccgccguggcgcaug

SEQ ID NO: 2899486 - RNA, 19 nt, Artificial Sequence
  Description of Artificial Sequence: Synthetic oligonucleotide
cagccggguccccgggcag

SEQ ID NO: 2899487 - RNA, 19 nt, Artificial Sequence
  Description of Artificial Sequence: Synthetic oligonucleotide
ggcggugcagacggcggcc

SEQ ID NO: 2899488 - RNA, 19 nt, Artificial Sequence
  Description of Artificial Sequence: Synthetic oligonucleotide
ggccguucuugcaguacac

SEQ ID NO: 2899489 - RNA, 19 nt, Artificial Sequence
  Description of Artificial Sequence: Synthetic oligonucleotide
agcggcugcggccguucuu

SEQ ID NO: 2899490 - RNA, 19 nt, Artificial Sequence
  Description of Artificial Sequence: Synthetic oligonucleotide
gugaugcccgcgcgcgcca

SEQ ID NO: 2899491 - RNA, 19 nt, Artificial Sequence
  Description of Artificial Sequence: Synthetic oligonucleotide
ggcccgggcugcuggcggg

SEQ ID NO: 2899492 - RNA, 19 nt, Artificial Sequence
  Description of Artificial Sequence: Synthetic oligonucleotide
augcccgcgcgcgccagca

SEQ ID NO: 2899493 - RNA, 19 nt, Artificial Sequence
  Description of Artificial Sequence: Synthetic oligonucleotide
gccgccgcgcaccgcagcc

SEQ ID NO: 2899494 - RNA, 19 nt, Artificial Sequence
  Description of Artificial Sequence: Synthetic oligonucleotide
uggcggcgcaggugggcuc

SEQ ID NO: 2899495 - RNA, 19 nt, Artificial Sequence
  Description of Artificial Sequence: Synthetic oligonucleotide
ccuuucaguguagacgucu

SEQ ID NO: 2899496 - RNA, 19 nt, Artificial Sequence
  Description of Artificial Sequence: Synthetic oligonucleotide
cgcacagagugaugcccgc

SEQ ID NO: 2899497 - RNA, 19 nt, Artificial Sequence
  Description of Artificial Sequence: Synthetic oligonucleotide
ggcgggagacguugacgca

SEQ ID NO: 2899498 - RNA, 19 nt, Artificial Sequence
  Description of Artificial Sequence: Synthetic oligonucleotide
gcggugcagacggcggccg

SEQ ID NO: 2899499 - RNA, 19 nt, Artificial Sequence
  Description of Artificial Sequence: Synthetic oligonucleotide
acggcgcggcuuacucggg

SEQ ID NO: 2899500 - RNA, 19 nt, Artificial Sequence
  Description of Artificial Sequence: Synthetic oligonucleotide
ccauaccuggaaggcgcgc

SEQ ID NO: 2899501 - RNA, 19 nt, Artificial Sequence
  Description of Artificial Sequence: Synthetic oligonucleotide
ccguggcgcaugagguagg

SEQ ID NO: 2899502 - RNA, 19 nt, Artificial Sequence
  Description of Artificial Sequence: Synthetic oligonucleotide
gcggccgagcggcugcggc

SEQ ID NO: 2899503 - RNA, 19 nt, Artificial Sequence
  Description of Artificial Sequence: Synthetic oligonucleotide
ggcggcgcaggugggcucc

SEQ ID NO: 2899504 - RNA, 19 nt, Artificial Sequence
  Description of Artificial Sequence: Synthetic oligonucleotide
gcgcaccgcagccuccaug

SEQ ID NO: 2899505 - RNA, 19 nt, Artificial Sequence
  Description of Artificial Sequence: Synthetic oligonucleotide
cgaacacgggaacgcgcag

SEQ ID NO: 2899506 - RNA, 19 nt, Artificial Sequence
  Description of Artificial Sequence: Synthetic oligonucleotide
gggcucagccggguccccg

SEQ ID NO: 2899507 - RNA, 19 nt, Artificial Sequence
  Description of Artificial Sequence: Synthetic oligonucleotide
cccgggagcgcgcggcccg

SEQ ID NO: 2899508 - RNA, 19 nt, Artificial Sequence
  Description of Artificial Sequence: Synthetic oligonucleotide
cgcaugagguaggcggugc

SEQ ID NO: 2899509 - RNA, 19 nt, Artificial Sequence
  Description of Artificial Sequence: Synthetic oligonucleotide
cggguccccgggcaggagg

SEQ ID NO: 2899510 - RNA, 19 nt, Artificial Sequence
  Description of Artificial Sequence: Synthetic oligonucleotide
gcgcggcccgggcugcugg

SEQ ID NO: 2899511 - RNA, 19 nt, Artificial Sequence
  Description of Artificial Sequence: Synthetic oligonucleotide
gcgcaugagguaggcggug

SEQ ID NO: 2899512 - RNA, 19 nt, Artificial Sequence
  Description of Artificial Sequence: Synthetic oligonucleotide
ggcugcggccguucuugca

SEQ ID NO: 2899513 - RNA, 19 nt, Artificial Sequence
  Description of Artificial Sequence: Synthetic oligonucleotide
cgucagcaggucuucggca

SEQ ID NO: 2899514 - RNA, 19 nt, Artificial Sequence
  Description of Artificial Sequence: Synthetic oligonucleotide
ggugggcuccaggugcguc

SEQ ID NO: 2899515 - RNA, 19 nt, Artificial Sequence
  Description of Artificial Sequence: Synthetic oligonucleotide
cgcaggugggcuccaggug

SEQ ID NO: 2899516 - RNA, 19 nt, Artificial Sequence
  Description of Artificial Sequence: Synthetic oligonucleotide
gcgcaggugggcuccaggu

SEQ ID NO: 2899517 - RNA, 19 nt, Artificial Sequence
  Description of Artificial Sequence: Synthetic oligonucleotide
gcaccgcagccuccauggc

SEQ ID NO: 2899518 - RNA, 19 nt, Artificial Sequence
  Description of Artificial Sequence: Synthetic oligonucleotide
gguaggcggugcagacggc

SEQ ID NO: 2899519 - RNA, 19 nt, Artificial Sequence
  Description of Artificial Sequence: Synthetic oligonucleotide
gcggcuuacucgggcucag

SEQ ID NO: 2899520 - RNA, 19 nt, Artificial Sequence
  Description of Artificial Sequence: Synthetic oligonucleotide
aggagggccugggccugga

SEQ ID NO: 2899521 - RNA, 19 nt, Artificial Sequence
  Description of Artificial Sequence: Synthetic oligonucleotide
aggugggcuccaggugcgu

SEQ ID NO: 2899522 - RNA, 19 nt, Artificial Sequence
  Description of Artificial Sequence: Synthetic oligonucleotide
gcgagcgcucuucaccaua

SEQ ID NO: 2899523 - RNA, 19 nt, Artificial Sequence
  Description of Artificial Sequence: Synthetic oligonucleotide
caggugcgucagcaggucu

SEQ ID NO: 2899524 - RNA, 19 nt, Artificial Sequence
  Description of Artificial Sequence: Synthetic oligonucleotide
agccuccauggcggcgcag

SEQ ID NO: 2899525 - RNA, 19 nt, Artificial Sequence
  Description of Artificial Sequence: Synthetic oligonucleotide
gcgcgcgccagcagcuccg

SEQ ID NO: 2899526 - RNA, 19 nt, Artificial Sequence
  Description of Artificial Sequence: Synthetic oligonucleotide
gcucuucaccauaccugga

SEQ ID NO: 2899527 - RNA, 19 nt, Artificial Sequence
  Description of Artificial Sequence: Synthetic oligonucleotide
gggagcgcgcggcccgggc

SEQ ID NO: 2899528 - RNA, 19 nt, Artificial Sequence
  Description of Artificial Sequence: Synthetic oligonucleotide
cugcggccguucuugcagu

SEQ ID NO: 2899529 - RNA, 19 nt, Artificial Sequence
  Description of Artificial Sequence: Synthetic oligonucleotide
cuguggccgccguggcgca

SEQ ID NO: 2899530 - RNA, 19 nt, Artificial Sequence
  Description of Artificial Sequence: Synthetic oligonucleotide
gcggccguucuugcaguac

SEQ ID NO: 2899531 - RNA, 19 nt, Artificial Sequence
  Description of Artificial Sequence: Synthetic oligonucleotide
uguggccgccguggcgcau

SEQ ID NO: 2899532 - RNA, 19 nt, Artificial Sequence
  Description of Artificial Sequence: Synthetic oligonucleotide
cagcucggccaccccggga

SEQ ID NO: 2899533 - RNA, 19 nt, Artificial Sequence
  Description of Artificial Sequence: Synthetic oligonucleotide
gcgcggcuuacucgggcuc

SEQ ID NO: 2899534 - RNA, 19 nt, Artificial Sequence
  Description of Artificial Sequence: Synthetic oligonucleotide
ggcgcaugagguaggcggu

SEQ ID NO: 2899535 - RNA, 19 nt, Artificial Sequence
  Description of Artificial Sequence: Synthetic oligonucleotide
ccaggcuguggccgccgug

SEQ ID NO: 2899536 - RNA, 19 nt, Artificial Sequence
  Description of Artificial Sequence: Synthetic oligonucleotide
cggccguucuugcaguaca

SEQ ID NO: 2899537 - RNA, 19 nt, Artificial Sequence
  Description of Artificial Sequence: Synthetic oligonucleotide
cugaacggcgcggcuuacu

SEQ ID NO: 2899538 - RNA, 19 nt, Artificial Sequence
  Description of Artificial Sequence: Synthetic oligonucleotide
cgggcugcuggcgggagac

SEQ ID NO: 2899539 - RNA, 19 nt, Artificial Sequence
  Description of Artificial Sequence: Synthetic oligonucleotide
cggccgagcggcugcggcc

SEQ ID NO: 2899540 - RNA, 19 nt, Artificial Sequence
  Description of Artificial Sequence: Synthetic oligonucleotide
gccaccccagcagcugaac

SEQ ID NO: 2899541 - RNA, 19 nt, Artificial Sequence
  Description of Artificial Sequence: Synthetic oligonucleotide
gggcucggcuaccgggcga

SEQ ID NO: 2899542 - RNA, 19 nt, Artificial Sequence
  Description of Artificial Sequence: Synthetic oligonucleotide
gagcggcugcggccguucu

SEQ ID NO: 2899543 - RNA, 19 nt, Artificial Sequence
  Description of Artificial Sequence: Synthetic oligonucleotide
ccgggcgagcgcucuucac

SEQ ID NO: 2899544 - RNA, 19 nt, Artificial Sequence
  Description of Artificial Sequence: Synthetic oligonucleotide
cgggagacguugacgcaca

SEQ ID NO: 2899545 - RNA, 19 nt, Artificial Sequence
  Description of Artificial Sequence: Synthetic oligonucleotide
cagccuccauggcggcgca

SEQ ID NO: 2899546 - RNA, 19 nt, Artificial Sequence
  Description of Artificial Sequence: Synthetic oligonucleotide
ggccugggccuggaguguc

SEQ ID NO: 2899547 - RNA, 19 nt, Artificial Sequence
  Description of Artificial Sequence: Synthetic oligonucleotide
gcagcugaacggcgcggcu

SEQ ID NO: 2899548 - RNA, 19 nt, Artificial Sequence
  Description of Artificial Sequence: Synthetic oligonucleotide
gcggcccgggcugcuggcg

SEQ ID NO: 2899549 - RNA, 19 nt, Artificial Sequence
  Description of Artificial Sequence: Synthetic oligonucleotide
gcugaacggcgcggcuuac

SEQ ID NO: 2899550 - RNA, 19 nt, Artificial Sequence
  Description of Artificial Sequence: Synthetic oligonucleotide
gguccccgggcaggagggc

SEQ ID NO: 2899551 - RNA, 19 nt, Artificial Sequence
  Description of Artificial Sequence: Synthetic oligonucleotide
ggagcgcgcggcccgggcu

SEQ ID NO: 2899552 - RNA, 19 nt, Artificial Sequence
  Description of Artificial Sequence: Synthetic oligonucleotide
ccgccguggcgcaugaggu

SEQ ID NO: 2899553 - RNA, 19 nt, Artificial Sequence
  Description of Artificial Sequence: Synthetic oligonucleotide
ccgcagccuccauggcggc

SEQ ID NO: 2899554 - RNA, 19 nt, Artificial Sequence
  Description of Artificial Sequence: Synthetic oligonucleotide
caggcgccgccgccgcgca

SEQ ID NO: 2899555 - RNA, 19 nt, Artificial Sequence
  Description of Artificial Sequence: Synthetic oligonucleotide
cggcgcggcuuacucgggc

SEQ ID NO: 2899556 - RNA, 19 nt, Artificial Sequence
  Description of Artificial Sequence: Synthetic oligonucleotide
cagcugaacggcgcggcuu

SEQ ID NO: 2899557 - RNA, 19 nt, Artificial Sequence
  Description of Artificial Sequence: Synthetic oligonucleotide
cggcccgggcugcuggcgg

SEQ ID NO: 2899558 - RNA, 19 nt, Artificial Sequence
  Description of Artificial Sequence: Synthetic oligonucleotide
ccuggagugucugcucaua

SEQ ID NO: 2899559 - RNA, 19 nt, Artificial Sequence
  Description of Artificial Sequence: Synthetic oligonucleotide
ggcggccgagcggcugcgg

SEQ ID NO: 2899560 - RNA, 19 nt, Artificial Sequence
  Description of Artificial Sequence: Synthetic oligonucleotide
gcuaccgggcgagcgcucu

SEQ ID NO: 2899561 - RNA, 19 nt, Artificial Sequence
  Description of Artificial Sequence: Synthetic oligonucleotide
cgcagccuccauggcggcg

SEQ ID NO: 2899562 - RNA, 19 nt, Artificial Sequence
  Description of Artificial Sequence: Synthetic oligonucleotide
cggcagggucaucgaacac

SEQ ID NO: 2899563 - RNA, 19 nt, Artificial Sequence
  Description of Artificial Sequence: Synthetic oligonucleotide
agacggcggccgagcggcu

SEQ ID NO: 2899564 - RNA, 19 nt, Artificial Sequence
  Description of Artificial Sequence: Synthetic oligonucleotide
cguugacgcacagagugau

SEQ ID NO: 2899565 - RNA, 19 nt, Artificial Sequence
  Description of Artificial Sequence: Synthetic oligonucleotide
ccaccccgggagcgcgcgg

SEQ ID NO: 2899566 - RNA, 19 nt, Artificial Sequence
  Description of Artificial Sequence: Synthetic oligonucleotide
gccgcgcaccgcagccucc

SEQ ID NO: 2899567 - RNA, 19 nt, Artificial Sequence
  Description of Artificial Sequence: Synthetic oligonucleotide
cggcugcggccguucuugc

SEQ ID NO: 2899568 - RNA, 19 nt, Artificial Sequence
  Description of Artificial Sequence: Synthetic oligonucleotide
ggccaccccagcagcugaa

SEQ ID NO: 2899569 - RNA, 19 nt, Artificial Sequence
  Description of Artificial Sequence: Synthetic oligonucleotide
gcucggcuaccgggcgagc

SEQ ID NO: 2899570 - RNA, 19 nt, Artificial Sequence
  Description of Artificial Sequence: Synthetic oligonucleotide
gccggguccccgggcagga

SEQ ID NO: 2899571 - RNA, 19 nt, Artificial Sequence
  Description of Artificial Sequence: Synthetic oligonucleotide
ggcuaccgggcgagcgcuc

SEQ ID NO: 2899572 - RNA, 19 nt, Artificial Sequence
  Description of Artificial Sequence: Synthetic oligonucleotide
cgccgcgcaccgcagccuc

SEQ ID NO: 2899573 - RNA, 19 nt, Artificial Sequence
  Description of Artificial Sequence: Synthetic oligonucleotide
cgcgcagcucggccacccc

SEQ ID NO: 2899574 - RNA, 19 nt, Artificial Sequence
  Description of Artificial Sequence: Synthetic oligonucleotide
cgggaacgcgcagcucggc

SEQ ID NO: 2899575 - RNA, 19 nt, Artificial Sequence
  Description of Artificial Sequence: Synthetic oligonucleotide
ggucuucggcagggucauc

SEQ ID NO: 2899576 - RNA, 19 nt, Artificial Sequence
  Description of Artificial Sequence: Synthetic oligonucleotide
ggcgagcgcucuucaccau

SEQ ID NO: 2899577 - RNA, 19 nt, Artificial Sequence
  Description of Artificial Sequence: Synthetic oligonucleotide
cggcuuacucgggcucagc

SEQ ID NO: 2899578 - RNA, 19 nt, Artificial Sequence
  Description of Artificial Sequence: Synthetic oligonucleotide
ccccgggagcgcgcggccc

SEQ ID NO: 2899579 - RNA, 19 nt, Artificial Sequence
  Description of Artificial Sequence: Synthetic oligonucleotide
cggccaccccgggagcgcg

SEQ ID NO: 2899580 - RNA, 19 nt, Artificial Sequence
  Description of Artificial Sequence: Synthetic oligonucleotide
ccgggagcgcgcggcccgg

SEQ ID NO: 2899581 - RNA, 19 nt, Artificial Sequence
  Description of Artificial Sequence: Synthetic oligonucleotide
cgcggcuuacucgggcuca

SEQ ID NO: 2899582 - RNA, 19 nt, Artificial Sequence
  Description of Artificial Sequence: Synthetic oligonucleotide
cuaccgggcgagcgcucuu

SEQ ID NO: 2899583 - RNA, 19 nt, Artificial Sequence
  Description of Artificial Sequence: Synthetic oligonucleotide
cgcggcccgggcugcuggc

SEQ ID NO: 2899584 - RNA, 19 nt, Artificial Sequence
  Description of Artificial Sequence: Synthetic oligonucleotide
cgagcggcugcggccguuc

SEQ ID NO: 2899585 - RNA, 19 nt, Artificial Sequence
  Description of Artificial Sequence: Synthetic oligonucleotide
ccgccgccgcgcaccgcag

SEQ ID NO: 2899586 - RNA, 19 nt, Artificial Sequence
  Description of Artificial Sequence: Synthetic oligonucleotide
cccgggcaggagggccugg

SEQ ID NO: 2899587 - RNA, 19 nt, Artificial Sequence
  Description of Artificial Sequence: Synthetic oligonucleotide
ggccgccguggcgcaugag

SEQ ID NO: 2899588 - RNA, 19 nt, Artificial Sequence
  Description of Artificial Sequence: Synthetic oligonucleotide
gcgcgccagcagcuccguc

SEQ ID NO: 2899589 - RNA, 19 nt, Artificial Sequence
  Description of Artificial Sequence: Synthetic oligonucleotide
cgccgccgcgcaccgcagc

SEQ ID NO: 2899590 - RNA, 19 nt, Artificial Sequence
  Description of Artificial Sequence: Synthetic oligonucleotide
ccgcgcaccgcagccucca

SEQ ID NO: 2899591 - RNA, 19 nt, Artificial Sequence
  Description of Artificial Sequence: Synthetic oligonucleotide
gcugcuggcgggagacguu

SEQ ID NO: 2899592 - RNA, 19 nt, Artificial Sequence
  Description of Artificial Sequence: Synthetic oligonucleotide
ccggguccccgggcaggag

SEQ ID NO: 2899593 - RNA, 19 nt, Artificial Sequence
  Description of Artificial Sequence: Synthetic oligonucleotide
cgccguggcgcaugaggua

SEQ ID NO: 2899594 - RNA, 19 nt, Artificial Sequence
  Description of Artificial Sequence: Synthetic oligonucleotide
gcccgggcugcuggcggga

SEQ ID NO: 2899595 - RNA, 19 nt, Artificial Sequence
  Description of Artificial Sequence: Synthetic oligonucleotide
cggugcagacggcggccga

SEQ ID NO: 2899596 - RNA, 19 nt, Artificial Sequence
  Description of Artificial Sequence: Synthetic oligonucleotide
cggcggccgagcggcugcg

SEQ ID NO: 2899597 - RNA, 19 nt, Artificial Sequence
  Description of Artificial Sequence: Synthetic oligonucleotide
cgggagcgcgcggcccggg

SEQ ID NO: 2899598 - RNA, 19 nt, Artificial Sequence
  Description of Artificial Sequence: Synthetic oligonucleotide
gcggcgcaggugggcucca

SEQ ID NO: 2899599 - RNA, 19 nt, Artificial Sequence
  Description of Artificial Sequence: Synthetic oligonucleotide
cggcgcaggugggcuccag

SEQ ID NO: 2899600 - RNA, 19 nt, Artificial Sequence
  Description of Artificial Sequence: Synthetic oligonucleotide
cggcuaccgggcgagcgcu

SEQ ID NO: 2899601 - RNA, 19 nt, Artificial Sequence
  Description of Artificial Sequence: Synthetic oligonucleotide
gccgagcggcugcggccgu

SEQ ID NO: 2899602 - RNA, 19 nt, Artificial Sequence
  Description of Artificial Sequence: Synthetic oligonucleotide
cgcgcggcccgggcugcug

SEQ ID NO: 2899603 - RNA, 19 nt, Artificial Sequence
  Description of Artificial Sequence: Synthetic oligonucleotide
cgcgcgccagcagcuccgu

SEQ ID NO: 2899604 - RNA, 19 nt, Artificial Sequence
  Description of Artificial Sequence: Synthetic oligonucleotide
gcgcgcggcccgggcugcu

SEQ ID NO: 2899605 - RNA, 19 nt, Artificial Sequence
  Description of Artificial Sequence: Synthetic oligonucleotide
cgcgcaccgcagccuccau

SEQ ID NO: 2899606 - RNA, 19 nt, Artificial Sequence
  Description of Artificial Sequence: Synthetic oligonucleotide
ccgagcggcugcggccguu

SEQ ID NO: 2899607 - RNA, 19 nt, Artificial Sequence
  Description of Artificial Sequence: Synthetic oligonucleotide
auugguuucaggcacaucc

SEQ ID NO: 2899608 - RNA, 19 nt, Artificial Sequence
  Description of Artificial Sequence: Synthetic oligonucleotide
aauaacgccaacuugcagg

SEQ ID NO: 2899609 - RNA, 19 nt, Artificial Sequence
  Description of Artificial Sequence: Synthetic oligonucleotide
aaaagcagcaaacacaaag

SEQ ID NO: 2899610 - RNA, 19 nt, Artificial Sequence
  Description of Artificial Sequence: Synthetic oligonucleotide
auuuucaaacuccauaugc

SEQ ID NO: 2899611 - RNA, 19 nt, Artificial Sequence
  Description of Artificial Sequence: Synthetic oligonucleotide
aacauugagaauaugaguc

SEQ ID NO: 2899612 - RNA, 19 nt, Artificial Sequence
  Description of Artificial Sequence: Synthetic oligonucleotide
aauaugagucaccuugugc

SEQ ID NO: 2899613 - RNA, 19 nt, Artificial Sequence
  Description of Artificial Sequence: Synthetic oligonucleotide
cuuaauaacgccaacuugc

SEQ ID NO: 2899614 - RNA, 19 nt, Artificial Sequence
  Description of Artificial Sequence: Synthetic oligonucleotide
uauauguaaacucacugag

SEQ ID NO: 2899615 - RNA, 19 nt, Artificial Sequence
  Description of Artificial Sequence: Synthetic oligonucleotide
uccaauauagaaauggucu

SEQ ID NO: 2899616 - RNA, 19 nt, Artificial Sequence
  Description of Artificial Sequence: Synthetic oligonucleotide
uauguaaacucacugagga

SEQ ID NO: 2899617 - RNA, 19 nt, Artificial Sequence
  Description of Artificial Sequence: Synthetic oligonucleotide
gagaauaugagucaccuug

SEQ ID NO: 2899618 - RNA, 19 nt, Artificial Sequence
  Description of Artificial Sequence: Synthetic oligonucleotide
aaauaagacagauauuggu

SEQ ID NO: 2899619 - RNA, 19 nt, Artificial Sequence
  Description of Artificial Sequence: Synthetic oligonucleotide
agcucaauaaacucaaaac

SEQ ID NO: 2899620 - RNA, 19 nt, Artificial Sequence
  Description of Artificial Sequence: Synthetic oligonucleotide
aauggucuuauauguaaac

SEQ ID NO: 2899621 - RNA, 19 nt, Artificial Sequence
  Description of Artificial Sequence: Synthetic oligonucleotide
aacgccaacuugcaggucc

SEQ ID NO: 2899622 - RNA, 19 nt, Artificial Sequence
  Description of Artificial Sequence: Synthetic oligonucleotide
cuuucuauaauuuucuuuc

SEQ ID NO: 2899623 - RNA, 19 nt, Artificial Sequence
  Description of Artificial Sequence: Synthetic oligonucleotide
gauuucuugguucagggag

SEQ ID NO: 2899624 - RNA, 19 nt, Artificial Sequence
  Description of Artificial Sequence: Synthetic oligonucleotide
uuucuuuccaguuagcgug

SEQ ID NO: 2899625 - RNA, 19 nt, Artificial Sequence
  Description of Artificial Sequence: Synthetic oligonucleotide
uaauuuucuuuccaguuag

SEQ ID NO: 2899626 - RNA, 19 nt, Artificial Sequence
  Description of Artificial Sequence: Synthetic oligonucleotide
aaugcuuugauuucuuggu

SEQ ID NO: 2899627 - RNA, 19 nt, Artificial Sequence
  Description of Artificial Sequence: Synthetic oligonucleotide
uucaguuuugcuuagcuca

SEQ ID NO: 2899628 - RNA, 19 nt, Artificial Sequence
  Description of Artificial Sequence: Synthetic oligonucleotide
ucaggcacauccaauauag

SEQ ID NO: 2899629 - RNA, 19 nt, Artificial Sequence
  Description of Artificial Sequence: Synthetic oligonucleotide
ucuauaauuuucuuuccag

SEQ ID NO: 2899630 - RNA, 19 nt, Artificial Sequence
  Description of Artificial Sequence: Synthetic oligonucleotide
uuugcuuagcucaauaaac

SEQ ID NO: 2899631 - RNA, 19 nt, Artificial Sequence
  Description of Artificial Sequence: Synthetic oligonucleotide
uauagaaauggucuuauau

SEQ ID NO: 2899632 - RNA, 19 nt, Artificial Sequence
  Description of Artificial Sequence: Synthetic oligonucleotide
ugcaacauugagaauauga

SEQ ID NO: 2899633 - RNA, 19 nt, Artificial Sequence
  Description of Artificial Sequence: Synthetic oligonucleotide
ucucaggagcuccagaucg

SEQ ID NO: 2899634 - RNA, 19 nt, Artificial Sequence
  Description of Artificial Sequence: Synthetic oligonucleotide
gaggaaagcauuuucaaac

SEQ ID NO: 2899635 - RNA, 19 nt, Artificial Sequence
  Description of Artificial Sequence: Synthetic oligonucleotide
auagaaauggucuuauaug

SEQ ID NO: 2899636 - RNA, 19 nt, Artificial Sequence
  Description of Artificial Sequence: Synthetic oligonucleotide
auaaacucaaaacauucug

SEQ ID NO: 2899637 - RNA, 19 nt, Artificial Sequence
  Description of Artificial Sequence: Synthetic oligonucleotide
uuauauguaaacucacuga

SEQ ID NO: 2899638 - RNA, 19 nt, Artificial Sequence
  Description of Artificial Sequence: Synthetic oligonucleotide
gaaugcuuugauuucuugg

SEQ ID NO: 2899639 - RNA, 19 nt, Artificial Sequence
  Description of Artificial Sequence: Synthetic oligonucleotide
acauccaauauagaaaugg

SEQ ID NO: 2899640 - RNA, 19 nt, Artificial Sequence
  Description of Artificial Sequence: Synthetic oligonucleotide
uagaaauggucuuauaugu

SEQ ID NO: 2899641 - RNA, 19 nt, Artificial Sequence
  Description of Artificial Sequence: Synthetic oligonucleotide
auaugagucaccuugugcu

SEQ ID NO: 2899642 - RNA, 19 nt, Artificial Sequence
  Description of Artificial Sequence: Synthetic oligonucleotide
uuuucaaacuccauaugca

SEQ ID NO: 2899643 - RNA, 19 nt, Artificial Sequence
  Description of Artificial Sequence: Synthetic oligonucleotide
aaaauaagacagauauugg

SEQ ID NO: 2899644 - RNA, 19 nt, Artificial Sequence
  Description of Artificial Sequence: Synthetic oligonucleotide
cuuauauguaaacucacug

SEQ ID NO: 2899645 - RNA, 19 nt, Artificial Sequence
  Description of Artificial Sequence: Synthetic oligonucleotide
uugauuucuugguucaggg

SEQ ID NO: 2899646 - RNA, 19 nt, Artificial Sequence
  Description of Artificial Sequence: Synthetic oligonucleotide
ucaaacuccauaugcaaca

SEQ ID NO: 2899647 - RNA, 19 nt, Artificial Sequence
  Description of Artificial Sequence: Synthetic oligonucleotide
caauaaacucaaaacauuc

SEQ ID NO: 2899648 - RNA, 19 nt, Artificial Sequence
  Description of Artificial Sequence: Synthetic oligonucleotide
aacuguggcaucuuuccag

SEQ ID NO: 2899649 - RNA, 19 nt, Artificial Sequence
  Description of Artificial Sequence: Synthetic oligonucleotide
aaaacauucuggaaaauaa

SEQ ID NO: 2899650 - RNA, 19 nt, Artificial Sequence
  Description of Artificial Sequence: Synthetic oligonucleotide
aacuccauaugcaacauug

SEQ ID NO: 2899651 - RNA, 19 nt, Artificial Sequence
  Description of Artificial Sequence: Synthetic oligonucleotide
uccauaugcaacauugaga

SEQ ID NO: 2899652 - RNA, 19 nt, Artificial Sequence
  Description of Artificial Sequence: Synthetic oligonucleotide
ugaacuguggcaucuuucc

SEQ ID NO: 2899653 - RNA, 19 nt, Artificial Sequence
  Description of Artificial Sequence: Synthetic oligonucleotide
acucaaaacauucuggaaa

SEQ ID NO: 2899654 - RNA, 19 nt, Artificial Sequence
  Description of Artificial Sequence: Synthetic oligonucleotide
cuuccugagauuauuccgg

SEQ ID NO: 2899655 - RNA, 19 nt, Artificial Sequence
  Description of Artificial Sequence: Synthetic oligonucleotide
uguaaacucacugaggaaa

SEQ ID NO: 2899656 - RNA, 19 nt, Artificial Sequence
  Description of Artificial Sequence: Synthetic oligonucleotide
uuuugcuuagcucaauaaa

SEQ ID NO: 2899657 - RNA, 19 nt, Artificial Sequence
  Description of Artificial Sequence: Synthetic oligonucleotide
auuacaugagcggaggagg

SEQ ID NO: 2899658 - RNA, 19 nt, Artificial Sequence
  Description of Artificial Sequence: Synthetic oligonucleotide
agguccugcacauagccac

SEQ ID NO: 2899659 - RNA, 19 nt, Artificial Sequence
  Description of Artificial Sequence: Synthetic oligonucleotide
uaagguccugcacauagcc

SEQ ID NO: 2899660 - RNA, 19 nt, Artificial Sequence
  Description of Artificial Sequence: Synthetic oligonucleotide
aacauucuggaaaauaaga

SEQ ID NO: 2899661 - RNA, 19 nt, Artificial Sequence
  Description of Artificial Sequence: Synthetic oligonucleotide
uucuauaauuuucuuucca

SEQ ID NO: 2899662 - RNA, 19 nt, Artificial Sequence
  Description of Artificial Sequence: Synthetic oligonucleotide
ucuuauauguaaacucacu

SEQ ID NO: 2899663 - RNA, 19 nt, Artificial Sequence
  Description of Artificial Sequence: Synthetic oligonucleotide
auuuucuuuccaguuagcg

SEQ ID NO: 2899664 - RNA, 19 nt, Artificial Sequence
  Description of Artificial Sequence: Synthetic oligonucleotide
uuaauaacgccaacuugca

SEQ ID NO: 2899665 - RNA, 19 nt, Artificial Sequence
  Description of Artificial Sequence: Synthetic oligonucleotide
ucaauaaacucaaaacauu

SEQ ID NO: 2899666 - RNA, 19 nt, Artificial Sequence
  Description of Artificial Sequence: Synthetic oligonucleotide
aauaaacucaaaacauucu

SEQ ID NO: 2899667 - RNA, 19 nt, Artificial Sequence
  Description of Artificial Sequence: Synthetic oligonucleotide
uuuucuuuccaguuagcgu

SEQ ID NO: 2899668 - RNA, 19 nt, Artificial Sequence
  Description of Artificial Sequence: Synthetic oligonucleotide
uggucuuauauguaaacuc

SEQ ID NO: 2899669 - RNA, 19 nt, Artificial Sequence
  Description of Artificial Sequence: Synthetic oligonucleotide
aauaagacagauauugguu

SEQ ID NO: 2899670 - RNA, 19 nt, Artificial Sequence
  Description of Artificial Sequence: Synthetic oligonucleotide
aaacauucuggaaaauaag

SEQ ID NO: 2899671 - RNA, 19 nt, Artificial Sequence
  Description of Artificial Sequence: Synthetic oligonucleotide
cacauagccacaaccaccc

SEQ ID NO: 2899672 - RNA, 19 nt, Artificial Sequence
  Description of Artificial Sequence: Synthetic oligonucleotide
acuguggcaucuuuccagc

SEQ ID NO: 2899673 - RNA, 19 nt, Artificial Sequence
  Description of Artificial Sequence: Synthetic oligonucleotide
uuccacaacaugaacugug

SEQ ID NO: 2899674 - RNA, 19 nt, Artificial Sequence
  Description of Artificial Sequence: Synthetic oligonucleotide
uuucuauaauuuucuuucc

SEQ ID NO: 2899675 - RNA, 19 nt, Artificial Sequence
  Description of Artificial Sequence: Synthetic oligonucleotide
aauauagaaauggucuuau

SEQ ID NO: 2899676 - RNA, 19 nt, Artificial Sequence
  Description of Artificial Sequence: Synthetic oligonucleotide
uugcuuagcucaauaaacu

SEQ ID NO: 2899677 - RNA, 19 nt, Artificial Sequence
  Description of Artificial Sequence: Synthetic oligonucleotide
aaagcagcaaacacaaaga

SEQ ID NO: 2899678 - RNA, 19 nt, Artificial Sequence
  Description of Artificial Sequence: Synthetic oligonucleotide
gagugcauuacaugagcgg

SEQ ID NO: 2899679 - RNA, 19 nt, Artificial Sequence
  Description of Artificial Sequence: Synthetic oligonucleotide
ugcuuccacaacaugaacu

SEQ ID NO: 2899680 - RNA, 19 nt, Artificial Sequence
  Description of Artificial Sequence: Synthetic oligonucleotide
gaaauggucuuauauguaa

SEQ ID NO: 2899681 - RNA, 19 nt, Artificial Sequence
  Description of Artificial Sequence: Synthetic oligonucleotide
caaccagggcuuaauaacg

SEQ ID NO: 2899682 - RNA, 19 nt, Artificial Sequence
  Description of Artificial Sequence: Synthetic oligonucleotide
uuucaaacuccauaugcaa

SEQ ID NO: 2899683 - RNA, 19 nt, Artificial Sequence
  Description of Artificial Sequence: Synthetic oligonucleotide
uuuccaguuagcgugguca

SEQ ID NO: 2899684 - RNA, 19 nt, Artificial Sequence
  Description of Artificial Sequence: Synthetic oligonucleotide
auaagacagauauugguuu

SEQ ID NO: 2899685 - RNA, 19 nt, Artificial Sequence
  Description of Artificial Sequence: Synthetic oligonucleotide
uucaaacuccauaugcaac

SEQ ID NO: 2899686 - RNA, 19 nt, Artificial Sequence
  Description of Artificial Sequence: Synthetic oligonucleotide
gaggaaaagcagcaaacac

SEQ ID NO: 2899687 - RNA, 19 nt, Artificial Sequence
  Description of Artificial Sequence: Synthetic oligonucleotide
cauucuggaaaauaagaca

SEQ ID NO: 2899688 - RNA, 19 nt, Artificial Sequence
  Description of Artificial Sequence: Synthetic oligonucleotide
cagaucgugagcagcaucc

SEQ ID NO: 2899689 - RNA, 19 nt, Artificial Sequence
  Description of Artificial Sequence: Synthetic oligonucleotide
uagcucaauaaacucaaaa

SEQ ID NO: 2899690 - RNA, 19 nt, Artificial Sequence
  Description of Artificial Sequence: Synthetic oligonucleotide
gauuauuccgggagaaugc

SEQ ID NO: 2899691 - RNA, 19 nt, Artificial Sequence
  Description of Artificial Sequence: Synthetic oligonucleotide
uugagaauaugagucaccu

SEQ ID NO: 2899692 - RNA, 19 nt, Artificial Sequence
  Description of Artificial Sequence: Synthetic oligonucleotide
ugcagguccaagcuaaggu

SEQ ID NO: 2899693 - RNA, 19 nt, Artificial Sequence
  Description of Artificial Sequence: Synthetic oligonucleotide
agauuauuccgggagaaug

SEQ ID NO: 2899694 - RNA, 19 nt, Artificial Sequence
  Description of Artificial Sequence: Synthetic oligonucleotide
aauuuucuuuccaguuagc

SEQ ID NO: 2899695 - RNA, 19 nt, Artificial Sequence
  Description of Artificial Sequence: Synthetic oligonucleotide
acaaccaccccaccgcugg

SEQ ID NO: 2899696 - RNA, 19 nt, Artificial Sequence
  Description of Artificial Sequence: Synthetic oligonucleotide
ucugcuuccacaacaugaa

SEQ ID NO: 2899697 - RNA, 19 nt, Artificial Sequence
  Description of Artificial Sequence: Synthetic oligonucleotide
aagcagcaaacacaaagaa

SEQ ID NO: 2899698 - RNA, 19 nt, Artificial Sequence
  Description of Artificial Sequence: Synthetic oligonucleotide
auugagaauaugagucacc

SEQ ID NO: 2899699 - RNA, 19 nt, Artificial Sequence
  Description of Artificial Sequence: Synthetic oligonucleotide
auaauuuucuuuccaguua

SEQ ID NO: 2899700 - RNA, 19 nt, Artificial Sequence
  Description of Artificial Sequence: Synthetic oligonucleotide
aaccagggcuuaauaacgc

SEQ ID NO: 2899701 - RNA, 19 nt, Artificial Sequence
  Description of Artificial Sequence: Synthetic oligonucleotide
aucgugagcagcauccugc

SEQ ID NO: 2899702 - RNA, 19 nt, Artificial Sequence
  Description of Artificial Sequence: Synthetic oligonucleotide
aaacucacugaggaaagca

SEQ ID NO: 2899703 - RNA, 19 nt, Artificial Sequence
  Description of Artificial Sequence: Synthetic oligonucleotide
gacagauauugguuucagg

SEQ ID NO: 2899704 - RNA, 19 nt, Artificial Sequence
  Description of Artificial Sequence: Synthetic oligonucleotide
acauugagaauaugaguca

SEQ ID NO: 2899705 - RNA, 19 nt, Artificial Sequence
  Description of Artificial Sequence: Synthetic oligonucleotide
uaugcaacauugagaauau

SEQ ID NO: 2899706 - RNA, 19 nt, Artificial Sequence
  Description of Artificial Sequence: Synthetic oligonucleotide
gcucaauaaacucaaaaca

SEQ ID NO: 2899707 - RNA, 19 nt, Artificial Sequence
  Description of Artificial Sequence: Synthetic oligonucleotide
ucuggaaaauaagacagau

SEQ ID NO: 2899708 - RNA, 19 nt, Artificial Sequence
  Description of Artificial Sequence: Synthetic oligonucleotide
uucuuuccaguuagcgugg

SEQ ID NO: 2899709 - RNA, 19 nt, Artificial Sequence
  Description of Artificial Sequence: Synthetic oligonucleotide
ugcauuacaugagcggagg

SEQ ID NO: 2899710 - RNA, 19 nt, Artificial Sequence
  Description of Artificial Sequence: Synthetic oligonucleotide
ucaccuugugcuuucucag

SEQ ID NO: 2899711 - RNA, 19 nt, Artificial Sequence
  Description of Artificial Sequence: Synthetic oligonucleotide
accagggcuuaauaacgcc

SEQ ID NO: 2899712 - RNA, 19 nt, Artificial Sequence
  Description of Artificial Sequence: Synthetic oligonucleotide
cuccauaugcaacauugag

SEQ ID NO: 2899713 - RNA, 19 nt, Artificial Sequence
  Description of Artificial Sequence: Synthetic oligonucleotide
ucuugguucagggagugca

SEQ ID NO: 2899714 - RNA, 19 nt, Artificial Sequence
  Description of Artificial Sequence: Synthetic oligonucleotide
uaauaacgccaacuugcag

SEQ ID NO: 2899715 - RNA, 19 nt, Artificial Sequence
  Description of Artificial Sequence: Synthetic oligonucleotide
auccaauauagaaaugguc

SEQ ID NO: 2899716 - RNA, 19 nt, Artificial Sequence
  Description of Artificial Sequence: Synthetic oligonucleotide
auaacgccaacuugcaggu

SEQ ID NO: 2899717 - RNA, 19 nt, Artificial Sequence
  Description of Artificial Sequence: Synthetic oligonucleotide
auauguaaacucacugagg

SEQ ID NO: 2899718 - RNA, 19 nt, Artificial Sequence
  Description of Artificial Sequence: Synthetic oligonucleotide
ugcuuccugagauuauucc

SEQ ID NO: 2899719 - RNA, 19 nt, Artificial Sequence
  Description of Artificial Sequence: Synthetic oligonucleotide
uuucucaggagcuccagau

SEQ ID NO: 2899720 - RNA, 19 nt, Artificial Sequence
  Description of Artificial Sequence: Synthetic oligonucleotide
uuccugagauuauuccggg

SEQ ID NO: 2899721 - RNA, 19 nt, Artificial Sequence
  Description of Artificial Sequence: Synthetic oligonucleotide
aggaggaaaagcagcaaac

SEQ ID NO: 2899722 - RNA, 19 nt, Artificial Sequence
  Description of Artificial Sequence: Synthetic oligonucleotide
uauuccgggagaaugcuuu

SEQ ID NO: 2899723 - RNA, 19 nt, Artificial Sequence
  Description of Artificial Sequence: Synthetic oligonucleotide
ugcacauagccacaaccac

SEQ ID NO: 2899724 - RNA, 19 nt, Artificial Sequence
  Description of Artificial Sequence: Synthetic oligonucleotide
cuugugcuuucucaggagc

SEQ ID NO: 2899725 - RNA, 19 nt, Artificial Sequence
  Description of Artificial Sequence: Synthetic oligonucleotide
uucuggaaaauaagacaga

SEQ ID NO: 2899726 - RNA, 19 nt, Artificial Sequence
  Description of Artificial Sequence: Synthetic oligonucleotide
cagguccaagcuaaggucc

SEQ ID NO: 2899727 - RNA, 19 nt, Artificial Sequence
  Description of Artificial Sequence: Synthetic oligonucleotide
auccugcgaccccagaagc

SEQ ID NO: 2899728 - RNA, 19 nt, Artificial Sequence
  Description of Artificial Sequence: Synthetic oligonucleotide
aacaugaacuguggcaucu

SEQ ID NO: 2899729 - RNA, 19 nt, Artificial Sequence
  Description of Artificial Sequence: Synthetic oligonucleotide
aggcacauccaauauagaa

SEQ ID NO: 2899730 - RNA, 19 nt, Artificial Sequence
  Description of Artificial Sequence: Synthetic oligonucleotide
gaauaugagucaccuugug

SEQ ID NO: 2899731 - RNA, 19 nt, Artificial Sequence
  Description of Artificial Sequence: Synthetic oligonucleotide
acaacaugaacuguggcau

SEQ ID NO: 2899732 - RNA, 19 nt, Artificial Sequence
  Description of Artificial Sequence: Synthetic oligonucleotide
uuuccagcuuucuauaauu

SEQ ID NO: 2899733 - RNA, 19 nt, Artificial Sequence
  Description of Artificial Sequence: Synthetic oligonucleotide
auagccacaaccaccccac

SEQ ID NO: 2899734 - RNA, 19 nt, Artificial Sequence
  Description of Artificial Sequence: Synthetic oligonucleotide
cuuagcucaauaaacucaa

SEQ ID NO: 2899735 - RNA, 19 nt, Artificial Sequence
  Description of Artificial Sequence: Synthetic oligonucleotide
uuacaugagcggaggagga

SEQ ID NO: 2899736 - RNA, 19 nt, Artificial Sequence
  Description of Artificial Sequence: Synthetic oligonucleotide
ugcuuagcucaauaaacuc

SEQ ID NO: 2899737 - RNA, 19 nt, Artificial Sequence
  Description of Artificial Sequence: Synthetic oligonucleotide
ucagggagugcauuacaug

SEQ ID NO: 2899738 - RNA, 19 nt, Artificial Sequence
  Description of Artificial Sequence: Synthetic oligonucleotide
caagcuaagguccugcaca

SEQ ID NO: 2899739 - RNA, 19 nt, Artificial Sequence
  Description of Artificial Sequence: Synthetic oligonucleotide
agugcauuacaugagcgga

SEQ ID NO: 2899740 - RNA, 19 nt, Artificial Sequence
  Description of Artificial Sequence: Synthetic oligonucleotide
gcuaagguccugcacauag

SEQ ID NO: 2899741 - RNA, 19 nt, Artificial Sequence
  Description of Artificial Sequence: Synthetic oligonucleotide
aggagcuccagaucgugag

SEQ ID NO: 2899742 - RNA, 19 nt, Artificial Sequence
  Description of Artificial Sequence: Synthetic oligonucleotide
gcaacauugagaauaugag

SEQ ID NO: 2899743 - RNA, 19 nt, Artificial Sequence
  Description of Artificial Sequence: Synthetic oligonucleotide
cacaacaugaacuguggca

SEQ ID NO: 2899744 - RNA, 19 nt, Artificial Sequence
  Description of Artificial Sequence: Synthetic oligonucleotide
cucaaaacauucuggaaaa

SEQ ID NO: 2899745 - RNA, 19 nt, Artificial Sequence
  Description of Artificial Sequence: Synthetic oligonucleotide
gcuuccugagauuauuccg

SEQ ID NO: 2899746 - RNA, 19 nt, Artificial Sequence
  Description of Artificial Sequence: Synthetic oligonucleotide
cauuacaugagcggaggag

SEQ ID NO: 2899747 - RNA, 19 nt, Artificial Sequence
  Description of Artificial Sequence: Synthetic oligonucleotide
uugugcuuucucaggagcu

SEQ ID NO: 2899748 - RNA, 19 nt, Artificial Sequence
  Description of Artificial Sequence: Synthetic oligonucleotide
guaaacucacugaggaaag

SEQ ID NO: 2899749 - RNA, 19 nt, Artificial Sequence
  Description of Artificial Sequence: Synthetic oligonucleotide
uugguuucaggcacaucca

SEQ ID NO: 2899750 - RNA, 19 nt, Artificial Sequence
  Description of Artificial Sequence: Synthetic oligonucleotide
ugagcggaggaggaaaagc

SEQ ID NO: 2899751 - RNA, 19 nt, Artificial Sequence
  Description of Artificial Sequence: Synthetic oligonucleotide
cucugcuuccacaacauga

SEQ ID NO: 2899752 - RNA, 19 nt, Artificial Sequence
  Description of Artificial Sequence: Synthetic oligonucleotide
uucagggagugcauuacau

SEQ ID NO: 2899753 - RNA, 19 nt, Artificial Sequence
  Description of Artificial Sequence: Synthetic oligonucleotide
aagacagauauugguuuca

SEQ ID NO: 2899754 - RNA, 19 nt, Artificial Sequence
  Description of Artificial Sequence: Synthetic oligonucleotide
agaaugcuuugauuucuug

SEQ ID NO: 2899755 - RNA, 19 nt, Artificial Sequence
  Description of Artificial Sequence: Synthetic oligonucleotide
ugauuucuugguucaggga

SEQ ID NO: 2899756 - RNA, 19 nt, Artificial Sequence
  Description of Artificial Sequence: Synthetic oligonucleotide
cauuuucaaacuccauaug

SEQ ID NO: 2899757 - RNA, 19 nt, Artificial Sequence
  Description of Artificial Sequence: Synthetic oligonucleotide
ucaguuuugcuuagcucaa

SEQ ID NO: 2899758 - RNA, 19 nt, Artificial Sequence
  Description of Artificial Sequence: Synthetic oligonucleotide
cagggagugcauuacauga

SEQ ID NO: 2899759 - RNA, 19 nt, Artificial Sequence
  Description of Artificial Sequence: Synthetic oligonucleotide
uuucaggcacauccaauau

SEQ ID NO: 2899760 - RNA, 19 nt, Artificial Sequence
  Description of Artificial Sequence: Synthetic oligonucleotide
ugagauuauuccgggagaa

SEQ ID NO: 2899761 - RNA, 19 nt, Artificial Sequence
  Description of Artificial Sequence: Synthetic oligonucleotide
ucgugagcagcauccugcg

SEQ ID NO: 2899762 - RNA, 19 nt, Artificial Sequence
  Description of Artificial Sequence: Synthetic oligonucleotide
auggucuuauauguaaacu

SEQ ID NO: 2899763 - RNA, 19 nt, Artificial Sequence
  Description of Artificial Sequence: Synthetic oligonucleotide
acugaggaaagcauuuuca

SEQ ID NO: 2899764 - RNA, 19 nt, Artificial Sequence
  Description of Artificial Sequence: Synthetic oligonucleotide
guuagcguggucacccugg

SEQ ID NO: 2899765 - RNA, 19 nt, Artificial Sequence
  Description of Artificial Sequence: Synthetic oligonucleotide
ccauaugcaacauugagaa

SEQ ID NO: 2899766 - RNA, 19 nt, Artificial Sequence
  Description of Artificial Sequence: Synthetic oligonucleotide
agcaaccagggcuuaauaa

SEQ ID NO: 2899767 - RNA, 19 nt, Artificial Sequence
  Description of Artificial Sequence: Synthetic oligonucleotide
ugagcagcauccugcgacc

SEQ ID NO: 2899768 - RNA, 19 nt, Artificial Sequence
  Description of Artificial Sequence: Synthetic oligonucleotide
cuucaguuuugcuuagcuc

SEQ ID NO: 2899769 - RNA, 19 nt, Artificial Sequence
  Description of Artificial Sequence: Synthetic oligonucleotide
ccugagauuauuccgggag

SEQ ID NO: 2899770 - RNA, 19 nt, Artificial Sequence
  Description of Artificial Sequence: Synthetic oligonucleotide
uucaggcacauccaauaua

SEQ ID NO: 2899771 - RNA, 19 nt, Artificial Sequence
  Description of Artificial Sequence: Synthetic oligonucleotide
agcagcauccugcgacccc

SEQ ID NO: 2899772 - RNA, 19 nt, Artificial Sequence
  Description of Artificial Sequence: Synthetic oligonucleotide
cauccugcgaccccagaag

SEQ ID NO: 2899773 - RNA, 19 nt, Artificial Sequence
  Description of Artificial Sequence: Synthetic oligonucleotide
cuaagguccugcacauagc

SEQ ID NO: 2899774 - RNA, 19 nt, Artificial Sequence
  Description of Artificial Sequence: Synthetic oligonucleotide
guuucaggcacauccaaua

SEQ ID NO: 2899775 - RNA, 19 nt, Artificial Sequence
  Description of Artificial Sequence: Synthetic oligonucleotide
gaggaggaaaagcagcaaa

SEQ ID NO: 2899776 - RNA, 19 nt, Artificial Sequence
  Description of Artificial Sequence: Synthetic oligonucleotide
gcuuaauaacgccaacuug

SEQ ID NO: 2899777 - RNA, 19 nt, Artificial Sequence
  Description of Artificial Sequence: Synthetic oligonucleotide
gcaaccagggcuuaauaac

SEQ ID NO: 2899778 - RNA, 19 nt, Artificial Sequence
  Description of Artificial Sequence: Synthetic oligonucleotide
uaaacucacugaggaaagc

SEQ ID NO: 2899779 - RNA, 19 nt, Artificial Sequence
  Description of Artificial Sequence: Synthetic oligonucleotide
agggcuuaauaacgccaac

SEQ ID NO: 2899780 - RNA, 19 nt, Artificial Sequence
  Description of Artificial Sequence: Synthetic oligonucleotide
aguuuugcuuagcucaaua

SEQ ID NO: 2899781 - RNA, 19 nt, Artificial Sequence
  Description of Artificial Sequence: Synthetic oligonucleotide
auuauuccgggagaaugcu

SEQ ID NO: 2899782 - RNA, 19 nt, Artificial Sequence
  Description of Artificial Sequence: Synthetic oligonucleotide
cauccuucaguuuugcuua

SEQ ID NO: 2899783 - RNA, 19 nt, Artificial Sequence
  Description of Artificial Sequence: Synthetic oligonucleotide
guuuugcuuagcucaauaa

SEQ ID NO: 2899784 - RNA, 19 nt, Artificial Sequence
  Description of Artificial Sequence: Synthetic oligonucleotide
augaacuguggcaucuuuc

SEQ ID NO: 2899785 - RNA, 19 nt, Artificial Sequence
  Description of Artificial Sequence: Synthetic oligonucleotide
ucuuuccagcuuucuauaa

SEQ ID NO: 2899786 - RNA, 19 nt, Artificial Sequence
  Description of Artificial Sequence: Synthetic oligonucleotide
ccaacuugcagguccaagc

SEQ ID NO: 2899787 - RNA, 19 nt, Artificial Sequence
  Description of Artificial Sequence: Synthetic oligonucleotide
uccagcuuucuauaauuuu

SEQ ID NO: 2899788 - RNA, 19 nt, Artificial Sequence
  Description of Artificial Sequence: Synthetic oligonucleotide
ccagcuuucuauaauuuuc

SEQ ID NO: 2899789 - RNA, 19 nt, Artificial Sequence
  Description of Artificial Sequence: Synthetic oligonucleotide
uggugcacugcuuccugag

SEQ ID NO: 2899790 - RNA, 19 nt, Artificial Sequence
  Description of Artificial Sequence: Synthetic oligonucleotide
gaucgugagcagcauccug

SEQ ID NO: 2899791 - RNA, 19 nt, Artificial Sequence
  Description of Artificial Sequence: Synthetic oligonucleotide
uuucuugguucagggagug

SEQ ID NO: 2899792 - RNA, 19 nt, Artificial Sequence
  Description of Artificial Sequence: Synthetic oligonucleotide
cuauaauuuucuuuccagu

SEQ ID NO: 2899793 - RNA, 19 nt, Artificial Sequence
  Description of Artificial Sequence: Synthetic oligonucleotide
cugcacauagccacaacca

SEQ ID NO: 2899794 - RNA, 19 nt, Artificial Sequence
  Description of Artificial Sequence: Synthetic oligonucleotide
uugcagguccaagcuaagg

SEQ ID NO: 2899795 - RNA, 19 nt, Artificial Sequence
  Description of Artificial Sequence: Synthetic oligonucleotide
ggucuuauauguaaacuca

SEQ ID NO: 2899796 - RNA, 19 nt, Artificial Sequence
  Description of Artificial Sequence: Synthetic oligonucleotide
aaccaccccaccgcugggc

SEQ ID NO: 2899797 - RNA, 19 nt, Artificial Sequence
  Description of Artificial Sequence: Synthetic oligonucleotide
gucuuauauguaaacucac

SEQ ID NO: 2899798 - RNA, 19 nt, Artificial Sequence
  Description of Artificial Sequence: Synthetic oligonucleotide
uguggcaucuuuccagcuu

SEQ ID NO: 2899799 - RNA, 19 nt, Artificial Sequence
  Description of Artificial Sequence: Synthetic oligonucleotide
aacucacugaggaaagcau

SEQ ID NO: 2899800 - RNA, 19 nt, Artificial Sequence
  Description of Artificial Sequence: Synthetic oligonucleotide
caccuugugcuuucucagg

SEQ ID NO: 2899801 - RNA, 19 nt, Artificial Sequence
  Description of Artificial Sequence: Synthetic oligonucleotide
acauagccacaaccacccc

SEQ ID NO: 2899802 - RNA, 19 nt, Artificial Sequence
  Description of Artificial Sequence: Synthetic oligonucleotide
ugguuucaggcacauccaa

SEQ ID NO: 2899803 - RNA, 19 nt, Artificial Sequence
  Description of Artificial Sequence: Synthetic oligonucleotide
aacuugcagguccaagcua

SEQ ID NO: 2899804 - RNA, 19 nt, Artificial Sequence
  Description of Artificial Sequence: Synthetic oligonucleotide
agaauaugagucaccuugu

SEQ ID NO: 2899805 - RNA, 19 nt, Artificial Sequence
  Description of Artificial Sequence: Synthetic oligonucleotide
uuccagcuuucuauaauuu

SEQ ID NO: 2899806 - RNA, 19 nt, Artificial Sequence
  Description of Artificial Sequence: Synthetic oligonucleotide
agacagauauugguuucag

SEQ ID NO: 2899807 - RNA, 19 nt, Artificial Sequence
  Description of Artificial Sequence: Synthetic oligonucleotide
aaacuccauaugcaacauu

SEQ ID NO: 2899808 - RNA, 19 nt, Artificial Sequence
  Description of Artificial Sequence: Synthetic oligonucleotide
uucucaggagcuccagauc

SEQ ID NO: 2899809 - RNA, 19 nt, Artificial Sequence
  Description of Artificial Sequence: Synthetic oligonucleotide
acccuggugcacugcuucc

SEQ ID NO: 2899810 - RNA, 19 nt, Artificial Sequence
  Description of Artificial Sequence: Synthetic oligonucleotide
uuagcucaauaaacucaaa

SEQ ID NO: 2899811 - RNA, 19 nt, Artificial Sequence
  Description of Artificial Sequence: Synthetic oligonucleotide
ccugcacauagccacaacc

SEQ ID NO: 2899812 - RNA, 19 nt, Artificial Sequence
  Description of Artificial Sequence: Synthetic oligonucleotide
ggagugcauuacaugagcg

SEQ ID NO: 2899813 - RNA, 19 nt, Artificial Sequence
  Description of Artificial Sequence: Synthetic oligonucleotide
uuccaguuagcguggucac

SEQ ID NO: 2899814 - RNA, 19 nt, Artificial Sequence
  Description of Artificial Sequence: Synthetic oligonucleotide
uccaagcuaagguccugca

SEQ ID NO: 2899815 - RNA, 19 nt, Artificial Sequence
  Description of Artificial Sequence: Synthetic oligonucleotide
cugaggaaagcauuuucaa

SEQ ID NO: 2899816 - RNA, 19 nt, Artificial Sequence
  Description of Artificial Sequence: Synthetic oligonucleotide
uccgggagaaugcuuugau

SEQ ID NO: 2899817 - RNA, 19 nt, Artificial Sequence
  Description of Artificial Sequence: Synthetic oligonucleotide
uaugagucaccuugugcuu

SEQ ID NO: 2899818 - RNA, 19 nt, Artificial Sequence
  Description of Artificial Sequence: Synthetic oligonucleotide
caacauugagaauaugagu

SEQ ID NO: 2899819 - RNA, 19 nt, Artificial Sequence
  Description of Artificial Sequence: Synthetic oligonucleotide
gggagugcauuacaugagc

SEQ ID NO: 2899820 - RNA, 19 nt, Artificial Sequence
  Description of Artificial Sequence: Synthetic oligonucleotide
gagcggaggaggaaaagca

SEQ ID NO: 2899821 - RNA, 19 nt, Artificial Sequence
  Description of Artificial Sequence: Synthetic oligonucleotide
cauagccacaaccacccca

SEQ ID NO: 2899822 - RNA, 19 nt, Artificial Sequence
  Description of Artificial Sequence: Synthetic oligonucleotide
ugcuuucucaggagcucca

SEQ ID NO: 2899823 - RNA, 19 nt, Artificial Sequence
  Description of Artificial Sequence: Synthetic oligonucleotide
cacauccaauauagaaaug

SEQ ID NO: 2899824 - RNA, 19 nt, Artificial Sequence
  Description of Artificial Sequence: Synthetic oligonucleotide
caaaacauucuggaaaaua

SEQ ID NO: 2899825 - RNA, 19 nt, Artificial Sequence
  Description of Artificial Sequence: Synthetic oligonucleotide
aguuagcguggucacccug

SEQ ID NO: 2899826 - RNA, 19 nt, Artificial Sequence
  Description of Artificial Sequence: Synthetic oligonucleotide
auuucuugguucagggagu

SEQ ID NO: 2899827 - RNA, 19 nt, Artificial Sequence
  Description of Artificial Sequence: Synthetic oligonucleotide
uccugcgaccccagaagca

SEQ ID NO: 2899828 - RNA, 19 nt, Artificial Sequence
  Description of Artificial Sequence: Synthetic oligonucleotide
acuugcagguccaagcuaa

SEQ ID NO: 2899829 - RNA, 19 nt, Artificial Sequence
  Description of Artificial Sequence: Synthetic oligonucleotide
aagcaaccagggcuuaaua

SEQ ID NO: 2899830 - RNA, 19 nt, Artificial Sequence
  Description of Artificial Sequence: Synthetic oligonucleotide
aucuuuccagcuuucuaua

SEQ ID NO: 2899831 - RNA, 19 nt, Artificial Sequence
  Description of Artificial Sequence: Synthetic oligonucleotide
auauagaaauggucuuaua

SEQ ID NO: 2899832 - RNA, 19 nt, Artificial Sequence
  Description of Artificial Sequence: Synthetic oligonucleotide
uuagcguggucacccuggu

SEQ ID NO: 2899833 - RNA, 19 nt, Artificial Sequence
  Description of Artificial Sequence: Synthetic oligonucleotide
uccugagauuauuccggga

SEQ ID NO: 2899834 - RNA, 19 nt, Artificial Sequence
  Description of Artificial Sequence: Synthetic oligonucleotide
gaacuguggcaucuuucca

SEQ ID NO: 2899835 - RNA, 19 nt, Artificial Sequence
  Description of Artificial Sequence: Synthetic oligonucleotide
ugagaauaugagucaccuu

SEQ ID NO: 2899836 - RNA, 19 nt, Artificial Sequence
  Description of Artificial Sequence: Synthetic oligonucleotide
ucaggagcuccagaucgug

SEQ ID NO: 2899837 - RNA, 19 nt, Artificial Sequence
  Description of Artificial Sequence: Synthetic oligonucleotide
auuccgggagaaugcuuug

SEQ ID NO: 2899838 - RNA, 19 nt, Artificial Sequence
  Description of Artificial Sequence: Synthetic oligonucleotide
ugagucaccuugugcuuuc

SEQ ID NO: 2899839 - RNA, 19 nt, Artificial Sequence
  Description of Artificial Sequence: Synthetic oligonucleotide
uuauuccgggagaaugcuu

SEQ ID NO: 2899840 - RNA, 19 nt, Artificial Sequence
  Description of Artificial Sequence: Synthetic oligonucleotide
accccagaagcaaccaggg

SEQ ID NO: 2899841 - RNA, 19 nt, Artificial Sequence
  Description of Artificial Sequence: Synthetic oligonucleotide
caucuuuccagcuuucuau

SEQ ID NO: 2899842 - RNA, 19 nt, Artificial Sequence
  Description of Artificial Sequence: Synthetic oligonucleotide
agcagcaaacacaaagaaa

SEQ ID NO: 2899843 - RNA, 19 nt, Artificial Sequence
  Description of Artificial Sequence: Synthetic oligonucleotide
ugguucagggagugcauua

SEQ ID NO: 2899844 - RNA, 19 nt, Artificial Sequence
  Description of Artificial Sequence: Synthetic oligonucleotide
cauccaauauagaaauggu

SEQ ID NO: 2899845 - RNA, 19 nt, Artificial Sequence
  Description of Artificial Sequence: Synthetic oligonucleotide
cugagauuauuccgggaga

SEQ ID NO: 2899846 - RNA, 19 nt, Artificial Sequence
  Description of Artificial Sequence: Synthetic oligonucleotide
gugcauuacaugagcggag

SEQ ID NO: 2899847 - RNA, 19 nt, Artificial Sequence
  Description of Artificial Sequence: Synthetic oligonucleotide
cugcuuccugagauuauuc

SEQ ID NO: 2899848 - RNA, 19 nt, Artificial Sequence
  Description of Artificial Sequence: Synthetic oligonucleotide
agggagugcauuacaugag

SEQ ID NO: 2899849 - RNA, 19 nt, Artificial Sequence
  Description of Artificial Sequence: Synthetic oligonucleotide
ucaaaacauucuggaaaau

SEQ ID NO: 2899850 - RNA, 19 nt, Artificial Sequence
  Description of Artificial Sequence: Synthetic oligonucleotide
cuugcagguccaagcuaag

SEQ ID NO: 2899851 - RNA, 19 nt, Artificial Sequence
  Description of Artificial Sequence: Synthetic oligonucleotide
gagcuccagaucgugagca

SEQ ID NO: 2899852 - RNA, 19 nt, Artificial Sequence
  Description of Artificial Sequence: Synthetic oligonucleotide
agcuuucuauaauuuucuu

SEQ ID NO: 2899853 - RNA, 19 nt, Artificial Sequence
  Description of Artificial Sequence: Synthetic oligonucleotide
auccuucaguuuugcuuag

SEQ ID NO: 2899854 - RNA, 19 nt, Artificial Sequence
  Description of Artificial Sequence: Synthetic oligonucleotide
gcuuagcucaauaaacuca

SEQ ID NO: 2899855 - RNA, 19 nt, Artificial Sequence
  Description of Artificial Sequence: Synthetic oligonucleotide
agcggaggaggaaaagcag

SEQ ID NO: 2899856 - RNA, 19 nt, Artificial Sequence
  Description of Artificial Sequence: Synthetic oligonucleotide
gccacaaccaccccaccgc

SEQ ID NO: 2899857 - RNA, 19 nt, Artificial Sequence
  Description of Artificial Sequence: Synthetic oligonucleotide
cuccagaucgugagcagca

SEQ ID NO: 2899858 - RNA, 19 nt, Artificial Sequence
  Description of Artificial Sequence: Synthetic oligonucleotide
ggcacauccaauauagaaa

SEQ ID NO: 2899859 - RNA, 19 nt, Artificial Sequence
  Description of Artificial Sequence: Synthetic oligonucleotide
agcuccagaucgugagcag

SEQ ID NO: 2899860 - RNA, 19 nt, Artificial Sequence
  Description of Artificial Sequence: Synthetic oligonucleotide
caauauagaaauggucuua

SEQ ID NO: 2899861 - RNA, 19 nt, Artificial Sequence
  Description of Artificial Sequence: Synthetic oligonucleotide
aagguccugcacauagcca

SEQ ID NO: 2899862 - RNA, 19 nt, Artificial Sequence
  Description of Artificial Sequence: Synthetic oligonucleotide
ccaguuagcguggucaccc

SEQ ID NO: 2899863 - RNA, 19 nt, Artificial Sequence
  Description of Artificial Sequence: Synthetic oligonucleotide
acaugagcggaggaggaaa

SEQ ID NO: 2899864 - RNA, 19 nt, Artificial Sequence
  Description of Artificial Sequence: Synthetic oligonucleotide
caacaugaacuguggcauc

SEQ ID NO: 2899865 - RNA, 19 nt, Artificial Sequence
  Description of Artificial Sequence: Synthetic oligonucleotide
guucagggagugcauuaca

SEQ ID NO: 2899866 - RNA, 19 nt, Artificial Sequence
  Description of Artificial Sequence: Synthetic oligonucleotide
agaaauggucuuauaugua

SEQ ID NO: 2899867 - RNA, 19 nt, Artificial Sequence
  Description of Artificial Sequence: Synthetic oligonucleotide
gcacauccaauauagaaau

SEQ ID NO: 2899868 - RNA, 19 nt, Artificial Sequence
  Description of Artificial Sequence: Synthetic oligonucleotide
ggaggaaaagcagcaaaca

SEQ ID NO: 2899869 - RNA, 19 nt, Artificial Sequence
  Description of Artificial Sequence: Synthetic oligonucleotide
gcagguccaagcuaagguc

SEQ ID NO: 2899870 - RNA, 19 nt, Artificial Sequence
  Description of Artificial Sequence: Synthetic oligonucleotide
uccaguuagcguggucacc

SEQ ID NO: 2899871 - RNA, 19 nt, Artificial Sequence
  Description of Artificial Sequence: Synthetic oligonucleotide
gcacauagccacaaccacc

SEQ ID NO: 2899872 - RNA, 19 nt, Artificial Sequence
  Description of Artificial Sequence: Synthetic oligonucleotide
gggagaaugcuuugauuuc

SEQ ID NO: 2899873 - RNA, 19 nt, Artificial Sequence
  Description of Artificial Sequence: Synthetic oligonucleotide
gugcuuucucaggagcucc

SEQ ID NO: 2899874 - RNA, 19 nt, Artificial Sequence
  Description of Artificial Sequence: Synthetic oligonucleotide
cugcuuccacaacaugaac

SEQ ID NO: 2899875 - RNA, 19 nt, Artificial Sequence
  Description of Artificial Sequence: Synthetic oligonucleotide
cagggcuuaauaacgccaa

SEQ ID NO: 2899876 - RNA, 19 nt, Artificial Sequence
  Description of Artificial Sequence: Synthetic oligonucleotide
acugcuuccugagauuauu

SEQ ID NO: 2899877 - RNA, 19 nt, Artificial Sequence
  Description of Artificial Sequence: Synthetic oligonucleotide
guccaagcuaagguccugc

SEQ ID NO: 2899878 - RNA, 19 nt, Artificial Sequence
  Description of Artificial Sequence: Synthetic oligonucleotide
augagcggaggaggaaaag

SEQ ID NO: 2899879 - RNA, 19 nt, Artificial Sequence
  Description of Artificial Sequence: Synthetic oligonucleotide
cacccuggugcacugcuuc

SEQ ID NO: 2899880 - RNA, 19 nt, Artificial Sequence
  Description of Artificial Sequence: Synthetic oligonucleotide
acuccauaugcaacauuga

SEQ ID NO: 2899881 - RNA, 19 nt, Artificial Sequence
  Description of Artificial Sequence: Synthetic oligonucleotide
uccugcacauagccacaac

SEQ ID NO: 2899882 - RNA, 19 nt, Artificial Sequence
  Description of Artificial Sequence: Synthetic oligonucleotide
ugcacugcuuccugagauu

SEQ ID NO: 2899883 - RNA, 19 nt, Artificial Sequence
  Description of Artificial Sequence: Synthetic oligonucleotide
uuccgggagaaugcuuuga

SEQ ID NO: 2899884 - RNA, 19 nt, Artificial Sequence
  Description of Artificial Sequence: Synthetic oligonucleotide
gaaccacgccauccuucag

SEQ ID NO: 2899885 - RNA, 19 nt, Artificial Sequence
  Description of Artificial Sequence: Synthetic oligonucleotide
auauugguuucaggcacau

SEQ ID NO: 2899886 - RNA, 19 nt, Artificial Sequence
  Description of Artificial Sequence: Synthetic oligonucleotide
uacaugagcggaggaggaa

SEQ ID NO: 2899887 - RNA, 19 nt, Artificial Sequence
  Description of Artificial Sequence: Synthetic oligonucleotide
ugggcucugcuuccacaac

SEQ ID NO: 2899888 - RNA, 19 nt, Artificial Sequence
  Description of Artificial Sequence: Synthetic oligonucleotide
uccuucaguuuugcuuagc

SEQ ID NO: 2899889 - RNA, 19 nt, Artificial Sequence
  Description of Artificial Sequence: Synthetic oligonucleotide
cuuucucaggagcuccaga

SEQ ID NO: 2899890 - RNA, 19 nt, Artificial Sequence
  Description of Artificial Sequence: Synthetic oligonucleotide
caccgcugggcucugcuuc

SEQ ID NO: 2899891 - RNA, 19 nt, Artificial Sequence
  Description of Artificial Sequence: Synthetic oligonucleotide
uagcguggucacccuggug

SEQ ID NO: 2899892 - RNA, 19 nt, Artificial Sequence
  Description of Artificial Sequence: Synthetic oligonucleotide
cuuuccaguuagcgugguc

SEQ ID NO: 2899893 - RNA, 19 nt, Artificial Sequence
  Description of Artificial Sequence: Synthetic oligonucleotide
uucuugguucagggagugc

SEQ ID NO: 2899894 - RNA, 19 nt, Artificial Sequence
  Description of Artificial Sequence: Synthetic oligonucleotide
uggucacccuggugcacug

SEQ ID NO: 2899895 - RNA, 19 nt, Artificial Sequence
  Description of Artificial Sequence: Synthetic oligonucleotide
caugagcggaggaggaaaa

SEQ ID NO: 2899896 - RNA, 19 nt, Artificial Sequence
  Description of Artificial Sequence: Synthetic oligonucleotide
uagccacaaccaccccacc

SEQ ID NO: 2899897 - RNA, 19 nt, Artificial Sequence
  Description of Artificial Sequence: Synthetic oligonucleotide
cacaaccaccccaccgcug

SEQ ID NO: 2899898 - RNA, 19 nt, Artificial Sequence
  Description of Artificial Sequence: Synthetic oligonucleotide
caacuugcagguccaagcu

SEQ ID NO: 2899899 - RNA, 19 nt, Artificial Sequence
  Description of Artificial Sequence: Synthetic oligonucleotide
ggagcuccagaucgugagc

SEQ ID NO: 2899900 - RNA, 19 nt, Artificial Sequence
  Description of Artificial Sequence: Synthetic oligonucleotide
agaucgugagcagcauccu

SEQ ID NO: 2899901 - RNA, 19 nt, Artificial Sequence
  Description of Artificial Sequence: Synthetic oligonucleotide
gcggaggaggaaaagcagc

SEQ ID NO: 2899902 - RNA, 19 nt, Artificial Sequence
  Description of Artificial Sequence: Synthetic oligonucleotide
uugguucagggagugcauu

SEQ ID NO: 2899903 - RNA, 19 nt, Artificial Sequence
  Description of Artificial Sequence: Synthetic oligonucleotide
ucuuuccaguuagcguggu

SEQ ID NO: 2899904 - RNA, 19 nt, Artificial Sequence
  Description of Artificial Sequence: Synthetic oligonucleotide
gcuuucuauaauuuucuuu

SEQ ID NO: 2899905 - RNA, 19 nt, Artificial Sequence
  Description of Artificial Sequence: Synthetic oligonucleotide
ccuugugcuuucucaggag

SEQ ID NO: 2899906 - RNA, 19 nt, Artificial Sequence
  Description of Artificial Sequence: Synthetic oligonucleotide
augagucaccuugugcuuu

SEQ ID NO: 2899907 - RNA, 19 nt, Artificial Sequence
  Description of Artificial Sequence: Synthetic oligonucleotide
ccacaacaugaacuguggc

SEQ ID NO: 2899908 - RNA, 19 nt, Artificial Sequence
  Description of Artificial Sequence: Synthetic oligonucleotide
cugggcucugcuuccacaa

SEQ ID NO: 2899909 - RNA, 19 nt, Artificial Sequence
  Description of Artificial Sequence: Synthetic oligonucleotide
ggcuuaauaacgccaacuu

SEQ ID NO: 2899910 - RNA, 19 nt, Artificial Sequence
  Description of Artificial Sequence: Synthetic oligonucleotide
gguucagggagugcauuac

SEQ ID NO: 2899911 - RNA, 19 nt, Artificial Sequence
  Description of Artificial Sequence: Synthetic oligonucleotide
uauugguuucaggcacauc

SEQ ID NO: 2899912 - RNA, 19 nt, Artificial Sequence
  Description of Artificial Sequence: Synthetic oligonucleotide
cuuuccagcuuucuauaau

SEQ ID NO: 2899913 - RNA, 19 nt, Artificial Sequence
  Description of Artificial Sequence: Synthetic oligonucleotide
cacgccauccuucaguuuu

SEQ ID NO: 2899914 - RNA, 19 nt, Artificial Sequence
  Description of Artificial Sequence: Synthetic oligonucleotide
gagcagcauccugcgaccc

SEQ ID NO: 2899915 - RNA, 19 nt, Artificial Sequence
  Description of Artificial Sequence: Synthetic oligonucleotide
ccaagcuaagguccugcac

SEQ ID NO: 2899916 - RNA, 19 nt, Artificial Sequence
  Description of Artificial Sequence: Synthetic oligonucleotide
gggcucugcuuccacaaca

SEQ ID NO: 2899917 - RNA, 19 nt, Artificial Sequence
  Description of Artificial Sequence: Synthetic oligonucleotide
gaaaagcagcaaacacaaa

SEQ ID NO: 2899918 - RNA, 19 nt, Artificial Sequence
  Description of Artificial Sequence: Synthetic oligonucleotide
gaagcaaccagggcuuaau

SEQ ID NO: 2899919 - RNA, 19 nt, Artificial Sequence
  Description of Artificial Sequence: Synthetic oligonucleotide
augcaacauugagaauaug

SEQ ID NO: 2899920 - RNA, 19 nt, Artificial Sequence
  Description of Artificial Sequence: Synthetic oligonucleotide
gugcacugcuuccugagau

SEQ ID NO: 2899921 - RNA, 19 nt, Artificial Sequence
  Description of Artificial Sequence: Synthetic oligonucleotide
ccagggcuuaauaacgcca

SEQ ID NO: 2899922 - RNA, 19 nt, Artificial Sequence
  Description of Artificial Sequence: Synthetic oligonucleotide
ggagaaugcuuugauuucu

SEQ ID NO: 2899923 - RNA, 19 nt, Artificial Sequence
  Description of Artificial Sequence: Synthetic oligonucleotide
uccagaucgugagcagcau

SEQ ID NO: 2899924 - RNA, 19 nt, Artificial Sequence
  Description of Artificial Sequence: Synthetic oligonucleotide
caaccaccccaccgcuggg

SEQ ID NO: 2899925 - RNA, 19 nt, Artificial Sequence
  Description of Artificial Sequence: Synthetic oligonucleotide
agaagcaaccagggcuuaa

SEQ ID NO: 2899926 - RNA, 19 nt, Artificial Sequence
  Description of Artificial Sequence: Synthetic oligonucleotide
caggagcuccagaucguga

SEQ ID NO: 2899927 - RNA, 19 nt, Artificial Sequence
  Description of Artificial Sequence: Synthetic oligonucleotide
gcuccagaucgugagcagc

SEQ ID NO: 2899928 - RNA, 19 nt, Artificial Sequence
  Description of Artificial Sequence: Synthetic oligonucleotide
cuggugcacugcuuccuga

SEQ ID NO: 2899929 - RNA, 19 nt, Artificial Sequence
  Description of Artificial Sequence: Synthetic oligonucleotide
agcauccugcgaccccaga

SEQ ID NO: 2899930 - RNA, 19 nt, Artificial Sequence
  Description of Artificial Sequence: Synthetic oligonucleotide
caggcacauccaauauaga

SEQ ID NO: 2899931 - RNA, 19 nt, Artificial Sequence
  Description of Artificial Sequence: Synthetic oligonucleotide
gccaacuugcagguccaag

SEQ ID NO: 2899932 - RNA, 19 nt, Artificial Sequence
  Description of Artificial Sequence: Synthetic oligonucleotide
gcauuacaugagcggagga

SEQ ID NO: 2899933 - RNA, 19 nt, Artificial Sequence
  Description of Artificial Sequence: Synthetic oligonucleotide
ggugcacugcuuccugaga

SEQ ID NO: 2899934 - RNA, 19 nt, Artificial Sequence
  Description of Artificial Sequence: Synthetic oligonucleotide
gucacccuggugcacugcu

SEQ ID NO: 2899935 - RNA, 19 nt, Artificial Sequence
  Description of Artificial Sequence: Synthetic oligonucleotide
acgccauccuucaguuuug

SEQ ID NO: 2899936 - RNA, 19 nt, Artificial Sequence
  Description of Artificial Sequence: Synthetic oligonucleotide
gcucugcuuccacaacaug

SEQ ID NO: 2899937 - RNA, 19 nt, Artificial Sequence
  Description of Artificial Sequence: Synthetic oligonucleotide
gagauuauuccgggagaau

SEQ ID NO: 2899938 - RNA, 19 nt, Artificial Sequence
  Description of Artificial Sequence: Synthetic oligonucleotide
gcauccugcgaccccagaa

SEQ ID NO: 2899939 - RNA, 19 nt, Artificial Sequence
  Description of Artificial Sequence: Synthetic oligonucleotide
acaugaacuguggcaucuu

SEQ ID NO: 2899940 - RNA, 19 nt, Artificial Sequence
  Description of Artificial Sequence: Synthetic oligonucleotide
cagcauccugcgaccccag

SEQ ID NO: 2899941 - RNA, 19 nt, Artificial Sequence
  Description of Artificial Sequence: Synthetic oligonucleotide
ccaauauagaaauggucuu

SEQ ID NO: 2899942 - RNA, 19 nt, Artificial Sequence
  Description of Artificial Sequence: Synthetic oligonucleotide
gggcuuaauaacgccaacu

SEQ ID NO: 2899943 - RNA, 19 nt, Artificial Sequence
  Description of Artificial Sequence: Synthetic oligonucleotide
ccagaucgugagcagcauc

SEQ ID NO: 2899944 - RNA, 19 nt, Artificial Sequence
  Description of Artificial Sequence: Synthetic oligonucleotide
ccauccuucaguuuugcuu

SEQ ID NO: 2899945 - RNA, 19 nt, Artificial Sequence
  Description of Artificial Sequence: Synthetic oligonucleotide
cuugguucagggagugcau

SEQ ID NO: 2899946 - RNA, 19 nt, Artificial Sequence
  Description of Artificial Sequence: Synthetic oligonucleotide
acgccaacuugcaggucca

SEQ ID NO: 2899947 - RNA, 19 nt, Artificial Sequence
  Description of Artificial Sequence: Synthetic oligonucleotide
ccuggugcacugcuuccug

SEQ ID NO: 2899948 - RNA, 19 nt, Artificial Sequence
  Description of Artificial Sequence: Synthetic oligonucleotide
cauaugcaacauugagaau

SEQ ID NO: 2899949 - RNA, 19 nt, Artificial Sequence
  Description of Artificial Sequence: Synthetic oligonucleotide
gcagcauccugcgacccca

SEQ ID NO: 2899950 - RNA, 19 nt, Artificial Sequence
  Description of Artificial Sequence: Synthetic oligonucleotide
caugaacuguggcaucuuu

SEQ ID NO: 2899951 - RNA, 19 nt, Artificial Sequence
  Description of Artificial Sequence: Synthetic oligonucleotide
ggaaaauaagacagauauu

SEQ ID NO: 2899952 - RNA, 19 nt, Artificial Sequence
  Description of Artificial Sequence: Synthetic oligonucleotide
uaacgccaacuugcagguc

SEQ ID NO: 2899953 - RNA, 19 nt, Artificial Sequence
  Description of Artificial Sequence: Synthetic oligonucleotide
caaacuccauaugcaacau

SEQ ID NO: 2899954 - RNA, 19 nt, Artificial Sequence
  Description of Artificial Sequence: Synthetic oligonucleotide
cuuccacaacaugaacugu

SEQ ID NO: 2899955 - RNA, 19 nt, Artificial Sequence
  Description of Artificial Sequence: Synthetic oligonucleotide
ggaggaggaaaagcagcaa

SEQ ID NO: 2899956 - RNA, 19 nt, Artificial Sequence
  Description of Artificial Sequence: Synthetic oligonucleotide
cgggagaaugcuuugauuu

SEQ ID NO: 2899957 - RNA, 19 nt, Artificial Sequence
  Description of Artificial Sequence: Synthetic oligonucleotide
gcacugcuuccugagauua

SEQ ID NO: 2899958 - RNA, 19 nt, Artificial Sequence
  Description of Artificial Sequence: Synthetic oligonucleotide
guggucacccuggugcacu

SEQ ID NO: 2899959 - RNA, 19 nt, Artificial Sequence
  Description of Artificial Sequence: Synthetic oligonucleotide
guccugcacauagccacaa

SEQ ID NO: 2899960 - RNA, 19 nt, Artificial Sequence
  Description of Artificial Sequence: Synthetic oligonucleotide
gguccugcacauagccaca

SEQ ID NO: 2899961 - RNA, 19 nt, Artificial Sequence
  Description of Artificial Sequence: Synthetic oligonucleotide
gguuucaggcacauccaau

SEQ ID NO: 2899962 - RNA, 19 nt, Artificial Sequence
  Description of Artificial Sequence: Synthetic oligonucleotide
agcuaagguccugcacaua

SEQ ID NO: 2899963 - RNA, 19 nt, Artificial Sequence
  Description of Artificial Sequence: Synthetic oligonucleotide
cuguggcaucuuuccagcu

SEQ ID NO: 2899964 - RNA, 19 nt, Artificial Sequence
  Description of Artificial Sequence: Synthetic oligonucleotide
cgaccccagaagcaaccag

SEQ ID NO: 2899965 - RNA, 19 nt, Artificial Sequence
  Description of Artificial Sequence: Synthetic oligonucleotide
ccugcgaccccagaagcaa

SEQ ID NO: 2899966 - RNA, 19 nt, Artificial Sequence
  Description of Artificial Sequence: Synthetic oligonucleotide
caguuagcguggucacccu

SEQ ID NO: 2899967 - RNA, 19 nt, Artificial Sequence
  Description of Artificial Sequence: Synthetic oligonucleotide
ggucacccuggugcacugc

SEQ ID NO: 2899968 - RNA, 19 nt, Artificial Sequence
  Description of Artificial Sequence: Synthetic oligonucleotide
cacugcuuccugagauuau

SEQ ID NO: 2899969 - RNA, 19 nt, Artificial Sequence
  Description of Artificial Sequence: Synthetic oligonucleotide
gccauccuucaguuuugcu

SEQ ID NO: 2899970 - RNA, 19 nt, Artificial Sequence
  Description of Artificial Sequence: Synthetic oligonucleotide
cagaagcaaccagggcuua

SEQ ID NO: 2899971 - RNA, 19 nt, Artificial Sequence
  Description of Artificial Sequence: Synthetic oligonucleotide
ggcucugcuuccacaacau

SEQ ID NO: 2899972 - RNA, 19 nt, Artificial Sequence
  Description of Artificial Sequence: Synthetic oligonucleotide
caguuuugcuuagcucaau

SEQ ID NO: 2899973 - RNA, 19 nt, Artificial Sequence
  Description of Artificial Sequence: Synthetic oligonucleotide
cgccauccuucaguuuugc

SEQ ID NO: 2899974 - RNA, 19 nt, Artificial Sequence
  Description of Artificial Sequence: Synthetic oligonucleotide
ccaccccaccgcugggcuc

SEQ ID NO: 2899975 - RNA, 19 nt, Artificial Sequence
  Description of Artificial Sequence: Synthetic oligonucleotide
ccgggagaaugcuuugauu

SEQ ID NO: 2899976 - RNA, 19 nt, Artificial Sequence
  Description of Artificial Sequence: Synthetic oligonucleotide
cgugagcagcauccugcga

SEQ ID NO: 2899977 - RNA, 19 nt, Artificial Sequence
  Description of Artificial Sequence: Synthetic oligonucleotide
accccaccgcugggcucug

SEQ ID NO: 2899978 - RNA, 19 nt, Artificial Sequence
  Description of Artificial Sequence: Synthetic oligonucleotide
cgcugggcucugcuuccac

SEQ ID NO: 2899979 - RNA, 19 nt, Artificial Sequence
  Description of Artificial Sequence: Synthetic oligonucleotide
cccuggugcacugcuuccu

SEQ ID NO: 2899980 - RNA, 19 nt, Artificial Sequence
  Description of Artificial Sequence: Synthetic oligonucleotide
ccaccgcugggcucugcuu

SEQ ID NO: 2899981 - RNA, 19 nt, Artificial Sequence
  Description of Artificial Sequence: Synthetic oligonucleotide
ccgcugggcucugcuucca

SEQ ID NO: 2899982 - RNA, 19 nt, Artificial Sequence
  Description of Artificial Sequence: Synthetic oligonucleotide
ccccaccgcugggcucugc

SEQ ID NO: 2899983 - RNA, 19 nt, Artificial Sequence
  Description of Artificial Sequence: Synthetic oligonucleotide
ccacgccauccuucaguuu

SEQ ID NO: 2899984 - RNA, 19 nt, Artificial Sequence
  Description of Artificial Sequence: Synthetic oligonucleotide
cgccaacuugcagguccaa

SEQ ID NO: 2899985 - RNA, 19 nt, Artificial Sequence
  Description of Artificial Sequence: Synthetic oligonucleotide
aaucuaguccaguagauuc

SEQ ID NO: 2899986 - RNA, 19 nt, Artificial Sequence
  Description of Artificial Sequence: Synthetic oligonucleotide
aaaagggacaguuagaaaa

SEQ ID NO: 2899987 - RNA, 19 nt, Artificial Sequence
  Description of Artificial Sequence: Synthetic oligonucleotide
uagaaaacaccacaguuag

SEQ ID NO: 2899988 - RNA, 19 nt, Artificial Sequence
  Description of Artificial Sequence: Synthetic oligonucleotide
uguguaugaaaucucagca

SEQ ID NO: 2899989 - RNA, 19 nt, Artificial Sequence
  Description of Artificial Sequence: Synthetic oligonucleotide
ugaaaucucagcacuaucc

SEQ ID NO: 2899990 - RNA, 19 nt, Artificial Sequence
  Description of Artificial Sequence: Synthetic oligonucleotide
auguguaugaaaucucagc

SEQ ID NO: 2899991 - RNA, 19 nt, Artificial Sequence
  Description of Artificial Sequence: Synthetic oligonucleotide
acuuuauugaacucuccac

SEQ ID NO: 2899992 - RNA, 19 nt, Artificial Sequence
  Description of Artificial Sequence: Synthetic oligonucleotide
cauuuagccaguaaugccc

SEQ ID NO: 2899993 - RNA, 19 nt, Artificial Sequence
  Description of Artificial Sequence: Synthetic oligonucleotide
uuuauugaacucuccaccc

SEQ ID NO: 2899994 - RNA, 19 nt, Artificial Sequence
  Description of Artificial Sequence: Synthetic oligonucleotide
aaacaccacaguuagggug

SEQ ID NO: 2899995 - RNA, 19 nt, Artificial Sequence
  Description of Artificial Sequence: Synthetic oligonucleotide
cuuuauugaacucuccacc

SEQ ID NO: 2899996 - RNA, 19 nt, Artificial Sequence
  Description of Artificial Sequence: Synthetic oligonucleotide
uauagugaauucauuugcc

SEQ ID NO: 2899997 - RNA, 19 nt, Artificial Sequence
  Description of Artificial Sequence: Synthetic oligonucleotide
ugaagcugcaaaugcaagg

SEQ ID NO: 2899998 - RNA, 19 nt, Artificial Sequence
  Description of Artificial Sequence: Synthetic oligonucleotide
aacaccacaguuagggugc

SEQ ID NO: 2899999 - RNA, 19 nt, Artificial Sequence
  Description of Artificial Sequence: Synthetic oligonucleotide
cuauagugaauucauuugc

SEQ ID NO: 2900000 - RNA, 19 nt, Artificial Sequence
  Description of Artificial Sequence: Synthetic oligonucleotide
uuagaaaacaccacaguua

SEQ ID NO: 2900001 - RNA, 19 nt, Artificial Sequence
  Description of Artificial Sequence: Synthetic oligonucleotide
auucauuugccuuacaaaa

SEQ ID NO: 2900002 - RNA, 19 nt, Artificial Sequence
  Description of Artificial Sequence: Synthetic oligonucleotide
aguccaguagauucugugc

SEQ ID NO: 2900003 - RNA, 19 nt, Artificial Sequence
  Description of Artificial Sequence: Synthetic oligonucleotide
uagauucugugccucaagg

SEQ ID NO: 2900004 - RNA, 19 nt, Artificial Sequence
  Description of Artificial Sequence: Synthetic oligonucleotide
aaggaaucuaguccaguag

SEQ ID NO: 2900005 - RNA, 19 nt, Artificial Sequence
  Description of Artificial Sequence: Synthetic oligonucleotide
acuauccugaguuaaauau

SEQ ID NO: 2900006 - RNA, 19 nt, Artificial Sequence
  Description of Artificial Sequence: Synthetic oligonucleotide
aaagggacaguuagaaaac

SEQ ID NO: 2900007 - RNA, 19 nt, Artificial Sequence
  Description of Artificial Sequence: Synthetic oligonucleotide
aaaauguguaugaaaucuc

SEQ ID NO: 2900008 - RNA, 19 nt, Artificial Sequence
  Description of Artificial Sequence: Synthetic oligonucleotide
caaggugacacccagguac

SEQ ID NO: 2900009 - RNA, 19 nt, Artificial Sequence
  Description of Artificial Sequence: Synthetic oligonucleotide
agauucugugccucaaggc

SEQ ID NO: 2900010 - RNA, 19 nt, Artificial Sequence
  Description of Artificial Sequence: Synthetic oligonucleotide
acaguuagaaaacaccaca

SEQ ID NO: 2900011 - RNA, 19 nt, Artificial Sequence
  Description of Artificial Sequence: Synthetic oligonucleotide
uauccugaguuaaauauaa

SEQ ID NO: 2900012 - RNA, 19 nt, Artificial Sequence
  Description of Artificial Sequence: Synthetic oligonucleotide
uccugaguuaaauauaaaa

SEQ ID NO: 2900013 - RNA, 19 nt, Artificial Sequence
  Description of Artificial Sequence: Synthetic oligonucleotide
aagcugcaaaugcaaggcc

SEQ ID NO: 2900014 - RNA, 19 nt, Artificial Sequence
  Description of Artificial Sequence: Synthetic oligonucleotide
ugagcuauagugaauucau

SEQ ID NO: 2900015 - RNA, 19 nt, Artificial Sequence
  Description of Artificial Sequence: Synthetic oligonucleotide
ucacugaagcugcaaaugc

SEQ ID NO: 2900016 - RNA, 19 nt, Artificial Sequence
  Description of Artificial Sequence: Synthetic oligonucleotide
uacaaggugacacccaggu

SEQ ID NO: 2900017 - RNA, 19 nt, Artificial Sequence
  Description of Artificial Sequence: Synthetic oligonucleotide
aaauguguaugaaaucuca

SEQ ID NO: 2900018 - RNA, 19 nt, Artificial Sequence
  Description of Artificial Sequence: Synthetic oligonucleotide
gaaaauguguaugaaaucu

SEQ ID NO: 2900019 - RNA, 19 nt, Artificial Sequence
  Description of Artificial Sequence: Synthetic oligonucleotide
uugaacucuccacccaagg

SEQ ID NO: 2900020 - RNA, 19 nt, Artificial Sequence
  Description of Artificial Sequence: Synthetic oligonucleotide
gaaacagcuguccucgggc

SEQ ID NO: 2900021 - RNA, 19 nt, Artificial Sequence
  Description of Artificial Sequence: Synthetic oligonucleotide
ugggaaacagcuguccucg

SEQ ID NO: 2900022 - RNA, 19 nt, Artificial Sequence
  Description of Artificial Sequence: Synthetic oligonucleotide
gaagcugcaaaugcaaggc

SEQ ID NO: 2900023 - RNA, 19 nt, Artificial Sequence
  Description of Artificial Sequence: Synthetic oligonucleotide
aauguguaugaaaucucag

SEQ ID NO: 2900024 - RNA, 19 nt, Artificial Sequence
  Description of Artificial Sequence: Synthetic oligonucleotide
caguuagaaaacaccacag

SEQ ID NO: 2900025 - RNA, 19 nt, Artificial Sequence
  Description of Artificial Sequence: Synthetic oligonucleotide
agagaaaaggcaggcaggg

SEQ ID NO: 2900026 - RNA, 19 nt, Artificial Sequence
  Description of Artificial Sequence: Synthetic oligonucleotide
auagugaauucauuugccu

SEQ ID NO: 2900027 - RNA, 19 nt, Artificial Sequence
  Description of Artificial Sequence: Synthetic oligonucleotide
aguuagaaaacaccacagu

SEQ ID NO: 2900028 - RNA, 19 nt, Artificial Sequence
  Description of Artificial Sequence: Synthetic oligonucleotide
caggcaggggucaagagag

SEQ ID NO: 2900029 - RNA, 19 nt, Artificial Sequence
  Description of Artificial Sequence: Synthetic oligonucleotide
aggaccaacagcaccaugg

SEQ ID NO: 2900030 - RNA, 19 nt, Artificial Sequence
  Description of Artificial Sequence: Synthetic oligonucleotide
aaacccagaaaauguguau

SEQ ID NO: 2900031 - RNA, 19 nt, Artificial Sequence
  Description of Artificial Sequence: Synthetic oligonucleotide
acaguuagggugccggcac

SEQ ID NO: 2900032 - RNA, 19 nt, Artificial Sequence
  Description of Artificial Sequence: Synthetic oligonucleotide
agcuauagugaauucauuu

SEQ ID NO: 2900033 - RNA, 19 nt, Artificial Sequence
  Description of Artificial Sequence: Synthetic oligonucleotide
aacccagaaaauguguaug

SEQ ID NO: 2900034 - RNA, 19 nt, Artificial Sequence
  Description of Artificial Sequence: Synthetic oligonucleotide
gaauucauuugccuuacaa

SEQ ID NO: 2900035 - RNA, 19 nt, Artificial Sequence
  Description of Artificial Sequence: Synthetic oligonucleotide
aaaacaccacaguuagggu

SEQ ID NO: 2900036 - RNA, 19 nt, Artificial Sequence
  Description of Artificial Sequence: Synthetic oligonucleotide
aggaaucuaguccaguaga

SEQ ID NO: 2900037 - RNA, 19 nt, Artificial Sequence
  Description of Artificial Sequence: Synthetic oligonucleotide
uuauugaacucuccaccca

SEQ ID NO: 2900038 - RNA, 19 nt, Artificial Sequence
  Description of Artificial Sequence: Synthetic oligonucleotide
cacccaaggaaucuagucc

SEQ ID NO: 2900039 - RNA, 19 nt, Artificial Sequence
  Description of Artificial Sequence: Synthetic oligonucleotide
agugaauucauuugccuua

SEQ ID NO: 2900040 - RNA, 19 nt, Artificial Sequence
  Description of Artificial Sequence: Synthetic oligonucleotide
ugggcuucacugaagcugc

SEQ ID NO: 2900041 - RNA, 19 nt, Artificial Sequence
  Description of Artificial Sequence: Synthetic oligonucleotide
auuuagccaguaaugcccc

SEQ ID NO: 2900042 - RNA, 19 nt, Artificial Sequence
  Description of Artificial Sequence: Synthetic oligonucleotide
ugaacucuccacccaagga

SEQ ID NO: 2900043 - RNA, 19 nt, Artificial Sequence
  Description of Artificial Sequence: Synthetic oligonucleotide
augaaaucucagcacuauc

SEQ ID NO: 2900044 - RNA, 19 nt, Artificial Sequence
  Description of Artificial Sequence: Synthetic oligonucleotide
uauugaacucuccacccaa

SEQ ID NO: 2900045 - RNA, 19 nt, Artificial Sequence
  Description of Artificial Sequence: Synthetic oligonucleotide
cuagguacaaggugacacc

SEQ ID NO: 2900046 - RNA, 19 nt, Artificial Sequence
  Description of Artificial Sequence: Synthetic oligonucleotide
uucacugaagcugcaaaug

SEQ ID NO: 2900047 - RNA, 19 nt, Artificial Sequence
  Description of Artificial Sequence: Synthetic oligonucleotide
aaggugacacccagguacc

SEQ ID NO: 2900048 - RNA, 19 nt, Artificial Sequence
  Description of Artificial Sequence: Synthetic oligonucleotide
cagagaaaaggcaggcagg

SEQ ID NO: 2900049 - RNA, 19 nt, Artificial Sequence
  Description of Artificial Sequence: Synthetic oligonucleotide
ucaaggcuucacaaggcca

SEQ ID NO: 2900050 - RNA, 19 nt, Artificial Sequence
  Description of Artificial Sequence: Synthetic oligonucleotide
aagaggaccaacagcacca

SEQ ID NO: 2900051 - RNA, 19 nt, Artificial Sequence
  Description of Artificial Sequence: Synthetic oligonucleotide
caaggcuucacaaggccag

SEQ ID NO: 2900052 - RNA, 19 nt, Artificial Sequence
  Description of Artificial Sequence: Synthetic oligonucleotide
gcuauagugaauucauuug

SEQ ID NO: 2900053 - RNA, 19 nt, Artificial Sequence
  Description of Artificial Sequence: Synthetic oligonucleotide
uaguccaguagauucugug

SEQ ID NO: 2900054 - RNA, 19 nt, Artificial Sequence
  Description of Artificial Sequence: Synthetic oligonucleotide
ugugccucaaggcuucaca

SEQ ID NO: 2900055 - RNA, 19 nt, Artificial Sequence
  Description of Artificial Sequence: Synthetic oligonucleotide
caagaggaccaacagcacc

SEQ ID NO: 2900056 - RNA, 19 nt, Artificial Sequence
  Description of Artificial Sequence: Synthetic oligonucleotide
agcaccaugggaaacagcu

SEQ ID NO: 2900057 - RNA, 19 nt, Artificial Sequence
  Description of Artificial Sequence: Synthetic oligonucleotide
acccaaggaaucuagucca

SEQ ID NO: 2900058 - RNA, 19 nt, Artificial Sequence
  Description of Artificial Sequence: Synthetic oligonucleotide
ugguugaggagcaggggcc

SEQ ID NO: 2900059 - RNA, 19 nt, Artificial Sequence
  Description of Artificial Sequence: Synthetic oligonucleotide
augccccugagcuauagug

SEQ ID NO: 2900060 - RNA, 19 nt, Artificial Sequence
  Description of Artificial Sequence: Synthetic oligonucleotide
ugcugggcuucacugaagc

SEQ ID NO: 2900061 - RNA, 19 nt, Artificial Sequence
  Description of Artificial Sequence: Synthetic oligonucleotide
agaggggccagccaggccu

SEQ ID NO: 2900062 - RNA, 19 nt, Artificial Sequence
  Description of Artificial Sequence: Synthetic oligonucleotide
uguccucgggccuagguac

SEQ ID NO: 2900063 - RNA, 19 nt, Artificial Sequence
  Description of Artificial Sequence: Synthetic oligonucleotide
gaacucuccacccaaggaa

SEQ ID NO: 2900064 - RNA, 19 nt, Artificial Sequence
  Description of Artificial Sequence: Synthetic oligonucleotide
gauucugugccucaaggcu

SEQ ID NO: 2900065 - RNA, 19 nt, Artificial Sequence
  Description of Artificial Sequence: Synthetic oligonucleotide
cagccugcagagaaaaggc

SEQ ID NO: 2900066 - RNA, 19 nt, Artificial Sequence
  Description of Artificial Sequence: Synthetic oligonucleotide
aguaaugccccugagcuau

SEQ ID NO: 2900067 - RNA, 19 nt, Artificial Sequence
  Description of Artificial Sequence: Synthetic oligonucleotide
cuucacaaggccaggggug

SEQ ID NO: 2900068 - RNA, 19 nt, Artificial Sequence
  Description of Artificial Sequence: Synthetic oligonucleotide
cagaaaauguguaugaaau

SEQ ID NO: 2900069 - RNA, 19 nt, Artificial Sequence
  Description of Artificial Sequence: Synthetic oligonucleotide
uagugaauucauuugccuu

SEQ ID NO: 2900070 - RNA, 19 nt, Artificial Sequence
  Description of Artificial Sequence: Synthetic oligonucleotide
gugacacccagguaccagg

SEQ ID NO: 2900071 - RNA, 19 nt, Artificial Sequence
  Description of Artificial Sequence: Synthetic oligonucleotide
aaaacccagaaaaugugua

SEQ ID NO: 2900072 - RNA, 19 nt, Artificial Sequence
  Description of Artificial Sequence: Synthetic oligonucleotide
cucaaggcuucacaaggcc

SEQ ID NO: 2900073 - RNA, 19 nt, Artificial Sequence
  Description of Artificial Sequence: Synthetic oligonucleotide
uagguacaaggugacaccc

SEQ ID NO: 2900074 - RNA, 19 nt, Artificial Sequence
  Description of Artificial Sequence: Synthetic oligonucleotide
acccagaaaauguguauga

SEQ ID NO: 2900075 - RNA, 19 nt, Artificial Sequence
  Description of Artificial Sequence: Synthetic oligonucleotide
uaugaaaucucagcacuau

SEQ ID NO: 2900076 - RNA, 19 nt, Artificial Sequence
  Description of Artificial Sequence: Synthetic oligonucleotide
gacaguuagaaaacaccac

SEQ ID NO: 2900077 - RNA, 19 nt, Artificial Sequence
  Description of Artificial Sequence: Synthetic oligonucleotide
guuagaaaacaccacaguu

SEQ ID NO: 2900078 - RNA, 19 nt, Artificial Sequence
  Description of Artificial Sequence: Synthetic oligonucleotide
accacaguuagggugccgg

SEQ ID NO: 2900079 - RNA, 19 nt, Artificial Sequence
  Description of Artificial Sequence: Synthetic oligonucleotide
gccucaaggcuucacaagg

SEQ ID NO: 2900080 - RNA, 19 nt, Artificial Sequence
  Description of Artificial Sequence: Synthetic oligonucleotide
gguacaaggugacacccag

SEQ ID NO: 2900081 - RNA, 19 nt, Artificial Sequence
  Description of Artificial Sequence: Synthetic oligonucleotide
ucuaguccaguagauucug

SEQ ID NO: 2900082 - RNA, 19 nt, Artificial Sequence
  Description of Artificial Sequence: Synthetic oligonucleotide
agggacaguuagaaaacac

SEQ ID NO: 2900083 - RNA, 19 nt, Artificial Sequence
  Description of Artificial Sequence: Synthetic oligonucleotide
cugaagcugcaaaugcaag

SEQ ID NO: 2900084 - RNA, 19 nt, Artificial Sequence
  Description of Artificial Sequence: Synthetic oligonucleotide
accaacagcaccaugggaa

SEQ ID NO: 2900085 - RNA, 19 nt, Artificial Sequence
  Description of Artificial Sequence: Synthetic oligonucleotide
aggaccagccugcagagaa

SEQ ID NO: 2900086 - RNA, 19 nt, Artificial Sequence
  Description of Artificial Sequence: Synthetic oligonucleotide
ugccccugagcuauaguga

SEQ ID NO: 2900087 - RNA, 19 nt, Artificial Sequence
  Description of Artificial Sequence: Synthetic oligonucleotide
ugccucaaggcuucacaag

SEQ ID NO: 2900088 - RNA, 19 nt, Artificial Sequence
  Description of Artificial Sequence: Synthetic oligonucleotide
cucgggccuagguacaagg

SEQ ID NO: 2900089 - RNA, 19 nt, Artificial Sequence
  Description of Artificial Sequence: Synthetic oligonucleotide
acacccagguaccaggagu

SEQ ID NO: 2900090 - RNA, 19 nt, Artificial Sequence
  Description of Artificial Sequence: Synthetic oligonucleotide
cacuuuauugaacucucca

SEQ ID NO: 2900091 - RNA, 19 nt, Artificial Sequence
  Description of Artificial Sequence: Synthetic oligonucleotide
cugggcuucacugaagcug

SEQ ID NO: 2900092 - RNA, 19 nt, Artificial Sequence
  Description of Artificial Sequence: Synthetic oligonucleotide
guagauucugugccucaag

SEQ ID NO: 2900093 - RNA, 19 nt, Artificial Sequence
  Description of Artificial Sequence: Synthetic oligonucleotide
ggcauuuagccaguaaugc

SEQ ID NO: 2900094 - RNA, 19 nt, Artificial Sequence
  Description of Artificial Sequence: Synthetic oligonucleotide
gcauuuagccaguaaugcc

SEQ ID NO: 2900095 - RNA, 19 nt, Artificial Sequence
  Description of Artificial Sequence: Synthetic oligonucleotide
aagggacaguuagaaaaca

SEQ ID NO: 2900096 - RNA, 19 nt, Artificial Sequence
  Description of Artificial Sequence: Synthetic oligonucleotide
ucaagagaggggccagcca

SEQ ID NO: 2900097 - RNA, 19 nt, Artificial Sequence
  Description of Artificial Sequence: Synthetic oligonucleotide
aggagcaggggccagcccu

SEQ ID NO: 2900098 - RNA, 19 nt, Artificial Sequence
  Description of Artificial Sequence: Synthetic oligonucleotide
cagcaagaggaccaacagc

SEQ ID NO: 2900099 - RNA, 19 nt, Artificial Sequence
  Description of Artificial Sequence: Synthetic oligonucleotide
uuagccaguaaugccccug

SEQ ID NO: 2900100 - RNA, 19 nt, Artificial Sequence
  Description of Artificial Sequence: Synthetic oligonucleotide
aacagcuguccucgggccu

SEQ ID NO: 2900101 - RNA, 19 nt, Artificial Sequence
  Description of Artificial Sequence: Synthetic oligonucleotide
gggacaguuagaaaacacc

SEQ ID NO: 2900102 - RNA, 19 nt, Artificial Sequence
  Description of Artificial Sequence: Synthetic oligonucleotide
uagccaguaaugccccuga

SEQ ID NO: 2900103 - RNA, 19 nt, Artificial Sequence
  Description of Artificial Sequence: Synthetic oligonucleotide
gagaaaaggcaggcagggg

SEQ ID NO: 2900104 - RNA, 19 nt, Artificial Sequence
  Description of Artificial Sequence: Synthetic oligonucleotide
aaugccccugagcuauagu

SEQ ID NO: 2900105 - RNA, 19 nt, Artificial Sequence
  Description of Artificial Sequence: Synthetic oligonucleotide
cacugguggccacaggacc

SEQ ID NO: 2900106 - RNA, 19 nt, Artificial Sequence
  Description of Artificial Sequence: Synthetic oligonucleotide
aucucagcacuauccugag

SEQ ID NO: 2900107 - RNA, 19 nt, Artificial Sequence
  Description of Artificial Sequence: Synthetic oligonucleotide
cacaggaccagccugcaga

SEQ ID NO: 2900108 - RNA, 19 nt, Artificial Sequence
  Description of Artificial Sequence: Synthetic oligonucleotide
aaggcuucacaaggccagg

SEQ ID NO: 2900109 - RNA, 19 nt, Artificial Sequence
  Description of Artificial Sequence: Synthetic oligonucleotide
ggacaguuagaaaacacca

SEQ ID NO: 2900110 - RNA, 19 nt, Artificial Sequence
  Description of Artificial Sequence: Synthetic oligonucleotide
ugcaaaugcaaggccuccc

SEQ ID NO: 2900111 - RNA, 19 nt, Artificial Sequence
  Description of Artificial Sequence: Synthetic oligonucleotide
aagagaggggccagccagg

SEQ ID NO: 2900112 - RNA, 19 nt, Artificial Sequence
  Description of Artificial Sequence: Synthetic oligonucleotide
uucugugccucaaggcuuc

SEQ ID NO: 2900113 - RNA, 19 nt, Artificial Sequence
  Description of Artificial Sequence: Synthetic oligonucleotide
ggaaacagcuguccucggg

SEQ ID NO: 2900114 - RNA, 19 nt, Artificial Sequence
  Description of Artificial Sequence: Synthetic oligonucleotide
aacucuccacccaaggaau

SEQ ID NO: 2900115 - RNA, 19 nt, Artificial Sequence
  Description of Artificial Sequence: Synthetic oligonucleotide
ugacacccagguaccagga

SEQ ID NO: 2900116 - RNA, 19 nt, Artificial Sequence
  Description of Artificial Sequence: Synthetic oligonucleotide
gaaaaggcaggcagggguc

SEQ ID NO: 2900117 - RNA, 19 nt, Artificial Sequence
  Description of Artificial Sequence: Synthetic oligonucleotide
agagaggggccagccaggc

SEQ ID NO: 2900118 - RNA, 19 nt, Artificial Sequence
  Description of Artificial Sequence: Synthetic oligonucleotide
gguugguugaggagcaggg

SEQ ID NO: 2900119 - RNA, 19 nt, Artificial Sequence
  Description of Artificial Sequence: Synthetic oligonucleotide
ggugccggcaccucucugg

SEQ ID NO: 2900120 - RNA, 19 nt, Artificial Sequence
  Description of Artificial Sequence: Synthetic oligonucleotide
uucacaaggccaggggugu

SEQ ID NO: 2900121 - RNA, 19 nt, Artificial Sequence
  Description of Artificial Sequence: Synthetic oligonucleotide
gcagcaagaggaccaacag

SEQ ID NO: 2900122 - RNA, 19 nt, Artificial Sequence
  Description of Artificial Sequence: Synthetic oligonucleotide
ggaccaacagcaccauggg

SEQ ID NO: 2900123 - RNA, 19 nt, Artificial Sequence
  Description of Artificial Sequence: Synthetic oligonucleotide
uggccacaggaccagccug

SEQ ID NO: 2900124 - RNA, 19 nt, Artificial Sequence
  Description of Artificial Sequence: Synthetic oligonucleotide
acugaagcugcaaaugcaa

SEQ ID NO: 2900125 - RNA, 19 nt, Artificial Sequence
  Description of Artificial Sequence: Synthetic oligonucleotide
agcugcaaaugcaaggccu

SEQ ID NO: 2900126 - RNA, 19 nt, Artificial Sequence
  Description of Artificial Sequence: Synthetic oligonucleotide
cuauccugaguuaaauaua

SEQ ID NO: 2900127 - RNA, 19 nt, Artificial Sequence
  Description of Artificial Sequence: Synthetic oligonucleotide
gccucaggggcauuuagcc

SEQ ID NO: 2900128 - RNA, 19 nt, Artificial Sequence
  Description of Artificial Sequence: Synthetic oligonucleotide
agaaaacaccacaguuagg

SEQ ID NO: 2900129 - RNA, 19 nt, Artificial Sequence
  Description of Artificial Sequence: Synthetic oligonucleotide
cuccacccaaggaaucuag

SEQ ID NO: 2900130 - RNA, 19 nt, Artificial Sequence
  Description of Artificial Sequence: Synthetic oligonucleotide
uccacccaaggaaucuagu

SEQ ID NO: 2900131 - RNA, 19 nt, Artificial Sequence
  Description of Artificial Sequence: Synthetic oligonucleotide
agcagcaagaggaccaaca

SEQ ID NO: 2900132 - RNA, 19 nt, Artificial Sequence
  Description of Artificial Sequence: Synthetic oligonucleotide
acaaggccagggguguggc

SEQ ID NO: 2900133 - RNA, 19 nt, Artificial Sequence
  Description of Artificial Sequence: Synthetic oligonucleotide
ccuagguacaaggugacac

SEQ ID NO: 2900134 - RNA, 19 nt, Artificial Sequence
  Description of Artificial Sequence: Synthetic oligonucleotide
cacugaagcugcaaaugca

SEQ ID NO: 2900135 - RNA, 19 nt, Artificial Sequence
  Description of Artificial Sequence: Synthetic oligonucleotide
caaggaaucuaguccagua

SEQ ID NO: 2900136 - RNA, 19 nt, Artificial Sequence
  Description of Artificial Sequence: Synthetic oligonucleotide
auugaacucuccacccaag

SEQ ID NO: 2900137 - RNA, 19 nt, Artificial Sequence
  Description of Artificial Sequence: Synthetic oligonucleotide
agggguguggccagcacuc

SEQ ID NO: 2900138 - RNA, 19 nt, Artificial Sequence
  Description of Artificial Sequence: Synthetic oligonucleotide
gacacccagguaccaggag

SEQ ID NO: 2900139 - RNA, 19 nt, Artificial Sequence
  Description of Artificial Sequence: Synthetic oligonucleotide
cacccagguaccaggaguc

SEQ ID NO: 2900140 - RNA, 19 nt, Artificial Sequence
  Description of Artificial Sequence: Synthetic oligonucleotide
aucuaguccaguagauucu

SEQ ID NO: 2900141 - RNA, 19 nt, Artificial Sequence
  Description of Artificial Sequence: Synthetic oligonucleotide
uaaugccccugagcuauag

SEQ ID NO: 2900142 - RNA, 19 nt, Artificial Sequence
  Description of Artificial Sequence: Synthetic oligonucleotide
gugaauucauuugccuuac

SEQ ID NO: 2900143 - RNA, 19 nt, Artificial Sequence
  Description of Artificial Sequence: Synthetic oligonucleotide
cucagcacuauccugaguu

SEQ ID NO: 2900144 - RNA, 19 nt, Artificial Sequence
  Description of Artificial Sequence: Synthetic oligonucleotide
gcaaaugcaaggccucccc

SEQ ID NO: 2900145 - RNA, 19 nt, Artificial Sequence
  Description of Artificial Sequence: Synthetic oligonucleotide
ucagcacuauccugaguua

SEQ ID NO: 2900146 - RNA, 19 nt, Artificial Sequence
  Description of Artificial Sequence: Synthetic oligonucleotide
ucgggccuagguacaaggu

SEQ ID NO: 2900147 - RNA, 19 nt, Artificial Sequence
  Description of Artificial Sequence: Synthetic oligonucleotide
ggcuucacaaggccagggg

SEQ ID NO: 2900148 - RNA, 19 nt, Artificial Sequence
  Description of Artificial Sequence: Synthetic oligonucleotide
gucaagagaggggccagcc

SEQ ID NO: 2900149 - RNA, 19 nt, Artificial Sequence
  Description of Artificial Sequence: Synthetic oligonucleotide
uuuagccaguaaugccccu

SEQ ID NO: 2900150 - RNA, 19 nt, Artificial Sequence
  Description of Artificial Sequence: Synthetic oligonucleotide
guacaaggugacacccagg

SEQ ID NO: 2900151 - RNA, 19 nt, Artificial Sequence
  Description of Artificial Sequence: Synthetic oligonucleotide
accaugggaaacagcuguc

SEQ ID NO: 2900152 - RNA, 19 nt, Artificial Sequence
  Description of Artificial Sequence: Synthetic oligonucleotide
gggcauuuagccaguaaug

SEQ ID NO: 2900153 - RNA, 19 nt, Artificial Sequence
  Description of Artificial Sequence: Synthetic oligonucleotide
cacaaggccaggggugugg

SEQ ID NO: 2900154 - RNA, 19 nt, Artificial Sequence
  Description of Artificial Sequence: Synthetic oligonucleotide
gccaguaaugccccugagc

SEQ ID NO: 2900155 - RNA, 19 nt, Artificial Sequence
  Description of Artificial Sequence: Synthetic oligonucleotide
ucaggggcauuuagccagu

SEQ ID NO: 2900156 - RNA, 19 nt, Artificial Sequence
  Description of Artificial Sequence: Synthetic oligonucleotide
gaccaacagcaccauggga

SEQ ID NO: 2900157 - RNA, 19 nt, Artificial Sequence
  Description of Artificial Sequence: Synthetic oligonucleotide
aguagauucugugccucaa

SEQ ID NO: 2900158 - RNA, 19 nt, Artificial Sequence
  Description of Artificial Sequence: Synthetic oligonucleotide
ggcaggggucaagagaggg

SEQ ID NO: 2900159 - RNA, 19 nt, Artificial Sequence
  Description of Artificial Sequence: Synthetic oligonucleotide
aggcuucacaaggccaggg

SEQ ID NO: 2900160 - RNA, 19 nt, Artificial Sequence
  Description of Artificial Sequence: Synthetic oligonucleotide
aaggcaggcaggggucaag

SEQ ID NO: 2900161 - RNA, 19 nt, Artificial Sequence
  Description of Artificial Sequence: Synthetic oligonucleotide
cugcaaaugcaaggccucc

SEQ ID NO: 2900162 - RNA, 19 nt, Artificial Sequence
  Description of Artificial Sequence: Synthetic oligonucleotide
gugccggcaccucucuggg

SEQ ID NO: 2900163 - RNA, 19 nt, Artificial Sequence
  Description of Artificial Sequence: Synthetic oligonucleotide
gaggaccaacagcaccaug

SEQ ID NO: 2900164 - RNA, 19 nt, Artificial Sequence
  Description of Artificial Sequence: Synthetic oligonucleotide
agcaggggccagcccugcc

SEQ ID NO: 2900165 - RNA, 19 nt, Artificial Sequence
  Description of Artificial Sequence: Synthetic oligonucleotide
agccaguaaugccccugag

SEQ ID NO: 2900166 - RNA, 19 nt, Artificial Sequence
  Description of Artificial Sequence: Synthetic oligonucleotide
uagggugccggcaccucuc

SEQ ID NO: 2900167 - RNA, 19 nt, Artificial Sequence
  Description of Artificial Sequence: Synthetic oligonucleotide
caccaugggaaacagcugu

SEQ ID NO: 2900168 - RNA, 19 nt, Artificial Sequence
  Description of Artificial Sequence: Synthetic oligonucleotide
acaccacaguuagggugcc

SEQ ID NO: 2900169 - RNA, 19 nt, Artificial Sequence
  Description of Artificial Sequence: Synthetic oligonucleotide
auucugugccucaaggcuu

SEQ ID NO: 2900170 - RNA, 19 nt, Artificial Sequence
  Description of Artificial Sequence: Synthetic oligonucleotide
ccaguaaugccccugagcu

SEQ ID NO: 2900171 - RNA, 19 nt, Artificial Sequence
  Description of Artificial Sequence: Synthetic oligonucleotide
acucuccacccaaggaauc

SEQ ID NO: 2900172 - RNA, 19 nt, Artificial Sequence
  Description of Artificial Sequence: Synthetic oligonucleotide
ccagaaaauguguaugaaa

SEQ ID NO: 2900173 - RNA, 19 nt, Artificial Sequence
  Description of Artificial Sequence: Synthetic oligonucleotide
ccucaaggcuucacaaggc

SEQ ID NO: 2900174 - RNA, 19 nt, Artificial Sequence
  Description of Artificial Sequence: Synthetic oligonucleotide
aguuagggugccggcaccu

SEQ ID NO: 2900175 - RNA, 19 nt, Artificial Sequence
  Description of Artificial Sequence: Synthetic oligonucleotide
ggguugguugaggagcagg

SEQ ID NO: 2900176 - RNA, 19 nt, Artificial Sequence
  Description of Artificial Sequence: Synthetic oligonucleotide
agcccugccccugcugggc

SEQ ID NO: 2900177 - RNA, 19 nt, Artificial Sequence
  Description of Artificial Sequence: Synthetic oligonucleotide
gugccucaaggcuucacaa

SEQ ID NO: 2900178 - RNA, 19 nt, Artificial Sequence
  Description of Artificial Sequence: Synthetic oligonucleotide
caguuagggugccggcacc

SEQ ID NO: 2900179 - RNA, 19 nt, Artificial Sequence
  Description of Artificial Sequence: Synthetic oligonucleotide
guaugaaaucucagcacua

SEQ ID NO: 2900180 - RNA, 19 nt, Artificial Sequence
  Description of Artificial Sequence: Synthetic oligonucleotide
cacuauccugaguuaaaua

SEQ ID NO: 2900181 - RNA, 19 nt, Artificial Sequence
  Description of Artificial Sequence: Synthetic oligonucleotide
ccacccaaggaaucuaguc

SEQ ID NO: 2900182 - RNA, 19 nt, Artificial Sequence
  Description of Artificial Sequence: Synthetic oligonucleotide
acaaggugacacccaggua

SEQ ID NO: 2900183 - RNA, 19 nt, Artificial Sequence
  Description of Artificial Sequence: Synthetic oligonucleotide
gcaggcaggggucaagaga

SEQ ID NO: 2900184 - RNA, 19 nt, Artificial Sequence
  Description of Artificial Sequence: Synthetic oligonucleotide
caggggccagcccugcccc

SEQ ID NO: 2900185 - RNA, 19 nt, Artificial Sequence
  Description of Artificial Sequence: Synthetic oligonucleotide
ggugacacccagguaccag

SEQ ID NO: 2900186 - RNA, 19 nt, Artificial Sequence
  Description of Artificial Sequence: Synthetic oligonucleotide
ggggcauuuagccaguaau

SEQ ID NO: 2900187 - RNA, 19 nt, Artificial Sequence
  Description of Artificial Sequence: Synthetic oligonucleotide
gggccuagguacaagguga

SEQ ID NO: 2900188 - RNA, 19 nt, Artificial Sequence
  Description of Artificial Sequence: Synthetic oligonucleotide
agcacuauccugaguuaaa

SEQ ID NO: 2900189 - RNA, 19 nt, Artificial Sequence
  Description of Artificial Sequence: Synthetic oligonucleotide
aggggcauuuagccaguaa

SEQ ID NO: 2900190 - RNA, 19 nt, Artificial Sequence
  Description of Artificial Sequence: Synthetic oligonucleotide
gagaggggccagccaggcc

SEQ ID NO: 2900191 - RNA, 19 nt, Artificial Sequence
  Description of Artificial Sequence: Synthetic oligonucleotide
caguagauucugugccuca

SEQ ID NO: 2900192 - RNA, 19 nt, Artificial Sequence
  Description of Artificial Sequence: Synthetic oligonucleotide
gcaggggucaagagagggg

SEQ ID NO: 2900193 - RNA, 19 nt, Artificial Sequence
  Description of Artificial Sequence: Synthetic oligonucleotide
aaaggcaggcaggggucaa

SEQ ID NO: 2900194 - RNA, 19 nt, Artificial Sequence
  Description of Artificial Sequence: Synthetic oligonucleotide
ugccggcaccucucugggg

SEQ ID NO: 2900195 - RNA, 19 nt, Artificial Sequence
  Description of Artificial Sequence: Synthetic oligonucleotide
gaaucuaguccaguagauu

SEQ ID NO: 2900196 - RNA, 19 nt, Artificial Sequence
  Description of Artificial Sequence: Synthetic oligonucleotide
caugggaaacagcuguccu

SEQ ID NO: 2900197 - RNA, 19 nt, Artificial Sequence
  Description of Artificial Sequence: Synthetic oligonucleotide
caaggccagggguguggcc

SEQ ID NO: 2900198 - RNA, 19 nt, Artificial Sequence
  Description of Artificial Sequence: Synthetic oligonucleotide
agguacaaggugacaccca

SEQ ID NO: 2900199 - RNA, 19 nt, Artificial Sequence
  Description of Artificial Sequence: Synthetic oligonucleotide
cacaguuagggugccggca

SEQ ID NO: 2900200 - RNA, 19 nt, Artificial Sequence
  Description of Artificial Sequence: Synthetic oligonucleotide
ccaugggaaacagcugucc

SEQ ID NO: 2900201 - RNA, 19 nt, Artificial Sequence
  Description of Artificial Sequence: Synthetic oligonucleotide
guugaggagcaggggccag

SEQ ID NO: 2900202 - RNA, 19 nt, Artificial Sequence
  Description of Artificial Sequence: Synthetic oligonucleotide
ccagcccugccccugcugg

SEQ ID NO: 2900203 - RNA, 19 nt, Artificial Sequence
  Description of Artificial Sequence: Synthetic oligonucleotide
cugguggccacaggaccag

SEQ ID NO: 2900204 - RNA, 19 nt, Artificial Sequence
  Description of Artificial Sequence: Synthetic oligonucleotide
ucacaaggccaggggugug

SEQ ID NO: 2900205 - RNA, 19 nt, Artificial Sequence
  Description of Artificial Sequence: Synthetic oligonucleotide
gggaaacagcuguccucgg

SEQ ID NO: 2900206 - RNA, 19 nt, Artificial Sequence
  Description of Artificial Sequence: Synthetic oligonucleotide
gcugcaaaugcaaggccuc

SEQ ID NO: 2900207 - RNA, 19 nt, Artificial Sequence
  Description of Artificial Sequence: Synthetic oligonucleotide
gcaggggccagcccugccc

SEQ ID NO: 2900208 - RNA, 19 nt, Artificial Sequence
  Description of Artificial Sequence: Synthetic oligonucleotide
gguggccacaggaccagcc

SEQ ID NO: 2900209 - RNA, 19 nt, Artificial Sequence
  Description of Artificial Sequence: Synthetic oligonucleotide
cccaaggaaucuaguccag

SEQ ID NO: 2900210 - RNA, 19 nt, Artificial Sequence
  Description of Artificial Sequence: Synthetic oligonucleotide
gcuucacaaggccaggggu

SEQ ID NO: 2900211 - RNA, 19 nt, Artificial Sequence
  Description of Artificial Sequence: Synthetic oligonucleotide
ggguguggccagcacuccc

SEQ ID NO: 2900212 - RNA, 19 nt, Artificial Sequence
  Description of Artificial Sequence: Synthetic oligonucleotide
cccacugguggccacagga

SEQ ID NO: 2900213 - RNA, 19 nt, Artificial Sequence
  Description of Artificial Sequence: Synthetic oligonucleotide
agaggaccaacagcaccau

SEQ ID NO: 2900214 - RNA, 19 nt, Artificial Sequence
  Description of Artificial Sequence: Synthetic oligonucleotide
agggugccggcaccucucu

SEQ ID NO: 2900215 - RNA, 19 nt, Artificial Sequence
  Description of Artificial Sequence: Synthetic oligonucleotide
cagcacuauccugaguuaa

SEQ ID NO: 2900216 - RNA, 19 nt, Artificial Sequence
  Description of Artificial Sequence: Synthetic oligonucleotide
cuguccucgggccuaggua

SEQ ID NO: 2900217 - RNA, 19 nt, Artificial Sequence
  Description of Artificial Sequence: Synthetic oligonucleotide
ccacugguggccacaggac

SEQ ID NO: 2900218 - RNA, 19 nt, Artificial Sequence
  Description of Artificial Sequence: Synthetic oligonucleotide
ggccacaggaccagccugc

SEQ ID NO: 2900219 - RNA, 19 nt, Artificial Sequence
  Description of Artificial Sequence: Synthetic oligonucleotide
gggccagccaggccucagg

SEQ ID NO: 2900220 - RNA, 19 nt, Artificial Sequence
  Description of Artificial Sequence: Synthetic oligonucleotide
ccacaguuagggugccggc

SEQ ID NO: 2900221 - RNA, 19 nt, Artificial Sequence
  Description of Artificial Sequence: Synthetic oligonucleotide
gccccugagcuauagugaa

SEQ ID NO: 2900222 - RNA, 19 nt, Artificial Sequence
  Description of Artificial Sequence: Synthetic oligonucleotide
caguaaugccccugagcua

SEQ ID NO: 2900223 - RNA, 19 nt, Artificial Sequence
  Description of Artificial Sequence: Synthetic oligonucleotide
aggcaggggucaagagagg

SEQ ID NO: 2900224 - RNA, 19 nt, Artificial Sequence
  Description of Artificial Sequence: Synthetic oligonucleotide
ccaguagauucugugccuc

SEQ ID NO: 2900225 - RNA, 19 nt, Artificial Sequence
  Description of Artificial Sequence: Synthetic oligonucleotide
ucugugccucaaggcuuca

SEQ ID NO: 2900226 - RNA, 19 nt, Artificial Sequence
  Description of Artificial Sequence: Synthetic oligonucleotide
cuaguccaguagauucugu

SEQ ID NO: 2900227 - RNA, 19 nt, Artificial Sequence
  Description of Artificial Sequence: Synthetic oligonucleotide
ggggucaagagaggggcca

SEQ ID NO: 2900228 - RNA, 19 nt, Artificial Sequence
  Description of Artificial Sequence: Synthetic oligonucleotide
caccacaguuagggugccg

SEQ ID NO: 2900229 - RNA, 19 nt, Artificial Sequence
  Description of Artificial Sequence: Synthetic oligonucleotide
guggccacaggaccagccu

SEQ ID NO: 2900230 - RNA, 19 nt, Artificial Sequence
  Description of Artificial Sequence: Synthetic oligonucleotide
ggucaagagaggggccagc

SEQ ID NO: 2900231 - RNA, 19 nt, Artificial Sequence
  Description of Artificial Sequence: Synthetic oligonucleotide
gggucaagagaggggccag

SEQ ID NO: 2900232 - RNA, 19 nt, Artificial Sequence
  Description of Artificial Sequence: Synthetic oligonucleotide
uccucgggccuagguacaa

SEQ ID NO: 2900233 - RNA, 19 nt, Artificial Sequence
  Description of Artificial Sequence: Synthetic oligonucleotide
ccaacagcaccaugggaaa

SEQ ID NO: 2900234 - RNA, 19 nt, Artificial Sequence
  Description of Artificial Sequence: Synthetic oligonucleotide
guuagggugccggcaccuc

SEQ ID NO: 2900235 - RNA, 19 nt, Artificial Sequence
  Description of Artificial Sequence: Synthetic oligonucleotide
ggaaucuaguccaguagau

SEQ ID NO: 2900236 - RNA, 19 nt, Artificial Sequence
  Description of Artificial Sequence: Synthetic oligonucleotide
gcaccaugggaaacagcug

SEQ ID NO: 2900237 - RNA, 19 nt, Artificial Sequence
  Description of Artificial Sequence: Synthetic oligonucleotide
gcaagaggaccaacagcac

SEQ ID NO: 2900238 - RNA, 19 nt, Artificial Sequence
  Description of Artificial Sequence: Synthetic oligonucleotide
ccccugcugggcuucacug

SEQ ID NO: 2900239 - RNA, 19 nt, Artificial Sequence
  Description of Artificial Sequence: Synthetic oligonucleotide
ugguggccacaggaccagc

SEQ ID NO: 2900240 - RNA, 19 nt, Artificial Sequence
  Description of Artificial Sequence: Synthetic oligonucleotide
cgggccuagguacaaggug

SEQ ID NO: 2900241 - RNA, 19 nt, Artificial Sequence
  Description of Artificial Sequence: Synthetic oligonucleotide
ggccuagguacaaggugac

SEQ ID NO: 2900242 - RNA, 19 nt, Artificial Sequence
  Description of Artificial Sequence: Synthetic oligonucleotide
cagccaggccucaggggca

SEQ ID NO: 2900243 - RNA, 19 nt, Artificial Sequence
  Description of Artificial Sequence: Synthetic oligonucleotide
cucuccacccaaggaaucu

SEQ ID NO: 2900244 - RNA, 19 nt, Artificial Sequence
  Description of Artificial Sequence: Synthetic oligonucleotide
cagcagcaagaggaccaac

SEQ ID NO: 2900245 - RNA, 19 nt, Artificial Sequence
  Description of Artificial Sequence: Synthetic oligonucleotide
gagcuauagugaauucauu

SEQ ID NO: 2900246 - RNA, 19 nt, Artificial Sequence
  Description of Artificial Sequence: Synthetic oligonucleotide
gagcaggggccagcccugc

SEQ ID NO: 2900247 - RNA, 19 nt, Artificial Sequence
  Description of Artificial Sequence: Synthetic oligonucleotide
cagggguguggccagcacu

SEQ ID NO: 2900248 - RNA, 19 nt, Artificial Sequence
  Description of Artificial Sequence: Synthetic oligonucleotide
ccucaggggcauuuagcca

SEQ ID NO: 2900249 - RNA, 19 nt, Artificial Sequence
  Description of Artificial Sequence: Synthetic oligonucleotide
ccugcugggcuucacugaa

SEQ ID NO: 2900250 - RNA, 19 nt, Artificial Sequence
  Description of Artificial Sequence: Synthetic oligonucleotide
gaggggccagccaggccuc

SEQ ID NO: 2900251 - RNA, 19 nt, Artificial Sequence
  Description of Artificial Sequence: Synthetic oligonucleotide
cccagaaaauguguaugaa

SEQ ID NO: 2900252 - RNA, 19 nt, Artificial Sequence
  Description of Artificial Sequence: Synthetic oligonucleotide
agcuguccucgggccuagg

SEQ ID NO: 2900253 - RNA, 19 nt, Artificial Sequence
  Description of Artificial Sequence: Synthetic oligonucleotide
cagcuguccucgggccuag

SEQ ID NO: 2900254 - RNA, 19 nt, Artificial Sequence
  Description of Artificial Sequence: Synthetic oligonucleotide
guccucgggccuagguaca

SEQ ID NO: 2900255 - RNA, 19 nt, Artificial Sequence
  Description of Artificial Sequence: Synthetic oligonucleotide
gcacuauccugaguuaaau

SEQ ID NO: 2900256 - RNA, 19 nt, Artificial Sequence
  Description of Artificial Sequence: Synthetic oligonucleotide
agccaggccucaggggcau

SEQ ID NO: 2900257 - RNA, 19 nt, Artificial Sequence
  Description of Artificial Sequence: Synthetic oligonucleotide
ccacaggaccagccugcag

SEQ ID NO: 2900258 - RNA, 19 nt, Artificial Sequence
  Description of Artificial Sequence: Synthetic oligonucleotide
gggguguggccagcacucc

SEQ ID NO: 2900259 - RNA, 19 nt, Artificial Sequence
  Description of Artificial Sequence: Synthetic oligonucleotide
ccccagcagcaagaggacc

SEQ ID NO: 2900260 - RNA, 19 nt, Artificial Sequence
  Description of Artificial Sequence: Synthetic oligonucleotide
ggcuucacugaagcugcaa

SEQ ID NO: 2900261 - RNA, 19 nt, Artificial Sequence
  Description of Artificial Sequence: Synthetic oligonucleotide
gggguugguugaggagcag

SEQ ID NO: 2900262 - RNA, 19 nt, Artificial Sequence
  Description of Artificial Sequence: Synthetic oligonucleotide
cccugcugggcuucacuga

SEQ ID NO: 2900263 - RNA, 19 nt, Artificial Sequence
  Description of Artificial Sequence: Synthetic oligonucleotide
gcugggcuucacugaagcu

SEQ ID NO: 2900264 - RNA, 19 nt, Artificial Sequence
  Description of Artificial Sequence: Synthetic oligonucleotide
gcuguccucgggccuaggu

SEQ ID NO: 2900265 - RNA, 19 nt, Artificial Sequence
  Description of Artificial Sequence: Synthetic oligonucleotide
gggugccggcaccucucug

SEQ ID NO: 2900266 - RNA, 19 nt, Artificial Sequence
  Description of Artificial Sequence: Synthetic oligonucleotide
ugccccugcugggcuucac

SEQ ID NO: 2900267 - RNA, 19 nt, Artificial Sequence
  Description of Artificial Sequence: Synthetic oligonucleotide
gccuagguacaaggugaca

SEQ ID NO: 2900268 - RNA, 19 nt, Artificial Sequence
  Description of Artificial Sequence: Synthetic oligonucleotide
guaaugccccugagcuaua

SEQ ID NO: 2900269 - RNA, 19 nt, Artificial Sequence
  Description of Artificial Sequence: Synthetic oligonucleotide
caggaccagccugcagaga

SEQ ID NO: 2900270 - RNA, 19 nt, Artificial Sequence
  Description of Artificial Sequence: Synthetic oligonucleotide
ggaccagccugcagagaaa

SEQ ID NO: 2900271 - RNA, 19 nt, Artificial Sequence
  Description of Artificial Sequence: Synthetic oligonucleotide
cccugagcuauagugaauu

SEQ ID NO: 2900272 - RNA, 19 nt, Artificial Sequence
  Description of Artificial Sequence: Synthetic oligonucleotide
ccucgggccuagguacaag

SEQ ID NO: 2900273 - RNA, 19 nt, Artificial Sequence
  Description of Artificial Sequence: Synthetic oligonucleotide
gccacaggaccagccugca

SEQ ID NO: 2900274 - RNA, 19 nt, Artificial Sequence
  Description of Artificial Sequence: Synthetic oligonucleotide
aggggccagccaggccuca

SEQ ID NO: 2900275 - RNA, 19 nt, Artificial Sequence
  Description of Artificial Sequence: Synthetic oligonucleotide
ccccacugguggccacagg

SEQ ID NO: 2900276 - RNA, 19 nt, Artificial Sequence
  Description of Artificial Sequence: Synthetic oligonucleotide
ccaaggaaucuaguccagu

SEQ ID NO: 2900277 - RNA, 19 nt, Artificial Sequence
  Description of Artificial Sequence: Synthetic oligonucleotide
caggccucaggggcauuua

SEQ ID NO: 2900278 - RNA, 19 nt, Artificial Sequence
  Description of Artificial Sequence: Synthetic oligonucleotide
ccagcagcaagaggaccaa

SEQ ID NO: 2900279 - RNA, 19 nt, Artificial Sequence
  Description of Artificial Sequence: Synthetic oligonucleotide
gccagggguguggccagca

SEQ ID NO: 2900280 - RNA, 19 nt, Artificial Sequence
  Description of Artificial Sequence: Synthetic oligonucleotide
ccugccccugcugggcuuc

SEQ ID NO: 2900281 - RNA, 19 nt, Artificial Sequence
  Description of Artificial Sequence: Synthetic oligonucleotide
gccccugcugggcuucacu

SEQ ID NO: 2900282 - RNA, 19 nt, Artificial Sequence
  Description of Artificial Sequence: Synthetic oligonucleotide
caggggcauuuagccagua

SEQ ID NO: 2900283 - RNA, 19 nt, Artificial Sequence
  Description of Artificial Sequence: Synthetic oligonucleotide
ggccagggguguggccagc

SEQ ID NO: 2900284 - RNA, 19 nt, Artificial Sequence
  Description of Artificial Sequence: Synthetic oligonucleotide
cugccccugcugggcuuca

SEQ ID NO: 2900285 - RNA, 19 nt, Artificial Sequence
  Description of Artificial Sequence: Synthetic oligonucleotide
ccccugagcuauagugaau

SEQ ID NO: 2900286 - RNA, 19 nt, Artificial Sequence
  Description of Artificial Sequence: Synthetic oligonucleotide
gcccugccccugcugggcu

SEQ ID NO: 2900287 - RNA, 19 nt, Artificial Sequence
  Description of Artificial Sequence: Synthetic oligonucleotide
ggccagcccugccccugcu

SEQ ID NO: 2900288 - RNA, 19 nt, Artificial Sequence
  Description of Artificial Sequence: Synthetic oligonucleotide
ccaggccucaggggcauuu

SEQ ID NO: 2900289 - RNA, 19 nt, Artificial Sequence
  Description of Artificial Sequence: Synthetic oligonucleotide
gccaggccucaggggcauu

SEQ ID NO: 2900290 - RNA, 19 nt, Artificial Sequence
  Description of Artificial Sequence: Synthetic oligonucleotide
uugaauguuacuaaaagag

SEQ ID NO: 2900291 - RNA, 19 nt, Artificial Sequence
  Description of Artificial Sequence: Synthetic oligonucleotide
uaucaaaacaucaauaucu

SEQ ID NO: 2900292 - RNA, 19 nt, Artificial Sequence
  Description of Artificial Sequence: Synthetic oligonucleotide
uacuaaaagaggcaggagg

SEQ ID NO: 2900293 - RNA, 19 nt, Artificial Sequence
  Description of Artificial Sequence: Synthetic oligonucleotide
auuaauugcuguuugaaug

SEQ ID NO: 2900294 - RNA, 19 nt, Artificial Sequence
  Description of Artificial Sequence: Synthetic oligonucleotide
uaaggaaucuaucaaaaca

SEQ ID NO: 2900295 - RNA, 19 nt, Artificial Sequence
  Description of Artificial Sequence: Synthetic oligonucleotide
ucuagcuuauauaagcuag

SEQ ID NO: 2900296 - RNA, 19 nt, Artificial Sequence
  Description of Artificial Sequence: Synthetic oligonucleotide
ugaauguuacuaaaagagg

SEQ ID NO: 2900297 - RNA, 19 nt, Artificial Sequence
  Description of Artificial Sequence: Synthetic oligonucleotide
ugcuguaauacuccaaugg

SEQ ID NO: 2900298 - RNA, 19 nt, Artificial Sequence
  Description of Artificial Sequence: Synthetic oligonucleotide
aacaacauccuccagacau

SEQ ID NO: 2900299 - RNA, 19 nt, Artificial Sequence
  Description of Artificial Sequence: Synthetic oligonucleotide
ucuucuagcuuauauaagc

SEQ ID NO: 2900300 - RNA, 19 nt, Artificial Sequence
  Description of Artificial Sequence: Synthetic oligonucleotide
acaaaacugaucugcaagc

SEQ ID NO: 2900301 - RNA, 19 nt, Artificial Sequence
  Description of Artificial Sequence: Synthetic oligonucleotide
uccccgauaaacaacaucc

SEQ ID NO: 2900302 - RNA, 19 nt, Artificial Sequence
  Description of Artificial Sequence: Synthetic oligonucleotide
uacaaaacugaucugcaag

SEQ ID NO: 2900303 - RNA, 19 nt, Artificial Sequence
  Description of Artificial Sequence: Synthetic oligonucleotide
caaaacaucaauaucuuuc

SEQ ID NO: 2900304 - RNA, 19 nt, Artificial Sequence
  Description of Artificial Sequence: Synthetic oligonucleotide
aacaucaauaucuuucgcu

SEQ ID NO: 2900305 - RNA, 19 nt, Artificial Sequence
  Description of Artificial Sequence: Synthetic oligonucleotide
cuuauauaagcuagcagcc

SEQ ID NO: 2900306 - RNA, 19 nt, Artificial Sequence
  Description of Artificial Sequence: Synthetic oligonucleotide
guugcuaggaaucuggaag

SEQ ID NO: 2900307 - RNA, 19 nt, Artificial Sequence
  Description of Artificial Sequence: Synthetic oligonucleotide
gaauguuacuaaaagaggc

SEQ ID NO: 2900308 - RNA, 19 nt, Artificial Sequence
  Description of Artificial Sequence: Synthetic oligonucleotide
ucuucugugggauuuggcg

SEQ ID NO: 2900309 - RNA, 19 nt, Artificial Sequence
  Description of Artificial Sequence: Synthetic oligonucleotide
ucugcaagcgaguucaccg

SEQ ID NO: 2900310 - RNA, 19 nt, Artificial Sequence
  Description of Artificial Sequence: Synthetic oligonucleotide
ucuaucaaaacaucaauau

SEQ ID NO: 2900311 - RNA, 19 nt, Artificial Sequence
  Description of Artificial Sequence: Synthetic oligonucleotide
uguaauacuccaauggcgu

SEQ ID NO: 2900312 - RNA, 19 nt, Artificial Sequence
  Description of Artificial Sequence: Synthetic oligonucleotide
uuugaauguuacuaaaaga

SEQ ID NO: 2900313 - RNA, 19 nt, Artificial Sequence
  Description of Artificial Sequence: Synthetic oligonucleotide
gcuuauauaagcuagcagc

SEQ ID NO: 2900314 - RNA, 19 nt, Artificial Sequence
  Description of Artificial Sequence: Synthetic oligonucleotide
guuugaauguuacuaaaag

SEQ ID NO: 2900315 - RNA, 19 nt, Artificial Sequence
  Description of Artificial Sequence: Synthetic oligonucleotide
aaacaucaauaucuuucgc

SEQ ID NO: 2900316 - RNA, 19 nt, Artificial Sequence
  Description of Artificial Sequence: Synthetic oligonucleotide
uauauaagcuagcagccug

SEQ ID NO: 2900317 - RNA, 19 nt, Artificial Sequence
  Description of Artificial Sequence: Synthetic oligonucleotide
auaaacaacauccuccaga

SEQ ID NO: 2900318 - RNA, 19 nt, Artificial Sequence
  Description of Artificial Sequence: Synthetic oligonucleotide
ugcaaugucggcaagcgca

SEQ ID NO: 2900319 - RNA, 19 nt, Artificial Sequence
  Description of Artificial Sequence: Synthetic oligonucleotide
aaucuaucaaaacaucaau

SEQ ID NO: 2900320 - RNA, 19 nt, Artificial Sequence
  Description of Artificial Sequence: Synthetic oligonucleotide
uguuacuaaaagaggcagg

SEQ ID NO: 2900321 - RNA, 19 nt, Artificial Sequence
  Description of Artificial Sequence: Synthetic oligonucleotide
uaaacaacauccuccagac

SEQ ID NO: 2900322 - RNA, 19 nt, Artificial Sequence
  Description of Artificial Sequence: Synthetic oligonucleotide
uaagcuagcagccuguaaa

SEQ ID NO: 2900323 - RNA, 19 nt, Artificial Sequence
  Description of Artificial Sequence: Synthetic oligonucleotide
uguucgugcaaucagugcu

SEQ ID NO: 2900324 - RNA, 19 nt, Artificial Sequence
  Description of Artificial Sequence: Synthetic oligonucleotide
acaucaauaucuuucgcug

SEQ ID NO: 2900325 - RNA, 19 nt, Artificial Sequence
  Description of Artificial Sequence: Synthetic oligonucleotide
uuaauugcuguuugaaugu

SEQ ID NO: 2900326 - RNA, 19 nt, Artificial Sequence
  Description of Artificial Sequence: Synthetic oligonucleotide
uuggaucuuuuccagaagc

SEQ ID NO: 2900327 - RNA, 19 nt, Artificial Sequence
  Description of Artificial Sequence: Synthetic oligonucleotide
cuguaauacuccaauggcg

SEQ ID NO: 2900328 - RNA, 19 nt, Artificial Sequence
  Description of Artificial Sequence: Synthetic oligonucleotide
uuuuccagaagcaugucuc

SEQ ID NO: 2900329 - RNA, 19 nt, Artificial Sequence
  Description of Artificial Sequence: Synthetic oligonucleotide
uuggucuuuauuaauugcu

SEQ ID NO: 2900330 - RNA, 19 nt, Artificial Sequence
  Description of Artificial Sequence: Synthetic oligonucleotide
acauccuccagacauguag

SEQ ID NO: 2900331 - RNA, 19 nt, Artificial Sequence
  Description of Artificial Sequence: Synthetic oligonucleotide
aauacuccaauggcguuac

SEQ ID NO: 2900332 - RNA, 19 nt, Artificial Sequence
  Description of Artificial Sequence: Synthetic oligonucleotide
aaacugaucugcaagcgag

SEQ ID NO: 2900333 - RNA, 19 nt, Artificial Sequence
  Description of Artificial Sequence: Synthetic oligonucleotide
accaguuauuuucucaguc

SEQ ID NO: 2900334 - RNA, 19 nt, Artificial Sequence
  Description of Artificial Sequence: Synthetic oligonucleotide
uuuauuaauugcuguuuga

SEQ ID NO: 2900335 - RNA, 19 nt, Artificial Sequence
  Description of Artificial Sequence: Synthetic oligonucleotide
aaaacugaucugcaagcga

SEQ ID NO: 2900336 - RNA, 19 nt, Artificial Sequence
  Description of Artificial Sequence: Synthetic oligonucleotide
aaggaaucuaucaaaacau

SEQ ID NO: 2900337 - RNA, 19 nt, Artificial Sequence
  Description of Artificial Sequence: Synthetic oligonucleotide
ugaucugcaagcgaguuca

SEQ ID NO: 2900338 - RNA, 19 nt, Artificial Sequence
  Description of Artificial Sequence: Synthetic oligonucleotide
uucaugauuuucuucuucu

SEQ ID NO: 2900339 - RNA, 19 nt, Artificial Sequence
  Description of Artificial Sequence: Synthetic oligonucleotide
aauguuacuaaaagaggca

SEQ ID NO: 2900340 - RNA, 19 nt, Artificial Sequence
  Description of Artificial Sequence: Synthetic oligonucleotide
cuuuauuaauugcuguuug

SEQ ID NO: 2900341 - RNA, 19 nt, Artificial Sequence
  Description of Artificial Sequence: Synthetic oligonucleotide
uguuugaauguuacuaaaa

SEQ ID NO: 2900342 - RNA, 19 nt, Artificial Sequence
  Description of Artificial Sequence: Synthetic oligonucleotide
auuuucuucuucuagcuua

SEQ ID NO: 2900343 - RNA, 19 nt, Artificial Sequence
  Description of Artificial Sequence: Synthetic oligonucleotide
aauggcguuacaaaacuga

SEQ ID NO: 2900344 - RNA, 19 nt, Artificial Sequence
  Description of Artificial Sequence: Synthetic oligonucleotide
aggaggaccacauugcugu

SEQ ID NO: 2900345 - RNA, 19 nt, Artificial Sequence
  Description of Artificial Sequence: Synthetic oligonucleotide
uggucuuuauuaauugcug

SEQ ID NO: 2900346 - RNA, 19 nt, Artificial Sequence
  Description of Artificial Sequence: Synthetic oligonucleotide
auugcuguuugaauguuac

SEQ ID NO: 2900347 - RNA, 19 nt, Artificial Sequence
  Description of Artificial Sequence: Synthetic oligonucleotide
cuucugugggauuuggcgg

SEQ ID NO: 2900348 - RNA, 19 nt, Artificial Sequence
  Description of Artificial Sequence: Synthetic oligonucleotide
ucaaccaguuauuuucuca

SEQ ID NO: 2900349 - RNA, 19 nt, Artificial Sequence
  Description of Artificial Sequence: Synthetic oligonucleotide
aagcuagcagccuguaaag

SEQ ID NO: 2900350 - RNA, 19 nt, Artificial Sequence
  Description of Artificial Sequence: Synthetic oligonucleotide
ugugcaaugucggcaagcg

SEQ ID NO: 2900351 - RNA, 19 nt, Artificial Sequence
  Description of Artificial Sequence: Synthetic oligonucleotide
cuaggaaucuggaagcgac

SEQ ID NO: 2900352 - RNA, 19 nt, Artificial Sequence
  Description of Artificial Sequence: Synthetic oligonucleotide
uucugugggauuuggcggg

SEQ ID NO: 2900353 - RNA, 19 nt, Artificial Sequence
  Description of Artificial Sequence: Synthetic oligonucleotide
caaccaguuauuuucucag

SEQ ID NO: 2900354 - RNA, 19 nt, Artificial Sequence
  Description of Artificial Sequence: Synthetic oligonucleotide
uuauuaauugcuguuugaa

SEQ ID NO: 2900355 - RNA, 19 nt, Artificial Sequence
  Description of Artificial Sequence: Synthetic oligonucleotide
uucuucuagcuuauauaag

SEQ ID NO: 2900356 - RNA, 19 nt, Artificial Sequence
  Description of Artificial Sequence: Synthetic oligonucleotide
uauuaauugcuguuugaau

SEQ ID NO: 2900357 - RNA, 19 nt, Artificial Sequence
  Description of Artificial Sequence: Synthetic oligonucleotide
uccaauggcguuacaaaac

SEQ ID NO: 2900358 - RNA, 19 nt, Artificial Sequence
  Description of Artificial Sequence: Synthetic oligonucleotide
guuguugcuaggaaucugg

SEQ ID NO: 2900359 - RNA, 19 nt, Artificial Sequence
  Description of Artificial Sequence: Synthetic oligonucleotide
aagcaugucuccccgauaa

SEQ ID NO: 2900360 - RNA, 19 nt, Artificial Sequence
  Description of Artificial Sequence: Synthetic oligonucleotide
uggucuucaguugugacug

SEQ ID NO: 2900361 - RNA, 19 nt, Artificial Sequence
  Description of Artificial Sequence: Synthetic oligonucleotide
uugcuaggaaucuggaagc

SEQ ID NO: 2900362 - RNA, 19 nt, Artificial Sequence
  Description of Artificial Sequence: Synthetic oligonucleotide
cuaucaaaacaucaauauc

SEQ ID NO: 2900363 - RNA, 19 nt, Artificial Sequence
  Description of Artificial Sequence: Synthetic oligonucleotide
cacauugcuguaauacucc

SEQ ID NO: 2900364 - RNA, 19 nt, Artificial Sequence
  Description of Artificial Sequence: Synthetic oligonucleotide
cuagcuuauauaagcuagc

SEQ ID NO: 2900365 - RNA, 19 nt, Artificial Sequence
  Description of Artificial Sequence: Synthetic oligonucleotide
uaucuuucgcuguucgugc

SEQ ID NO: 2900366 - RNA, 19 nt, Artificial Sequence
  Description of Artificial Sequence: Synthetic oligonucleotide
agcuuauauaagcuagcag

SEQ ID NO: 2900367 - RNA, 19 nt, Artificial Sequence
  Description of Artificial Sequence: Synthetic oligonucleotide
aauaucuuucgcuguucgu

SEQ ID NO: 2900368 - RNA, 19 nt, Artificial Sequence
  Description of Artificial Sequence: Synthetic oligonucleotide
uuuggaucuuuuccagaag

SEQ ID NO: 2900369 - RNA, 19 nt, Artificial Sequence
  Description of Artificial Sequence: Synthetic oligonucleotide
ucuucuucuagcuuauaua

SEQ ID NO: 2900370 - RNA, 19 nt, Artificial Sequence
  Description of Artificial Sequence: Synthetic oligonucleotide
ugggcauacucuucugugg

SEQ ID NO: 2900371 - RNA, 19 nt, Artificial Sequence
  Description of Artificial Sequence: Synthetic oligonucleotide
gaucuuuuccagaagcaug

SEQ ID NO: 2900372 - RNA, 19 nt, Artificial Sequence
  Description of Artificial Sequence: Synthetic oligonucleotide
cuuagugcccuucaaccag

SEQ ID NO: 2900373 - RNA, 19 nt, Artificial Sequence
  Description of Artificial Sequence: Synthetic oligonucleotide
ucaguugugacugugcaau

SEQ ID NO: 2900374 - RNA, 19 nt, Artificial Sequence
  Description of Artificial Sequence: Synthetic oligonucleotide
caauaucuuucgcuguucg

SEQ ID NO: 2900375 - RNA, 19 nt, Artificial Sequence
  Description of Artificial Sequence: Synthetic oligonucleotide
uucucagucaccuguuucu

SEQ ID NO: 2900376 - RNA, 19 nt, Artificial Sequence
  Description of Artificial Sequence: Synthetic oligonucleotide
guuggucuuuauuaauugc

SEQ ID NO: 2900377 - RNA, 19 nt, Artificial Sequence
  Description of Artificial Sequence: Synthetic oligonucleotide
auguuacuaaaagaggcag

SEQ ID NO: 2900378 - RNA, 19 nt, Artificial Sequence
  Description of Artificial Sequence: Synthetic oligonucleotide
ucuucaguugugacugugc

SEQ ID NO: 2900379 - RNA, 19 nt, Artificial Sequence
  Description of Artificial Sequence: Synthetic oligonucleotide
uucuucuucuagcuuauau

SEQ ID NO: 2900380 - RNA, 19 nt, Artificial Sequence
  Description of Artificial Sequence: Synthetic oligonucleotide
uggguaaggaaucuaucaa

SEQ ID NO: 2900381 - RNA, 19 nt, Artificial Sequence
  Description of Artificial Sequence: Synthetic oligonucleotide
cuacgggugacacuucugg

SEQ ID NO: 2900382 - RNA, 19 nt, Artificial Sequence
  Description of Artificial Sequence: Synthetic oligonucleotide
cuucuucuagcuuauauaa

SEQ ID NO: 2900383 - RNA, 19 nt, Artificial Sequence
  Description of Artificial Sequence: Synthetic oligonucleotide
gaaucuggaagcgacuggc

SEQ ID NO: 2900384 - RNA, 19 nt, Artificial Sequence
  Description of Artificial Sequence: Synthetic oligonucleotide
aaaagaggcaggaggacca

SEQ ID NO: 2900385 - RNA, 19 nt, Artificial Sequence
  Description of Artificial Sequence: Synthetic oligonucleotide
ucuuagugcccuucaacca

SEQ ID NO: 2900386 - RNA, 19 nt, Artificial Sequence
  Description of Artificial Sequence: Synthetic oligonucleotide
aguuauuuucucagucacc

SEQ ID NO: 2900387 - RNA, 19 nt, Artificial Sequence
  Description of Artificial Sequence: Synthetic oligonucleotide
ugcuguuugaauguuacua

SEQ ID NO: 2900388 - RNA, 19 nt, Artificial Sequence
  Description of Artificial Sequence: Synthetic oligonucleotide
ugcaagcgaguucaccgcg

SEQ ID NO: 2900389 - RNA, 19 nt, Artificial Sequence
  Description of Artificial Sequence: Synthetic oligonucleotide
guuacuaaaagaggcagga

SEQ ID NO: 2900390 - RNA, 19 nt, Artificial Sequence
  Description of Artificial Sequence: Synthetic oligonucleotide
acuaaaagaggcaggagga

SEQ ID NO: 2900391 - RNA, 19 nt, Artificial Sequence
  Description of Artificial Sequence: Synthetic oligonucleotide
uggaucuuuuccagaagca

SEQ ID NO: 2900392 - RNA, 19 nt, Artificial Sequence
  Description of Artificial Sequence: Synthetic oligonucleotide
caguuauuuucucagucac

SEQ ID NO: 2900393 - RNA, 19 nt, Artificial Sequence
  Description of Artificial Sequence: Synthetic oligonucleotide
aagcgaguucaccgcgucc

SEQ ID NO: 2900394 - RNA, 19 nt, Artificial Sequence
  Description of Artificial Sequence: Synthetic oligonucleotide
ccgauaaacaacauccucc

SEQ ID NO: 2900395 - RNA, 19 nt, Artificial Sequence
  Description of Artificial Sequence: Synthetic oligonucleotide
uuuccagaagcaugucucc

SEQ ID NO: 2900396 - RNA, 19 nt, Artificial Sequence
  Description of Artificial Sequence: Synthetic oligonucleotide
gaccacauugcuguaauac

SEQ ID NO: 2900397 - RNA, 19 nt, Artificial Sequence
  Description of Artificial Sequence: Synthetic oligonucleotide
gaaucuaucaaaacaucaa

SEQ ID NO: 2900398 - RNA, 19 nt, Artificial Sequence
  Description of Artificial Sequence: Synthetic oligonucleotide
caaaacugaucugcaagcg

SEQ ID NO: 2900399 - RNA, 19 nt, Artificial Sequence
  Description of Artificial Sequence: Synthetic oligonucleotide
acgggugacacuucugguc

SEQ ID NO: 2900400 - RNA, 19 nt, Artificial Sequence
  Description of Artificial Sequence: Synthetic oligonucleotide
guaaggaaucuaucaaaac

SEQ ID NO: 2900401 - RNA, 19 nt, Artificial Sequence
  Description of Artificial Sequence: Synthetic oligonucleotide
acuucuggucuucaguugu

SEQ ID NO: 2900402 - RNA, 19 nt, Artificial Sequence
  Description of Artificial Sequence: Synthetic oligonucleotide
gauaaacaacauccuccag

SEQ ID NO: 2900403 - RNA, 19 nt, Artificial Sequence
  Description of Artificial Sequence: Synthetic oligonucleotide
ucuucgcuggguaaggaau

SEQ ID NO: 2900404 - RNA, 19 nt, Artificial Sequence
  Description of Artificial Sequence: Synthetic oligonucleotide
ucuuuauuaauugcuguuu

SEQ ID NO: 2900405 - RNA, 19 nt, Artificial Sequence
  Description of Artificial Sequence: Synthetic oligonucleotide
uccagaagcaugucucccc

SEQ ID NO: 2900406 - RNA, 19 nt, Artificial Sequence
  Description of Artificial Sequence: Synthetic oligonucleotide
accacauugcuguaauacu

SEQ ID NO: 2900407 - RNA, 19 nt, Artificial Sequence
  Description of Artificial Sequence: Synthetic oligonucleotide
uuacaaaacugaucugcaa

SEQ ID NO: 2900408 - RNA, 19 nt, Artificial Sequence
  Description of Artificial Sequence: Synthetic oligonucleotide
uuauauaagcuagcagccu

SEQ ID NO: 2900409 - RNA, 19 nt, Artificial Sequence
  Description of Artificial Sequence: Synthetic oligonucleotide
aggcaggaggaccacauug

SEQ ID NO: 2900410 - RNA, 19 nt, Artificial Sequence
  Description of Artificial Sequence: Synthetic oligonucleotide
ggcguuacaaaacugaucu

SEQ ID NO: 2900411 - RNA, 19 nt, Artificial Sequence
  Description of Artificial Sequence: Synthetic oligonucleotide
aaccaguuauuuucucagu

SEQ ID NO: 2900412 - RNA, 19 nt, Artificial Sequence
  Description of Artificial Sequence: Synthetic oligonucleotide
cauccuccagacauguagc

SEQ ID NO: 2900413 - RNA, 19 nt, Artificial Sequence
  Description of Artificial Sequence: Synthetic oligonucleotide
ucggcaagcgcacuuugga

SEQ ID NO: 2900414 - RNA, 19 nt, Artificial Sequence
  Description of Artificial Sequence: Synthetic oligonucleotide
cuggguaaggaaucuauca

SEQ ID NO: 2900415 - RNA, 19 nt, Artificial Sequence
  Description of Artificial Sequence: Synthetic oligonucleotide
uucuguuguugcuaggaau

SEQ ID NO: 2900416 - RNA, 19 nt, Artificial Sequence
  Description of Artificial Sequence: Synthetic oligonucleotide
uucuagcuuauauaagcua

SEQ ID NO: 2900417 - RNA, 19 nt, Artificial Sequence
  Description of Artificial Sequence: Synthetic oligonucleotide
uagcuuauauaagcuagca

SEQ ID NO: 2900418 - RNA, 19 nt, Artificial Sequence
  Description of Artificial Sequence: Synthetic oligonucleotide
uuacuaaaagaggcaggag

SEQ ID NO: 2900419 - RNA, 19 nt, Artificial Sequence
  Description of Artificial Sequence: Synthetic oligonucleotide
guuauuuucucagucaccu

SEQ ID NO: 2900420 - RNA, 19 nt, Artificial Sequence
  Description of Artificial Sequence: Synthetic oligonucleotide
uuauuuucucagucaccug

SEQ ID NO: 2900421 - RNA, 19 nt, Artificial Sequence
  Description of Artificial Sequence: Synthetic oligonucleotide
uuucuguuguugcuaggaa

SEQ ID NO: 2900422 - RNA, 19 nt, Artificial Sequence
  Description of Artificial Sequence: Synthetic oligonucleotide
uguuucuguuguugcuagg

SEQ ID NO: 2900423 - RNA, 19 nt, Artificial Sequence
  Description of Artificial Sequence: Synthetic oligonucleotide
aggaaucuaucaaaacauc

SEQ ID NO: 2900424 - RNA, 19 nt, Artificial Sequence
  Description of Artificial Sequence: Synthetic oligonucleotide
ucgcuguucgugcaaucag

SEQ ID NO: 2900425 - RNA, 19 nt, Artificial Sequence
  Description of Artificial Sequence: Synthetic oligonucleotide
cuguaaagcagcugucgac

SEQ ID NO: 2900426 - RNA, 19 nt, Artificial Sequence
  Description of Artificial Sequence: Synthetic oligonucleotide
cuguuucuguuguugcuag

SEQ ID NO: 2900427 - RNA, 19 nt, Artificial Sequence
  Description of Artificial Sequence: Synthetic oligonucleotide
uugcuguaauacuccaaug

SEQ ID NO: 2900428 - RNA, 19 nt, Artificial Sequence
  Description of Artificial Sequence: Synthetic oligonucleotide
acuccaauggcguuacaaa

SEQ ID NO: 2900429 - RNA, 19 nt, Artificial Sequence
  Description of Artificial Sequence: Synthetic oligonucleotide
aucuuuuccagaagcaugu

SEQ ID NO: 2900430 - RNA, 19 nt, Artificial Sequence
  Description of Artificial Sequence: Synthetic oligonucleotide
gguuggucuuuauuaauug

SEQ ID NO: 2900431 - RNA, 19 nt, Artificial Sequence
  Description of Artificial Sequence: Synthetic oligonucleotide
ugugggauuuggcggguug

SEQ ID NO: 2900432 - RNA, 19 nt, Artificial Sequence
  Description of Artificial Sequence: Synthetic oligonucleotide
cuuuggaucuuuuccagaa

SEQ ID NO: 2900433 - RNA, 19 nt, Artificial Sequence
  Description of Artificial Sequence: Synthetic oligonucleotide
ucaaaacaucaauaucuuu

SEQ ID NO: 2900434 - RNA, 19 nt, Artificial Sequence
  Description of Artificial Sequence: Synthetic oligonucleotide
aaugucggcaagcgcacuu

SEQ ID NO: 2900435 - RNA, 19 nt, Artificial Sequence
  Description of Artificial Sequence: Synthetic oligonucleotide
aucaauaucuuucgcuguu

SEQ ID NO: 2900436 - RNA, 19 nt, Artificial Sequence
  Description of Artificial Sequence: Synthetic oligonucleotide
ugcuaggaaucuggaagcg

SEQ ID NO: 2900437 - RNA, 19 nt, Artificial Sequence
  Description of Artificial Sequence: Synthetic oligonucleotide
cuucaugauuuucuucuuc

SEQ ID NO: 2900438 - RNA, 19 nt, Artificial Sequence
  Description of Artificial Sequence: Synthetic oligonucleotide
ugacugugcaaugucggca

SEQ ID NO: 2900439 - RNA, 19 nt, Artificial Sequence
  Description of Artificial Sequence: Synthetic oligonucleotide
uguugcuaggaaucuggaa

SEQ ID NO: 2900440 - RNA, 19 nt, Artificial Sequence
  Description of Artificial Sequence: Synthetic oligonucleotide
aucugcaagcgaguucacc

SEQ ID NO: 2900441 - RNA, 19 nt, Artificial Sequence
  Description of Artificial Sequence: Synthetic oligonucleotide
agcuagcagccuguaaagc

SEQ ID NO: 2900442 - RNA, 19 nt, Artificial Sequence
  Description of Artificial Sequence: Synthetic oligonucleotide
guuacaaaacugaucugca

SEQ ID NO: 2900443 - RNA, 19 nt, Artificial Sequence
  Description of Artificial Sequence: Synthetic oligonucleotide
acacuucuggucuucaguu

SEQ ID NO: 2900444 - RNA, 19 nt, Artificial Sequence
  Description of Artificial Sequence: Synthetic oligonucleotide
uuagugcccuucaaccagu

SEQ ID NO: 2900445 - RNA, 19 nt, Artificial Sequence
  Description of Artificial Sequence: Synthetic oligonucleotide
cugggcauacucuucugug

SEQ ID NO: 2900446 - RNA, 19 nt, Artificial Sequence
  Description of Artificial Sequence: Synthetic oligonucleotide
uuguugcuaggaaucugga

SEQ ID NO: 2900447 - RNA, 19 nt, Artificial Sequence
  Description of Artificial Sequence: Synthetic oligonucleotide
gacauguagcagcuucaug

SEQ ID NO: 2900448 - RNA, 19 nt, Artificial Sequence
  Description of Artificial Sequence: Synthetic oligonucleotide
acauugcuguaauacucca

SEQ ID NO: 2900449 - RNA, 19 nt, Artificial Sequence
  Description of Artificial Sequence: Synthetic oligonucleotide
ugucuccccgauaaacaac

SEQ ID NO: 2900450 - RNA, 19 nt, Artificial Sequence
  Description of Artificial Sequence: Synthetic oligonucleotide
ucuggucuucaguugugac

SEQ ID NO: 2900451 - RNA, 19 nt, Artificial Sequence
  Description of Artificial Sequence: Synthetic oligonucleotide
aaacaacauccuccagaca

SEQ ID NO: 2900452 - RNA, 19 nt, Artificial Sequence
  Description of Artificial Sequence: Synthetic oligonucleotide
uggcguuacaaaacugauc

SEQ ID NO: 2900453 - RNA, 19 nt, Artificial Sequence
  Description of Artificial Sequence: Synthetic oligonucleotide
acuuuggaucuuuuccaga

SEQ ID NO: 2900454 - RNA, 19 nt, Artificial Sequence
  Description of Artificial Sequence: Synthetic oligonucleotide
caugucuccccgauaaaca

SEQ ID NO: 2900455 - RNA, 19 nt, Artificial Sequence
  Description of Artificial Sequence: Synthetic oligonucleotide
agcagcugucgacucuucg

SEQ ID NO: 2900456 - RNA, 19 nt, Artificial Sequence
  Description of Artificial Sequence: Synthetic oligonucleotide
uacuccaauggcguuacaa

SEQ ID NO: 2900457 - RNA, 19 nt, Artificial Sequence
  Description of Artificial Sequence: Synthetic oligonucleotide
uguuguugcuaggaaucug

SEQ ID NO: 2900458 - RNA, 19 nt, Artificial Sequence
  Description of Artificial Sequence: Synthetic oligonucleotide
uucaccgcguccugcagcu

SEQ ID NO: 2900459 - RNA, 19 nt, Artificial Sequence
  Description of Artificial Sequence: Synthetic oligonucleotide
uaauacuccaauggcguua

SEQ ID NO: 2900460 - RNA, 19 nt, Artificial Sequence
  Description of Artificial Sequence: Synthetic oligonucleotide
ggaaucuaucaaaacauca

SEQ ID NO: 2900461 - RNA, 19 nt, Artificial Sequence
  Description of Artificial Sequence: Synthetic oligonucleotide
aucuaucaaaacaucaaua

SEQ ID NO: 2900462 - RNA, 19 nt, Artificial Sequence
  Description of Artificial Sequence: Synthetic oligonucleotide
cuguucgugcaaucagugc

SEQ ID NO: 2900463 - RNA, 19 nt, Artificial Sequence
  Description of Artificial Sequence: Synthetic oligonucleotide
aggaaucuggaagcgacug

SEQ ID NO: 2900464 - RNA, 19 nt, Artificial Sequence
  Description of Artificial Sequence: Synthetic oligonucleotide
gaagcgacuggcuacgggu

SEQ ID NO: 2900465 - RNA, 19 nt, Artificial Sequence
  Description of Artificial Sequence: Synthetic oligonucleotide
caccuguuucuguuguugc

SEQ ID NO: 2900466 - RNA, 19 nt, Artificial Sequence
  Description of Artificial Sequence: Synthetic oligonucleotide
ugacacuucuggucuucag

SEQ ID NO: 2900467 - RNA, 19 nt, Artificial Sequence
  Description of Artificial Sequence: Synthetic oligonucleotide
uucgcuguucgugcaauca

SEQ ID NO: 2900468 - RNA, 19 nt, Artificial Sequence
  Description of Artificial Sequence: Synthetic oligonucleotide
uaggaaucuggaagcgacu

SEQ ID NO: 2900469 - RNA, 19 nt, Artificial Sequence
  Description of Artificial Sequence: Synthetic oligonucleotide
gggcauacucuucuguggg

SEQ ID NO: 2900470 - RNA, 19 nt, Artificial Sequence
  Description of Artificial Sequence: Synthetic oligonucleotide
guuucuguuguugcuagga

SEQ ID NO: 2900471 - RNA, 19 nt, Artificial Sequence
  Description of Artificial Sequence: Synthetic oligonucleotide
agaagcaugucuccccgau

SEQ ID NO: 2900472 - RNA, 19 nt, Artificial Sequence
  Description of Artificial Sequence: Synthetic oligonucleotide
uucaguugugacugugcaa

SEQ ID NO: 2900473 - RNA, 19 nt, Artificial Sequence
  Description of Artificial Sequence: Synthetic oligonucleotide
cguuacaaaacugaucugc

SEQ ID NO: 2900474 - RNA, 19 nt, Artificial Sequence
  Description of Artificial Sequence: Synthetic oligonucleotide
ccuccagacauguagcagc

SEQ ID NO: 2900475 - RNA, 19 nt, Artificial Sequence
  Description of Artificial Sequence: Synthetic oligonucleotide
augucuccccgauaaacaa

SEQ ID NO: 2900476 - RNA, 19 nt, Artificial Sequence
  Description of Artificial Sequence: Synthetic oligonucleotide
cugcaagcgaguucaccgc

SEQ ID NO: 2900477 - RNA, 19 nt, Artificial Sequence
  Description of Artificial Sequence: Synthetic oligonucleotide
aguugugacugugcaaugu

SEQ ID NO: 2900478 - RNA, 19 nt, Artificial Sequence
  Description of Artificial Sequence: Synthetic oligonucleotide
gugacugugcaaugucggc

SEQ ID NO: 2900479 - RNA, 19 nt, Artificial Sequence
  Description of Artificial Sequence: Synthetic oligonucleotide
ggaaucuggaagcgacugg

SEQ ID NO: 2900480 - RNA, 19 nt, Artificial Sequence
  Description of Artificial Sequence: Synthetic oligonucleotide
aaagcagcugucgacucuu

SEQ ID NO: 2900481 - RNA, 19 nt, Artificial Sequence
  Description of Artificial Sequence: Synthetic oligonucleotide
cuucaguugugacugugca

SEQ ID NO: 2900482 - RNA, 19 nt, Artificial Sequence
  Description of Artificial Sequence: Synthetic oligonucleotide
uuccagaagcaugucuccc

SEQ ID NO: 2900483 - RNA, 19 nt, Artificial Sequence
  Description of Artificial Sequence: Synthetic oligonucleotide
uccuccagacauguagcag

SEQ ID NO: 2900484 - RNA, 19 nt, Artificial Sequence
  Description of Artificial Sequence: Synthetic oligonucleotide
gacucuucgcuggguaagg

SEQ ID NO: 2900485 - RNA, 19 nt, Artificial Sequence
  Description of Artificial Sequence: Synthetic oligonucleotide
cuucgcuggguaaggaauc

SEQ ID NO: 2900486 - RNA, 19 nt, Artificial Sequence
  Description of Artificial Sequence: Synthetic oligonucleotide
ucaauaucuuucgcuguuc

SEQ ID NO: 2900487 - RNA, 19 nt, Artificial Sequence
  Description of Artificial Sequence: Synthetic oligonucleotide
uucaaccaguuauuuucuc

SEQ ID NO: 2900488 - RNA, 19 nt, Artificial Sequence
  Description of Artificial Sequence: Synthetic oligonucleotide
gacugugcaaugucggcaa

SEQ ID NO: 2900489 - RNA, 19 nt, Artificial Sequence
  Description of Artificial Sequence: Synthetic oligonucleotide
aucaaaacaucaauaucuu

SEQ ID NO: 2900490 - RNA, 19 nt, Artificial Sequence
  Description of Artificial Sequence: Synthetic oligonucleotide
gcugucgacucuucgcugg

SEQ ID NO: 2900491 - RNA, 19 nt, Artificial Sequence
  Description of Artificial Sequence: Synthetic oligonucleotide
uuuucucagucaccuguuu

SEQ ID NO: 2900492 - RNA, 19 nt, Artificial Sequence
  Description of Artificial Sequence: Synthetic oligonucleotide
accuguuucuguuguugcu

SEQ ID NO: 2900493 - RNA, 19 nt, Artificial Sequence
  Description of Artificial Sequence: Synthetic oligonucleotide
aggaccacauugcuguaau

SEQ ID NO: 2900494 - RNA, 19 nt, Artificial Sequence
  Description of Artificial Sequence: Synthetic oligonucleotide
ugucggcaagcgcacuuug

SEQ ID NO: 2900495 - RNA, 19 nt, Artificial Sequence
  Description of Artificial Sequence: Synthetic oligonucleotide
auauaagcuagcagccugu

SEQ ID NO: 2900496 - RNA, 19 nt, Artificial Sequence
  Description of Artificial Sequence: Synthetic oligonucleotide
gcuagcagccuguaaagca

SEQ ID NO: 2900497 - RNA, 19 nt, Artificial Sequence
  Description of Artificial Sequence: Synthetic oligonucleotide
cucuucugugggauuuggc

SEQ ID NO: 2900498 - RNA, 19 nt, Artificial Sequence
  Description of Artificial Sequence: Synthetic oligonucleotide
cuggaagcgacuggcuacg

SEQ ID NO: 2900499 - RNA, 19 nt, Artificial Sequence
  Description of Artificial Sequence: Synthetic oligonucleotide
gacacuucuggucuucagu

SEQ ID NO: 2900500 - RNA, 19 nt, Artificial Sequence
  Description of Artificial Sequence: Synthetic oligonucleotide
cuguuugaauguuacuaaa

SEQ ID NO: 2900501 - RNA, 19 nt, Artificial Sequence
  Description of Artificial Sequence: Synthetic oligonucleotide
ucuuucgcuguucgugcaa

SEQ ID NO: 2900502 - RNA, 19 nt, Artificial Sequence
  Description of Artificial Sequence: Synthetic oligonucleotide
auccuccagacauguagca

SEQ ID NO: 2900503 - RNA, 19 nt, Artificial Sequence
  Description of Artificial Sequence: Synthetic oligonucleotide
aauugcuguuugaauguua

SEQ ID NO: 2900504 - RNA, 19 nt, Artificial Sequence
  Description of Artificial Sequence: Synthetic oligonucleotide
cgcacuuuggaucuuuucc

SEQ ID NO: 2900505 - RNA, 19 nt, Artificial Sequence
  Description of Artificial Sequence: Synthetic oligonucleotide
acucuucugugggauuugg

SEQ ID NO: 2900506 - RNA, 19 nt, Artificial Sequence
  Description of Artificial Sequence: Synthetic oligonucleotide
guaaagcagcugucgacuc

SEQ ID NO: 2900507 - RNA, 19 nt, Artificial Sequence
  Description of Artificial Sequence: Synthetic oligonucleotide
caggaggaccacauugcug

SEQ ID NO: 2900508 - RNA, 19 nt, Artificial Sequence
  Description of Artificial Sequence: Synthetic oligonucleotide
cuucuagcuuauauaagcu

SEQ ID NO: 2900509 - RNA, 19 nt, Artificial Sequence
  Description of Artificial Sequence: Synthetic oligonucleotide
cuccaauggcguuacaaaa

SEQ ID NO: 2900510 - RNA, 19 nt, Artificial Sequence
  Description of Artificial Sequence: Synthetic oligonucleotide
ccacauugcuguaauacuc

SEQ ID NO: 2900511 - RNA, 19 nt, Artificial Sequence
  Description of Artificial Sequence: Synthetic oligonucleotide
cacuucuggucuucaguug

SEQ ID NO: 2900512 - RNA, 19 nt, Artificial Sequence
  Description of Artificial Sequence: Synthetic oligonucleotide
agcgaguucaccgcguccu

SEQ ID NO: 2900513 - RNA, 19 nt, Artificial Sequence
  Description of Artificial Sequence: Synthetic oligonucleotide
uugcuguuugaauguuacu

SEQ ID NO: 2900514 - RNA, 19 nt, Artificial Sequence
  Description of Artificial Sequence: Synthetic oligonucleotide
gguaaggaaucuaucaaaa

SEQ ID NO: 2900515 - RNA, 19 nt, Artificial Sequence
  Description of Artificial Sequence: Synthetic oligonucleotide
uacgggugacacuucuggu

SEQ ID NO: 2900516 - RNA, 19 nt, Artificial Sequence
  Description of Artificial Sequence: Synthetic oligonucleotide
auaagcuagcagccuguaa

SEQ ID NO: 2900517 - RNA, 19 nt, Artificial Sequence
  Description of Artificial Sequence: Synthetic oligonucleotide
guucgugcaaucagugcug

SEQ ID NO: 2900518 - RNA, 19 nt, Artificial Sequence
  Description of Artificial Sequence: Synthetic oligonucleotide
uucgugcaaucagugcugc

SEQ ID NO: 2900519 - RNA, 19 nt, Artificial Sequence
  Description of Artificial Sequence: Synthetic oligonucleotide
aaucuggaagcgacuggcu

SEQ ID NO: 2900520 - RNA, 19 nt, Artificial Sequence
  Description of Artificial Sequence: Synthetic oligonucleotide
gcuguuugaauguuacuaa

SEQ ID NO: 2900521 - RNA, 19 nt, Artificial Sequence
  Description of Artificial Sequence: Synthetic oligonucleotide
gucuccccgauaaacaaca

SEQ ID NO: 2900522 - RNA, 19 nt, Artificial Sequence
  Description of Artificial Sequence: Synthetic oligonucleotide
aucuggaagcgacuggcua

SEQ ID NO: 2900523 - RNA, 19 nt, Artificial Sequence
  Description of Artificial Sequence: Synthetic oligonucleotide
aacugaucugcaagcgagu

SEQ ID NO: 2900524 - RNA, 19 nt, Artificial Sequence
  Description of Artificial Sequence: Synthetic oligonucleotide
cuucuggucuucaguugug

SEQ ID NO: 2900525 - RNA, 19 nt, Artificial Sequence
  Description of Artificial Sequence: Synthetic oligonucleotide
gugggauuuggcggguugg

SEQ ID NO: 2900526 - RNA, 19 nt, Artificial Sequence
  Description of Artificial Sequence: Synthetic oligonucleotide
gcacuuuggaucuuuucca

SEQ ID NO: 2900527 - RNA, 19 nt, Artificial Sequence
  Description of Artificial Sequence: Synthetic oligonucleotide
ugcccuucaaccaguuauu

SEQ ID NO: 2900528 - RNA, 19 nt, Artificial Sequence
  Description of Artificial Sequence: Synthetic oligonucleotide
guucaccgcguccugcagc

SEQ ID NO: 2900529 - RNA, 19 nt, Artificial Sequence
  Description of Artificial Sequence: Synthetic oligonucleotide
gaguucaccgcguccugca

SEQ ID NO: 2900530 - RNA, 19 nt, Artificial Sequence
  Description of Artificial Sequence: Synthetic oligonucleotide
ggcaagcgcacuuuggauc

SEQ ID NO: 2900531 - RNA, 19 nt, Artificial Sequence
  Description of Artificial Sequence: Synthetic oligonucleotide
gcagcugucgacucuucgc

SEQ ID NO: 2900532 - RNA, 19 nt, Artificial Sequence
  Description of Artificial Sequence: Synthetic oligonucleotide
acaacauccuccagacaug

SEQ ID NO: 2900533 - RNA, 19 nt, Artificial Sequence
  Description of Artificial Sequence: Synthetic oligonucleotide
cuccccgauaaacaacauc

SEQ ID NO: 2900534 - RNA, 19 nt, Artificial Sequence
  Description of Artificial Sequence: Synthetic oligonucleotide
aguucaccgcguccugcag

SEQ ID NO: 2900535 - RNA, 19 nt, Artificial Sequence
  Description of Artificial Sequence: Synthetic oligonucleotide
cugaucugcaagcgaguuc

SEQ ID NO: 2900536 - RNA, 19 nt, Artificial Sequence
  Description of Artificial Sequence: Synthetic oligonucleotide
ggguaaggaaucuaucaaa

SEQ ID NO: 2900537 - RNA, 19 nt, Artificial Sequence
  Description of Artificial Sequence: Synthetic oligonucleotide
uucgcuggguaaggaaucu

SEQ ID NO: 2900538 - RNA, 19 nt, Artificial Sequence
  Description of Artificial Sequence: Synthetic oligonucleotide
aucuuucgcuguucgugca

SEQ ID NO: 2900539 - RNA, 19 nt, Artificial Sequence
  Description of Artificial Sequence: Synthetic oligonucleotide
aagcgacuggcuacgggug

SEQ ID NO: 2900540 - RNA, 19 nt, Artificial Sequence
  Description of Artificial Sequence: Synthetic oligonucleotide
ucgacucuucgcuggguaa

SEQ ID NO: 2900541 - RNA, 19 nt, Artificial Sequence
  Description of Artificial Sequence: Synthetic oligonucleotide
acugugcaaugucggcaag

SEQ ID NO: 2900542 - RNA, 19 nt, Artificial Sequence
  Description of Artificial Sequence: Synthetic oligonucleotide
ccagacauguagcagcuuc

SEQ ID NO: 2900543 - RNA, 19 nt, Artificial Sequence
  Description of Artificial Sequence: Synthetic oligonucleotide
gugcccuucaaccaguuau

SEQ ID NO: 2900544 - RNA, 19 nt, Artificial Sequence
  Description of Artificial Sequence: Synthetic oligonucleotide
auacucuucugugggauuu

SEQ ID NO: 2900545 - RNA, 19 nt, Artificial Sequence
  Description of Artificial Sequence: Synthetic oligonucleotide
cagacauguagcagcuuca

SEQ ID NO: 2900546 - RNA, 19 nt, Artificial Sequence
  Description of Artificial Sequence: Synthetic oligonucleotide
cagcuucaugauuuucuuc

SEQ ID NO: 2900547 - RNA, 19 nt, Artificial Sequence
  Description of Artificial Sequence: Synthetic oligonucleotide
gucuuuauuaauugcuguu

SEQ ID NO: 2900548 - RNA, 19 nt, Artificial Sequence
  Description of Artificial Sequence: Synthetic oligonucleotide
agcugucgacucuucgcug

SEQ ID NO: 2900549 - RNA, 19 nt, Artificial Sequence
  Description of Artificial Sequence: Synthetic oligonucleotide
gccuguaaagcagcugucg

SEQ ID NO: 2900550 - RNA, 19 nt, Artificial Sequence
  Description of Artificial Sequence: Synthetic oligonucleotide
ggaagcgacuggcuacggg

SEQ ID NO: 2900551 - RNA, 19 nt, Artificial Sequence
  Description of Artificial Sequence: Synthetic oligonucleotide
uaauugcuguuugaauguu

SEQ ID NO: 2900552 - RNA, 19 nt, Artificial Sequence
  Description of Artificial Sequence: Synthetic oligonucleotide
uauaagcuagcagccugua

SEQ ID NO: 2900553 - RNA, 19 nt, Artificial Sequence
  Description of Artificial Sequence: Synthetic oligonucleotide
ccagaagcaugucuccccg

SEQ ID NO: 2900554 - RNA, 19 nt, Artificial Sequence
  Description of Artificial Sequence: Synthetic oligonucleotide
caccgcguccugcagcugc

SEQ ID NO: 2900555 - RNA, 19 nt, Artificial Sequence
  Description of Artificial Sequence: Synthetic oligonucleotide
cuuuuccagaagcaugucu

SEQ ID NO: 2900556 - RNA, 19 nt, Artificial Sequence
  Description of Artificial Sequence: Synthetic oligonucleotide
cagucaccuguuucuguug

SEQ ID NO: 2900557 - RNA, 19 nt, Artificial Sequence
  Description of Artificial Sequence: Synthetic oligonucleotide
ggcggguuggucuuuauua

SEQ ID NO: 2900558 - RNA, 19 nt, Artificial Sequence
  Description of Artificial Sequence: Synthetic oligonucleotide
gucggcaagcgcacuuugg

SEQ ID NO: 2900559 - RNA, 19 nt, Artificial Sequence
  Description of Artificial Sequence: Synthetic oligonucleotide
uacucuucugugggauuug

SEQ ID NO: 2900560 - RNA, 19 nt, Artificial Sequence
  Description of Artificial Sequence: Synthetic oligonucleotide
uuucgcuguucgugcaauc

SEQ ID NO: 2900561 - RNA, 19 nt, Artificial Sequence
  Description of Artificial Sequence: Synthetic oligonucleotide
gucuucaguugugacugug

SEQ ID NO: 2900562 - RNA, 19 nt, Artificial Sequence
  Description of Artificial Sequence: Synthetic oligonucleotide
ggucuuuauuaauugcugu

SEQ ID NO: 2900563 - RNA, 19 nt, Artificial Sequence
  Description of Artificial Sequence: Synthetic oligonucleotide
cuucaaccaguuauuuucu

SEQ ID NO: 2900564 - RNA, 19 nt, Artificial Sequence
  Description of Artificial Sequence: Synthetic oligonucleotide
acuggcuacgggugacacu

SEQ ID NO: 2900565 - RNA, 19 nt, Artificial Sequence
  Description of Artificial Sequence: Synthetic oligonucleotide
auggcguuacaaaacugau

SEQ ID NO: 2900566 - RNA, 19 nt, Artificial Sequence
  Description of Artificial Sequence: Synthetic oligonucleotide
caguugugacugugcaaug

SEQ ID NO: 2900567 - RNA, 19 nt, Artificial Sequence
  Description of Artificial Sequence: Synthetic oligonucleotide
acugaucugcaagcgaguu

SEQ ID NO: 2900568 - RNA, 19 nt, Artificial Sequence
  Description of Artificial Sequence: Synthetic oligonucleotide
caagcgaguucaccgcguc

SEQ ID NO: 2900569 - RNA, 19 nt, Artificial Sequence
  Description of Artificial Sequence: Synthetic oligonucleotide
agcgacuggcuacggguga

SEQ ID NO: 2900570 - RNA, 19 nt, Artificial Sequence
  Description of Artificial Sequence: Synthetic oligonucleotide
cauugcuguaauacuccaa

SEQ ID NO: 2900571 - RNA, 19 nt, Artificial Sequence
  Description of Artificial Sequence: Synthetic oligonucleotide
cagccuguaaagcagcugu

SEQ ID NO: 2900572 - RNA, 19 nt, Artificial Sequence
  Description of Artificial Sequence: Synthetic oligonucleotide
gugcaaugucggcaagcgc

SEQ ID NO: 2900573 - RNA, 19 nt, Artificial Sequence
  Description of Artificial Sequence: Synthetic oligonucleotide
gugcaaucagugcugcaaa

SEQ ID NO: 2900574 - RNA, 19 nt, Artificial Sequence
  Description of Artificial Sequence: Synthetic oligonucleotide
ugggauuuggcggguuggu

SEQ ID NO: 2900575 - RNA, 19 nt, Artificial Sequence
  Description of Artificial Sequence: Synthetic oligonucleotide
agccuguaaagcagcuguc

SEQ ID NO: 2900576 - RNA, 19 nt, Artificial Sequence
  Description of Artificial Sequence: Synthetic oligonucleotide
ucuuuuccagaagcauguc

SEQ ID NO: 2900577 - RNA, 19 nt, Artificial Sequence
  Description of Artificial Sequence: Synthetic oligonucleotide
caucaauaucuuucgcugu

SEQ ID NO: 2900578 - RNA, 19 nt, Artificial Sequence
  Description of Artificial Sequence: Synthetic oligonucleotide
agacauguagcagcuucau

SEQ ID NO: 2900579 - RNA, 19 nt, Artificial Sequence
  Description of Artificial Sequence: Synthetic oligonucleotide
ggauuuggcggguuggucu

SEQ ID NO: 2900580 - RNA, 19 nt, Artificial Sequence
  Description of Artificial Sequence: Synthetic oligonucleotide
cuggucuucaguugugacu

SEQ ID NO: 2900581 - RNA, 19 nt, Artificial Sequence
  Description of Artificial Sequence: Synthetic oligonucleotide
cccgauaaacaacauccuc

SEQ ID NO: 2900582 - RNA, 19 nt, Artificial Sequence
  Description of Artificial Sequence: Synthetic oligonucleotide
gcuguucgugcaaucagug

SEQ ID NO: 2900583 - RNA, 19 nt, Artificial Sequence
  Description of Artificial Sequence: Synthetic oligonucleotide
cgauaaacaacauccucca

SEQ ID NO: 2900584 - RNA, 19 nt, Artificial Sequence
  Description of Artificial Sequence: Synthetic oligonucleotide
gcaugucuccccgauaaac

SEQ ID NO: 2900585 - RNA, 19 nt, Artificial Sequence
  Description of Artificial Sequence: Synthetic oligonucleotide
uggaagcgacuggcuacgg

SEQ ID NO: 2900586 - RNA, 19 nt, Artificial Sequence
  Description of Artificial Sequence: Synthetic oligonucleotide
ucuccccgauaaacaacau

SEQ ID NO: 2900587 - RNA, 19 nt, Artificial Sequence
  Description of Artificial Sequence: Synthetic oligonucleotide
gacuggcuacgggugacac

SEQ ID NO: 2900588 - RNA, 19 nt, Artificial Sequence
  Description of Artificial Sequence: Synthetic oligonucleotide
ucgugcaaucagugcugca

SEQ ID NO: 2900589 - RNA, 19 nt, Artificial Sequence
  Description of Artificial Sequence: Synthetic oligonucleotide
aagcagcugucgacucuuc

SEQ ID NO: 2900590 - RNA, 19 nt, Artificial Sequence
  Description of Artificial Sequence: Synthetic oligonucleotide
gaagcaugucuccccgaua

SEQ ID NO: 2900591 - RNA, 19 nt, Artificial Sequence
  Description of Artificial Sequence: Synthetic oligonucleotide
cucuucgcuggguaaggaa

SEQ ID NO: 2900592 - RNA, 19 nt, Artificial Sequence
  Description of Artificial Sequence: Synthetic oligonucleotide
uggcggguuggucuuuauu

SEQ ID NO: 2900593 - RNA, 19 nt, Artificial Sequence
  Description of Artificial Sequence: Synthetic oligonucleotide
cauguagcagcuucaugau

SEQ ID NO: 2900594 - RNA, 19 nt, Artificial Sequence
  Description of Artificial Sequence: Synthetic oligonucleotide
gauuuggcggguuggucuu

SEQ ID NO: 2900595 - RNA, 19 nt, Artificial Sequence
  Description of Artificial Sequence: Synthetic oligonucleotide
ucugugggauuuggcgggu

SEQ ID NO: 2900596 - RNA, 19 nt, Artificial Sequence
  Description of Artificial Sequence: Synthetic oligonucleotide
agcaugucuccccgauaaa

SEQ ID NO: 2900597 - RNA, 19 nt, Artificial Sequence
  Description of Artificial Sequence: Synthetic oligonucleotide
aagcgcacuuuggaucuuu

SEQ ID NO: 2900598 - RNA, 19 nt, Artificial Sequence
  Description of Artificial Sequence: Synthetic oligonucleotide
gucgacucuucgcugggua

SEQ ID NO: 2900599 - RNA, 19 nt, Artificial Sequence
  Description of Artificial Sequence: Synthetic oligonucleotide
gaggaccacauugcuguaa

SEQ ID NO: 2900600 - RNA, 19 nt, Artificial Sequence
  Description of Artificial Sequence: Synthetic oligonucleotide
gcaagcgcacuuuggaucu

SEQ ID NO: 2900601 - RNA, 19 nt, Artificial Sequence
  Description of Artificial Sequence: Synthetic oligonucleotide
gcguuacaaaacugaucug

SEQ ID NO: 2900602 - RNA, 19 nt, Artificial Sequence
  Description of Artificial Sequence: Synthetic oligonucleotide
ccuguaaagcagcugucga

SEQ ID NO: 2900603 - RNA, 19 nt, Artificial Sequence
  Description of Artificial Sequence: Synthetic oligonucleotide
acucuucgcuggguaagga

SEQ ID NO: 2900604 - RNA, 19 nt, Artificial Sequence
  Description of Artificial Sequence: Synthetic oligonucleotide
uuuggcggguuggucuuua

SEQ ID NO: 2900605 - RNA, 19 nt, Artificial Sequence
  Description of Artificial Sequence: Synthetic oligonucleotide
agugcccuucaaccaguua

SEQ ID NO: 2900606 - RNA, 19 nt, Artificial Sequence
  Description of Artificial Sequence: Synthetic oligonucleotide
uagugcccuucaaccaguu

SEQ ID NO: 2900607 - RNA, 19 nt, Artificial Sequence
  Description of Artificial Sequence: Synthetic oligonucleotide
guaauacuccaauggcguu

SEQ ID NO: 2900608 - RNA, 19 nt, Artificial Sequence
  Description of Artificial Sequence: Synthetic oligonucleotide
cuccagacauguagcagcu

SEQ ID NO: 2900609 - RNA, 19 nt, Artificial Sequence
  Description of Artificial Sequence: Synthetic oligonucleotide
cuggcuacgggugacacuu

SEQ ID NO: 2900610 - RNA, 19 nt, Artificial Sequence
  Description of Artificial Sequence: Synthetic oligonucleotide
ggcauacucuucuguggga

SEQ ID NO: 2900611 - RNA, 19 nt, Artificial Sequence
  Description of Artificial Sequence: Synthetic oligonucleotide
accgcguccugcagcugcg

SEQ ID NO: 2900612 - RNA, 19 nt, Artificial Sequence
  Description of Artificial Sequence: Synthetic oligonucleotide
cagcugucgacucuucgcu

SEQ ID NO: 2900613 - RNA, 19 nt, Artificial Sequence
  Description of Artificial Sequence: Synthetic oligonucleotide
gcaaugucggcaagcgcac

SEQ ID NO: 2900614 - RNA, 19 nt, Artificial Sequence
  Description of Artificial Sequence: Synthetic oligonucleotide
gcuggguaaggaaucuauc

SEQ ID NO: 2900615 - RNA, 19 nt, Artificial Sequence
  Description of Artificial Sequence: Synthetic oligonucleotide
ccaauggcguuacaaaacu

SEQ ID NO: 2900616 - RNA, 19 nt, Artificial Sequence
  Description of Artificial Sequence: Synthetic oligonucleotide
gcggguuggucuuuauuaa

SEQ ID NO: 2900617 - RNA, 19 nt, Artificial Sequence
  Description of Artificial Sequence: Synthetic oligonucleotide
gaucugcaagcgaguucac

SEQ ID NO: 2900618 - RNA, 19 nt, Artificial Sequence
  Description of Artificial Sequence: Synthetic oligonucleotide
aacauccuccagacaugua

SEQ ID NO: 2900619 - RNA, 19 nt, Artificial Sequence
  Description of Artificial Sequence: Synthetic oligonucleotide
gcuaggaaucuggaagcga

SEQ ID NO: 2900620 - RNA, 19 nt, Artificial Sequence
  Description of Artificial Sequence: Synthetic oligonucleotide
cagaagcaugucuccccga

SEQ ID NO: 2900621 - RNA, 19 nt, Artificial Sequence
  Description of Artificial Sequence: Synthetic oligonucleotide
auacuccaauggcguuaca

SEQ ID NO: 2900622 - RNA, 19 nt, Artificial Sequence
  Description of Artificial Sequence: Synthetic oligonucleotide
caacauccuccagacaugu

SEQ ID NO: 2900623 - RNA, 19 nt, Artificial Sequence
  Description of Artificial Sequence: Synthetic oligonucleotide
gugacacuucuggucuuca

SEQ ID NO: 2900624 - RNA, 19 nt, Artificial Sequence
  Description of Artificial Sequence: Synthetic oligonucleotide
ggaucuuuuccagaagcau

SEQ ID NO: 2900625 - RNA, 19 nt, Artificial Sequence
  Description of Artificial Sequence: Synthetic oligonucleotide
augucggcaagcgcacuuu

SEQ ID NO: 2900626 - RNA, 19 nt, Artificial Sequence
  Description of Artificial Sequence: Synthetic oligonucleotide
uuggcggguuggucuuuau

SEQ ID NO: 2900627 - RNA, 19 nt, Artificial Sequence
  Description of Artificial Sequence: Synthetic oligonucleotide
ggugacacuucuggucuuc

SEQ ID NO: 2900628 - RNA, 19 nt, Artificial Sequence
  Description of Artificial Sequence: Synthetic oligonucleotide
ucgcuggguaaggaaucua

SEQ ID NO: 2900629 - RNA, 19 nt, Artificial Sequence
  Description of Artificial Sequence: Synthetic oligonucleotide
gcagccuguaaagcagcug

SEQ ID NO: 2900630 - RNA, 19 nt, Artificial Sequence
  Description of Artificial Sequence: Synthetic oligonucleotide
uggcuacgggugacacuuc

SEQ ID NO: 2900631 - RNA, 19 nt, Artificial Sequence
  Description of Artificial Sequence: Synthetic oligonucleotide
cuguuguugcuaggaaucu

SEQ ID NO: 2900632 - RNA, 19 nt, Artificial Sequence
  Description of Artificial Sequence: Synthetic oligonucleotide
gcuacgggugacacuucug

SEQ ID NO: 2900633 - RNA, 19 nt, Artificial Sequence
  Description of Artificial Sequence: Synthetic oligonucleotide
guagcagcuucaugauuuu

SEQ ID NO: 2900634 - RNA, 19 nt, Artificial Sequence
  Description of Artificial Sequence: Synthetic oligonucleotide
gcguccugcagcugcguga

SEQ ID NO: 2900635 - RNA, 19 nt, Artificial Sequence
  Description of Artificial Sequence: Synthetic oligonucleotide
gcgcacuuuggaucuuuuc

SEQ ID NO: 2900636 - RNA, 19 nt, Artificial Sequence
  Description of Artificial Sequence: Synthetic oligonucleotide
uccagacauguagcagcuu

SEQ ID NO: 2900637 - RNA, 19 nt, Artificial Sequence
  Description of Artificial Sequence: Synthetic oligonucleotide
cauacucuucugugggauu

SEQ ID NO: 2900638 - RNA, 19 nt, Artificial Sequence
  Description of Artificial Sequence: Synthetic oligonucleotide
gcugggcauacucuucugu

SEQ ID NO: 2900639 - RNA, 19 nt, Artificial Sequence
  Description of Artificial Sequence: Synthetic oligonucleotide
gggauuuggcggguugguc

SEQ ID NO: 2900640 - RNA, 19 nt, Artificial Sequence
  Description of Artificial Sequence: Synthetic oligonucleotide
gcgaguucaccgcguccug

SEQ ID NO: 2900641 - RNA, 19 nt, Artificial Sequence
  Description of Artificial Sequence: Synthetic oligonucleotide
ggguuggucuuuauuaauu

SEQ ID NO: 2900642 - RNA, 19 nt, Artificial Sequence
  Description of Artificial Sequence: Synthetic oligonucleotide
cgugcaaucagugcugcaa

SEQ ID NO: 2900643 - RNA, 19 nt, Artificial Sequence
  Description of Artificial Sequence: Synthetic oligonucleotide
cgacucuucgcuggguaag

SEQ ID NO: 2900644 - RNA, 19 nt, Artificial Sequence
  Description of Artificial Sequence: Synthetic oligonucleotide
ccuguuucuguuguugcua

SEQ ID NO: 2900645 - RNA, 19 nt, Artificial Sequence
  Description of Artificial Sequence: Synthetic oligonucleotide
ggcuacgggugacacuucu

SEQ ID NO: 2900646 - RNA, 19 nt, Artificial Sequence
  Description of Artificial Sequence: Synthetic oligonucleotide
cuuucgcuguucgugcaau

SEQ ID NO: 2900647 - RNA, 19 nt, Artificial Sequence
  Description of Artificial Sequence: Synthetic oligonucleotide
ucaccgcguccugcagcug

SEQ ID NO: 2900648 - RNA, 19 nt, Artificial Sequence
  Description of Artificial Sequence: Synthetic oligonucleotide
gcauacucuucugugggau

SEQ ID NO: 2900649 - RNA, 19 nt, Artificial Sequence
  Description of Artificial Sequence: Synthetic oligonucleotide
auuuggcggguuggucuuu

SEQ ID NO: 2900650 - RNA, 19 nt, Artificial Sequence
  Description of Artificial Sequence: Synthetic oligonucleotide
agcgcacuuuggaucuuuu

SEQ ID NO: 2900651 - RNA, 19 nt, Artificial Sequence
  Description of Artificial Sequence: Synthetic oligonucleotide
gaggcaggaggaccacauu

SEQ ID NO: 2900652 - RNA, 19 nt, Artificial Sequence
  Description of Artificial Sequence: Synthetic oligonucleotide
ggaccacauugcuguaaua

SEQ ID NO: 2900653 - RNA, 19 nt, Artificial Sequence
  Description of Artificial Sequence: Synthetic oligonucleotide
gcgacuggcuacgggugac

SEQ ID NO: 2900654 - RNA, 19 nt, Artificial Sequence
  Description of Artificial Sequence: Synthetic oligonucleotide
cgaguucaccgcguccugc

SEQ ID NO: 2900655 - RNA, 19 nt, Artificial Sequence
  Description of Artificial Sequence: Synthetic oligonucleotide
ggaggaccacauugcugua

SEQ ID NO: 2900656 - RNA, 19 nt, Artificial Sequence
  Description of Artificial Sequence: Synthetic oligonucleotide
cgggugacacuucuggucu

SEQ ID NO: 2900657 - RNA, 19 nt, Artificial Sequence
  Description of Artificial Sequence: Synthetic oligonucleotide
ccccgauaaacaacauccu

SEQ ID NO: 2900658 - RNA, 19 nt, Artificial Sequence
  Description of Artificial Sequence: Synthetic oligonucleotide
ggucuucaguugugacugu

SEQ ID NO: 2900659 - RNA, 19 nt, Artificial Sequence
  Description of Artificial Sequence: Synthetic oligonucleotide
caaugucggcaagcgcacu

SEQ ID NO: 2900660 - RNA, 19 nt, Artificial Sequence
  Description of Artificial Sequence: Synthetic oligonucleotide
gcaagcgaguucaccgcgu

SEQ ID NO: 2900661 - RNA, 19 nt, Artificial Sequence
  Description of Artificial Sequence: Synthetic oligonucleotide
cgcuguucgugcaaucagu

SEQ ID NO: 2900662 - RNA, 19 nt, Artificial Sequence
  Description of Artificial Sequence: Synthetic oligonucleotide
cccuucaaccaguuauuuu

SEQ ID NO: 2900663 - RNA, 19 nt, Artificial Sequence
  Description of Artificial Sequence: Synthetic oligonucleotide
cgcuggguaaggaaucuau

SEQ ID NO: 2900664 - RNA, 19 nt, Artificial Sequence
  Description of Artificial Sequence: Synthetic oligonucleotide
cgcguccugcagcugcgug

SEQ ID NO: 2900665 - RNA, 19 nt, Artificial Sequence
  Description of Artificial Sequence: Synthetic oligonucleotide
gcccuucaaccaguuauuu

SEQ ID NO: 2900666 - RNA, 19 nt, Artificial Sequence
  Description of Artificial Sequence: Synthetic oligonucleotide
cggguuggucuuuauuaau

SEQ ID NO: 2900667 - RNA, 19 nt, Artificial Sequence
  Description of Artificial Sequence: Synthetic oligonucleotide
gggugacacuucuggucuu

SEQ ID NO: 2900668 - RNA, 19 nt, Artificial Sequence
  Description of Artificial Sequence: Synthetic oligonucleotide
cggcaagcgcacuuuggau

SEQ ID NO: 2900669 - RNA, 19 nt, Artificial Sequence
  Description of Artificial Sequence: Synthetic oligonucleotide
cugugggauuuggcggguu

SEQ ID NO: 2900670 - RNA, 19 nt, Artificial Sequence
  Description of Artificial Sequence: Synthetic oligonucleotide
caagcgcacuuuggaucuu

SEQ ID NO: 2900671 - RNA, 19 nt, Artificial Sequence
  Description of Artificial Sequence: Synthetic oligonucleotide
cgacuggcuacgggugaca

SEQ ID NO: 2900672 - RNA, 19 nt, Artificial Sequence
  Description of Artificial Sequence: Synthetic oligonucleotide
ccgcguccugcagcugcgu

SEQ ID NO: 2900673 - RNA, 19 nt, Artificial Sequence
  Description of Artificial Sequence: Synthetic oligonucleotide
uuguguuacaccgugagcg

SEQ ID NO: 2900674 - RNA, 19 nt, Artificial Sequence
  Description of Artificial Sequence: Synthetic oligonucleotide
ucugcuuuaggucugaguc

SEQ ID NO: 2900675 - RNA, 19 nt, Artificial Sequence
  Description of Artificial Sequence: Synthetic oligonucleotide
uguuagaauuuucugauuc

SEQ ID NO: 2900676 - RNA, 19 nt, Artificial Sequence
  Description of Artificial Sequence: Synthetic oligonucleotide
uucaccacuguuaugagcu

SEQ ID NO: 2900677 - RNA, 19 nt, Artificial Sequence
  Description of Artificial Sequence: Synthetic oligonucleotide
aaugcgaaugccugaugcg

SEQ ID NO: 2900678 - RNA, 19 nt, Artificial Sequence
  Description of Artificial Sequence: Synthetic oligonucleotide
uaugggaucuccuucagcu

SEQ ID NO: 2900679 - RNA, 19 nt, Artificial Sequence
  Description of Artificial Sequence: Synthetic oligonucleotide
ugagucuccacuuuagugu

SEQ ID NO: 2900680 - RNA, 19 nt, Artificial Sequence
  Description of Artificial Sequence: Synthetic oligonucleotide
caucaggacuucuugaacg

SEQ ID NO: 2900681 - RNA, 19 nt, Artificial Sequence
  Description of Artificial Sequence: Synthetic oligonucleotide
gagaucugugucuggaucg

SEQ ID NO: 2900682 - RNA, 19 nt, Artificial Sequence
  Description of Artificial Sequence: Synthetic oligonucleotide
uucugucgccuuaagacgg

SEQ ID NO: 2900683 - RNA, 19 nt, Artificial Sequence
  Description of Artificial Sequence: Synthetic oligonucleotide
uguuaugagcuuuccuucg

SEQ ID NO: 2900684 - RNA, 19 nt, Artificial Sequence
  Description of Artificial Sequence: Synthetic oligonucleotide
uguaacuccguggagaaug

SEQ ID NO: 2900685 - RNA, 19 nt, Artificial Sequence
  Description of Artificial Sequence: Synthetic oligonucleotide
gaaugcgaaugccugaugc

SEQ ID NO: 2900686 - RNA, 19 nt, Artificial Sequence
  Description of Artificial Sequence: Synthetic oligonucleotide
uccacuuuaguguauggga

SEQ ID NO: 2900687 - RNA, 19 nt, Artificial Sequence
  Description of Artificial Sequence: Synthetic oligonucleotide
uuaggucugagucuucacc

SEQ ID NO: 2900688 - RNA, 19 nt, Artificial Sequence
  Description of Artificial Sequence: Synthetic oligonucleotide
uucugauucacuaccgcug

SEQ ID NO: 2900689 - RNA, 19 nt, Artificial Sequence
  Description of Artificial Sequence: Synthetic oligonucleotide
aguguaugggaucuccuuc

SEQ ID NO: 2900690 - RNA, 19 nt, Artificial Sequence
  Description of Artificial Sequence: Synthetic oligonucleotide
uuuccuucgccucauuggc

SEQ ID NO: 2900691 - RNA, 19 nt, Artificial Sequence
  Description of Artificial Sequence: Synthetic oligonucleotide
uacaccgugagcgugaucu

SEQ ID NO: 2900692 - RNA, 19 nt, Artificial Sequence
  Description of Artificial Sequence: Synthetic oligonucleotide
cuuuccuucgccucauugg

SEQ ID NO: 2900693 - RNA, 19 nt, Artificial Sequence
  Description of Artificial Sequence: Synthetic oligonucleotide
acuguuaugagcuuuccuu

SEQ ID NO: 2900694 - RNA, 19 nt, Artificial Sequence
  Description of Artificial Sequence: Synthetic oligonucleotide
ucuugaacgagaucugugu

SEQ ID NO: 2900695 - RNA, 19 nt, Artificial Sequence
  Description of Artificial Sequence: Synthetic oligonucleotide
gucauugucacugccauag

SEQ ID NO: 2900696 - RNA, 19 nt, Artificial Sequence
  Description of Artificial Sequence: Synthetic oligonucleotide
uuuucugauucacuaccgc

SEQ ID NO: 2900697 - RNA, 19 nt, Artificial Sequence
  Description of Artificial Sequence: Synthetic oligonucleotide
uggagaaugcgaaugccug

SEQ ID NO: 2900698 - RNA, 19 nt, Artificial Sequence
  Description of Artificial Sequence: Synthetic oligonucleotide
ucugauucacuaccgcugc

SEQ ID NO: 2900699 - RNA, 19 nt, Artificial Sequence
  Description of Artificial Sequence: Synthetic oligonucleotide
cuucugucgccuuaagacg

SEQ ID NO: 2900700 - RNA, 19 nt, Artificial Sequence
  Description of Artificial Sequence: Synthetic oligonucleotide
gacugggucacccugaguc

SEQ ID NO: 2900701 - RNA, 19 nt, Artificial Sequence
  Description of Artificial Sequence: Synthetic oligonucleotide
uuccauagcucuucuuugg

SEQ ID NO: 2900702 - RNA, 19 nt, Artificial Sequence
  Description of Artificial Sequence: Synthetic oligonucleotide
uguuguuaggauccacuug

SEQ ID NO: 2900703 - RNA, 19 nt, Artificial Sequence
  Description of Artificial Sequence: Synthetic oligonucleotide
gaauuuucugauucacuac

SEQ ID NO: 2900704 - RNA, 19 nt, Artificial Sequence
  Description of Artificial Sequence: Synthetic oligonucleotide
uuuaguguaugggaucucc

SEQ ID NO: 2900705 - RNA, 19 nt, Artificial Sequence
  Description of Artificial Sequence: Synthetic oligonucleotide
uuucugauucacuaccgcu

SEQ ID NO: 2900706 - RNA, 19 nt, Artificial Sequence
  Description of Artificial Sequence: Synthetic oligonucleotide
gacggcuucccacugaggc

SEQ ID NO: 2900707 - RNA, 19 nt, Artificial Sequence
  Description of Artificial Sequence: Synthetic oligonucleotide
aauccaccaugucauucuc

SEQ ID NO: 2900708 - RNA, 19 nt, Artificial Sequence
  Description of Artificial Sequence: Synthetic oligonucleotide
ucauucuccugccuuauuc

SEQ ID NO: 2900709 - RNA, 19 nt, Artificial Sequence
  Description of Artificial Sequence: Synthetic oligonucleotide
uuacggugcucucuguuag

SEQ ID NO: 2900710 - RNA, 19 nt, Artificial Sequence
  Description of Artificial Sequence: Synthetic oligonucleotide
uggaugugcuuccauagcu

SEQ ID NO: 2900711 - RNA, 19 nt, Artificial Sequence
  Description of Artificial Sequence: Synthetic oligonucleotide
uuaggauccacuuggguuu

SEQ ID NO: 2900712 - RNA, 19 nt, Artificial Sequence
  Description of Artificial Sequence: Synthetic oligonucleotide
uggacaucaggacuucuug

SEQ ID NO: 2900713 - RNA, 19 nt, Artificial Sequence
  Description of Artificial Sequence: Synthetic oligonucleotide
ucgccuguuguuaggaucc

SEQ ID NO: 2900714 - RNA, 19 nt, Artificial Sequence
  Description of Artificial Sequence: Synthetic oligonucleotide
acugccauaggagagguug

SEQ ID NO: 2900715 - RNA, 19 nt, Artificial Sequence
  Description of Artificial Sequence: Synthetic oligonucleotide
uagaauuuucugauucacu

SEQ ID NO: 2900716 - RNA, 19 nt, Artificial Sequence
  Description of Artificial Sequence: Synthetic oligonucleotide
ugggaucuccuucagcugc

SEQ ID NO: 2900717 - RNA, 19 nt, Artificial Sequence
  Description of Artificial Sequence: Synthetic oligonucleotide
ugagucuucaccacuguua

SEQ ID NO: 2900718 - RNA, 19 nt, Artificial Sequence
  Description of Artificial Sequence: Synthetic oligonucleotide
uucuugaacgagaucugug

SEQ ID NO: 2900719 - RNA, 19 nt, Artificial Sequence
  Description of Artificial Sequence: Synthetic oligonucleotide
aagacggcuucccacugag

SEQ ID NO: 2900720 - RNA, 19 nt, Artificial Sequence
  Description of Artificial Sequence: Synthetic oligonucleotide
uaggucugagucuucacca

SEQ ID NO: 2900721 - RNA, 19 nt, Artificial Sequence
  Description of Artificial Sequence: Synthetic oligonucleotide
ucauuggcugcgcagaguc

SEQ ID NO: 2900722 - RNA, 19 nt, Artificial Sequence
  Description of Artificial Sequence: Synthetic oligonucleotide
uuaugagcuuuccuucgcc

SEQ ID NO: 2900723 - RNA, 19 nt, Artificial Sequence
  Description of Artificial Sequence: Synthetic oligonucleotide
gacuucuugaacgagaucu

SEQ ID NO: 2900724 - RNA, 19 nt, Artificial Sequence
  Description of Artificial Sequence: Synthetic oligonucleotide
uugaacgagaucugugucu

SEQ ID NO: 2900725 - RNA, 19 nt, Artificial Sequence
  Description of Artificial Sequence: Synthetic oligonucleotide
aucgccuguuguuaggauc

SEQ ID NO: 2900726 - RNA, 19 nt, Artificial Sequence
  Description of Artificial Sequence: Synthetic oligonucleotide
accaugucauucuccugcc

SEQ ID NO: 2900727 - RNA, 19 nt, Artificial Sequence
  Description of Artificial Sequence: Synthetic oligonucleotide
auugucacugccauaggag

SEQ ID NO: 2900728 - RNA, 19 nt, Artificial Sequence
  Description of Artificial Sequence: Synthetic oligonucleotide
uugucacugccauaggaga

SEQ ID NO: 2900729 - RNA, 19 nt, Artificial Sequence
  Description of Artificial Sequence: Synthetic oligonucleotide
ugaacgagaucugugucug

SEQ ID NO: 2900730 - RNA, 19 nt, Artificial Sequence
  Description of Artificial Sequence: Synthetic oligonucleotide
ugagcuuuccuucgccuca

SEQ ID NO: 2900731 - RNA, 19 nt, Artificial Sequence
  Description of Artificial Sequence: Synthetic oligonucleotide
cugagucuccacuuuagug

SEQ ID NO: 2900732 - RNA, 19 nt, Artificial Sequence
  Description of Artificial Sequence: Synthetic oligonucleotide
acgaguuccuucuggaugu

SEQ ID NO: 2900733 - RNA, 19 nt, Artificial Sequence
  Description of Artificial Sequence: Synthetic oligonucleotide
gauucacuaccgcugcuug

SEQ ID NO: 2900734 - RNA, 19 nt, Artificial Sequence
  Description of Artificial Sequence: Synthetic oligonucleotide
uguuacaccgugagcguga

SEQ ID NO: 2900735 - RNA, 19 nt, Artificial Sequence
  Description of Artificial Sequence: Synthetic oligonucleotide
uuguuaggauccacuuggg

SEQ ID NO: 2900736 - RNA, 19 nt, Artificial Sequence
  Description of Artificial Sequence: Synthetic oligonucleotide
guuagaauuuucugauuca

SEQ ID NO: 2900737 - RNA, 19 nt, Artificial Sequence
  Description of Artificial Sequence: Synthetic oligonucleotide
uccauagcucuucuuuggc

SEQ ID NO: 2900738 - RNA, 19 nt, Artificial Sequence
  Description of Artificial Sequence: Synthetic oligonucleotide
gucuucaccacuguuauga

SEQ ID NO: 2900739 - RNA, 19 nt, Artificial Sequence
  Description of Artificial Sequence: Synthetic oligonucleotide
uguaugggaucuccuucag

SEQ ID NO: 2900740 - RNA, 19 nt, Artificial Sequence
  Description of Artificial Sequence: Synthetic oligonucleotide
ccuucugucgccuuaagac

SEQ ID NO: 2900741 - RNA, 19 nt, Artificial Sequence
  Description of Artificial Sequence: Synthetic oligonucleotide
cuuccauagcucuucuuug

SEQ ID NO: 2900742 - RNA, 19 nt, Artificial Sequence
  Description of Artificial Sequence: Synthetic oligonucleotide
augagcuuuccuucgccuc

SEQ ID NO: 2900743 - RNA, 19 nt, Artificial Sequence
  Description of Artificial Sequence: Synthetic oligonucleotide
uguuaggauccacuugggu

SEQ ID NO: 2900744 - RNA, 19 nt, Artificial Sequence
  Description of Artificial Sequence: Synthetic oligonucleotide
uuaguguaugggaucuccu

SEQ ID NO: 2900745 - RNA, 19 nt, Artificial Sequence
  Description of Artificial Sequence: Synthetic oligonucleotide
ugcucuucugacagccccg

SEQ ID NO: 2900746 - RNA, 19 nt, Artificial Sequence
  Description of Artificial Sequence: Synthetic oligonucleotide
acuuuaguguaugggaucu

SEQ ID NO: 2900747 - RNA, 19 nt, Artificial Sequence
  Description of Artificial Sequence: Synthetic oligonucleotide
uucacuaccgcugcuugug

SEQ ID NO: 2900748 - RNA, 19 nt, Artificial Sequence
  Description of Artificial Sequence: Synthetic oligonucleotide
gaaugccugaugcggacug

SEQ ID NO: 2900749 - RNA, 19 nt, Artificial Sequence
  Description of Artificial Sequence: Synthetic oligonucleotide
ucuccacuuuaguguaugg

SEQ ID NO: 2900750 - RNA, 19 nt, Artificial Sequence
  Description of Artificial Sequence: Synthetic oligonucleotide
aacgagaucugugucugga

SEQ ID NO: 2900751 - RNA, 19 nt, Artificial Sequence
  Description of Artificial Sequence: Synthetic oligonucleotide
uucuuuggcuuggacauca

SEQ ID NO: 2900752 - RNA, 19 nt, Artificial Sequence
  Description of Artificial Sequence: Synthetic oligonucleotide
uuaagacggcuucccacug

SEQ ID NO: 2900753 - RNA, 19 nt, Artificial Sequence
  Description of Artificial Sequence: Synthetic oligonucleotide
uaugagcuuuccuucgccu

SEQ ID NO: 2900754 - RNA, 19 nt, Artificial Sequence
  Description of Artificial Sequence: Synthetic oligonucleotide
guuaugagcuuuccuucgc

SEQ ID NO: 2900755 - RNA, 19 nt, Artificial Sequence
  Description of Artificial Sequence: Synthetic oligonucleotide
augcgaaugccugaugcgg

SEQ ID NO: 2900756 - RNA, 19 nt, Artificial Sequence
  Description of Artificial Sequence: Synthetic oligonucleotide
ucauugucacugccauagg

SEQ ID NO: 2900757 - RNA, 19 nt, Artificial Sequence
  Description of Artificial Sequence: Synthetic oligonucleotide
uccuucgccucauuggcug

SEQ ID NO: 2900758 - RNA, 19 nt, Artificial Sequence
  Description of Artificial Sequence: Synthetic oligonucleotide
uuuacggugcucucuguua

SEQ ID NO: 2900759 - RNA, 19 nt, Artificial Sequence
  Description of Artificial Sequence: Synthetic oligonucleotide
cacgaguuccuucuggaug

SEQ ID NO: 2900760 - RNA, 19 nt, Artificial Sequence
  Description of Artificial Sequence: Synthetic oligonucleotide
cuucaccacuguuaugagc

SEQ ID NO: 2900761 - RNA, 19 nt, Artificial Sequence
  Description of Artificial Sequence: Synthetic oligonucleotide
agaucugugucuggaucgc

SEQ ID NO: 2900762 - RNA, 19 nt, Artificial Sequence
  Description of Artificial Sequence: Synthetic oligonucleotide
uccguggagaaugcgaaug

SEQ ID NO: 2900763 - RNA, 19 nt, Artificial Sequence
  Description of Artificial Sequence: Synthetic oligonucleotide
gacaucaggacuucuugaa

SEQ ID NO: 2900764 - RNA, 19 nt, Artificial Sequence
  Description of Artificial Sequence: Synthetic oligonucleotide
aggucugagucuucaccac

SEQ ID NO: 2900765 - RNA, 19 nt, Artificial Sequence
  Description of Artificial Sequence: Synthetic oligonucleotide
uggcuuggacaucaggacu

SEQ ID NO: 2900766 - RNA, 19 nt, Artificial Sequence
  Description of Artificial Sequence: Synthetic oligonucleotide
ugccuuauucuguuucucu

SEQ ID NO: 2900767 - RNA, 19 nt, Artificial Sequence
  Description of Artificial Sequence: Synthetic oligonucleotide
aucaggacuucuugaacga

SEQ ID NO: 2900768 - RNA, 19 nt, Artificial Sequence
  Description of Artificial Sequence: Synthetic oligonucleotide
ugcgcagagucauugucac

SEQ ID NO: 2900769 - RNA, 19 nt, Artificial Sequence
  Description of Artificial Sequence: Synthetic oligonucleotide
uguguuacaccgugagcgu

SEQ ID NO: 2900770 - RNA, 19 nt, Artificial Sequence
  Description of Artificial Sequence: Synthetic oligonucleotide
auagcucuucuuuggcuug

SEQ ID NO: 2900771 - RNA, 19 nt, Artificial Sequence
  Description of Artificial Sequence: Synthetic oligonucleotide
cuuguguuacaccgugagc

SEQ ID NO: 2900772 - RNA, 19 nt, Artificial Sequence
  Description of Artificial Sequence: Synthetic oligonucleotide
uucuccugccuuauucugu

SEQ ID NO: 2900773 - RNA, 19 nt, Artificial Sequence
  Description of Artificial Sequence: Synthetic oligonucleotide
ucugugucuggaucgccug

SEQ ID NO: 2900774 - RNA, 19 nt, Artificial Sequence
  Description of Artificial Sequence: Synthetic oligonucleotide
cuuuggcuuggacaucagg

SEQ ID NO: 2900775 - RNA, 19 nt, Artificial Sequence
  Description of Artificial Sequence: Synthetic oligonucleotide
ucuucaccacuguuaugag

SEQ ID NO: 2900776 - RNA, 19 nt, Artificial Sequence
  Description of Artificial Sequence: Synthetic oligonucleotide
uccugccuuauucuguuuc

SEQ ID NO: 2900777 - RNA, 19 nt, Artificial Sequence
  Description of Artificial Sequence: Synthetic oligonucleotide
cuugaacgagaucuguguc

SEQ ID NO: 2900778 - RNA, 19 nt, Artificial Sequence
  Description of Artificial Sequence: Synthetic oligonucleotide
ugcgaaugccugaugcgga

SEQ ID NO: 2900779 - RNA, 19 nt, Artificial Sequence
  Description of Artificial Sequence: Synthetic oligonucleotide
uccacgaguuccuucugga

SEQ ID NO: 2900780 - RNA, 19 nt, Artificial Sequence
  Description of Artificial Sequence: Synthetic oligonucleotide
cuccacuuuaguguauggg

SEQ ID NO: 2900781 - RNA, 19 nt, Artificial Sequence
  Description of Artificial Sequence: Synthetic oligonucleotide
uccuucugucgccuuaaga

SEQ ID NO: 2900782 - RNA, 19 nt, Artificial Sequence
  Description of Artificial Sequence: Synthetic oligonucleotide
uuuuacggugcucucuguu

SEQ ID NO: 2900783 - RNA, 19 nt, Artificial Sequence
  Description of Artificial Sequence: Synthetic oligonucleotide
uuuaggucugagucuucac

SEQ ID NO: 2900784 - RNA, 19 nt, Artificial Sequence
  Description of Artificial Sequence: Synthetic oligonucleotide
ugaggcgcugaauccacca

SEQ ID NO: 2900785 - RNA, 19 nt, Artificial Sequence
  Description of Artificial Sequence: Synthetic oligonucleotide
ugugcuuccauagcucuuc

SEQ ID NO: 2900786 - RNA, 19 nt, Artificial Sequence
  Description of Artificial Sequence: Synthetic oligonucleotide
uucagcugcucuucugaca

SEQ ID NO: 2900787 - RNA, 19 nt, Artificial Sequence
  Description of Artificial Sequence: Synthetic oligonucleotide
ucugacagccccgaugggu

SEQ ID NO: 2900788 - RNA, 19 nt, Artificial Sequence
  Description of Artificial Sequence: Synthetic oligonucleotide
gcuuguguuacaccgugag

SEQ ID NO: 2900789 - RNA, 19 nt, Artificial Sequence
  Description of Artificial Sequence: Synthetic oligonucleotide
aaugccugaugcggacugg

SEQ ID NO: 2900790 - RNA, 19 nt, Artificial Sequence
  Description of Artificial Sequence: Synthetic oligonucleotide
uggaucgccuguuguuagg

SEQ ID NO: 2900791 - RNA, 19 nt, Artificial Sequence
  Description of Artificial Sequence: Synthetic oligonucleotide
gucacugccauaggagagg

SEQ ID NO: 2900792 - RNA, 19 nt, Artificial Sequence
  Description of Artificial Sequence: Synthetic oligonucleotide
cacuuuaguguaugggauc

SEQ ID NO: 2900793 - RNA, 19 nt, Artificial Sequence
  Description of Artificial Sequence: Synthetic oligonucleotide
aacuccguggagaaugcga

SEQ ID NO: 2900794 - RNA, 19 nt, Artificial Sequence
  Description of Artificial Sequence: Synthetic oligonucleotide
ugccauaggagagguugcg

SEQ ID NO: 2900795 - RNA, 19 nt, Artificial Sequence
  Description of Artificial Sequence: Synthetic oligonucleotide
acggcuucccacugaggcg

SEQ ID NO: 2900796 - RNA, 19 nt, Artificial Sequence
  Description of Artificial Sequence: Synthetic oligonucleotide
gaauccaccaugucauucu

SEQ ID NO: 2900797 - RNA, 19 nt, Artificial Sequence
  Description of Artificial Sequence: Synthetic oligonucleotide
ugaauccaccaugucauuc

SEQ ID NO: 2900798 - RNA, 19 nt, Artificial Sequence
  Description of Artificial Sequence: Synthetic oligonucleotide
uccuccucugcuuuagguc

SEQ ID NO: 2900799 - RNA, 19 nt, Artificial Sequence
  Description of Artificial Sequence: Synthetic oligonucleotide
uuuuccuucugucgccuua

SEQ ID NO: 2900800 - RNA, 19 nt, Artificial Sequence
  Description of Artificial Sequence: Synthetic oligonucleotide
accgcugcuuguguuacac

SEQ ID NO: 2900801 - RNA, 19 nt, Artificial Sequence
  Description of Artificial Sequence: Synthetic oligonucleotide
uuggacaucaggacuucuu

SEQ ID NO: 2900802 - RNA, 19 nt, Artificial Sequence
  Description of Artificial Sequence: Synthetic oligonucleotide
uucuggaugugcuuccaua

SEQ ID NO: 2900803 - RNA, 19 nt, Artificial Sequence
  Description of Artificial Sequence: Synthetic oligonucleotide
uaagacggcuucccacuga

SEQ ID NO: 2900804 - RNA, 19 nt, Artificial Sequence
  Description of Artificial Sequence: Synthetic oligonucleotide
agcgugaucuccuccucug

SEQ ID NO: 2900805 - RNA, 19 nt, Artificial Sequence
  Description of Artificial Sequence: Synthetic oligonucleotide
guuaggauccacuuggguu

SEQ ID NO: 2900806 - RNA, 19 nt, Artificial Sequence
  Description of Artificial Sequence: Synthetic oligonucleotide
cuggaugugcuuccauagc

SEQ ID NO: 2900807 - RNA, 19 nt, Artificial Sequence
  Description of Artificial Sequence: Synthetic oligonucleotide
ugcggacugggucacccug

SEQ ID NO: 2900808 - RNA, 19 nt, Artificial Sequence
  Description of Artificial Sequence: Synthetic oligonucleotide
gaugcggacugggucaccc

SEQ ID NO: 2900809 - RNA, 19 nt, Artificial Sequence
  Description of Artificial Sequence: Synthetic oligonucleotide
gaugugcuuccauagcucu

SEQ ID NO: 2900810 - RNA, 19 nt, Artificial Sequence
  Description of Artificial Sequence: Synthetic oligonucleotide
guccacgaguuccuucugg

SEQ ID NO: 2900811 - RNA, 19 nt, Artificial Sequence
  Description of Artificial Sequence: Synthetic oligonucleotide
ucaggacuucuugaacgag

SEQ ID NO: 2900812 - RNA, 19 nt, Artificial Sequence
  Description of Artificial Sequence: Synthetic oligonucleotide
uaguguaugggaucuccuu

SEQ ID NO: 2900813 - RNA, 19 nt, Artificial Sequence
  Description of Artificial Sequence: Synthetic oligonucleotide
gaacgagaucugugucugg

SEQ ID NO: 2900814 - RNA, 19 nt, Artificial Sequence
  Description of Artificial Sequence: Synthetic oligonucleotide
accacuguuaugagcuuuc

SEQ ID NO: 2900815 - RNA, 19 nt, Artificial Sequence
  Description of Artificial Sequence: Synthetic oligonucleotide
cugacagccccgauggguc

SEQ ID NO: 2900816 - RNA, 19 nt, Artificial Sequence
  Description of Artificial Sequence: Synthetic oligonucleotide
ugcuuuaggucugagucuu

SEQ ID NO: 2900817 - RNA, 19 nt, Artificial Sequence
  Description of Artificial Sequence: Synthetic oligonucleotide
cugcuuguguuacaccgug

SEQ ID NO: 2900818 - RNA, 19 nt, Artificial Sequence
  Description of Artificial Sequence: Synthetic oligonucleotide
cuggaucgccuguuguuag

SEQ ID NO: 2900819 - RNA, 19 nt, Artificial Sequence
  Description of Artificial Sequence: Synthetic oligonucleotide
aggcgcugaauccaccaug

SEQ ID NO: 2900820 - RNA, 19 nt, Artificial Sequence
  Description of Artificial Sequence: Synthetic oligonucleotide
cagagucauugucacugcc

SEQ ID NO: 2900821 - RNA, 19 nt, Artificial Sequence
  Description of Artificial Sequence: Synthetic oligonucleotide
agaaugcgaaugccugaug

SEQ ID NO: 2900822 - RNA, 19 nt, Artificial Sequence
  Description of Artificial Sequence: Synthetic oligonucleotide
cugccauaggagagguugc

SEQ ID NO: 2900823 - RNA, 19 nt, Artificial Sequence
  Description of Artificial Sequence: Synthetic oligonucleotide
ucuggaucgccuguuguua

SEQ ID NO: 2900824 - RNA, 19 nt, Artificial Sequence
  Description of Artificial Sequence: Synthetic oligonucleotide
guaugggaucuccuucagc

SEQ ID NO: 2900825 - RNA, 19 nt, Artificial Sequence
  Description of Artificial Sequence: Synthetic oligonucleotide
ucuuuggcuuggacaucag

SEQ ID NO: 2900826 - RNA, 19 nt, Artificial Sequence
  Description of Artificial Sequence: Synthetic oligonucleotide
acugaggcgcugaauccac

SEQ ID NO: 2900827 - RNA, 19 nt, Artificial Sequence
  Description of Artificial Sequence: Synthetic oligonucleotide
auucacuaccgcugcuugu

SEQ ID NO: 2900828 - RNA, 19 nt, Artificial Sequence
  Description of Artificial Sequence: Synthetic oligonucleotide
augggaucuccuucagcug

SEQ ID NO: 2900829 - RNA, 19 nt, Artificial Sequence
  Description of Artificial Sequence: Synthetic oligonucleotide
cuuaagacggcuucccacu

SEQ ID NO: 2900830 - RNA, 19 nt, Artificial Sequence
  Description of Artificial Sequence: Synthetic oligonucleotide
gucgccuuaagacggcuuc

SEQ ID NO: 2900831 - RNA, 19 nt, Artificial Sequence
  Description of Artificial Sequence: Synthetic oligonucleotide
cuucagcugcucuucugac

SEQ ID NO: 2900832 - RNA, 19 nt, Artificial Sequence
  Description of Artificial Sequence: Synthetic oligonucleotide
acugggucacccugagucu

SEQ ID NO: 2900833 - RNA, 19 nt, Artificial Sequence
  Description of Artificial Sequence: Synthetic oligonucleotide
ugcuuguguuacaccguga

SEQ ID NO: 2900834 - RNA, 19 nt, Artificial Sequence
  Description of Artificial Sequence: Synthetic oligonucleotide
uagcucuucuuuggcuugg

SEQ ID NO: 2900835 - RNA, 19 nt, Artificial Sequence
  Description of Artificial Sequence: Synthetic oligonucleotide
acuucuugaacgagaucug

SEQ ID NO: 2900836 - RNA, 19 nt, Artificial Sequence
  Description of Artificial Sequence: Synthetic oligonucleotide
auuggcugcgcagagucau

SEQ ID NO: 2900837 - RNA, 19 nt, Artificial Sequence
  Description of Artificial Sequence: Synthetic oligonucleotide
gagucuccacuuuagugua

SEQ ID NO: 2900838 - RNA, 19 nt, Artificial Sequence
  Description of Artificial Sequence: Synthetic oligonucleotide
acuaccgcugcuuguguua

SEQ ID NO: 2900839 - RNA, 19 nt, Artificial Sequence
  Description of Artificial Sequence: Synthetic oligonucleotide
uaacuccguggagaaugcg

SEQ ID NO: 2900840 - RNA, 19 nt, Artificial Sequence
  Description of Artificial Sequence: Synthetic oligonucleotide
caggacuucuugaacgaga

SEQ ID NO: 2900841 - RNA, 19 nt, Artificial Sequence
  Description of Artificial Sequence: Synthetic oligonucleotide
uuccuucgccucauuggcu

SEQ ID NO: 2900842 - RNA, 19 nt, Artificial Sequence
  Description of Artificial Sequence: Synthetic oligonucleotide
ugggucacccugagucucc

SEQ ID NO: 2900843 - RNA, 19 nt, Artificial Sequence
  Description of Artificial Sequence: Synthetic oligonucleotide
ugauucacuaccgcugcuu

SEQ ID NO: 2900844 - RNA, 19 nt, Artificial Sequence
  Description of Artificial Sequence: Synthetic oligonucleotide
ugccuguaacuccguggag

SEQ ID NO: 2900845 - RNA, 19 nt, Artificial Sequence
  Description of Artificial Sequence: Synthetic oligonucleotide
gagucuucaccacuguuau

SEQ ID NO: 2900846 - RNA, 19 nt, Artificial Sequence
  Description of Artificial Sequence: Synthetic oligonucleotide
cgcugcuuguguuacaccg

SEQ ID NO: 2900847 - RNA, 19 nt, Artificial Sequence
  Description of Artificial Sequence: Synthetic oligonucleotide
augucauucuccugccuua

SEQ ID NO: 2900848 - RNA, 19 nt, Artificial Sequence
  Description of Artificial Sequence: Synthetic oligonucleotide
guaacuccguggagaaugc

SEQ ID NO: 2900849 - RNA, 19 nt, Artificial Sequence
  Description of Artificial Sequence: Synthetic oligonucleotide
uuccuucugucgccuuaag

SEQ ID NO: 2900850 - RNA, 19 nt, Artificial Sequence
  Description of Artificial Sequence: Synthetic oligonucleotide
ccuuaagacggcuucccac

SEQ ID NO: 2900851 - RNA, 19 nt, Artificial Sequence
  Description of Artificial Sequence: Synthetic oligonucleotide
ucacccugagucuccacuu

SEQ ID NO: 2900852 - RNA, 19 nt, Artificial Sequence
  Description of Artificial Sequence: Synthetic oligonucleotide
uuuccuucugucgccuuaa

SEQ ID NO: 2900853 - RNA, 19 nt, Artificial Sequence
  Description of Artificial Sequence: Synthetic oligonucleotide
augccugaugcggacuggg

SEQ ID NO: 2900854 - RNA, 19 nt, Artificial Sequence
  Description of Artificial Sequence: Synthetic oligonucleotide
ucacuaccgcugcuugugu

SEQ ID NO: 2900855 - RNA, 19 nt, Artificial Sequence
  Description of Artificial Sequence: Synthetic oligonucleotide
ugagcgugaucuccuccuc

SEQ ID NO: 2900856 - RNA, 19 nt, Artificial Sequence
  Description of Artificial Sequence: Synthetic oligonucleotide
gucuccacuuuaguguaug

SEQ ID NO: 2900857 - RNA, 19 nt, Artificial Sequence
  Description of Artificial Sequence: Synthetic oligonucleotide
cuuuaggucugagucuuca

SEQ ID NO: 2900858 - RNA, 19 nt, Artificial Sequence
  Description of Artificial Sequence: Synthetic oligonucleotide
aggacuucuugaacgagau

SEQ ID NO: 2900859 - RNA, 19 nt, Artificial Sequence
  Description of Artificial Sequence: Synthetic oligonucleotide
ugacagccccgaugggucc

SEQ ID NO: 2900860 - RNA, 19 nt, Artificial Sequence
  Description of Artificial Sequence: Synthetic oligonucleotide
agucuucaccacuguuaug

SEQ ID NO: 2900861 - RNA, 19 nt, Artificial Sequence
  Description of Artificial Sequence: Synthetic oligonucleotide
cugcgcagagucauuguca

SEQ ID NO: 2900862 - RNA, 19 nt, Artificial Sequence
  Description of Artificial Sequence: Synthetic oligonucleotide
ucacugccauaggagaggu

SEQ ID NO: 2900863 - RNA, 19 nt, Artificial Sequence
  Description of Artificial Sequence: Synthetic oligonucleotide
acaccgugagcgugaucuc

SEQ ID NO: 2900864 - RNA, 19 nt, Artificial Sequence
  Description of Artificial Sequence: Synthetic oligonucleotide
gaucugugucuggaucgcc

SEQ ID NO: 2900865 - RNA, 19 nt, Artificial Sequence
  Description of Artificial Sequence: Synthetic oligonucleotide
ucgccuuaagacggcuucc

SEQ ID NO: 2900866 - RNA, 19 nt, Artificial Sequence
  Description of Artificial Sequence: Synthetic oligonucleotide
uacggugcucucuguuaga

SEQ ID NO: 2900867 - RNA, 19 nt, Artificial Sequence
  Description of Artificial Sequence: Synthetic oligonucleotide
cccacugaggcgcugaauc

SEQ ID NO: 2900868 - RNA, 19 nt, Artificial Sequence
  Description of Artificial Sequence: Synthetic oligonucleotide
gcuuuccuucgccucauug

SEQ ID NO: 2900869 - RNA, 19 nt, Artificial Sequence
  Description of Artificial Sequence: Synthetic oligonucleotide
ggugcucucuguuagaauu

SEQ ID NO: 2900870 - RNA, 19 nt, Artificial Sequence
  Description of Artificial Sequence: Synthetic oligonucleotide
aucugugucuggaucgccu

SEQ ID NO: 2900871 - RNA, 19 nt, Artificial Sequence
  Description of Artificial Sequence: Synthetic oligonucleotide
acgagaucugugucuggau

SEQ ID NO: 2900872 - RNA, 19 nt, Artificial Sequence
  Description of Artificial Sequence: Synthetic oligonucleotide
ggacaucaggacuucuuga

SEQ ID NO: 2900873 - RNA, 19 nt, Artificial Sequence
  Description of Artificial Sequence: Synthetic oligonucleotide
cuucgccucauuggcugcg

SEQ ID NO: 2900874 - RNA, 19 nt, Artificial Sequence
  Description of Artificial Sequence: Synthetic oligonucleotide
acuccguggagaaugcgaa

SEQ ID NO: 2900875 - RNA, 19 nt, Artificial Sequence
  Description of Artificial Sequence: Synthetic oligonucleotide
ugccugaugcggacugggu

SEQ ID NO: 2900876 - RNA, 19 nt, Artificial Sequence
  Description of Artificial Sequence: Synthetic oligonucleotide
caccgugagcgugaucucc

SEQ ID NO: 2900877 - RNA, 19 nt, Artificial Sequence
  Description of Artificial Sequence: Synthetic oligonucleotide
ugucauucuccugccuuau

SEQ ID NO: 2900878 - RNA, 19 nt, Artificial Sequence
  Description of Artificial Sequence: Synthetic oligonucleotide
ggagaaugcgaaugccuga

SEQ ID NO: 2900879 - RNA, 19 nt, Artificial Sequence
  Description of Artificial Sequence: Synthetic oligonucleotide
cugaggcgcugaauccacc

SEQ ID NO: 2900880 - RNA, 19 nt, Artificial Sequence
  Description of Artificial Sequence: Synthetic oligonucleotide
guguuacaccgugagcgug

SEQ ID NO: 2900881 - RNA, 19 nt, Artificial Sequence
  Description of Artificial Sequence: Synthetic oligonucleotide
cuaccgcugcuuguguuac

SEQ ID NO: 2900882 - RNA, 19 nt, Artificial Sequence
  Description of Artificial Sequence: Synthetic oligonucleotide
cgcagagucauugucacug

SEQ ID NO: 2900883 - RNA, 19 nt, Artificial Sequence
  Description of Artificial Sequence: Synthetic oligonucleotide
ugcucucuguuagaauuuu

SEQ ID NO: 2900884 - RNA, 19 nt, Artificial Sequence
  Description of Artificial Sequence: Synthetic oligonucleotide
ugucgccuuaagacggcuu

SEQ ID NO: 2900885 - RNA, 19 nt, Artificial Sequence
  Description of Artificial Sequence: Synthetic oligonucleotide
ugugucuggaucgccuguu

SEQ ID NO: 2900886 - RNA, 19 nt, Artificial Sequence
  Description of Artificial Sequence: Synthetic oligonucleotide
cuccucugcuuuaggucug

SEQ ID NO: 2900887 - RNA, 19 nt, Artificial Sequence
  Description of Artificial Sequence: Synthetic oligonucleotide
cuuauucuguuucucuuuu

SEQ ID NO: 2900888 - RNA, 19 nt, Artificial Sequence
  Description of Artificial Sequence: Synthetic oligonucleotide
uggguccacgaguuccuuc

SEQ ID NO: 2900889 - RNA, 19 nt, Artificial Sequence
  Description of Artificial Sequence: Synthetic oligonucleotide
ccugaugcggacuggguca

SEQ ID NO: 2900890 - RNA, 19 nt, Artificial Sequence
  Description of Artificial Sequence: Synthetic oligonucleotide
agucauugucacugccaua

SEQ ID NO: 2900891 - RNA, 19 nt, Artificial Sequence
  Description of Artificial Sequence: Synthetic oligonucleotide
ccacugaggcgcugaaucc

SEQ ID NO: 2900892 - RNA, 19 nt, Artificial Sequence
  Description of Artificial Sequence: Synthetic oligonucleotide
cuuuaguguaugggaucuc

SEQ ID NO: 2900893 - RNA, 19 nt, Artificial Sequence
  Description of Artificial Sequence: Synthetic oligonucleotide
gucacccugagucuccacu

SEQ ID NO: 2900894 - RNA, 19 nt, Artificial Sequence
  Description of Artificial Sequence: Synthetic oligonucleotide
gagaaugcgaaugccugau

SEQ ID NO: 2900895 - RNA, 19 nt, Artificial Sequence
  Description of Artificial Sequence: Synthetic oligonucleotide
ucgccucauuggcugcgca

SEQ ID NO: 2900896 - RNA, 19 nt, Artificial Sequence
  Description of Artificial Sequence: Synthetic oligonucleotide
gcugaauccaccaugucau

SEQ ID NO: 2900897 - RNA, 19 nt, Artificial Sequence
  Description of Artificial Sequence: Synthetic oligonucleotide
cugccuuauucuguuucuc

SEQ ID NO: 2900898 - RNA, 19 nt, Artificial Sequence
  Description of Artificial Sequence: Synthetic oligonucleotide
ccguggagaaugcgaaugc

SEQ ID NO: 2900899 - RNA, 19 nt, Artificial Sequence
  Description of Artificial Sequence: Synthetic oligonucleotide
gcugcgcagagucauuguc

SEQ ID NO: 2900900 - RNA, 19 nt, Artificial Sequence
  Description of Artificial Sequence: Synthetic oligonucleotide
uucgccucauuggcugcgc

SEQ ID NO: 2900901 - RNA, 19 nt, Artificial Sequence
  Description of Artificial Sequence: Synthetic oligonucleotide
acccugagucuccacuuua

SEQ ID NO: 2900902 - RNA, 19 nt, Artificial Sequence
  Description of Artificial Sequence: Synthetic oligonucleotide
guggagaaugcgaaugccu

SEQ ID NO: 2900903 - RNA, 19 nt, Artificial Sequence
  Description of Artificial Sequence: Synthetic oligonucleotide
uucccacugaggcgcugaa

SEQ ID NO: 2900904 - RNA, 19 nt, Artificial Sequence
  Description of Artificial Sequence: Synthetic oligonucleotide
acggugcucucuguuagaa

SEQ ID NO: 2900905 - RNA, 19 nt, Artificial Sequence
  Description of Artificial Sequence: Synthetic oligonucleotide
cugggucacccugagucuc

SEQ ID NO: 2900906 - RNA, 19 nt, Artificial Sequence
  Description of Artificial Sequence: Synthetic oligonucleotide
caugucauucuccugccuu

SEQ ID NO: 2900907 - RNA, 19 nt, Artificial Sequence
  Description of Artificial Sequence: Synthetic oligonucleotide
accgugagcgugaucuccu

SEQ ID NO: 2900908 - RNA, 19 nt, Artificial Sequence
  Description of Artificial Sequence: Synthetic oligonucleotide
gcuuccauagcucuucuuu

SEQ ID NO: 2900909 - RNA, 19 nt, Artificial Sequence
  Description of Artificial Sequence: Synthetic oligonucleotide
ggaugugcuuccauagcuc

SEQ ID NO: 2900910 - RNA, 19 nt, Artificial Sequence
  Description of Artificial Sequence: Synthetic oligonucleotide
ucaccacuguuaugagcuu

SEQ ID NO: 2900911 - RNA, 19 nt, Artificial Sequence
  Description of Artificial Sequence: Synthetic oligonucleotide
cugcuuuaggucugagucu

SEQ ID NO: 2900912 - RNA, 19 nt, Artificial Sequence
  Description of Artificial Sequence: Synthetic oligonucleotide
cccugagucuccacuuuag

SEQ ID NO: 2900913 - RNA, 19 nt, Artificial Sequence
  Description of Artificial Sequence: Synthetic oligonucleotide
cacugaggcgcugaaucca

SEQ ID NO: 2900914 - RNA, 19 nt, Artificial Sequence
  Description of Artificial Sequence: Synthetic oligonucleotide
gccuguaacuccguggaga

SEQ ID NO: 2900915 - RNA, 19 nt, Artificial Sequence
  Description of Artificial Sequence: Synthetic oligonucleotide
ugcuuccauagcucuucuu

SEQ ID NO: 2900916 - RNA, 19 nt, Artificial Sequence
  Description of Artificial Sequence: Synthetic oligonucleotide
cugaugcggacugggucac

SEQ ID NO: 2900917 - RNA, 19 nt, Artificial Sequence
  Description of Artificial Sequence: Synthetic oligonucleotide
gccugaugcggacuggguc

SEQ ID NO: 2900918 - RNA, 19 nt, Artificial Sequence
  Description of Artificial Sequence: Synthetic oligonucleotide
agccccgauggguccacga

SEQ ID NO: 2900919 - RNA, 19 nt, Artificial Sequence
  Description of Artificial Sequence: Synthetic oligonucleotide
gauggguccacgaguuccu

SEQ ID NO: 2900920 - RNA, 19 nt, Artificial Sequence
  Description of Artificial Sequence: Synthetic oligonucleotide
cuguuguuaggauccacuu

SEQ ID NO: 2900921 - RNA, 19 nt, Artificial Sequence
  Description of Artificial Sequence: Synthetic oligonucleotide
cuucuuuggcuuggacauc

SEQ ID NO: 2900922 - RNA, 19 nt, Artificial Sequence
  Description of Artificial Sequence: Synthetic oligonucleotide
cgauggguccacgaguucc

SEQ ID NO: 2900923 - RNA, 19 nt, Artificial Sequence
  Description of Artificial Sequence: Synthetic oligonucleotide
cauuggcugcgcagaguca

SEQ ID NO: 2900924 - RNA, 19 nt, Artificial Sequence
  Description of Artificial Sequence: Synthetic oligonucleotide
uaccgcugcuuguguuaca

SEQ ID NO: 2900925 - RNA, 19 nt, Artificial Sequence
  Description of Artificial Sequence: Synthetic oligonucleotide
uuggcugcgcagagucauu

SEQ ID NO: 2900926 - RNA, 19 nt, Artificial Sequence
  Description of Artificial Sequence: Synthetic oligonucleotide
augcggacugggucacccu

SEQ ID NO: 2900927 - RNA, 19 nt, Artificial Sequence
  Description of Artificial Sequence: Synthetic oligonucleotide
gcgaaugccugaugcggac

SEQ ID NO: 2900928 - RNA, 19 nt, Artificial Sequence
  Description of Artificial Sequence: Synthetic oligonucleotide
cgagaucugugucuggauc

SEQ ID NO: 2900929 - RNA, 19 nt, Artificial Sequence
  Description of Artificial Sequence: Synthetic oligonucleotide
gaucuccuccucugcuuua

SEQ ID NO: 2900930 - RNA, 19 nt, Artificial Sequence
  Description of Artificial Sequence: Synthetic oligonucleotide
acagccccgauggguccac

SEQ ID NO: 2900931 - RNA, 19 nt, Artificial Sequence
  Description of Artificial Sequence: Synthetic oligonucleotide
gagcgugaucuccuccucu

SEQ ID NO: 2900932 - RNA, 19 nt, Artificial Sequence
  Description of Artificial Sequence: Synthetic oligonucleotide
cuucuugaacgagaucugu

SEQ ID NO: 2900933 - RNA, 19 nt, Artificial Sequence
  Description of Artificial Sequence: Synthetic oligonucleotide
cgcugaauccaccauguca

SEQ ID NO: 2900934 - RNA, 19 nt, Artificial Sequence
  Description of Artificial Sequence: Synthetic oligonucleotide
uuacaccgugagcgugauc

SEQ ID NO: 2900935 - RNA, 19 nt, Artificial Sequence
  Description of Artificial Sequence: Synthetic oligonucleotide
ccuguaacuccguggagaa

SEQ ID NO: 2900936 - RNA, 19 nt, Artificial Sequence
  Description of Artificial Sequence: Synthetic oligonucleotide
agacggcuucccacugagg

SEQ ID NO: 2900937 - RNA, 19 nt, Artificial Sequence
  Description of Artificial Sequence: Synthetic oligonucleotide
ggguccacgaguuccuucu

SEQ ID NO: 2900938 - RNA, 19 nt, Artificial Sequence
  Description of Artificial Sequence: Synthetic oligonucleotide
cacuguuaugagcuuuccu

SEQ ID NO: 2900939 - RNA, 19 nt, Artificial Sequence
  Description of Artificial Sequence: Synthetic oligonucleotide
uaggauccacuuggguuuu

SEQ ID NO: 2900940 - RNA, 19 nt, Artificial Sequence
  Description of Artificial Sequence: Synthetic oligonucleotide
ccucauuggcugcgcagag

SEQ ID NO: 2900941 - RNA, 19 nt, Artificial Sequence
  Description of Artificial Sequence: Synthetic oligonucleotide
ggaucgccuguuguuagga

SEQ ID NO: 2900942 - RNA, 19 nt, Artificial Sequence
  Description of Artificial Sequence: Synthetic oligonucleotide
gccccgauggguccacgag

SEQ ID NO: 2900943 - RNA, 19 nt, Artificial Sequence
  Description of Artificial Sequence: Synthetic oligonucleotide
ccuguuguuaggauccacu

SEQ ID NO: 2900944 - RNA, 19 nt, Artificial Sequence
  Description of Artificial Sequence: Synthetic oligonucleotide
ugaugcggacugggucacc

SEQ ID NO: 2900945 - RNA, 19 nt, Artificial Sequence
  Description of Artificial Sequence: Synthetic oligonucleotide
cuucccacugaggcgcuga

SEQ ID NO: 2900946 - RNA, 19 nt, Artificial Sequence
  Description of Artificial Sequence: Synthetic oligonucleotide
gaucgccuguuguuaggau

SEQ ID NO: 2900947 - RNA, 19 nt, Artificial Sequence
  Description of Artificial Sequence: Synthetic oligonucleotide
gcgugaucuccuccucugc

SEQ ID NO: 2900948 - RNA, 19 nt, Artificial Sequence
  Description of Artificial Sequence: Synthetic oligonucleotide
gucuggaucgccuguuguu

SEQ ID NO: 2900949 - RNA, 19 nt, Artificial Sequence
  Description of Artificial Sequence: Synthetic oligonucleotide
ggacuucuugaacgagauc

SEQ ID NO: 2900950 - RNA, 19 nt, Artificial Sequence
  Description of Artificial Sequence: Synthetic oligonucleotide
cguggagaaugcgaaugcc

SEQ ID NO: 2900951 - RNA, 19 nt, Artificial Sequence
  Description of Artificial Sequence: Synthetic oligonucleotide
agcucuucuuuggcuugga

SEQ ID NO: 2900952 - RNA, 19 nt, Artificial Sequence
  Description of Artificial Sequence: Synthetic oligonucleotide
ccuccucugcuuuaggucu

SEQ ID NO: 2900953 - RNA, 19 nt, Artificial Sequence
  Description of Artificial Sequence: Synthetic oligonucleotide
gacagccccgaugggucca

SEQ ID NO: 2900954 - RNA, 19 nt, Artificial Sequence
  Description of Artificial Sequence: Synthetic oligonucleotide
gguccacgaguuccuucug

SEQ ID NO: 2900955 - RNA, 19 nt, Artificial Sequence
  Description of Artificial Sequence: Synthetic oligonucleotide
cuguuagaauuuucugauu

SEQ ID NO: 2900956 - RNA, 19 nt, Artificial Sequence
  Description of Artificial Sequence: Synthetic oligonucleotide
ggucugagucuucaccacu

SEQ ID NO: 2900957 - RNA, 19 nt, Artificial Sequence
  Description of Artificial Sequence: Synthetic oligonucleotide
ccuucgccucauuggcugc

SEQ ID NO: 2900958 - RNA, 19 nt, Artificial Sequence
  Description of Artificial Sequence: Synthetic oligonucleotide
gccuuaagacggcuuccca

SEQ ID NO: 2900959 - RNA, 19 nt, Artificial Sequence
  Description of Artificial Sequence: Synthetic oligonucleotide
gccucauuggcugcgcaga

SEQ ID NO: 2900960 - RNA, 19 nt, Artificial Sequence
  Description of Artificial Sequence: Synthetic oligonucleotide
gaggcgcugaauccaccau

SEQ ID NO: 2900961 - RNA, 19 nt, Artificial Sequence
  Description of Artificial Sequence: Synthetic oligonucleotide
ucccacugaggcgcugaau

SEQ ID NO: 2900962 - RNA, 19 nt, Artificial Sequence
  Description of Artificial Sequence: Synthetic oligonucleotide
cgugagcgugaucuccucc

SEQ ID NO: 2900963 - RNA, 19 nt, Artificial Sequence
  Description of Artificial Sequence: Synthetic oligonucleotide
agucuccacuuuaguguau

SEQ ID NO: 2900964 - RNA, 19 nt, Artificial Sequence
  Description of Artificial Sequence: Synthetic oligonucleotide
augugcuuccauagcucuu

SEQ ID NO: 2900965 - RNA, 19 nt, Artificial Sequence
  Description of Artificial Sequence: Synthetic oligonucleotide
ccacuuuaguguaugggau

SEQ ID NO: 2900966 - RNA, 19 nt, Artificial Sequence
  Description of Artificial Sequence: Synthetic oligonucleotide
cggcuucccacugaggcgc

SEQ ID NO: 2900967 - RNA, 19 nt, Artificial Sequence
  Description of Artificial Sequence: Synthetic oligonucleotide
gccuuauucuguuucucuu

SEQ ID NO: 2900968 - RNA, 19 nt, Artificial Sequence
  Description of Artificial Sequence: Synthetic oligonucleotide
ggcgcugaauccaccaugu

SEQ ID NO: 2900969 - RNA, 19 nt, Artificial Sequence
  Description of Artificial Sequence: Synthetic oligonucleotide
gcucucuguuagaauuuuc

SEQ ID NO: 2900970 - RNA, 19 nt, Artificial Sequence
  Description of Artificial Sequence: Synthetic oligonucleotide
gcugcucuucugacagccc

SEQ ID NO: 2900971 - RNA, 19 nt, Artificial Sequence
  Description of Artificial Sequence: Synthetic oligonucleotide
agcuuuccuucgccucauu

SEQ ID NO: 2900972 - RNA, 19 nt, Artificial Sequence
  Description of Artificial Sequence: Synthetic oligonucleotide
cugauucacuaccgcugcu

SEQ ID NO: 2900973 - RNA, 19 nt, Artificial Sequence
  Description of Artificial Sequence: Synthetic oligonucleotide
ccauagcucuucuuuggcu

SEQ ID NO: 2900974 - RNA, 19 nt, Artificial Sequence
  Description of Artificial Sequence: Synthetic oligonucleotide
cugugucuggaucgccugu

SEQ ID NO: 2900975 - RNA, 19 nt, Artificial Sequence
  Description of Artificial Sequence: Synthetic oligonucleotide
ccgcugcuuguguuacacc

SEQ ID NO: 2900976 - RNA, 19 nt, Artificial Sequence
  Description of Artificial Sequence: Synthetic oligonucleotide
ggcuuggacaucaggacuu

SEQ ID NO: 2900977 - RNA, 19 nt, Artificial Sequence
  Description of Artificial Sequence: Synthetic oligonucleotide
cgccuuaagacggcuuccc

SEQ ID NO: 2900978 - RNA, 19 nt, Artificial Sequence
  Description of Artificial Sequence: Synthetic oligonucleotide
cgccucauuggcugcgcag

SEQ ID NO: 2900979 - RNA, 19 nt, Artificial Sequence
  Description of Artificial Sequence: Synthetic oligonucleotide
ccugccuuauucuguuucu

SEQ ID NO: 2900980 - RNA, 19 nt, Artificial Sequence
  Description of Artificial Sequence: Synthetic oligonucleotide
gcucuucugacagccccga

SEQ ID NO: 2900981 - RNA, 19 nt, Artificial Sequence
  Description of Artificial Sequence: Synthetic oligonucleotide
cuuggacaucaggacuucu

SEQ ID NO: 2900982 - RNA, 19 nt, Artificial Sequence
  Description of Artificial Sequence: Synthetic oligonucleotide
gccuguuguuaggauccac

SEQ ID NO: 2900983 - RNA, 19 nt, Artificial Sequence
  Description of Artificial Sequence: Synthetic oligonucleotide
auggguccacgaguuccuu

SEQ ID NO: 2900984 - RNA, 19 nt, Artificial Sequence
  Description of Artificial Sequence: Synthetic oligonucleotide
guuacaccgugagcgugau

SEQ ID NO: 2900985 - RNA, 19 nt, Artificial Sequence
  Description of Artificial Sequence: Synthetic oligonucleotide
gugcucucuguuagaauuu

SEQ ID NO: 2900986 - RNA, 19 nt, Artificial Sequence
  Description of Artificial Sequence: Synthetic oligonucleotide
cucauuggcugcgcagagu

SEQ ID NO: 2900987 - RNA, 19 nt, Artificial Sequence
  Description of Artificial Sequence: Synthetic oligonucleotide
cugaauccaccaugucauu

SEQ ID NO: 2900988 - RNA, 19 nt, Artificial Sequence
  Description of Artificial Sequence: Synthetic oligonucleotide
gucauucuccugccuuauu

SEQ ID NO: 2900989 - RNA, 19 nt, Artificial Sequence
  Description of Artificial Sequence: Synthetic oligonucleotide
cggacugggucacccugag

SEQ ID NO: 2900990 - RNA, 19 nt, Artificial Sequence
  Description of Artificial Sequence: Synthetic oligonucleotide
gagcuuuccuucgccucau

SEQ ID NO: 2900991 - RNA, 19 nt, Artificial Sequence
  Description of Artificial Sequence: Synthetic oligonucleotide
cuccguggagaaugcgaau

SEQ ID NO: 2900992 - RNA, 19 nt, Artificial Sequence
  Description of Artificial Sequence: Synthetic oligonucleotide
gcugcuuguguuacaccgu

SEQ ID NO: 2900993 - RNA, 19 nt, Artificial Sequence
  Description of Artificial Sequence: Synthetic oligonucleotide
cacuaccgcugcuuguguu

SEQ ID NO: 2900994 - RNA, 19 nt, Artificial Sequence
  Description of Artificial Sequence: Synthetic oligonucleotide
gcgcugaauccaccauguc

SEQ ID NO: 2900995 - RNA, 19 nt, Artificial Sequence
  Description of Artificial Sequence: Synthetic oligonucleotide
ccugagucuccacuuuagu

SEQ ID NO: 2900996 - RNA, 19 nt, Artificial Sequence
  Description of Artificial Sequence: Synthetic oligonucleotide
gcuuuaggucugagucuuc

SEQ ID NO: 2900997 - RNA, 19 nt, Artificial Sequence
  Description of Artificial Sequence: Synthetic oligonucleotide
cagccccgauggguccacg

SEQ ID NO: 2900998 - RNA, 19 nt, Artificial Sequence
  Description of Artificial Sequence: Synthetic oligonucleotide
caccacuguuaugagcuuu

SEQ ID NO: 2900999 - RNA, 19 nt, Artificial Sequence
  Description of Artificial Sequence: Synthetic oligonucleotide
ccgugagcgugaucuccuc

SEQ ID NO: 2901000 - RNA, 19 nt, Artificial Sequence
  Description of Artificial Sequence: Synthetic oligonucleotide
gcggacugggucacccuga

SEQ ID NO: 2901001 - RNA, 19 nt, Artificial Sequence
  Description of Artificial Sequence: Synthetic oligonucleotide
ccucugcuuuaggucugag

SEQ ID NO: 2901002 - RNA, 19 nt, Artificial Sequence
  Description of Artificial Sequence: Synthetic oligonucleotide
ccgauggguccacgaguuc

SEQ ID NO: 2901003 - RNA, 19 nt, Artificial Sequence
  Description of Artificial Sequence: Synthetic oligonucleotide
ccuucuggaugugcuucca

SEQ ID NO: 2901004 - RNA, 19 nt, Artificial Sequence
  Description of Artificial Sequence: Synthetic oligonucleotide
gggucacccugagucucca

SEQ ID NO: 2901005 - RNA, 19 nt, Artificial Sequence
  Description of Artificial Sequence: Synthetic oligonucleotide
cugucgccuuaagacggcu

SEQ ID NO: 2901006 - RNA, 19 nt, Artificial Sequence
  Description of Artificial Sequence: Synthetic oligonucleotide
cgugaucuccuccucugcu

SEQ ID NO: 2901007 - RNA, 19 nt, Artificial Sequence
  Description of Artificial Sequence: Synthetic oligonucleotide
cccgauggguccacgaguu

SEQ ID NO: 2901008 - RNA, 19 nt, Artificial Sequence
  Description of Artificial Sequence: Synthetic oligonucleotide
gcuucccacugaggcgcug

SEQ ID NO: 2901009 - RNA, 19 nt, Artificial Sequence
  Description of Artificial Sequence: Synthetic oligonucleotide
cucuucugacagccccgau

SEQ ID NO: 2901010 - RNA, 19 nt, Artificial Sequence
  Description of Artificial Sequence: Synthetic oligonucleotide
cuguaacuccguggagaau

SEQ ID NO: 2901011 - RNA, 19 nt, Artificial Sequence
  Description of Artificial Sequence: Synthetic oligonucleotide
ggacugggucacccugagu

SEQ ID NO: 2901012 - RNA, 19 nt, Artificial Sequence
  Description of Artificial Sequence: Synthetic oligonucleotide
ccccgauggguccacgagu

SEQ ID NO: 2901013 - RNA, 19 nt, Artificial Sequence
  Description of Artificial Sequence: Synthetic oligonucleotide
gcgcagagucauugucacu

SEQ ID NO: 2901014 - RNA, 19 nt, Artificial Sequence
  Description of Artificial Sequence: Synthetic oligonucleotide
ccacgaguuccuucuggau

SEQ ID NO: 2901015 - RNA, 19 nt, Artificial Sequence
  Description of Artificial Sequence: Synthetic oligonucleotide
cuccugccuuauucuguuu

SEQ ID NO: 2901016 - RNA, 19 nt, Artificial Sequence
  Description of Artificial Sequence: Synthetic oligonucleotide
cgaguuccuucuggaugug

SEQ ID NO: 2901017 - RNA, 19 nt, Artificial Sequence
  Description of Artificial Sequence: Synthetic oligonucleotide
ccaugucauucuccugccu

SEQ ID NO: 2901018 - RNA, 19 nt, Artificial Sequence
  Description of Artificial Sequence: Synthetic oligonucleotide
cacugccauaggagagguu

SEQ ID NO: 2901019 - RNA, 19 nt, Artificial Sequence
  Description of Artificial Sequence: Synthetic oligonucleotide
cgaaugccugaugcggacu

SEQ ID NO: 2901020 - RNA, 19 nt, Artificial Sequence
  Description of Artificial Sequence: Synthetic oligonucleotide
ggcuucccacugaggcgcu

SEQ ID NO: 2901021 - RNA, 19 nt, Artificial Sequence
  Description of Artificial Sequence: Synthetic oligonucleotide
cgccuguuguuaggaucca

SEQ ID NO: 2901022 - RNA, 19 nt, Artificial Sequence
  Description of Artificial Sequence: Synthetic oligonucleotide
cggugcucucuguuagaau

SEQ ID NO: 2901023 - RNA, 19 nt, Artificial Sequence
  Description of Artificial Sequence: Synthetic oligonucleotide
aauuguauaguuugucugc

SEQ ID NO: 2901024 - RNA, 19 nt, Artificial Sequence
  Description of Artificial Sequence: Synthetic oligonucleotide
aagaaucccauuuugcugg

SEQ ID NO: 2901025 - RNA, 19 nt, Artificial Sequence
  Description of Artificial Sequence: Synthetic oligonucleotide
aaagcaacaguaagaaucc

SEQ ID NO: 2901026 - RNA, 19 nt, Artificial Sequence
  Description of Artificial Sequence: Synthetic oligonucleotide
aaauuguauaguuugucug

SEQ ID NO: 2901027 - RNA, 19 nt, Artificial Sequence
  Description of Artificial Sequence: Synthetic oligonucleotide
gaaggaaugugagagaugg

SEQ ID NO: 2901028 - RNA, 19 nt, Artificial Sequence
  Description of Artificial Sequence: Synthetic oligonucleotide
gaaagcaacaguaagaauc

SEQ ID NO: 2901029 - RNA, 19 nt, Artificial Sequence
  Description of Artificial Sequence: Synthetic oligonucleotide
uuucuuuccaguuugggca

SEQ ID NO: 2901030 - RNA, 19 nt, Artificial Sequence
  Description of Artificial Sequence: Synthetic oligonucleotide
ugaguagaaaugcagacgu

SEQ ID NO: 2901031 - RNA, 19 nt, Artificial Sequence
  Description of Artificial Sequence: Synthetic oligonucleotide
cugauuuccauauuugggg

SEQ ID NO: 2901032 - RNA, 19 nt, Artificial Sequence
  Description of Artificial Sequence: Synthetic oligonucleotide
auggguuuggcucugaaag

SEQ ID NO: 2901033 - RNA, 19 nt, Artificial Sequence
  Description of Artificial Sequence: Synthetic oligonucleotide
aaagagucagcccucgcuc

SEQ ID NO: 2901034 - RNA, 19 nt, Artificial Sequence
  Description of Artificial Sequence: Synthetic oligonucleotide
aacaguaagaaucccauuu

SEQ ID NO: 2901035 - RNA, 19 nt, Artificial Sequence
  Description of Artificial Sequence: Synthetic oligonucleotide
ucugaaagcaacaguaaga

SEQ ID NO: 2901036 - RNA, 19 nt, Artificial Sequence
  Description of Artificial Sequence: Synthetic oligonucleotide
uguauaguuugucugccag

SEQ ID NO: 2901037 - RNA, 19 nt, Artificial Sequence
  Description of Artificial Sequence: Synthetic oligonucleotide
uuuugcugggccuugcugg

SEQ ID NO: 2901038 - RNA, 19 nt, Artificial Sequence
  Description of Artificial Sequence: Synthetic oligonucleotide
agucuugucaucuguuacc

SEQ ID NO: 2901039 - RNA, 19 nt, Artificial Sequence
  Description of Artificial Sequence: Synthetic oligonucleotide
auucaggucccucaaauug

SEQ ID NO: 2901040 - RNA, 19 nt, Artificial Sequence
  Description of Artificial Sequence: Synthetic oligonucleotide
aguaagaaucccauuuugc

SEQ ID NO: 2901041 - RNA, 19 nt, Artificial Sequence
  Description of Artificial Sequence: Synthetic oligonucleotide
guucugaccauccuugagg

SEQ ID NO: 2901042 - RNA, 19 nt, Artificial Sequence
  Description of Artificial Sequence: Synthetic oligonucleotide
uaauguaugcguuggguga

SEQ ID NO: 2901043 - RNA, 19 nt, Artificial Sequence
  Description of Artificial Sequence: Synthetic oligonucleotide
uucugaccauccuugaggg

SEQ ID NO: 2901044 - RNA, 19 nt, Artificial Sequence
  Description of Artificial Sequence: Synthetic oligonucleotide
ucuguuaccuccuccacca

SEQ ID NO: 2901045 - RNA, 19 nt, Artificial Sequence
  Description of Artificial Sequence: Synthetic oligonucleotide
auauuuggggcucagcuga

SEQ ID NO: 2901046 - RNA, 19 nt, Artificial Sequence
  Description of Artificial Sequence: Synthetic oligonucleotide
auuguauaguuugucugcc

SEQ ID NO: 2901047 - RNA, 19 nt, Artificial Sequence
  Description of Artificial Sequence: Synthetic oligonucleotide
cuuucuuuccaguuugggc

SEQ ID NO: 2901048 - RNA, 19 nt, Artificial Sequence
  Description of Artificial Sequence: Synthetic oligonucleotide
uuuagccugguaauguaug

SEQ ID NO: 2901049 - RNA, 19 nt, Artificial Sequence
  Description of Artificial Sequence: Synthetic oligonucleotide
accugauuuccauauuugg

SEQ ID NO: 2901050 - RNA, 19 nt, Artificial Sequence
  Description of Artificial Sequence: Synthetic oligonucleotide
uugggugaaggaaugugag

SEQ ID NO: 2901051 - RNA, 19 nt, Artificial Sequence
  Description of Artificial Sequence: Synthetic oligonucleotide
aucuguuaccuccuccacc

SEQ ID NO: 2901052 - RNA, 19 nt, Artificial Sequence
  Description of Artificial Sequence: Synthetic oligonucleotide
accaguuuggccccugggc

SEQ ID NO: 2901053 - RNA, 19 nt, Artificial Sequence
  Description of Artificial Sequence: Synthetic oligonucleotide
ucgaacagcugcuuuagug

SEQ ID NO: 2901054 - RNA, 19 nt, Artificial Sequence
  Description of Artificial Sequence: Synthetic oligonucleotide
guaauguaugcguugggug

SEQ ID NO: 2901055 - RNA, 19 nt, Artificial Sequence
  Description of Artificial Sequence: Synthetic oligonucleotide
uauaguuugucugccagcu

SEQ ID NO: 2901056 - RNA, 19 nt, Artificial Sequence
  Description of Artificial Sequence: Synthetic oligonucleotide
acucgaaguauuccuggac

SEQ ID NO: 2901057 - RNA, 19 nt, Artificial Sequence
  Description of Artificial Sequence: Synthetic oligonucleotide
aaacaccgcucaaagaguc

SEQ ID NO: 2901058 - RNA, 19 nt, Artificial Sequence
  Description of Artificial Sequence: Synthetic oligonucleotide
uuugggcagagucuuguca

SEQ ID NO: 2901059 - RNA, 19 nt, Artificial Sequence
  Description of Artificial Sequence: Synthetic oligonucleotide
ccaaacaccgcucaaagag

SEQ ID NO: 2901060 - RNA, 19 nt, Artificial Sequence
  Description of Artificial Sequence: Synthetic oligonucleotide
gaacagcugcuuuagugcc

SEQ ID NO: 2901061 - RNA, 19 nt, Artificial Sequence
  Description of Artificial Sequence: Synthetic oligonucleotide
uuagccugguaauguaugc

SEQ ID NO: 2901062 - RNA, 19 nt, Artificial Sequence
  Description of Artificial Sequence: Synthetic oligonucleotide
cuugcuggagccaugcaug

SEQ ID NO: 2901063 - RNA, 19 nt, Artificial Sequence
  Description of Artificial Sequence: Synthetic oligonucleotide
cucugaaagcaacaguaag

SEQ ID NO: 2901064 - RNA, 19 nt, Artificial Sequence
  Description of Artificial Sequence: Synthetic oligonucleotide
aaugugagagauggguuug

SEQ ID NO: 2901065 - RNA, 19 nt, Artificial Sequence
  Description of Artificial Sequence: Synthetic oligonucleotide
ugugcugcccacucgaagu

SEQ ID NO: 2901066 - RNA, 19 nt, Artificial Sequence
  Description of Artificial Sequence: Synthetic oligonucleotide
uaccugauuuccauauuug

SEQ ID NO: 2901067 - RNA, 19 nt, Artificial Sequence
  Description of Artificial Sequence: Synthetic oligonucleotide
ucagcugaguagaaaugca

SEQ ID NO: 2901068 - RNA, 19 nt, Artificial Sequence
  Description of Artificial Sequence: Synthetic oligonucleotide
ucaaauuguauaguuuguc

SEQ ID NO: 2901069 - RNA, 19 nt, Artificial Sequence
  Description of Artificial Sequence: Synthetic oligonucleotide
uuuggcucugaaagcaaca

SEQ ID NO: 2901070 - RNA, 19 nt, Artificial Sequence
  Description of Artificial Sequence: Synthetic oligonucleotide
uuuagugccucuuccaguu

SEQ ID NO: 2901071 - RNA, 19 nt, Artificial Sequence
  Description of Artificial Sequence: Synthetic oligonucleotide
cugaguagaaaugcagacg

SEQ ID NO: 2901072 - RNA, 19 nt, Artificial Sequence
  Description of Artificial Sequence: Synthetic oligonucleotide
uucaggucccucaaauugu

SEQ ID NO: 2901073 - RNA, 19 nt, Artificial Sequence
  Description of Artificial Sequence: Synthetic oligonucleotide
accgcucaaagagucagcc

SEQ ID NO: 2901074 - RNA, 19 nt, Artificial Sequence
  Description of Artificial Sequence: Synthetic oligonucleotide
caugcaugucaccaaacac

SEQ ID NO: 2901075 - RNA, 19 nt, Artificial Sequence
  Description of Artificial Sequence: Synthetic oligonucleotide
ugccucuuccaguugcugg

SEQ ID NO: 2901076 - RNA, 19 nt, Artificial Sequence
  Description of Artificial Sequence: Synthetic oligonucleotide
aggaaugugagagaugggu

SEQ ID NO: 2901077 - RNA, 19 nt, Artificial Sequence
  Description of Artificial Sequence: Synthetic oligonucleotide
cauauuuggggcucagcug

SEQ ID NO: 2901078 - RNA, 19 nt, Artificial Sequence
  Description of Artificial Sequence: Synthetic oligonucleotide
uccaguuugggcagagucu

SEQ ID NO: 2901079 - RNA, 19 nt, Artificial Sequence
  Description of Artificial Sequence: Synthetic oligonucleotide
ccucaaauuguauaguuug

SEQ ID NO: 2901080 - RNA, 19 nt, Artificial Sequence
  Description of Artificial Sequence: Synthetic oligonucleotide
uuuuagccugguaauguau

SEQ ID NO: 2901081 - RNA, 19 nt, Artificial Sequence
  Description of Artificial Sequence: Synthetic oligonucleotide
ccugauuuccauauuuggg

SEQ ID NO: 2901082 - RNA, 19 nt, Artificial Sequence
  Description of Artificial Sequence: Synthetic oligonucleotide
uuaccuccuccaccaaacg

SEQ ID NO: 2901083 - RNA, 19 nt, Artificial Sequence
  Description of Artificial Sequence: Synthetic oligonucleotide
aagcaacaguaagaauccc

SEQ ID NO: 2901084 - RNA, 19 nt, Artificial Sequence
  Description of Artificial Sequence: Synthetic oligonucleotide
auaccugauuuccauauuu

SEQ ID NO: 2901085 - RNA, 19 nt, Artificial Sequence
  Description of Artificial Sequence: Synthetic oligonucleotide
ugguaauguaugcguuggg

SEQ ID NO: 2901086 - RNA, 19 nt, Artificial Sequence
  Description of Artificial Sequence: Synthetic oligonucleotide
ggucccucaaauuguauag

SEQ ID NO: 2901087 - RNA, 19 nt, Artificial Sequence
  Description of Artificial Sequence: Synthetic oligonucleotide
ugaaggaaugugagagaug

SEQ ID NO: 2901088 - RNA, 19 nt, Artificial Sequence
  Description of Artificial Sequence: Synthetic oligonucleotide
gagucuugucaucuguuac

SEQ ID NO: 2901089 - RNA, 19 nt, Artificial Sequence
  Description of Artificial Sequence: Synthetic oligonucleotide
cugguucguuccuugaagc

SEQ ID NO: 2901090 - RNA, 19 nt, Artificial Sequence
  Description of Artificial Sequence: Synthetic oligonucleotide
uagugccucuuccaguugc

SEQ ID NO: 2901091 - RNA, 19 nt, Artificial Sequence
  Description of Artificial Sequence: Synthetic oligonucleotide
cugguaauguaugcguugg

SEQ ID NO: 2901092 - RNA, 19 nt, Artificial Sequence
  Description of Artificial Sequence: Synthetic oligonucleotide
guaagaaucccauuuugcu

SEQ ID NO: 2901093 - RNA, 19 nt, Artificial Sequence
  Description of Artificial Sequence: Synthetic oligonucleotide
gaaguauuccuggacucgc

SEQ ID NO: 2901094 - RNA, 19 nt, Artificial Sequence
  Description of Artificial Sequence: Synthetic oligonucleotide
uaugcguugggugaaggaa

SEQ ID NO: 2901095 - RNA, 19 nt, Artificial Sequence
  Description of Artificial Sequence: Synthetic oligonucleotide
gggugaaggaaugugagag

SEQ ID NO: 2901096 - RNA, 19 nt, Artificial Sequence
  Description of Artificial Sequence: Synthetic oligonucleotide
caguaagaaucccauuuug

SEQ ID NO: 2901097 - RNA, 19 nt, Artificial Sequence
  Description of Artificial Sequence: Synthetic oligonucleotide
aguauuccuggacucgcug

SEQ ID NO: 2901098 - RNA, 19 nt, Artificial Sequence
  Description of Artificial Sequence: Synthetic oligonucleotide
ugucaccaaacaccgcuca

SEQ ID NO: 2901099 - RNA, 19 nt, Artificial Sequence
  Description of Artificial Sequence: Synthetic oligonucleotide
auuuugcugggccuugcug

SEQ ID NO: 2901100 - RNA, 19 nt, Artificial Sequence
  Description of Artificial Sequence: Synthetic oligonucleotide
aguagaaaugcagacguuu

SEQ ID NO: 2901101 - RNA, 19 nt, Artificial Sequence
  Description of Artificial Sequence: Synthetic oligonucleotide
guauaguuugucugccagc

SEQ ID NO: 2901102 - RNA, 19 nt, Artificial Sequence
  Description of Artificial Sequence: Synthetic oligonucleotide
cagcugaguagaaaugcag

SEQ ID NO: 2901103 - RNA, 19 nt, Artificial Sequence
  Description of Artificial Sequence: Synthetic oligonucleotide
uagccugguaauguaugcg

SEQ ID NO: 2901104 - RNA, 19 nt, Artificial Sequence
  Description of Artificial Sequence: Synthetic oligonucleotide
uugaagccccuucaccacc

SEQ ID NO: 2901105 - RNA, 19 nt, Artificial Sequence
  Description of Artificial Sequence: Synthetic oligonucleotide
ucgaaguauuccuggacuc

SEQ ID NO: 2901106 - RNA, 19 nt, Artificial Sequence
  Description of Artificial Sequence: Synthetic oligonucleotide
auccuugaggggugcagcg

SEQ ID NO: 2901107 - RNA, 19 nt, Artificial Sequence
  Description of Artificial Sequence: Synthetic oligonucleotide
ugcguugggugaaggaaug

SEQ ID NO: 2901108 - RNA, 19 nt, Artificial Sequence
  Description of Artificial Sequence: Synthetic oligonucleotide
ugguucguuccuugaagcc

SEQ ID NO: 2901109 - RNA, 19 nt, Artificial Sequence
  Description of Artificial Sequence: Synthetic oligonucleotide
ugcuuuagugccucuucca

SEQ ID NO: 2901110 - RNA, 19 nt, Artificial Sequence
  Description of Artificial Sequence: Synthetic oligonucleotide
uggguuuggcucugaaagc

SEQ ID NO: 2901111 - RNA, 19 nt, Artificial Sequence
  Description of Artificial Sequence: Synthetic oligonucleotide
acaguaagaaucccauuuu

SEQ ID NO: 2901112 - RNA, 19 nt, Artificial Sequence
  Description of Artificial Sequence: Synthetic oligonucleotide
cucgcuguucugaccaucc

SEQ ID NO: 2901113 - RNA, 19 nt, Artificial Sequence
  Description of Artificial Sequence: Synthetic oligonucleotide
uccaccaaacgccgaaccu

SEQ ID NO: 2901114 - RNA, 19 nt, Artificial Sequence
  Description of Artificial Sequence: Synthetic oligonucleotide
agccugguaauguaugcgu

SEQ ID NO: 2901115 - RNA, 19 nt, Artificial Sequence
  Description of Artificial Sequence: Synthetic oligonucleotide
uguaugcguugggugaagg

SEQ ID NO: 2901116 - RNA, 19 nt, Artificial Sequence
  Description of Artificial Sequence: Synthetic oligonucleotide
uuguauaguuugucugcca

SEQ ID NO: 2901117 - RNA, 19 nt, Artificial Sequence
  Description of Artificial Sequence: Synthetic oligonucleotide
uugggcagagucuugucau

SEQ ID NO: 2901118 - RNA, 19 nt, Artificial Sequence
  Description of Artificial Sequence: Synthetic oligonucleotide
aauguaugcguugggugaa

SEQ ID NO: 2901119 - RNA, 19 nt, Artificial Sequence
  Description of Artificial Sequence: Synthetic oligonucleotide
ucgcuccucgaacagcugc

SEQ ID NO: 2901120 - RNA, 19 nt, Artificial Sequence
  Description of Artificial Sequence: Synthetic oligonucleotide
caaauuguauaguuugucu

SEQ ID NO: 2901121 - RNA, 19 nt, Artificial Sequence
  Description of Artificial Sequence: Synthetic oligonucleotide
agaaucccauuuugcuggg

SEQ ID NO: 2901122 - RNA, 19 nt, Artificial Sequence
  Description of Artificial Sequence: Synthetic oligonucleotide
uguuaccuccuccaccaaa

SEQ ID NO: 2901123 - RNA, 19 nt, Artificial Sequence
  Description of Artificial Sequence: Synthetic oligonucleotide
uuuggggcucagcugagua

SEQ ID NO: 2901124 - RNA, 19 nt, Artificial Sequence
  Description of Artificial Sequence: Synthetic oligonucleotide
cuugaagccccuucaccac

SEQ ID NO: 2901125 - RNA, 19 nt, Artificial Sequence
  Description of Artificial Sequence: Synthetic oligonucleotide
cugaaagcaacaguaagaa

SEQ ID NO: 2901126 - RNA, 19 nt, Artificial Sequence
  Description of Artificial Sequence: Synthetic oligonucleotide
cugcuuuagugccucuucc

SEQ ID NO: 2901127 - RNA, 19 nt, Artificial Sequence
  Description of Artificial Sequence: Synthetic oligonucleotide
ugaaagcaacaguaagaau

SEQ ID NO: 2901128 - RNA, 19 nt, Artificial Sequence
  Description of Artificial Sequence: Synthetic oligonucleotide
ucugaccauccuugagggg

SEQ ID NO: 2901129 - RNA, 19 nt, Artificial Sequence
  Description of Artificial Sequence: Synthetic oligonucleotide
uauuuggggcucagcugag

SEQ ID NO: 2901130 - RNA, 19 nt, Artificial Sequence
  Description of Artificial Sequence: Synthetic oligonucleotide
ucccucaaauuguauaguu

SEQ ID NO: 2901131 - RNA, 19 nt, Artificial Sequence
  Description of Artificial Sequence: Synthetic oligonucleotide
ucaaagagucagcccucgc

SEQ ID NO: 2901132 - RNA, 19 nt, Artificial Sequence
  Description of Artificial Sequence: Synthetic oligonucleotide
uuggggcucagcugaguag

SEQ ID NO: 2901133 - RNA, 19 nt, Artificial Sequence
  Description of Artificial Sequence: Synthetic oligonucleotide
guuaccuccuccaccaaac

SEQ ID NO: 2901134 - RNA, 19 nt, Artificial Sequence
  Description of Artificial Sequence: Synthetic oligonucleotide
uuugcugggccuugcugga

SEQ ID NO: 2901135 - RNA, 19 nt, Artificial Sequence
  Description of Artificial Sequence: Synthetic oligonucleotide
ucugccagcuucaccaguu

SEQ ID NO: 2901136 - RNA, 19 nt, Artificial Sequence
  Description of Artificial Sequence: Synthetic oligonucleotide
aguuuggccccugggcugc

SEQ ID NO: 2901137 - RNA, 19 nt, Artificial Sequence
  Description of Artificial Sequence: Synthetic oligonucleotide
ugaccauccuugaggggug

SEQ ID NO: 2901138 - RNA, 19 nt, Artificial Sequence
  Description of Artificial Sequence: Synthetic oligonucleotide
guucguuccuugaagcccc

SEQ ID NO: 2901139 - RNA, 19 nt, Artificial Sequence
  Description of Artificial Sequence: Synthetic oligonucleotide
guugcugguucguuccuug

SEQ ID NO: 2901140 - RNA, 19 nt, Artificial Sequence
  Description of Artificial Sequence: Synthetic oligonucleotide
agcaacaguaagaauccca

SEQ ID NO: 2901141 - RNA, 19 nt, Artificial Sequence
  Description of Artificial Sequence: Synthetic oligonucleotide
uauuccuggacucgcuguu

SEQ ID NO: 2901142 - RNA, 19 nt, Artificial Sequence
  Description of Artificial Sequence: Synthetic oligonucleotide
ucaccaguuuggccccugg

SEQ ID NO: 2901143 - RNA, 19 nt, Artificial Sequence
  Description of Artificial Sequence: Synthetic oligonucleotide
uccaguugcugguucguuc

SEQ ID NO: 2901144 - RNA, 19 nt, Artificial Sequence
  Description of Artificial Sequence: Synthetic oligonucleotide
aaggaaugugagagauggg

SEQ ID NO: 2901145 - RNA, 19 nt, Artificial Sequence
  Description of Artificial Sequence: Synthetic oligonucleotide
ugccagcuucaccaguuug

SEQ ID NO: 2901146 - RNA, 19 nt, Artificial Sequence
  Description of Artificial Sequence: Synthetic oligonucleotide
agagucuugucaucuguua

SEQ ID NO: 2901147 - RNA, 19 nt, Artificial Sequence
  Description of Artificial Sequence: Synthetic oligonucleotide
acaccgcucaaagagucag

SEQ ID NO: 2901148 - RNA, 19 nt, Artificial Sequence
  Description of Artificial Sequence: Synthetic oligonucleotide
ugccugcucuaccuguugc

SEQ ID NO: 2901149 - RNA, 19 nt, Artificial Sequence
  Description of Artificial Sequence: Synthetic oligonucleotide
acagcugcuuuagugccuc

SEQ ID NO: 2901150 - RNA, 19 nt, Artificial Sequence
  Description of Artificial Sequence: Synthetic oligonucleotide
uauaccugauuuccauauu

SEQ ID NO: 2901151 - RNA, 19 nt, Artificial Sequence
  Description of Artificial Sequence: Synthetic oligonucleotide
ugaagccccuucaccaccu

SEQ ID NO: 2901152 - RNA, 19 nt, Artificial Sequence
  Description of Artificial Sequence: Synthetic oligonucleotide
uuccuggacucgcuguucu

SEQ ID NO: 2901153 - RNA, 19 nt, Artificial Sequence
  Description of Artificial Sequence: Synthetic oligonucleotide
caugucaccaaacaccgcu

SEQ ID NO: 2901154 - RNA, 19 nt, Artificial Sequence
  Description of Artificial Sequence: Synthetic oligonucleotide
ugcucuaccuguugccgcu

SEQ ID NO: 2901155 - RNA, 19 nt, Artificial Sequence
  Description of Artificial Sequence: Synthetic oligonucleotide
cucaaagagucagcccucg

SEQ ID NO: 2901156 - RNA, 19 nt, Artificial Sequence
  Description of Artificial Sequence: Synthetic oligonucleotide
ucaggucccucaaauugua

SEQ ID NO: 2901157 - RNA, 19 nt, Artificial Sequence
  Description of Artificial Sequence: Synthetic oligonucleotide
uggggcucagcugaguaga

SEQ ID NO: 2901158 - RNA, 19 nt, Artificial Sequence
  Description of Artificial Sequence: Synthetic oligonucleotide
gaggggugcagcgauucag

SEQ ID NO: 2901159 - RNA, 19 nt, Artificial Sequence
  Description of Artificial Sequence: Synthetic oligonucleotide
ucaccaaacaccgcucaaa

SEQ ID NO: 2901160 - RNA, 19 nt, Artificial Sequence
  Description of Artificial Sequence: Synthetic oligonucleotide
guugggugaaggaauguga

SEQ ID NO: 2901161 - RNA, 19 nt, Artificial Sequence
  Description of Artificial Sequence: Synthetic oligonucleotide
uccucgaacagcugcuuua

SEQ ID NO: 2901162 - RNA, 19 nt, Artificial Sequence
  Description of Artificial Sequence: Synthetic oligonucleotide
gauggguuuggcucugaaa

SEQ ID NO: 2901163 - RNA, 19 nt, Artificial Sequence
  Description of Artificial Sequence: Synthetic oligonucleotide
gaaugugagagauggguuu

SEQ ID NO: 2901164 - RNA, 19 nt, Artificial Sequence
  Description of Artificial Sequence: Synthetic oligonucleotide
accaaacaccgcucaaaga

SEQ ID NO: 2901165 - RNA, 19 nt, Artificial Sequence
  Description of Artificial Sequence: Synthetic oligonucleotide
cuccaccaaacgccgaacc

SEQ ID NO: 2901166 - RNA, 19 nt, Artificial Sequence
  Description of Artificial Sequence: Synthetic oligonucleotide
uuagugccucuuccaguug

SEQ ID NO: 2901167 - RNA, 19 nt, Artificial Sequence
  Description of Artificial Sequence: Synthetic oligonucleotide
guauaccugauuuccauau

SEQ ID NO: 2901168 - RNA, 19 nt, Artificial Sequence
  Description of Artificial Sequence: Synthetic oligonucleotide
uucaccaccugugcugccc

SEQ ID NO: 2901169 - RNA, 19 nt, Artificial Sequence
  Description of Artificial Sequence: Synthetic oligonucleotide
cgaacagcugcuuuagugc

SEQ ID NO: 2901170 - RNA, 19 nt, Artificial Sequence
  Description of Artificial Sequence: Synthetic oligonucleotide
aggucccucaaauuguaua

SEQ ID NO: 2901171 - RNA, 19 nt, Artificial Sequence
  Description of Artificial Sequence: Synthetic oligonucleotide
uccuccaccaaacgccgaa

SEQ ID NO: 2901172 - RNA, 19 nt, Artificial Sequence
  Description of Artificial Sequence: Synthetic oligonucleotide
gcugguucguuccuugaag

SEQ ID NO: 2901173 - RNA, 19 nt, Artificial Sequence
  Description of Artificial Sequence: Synthetic oligonucleotide
aguuugggcagagucuugu

SEQ ID NO: 2901174 - RNA, 19 nt, Artificial Sequence
  Description of Artificial Sequence: Synthetic oligonucleotide
ugcugguucguuccuugaa

SEQ ID NO: 2901175 - RNA, 19 nt, Artificial Sequence
  Description of Artificial Sequence: Synthetic oligonucleotide
uggggugccugcucuaccu

SEQ ID NO: 2901176 - RNA, 19 nt, Artificial Sequence
  Description of Artificial Sequence: Synthetic oligonucleotide
gguucguuccuugaagccc

SEQ ID NO: 2901177 - RNA, 19 nt, Artificial Sequence
  Description of Artificial Sequence: Synthetic oligonucleotide
accugugcugcccacucga

SEQ ID NO: 2901178 - RNA, 19 nt, Artificial Sequence
  Description of Artificial Sequence: Synthetic oligonucleotide
aucccauuuugcugggccu

SEQ ID NO: 2901179 - RNA, 19 nt, Artificial Sequence
  Description of Artificial Sequence: Synthetic oligonucleotide
cugcucuaccuguugccgc

SEQ ID NO: 2901180 - RNA, 19 nt, Artificial Sequence
  Description of Artificial Sequence: Synthetic oligonucleotide
agucagcccucgcuccucg

SEQ ID NO: 2901181 - RNA, 19 nt, Artificial Sequence
  Description of Artificial Sequence: Synthetic oligonucleotide
uggacucgcuguucugacc

SEQ ID NO: 2901182 - RNA, 19 nt, Artificial Sequence
  Description of Artificial Sequence: Synthetic oligonucleotide
augugagagauggguuugg

SEQ ID NO: 2901183 - RNA, 19 nt, Artificial Sequence
  Description of Artificial Sequence: Synthetic oligonucleotide
ccuguugccgcuuucuuuc

SEQ ID NO: 2901184 - RNA, 19 nt, Artificial Sequence
  Description of Artificial Sequence: Synthetic oligonucleotide
cauccuugaggggugcagc

SEQ ID NO: 2901185 - RNA, 19 nt, Artificial Sequence
  Description of Artificial Sequence: Synthetic oligonucleotide
uugcuggagccaugcaugu

SEQ ID NO: 2901186 - RNA, 19 nt, Artificial Sequence
  Description of Artificial Sequence: Synthetic oligonucleotide
aagccccuucaccaccugu

SEQ ID NO: 2901187 - RNA, 19 nt, Artificial Sequence
  Description of Artificial Sequence: Synthetic oligonucleotide
uccauauuuggggcucagc

SEQ ID NO: 2901188 - RNA, 19 nt, Artificial Sequence
  Description of Artificial Sequence: Synthetic oligonucleotide
ccaguugcugguucguucc

SEQ ID NO: 2901189 - RNA, 19 nt, Artificial Sequence
  Description of Artificial Sequence: Synthetic oligonucleotide
caucuguuaccuccuccac

SEQ ID NO: 2901190 - RNA, 19 nt, Artificial Sequence
  Description of Artificial Sequence: Synthetic oligonucleotide
aaguauuccuggacucgcu

SEQ ID NO: 2901191 - RNA, 19 nt, Artificial Sequence
  Description of Artificial Sequence: Synthetic oligonucleotide
guuuggcucugaaagcaac

SEQ ID NO: 2901192 - RNA, 19 nt, Artificial Sequence
  Description of Artificial Sequence: Synthetic oligonucleotide
gcuggagccaugcauguca

SEQ ID NO: 2901193 - RNA, 19 nt, Artificial Sequence
  Description of Artificial Sequence: Synthetic oligonucleotide
auuccuggacucgcuguuc

SEQ ID NO: 2901194 - RNA, 19 nt, Artificial Sequence
  Description of Artificial Sequence: Synthetic oligonucleotide
ucaccaccugugcugccca

SEQ ID NO: 2901195 - RNA, 19 nt, Artificial Sequence
  Description of Artificial Sequence: Synthetic oligonucleotide
ucuaccuguugccgcuuuc

SEQ ID NO: 2901196 - RNA, 19 nt, Artificial Sequence
  Description of Artificial Sequence: Synthetic oligonucleotide
ccacucgaaguauuccugg

SEQ ID NO: 2901197 - RNA, 19 nt, Artificial Sequence
  Description of Artificial Sequence: Synthetic oligonucleotide
augucaccaaacaccgcuc

SEQ ID NO: 2901198 - RNA, 19 nt, Artificial Sequence
  Description of Artificial Sequence: Synthetic oligonucleotide
aggggugcagcgauucagg

SEQ ID NO: 2901199 - RNA, 19 nt, Artificial Sequence
  Description of Artificial Sequence: Synthetic oligonucleotide
cuggacucgcuguucugac

SEQ ID NO: 2901200 - RNA, 19 nt, Artificial Sequence
  Description of Artificial Sequence: Synthetic oligonucleotide
ugcccacucgaaguauucc

SEQ ID NO: 2901201 - RNA, 19 nt, Artificial Sequence
  Description of Artificial Sequence: Synthetic oligonucleotide
uuuccauauuuggggcuca

SEQ ID NO: 2901202 - RNA, 19 nt, Artificial Sequence
  Description of Artificial Sequence: Synthetic oligonucleotide
agccaugcaugucaccaaa

SEQ ID NO: 2901203 - RNA, 19 nt, Artificial Sequence
  Description of Artificial Sequence: Synthetic oligonucleotide
ggacucgcuguucugacca

SEQ ID NO: 2901204 - RNA, 19 nt, Artificial Sequence
  Description of Artificial Sequence: Synthetic oligonucleotide
uugaggggugcagcgauuc

SEQ ID NO: 2901205 - RNA, 19 nt, Artificial Sequence
  Description of Artificial Sequence: Synthetic oligonucleotide
aacagcugcuuuagugccu

SEQ ID NO: 2901206 - RNA, 19 nt, Artificial Sequence
  Description of Artificial Sequence: Synthetic oligonucleotide
guaugcguugggugaagga

SEQ ID NO: 2901207 - RNA, 19 nt, Artificial Sequence
  Description of Artificial Sequence: Synthetic oligonucleotide
cucaaauuguauaguuugu

SEQ ID NO: 2901208 - RNA, 19 nt, Artificial Sequence
  Description of Artificial Sequence: Synthetic oligonucleotide
ugaggggugcagcgauuca

SEQ ID NO: 2901209 - RNA, 19 nt, Artificial Sequence
  Description of Artificial Sequence: Synthetic oligonucleotide
agagucagcccucgcuccu

SEQ ID NO: 2901210 - RNA, 19 nt, Artificial Sequence
  Description of Artificial Sequence: Synthetic oligonucleotide
cucgaaguauuccuggacu

SEQ ID NO: 2901211 - RNA, 19 nt, Artificial Sequence
  Description of Artificial Sequence: Synthetic oligonucleotide
gcuuucuuuccaguuuggg

SEQ ID NO: 2901212 - RNA, 19 nt, Artificial Sequence
  Description of Artificial Sequence: Synthetic oligonucleotide
caguuuggccccugggcug

SEQ ID NO: 2901213 - RNA, 19 nt, Artificial Sequence
  Description of Artificial Sequence: Synthetic oligonucleotide
ggagccaugcaugucacca

SEQ ID NO: 2901214 - RNA, 19 nt, Artificial Sequence
  Description of Artificial Sequence: Synthetic oligonucleotide
ccugguaauguaugcguug

SEQ ID NO: 2901215 - RNA, 19 nt, Artificial Sequence
  Description of Artificial Sequence: Synthetic oligonucleotide
ucuugucaucuguuaccuc

SEQ ID NO: 2901216 - RNA, 19 nt, Artificial Sequence
  Description of Artificial Sequence: Synthetic oligonucleotide
ucagcccucgcuccucgaa

SEQ ID NO: 2901217 - RNA, 19 nt, Artificial Sequence
  Description of Artificial Sequence: Synthetic oligonucleotide
aacaccgcucaaagaguca

SEQ ID NO: 2901218 - RNA, 19 nt, Artificial Sequence
  Description of Artificial Sequence: Synthetic oligonucleotide
uuccauauuuggggcucag

SEQ ID NO: 2901219 - RNA, 19 nt, Artificial Sequence
  Description of Artificial Sequence: Synthetic oligonucleotide
caccaguuuggccccuggg

SEQ ID NO: 2901220 - RNA, 19 nt, Artificial Sequence
  Description of Artificial Sequence: Synthetic oligonucleotide
ccuugaagccccuucacca

SEQ ID NO: 2901221 - RNA, 19 nt, Artificial Sequence
  Description of Artificial Sequence: Synthetic oligonucleotide
cuggagccaugcaugucac

SEQ ID NO: 2901222 - RNA, 19 nt, Artificial Sequence
  Description of Artificial Sequence: Synthetic oligonucleotide
uugcugguucguuccuuga

SEQ ID NO: 2901223 - RNA, 19 nt, Artificial Sequence
  Description of Artificial Sequence: Synthetic oligonucleotide
acucgcuguucugaccauc

SEQ ID NO: 2901224 - RNA, 19 nt, Artificial Sequence
  Description of Artificial Sequence: Synthetic oligonucleotide
agcccucgcuccucgaaca

SEQ ID NO: 2901225 - RNA, 19 nt, Artificial Sequence
  Description of Artificial Sequence: Synthetic oligonucleotide
aguuugucugccagcuuca

SEQ ID NO: 2901226 - RNA, 19 nt, Artificial Sequence
  Description of Artificial Sequence: Synthetic oligonucleotide
caaagagucagcccucgcu

SEQ ID NO: 2901227 - RNA, 19 nt, Artificial Sequence
  Description of Artificial Sequence: Synthetic oligonucleotide
cuguugccgcuuucuuucc

SEQ ID NO: 2901228 - RNA, 19 nt, Artificial Sequence
  Description of Artificial Sequence: Synthetic oligonucleotide
cugaccauccuugaggggu

SEQ ID NO: 2901229 - RNA, 19 nt, Artificial Sequence
  Description of Artificial Sequence: Synthetic oligonucleotide
ugggcagagucuugucauc

SEQ ID NO: 2901230 - RNA, 19 nt, Artificial Sequence
  Description of Artificial Sequence: Synthetic oligonucleotide
gugaaggaaugugagagau

SEQ ID NO: 2901231 - RNA, 19 nt, Artificial Sequence
  Description of Artificial Sequence: Synthetic oligonucleotide
ucgcuguucugaccauccu

SEQ ID NO: 2901232 - RNA, 19 nt, Artificial Sequence
  Description of Artificial Sequence: Synthetic oligonucleotide
uggagccaugcaugucacc

SEQ ID NO: 2901233 - RNA, 19 nt, Artificial Sequence
  Description of Artificial Sequence: Synthetic oligonucleotide
uugccgcuuucuuuccagu

SEQ ID NO: 2901234 - RNA, 19 nt, Artificial Sequence
  Description of Artificial Sequence: Synthetic oligonucleotide
uguggggugccugcucuac

SEQ ID NO: 2901235 - RNA, 19 nt, Artificial Sequence
  Description of Artificial Sequence: Synthetic oligonucleotide
caccgcucaaagagucagc

SEQ ID NO: 2901236 - RNA, 19 nt, Artificial Sequence
  Description of Artificial Sequence: Synthetic oligonucleotide
cacucgaaguauuccugga

SEQ ID NO: 2901237 - RNA, 19 nt, Artificial Sequence
  Description of Artificial Sequence: Synthetic oligonucleotide
guuugggcagagucuuguc

SEQ ID NO: 2901238 - RNA, 19 nt, Artificial Sequence
  Description of Artificial Sequence: Synthetic oligonucleotide
uccuggacucgcuguucug

SEQ ID NO: 2901239 - RNA, 19 nt, Artificial Sequence
  Description of Artificial Sequence: Synthetic oligonucleotide
gauucaggucccucaaauu

SEQ ID NO: 2901240 - RNA, 19 nt, Artificial Sequence
  Description of Artificial Sequence: Synthetic oligonucleotide
cugcccacucgaaguauuc

SEQ ID NO: 2901241 - RNA, 19 nt, Artificial Sequence
  Description of Artificial Sequence: Synthetic oligonucleotide
cuuuagugccucuuccagu

SEQ ID NO: 2901242 - RNA, 19 nt, Artificial Sequence
  Description of Artificial Sequence: Synthetic oligonucleotide
agauggguuuggcucugaa

SEQ ID NO: 2901243 - RNA, 19 nt, Artificial Sequence
  Description of Artificial Sequence: Synthetic oligonucleotide
caaacaccgcucaaagagu

SEQ ID NO: 2901244 - RNA, 19 nt, Artificial Sequence
  Description of Artificial Sequence: Synthetic oligonucleotide
ugccgcuuucuuuccaguu

SEQ ID NO: 2901245 - RNA, 19 nt, Artificial Sequence
  Description of Artificial Sequence: Synthetic oligonucleotide
uaccuguugccgcuuucuu

SEQ ID NO: 2901246 - RNA, 19 nt, Artificial Sequence
  Description of Artificial Sequence: Synthetic oligonucleotide
agccccuucaccaccugug

SEQ ID NO: 2901247 - RNA, 19 nt, Artificial Sequence
  Description of Artificial Sequence: Synthetic oligonucleotide
guauuccuggacucgcugu

SEQ ID NO: 2901248 - RNA, 19 nt, Artificial Sequence
  Description of Artificial Sequence: Synthetic oligonucleotide
auaguuugucugccagcuu

SEQ ID NO: 2901249 - RNA, 19 nt, Artificial Sequence
  Description of Artificial Sequence: Synthetic oligonucleotide
uccuugaggggugcagcga

SEQ ID NO: 2901250 - RNA, 19 nt, Artificial Sequence
  Description of Artificial Sequence: Synthetic oligonucleotide
ggguuuggcucugaaagca

SEQ ID NO: 2901251 - RNA, 19 nt, Artificial Sequence
  Description of Artificial Sequence: Synthetic oligonucleotide
cagcgauucaggucccuca

SEQ ID NO: 2901252 - RNA, 19 nt, Artificial Sequence
  Description of Artificial Sequence: Synthetic oligonucleotide
gcugcuuuagugccucuuc

SEQ ID NO: 2901253 - RNA, 19 nt, Artificial Sequence
  Description of Artificial Sequence: Synthetic oligonucleotide
augcguugggugaaggaau

SEQ ID NO: 2901254 - RNA, 19 nt, Artificial Sequence
  Description of Artificial Sequence: Synthetic oligonucleotide
agagauggguuuggcucug

SEQ ID NO: 2901255 - RNA, 19 nt, Artificial Sequence
  Description of Artificial Sequence: Synthetic oligonucleotide
auguaugcguugggugaag

SEQ ID NO: 2901256 - RNA, 19 nt, Artificial Sequence
  Description of Artificial Sequence: Synthetic oligonucleotide
gguaauguaugcguugggu

SEQ ID NO: 2901257 - RNA, 19 nt, Artificial Sequence
  Description of Artificial Sequence: Synthetic oligonucleotide
gucuugucaucuguuaccu

SEQ ID NO: 2901258 - RNA, 19 nt, Artificial Sequence
  Description of Artificial Sequence: Synthetic oligonucleotide
gugagagauggguuuggcu

SEQ ID NO: 2901259 - RNA, 19 nt, Artificial Sequence
  Description of Artificial Sequence: Synthetic oligonucleotide
gguauaccugauuuccaua

SEQ ID NO: 2901260 - RNA, 19 nt, Artificial Sequence
  Description of Artificial Sequence: Synthetic oligonucleotide
gagccaugcaugucaccaa

SEQ ID NO: 2901261 - RNA, 19 nt, Artificial Sequence
  Description of Artificial Sequence: Synthetic oligonucleotide
uucguuccuugaagccccu

SEQ ID NO: 2901262 - RNA, 19 nt, Artificial Sequence
  Description of Artificial Sequence: Synthetic oligonucleotide
caccugugcugcccacucg

SEQ ID NO: 2901263 - RNA, 19 nt, Artificial Sequence
  Description of Artificial Sequence: Synthetic oligonucleotide
ccugcucuaccuguugccg

SEQ ID NO: 2901264 - RNA, 19 nt, Artificial Sequence
  Description of Artificial Sequence: Synthetic oligonucleotide
cccacucgaaguauuccug

SEQ ID NO: 2901265 - RNA, 19 nt, Artificial Sequence
  Description of Artificial Sequence: Synthetic oligonucleotide
gaagccccuucaccaccug

SEQ ID NO: 2901266 - RNA, 19 nt, Artificial Sequence
  Description of Artificial Sequence: Synthetic oligonucleotide
cgaaguauuccuggacucg

SEQ ID NO: 2901267 - RNA, 19 nt, Artificial Sequence
  Description of Artificial Sequence: Synthetic oligonucleotide
ugggccuugcuggagccau

SEQ ID NO: 2901268 - RNA, 19 nt, Artificial Sequence
  Description of Artificial Sequence: Synthetic oligonucleotide
caguuugggcagagucuug

SEQ ID NO: 2901269 - RNA, 19 nt, Artificial Sequence
  Description of Artificial Sequence: Synthetic oligonucleotide
ucccauuuugcugggccuu

SEQ ID NO: 2901270 - RNA, 19 nt, Artificial Sequence
  Description of Artificial Sequence: Synthetic oligonucleotide
cuucaccaccugugcugcc

SEQ ID NO: 2901271 - RNA, 19 nt, Artificial Sequence
  Description of Artificial Sequence: Synthetic oligonucleotide
cuguucugaccauccuuga

SEQ ID NO: 2901272 - RNA, 19 nt, Artificial Sequence
  Description of Artificial Sequence: Synthetic oligonucleotide
gugccugcucuaccuguug

SEQ ID NO: 2901273 - RNA, 19 nt, Artificial Sequence
  Description of Artificial Sequence: Synthetic oligonucleotide
ccgcuuucuuuccaguuug

SEQ ID NO: 2901274 - RNA, 19 nt, Artificial Sequence
  Description of Artificial Sequence: Synthetic oligonucleotide
uucaccaguuuggccccug

SEQ ID NO: 2901275 - RNA, 19 nt, Artificial Sequence
  Description of Artificial Sequence: Synthetic oligonucleotide
guggggugccugcucuacc

SEQ ID NO: 2901276 - RNA, 19 nt, Artificial Sequence
  Description of Artificial Sequence: Synthetic oligonucleotide
guagaaaugcagacguuuu

SEQ ID NO: 2901277 - RNA, 19 nt, Artificial Sequence
  Description of Artificial Sequence: Synthetic oligonucleotide
cagcccucgcuccucgaac

SEQ ID NO: 2901278 - RNA, 19 nt, Artificial Sequence
  Description of Artificial Sequence: Synthetic oligonucleotide
ggcucagcugaguagaaau

SEQ ID NO: 2901279 - RNA, 19 nt, Artificial Sequence
  Description of Artificial Sequence: Synthetic oligonucleotide
ccauauuuggggcucagcu

SEQ ID NO: 2901280 - RNA, 19 nt, Artificial Sequence
  Description of Artificial Sequence: Synthetic oligonucleotide
gcucagcugaguagaaaug

SEQ ID NO: 2901281 - RNA, 19 nt, Artificial Sequence
  Description of Artificial Sequence: Synthetic oligonucleotide
gucaccaaacaccgcucaa

SEQ ID NO: 2901282 - RNA, 19 nt, Artificial Sequence
  Description of Artificial Sequence: Synthetic oligonucleotide
ccaugcaugucaccaaaca

SEQ ID NO: 2901283 - RNA, 19 nt, Artificial Sequence
  Description of Artificial Sequence: Synthetic oligonucleotide
ugggcugcuguggggugcc

SEQ ID NO: 2901284 - RNA, 19 nt, Artificial Sequence
  Description of Artificial Sequence: Synthetic oligonucleotide
gccugcucuaccuguugcc

SEQ ID NO: 2901285 - RNA, 19 nt, Artificial Sequence
  Description of Artificial Sequence: Synthetic oligonucleotide
ccaccaaacgccgaaccug

SEQ ID NO: 2901286 - RNA, 19 nt, Artificial Sequence
  Description of Artificial Sequence: Synthetic oligonucleotide
auuuggggcucagcugagu

SEQ ID NO: 2901287 - RNA, 19 nt, Artificial Sequence
  Description of Artificial Sequence: Synthetic oligonucleotide
agugccucuuccaguugcu

SEQ ID NO: 2901288 - RNA, 19 nt, Artificial Sequence
  Description of Artificial Sequence: Synthetic oligonucleotide
guuugucugccagcuucac

SEQ ID NO: 2901289 - RNA, 19 nt, Artificial Sequence
  Description of Artificial Sequence: Synthetic oligonucleotide
uugcugggccuugcuggag

SEQ ID NO: 2901290 - RNA, 19 nt, Artificial Sequence
  Description of Artificial Sequence: Synthetic oligonucleotide
gaccauccuugaggggugc

SEQ ID NO: 2901291 - RNA, 19 nt, Artificial Sequence
  Description of Artificial Sequence: Synthetic oligonucleotide
cugggcugcuguggggugc

SEQ ID NO: 2901292 - RNA, 19 nt, Artificial Sequence
  Description of Artificial Sequence: Synthetic oligonucleotide
gggugcagcgauucagguc

SEQ ID NO: 2901293 - RNA, 19 nt, Artificial Sequence
  Description of Artificial Sequence: Synthetic oligonucleotide
gcaacaguaagaaucccau

SEQ ID NO: 2901294 - RNA, 19 nt, Artificial Sequence
  Description of Artificial Sequence: Synthetic oligonucleotide
ccuucaccaccugugcugc

SEQ ID NO: 2901295 - RNA, 19 nt, Artificial Sequence
  Description of Artificial Sequence: Synthetic oligonucleotide
ccucgaacagcugcuuuag

SEQ ID NO: 2901296 - RNA, 19 nt, Artificial Sequence
  Description of Artificial Sequence: Synthetic oligonucleotide
cucgcuccucgaacagcug

SEQ ID NO: 2901297 - RNA, 19 nt, Artificial Sequence
  Description of Artificial Sequence: Synthetic oligonucleotide
ggguauaccugauuuccau

SEQ ID NO: 2901298 - RNA, 19 nt, Artificial Sequence
  Description of Artificial Sequence: Synthetic oligonucleotide
uuccaguugcugguucguu

SEQ ID NO: 2901299 - RNA, 19 nt, Artificial Sequence
  Description of Artificial Sequence: Synthetic oligonucleotide
aguugcugguucguuccuu

SEQ ID NO: 2901300 - RNA, 19 nt, Artificial Sequence
  Description of Artificial Sequence: Synthetic oligonucleotide
ugcugcccacucgaaguau

SEQ ID NO: 2901301 - RNA, 19 nt, Artificial Sequence
  Description of Artificial Sequence: Synthetic oligonucleotide
ugcuggagccaugcauguc

SEQ ID NO: 2901302 - RNA, 19 nt, Artificial Sequence
  Description of Artificial Sequence: Synthetic oligonucleotide
accaccugugcugcccacu

SEQ ID NO: 2901303 - RNA, 19 nt, Artificial Sequence
  Description of Artificial Sequence: Synthetic oligonucleotide
ccgcucaaagagucagccc

SEQ ID NO: 2901304 - RNA, 19 nt, Artificial Sequence
  Description of Artificial Sequence: Synthetic oligonucleotide
uggccccugggcugcugug

SEQ ID NO: 2901305 - RNA, 19 nt, Artificial Sequence
  Description of Artificial Sequence: Synthetic oligonucleotide
agcugcuuuagugccucuu

SEQ ID NO: 2901306 - RNA, 19 nt, Artificial Sequence
  Description of Artificial Sequence: Synthetic oligonucleotide
gcagagucuugucaucugu

SEQ ID NO: 2901307 - RNA, 19 nt, Artificial Sequence
  Description of Artificial Sequence: Synthetic oligonucleotide
gccccugggcugcuguggg

SEQ ID NO: 2901308 - RNA, 19 nt, Artificial Sequence
  Description of Artificial Sequence: Synthetic oligonucleotide
gcucugaaagcaacaguaa

SEQ ID NO: 2901309 - RNA, 19 nt, Artificial Sequence
  Description of Artificial Sequence: Synthetic oligonucleotide
ugcagcgauucaggucccu

SEQ ID NO: 2901310 - RNA, 19 nt, Artificial Sequence
  Description of Artificial Sequence: Synthetic oligonucleotide
cguugggugaaggaaugug

SEQ ID NO: 2901311 - RNA, 19 nt, Artificial Sequence
  Description of Artificial Sequence: Synthetic oligonucleotide
gagucagcccucgcuccuc

SEQ ID NO: 2901312 - RNA, 19 nt, Artificial Sequence
  Description of Artificial Sequence: Synthetic oligonucleotide
gugcugcccacucgaagua

SEQ ID NO: 2901313 - RNA, 19 nt, Artificial Sequence
  Description of Artificial Sequence: Synthetic oligonucleotide
cauuuugcugggccuugcu

SEQ ID NO: 2901314 - RNA, 19 nt, Artificial Sequence
  Description of Artificial Sequence: Synthetic oligonucleotide
uuuggccccugggcugcug

SEQ ID NO: 2901315 - RNA, 19 nt, Artificial Sequence
  Description of Artificial Sequence: Synthetic oligonucleotide
cgcucaaagagucagcccu

SEQ ID NO: 2901316 - RNA, 19 nt, Artificial Sequence
  Description of Artificial Sequence: Synthetic oligonucleotide
gucccucaaauuguauagu

SEQ ID NO: 2901317 - RNA, 19 nt, Artificial Sequence
  Description of Artificial Sequence: Synthetic oligonucleotide
cagagucuugucaucuguu

SEQ ID NO: 2901318 - RNA, 19 nt, Artificial Sequence
  Description of Artificial Sequence: Synthetic oligonucleotide
cuaccuguugccgcuuucu

SEQ ID NO: 2901319 - RNA, 19 nt, Artificial Sequence
  Description of Artificial Sequence: Synthetic oligonucleotide
accauccuugaggggugca

SEQ ID NO: 2901320 - RNA, 19 nt, Artificial Sequence
  Description of Artificial Sequence: Synthetic oligonucleotide
ggaaugugagagauggguu

SEQ ID NO: 2901321 - RNA, 19 nt, Artificial Sequence
  Description of Artificial Sequence: Synthetic oligonucleotide
caacaguaagaaucccauu

SEQ ID NO: 2901322 - RNA, 19 nt, Artificial Sequence
  Description of Artificial Sequence: Synthetic oligonucleotide
gcccacucgaaguauuccu

SEQ ID NO: 2901323 - RNA, 19 nt, Artificial Sequence
  Description of Artificial Sequence: Synthetic oligonucleotide
ggggugccugcucuaccug

SEQ ID NO: 2901324 - RNA, 19 nt, Artificial Sequence
  Description of Artificial Sequence: Synthetic oligonucleotide
gcucaaagagucagcccuc

SEQ ID NO: 2901325 - RNA, 19 nt, Artificial Sequence
  Description of Artificial Sequence: Synthetic oligonucleotide
ggccccugggcugcugugg

SEQ ID NO: 2901326 - RNA, 19 nt, Artificial Sequence
  Description of Artificial Sequence: Synthetic oligonucleotide
caccaccugugcugcccac

SEQ ID NO: 2901327 - RNA, 19 nt, Artificial Sequence
  Description of Artificial Sequence: Synthetic oligonucleotide
gguuuggcucugaaagcaa

SEQ ID NO: 2901328 - RNA, 19 nt, Artificial Sequence
  Description of Artificial Sequence: Synthetic oligonucleotide
gagauggguuuggcucuga

SEQ ID NO: 2901329 - RNA, 19 nt, Artificial Sequence
  Description of Artificial Sequence: Synthetic oligonucleotide
gccaugcaugucaccaaac

SEQ ID NO: 2901330 - RNA, 19 nt, Artificial Sequence
  Description of Artificial Sequence: Synthetic oligonucleotide
ccaguuuggccccugggcu

SEQ ID NO: 2901331 - RNA, 19 nt, Artificial Sequence
  Description of Artificial Sequence: Synthetic oligonucleotide
ccauuuugcugggccuugc

SEQ ID NO: 2901332 - RNA, 19 nt, Artificial Sequence
  Description of Artificial Sequence: Synthetic oligonucleotide
gcccucgcuccucgaacag

SEQ ID NO: 2901333 - RNA, 19 nt, Artificial Sequence
  Description of Artificial Sequence: Synthetic oligonucleotide
gaguagaaaugcagacguu

SEQ ID NO: 2901334 - RNA, 19 nt, Artificial Sequence
  Description of Artificial Sequence: Synthetic oligonucleotide
gcaugucaccaaacaccgc

SEQ ID NO: 2901335 - RNA, 19 nt, Artificial Sequence
  Description of Artificial Sequence: Synthetic oligonucleotide
gcuguggggugccugcucu

SEQ ID NO: 2901336 - RNA, 19 nt, Artificial Sequence
  Description of Artificial Sequence: Synthetic oligonucleotide
gugcagcgauucagguccc

SEQ ID NO: 2901337 - RNA, 19 nt, Artificial Sequence
  Description of Artificial Sequence: Synthetic oligonucleotide
cuccuccaccaaacgccga

SEQ ID NO: 2901338 - RNA, 19 nt, Artificial Sequence
  Description of Artificial Sequence: Synthetic oligonucleotide
ccuggacucgcuguucuga

SEQ ID NO: 2901339 - RNA, 19 nt, Artificial Sequence
  Description of Artificial Sequence: Synthetic oligonucleotide
gcagcgauucaggucccuc

SEQ ID NO: 2901340 - RNA, 19 nt, Artificial Sequence
  Description of Artificial Sequence: Synthetic oligonucleotide
cuuccaguugcugguucgu

SEQ ID NO: 2901341 - RNA, 19 nt, Artificial Sequence
  Description of Artificial Sequence: Synthetic oligonucleotide
cccauuuugcugggccuug

SEQ ID NO: 2901342 - RNA, 19 nt, Artificial Sequence
  Description of Artificial Sequence: Synthetic oligonucleotide
cucgaacagcugcuuuagu

SEQ ID NO: 2901343 - RNA, 19 nt, Artificial Sequence
  Description of Artificial Sequence: Synthetic oligonucleotide
ccucgcuccucgaacagcu

SEQ ID NO: 2901344 - RNA, 19 nt, Artificial Sequence
  Description of Artificial Sequence: Synthetic oligonucleotide
gucagcccucgcuccucga

SEQ ID NO: 2901345 - RNA, 19 nt, Artificial Sequence
  Description of Artificial Sequence: Synthetic oligonucleotide
gacucgcuguucugaccau

SEQ ID NO: 2901346 - RNA, 19 nt, Artificial Sequence
  Description of Artificial Sequence: Synthetic oligonucleotide
gggcagagucuugucaucu

SEQ ID NO: 2901347 - RNA, 19 nt, Artificial Sequence
  Description of Artificial Sequence: Synthetic oligonucleotide
gcgauucaggucccucaaa

SEQ ID NO: 2901348 - RNA, 19 nt, Artificial Sequence
  Description of Artificial Sequence: Synthetic oligonucleotide
ggggugcagcgauucaggu

SEQ ID NO: 2901349 - RNA, 19 nt, Artificial Sequence
  Description of Artificial Sequence: Synthetic oligonucleotide
ccuugcuggagccaugcau

SEQ ID NO: 2901350 - RNA, 19 nt, Artificial Sequence
  Description of Artificial Sequence: Synthetic oligonucleotide
ucguuccuugaagccccuu

SEQ ID NO: 2901351 - RNA, 19 nt, Artificial Sequence
  Description of Artificial Sequence: Synthetic oligonucleotide
gccgcuuucuuuccaguuu

SEQ ID NO: 2901352 - RNA, 19 nt, Artificial Sequence
  Description of Artificial Sequence: Synthetic oligonucleotide
cuguuaccuccuccaccaa

SEQ ID NO: 2901353 - RNA, 19 nt, Artificial Sequence
  Description of Artificial Sequence: Synthetic oligonucleotide
cccucaaauuguauaguuu

SEQ ID NO: 2901354 - RNA, 19 nt, Artificial Sequence
  Description of Artificial Sequence: Synthetic oligonucleotide
ccuccaccaaacgccgaac

SEQ ID NO: 2901355 - RNA, 19 nt, Artificial Sequence
  Description of Artificial Sequence: Synthetic oligonucleotide
gggugccugcucuaccugu

SEQ ID NO: 2901356 - RNA, 19 nt, Artificial Sequence
  Description of Artificial Sequence: Synthetic oligonucleotide
ccugggcugcuguggggug

SEQ ID NO: 2901357 - RNA, 19 nt, Artificial Sequence
  Description of Artificial Sequence: Synthetic oligonucleotide
cuugaggggugcagcgauu

SEQ ID NO: 2901358 - RNA, 19 nt, Artificial Sequence
  Description of Artificial Sequence: Synthetic oligonucleotide
cccucgcuccucgaacagc

SEQ ID NO: 2901359 - RNA, 19 nt, Artificial Sequence
  Description of Artificial Sequence: Synthetic oligonucleotide
caggucccucaaauuguau

SEQ ID NO: 2901360 - RNA, 19 nt, Artificial Sequence
  Description of Artificial Sequence: Synthetic oligonucleotide
cgauucaggucccucaaau

SEQ ID NO: 2901361 - RNA, 19 nt, Artificial Sequence
  Description of Artificial Sequence: Synthetic oligonucleotide
caguugcugguucguuccu

SEQ ID NO: 2901362 - RNA, 19 nt, Artificial Sequence
  Description of Artificial Sequence: Synthetic oligonucleotide
cuguggggugccugcucua

SEQ ID NO: 2901363 - RNA, 19 nt, Artificial Sequence
  Description of Artificial Sequence: Synthetic oligonucleotide
cuccucgaacagcugcuuu

SEQ ID NO: 2901364 - RNA, 19 nt, Artificial Sequence
  Description of Artificial Sequence: Synthetic oligonucleotide
cugggccuugcuggagcca

SEQ ID NO: 2901365 - RNA, 19 nt, Artificial Sequence
  Description of Artificial Sequence: Synthetic oligonucleotide
gggcucagcugaguagaaa

SEQ ID NO: 2901366 - RNA, 19 nt, Artificial Sequence
  Description of Artificial Sequence: Synthetic oligonucleotide
ccaguuugggcagagucuu

SEQ ID NO: 2901367 - RNA, 19 nt, Artificial Sequence
  Description of Artificial Sequence: Synthetic oligonucleotide
gccuugcuggagccaugca

SEQ ID NO: 2901368 - RNA, 19 nt, Artificial Sequence
  Description of Artificial Sequence: Synthetic oligonucleotide
ccuugaggggugcagcgau

SEQ ID NO: 2901369 - RNA, 19 nt, Artificial Sequence
  Description of Artificial Sequence: Synthetic oligonucleotide
cucuaccuguugccgcuuu

SEQ ID NO: 2901370 - RNA, 19 nt, Artificial Sequence
  Description of Artificial Sequence: Synthetic oligonucleotide
gggccuugcuggagccaug

SEQ ID NO: 2901371 - RNA, 19 nt, Artificial Sequence
  Description of Artificial Sequence: Synthetic oligonucleotide
gccugguaauguaugcguu

SEQ ID NO: 2901372 - RNA, 19 nt, Artificial Sequence
  Description of Artificial Sequence: Synthetic oligonucleotide
cugccagcuucaccaguuu

SEQ ID NO: 2901373 - RNA, 19 nt, Artificial Sequence
  Description of Artificial Sequence: Synthetic oligonucleotide
cuucaccaguuuggccccu

SEQ ID NO: 2901374 - RNA, 19 nt, Artificial Sequence
  Description of Artificial Sequence: Synthetic oligonucleotide
gcguugggugaaggaaugu

SEQ ID NO: 2901375 - RNA, 19 nt, Artificial Sequence
  Description of Artificial Sequence: Synthetic oligonucleotide
gcugcccacucgaaguauu

SEQ ID NO: 2901376 - RNA, 19 nt, Artificial Sequence
  Description of Artificial Sequence: Synthetic oligonucleotide
cagcugcuuuagugccucu

SEQ ID NO: 2901377 - RNA, 19 nt, Artificial Sequence
  Description of Artificial Sequence: Synthetic oligonucleotide
cugcuguggggugccugcu

SEQ ID NO: 2901378 - RNA, 19 nt, Artificial Sequence
  Description of Artificial Sequence: Synthetic oligonucleotide
ccccuucaccaccugugcu

SEQ ID NO: 2901379 - RNA, 19 nt, Artificial Sequence
  Description of Artificial Sequence: Synthetic oligonucleotide
cgcuguucugaccauccuu

SEQ ID NO: 2901380 - RNA, 19 nt, Artificial Sequence
  Description of Artificial Sequence: Synthetic oligonucleotide
gcucuaccuguugccgcuu

SEQ ID NO: 2901381 - RNA, 19 nt, Artificial Sequence
  Description of Artificial Sequence: Synthetic oligonucleotide
gggcugcuguggggugccu

SEQ ID NO: 2901382 - RNA, 19 nt, Artificial Sequence
  Description of Artificial Sequence: Synthetic oligonucleotide
aaugaggcaauuuauuaac

SEQ ID NO: 2901383 - RNA, 19 nt, Artificial Sequence
  Description of Artificial Sequence: Synthetic oligonucleotide
uuuuccaccaucuucagcc

SEQ ID NO: 2901384 - RNA, 19 nt, Artificial Sequence
  Description of Artificial Sequence: Synthetic oligonucleotide
uuuauguuuggccagcuug

SEQ ID NO: 2901385 - RNA, 19 nt, Artificial Sequence
  Description of Artificial Sequence: Synthetic oligonucleotide
aaugcuucuuguuggcagc

SEQ ID NO: 2901386 - RNA, 19 nt, Artificial Sequence
  Description of Artificial Sequence: Synthetic oligonucleotide
guuaacgucuuuuacagug

SEQ ID NO: 2901387 - RNA, 19 nt, Artificial Sequence
  Description of Artificial Sequence: Synthetic oligonucleotide
uuuacagugacuccaggca

SEQ ID NO: 2901388 - RNA, 19 nt, Artificial Sequence
  Description of Artificial Sequence: Synthetic oligonucleotide
agaucuuggucauggagcc

SEQ ID NO: 2901389 - RNA, 19 nt, Artificial Sequence
  Description of Artificial Sequence: Synthetic oligonucleotide
uucuaaugcuucuuguugg

SEQ ID NO: 2901390 - RNA, 19 nt, Artificial Sequence
  Description of Artificial Sequence: Synthetic oligonucleotide
auuuauuaacccagcaucc

SEQ ID NO: 2901391 - RNA, 19 nt, Artificial Sequence
  Description of Artificial Sequence: Synthetic oligonucleotide
uagaucuuggucauggagc

SEQ ID NO: 2901392 - RNA, 19 nt, Artificial Sequence
  Description of Artificial Sequence: Synthetic oligonucleotide
ugguuaacgucuuuuacag

SEQ ID NO: 2901393 - RNA, 19 nt, Artificial Sequence
  Description of Artificial Sequence: Synthetic oligonucleotide
acuguguccacccauucgg

SEQ ID NO: 2901394 - RNA, 19 nt, Artificial Sequence
  Description of Artificial Sequence: Synthetic oligonucleotide
aaguggcugggucugacac

SEQ ID NO: 2901395 - RNA, 19 nt, Artificial Sequence
  Description of Artificial Sequence: Synthetic oligonucleotide
accaguucucaucauaggg

SEQ ID NO: 2901396 - RNA, 19 nt, Artificial Sequence
  Description of Artificial Sequence: Synthetic oligonucleotide
uuuguucuaaugcuucuug

SEQ ID NO: 2901397 - RNA, 19 nt, Artificial Sequence
  Description of Artificial Sequence: Synthetic oligonucleotide
uuuuacagugacuccaggc

SEQ ID NO: 2901398 - RNA, 19 nt, Artificial Sequence
  Description of Artificial Sequence: Synthetic oligonucleotide
ucugacgaacuccugcugg

SEQ ID NO: 2901399 - RNA, 19 nt, Artificial Sequence
  Description of Artificial Sequence: Synthetic oligonucleotide
ugaggcaauuuauuaaccc

SEQ ID NO: 2901400 - RNA, 19 nt, Artificial Sequence
  Description of Artificial Sequence: Synthetic oligonucleotide
acgucuuuuacagugacuc

SEQ ID NO: 2901401 - RNA, 19 nt, Artificial Sequence
  Description of Artificial Sequence: Synthetic oligonucleotide
uuuugaggaaggcugccag

SEQ ID NO: 2901402 - RNA, 19 nt, Artificial Sequence
  Description of Artificial Sequence: Synthetic oligonucleotide
uaaugcuucuuguuggcag

SEQ ID NO: 2901403 - RNA, 19 nt, Artificial Sequence
  Description of Artificial Sequence: Synthetic oligonucleotide
aucuugguccuuuuccacc

SEQ ID NO: 2901404 - RNA, 19 nt, Artificial Sequence
  Description of Artificial Sequence: Synthetic oligonucleotide
ucuuuuacagugacuccag

SEQ ID NO: 2901405 - RNA, 19 nt, Artificial Sequence
  Description of Artificial Sequence: Synthetic oligonucleotide
uuauguuuggccagcuuga

SEQ ID NO: 2901406 - RNA, 19 nt, Artificial Sequence
  Description of Artificial Sequence: Synthetic oligonucleotide
uuggucauggagccgaccc

SEQ ID NO: 2901407 - RNA, 19 nt, Artificial Sequence
  Description of Artificial Sequence: Synthetic oligonucleotide
accgcggagguacaggugc

SEQ ID NO: 2901408 - RNA, 19 nt, Artificial Sequence
  Description of Artificial Sequence: Synthetic oligonucleotide
uguggaagcagcucgugug

SEQ ID NO: 2901409 - RNA, 19 nt, Artificial Sequence
  Description of Artificial Sequence: Synthetic oligonucleotide
guucuaaugcuucuuguug

SEQ ID NO: 2901410 - RNA, 19 nt, Artificial Sequence
  Description of Artificial Sequence: Synthetic oligonucleotide
uguagaaccaguucucauc

SEQ ID NO: 2901411 - RNA, 19 nt, Artificial Sequence
  Description of Artificial Sequence: Synthetic oligonucleotide
ucugacaccguuucucugc

SEQ ID NO: 2901412 - RNA, 19 nt, Artificial Sequence
  Description of Artificial Sequence: Synthetic oligonucleotide
agcucuuuauguuuggcca

SEQ ID NO: 2901413 - RNA, 19 nt, Artificial Sequence
  Description of Artificial Sequence: Synthetic oligonucleotide
aauucuguccagaucucuc

SEQ ID NO: 2901414 - RNA, 19 nt, Artificial Sequence
  Description of Artificial Sequence: Synthetic oligonucleotide
agcuugacuguguccaccc

SEQ ID NO: 2901415 - RNA, 19 nt, Artificial Sequence
  Description of Artificial Sequence: Synthetic oligonucleotide
gggacuuucagcuucccgg

SEQ ID NO: 2901416 - RNA, 19 nt, Artificial Sequence
  Description of Artificial Sequence: Synthetic oligonucleotide
gaaccaguucucaucauag

SEQ ID NO: 2901417 - RNA, 19 nt, Artificial Sequence
  Description of Artificial Sequence: Synthetic oligonucleotide
guagaucuuggucauggag

SEQ ID NO: 2901418 - RNA, 19 nt, Artificial Sequence
  Description of Artificial Sequence: Synthetic oligonucleotide
uguccggcaauucugucca

SEQ ID NO: 2901419 - RNA, 19 nt, Artificial Sequence
  Description of Artificial Sequence: Synthetic oligonucleotide
uuaacgucuuuuacaguga

SEQ ID NO: 2901420 - RNA, 19 nt, Artificial Sequence
  Description of Artificial Sequence: Synthetic oligonucleotide
gaaugaggcaauuuauuaa

SEQ ID NO: 2901421 - RNA, 19 nt, Artificial Sequence
  Description of Artificial Sequence: Synthetic oligonucleotide
uugaggaaggcugccaggg

SEQ ID NO: 2901422 - RNA, 19 nt, Artificial Sequence
  Description of Artificial Sequence: Synthetic oligonucleotide
ucuaaugcuucuuguuggc

SEQ ID NO: 2901423 - RNA, 19 nt, Artificial Sequence
  Description of Artificial Sequence: Synthetic oligonucleotide
gaggcaauuuauuaaccca

SEQ ID NO: 2901424 - RNA, 19 nt, Artificial Sequence
  Description of Artificial Sequence: Synthetic oligonucleotide
uauuaacccagcauccuuu

SEQ ID NO: 2901425 - RNA, 19 nt, Artificial Sequence
  Description of Artificial Sequence: Synthetic oligonucleotide
uuuauuaacccagcauccu

SEQ ID NO: 2901426 - RNA, 19 nt, Artificial Sequence
  Description of Artificial Sequence: Synthetic oligonucleotide
uccuuuguucuaaugcuuc

SEQ ID NO: 2901427 - RNA, 19 nt, Artificial Sequence
  Description of Artificial Sequence: Synthetic oligonucleotide
augaggcaauuuauuaacc

SEQ ID NO: 2901428 - RNA, 19 nt, Artificial Sequence
  Description of Artificial Sequence: Synthetic oligonucleotide
guagaaccaguucucauca

SEQ ID NO: 2901429 - RNA, 19 nt, Artificial Sequence
  Description of Artificial Sequence: Synthetic oligonucleotide
ucuugguccuuuuccacca

SEQ ID NO: 2901430 - RNA, 19 nt, Artificial Sequence
  Description of Artificial Sequence: Synthetic oligonucleotide
gacuguguccacccauucg

SEQ ID NO: 2901431 - RNA, 19 nt, Artificial Sequence
  Description of Artificial Sequence: Synthetic oligonucleotide
aacuccugcugguuaacgu

SEQ ID NO: 2901432 - RNA, 19 nt, Artificial Sequence
  Description of Artificial Sequence: Synthetic oligonucleotide
uguguccacccauucgggg

SEQ ID NO: 2901433 - RNA, 19 nt, Artificial Sequence
  Description of Artificial Sequence: Synthetic oligonucleotide
uuauuaacccagcauccuu

SEQ ID NO: 2901434 - RNA, 19 nt, Artificial Sequence
  Description of Artificial Sequence: Synthetic oligonucleotide
cuuguuggcagcugccacc

SEQ ID NO: 2901435 - RNA, 19 nt, Artificial Sequence
  Description of Artificial Sequence: Synthetic oligonucleotide
gagguguuagcuugcggcc

SEQ ID NO: 2901436 - RNA, 19 nt, Artificial Sequence
  Description of Artificial Sequence: Synthetic oligonucleotide
guccagaucucucuguccc

SEQ ID NO: 2901437 - RNA, 19 nt, Artificial Sequence
  Description of Artificial Sequence: Synthetic oligonucleotide
uguucuaaugcuucuuguu

SEQ ID NO: 2901438 - RNA, 19 nt, Artificial Sequence
  Description of Artificial Sequence: Synthetic oligonucleotide
aguggcugggucugacacc

SEQ ID NO: 2901439 - RNA, 19 nt, Artificial Sequence
  Description of Artificial Sequence: Synthetic oligonucleotide
gugcuguggaagcagcucg

SEQ ID NO: 2901440 - RNA, 19 nt, Artificial Sequence
  Description of Artificial Sequence: Synthetic oligonucleotide
uaacgucuuuuacagugac

SEQ ID NO: 2901441 - RNA, 19 nt, Artificial Sequence
  Description of Artificial Sequence: Synthetic oligonucleotide
uuacagugacuccaggcau

SEQ ID NO: 2901442 - RNA, 19 nt, Artificial Sequence
  Description of Artificial Sequence: Synthetic oligonucleotide
cugguuaacgucuuuuaca

SEQ ID NO: 2901443 - RNA, 19 nt, Artificial Sequence
  Description of Artificial Sequence: Synthetic oligonucleotide
gaucucucugucccugagg

SEQ ID NO: 2901444 - RNA, 19 nt, Artificial Sequence
  Description of Artificial Sequence: Synthetic oligonucleotide
auuaacccagcauccuuug

SEQ ID NO: 2901445 - RNA, 19 nt, Artificial Sequence
  Description of Artificial Sequence: Synthetic oligonucleotide
acagugacuccaggcaucc

SEQ ID NO: 2901446 - RNA, 19 nt, Artificial Sequence
  Description of Artificial Sequence: Synthetic oligonucleotide
uuguucuaaugcuucuugu

SEQ ID NO: 2901447 - RNA, 19 nt, Artificial Sequence
  Description of Artificial Sequence: Synthetic oligonucleotide
ucccugagguguuagcuug

SEQ ID NO: 2901448 - RNA, 19 nt, Artificial Sequence
  Description of Artificial Sequence: Synthetic oligonucleotide
auucuguccagaucucucu

SEQ ID NO: 2901449 - RNA, 19 nt, Artificial Sequence
  Description of Artificial Sequence: Synthetic oligonucleotide
ugguccuuuuccaccaucu

SEQ ID NO: 2901450 - RNA, 19 nt, Artificial Sequence
  Description of Artificial Sequence: Synthetic oligonucleotide
ccaguucucaucauagggg

SEQ ID NO: 2901451 - RNA, 19 nt, Artificial Sequence
  Description of Artificial Sequence: Synthetic oligonucleotide
cuguccggcaauucugucc

SEQ ID NO: 2901452 - RNA, 19 nt, Artificial Sequence
  Description of Artificial Sequence: Synthetic oligonucleotide
ucuuguuggcagcugccac

SEQ ID NO: 2901453 - RNA, 19 nt, Artificial Sequence
  Description of Artificial Sequence: Synthetic oligonucleotide
uucggggacuuucagcuuc

SEQ ID NO: 2901454 - RNA, 19 nt, Artificial Sequence
  Description of Artificial Sequence: Synthetic oligonucleotide
uguguagaaccaguucuca

SEQ ID NO: 2901455 - RNA, 19 nt, Artificial Sequence
  Description of Artificial Sequence: Synthetic oligonucleotide
uccuccguagaucuugguc

SEQ ID NO: 2901456 - RNA, 19 nt, Artificial Sequence
  Description of Artificial Sequence: Synthetic oligonucleotide
uucuguccagaucucucug

SEQ ID NO: 2901457 - RNA, 19 nt, Artificial Sequence
  Description of Artificial Sequence: Synthetic oligonucleotide
cuuuuacagugacuccagg

SEQ ID NO: 2901458 - RNA, 19 nt, Artificial Sequence
  Description of Artificial Sequence: Synthetic oligonucleotide
ggcaauucuguccagaucu

SEQ ID NO: 2901459 - RNA, 19 nt, Artificial Sequence
  Description of Artificial Sequence: Synthetic oligonucleotide
acuuucagcuucccggacu

SEQ ID NO: 2901460 - RNA, 19 nt, Artificial Sequence
  Description of Artificial Sequence: Synthetic oligonucleotide
uguccagaucucucugucc

SEQ ID NO: 2901461 - RNA, 19 nt, Artificial Sequence
  Description of Artificial Sequence: Synthetic oligonucleotide
guggcugggucugacaccg

SEQ ID NO: 2901462 - RNA, 19 nt, Artificial Sequence
  Description of Artificial Sequence: Synthetic oligonucleotide
auggagccgaccccggcac

SEQ ID NO: 2901463 - RNA, 19 nt, Artificial Sequence
  Description of Artificial Sequence: Synthetic oligonucleotide
gucuuuuacagugacucca

SEQ ID NO: 2901464 - RNA, 19 nt, Artificial Sequence
  Description of Artificial Sequence: Synthetic oligonucleotide
agguguuagcuugcggccc

SEQ ID NO: 2901465 - RNA, 19 nt, Artificial Sequence
  Description of Artificial Sequence: Synthetic oligonucleotide
ucguguguagaaccaguuc

SEQ ID NO: 2901466 - RNA, 19 nt, Artificial Sequence
  Description of Artificial Sequence: Synthetic oligonucleotide
agaaccaguucucaucaua

SEQ ID NO: 2901467 - RNA, 19 nt, Artificial Sequence
  Description of Artificial Sequence: Synthetic oligonucleotide
ucuguccagaucucucugu

SEQ ID NO: 2901468 - RNA, 19 nt, Artificial Sequence
  Description of Artificial Sequence: Synthetic oligonucleotide
uguccacccauucggggac

SEQ ID NO: 2901469 - RNA, 19 nt, Artificial Sequence
  Description of Artificial Sequence: Synthetic oligonucleotide
acaggugccgugcugugga

SEQ ID NO: 2901470 - RNA, 19 nt, Artificial Sequence
  Description of Artificial Sequence: Synthetic oligonucleotide
uccaccaucuucagccccu

SEQ ID NO: 2901471 - RNA, 19 nt, Artificial Sequence
  Description of Artificial Sequence: Synthetic oligonucleotide
cauucggggacuuucagcu

SEQ ID NO: 2901472 - RNA, 19 nt, Artificial Sequence
  Description of Artificial Sequence: Synthetic oligonucleotide
ugucccugagguguuagcu

SEQ ID NO: 2901473 - RNA, 19 nt, Artificial Sequence
  Description of Artificial Sequence: Synthetic oligonucleotide
uucucugccguccuccgua

SEQ ID NO: 2901474 - RNA, 19 nt, Artificial Sequence
  Description of Artificial Sequence: Synthetic oligonucleotide
cuuuuccaccaucuucagc

SEQ ID NO: 2901475 - RNA, 19 nt, Artificial Sequence
  Description of Artificial Sequence: Synthetic oligonucleotide
gaacuccugcugguuaacg

SEQ ID NO: 2901476 - RNA, 19 nt, Artificial Sequence
  Description of Artificial Sequence: Synthetic oligonucleotide
uggucauggagccgacccc

SEQ ID NO: 2901477 - RNA, 19 nt, Artificial Sequence
  Description of Artificial Sequence: Synthetic oligonucleotide
agcauccuuuguucuaaug

SEQ ID NO: 2901478 - RNA, 19 nt, Artificial Sequence
  Description of Artificial Sequence: Synthetic oligonucleotide
agaucucucugucccugag

SEQ ID NO: 2901479 - RNA, 19 nt, Artificial Sequence
  Description of Artificial Sequence: Synthetic oligonucleotide
aucuuggucauggagccga

SEQ ID NO: 2901480 - RNA, 19 nt, Artificial Sequence
  Description of Artificial Sequence: Synthetic oligonucleotide
ugaggaaggcugccagggc

SEQ ID NO: 2901481 - RNA, 19 nt, Artificial Sequence
  Description of Artificial Sequence: Synthetic oligonucleotide
uuaacccagcauccuuugu

SEQ ID NO: 2901482 - RNA, 19 nt, Artificial Sequence
  Description of Artificial Sequence: Synthetic oligonucleotide
guuucucugccguccuccg

SEQ ID NO: 2901483 - RNA, 19 nt, Artificial Sequence
  Description of Artificial Sequence: Synthetic oligonucleotide
uuccaccaucuucagcccc

SEQ ID NO: 2901484 - RNA, 19 nt, Artificial Sequence
  Description of Artificial Sequence: Synthetic oligonucleotide
caucuugguccuuuuccac

SEQ ID NO: 2901485 - RNA, 19 nt, Artificial Sequence
  Description of Artificial Sequence: Synthetic oligonucleotide
ucugccguccuccguagau

SEQ ID NO: 2901486 - RNA, 19 nt, Artificial Sequence
  Description of Artificial Sequence: Synthetic oligonucleotide
ggagccucugcugaagugg

SEQ ID NO: 2901487 - RNA, 19 nt, Artificial Sequence
  Description of Artificial Sequence: Synthetic oligonucleotide
agcagcucguguguagaac

SEQ ID NO: 2901488 - RNA, 19 nt, Artificial Sequence
  Description of Artificial Sequence: Synthetic oligonucleotide
uugacuguguccacccauu

SEQ ID NO: 2901489 - RNA, 19 nt, Artificial Sequence
  Description of Artificial Sequence: Synthetic oligonucleotide
cucuuuauguuuggccagc

SEQ ID NO: 2901490 - RNA, 19 nt, Artificial Sequence
  Description of Artificial Sequence: Synthetic oligonucleotide
ugcugguuaacgucuuuua

SEQ ID NO: 2901491 - RNA, 19 nt, Artificial Sequence
  Description of Artificial Sequence: Synthetic oligonucleotide
gacgcggcgggccacacuc

SEQ ID NO: 2901492 - RNA, 19 nt, Artificial Sequence
  Description of Artificial Sequence: Synthetic oligonucleotide
ugccguccuccguagaucu

SEQ ID NO: 2901493 - RNA, 19 nt, Artificial Sequence
  Description of Artificial Sequence: Synthetic oligonucleotide
agggcuuggaggacgcggc

SEQ ID NO: 2901494 - RNA, 19 nt, Artificial Sequence
  Description of Artificial Sequence: Synthetic oligonucleotide
cuguguccacccauucggg

SEQ ID NO: 2901495 - RNA, 19 nt, Artificial Sequence
  Description of Artificial Sequence: Synthetic oligonucleotide
gcagcucguguguagaacc

SEQ ID NO: 2901496 - RNA, 19 nt, Artificial Sequence
  Description of Artificial Sequence: Synthetic oligonucleotide
uucuuguuggcagcugcca

SEQ ID NO: 2901497 - RNA, 19 nt, Artificial Sequence
  Description of Artificial Sequence: Synthetic oligonucleotide
cauccuuuguucuaaugcu

SEQ ID NO: 2901498 - RNA, 19 nt, Artificial Sequence
  Description of Artificial Sequence: Synthetic oligonucleotide
cugacaccguuucucugcc

SEQ ID NO: 2901499 - RNA, 19 nt, Artificial Sequence
  Description of Artificial Sequence: Synthetic oligonucleotide
gcugccagggcucugacga

SEQ ID NO: 2901500 - RNA, 19 nt, Artificial Sequence
  Description of Artificial Sequence: Synthetic oligonucleotide
auguuuggccagcuugacu

SEQ ID NO: 2901501 - RNA, 19 nt, Artificial Sequence
  Description of Artificial Sequence: Synthetic oligonucleotide
gcaauuuauuaacccagca

SEQ ID NO: 2901502 - RNA, 19 nt, Artificial Sequence
  Description of Artificial Sequence: Synthetic oligonucleotide
cccaucuugguccuuuucc

SEQ ID NO: 2901503 - RNA, 19 nt, Artificial Sequence
  Description of Artificial Sequence: Synthetic oligonucleotide
uacaggugccgugcugugg

SEQ ID NO: 2901504 - RNA, 19 nt, Artificial Sequence
  Description of Artificial Sequence: Synthetic oligonucleotide
ugacuguguccacccauuc

SEQ ID NO: 2901505 - RNA, 19 nt, Artificial Sequence
  Description of Artificial Sequence: Synthetic oligonucleotide
aacgucuuuuacagugacu

SEQ ID NO: 2901506 - RNA, 19 nt, Artificial Sequence
  Description of Artificial Sequence: Synthetic oligonucleotide
uauguuuggccagcuugac

SEQ ID NO: 2901507 - RNA, 19 nt, Artificial Sequence
  Description of Artificial Sequence: Synthetic oligonucleotide
ucuuuauguuuggccagcu

SEQ ID NO: 2901508 - RNA, 19 nt, Artificial Sequence
  Description of Artificial Sequence: Synthetic oligonucleotide
caccuguccggcaauucug

SEQ ID NO: 2901509 - RNA, 19 nt, Artificial Sequence
  Description of Artificial Sequence: Synthetic oligonucleotide
ucugucccugagguguuag

SEQ ID NO: 2901510 - RNA, 19 nt, Artificial Sequence
  Description of Artificial Sequence: Synthetic oligonucleotide
uggagccucugcugaagug

SEQ ID NO: 2901511 - RNA, 19 nt, Artificial Sequence
  Description of Artificial Sequence: Synthetic oligonucleotide
gcucuuuauguuuggccag

SEQ ID NO: 2901512 - RNA, 19 nt, Artificial Sequence
  Description of Artificial Sequence: Synthetic oligonucleotide
uccagggcuuggaggacgc

SEQ ID NO: 2901513 - RNA, 19 nt, Artificial Sequence
  Description of Artificial Sequence: Synthetic oligonucleotide
ucauggagccgaccccggc

SEQ ID NO: 2901514 - RNA, 19 nt, Artificial Sequence
  Description of Artificial Sequence: Synthetic oligonucleotide
ggcucugacgaacuccugc

SEQ ID NO: 2901515 - RNA, 19 nt, Artificial Sequence
  Description of Artificial Sequence: Synthetic oligonucleotide
cugagguguuagcuugcgg

SEQ ID NO: 2901516 - RNA, 19 nt, Artificial Sequence
  Description of Artificial Sequence: Synthetic oligonucleotide
cugggucugacaccguuuc

SEQ ID NO: 2901517 - RNA, 19 nt, Artificial Sequence
  Description of Artificial Sequence: Synthetic oligonucleotide
ucggggacuuucagcuucc

SEQ ID NO: 2901518 - RNA, 19 nt, Artificial Sequence
  Description of Artificial Sequence: Synthetic oligonucleotide
uuggccagcuugacugugu

SEQ ID NO: 2901519 - RNA, 19 nt, Artificial Sequence
  Description of Artificial Sequence: Synthetic oligonucleotide
gaucuuggucauggagccg

SEQ ID NO: 2901520 - RNA, 19 nt, Artificial Sequence
  Description of Artificial Sequence: Synthetic oligonucleotide
acaccguuucucugccguc

SEQ ID NO: 2901521 - RNA, 19 nt, Artificial Sequence
  Description of Artificial Sequence: Synthetic oligonucleotide
gcugguuaacgucuuuuac

SEQ ID NO: 2901522 - RNA, 19 nt, Artificial Sequence
  Description of Artificial Sequence: Synthetic oligonucleotide
aagcagcucguguguagaa

SEQ ID NO: 2901523 - RNA, 19 nt, Artificial Sequence
  Description of Artificial Sequence: Synthetic oligonucleotide
cuguccagaucucucuguc

SEQ ID NO: 2901524 - RNA, 19 nt, Artificial Sequence
  Description of Artificial Sequence: Synthetic oligonucleotide
uuuggccagcuugacugug

SEQ ID NO: 2901525 - RNA, 19 nt, Artificial Sequence
  Description of Artificial Sequence: Synthetic oligonucleotide
acgaacuccugcugguuaa

SEQ ID NO: 2901526 - RNA, 19 nt, Artificial Sequence
  Description of Artificial Sequence: Synthetic oligonucleotide
ggcaauuuauuaacccagc

SEQ ID NO: 2901527 - RNA, 19 nt, Artificial Sequence
  Description of Artificial Sequence: Synthetic oligonucleotide
ugacaccguuucucugccg

SEQ ID NO: 2901528 - RNA, 19 nt, Artificial Sequence
  Description of Artificial Sequence: Synthetic oligonucleotide
ggcagcugccaccuguccg

SEQ ID NO: 2901529 - RNA, 19 nt, Artificial Sequence
  Description of Artificial Sequence: Synthetic oligonucleotide
ucucugccguccuccguag

SEQ ID NO: 2901530 - RNA, 19 nt, Artificial Sequence
  Description of Artificial Sequence: Synthetic oligonucleotide
uugguccuuuuccaccauc

SEQ ID NO: 2901531 - RNA, 19 nt, Artificial Sequence
  Description of Artificial Sequence: Synthetic oligonucleotide
gaagcagcucguguguaga

SEQ ID NO: 2901532 - RNA, 19 nt, Artificial Sequence
  Description of Artificial Sequence: Synthetic oligonucleotide
guguccacccauucgggga

SEQ ID NO: 2901533 - RNA, 19 nt, Artificial Sequence
  Description of Artificial Sequence: Synthetic oligonucleotide
ggugccgugcuguggaagc

SEQ ID NO: 2901534 - RNA, 19 nt, Artificial Sequence
  Description of Artificial Sequence: Synthetic oligonucleotide
gacaccguuucucugccgu

SEQ ID NO: 2901535 - RNA, 19 nt, Artificial Sequence
  Description of Artificial Sequence: Synthetic oligonucleotide
ggaagcagcucguguguag

SEQ ID NO: 2901536 - RNA, 19 nt, Artificial Sequence
  Description of Artificial Sequence: Synthetic oligonucleotide
ccuccguagaucuugguca

SEQ ID NO: 2901537 - RNA, 19 nt, Artificial Sequence
  Description of Artificial Sequence: Synthetic oligonucleotide
ucucucugucccugaggug

SEQ ID NO: 2901538 - RNA, 19 nt, Artificial Sequence
  Description of Artificial Sequence: Synthetic oligonucleotide
cagggcuuggaggacgcgg

SEQ ID NO: 2901539 - RNA, 19 nt, Artificial Sequence
  Description of Artificial Sequence: Synthetic oligonucleotide
cuuggagccucugcugaag

SEQ ID NO: 2901540 - RNA, 19 nt, Artificial Sequence
  Description of Artificial Sequence: Synthetic oligonucleotide
ucuuggagccucugcugaa

SEQ ID NO: 2901541 - RNA, 19 nt, Artificial Sequence
  Description of Artificial Sequence: Synthetic oligonucleotide
uccagaucucucugucccu

SEQ ID NO: 2901542 - RNA, 19 nt, Artificial Sequence
  Description of Artificial Sequence: Synthetic oligonucleotide
uuggcagcugccaccuguc

SEQ ID NO: 2901543 - RNA, 19 nt, Artificial Sequence
  Description of Artificial Sequence: Synthetic oligonucleotide
uuucucugccguccuccgu

SEQ ID NO: 2901544 - RNA, 19 nt, Artificial Sequence
  Description of Artificial Sequence: Synthetic oligonucleotide
cagggcucugacgaacucc

SEQ ID NO: 2901545 - RNA, 19 nt, Artificial Sequence
  Description of Artificial Sequence: Synthetic oligonucleotide
gaaguggcugggucugaca

SEQ ID NO: 2901546 - RNA, 19 nt, Artificial Sequence
  Description of Artificial Sequence: Synthetic oligonucleotide
gacuuucagcuucccggac

SEQ ID NO: 2901547 - RNA, 19 nt, Artificial Sequence
  Description of Artificial Sequence: Synthetic oligonucleotide
ccguagaucuuggucaugg

SEQ ID NO: 2901548 - RNA, 19 nt, Artificial Sequence
  Description of Artificial Sequence: Synthetic oligonucleotide
uucagcuucccggacuuuu

SEQ ID NO: 2901549 - RNA, 19 nt, Artificial Sequence
  Description of Artificial Sequence: Synthetic oligonucleotide
caccguuucucugccgucc

SEQ ID NO: 2901550 - RNA, 19 nt, Artificial Sequence
  Description of Artificial Sequence: Synthetic oligonucleotide
gacgaacuccugcugguua

SEQ ID NO: 2901551 - RNA, 19 nt, Artificial Sequence
  Description of Artificial Sequence: Synthetic oligonucleotide
gguguuagcuugcggcccc

SEQ ID NO: 2901552 - RNA, 19 nt, Artificial Sequence
  Description of Artificial Sequence: Synthetic oligonucleotide
uuggaggacgcggcgggcc

SEQ ID NO: 2901553 - RNA, 19 nt, Artificial Sequence
  Description of Artificial Sequence: Synthetic oligonucleotide
ggcaagcucuuuauguuug

SEQ ID NO: 2901554 - RNA, 19 nt, Artificial Sequence
  Description of Artificial Sequence: Synthetic oligonucleotide
gcuuggaggacgcggcggg

SEQ ID NO: 2901555 - RNA, 19 nt, Artificial Sequence
  Description of Artificial Sequence: Synthetic oligonucleotide
guguguagaaccaguucuc

SEQ ID NO: 2901556 - RNA, 19 nt, Artificial Sequence
  Description of Artificial Sequence: Synthetic oligonucleotide
agcucguguguagaaccag

SEQ ID NO: 2901557 - RNA, 19 nt, Artificial Sequence
  Description of Artificial Sequence: Synthetic oligonucleotide
acccagcauccuuuguucu

SEQ ID NO: 2901558 - RNA, 19 nt, Artificial Sequence
  Description of Artificial Sequence: Synthetic oligonucleotide
uccggcaauucuguccaga

SEQ ID NO: 2901559 - RNA, 19 nt, Artificial Sequence
  Description of Artificial Sequence: Synthetic oligonucleotide
gucugacaccguuucucug

SEQ ID NO: 2901560 - RNA, 19 nt, Artificial Sequence
  Description of Artificial Sequence: Synthetic oligonucleotide
ggagguacaggugccgugc

SEQ ID NO: 2901561 - RNA, 19 nt, Artificial Sequence
  Description of Artificial Sequence: Synthetic oligonucleotide
ucuuggucauggagccgac

SEQ ID NO: 2901562 - RNA, 19 nt, Artificial Sequence
  Description of Artificial Sequence: Synthetic oligonucleotide
agggcucugacgaacuccu

SEQ ID NO: 2901563 - RNA, 19 nt, Artificial Sequence
  Description of Artificial Sequence: Synthetic oligonucleotide
cucugacgaacuccugcug

SEQ ID NO: 2901564 - RNA, 19 nt, Artificial Sequence
  Description of Artificial Sequence: Synthetic oligonucleotide
uggccagcuugacuguguc

SEQ ID NO: 2901565 - RNA, 19 nt, Artificial Sequence
  Description of Artificial Sequence: Synthetic oligonucleotide
ugccgugcuguggaagcag

SEQ ID NO: 2901566 - RNA, 19 nt, Artificial Sequence
  Description of Artificial Sequence: Synthetic oligonucleotide
ggggacuuucagcuucccg

SEQ ID NO: 2901567 - RNA, 19 nt, Artificial Sequence
  Description of Artificial Sequence: Synthetic oligonucleotide
ggcaccaccgcggagguac

SEQ ID NO: 2901568 - RNA, 19 nt, Artificial Sequence
  Description of Artificial Sequence: Synthetic oligonucleotide
ugggucugacaccguuucu

SEQ ID NO: 2901569 - RNA, 19 nt, Artificial Sequence
  Description of Artificial Sequence: Synthetic oligonucleotide
accaccgcggagguacagg

SEQ ID NO: 2901570 - RNA, 19 nt, Artificial Sequence
  Description of Artificial Sequence: Synthetic oligonucleotide
agguacaggugccgugcug

SEQ ID NO: 2901571 - RNA, 19 nt, Artificial Sequence
  Description of Artificial Sequence: Synthetic oligonucleotide
cugcugaaguggcuggguc

SEQ ID NO: 2901572 - RNA, 19 nt, Artificial Sequence
  Description of Artificial Sequence: Synthetic oligonucleotide
ccauucggggacuuucagc

SEQ ID NO: 2901573 - RNA, 19 nt, Artificial Sequence
  Description of Artificial Sequence: Synthetic oligonucleotide
cugucccugagguguuagc

SEQ ID NO: 2901574 - RNA, 19 nt, Artificial Sequence
  Description of Artificial Sequence: Synthetic oligonucleotide
cucugcugaaguggcuggg

SEQ ID NO: 2901575 - RNA, 19 nt, Artificial Sequence
  Description of Artificial Sequence: Synthetic oligonucleotide
ggacuuucagcuucccgga

SEQ ID NO: 2901576 - RNA, 19 nt, Artificial Sequence
  Description of Artificial Sequence: Synthetic oligonucleotide
cagcuugacuguguccacc

SEQ ID NO: 2901577 - RNA, 19 nt, Artificial Sequence
  Description of Artificial Sequence: Synthetic oligonucleotide
cucucugucccugaggugu

SEQ ID NO: 2901578 - RNA, 19 nt, Artificial Sequence
  Description of Artificial Sequence: Synthetic oligonucleotide
accguuucucugccguccu

SEQ ID NO: 2901579 - RNA, 19 nt, Artificial Sequence
  Description of Artificial Sequence: Synthetic oligonucleotide
uagaaccaguucucaucau

SEQ ID NO: 2901580 - RNA, 19 nt, Artificial Sequence
  Description of Artificial Sequence: Synthetic oligonucleotide
gccagcuugacugugucca

SEQ ID NO: 2901581 - RNA, 19 nt, Artificial Sequence
  Description of Artificial Sequence: Synthetic oligonucleotide
cuaaugcuucuuguuggca

SEQ ID NO: 2901582 - RNA, 19 nt, Artificial Sequence
  Description of Artificial Sequence: Synthetic oligonucleotide
guacaggugccgugcugug

SEQ ID NO: 2901583 - RNA, 19 nt, Artificial Sequence
  Description of Artificial Sequence: Synthetic oligonucleotide
cauggagccgaccccggca

SEQ ID NO: 2901584 - RNA, 19 nt, Artificial Sequence
  Description of Artificial Sequence: Synthetic oligonucleotide
cuuggucauggagccgacc

SEQ ID NO: 2901585 - RNA, 19 nt, Artificial Sequence
  Description of Artificial Sequence: Synthetic oligonucleotide
cacccauucggggacuuuc

SEQ ID NO: 2901586 - RNA, 19 nt, Artificial Sequence
  Description of Artificial Sequence: Synthetic oligonucleotide
auccuuuguucuaaugcuu

SEQ ID NO: 2901587 - RNA, 19 nt, Artificial Sequence
  Description of Artificial Sequence: Synthetic oligonucleotide
ugccagggcucugacgaac

SEQ ID NO: 2901588 - RNA, 19 nt, Artificial Sequence
  Description of Artificial Sequence: Synthetic oligonucleotide
gcugaaguggcugggucug

SEQ ID NO: 2901589 - RNA, 19 nt, Artificial Sequence
  Description of Artificial Sequence: Synthetic oligonucleotide
cacucuuggagccucugcu

SEQ ID NO: 2901590 - RNA, 19 nt, Artificial Sequence
  Description of Artificial Sequence: Synthetic oligonucleotide
augcuucuuguuggcagcu

SEQ ID NO: 2901591 - RNA, 19 nt, Artificial Sequence
  Description of Artificial Sequence: Synthetic oligonucleotide
ccucugcugaaguggcugg

SEQ ID NO: 2901592 - RNA, 19 nt, Artificial Sequence
  Description of Artificial Sequence: Synthetic oligonucleotide
gggccacacucuuggagcc

SEQ ID NO: 2901593 - RNA, 19 nt, Artificial Sequence
  Description of Artificial Sequence: Synthetic oligonucleotide
uccugcugguuaacgucuu

SEQ ID NO: 2901594 - RNA, 19 nt, Artificial Sequence
  Description of Artificial Sequence: Synthetic oligonucleotide
gucauggagccgaccccgg

SEQ ID NO: 2901595 - RNA, 19 nt, Artificial Sequence
  Description of Artificial Sequence: Synthetic oligonucleotide
uggagccgaccccggcacc

SEQ ID NO: 2901596 - RNA, 19 nt, Artificial Sequence
  Description of Artificial Sequence: Synthetic oligonucleotide
uguuggcagcugccaccug

SEQ ID NO: 2901597 - RNA, 19 nt, Artificial Sequence
  Description of Artificial Sequence: Synthetic oligonucleotide
gcgggccacacucuuggag

SEQ ID NO: 2901598 - RNA, 19 nt, Artificial Sequence
  Description of Artificial Sequence: Synthetic oligonucleotide
cgggccacacucuuggagc

SEQ ID NO: 2901599 - RNA, 19 nt, Artificial Sequence
  Description of Artificial Sequence: Synthetic oligonucleotide
cagcucguguguagaacca

SEQ ID NO: 2901600 - RNA, 19 nt, Artificial Sequence
  Description of Artificial Sequence: Synthetic oligonucleotide
uucagccccuccagggcuu

SEQ ID NO: 2901601 - RNA, 19 nt, Artificial Sequence
  Description of Artificial Sequence: Synthetic oligonucleotide
accuguccggcaauucugu

SEQ ID NO: 2901602 - RNA, 19 nt, Artificial Sequence
  Description of Artificial Sequence: Synthetic oligonucleotide
aggugccgugcuguggaag

SEQ ID NO: 2901603 - RNA, 19 nt, Artificial Sequence
  Description of Artificial Sequence: Synthetic oligonucleotide
guggaagcagcucgugugu

SEQ ID NO: 2901604 - RNA, 19 nt, Artificial Sequence
  Description of Artificial Sequence: Synthetic oligonucleotide
uggaagcagcucgugugua

SEQ ID NO: 2901605 - RNA, 19 nt, Artificial Sequence
  Description of Artificial Sequence: Synthetic oligonucleotide
auucggggacuuucagcuu

SEQ ID NO: 2901606 - RNA, 19 nt, Artificial Sequence
  Description of Artificial Sequence: Synthetic oligonucleotide
cgucuuuuacagugacucc

SEQ ID NO: 2901607 - RNA, 19 nt, Artificial Sequence
  Description of Artificial Sequence: Synthetic oligonucleotide
cuugacuguguccacccau

SEQ ID NO: 2901608 - RNA, 19 nt, Artificial Sequence
  Description of Artificial Sequence: Synthetic oligonucleotide
ugacgaacuccugcugguu

SEQ ID NO: 2901609 - RNA, 19 nt, Artificial Sequence
  Description of Artificial Sequence: Synthetic oligonucleotide
cuuggaggacgcggcgggc

SEQ ID NO: 2901610 - RNA, 19 nt, Artificial Sequence
  Description of Artificial Sequence: Synthetic oligonucleotide
ggcuuggaggacgcggcgg

SEQ ID NO: 2901611 - RNA, 19 nt, Artificial Sequence
  Description of Artificial Sequence: Synthetic oligonucleotide
guguagaaccaguucucau

SEQ ID NO: 2901612 - RNA, 19 nt, Artificial Sequence
  Description of Artificial Sequence: Synthetic oligonucleotide
caccaucuucagccccucc

SEQ ID NO: 2901613 - RNA, 19 nt, Artificial Sequence
  Description of Artificial Sequence: Synthetic oligonucleotide
cguguguagaaccaguucu

SEQ ID NO: 2901614 - RNA, 19 nt, Artificial Sequence
  Description of Artificial Sequence: Synthetic oligonucleotide
gccucugcugaaguggcug

SEQ ID NO: 2901615 - RNA, 19 nt, Artificial Sequence
  Description of Artificial Sequence: Synthetic oligonucleotide
ggcugccagggcucugacg

SEQ ID NO: 2901616 - RNA, 19 nt, Artificial Sequence
  Description of Artificial Sequence: Synthetic oligonucleotide
cagaucucucugucccuga

SEQ ID NO: 2901617 - RNA, 19 nt, Artificial Sequence
  Description of Artificial Sequence: Synthetic oligonucleotide
caccgcggagguacaggug

SEQ ID NO: 2901618 - RNA, 19 nt, Artificial Sequence
  Description of Artificial Sequence: Synthetic oligonucleotide
acccauucggggacuuuca

SEQ ID NO: 2901619 - RNA, 19 nt, Artificial Sequence
  Description of Artificial Sequence: Synthetic oligonucleotide
gggcuuggaggacgcggcg

SEQ ID NO: 2901620 - RNA, 19 nt, Artificial Sequence
  Description of Artificial Sequence: Synthetic oligonucleotide
cacacucuuggagccucug

SEQ ID NO: 2901621 - RNA, 19 nt, Artificial Sequence
  Description of Artificial Sequence: Synthetic oligonucleotide
cccggcaccaccgcggagg

SEQ ID NO: 2901622 - RNA, 19 nt, Artificial Sequence
  Description of Artificial Sequence: Synthetic oligonucleotide
ccugagguguuagcuugcg

SEQ ID NO: 2901623 - RNA, 19 nt, Artificial Sequence
  Description of Artificial Sequence: Synthetic oligonucleotide
cuuucagcuucccggacuu

SEQ ID NO: 2901624 - RNA, 19 nt, Artificial Sequence
  Description of Artificial Sequence: Synthetic oligonucleotide
cccuccagggcuuggagga

SEQ ID NO: 2901625 - RNA, 19 nt, Artificial Sequence
  Description of Artificial Sequence: Synthetic oligonucleotide
gguacaggugccgugcugu

SEQ ID NO: 2901626 - RNA, 19 nt, Artificial Sequence
  Description of Artificial Sequence: Synthetic oligonucleotide
ccccuccagggcuuggagg

SEQ ID NO: 2901627 - RNA, 19 nt, Artificial Sequence
  Description of Artificial Sequence: Synthetic oligonucleotide
cugccguccuccguagauc

SEQ ID NO: 2901628 - RNA, 19 nt, Artificial Sequence
  Description of Artificial Sequence: Synthetic oligonucleotide
cuucagccccuccagggcu

SEQ ID NO: 2901629 - RNA, 19 nt, Artificial Sequence
  Description of Artificial Sequence: Synthetic oligonucleotide
cguuucucugccguccucc

SEQ ID NO: 2901630 - RNA, 19 nt, Artificial Sequence
  Description of Artificial Sequence: Synthetic oligonucleotide
gcucugacgaacuccugcu

SEQ ID NO: 2901631 - RNA, 19 nt, Artificial Sequence
  Description of Artificial Sequence: Synthetic oligonucleotide
guuuggccagcuugacugu

SEQ ID NO: 2901632 - RNA, 19 nt, Artificial Sequence
  Description of Artificial Sequence: Synthetic oligonucleotide
caauucuguccagaucucu

SEQ ID NO: 2901633 - RNA, 19 nt, Artificial Sequence
  Description of Artificial Sequence: Synthetic oligonucleotide
cccauucggggacuuucag

SEQ ID NO: 2901634 - RNA, 19 nt, Artificial Sequence
  Description of Artificial Sequence: Synthetic oligonucleotide
cucguguguagaaccaguu

SEQ ID NO: 2901635 - RNA, 19 nt, Artificial Sequence
  Description of Artificial Sequence: Synthetic oligonucleotide
ccagaucucucugucccug

SEQ ID NO: 2901636 - RNA, 19 nt, Artificial Sequence
  Description of Artificial Sequence: Synthetic oligonucleotide
gcugccaccuguccggcaa

SEQ ID NO: 2901637 - RNA, 19 nt, Artificial Sequence
  Description of Artificial Sequence: Synthetic oligonucleotide
gagguacaggugccgugcu

SEQ ID NO: 2901638 - RNA, 19 nt, Artificial Sequence
  Description of Artificial Sequence: Synthetic oligonucleotide
cuguggaagcagcucgugu

SEQ ID NO: 2901639 - RNA, 19 nt, Artificial Sequence
  Description of Artificial Sequence: Synthetic oligonucleotide
accccggcaccaccgcgga

SEQ ID NO: 2901640 - RNA, 19 nt, Artificial Sequence
  Description of Artificial Sequence: Synthetic oligonucleotide
gguuaacgucuuuuacagu

SEQ ID NO: 2901641 - RNA, 19 nt, Artificial Sequence
  Description of Artificial Sequence: Synthetic oligonucleotide
cccugagguguuagcuugc

SEQ ID NO: 2901642 - RNA, 19 nt, Artificial Sequence
  Description of Artificial Sequence: Synthetic oligonucleotide
guccggcaauucuguccag

SEQ ID NO: 2901643 - RNA, 19 nt, Artificial Sequence
  Description of Artificial Sequence: Synthetic oligonucleotide
cguccuccguagaucuugg

SEQ ID NO: 2901644 - RNA, 19 nt, Artificial Sequence
  Description of Artificial Sequence: Synthetic oligonucleotide
agcugccaccuguccggca

SEQ ID NO: 2901645 - RNA, 19 nt, Artificial Sequence
  Description of Artificial Sequence: Synthetic oligonucleotide
gcuguggaagcagcucgug

SEQ ID NO: 2901646 - RNA, 19 nt, Artificial Sequence
  Description of Artificial Sequence: Synthetic oligonucleotide
gcaauucuguccagaucuc

SEQ ID NO: 2901647 - RNA, 19 nt, Artificial Sequence
  Description of Artificial Sequence: Synthetic oligonucleotide
ccguccuccguagaucuug

SEQ ID NO: 2901648 - RNA, 19 nt, Artificial Sequence
  Description of Artificial Sequence: Synthetic oligonucleotide
cuuuauguuuggccagcuu

SEQ ID NO: 2901649 - RNA, 19 nt, Artificial Sequence
  Description of Artificial Sequence: Synthetic oligonucleotide
cuccguagaucuuggucau

SEQ ID NO: 2901650 - RNA, 19 nt, Artificial Sequence
  Description of Artificial Sequence: Synthetic oligonucleotide
ccagcuugacuguguccac

SEQ ID NO: 2901651 - RNA, 19 nt, Artificial Sequence
  Description of Artificial Sequence: Synthetic oligonucleotide
aggacgcggcgggccacac

SEQ ID NO: 2901652 - RNA, 19 nt, Artificial Sequence
  Description of Artificial Sequence: Synthetic oligonucleotide
gccgaccccggcaccaccg

SEQ ID NO: 2901653 - RNA, 19 nt, Artificial Sequence
  Description of Artificial Sequence: Synthetic oligonucleotide
ggggcaagcucuuuauguu

SEQ ID NO: 2901654 - RNA, 19 nt, Artificial Sequence
  Description of Artificial Sequence: Synthetic oligonucleotide
cggcgggccacacucuugg

SEQ ID NO: 2901655 - RNA, 19 nt, Artificial Sequence
  Description of Artificial Sequence: Synthetic oligonucleotide
cagcugccaccuguccggc

SEQ ID NO: 2901656 - RNA, 19 nt, Artificial Sequence
  Description of Artificial Sequence: Synthetic oligonucleotide
gcuugacuguguccaccca

SEQ ID NO: 2901657 - RNA, 19 nt, Artificial Sequence
  Description of Artificial Sequence: Synthetic oligonucleotide
gccccuccagggcuuggag

SEQ ID NO: 2901658 - RNA, 19 nt, Artificial Sequence
  Description of Artificial Sequence: Synthetic oligonucleotide
uccacccauucggggacuu

SEQ ID NO: 2901659 - RNA, 19 nt, Artificial Sequence
  Description of Artificial Sequence: Synthetic oligonucleotide
uggcugggucugacaccgu

SEQ ID NO: 2901660 - RNA, 19 nt, Artificial Sequence
  Description of Artificial Sequence: Synthetic oligonucleotide
caccaccgcggagguacag

SEQ ID NO: 2901661 - RNA, 19 nt, Artificial Sequence
  Description of Artificial Sequence: Synthetic oligonucleotide
gccgugcuguggaagcagc

SEQ ID NO: 2901662 - RNA, 19 nt, Artificial Sequence
  Description of Artificial Sequence: Synthetic oligonucleotide
gggcaagcucuuuauguuu

SEQ ID NO: 2901663 - RNA, 19 nt, Artificial Sequence
  Description of Artificial Sequence: Synthetic oligonucleotide
agccucugcugaaguggcu

SEQ ID NO: 2901664 - RNA, 19 nt, Artificial Sequence
  Description of Artificial Sequence: Synthetic oligonucleotide
gccacacucuuggagccuc

SEQ ID NO: 2901665 - RNA, 19 nt, Artificial Sequence
  Description of Artificial Sequence: Synthetic oligonucleotide
ugccaccuguccggcaauu

SEQ ID NO: 2901666 - RNA, 19 nt, Artificial Sequence
  Description of Artificial Sequence: Synthetic oligonucleotide
gugccgugcuguggaagca

SEQ ID NO: 2901667 - RNA, 19 nt, Artificial Sequence
  Description of Artificial Sequence: Synthetic oligonucleotide
ccuguccggcaauucuguc

SEQ ID NO: 2901668 - RNA, 19 nt, Artificial Sequence
  Description of Artificial Sequence: Synthetic oligonucleotide
ccagcauccuuuguucuaa

SEQ ID NO: 2901669 - RNA, 19 nt, Artificial Sequence
  Description of Artificial Sequence: Synthetic oligonucleotide
gaggacgcggcgggccaca

SEQ ID NO: 2901670 - RNA, 19 nt, Artificial Sequence
  Description of Artificial Sequence: Synthetic oligonucleotide
ccgcggagguacaggugcc

SEQ ID NO: 2901671 - RNA, 19 nt, Artificial Sequence
  Description of Artificial Sequence: Synthetic oligonucleotide
cgugcuguggaagcagcuc

SEQ ID NO: 2901672 - RNA, 19 nt, Artificial Sequence
  Description of Artificial Sequence: Synthetic oligonucleotide
cugaaguggcugggucuga

SEQ ID NO: 2901673 - RNA, 19 nt, Artificial Sequence
  Description of Artificial Sequence: Synthetic oligonucleotide
cugcugguuaacgucuuuu

SEQ ID NO: 2901674 - RNA, 19 nt, Artificial Sequence
  Description of Artificial Sequence: Synthetic oligonucleotide
cggcaauucuguccagauc

SEQ ID NO: 2901675 - RNA, 19 nt, Artificial Sequence
  Description of Artificial Sequence: Synthetic oligonucleotide
gcucguguguagaaccagu

SEQ ID NO: 2901676 - RNA, 19 nt, Artificial Sequence
  Description of Artificial Sequence: Synthetic oligonucleotide
cugccagggcucugacgaa

SEQ ID NO: 2901677 - RNA, 19 nt, Artificial Sequence
  Description of Artificial Sequence: Synthetic oligonucleotide
ccagggcucugacgaacuc

SEQ ID NO: 2901678 - RNA, 19 nt, Artificial Sequence
  Description of Artificial Sequence: Synthetic oligonucleotide
cucugccguccuccguaga

SEQ ID NO: 2901679 - RNA, 19 nt, Artificial Sequence
  Description of Artificial Sequence: Synthetic oligonucleotide
cccagcauccuuuguucua

SEQ ID NO: 2901680 - RNA, 19 nt, Artificial Sequence
  Description of Artificial Sequence: Synthetic oligonucleotide
ccccaucuugguccuuuuc

SEQ ID NO: 2901681 - RNA, 19 nt, Artificial Sequence
  Description of Artificial Sequence: Synthetic oligonucleotide
cguagaucuuggucaugga

SEQ ID NO: 2901682 - RNA, 19 nt, Artificial Sequence
  Description of Artificial Sequence: Synthetic oligonucleotide
gguccuuuuccaccaucuu

SEQ ID NO: 2901683 - RNA, 19 nt, Artificial Sequence
  Description of Artificial Sequence: Synthetic oligonucleotide
cuugguccuuuuccaccau

SEQ ID NO: 2901684 - RNA, 19 nt, Artificial Sequence
  Description of Artificial Sequence: Synthetic oligonucleotide
guccuccguagaucuuggu

SEQ ID NO: 2901685 - RNA, 19 nt, Artificial Sequence
  Description of Artificial Sequence: Synthetic oligonucleotide
ccaccuguccggcaauucu

SEQ ID NO: 2901686 - RNA, 19 nt, Artificial Sequence
  Description of Artificial Sequence: Synthetic oligonucleotide
caggugccgugcuguggaa

SEQ ID NO: 2901687 - RNA, 19 nt, Artificial Sequence
  Description of Artificial Sequence: Synthetic oligonucleotide
gccaccuguccggcaauuc

SEQ ID NO: 2901688 - RNA, 19 nt, Artificial Sequence
  Description of Artificial Sequence: Synthetic oligonucleotide
cgcggagguacaggugccg

SEQ ID NO: 2901689 - RNA, 19 nt, Artificial Sequence
  Description of Artificial Sequence: Synthetic oligonucleotide
cgaacuccugcugguuaac

SEQ ID NO: 2901690 - RNA, 19 nt, Artificial Sequence
  Description of Artificial Sequence: Synthetic oligonucleotide
ccgaccccggcaccaccgc

SEQ ID NO: 2901691 - RNA, 19 nt, Artificial Sequence
  Description of Artificial Sequence: Synthetic oligonucleotide
ggcugggucugacaccguu

SEQ ID NO: 2901692 - RNA, 19 nt, Artificial Sequence
  Description of Artificial Sequence: Synthetic oligonucleotide
cgaccccggcaccaccgcg

SEQ ID NO: 2901693 - RNA, 19 nt, Artificial Sequence
  Description of Artificial Sequence: Synthetic oligonucleotide
ccggcaauucuguccagau

SEQ ID NO: 2901694 - RNA, 19 nt, Artificial Sequence
  Description of Artificial Sequence: Synthetic oligonucleotide
cagcauccuuuguucuaau

SEQ ID NO: 2901695 - RNA, 19 nt, Artificial Sequence
  Description of Artificial Sequence: Synthetic oligonucleotide
ccaccgcggagguacaggu

SEQ ID NO: 2901696 - RNA, 19 nt, Artificial Sequence
  Description of Artificial Sequence: Synthetic oligonucleotide
gggcucugacgaacuccug

SEQ ID NO: 2901697 - RNA, 19 nt, Artificial Sequence
  Description of Artificial Sequence: Synthetic oligonucleotide
ccagggcuuggaggacgcg

SEQ ID NO: 2901698 - RNA, 19 nt, Artificial Sequence
  Description of Artificial Sequence: Synthetic oligonucleotide
ggaggacgcggcgggccac

SEQ ID NO: 2901699 - RNA, 19 nt, Artificial Sequence
  Description of Artificial Sequence: Synthetic oligonucleotide
ccguuucucugccguccuc

SEQ ID NO: 2901700 - RNA, 19 nt, Artificial Sequence
  Description of Artificial Sequence: Synthetic oligonucleotide
ggcgggccacacucuugga

SEQ ID NO: 2901701 - RNA, 19 nt, Artificial Sequence
  Description of Artificial Sequence: Synthetic oligonucleotide
gcggcgggccacacucuug

SEQ ID NO: 2901702 - RNA, 19 nt, Artificial Sequence
  Description of Artificial Sequence: Synthetic oligonucleotide
cucugucccugagguguua

SEQ ID NO: 2901703 - RNA, 19 nt, Artificial Sequence
  Description of Artificial Sequence: Synthetic oligonucleotide
acgcggcgggccacacucu

SEQ ID NO: 2901704 - RNA, 19 nt, Artificial Sequence
  Description of Artificial Sequence: Synthetic oligonucleotide
ccaccaucuucagccccuc

SEQ ID NO: 2901705 - RNA, 19 nt, Artificial Sequence
  Description of Artificial Sequence: Synthetic oligonucleotide
gccagggcucugacgaacu

SEQ ID NO: 2901706 - RNA, 19 nt, Artificial Sequence
  Description of Artificial Sequence: Synthetic oligonucleotide
gcugggucugacaccguuu

SEQ ID NO: 2901707 - RNA, 19 nt, Artificial Sequence
  Description of Artificial Sequence: Synthetic oligonucleotide
gcggagguacaggugccgu

SEQ ID NO: 2901708 - RNA, 19 nt, Artificial Sequence
  Description of Artificial Sequence: Synthetic oligonucleotide
guccacccauucggggacu

SEQ ID NO: 2901709 - RNA, 19 nt, Artificial Sequence
  Description of Artificial Sequence: Synthetic oligonucleotide
ccgugcuguggaagcagcu

SEQ ID NO: 2901710 - RNA, 19 nt, Artificial Sequence
  Description of Artificial Sequence: Synthetic oligonucleotide
cugccaccuguccggcaau

SEQ ID NO: 2901711 - RNA, 19 nt, Artificial Sequence
  Description of Artificial Sequence: Synthetic oligonucleotide
ggccacacucuuggagccu

SEQ ID NO: 2901712 - RNA, 19 nt, Artificial Sequence
  Description of Artificial Sequence: Synthetic oligonucleotide
cggggacuuucagcuuccc

SEQ ID NO: 2901713 - RNA, 19 nt, Artificial Sequence
  Description of Artificial Sequence: Synthetic oligonucleotide
gcaccaccgcggagguaca

SEQ ID NO: 2901714 - RNA, 19 nt, Artificial Sequence
  Description of Artificial Sequence: Synthetic oligonucleotide
ggacgcggcgggccacacu

SEQ ID NO: 2901715 - RNA, 19 nt, Artificial Sequence
  Description of Artificial Sequence: Synthetic oligonucleotide
ccacacucuuggagccucu

SEQ ID NO: 2901716 - RNA, 19 nt, Artificial Sequence
  Description of Artificial Sequence: Synthetic oligonucleotide
ccccggcaccaccgcggag

SEQ ID NO: 2901717 - RNA, 19 nt, Artificial Sequence
  Description of Artificial Sequence: Synthetic oligonucleotide
ccugcugguuaacgucuuu

SEQ ID NO: 2901718 - RNA, 19 nt, Artificial Sequence
  Description of Artificial Sequence: Synthetic oligonucleotide
ccggcaccaccgcggaggu

SEQ ID NO: 2901719 - RNA, 19 nt, Artificial Sequence
  Description of Artificial Sequence: Synthetic oligonucleotide
gccguccuccguagaucuu

SEQ ID NO: 2901720 - RNA, 19 nt, Artificial Sequence
  Description of Artificial Sequence: Synthetic oligonucleotide
ccacccauucggggacuuu

SEQ ID NO: 2901721 - RNA, 19 nt, Artificial Sequence
  Description of Artificial Sequence: Synthetic oligonucleotide
cggcaccaccgcggaggua

SEQ ID NO: 2901722 - RNA, 19 nt, Artificial Sequence
  Description of Artificial Sequence: Synthetic oligonucleotide
auacauuuggcauacagac

SEQ ID NO: 2901723 - RNA, 19 nt, Artificial Sequence
  Description of Artificial Sequence: Synthetic oligonucleotide
uccaguuuggcuuuaaugg

SEQ ID NO: 2901724 - RNA, 19 nt, Artificial Sequence
  Description of Artificial Sequence: Synthetic oligonucleotide
gaaaaguugaugaaguugg

SEQ ID NO: 2901725 - RNA, 19 nt, Artificial Sequence
  Description of Artificial Sequence: Synthetic oligonucleotide
uuaauggaaaaguugauga

SEQ ID NO: 2901726 - RNA, 19 nt, Artificial Sequence
  Description of Artificial Sequence: Synthetic oligonucleotide
acauuuggcauacagacag

SEQ ID NO: 2901727 - RNA, 19 nt, Artificial Sequence
  Description of Artificial Sequence: Synthetic oligonucleotide
ucaauuucagccaucacac

SEQ ID NO: 2901728 - RNA, 19 nt, Artificial Sequence
  Description of Artificial Sequence: Synthetic oligonucleotide
uggaagaacaagcaggaag

SEQ ID NO: 2901729 - RNA, 19 nt, Artificial Sequence
  Description of Artificial Sequence: Synthetic oligonucleotide
cuaagcauucgcuucaucg

SEQ ID NO: 2901730 - RNA, 19 nt, Artificial Sequence
  Description of Artificial Sequence: Synthetic oligonucleotide
gaaguugguaucaacaagg

SEQ ID NO: 2901731 - RNA, 19 nt, Artificial Sequence
  Description of Artificial Sequence: Synthetic oligonucleotide
aauggaaaaguugaugaag

SEQ ID NO: 2901732 - RNA, 19 nt, Artificial Sequence
  Description of Artificial Sequence: Synthetic oligonucleotide
uucuuuaagucucucaucu

SEQ ID NO: 2901733 - RNA, 19 nt, Artificial Sequence
  Description of Artificial Sequence: Synthetic oligonucleotide
uuguguauuguacuggaag

SEQ ID NO: 2901734 - RNA, 19 nt, Artificial Sequence
  Description of Artificial Sequence: Synthetic oligonucleotide
aaguugaugaaguugguau

SEQ ID NO: 2901735 - RNA, 19 nt, Artificial Sequence
  Description of Artificial Sequence: Synthetic oligonucleotide
aacacuugugcugagugac

SEQ ID NO: 2901736 - RNA, 19 nt, Artificial Sequence
  Description of Artificial Sequence: Synthetic oligonucleotide
uuuucuuuaagucucucau

SEQ ID NO: 2901737 - RNA, 19 nt, Artificial Sequence
  Description of Artificial Sequence: Synthetic oligonucleotide
uuauacaagggauacauuu

SEQ ID NO: 2901738 - RNA, 19 nt, Artificial Sequence
  Description of Artificial Sequence: Synthetic oligonucleotide
aauuucagccaucacacaa

SEQ ID NO: 2901739 - RNA, 19 nt, Artificial Sequence
  Description of Artificial Sequence: Synthetic oligonucleotide
uucaucgucgcauauuucc

SEQ ID NO: 2901740 - RNA, 19 nt, Artificial Sequence
  Description of Artificial Sequence: Synthetic oligonucleotide
uguacuggaagaacaagca

SEQ ID NO: 2901741 - RNA, 19 nt, Artificial Sequence
  Description of Artificial Sequence: Synthetic oligonucleotide
agucucucaucucugagac

SEQ ID NO: 2901742 - RNA, 19 nt, Artificial Sequence
  Description of Artificial Sequence: Synthetic oligonucleotide
uauacaagggauacauuug

SEQ ID NO: 2901743 - RNA, 19 nt, Artificial Sequence
  Description of Artificial Sequence: Synthetic oligonucleotide
acggcagucggucaaaucg

SEQ ID NO: 2901744 - RNA, 19 nt, Artificial Sequence
  Description of Artificial Sequence: Synthetic oligonucleotide
uuguacuggaagaacaagc

SEQ ID NO: 2901745 - RNA, 19 nt, Artificial Sequence
  Description of Artificial Sequence: Synthetic oligonucleotide
ucaucucugagacuaagca

SEQ ID NO: 2901746 - RNA, 19 nt, Artificial Sequence
  Description of Artificial Sequence: Synthetic oligonucleotide
uugguaucaacaaggaugu

SEQ ID NO: 2901747 - RNA, 19 nt, Artificial Sequence
  Description of Artificial Sequence: Synthetic oligonucleotide
uuuaauggaaaaguugaug

SEQ ID NO: 2901748 - RNA, 19 nt, Artificial Sequence
  Description of Artificial Sequence: Synthetic oligonucleotide
ugaaguugguaucaacaag

SEQ ID NO: 2901749 - RNA, 19 nt, Artificial Sequence
  Description of Artificial Sequence: Synthetic oligonucleotide
aaaucguggauccuuggca

SEQ ID NO: 2901750 - RNA, 19 nt, Artificial Sequence
  Description of Artificial Sequence: Synthetic oligonucleotide
uucucuuuccuucagcgca

SEQ ID NO: 2901751 - RNA, 19 nt, Artificial Sequence
  Description of Artificial Sequence: Synthetic oligonucleotide
cacacaaucaguuauacaa

SEQ ID NO: 2901752 - RNA, 19 nt, Artificial Sequence
  Description of Artificial Sequence: Synthetic oligonucleotide
acuucucuuuccuucagcg

SEQ ID NO: 2901753 - RNA, 19 nt, Artificial Sequence
  Description of Artificial Sequence: Synthetic oligonucleotide
uuuccuucagcgcacuggg

SEQ ID NO: 2901754 - RNA, 19 nt, Artificial Sequence
  Description of Artificial Sequence: Synthetic oligonucleotide
uuggcauacagacagucca

SEQ ID NO: 2901755 - RNA, 19 nt, Artificial Sequence
  Description of Artificial Sequence: Synthetic oligonucleotide
cagucaucagcauaggucc

SEQ ID NO: 2901756 - RNA, 19 nt, Artificial Sequence
  Description of Artificial Sequence: Synthetic oligonucleotide
caaggaugugguaaggugg

SEQ ID NO: 2901757 - RNA, 19 nt, Artificial Sequence
  Description of Artificial Sequence: Synthetic oligonucleotide
uguguauuguacuggaaga

SEQ ID NO: 2901758 - RNA, 19 nt, Artificial Sequence
  Description of Artificial Sequence: Synthetic oligonucleotide
gaugugguaagguggaccc

SEQ ID NO: 2901759 - RNA, 19 nt, Artificial Sequence
  Description of Artificial Sequence: Synthetic oligonucleotide
ucugagacuaagcauucgc

SEQ ID NO: 2901760 - RNA, 19 nt, Artificial Sequence
  Description of Artificial Sequence: Synthetic oligonucleotide
caagcagucaucagcauag

SEQ ID NO: 2901761 - RNA, 19 nt, Artificial Sequence
  Description of Artificial Sequence: Synthetic oligonucleotide
uuuugcuuucccauguuca

SEQ ID NO: 2901762 - RNA, 19 nt, Artificial Sequence
  Description of Artificial Sequence: Synthetic oligonucleotide
ucaacaaggaugugguaag

SEQ ID NO: 2901763 - RNA, 19 nt, Artificial Sequence
  Description of Artificial Sequence: Synthetic oligonucleotide
cacaaucaguuauacaagg

SEQ ID NO: 2901764 - RNA, 19 nt, Artificial Sequence
  Description of Artificial Sequence: Synthetic oligonucleotide
aauguaacacuugugcuga

SEQ ID NO: 2901765 - RNA, 19 nt, Artificial Sequence
  Description of Artificial Sequence: Synthetic oligonucleotide
uuaggcuuuaaucuauccu

SEQ ID NO: 2901766 - RNA, 19 nt, Artificial Sequence
  Description of Artificial Sequence: Synthetic oligonucleotide
uaaucuauccuuuucuuua

SEQ ID NO: 2901767 - RNA, 19 nt, Artificial Sequence
  Description of Artificial Sequence: Synthetic oligonucleotide
aagcauucgcuucaucguc

SEQ ID NO: 2901768 - RNA, 19 nt, Artificial Sequence
  Description of Artificial Sequence: Synthetic oligonucleotide
ugcacuaaguccaguuugg

SEQ ID NO: 2901769 - RNA, 19 nt, Artificial Sequence
  Description of Artificial Sequence: Synthetic oligonucleotide
uacucgauacuucuguccc

SEQ ID NO: 2901770 - RNA, 19 nt, Artificial Sequence
  Description of Artificial Sequence: Synthetic oligonucleotide
aauccuuagugcuacucga

SEQ ID NO: 2901771 - RNA, 19 nt, Artificial Sequence
  Description of Artificial Sequence: Synthetic oligonucleotide
uuuucuuuugcuuucccau

SEQ ID NO: 2901772 - RNA, 19 nt, Artificial Sequence
  Description of Artificial Sequence: Synthetic oligonucleotide
gauacuucugucccaauuc

SEQ ID NO: 2901773 - RNA, 19 nt, Artificial Sequence
  Description of Artificial Sequence: Synthetic oligonucleotide
uccuuggcaauccuuagug

SEQ ID NO: 2901774 - RNA, 19 nt, Artificial Sequence
  Description of Artificial Sequence: Synthetic oligonucleotide
ucauugacugcacuaaguc

SEQ ID NO: 2901775 - RNA, 19 nt, Artificial Sequence
  Description of Artificial Sequence: Synthetic oligonucleotide
uuuaagucucucaucucug

SEQ ID NO: 2901776 - RNA, 19 nt, Artificial Sequence
  Description of Artificial Sequence: Synthetic oligonucleotide
caagcaggaaggauguugg

SEQ ID NO: 2901777 - RNA, 19 nt, Artificial Sequence
  Description of Artificial Sequence: Synthetic oligonucleotide
ccaauucucaauuucagcc

SEQ ID NO: 2901778 - RNA, 19 nt, Artificial Sequence
  Description of Artificial Sequence: Synthetic oligonucleotide
caauguaacacuugugcug

SEQ ID NO: 2901779 - RNA, 19 nt, Artificial Sequence
  Description of Artificial Sequence: Synthetic oligonucleotide
acuaaguccaguuuggcuu

SEQ ID NO: 2901780 - RNA, 19 nt, Artificial Sequence
  Description of Artificial Sequence: Synthetic oligonucleotide
cuauccuuuucuuuaaguc

SEQ ID NO: 2901781 - RNA, 19 nt, Artificial Sequence
  Description of Artificial Sequence: Synthetic oligonucleotide
aauucucaauuucagccau

SEQ ID NO: 2901782 - RNA, 19 nt, Artificial Sequence
  Description of Artificial Sequence: Synthetic oligonucleotide
agaacaagcaggaaggaug

SEQ ID NO: 2901783 - RNA, 19 nt, Artificial Sequence
  Description of Artificial Sequence: Synthetic oligonucleotide
uuuggcuuuaauggaaaag

SEQ ID NO: 2901784 - RNA, 19 nt, Artificial Sequence
  Description of Artificial Sequence: Synthetic oligonucleotide
ucagcauagguccuuugug

SEQ ID NO: 2901785 - RNA, 19 nt, Artificial Sequence
  Description of Artificial Sequence: Synthetic oligonucleotide
gaugaaguugguaucaaca

SEQ ID NO: 2901786 - RNA, 19 nt, Artificial Sequence
  Description of Artificial Sequence: Synthetic oligonucleotide
ggaagaacaagcaggaagg

SEQ ID NO: 2901787 - RNA, 19 nt, Artificial Sequence
  Description of Artificial Sequence: Synthetic oligonucleotide
ucaguuauacaagggauac

SEQ ID NO: 2901788 - RNA, 19 nt, Artificial Sequence
  Description of Artificial Sequence: Synthetic oligonucleotide
aguuauacaagggauacau

SEQ ID NO: 2901789 - RNA, 19 nt, Artificial Sequence
  Description of Artificial Sequence: Synthetic oligonucleotide
gacaguccaucauugacug

SEQ ID NO: 2901790 - RNA, 19 nt, Artificial Sequence
  Description of Artificial Sequence: Synthetic oligonucleotide
uaccaagcagucaucagca

SEQ ID NO: 2901791 - RNA, 19 nt, Artificial Sequence
  Description of Artificial Sequence: Synthetic oligonucleotide
acaauguaacacuugugcu

SEQ ID NO: 2901792 - RNA, 19 nt, Artificial Sequence
  Description of Artificial Sequence: Synthetic oligonucleotide
gguaucaacaaggaugugg

SEQ ID NO: 2901793 - RNA, 19 nt, Artificial Sequence
  Description of Artificial Sequence: Synthetic oligonucleotide
uuuaggcuuuaaucuaucc

SEQ ID NO: 2901794 - RNA, 19 nt, Artificial Sequence
  Description of Artificial Sequence: Synthetic oligonucleotide
uaggcuuuaaucuauccuu

SEQ ID NO: 2901795 - RNA, 19 nt, Artificial Sequence
  Description of Artificial Sequence: Synthetic oligonucleotide
uacagacaguccaucauug

SEQ ID NO: 2901796 - RNA, 19 nt, Artificial Sequence
  Description of Artificial Sequence: Synthetic oligonucleotide
uuuggcauacagacagucc

SEQ ID NO: 2901797 - RNA, 19 nt, Artificial Sequence
  Description of Artificial Sequence: Synthetic oligonucleotide
acaaggaugugguaaggug

SEQ ID NO: 2901798 - RNA, 19 nt, Artificial Sequence
  Description of Artificial Sequence: Synthetic oligonucleotide
guaccaagcagucaucagc

SEQ ID NO: 2901799 - RNA, 19 nt, Artificial Sequence
  Description of Artificial Sequence: Synthetic oligonucleotide
uauuguacuggaagaacaa

SEQ ID NO: 2901800 - RNA, 19 nt, Artificial Sequence
  Description of Artificial Sequence: Synthetic oligonucleotide
auugacugcacuaagucca

SEQ ID NO: 2901801 - RNA, 19 nt, Artificial Sequence
  Description of Artificial Sequence: Synthetic oligonucleotide
aaucaguuauacaagggau

SEQ ID NO: 2901802 - RNA, 19 nt, Artificial Sequence
  Description of Artificial Sequence: Synthetic oligonucleotide
agugcuacucgauacuucu

SEQ ID NO: 2901803 - RNA, 19 nt, Artificial Sequence
  Description of Artificial Sequence: Synthetic oligonucleotide
cauugacugcacuaagucc

SEQ ID NO: 2901804 - RNA, 19 nt, Artificial Sequence
  Description of Artificial Sequence: Synthetic oligonucleotide
acaagggauacauuuggca

SEQ ID NO: 2901805 - RNA, 19 nt, Artificial Sequence
  Description of Artificial Sequence: Synthetic oligonucleotide
guaacacuugugcugagug

SEQ ID NO: 2901806 - RNA, 19 nt, Artificial Sequence
  Description of Artificial Sequence: Synthetic oligonucleotide
caauccuuagugcuacucg

SEQ ID NO: 2901807 - RNA, 19 nt, Artificial Sequence
  Description of Artificial Sequence: Synthetic oligonucleotide
uaagcauucgcuucaucgu

SEQ ID NO: 2901808 - RNA, 19 nt, Artificial Sequence
  Description of Artificial Sequence: Synthetic oligonucleotide
ucuauccuuuucuuuaagu

SEQ ID NO: 2901809 - RNA, 19 nt, Artificial Sequence
  Description of Artificial Sequence: Synthetic oligonucleotide
ucccaauucucaauuucag

SEQ ID NO: 2901810 - RNA, 19 nt, Artificial Sequence
  Description of Artificial Sequence: Synthetic oligonucleotide
aagucucucaucucugaga

SEQ ID NO: 2901811 - RNA, 19 nt, Artificial Sequence
  Description of Artificial Sequence: Synthetic oligonucleotide
uaagucucucaucucugag

SEQ ID NO: 2901812 - RNA, 19 nt, Artificial Sequence
  Description of Artificial Sequence: Synthetic oligonucleotide
aaucguggauccuuggcaa

SEQ ID NO: 2901813 - RNA, 19 nt, Artificial Sequence
  Description of Artificial Sequence: Synthetic oligonucleotide
uucuuuugcuuucccaugu

SEQ ID NO: 2901814 - RNA, 19 nt, Artificial Sequence
  Description of Artificial Sequence: Synthetic oligonucleotide
uuuaaucuauccuuuucuu

SEQ ID NO: 2901815 - RNA, 19 nt, Artificial Sequence
  Description of Artificial Sequence: Synthetic oligonucleotide
ugcuacucgauacuucugu

SEQ ID NO: 2901816 - RNA, 19 nt, Artificial Sequence
  Description of Artificial Sequence: Synthetic oligonucleotide
uuucuuuugcuuucccaug

SEQ ID NO: 2901817 - RNA, 19 nt, Artificial Sequence
  Description of Artificial Sequence: Synthetic oligonucleotide
gagacuaagcauucgcuuc

SEQ ID NO: 2901818 - RNA, 19 nt, Artificial Sequence
  Description of Artificial Sequence: Synthetic oligonucleotide
cugagugacucucuguacc

SEQ ID NO: 2901819 - RNA, 19 nt, Artificial Sequence
  Description of Artificial Sequence: Synthetic oligonucleotide
aaucuauccuuuucuuuaa

SEQ ID NO: 2901820 - RNA, 19 nt, Artificial Sequence
  Description of Artificial Sequence: Synthetic oligonucleotide
ucggucaaaucguggaucc

SEQ ID NO: 2901821 - RNA, 19 nt, Artificial Sequence
  Description of Artificial Sequence: Synthetic oligonucleotide
aucacacaaucaguuauac

SEQ ID NO: 2901822 - RNA, 19 nt, Artificial Sequence
  Description of Artificial Sequence: Synthetic oligonucleotide
auuuggcauacagacaguc

SEQ ID NO: 2901823 - RNA, 19 nt, Artificial Sequence
  Description of Artificial Sequence: Synthetic oligonucleotide
ucucucaucucugagacua

SEQ ID NO: 2901824 - RNA, 19 nt, Artificial Sequence
  Description of Artificial Sequence: Synthetic oligonucleotide
cuacucgauacuucugucc

SEQ ID NO: 2901825 - RNA, 19 nt, Artificial Sequence
  Description of Artificial Sequence: Synthetic oligonucleotide
uguauuguacuggaagaac

SEQ ID NO: 2901826 - RNA, 19 nt, Artificial Sequence
  Description of Artificial Sequence: Synthetic oligonucleotide
gauacauuuggcauacaga

SEQ ID NO: 2901827 - RNA, 19 nt, Artificial Sequence
  Description of Artificial Sequence: Synthetic oligonucleotide
uacaagggauacauuuggc

SEQ ID NO: 2901828 - RNA, 19 nt, Artificial Sequence
  Description of Artificial Sequence: Synthetic oligonucleotide
uaauggaaaaguugaugaa

SEQ ID NO: 2901829 - RNA, 19 nt, Artificial Sequence
  Description of Artificial Sequence: Synthetic oligonucleotide
aguuguguauuguacugga

SEQ ID NO: 2901830 - RNA, 19 nt, Artificial Sequence
  Description of Artificial Sequence: Synthetic oligonucleotide
ucaaaucguggauccuugg

SEQ ID NO: 2901831 - RNA, 19 nt, Artificial Sequence
  Description of Artificial Sequence: Synthetic oligonucleotide
uuaaucuauccuuuucuuu

SEQ ID NO: 2901832 - RNA, 19 nt, Artificial Sequence
  Description of Artificial Sequence: Synthetic oligonucleotide
augaaguugguaucaacaa

SEQ ID NO: 2901833 - RNA, 19 nt, Artificial Sequence
  Description of Artificial Sequence: Synthetic oligonucleotide
uuugcuuucccauguucac

SEQ ID NO: 2901834 - RNA, 19 nt, Artificial Sequence
  Description of Artificial Sequence: Synthetic oligonucleotide
uacauuuggcauacagaca

SEQ ID NO: 2901835 - RNA, 19 nt, Artificial Sequence
  Description of Artificial Sequence: Synthetic oligonucleotide
ggauacauuuggcauacag

SEQ ID NO: 2901836 - RNA, 19 nt, Artificial Sequence
  Description of Artificial Sequence: Synthetic oligonucleotide
acaaucaguuauacaaggg

SEQ ID NO: 2901837 - RNA, 19 nt, Artificial Sequence
  Description of Artificial Sequence: Synthetic oligonucleotide
aagggauacauuuggcaua

SEQ ID NO: 2901838 - RNA, 19 nt, Artificial Sequence
  Description of Artificial Sequence: Synthetic oligonucleotide
caaucaguuauacaaggga

SEQ ID NO: 2901839 - RNA, 19 nt, Artificial Sequence
  Description of Artificial Sequence: Synthetic oligonucleotide
agggauacauuuggcauac

SEQ ID NO: 2901840 - RNA, 19 nt, Artificial Sequence
  Description of Artificial Sequence: Synthetic oligonucleotide
ugugguaagguggacccag

SEQ ID NO: 2901841 - RNA, 19 nt, Artificial Sequence
  Description of Artificial Sequence: Synthetic oligonucleotide
uuaagucucucaucucuga

SEQ ID NO: 2901842 - RNA, 19 nt, Artificial Sequence
  Description of Artificial Sequence: Synthetic oligonucleotide
ugucccaauucucaauuuc

SEQ ID NO: 2901843 - RNA, 19 nt, Artificial Sequence
  Description of Artificial Sequence: Synthetic oligonucleotide
uucucaauuucagccauca

SEQ ID NO: 2901844 - RNA, 19 nt, Artificial Sequence
  Description of Artificial Sequence: Synthetic oligonucleotide
gacucucuguaccaagcag

SEQ ID NO: 2901845 - RNA, 19 nt, Artificial Sequence
  Description of Artificial Sequence: Synthetic oligonucleotide
ugugcugagugacucucug

SEQ ID NO: 2901846 - RNA, 19 nt, Artificial Sequence
  Description of Artificial Sequence: Synthetic oligonucleotide
uguaccaagcagucaucag

SEQ ID NO: 2901847 - RNA, 19 nt, Artificial Sequence
  Description of Artificial Sequence: Synthetic oligonucleotide
uuucuuuaagucucucauc

SEQ ID NO: 2901848 - RNA, 19 nt, Artificial Sequence
  Description of Artificial Sequence: Synthetic oligonucleotide
aucaacaaggaugugguaa

SEQ ID NO: 2901849 - RNA, 19 nt, Artificial Sequence
  Description of Artificial Sequence: Synthetic oligonucleotide
ucugucccaauucucaauu

SEQ ID NO: 2901850 - RNA, 19 nt, Artificial Sequence
  Description of Artificial Sequence: Synthetic oligonucleotide
acaagcaggaaggauguug

SEQ ID NO: 2901851 - RNA, 19 nt, Artificial Sequence
  Description of Artificial Sequence: Synthetic oligonucleotide
ggaaaaguugaugaaguug

SEQ ID NO: 2901852 - RNA, 19 nt, Artificial Sequence
  Description of Artificial Sequence: Synthetic oligonucleotide
caaaucguggauccuuggc

SEQ ID NO: 2901853 - RNA, 19 nt, Artificial Sequence
  Description of Artificial Sequence: Synthetic oligonucleotide
agcauagguccuuugugug

SEQ ID NO: 2901854 - RNA, 19 nt, Artificial Sequence
  Description of Artificial Sequence: Synthetic oligonucleotide
cuuuccuucagcgcacugg

SEQ ID NO: 2901855 - RNA, 19 nt, Artificial Sequence
  Description of Artificial Sequence: Synthetic oligonucleotide
ugagugacucucuguacca

SEQ ID NO: 2901856 - RNA, 19 nt, Artificial Sequence
  Description of Artificial Sequence: Synthetic oligonucleotide
ucgcauauuuccuuguuuu

SEQ ID NO: 2901857 - RNA, 19 nt, Artificial Sequence
  Description of Artificial Sequence: Synthetic oligonucleotide
ugagacuaagcauucgcuu

SEQ ID NO: 2901858 - RNA, 19 nt, Artificial Sequence
  Description of Artificial Sequence: Synthetic oligonucleotide
ucaucgucgcauauuuccu

SEQ ID NO: 2901859 - RNA, 19 nt, Artificial Sequence
  Description of Artificial Sequence: Synthetic oligonucleotide
aacaaggaugugguaaggu

SEQ ID NO: 2901860 - RNA, 19 nt, Artificial Sequence
  Description of Artificial Sequence: Synthetic oligonucleotide
auacuucugucccaauucu

SEQ ID NO: 2901861 - RNA, 19 nt, Artificial Sequence
  Description of Artificial Sequence: Synthetic oligonucleotide
ugcugagugacucucugua

SEQ ID NO: 2901862 - RNA, 19 nt, Artificial Sequence
  Description of Artificial Sequence: Synthetic oligonucleotide
aagcaggaaggauguuggg

SEQ ID NO: 2901863 - RNA, 19 nt, Artificial Sequence
  Description of Artificial Sequence: Synthetic oligonucleotide
agacuaagcauucgcuuca

SEQ ID NO: 2901864 - RNA, 19 nt, Artificial Sequence
  Description of Artificial Sequence: Synthetic oligonucleotide
uuuuaggcuuuaaucuauc

SEQ ID NO: 2901865 - RNA, 19 nt, Artificial Sequence
  Description of Artificial Sequence: Synthetic oligonucleotide
uuucagccaucacacaauc

SEQ ID NO: 2901866 - RNA, 19 nt, Artificial Sequence
  Description of Artificial Sequence: Synthetic oligonucleotide
auuguacuggaagaacaag

SEQ ID NO: 2901867 - RNA, 19 nt, Artificial Sequence
  Description of Artificial Sequence: Synthetic oligonucleotide
aucagcauagguccuuugu

SEQ ID NO: 2901868 - RNA, 19 nt, Artificial Sequence
  Description of Artificial Sequence: Synthetic oligonucleotide
ugugugugcacggcagucg

SEQ ID NO: 2901869 - RNA, 19 nt, Artificial Sequence
  Description of Artificial Sequence: Synthetic oligonucleotide
gauccuuggcaauccuuag

SEQ ID NO: 2901870 - RNA, 19 nt, Artificial Sequence
  Description of Artificial Sequence: Synthetic oligonucleotide
uccaucauugacugcacua

SEQ ID NO: 2901871 - RNA, 19 nt, Artificial Sequence
  Description of Artificial Sequence: Synthetic oligonucleotide
cagacaguccaucauugac

SEQ ID NO: 2901872 - RNA, 19 nt, Artificial Sequence
  Description of Artificial Sequence: Synthetic oligonucleotide
gcuuuaauggaaaaguuga

SEQ ID NO: 2901873 - RNA, 19 nt, Artificial Sequence
  Description of Artificial Sequence: Synthetic oligonucleotide
ugaugaaguugguaucaac

SEQ ID NO: 2901874 - RNA, 19 nt, Artificial Sequence
  Description of Artificial Sequence: Synthetic oligonucleotide
ugacucucuguaccaagca

SEQ ID NO: 2901875 - RNA, 19 nt, Artificial Sequence
  Description of Artificial Sequence: Synthetic oligonucleotide
cugcacuaaguccaguuug

SEQ ID NO: 2901876 - RNA, 19 nt, Artificial Sequence
  Description of Artificial Sequence: Synthetic oligonucleotide
guauuguacuggaagaaca

SEQ ID NO: 2901877 - RNA, 19 nt, Artificial Sequence
  Description of Artificial Sequence: Synthetic oligonucleotide
uccuucagcgcacugggau

SEQ ID NO: 2901878 - RNA, 19 nt, Artificial Sequence
  Description of Artificial Sequence: Synthetic oligonucleotide
uugacugcacuaaguccag

SEQ ID NO: 2901879 - RNA, 19 nt, Artificial Sequence
  Description of Artificial Sequence: Synthetic oligonucleotide
aaaguugaugaaguuggua

SEQ ID NO: 2901880 - RNA, 19 nt, Artificial Sequence
  Description of Artificial Sequence: Synthetic oligonucleotide
acacaaucaguuauacaag

SEQ ID NO: 2901881 - RNA, 19 nt, Artificial Sequence
  Description of Artificial Sequence: Synthetic oligonucleotide
uugcuuucccauguucacg

SEQ ID NO: 2901882 - RNA, 19 nt, Artificial Sequence
  Description of Artificial Sequence: Synthetic oligonucleotide
uaacacuugugcugaguga

SEQ ID NO: 2901883 - RNA, 19 nt, Artificial Sequence
  Description of Artificial Sequence: Synthetic oligonucleotide
caauucucaauuucagcca

SEQ ID NO: 2901884 - RNA, 19 nt, Artificial Sequence
  Description of Artificial Sequence: Synthetic oligonucleotide
guaagguggacccaguugu

SEQ ID NO: 2901885 - RNA, 19 nt, Artificial Sequence
  Description of Artificial Sequence: Synthetic oligonucleotide
aucgucgcauauuuccuug

SEQ ID NO: 2901886 - RNA, 19 nt, Artificial Sequence
  Description of Artificial Sequence: Synthetic oligonucleotide
auacagacaguccaucauu

SEQ ID NO: 2901887 - RNA, 19 nt, Artificial Sequence
  Description of Artificial Sequence: Synthetic oligonucleotide
cuuuucuuuaagucucuca

SEQ ID NO: 2901888 - RNA, 19 nt, Artificial Sequence
  Description of Artificial Sequence: Synthetic oligonucleotide
ucacacaaucaguuauaca

SEQ ID NO: 2901889 - RNA, 19 nt, Artificial Sequence
  Description of Artificial Sequence: Synthetic oligonucleotide
acuggaagaacaagcagga

SEQ ID NO: 2901890 - RNA, 19 nt, Artificial Sequence
  Description of Artificial Sequence: Synthetic oligonucleotide
cuucucuuuccuucagcgc

SEQ ID NO: 2901891 - RNA, 19 nt, Artificial Sequence
  Description of Artificial Sequence: Synthetic oligonucleotide
auagguccuuugugugugc

SEQ ID NO: 2901892 - RNA, 19 nt, Artificial Sequence
  Description of Artificial Sequence: Synthetic oligonucleotide
cuuuaaucuauccuuuucu

SEQ ID NO: 2901893 - RNA, 19 nt, Artificial Sequence
  Description of Artificial Sequence: Synthetic oligonucleotide
aagaacaagcaggaaggau

SEQ ID NO: 2901894 - RNA, 19 nt, Artificial Sequence
  Description of Artificial Sequence: Synthetic oligonucleotide
aaggaugugguaaggugga

SEQ ID NO: 2901895 - RNA, 19 nt, Artificial Sequence
  Description of Artificial Sequence: Synthetic oligonucleotide
guuuucuuuugcuuuccca

SEQ ID NO: 2901896 - RNA, 19 nt, Artificial Sequence
  Description of Artificial Sequence: Synthetic oligonucleotide
aaguugguaucaacaagga

SEQ ID NO: 2901897 - RNA, 19 nt, Artificial Sequence
  Description of Artificial Sequence: Synthetic oligonucleotide
caucauugacugcacuaag

SEQ ID NO: 2901898 - RNA, 19 nt, Artificial Sequence
  Description of Artificial Sequence: Synthetic oligonucleotide
aucucugagacuaagcauu

SEQ ID NO: 2901899 - RNA, 19 nt, Artificial Sequence
  Description of Artificial Sequence: Synthetic oligonucleotide
ucucugagacuaagcauuc

SEQ ID NO: 2901900 - RNA, 19 nt, Artificial Sequence
  Description of Artificial Sequence: Synthetic oligonucleotide
uggcuuuaauggaaaaguu

SEQ ID NO: 2901901 - RNA, 19 nt, Artificial Sequence
  Description of Artificial Sequence: Synthetic oligonucleotide
uuugugugugcacggcagu

SEQ ID NO: 2901902 - RNA, 19 nt, Artificial Sequence
  Description of Artificial Sequence: Synthetic oligonucleotide
cuuuaagucucucaucucu

SEQ ID NO: 2901903 - RNA, 19 nt, Artificial Sequence
  Description of Artificial Sequence: Synthetic oligonucleotide
gacuucucuuuccuucagc

SEQ ID NO: 2901904 - RNA, 19 nt, Artificial Sequence
  Description of Artificial Sequence: Synthetic oligonucleotide
acuucugucccaauucuca

SEQ ID NO: 2901905 - RNA, 19 nt, Artificial Sequence
  Description of Artificial Sequence: Synthetic oligonucleotide
agacaguccaucauugacu

SEQ ID NO: 2901906 - RNA, 19 nt, Artificial Sequence
  Description of Artificial Sequence: Synthetic oligonucleotide
caguuguguauuguacugg

SEQ ID NO: 2901907 - RNA, 19 nt, Artificial Sequence
  Description of Artificial Sequence: Synthetic oligonucleotide
aaaaguugaugaaguuggu

SEQ ID NO: 2901908 - RNA, 19 nt, Artificial Sequence
  Description of Artificial Sequence: Synthetic oligonucleotide
cuuuugcuuucccauguuc

SEQ ID NO: 2901909 - RNA, 19 nt, Artificial Sequence
  Description of Artificial Sequence: Synthetic oligonucleotide
ucucuuuccuucagcgcac

SEQ ID NO: 2901910 - RNA, 19 nt, Artificial Sequence
  Description of Artificial Sequence: Synthetic oligonucleotide
ggcuuuaauggaaaaguug

SEQ ID NO: 2901911 - RNA, 19 nt, Artificial Sequence
  Description of Artificial Sequence: Synthetic oligonucleotide
uuggcaauccuuagugcua

SEQ ID NO: 2901912 - RNA, 19 nt, Artificial Sequence
  Description of Artificial Sequence: Synthetic oligonucleotide
ucuuuaagucucucaucuc

SEQ ID NO: 2901913 - RNA, 19 nt, Artificial Sequence
  Description of Artificial Sequence: Synthetic oligonucleotide
uaagguggacccaguugug

SEQ ID NO: 2901914 - RNA, 19 nt, Artificial Sequence
  Description of Artificial Sequence: Synthetic oligonucleotide
cauagguccuuugugugug

SEQ ID NO: 2901915 - RNA, 19 nt, Artificial Sequence
  Description of Artificial Sequence: Synthetic oligonucleotide
cucucuguaccaagcaguc

SEQ ID NO: 2901916 - RNA, 19 nt, Artificial Sequence
  Description of Artificial Sequence: Synthetic oligonucleotide
acccaguuguguauuguac

SEQ ID NO: 2901917 - RNA, 19 nt, Artificial Sequence
  Description of Artificial Sequence: Synthetic oligonucleotide
acuaagcauucgcuucauc

SEQ ID NO: 2901918 - RNA, 19 nt, Artificial Sequence
  Description of Artificial Sequence: Synthetic oligonucleotide
aguugguaucaacaaggau

SEQ ID NO: 2901919 - RNA, 19 nt, Artificial Sequence
  Description of Artificial Sequence: Synthetic oligonucleotide
acaguccaucauugacugc

SEQ ID NO: 2901920 - RNA, 19 nt, Artificial Sequence
  Description of Artificial Sequence: Synthetic oligonucleotide
uucagccaucacacaauca

SEQ ID NO: 2901921 - RNA, 19 nt, Artificial Sequence
  Description of Artificial Sequence: Synthetic oligonucleotide
gguaagguggacccaguug

SEQ ID NO: 2901922 - RNA, 19 nt, Artificial Sequence
  Description of Artificial Sequence: Synthetic oligonucleotide
gugugugcacggcagucgg

SEQ ID NO: 2901923 - RNA, 19 nt, Artificial Sequence
  Description of Artificial Sequence: Synthetic oligonucleotide
agguccuuugugugugcac

SEQ ID NO: 2901924 - RNA, 19 nt, Artificial Sequence
  Description of Artificial Sequence: Synthetic oligonucleotide
uccuuagugcuacucgaua

SEQ ID NO: 2901925 - RNA, 19 nt, Artificial Sequence
  Description of Artificial Sequence: Synthetic oligonucleotide
gguccuuugugugugcacg

SEQ ID NO: 2901926 - RNA, 19 nt, Artificial Sequence
  Description of Artificial Sequence: Synthetic oligonucleotide
uacuucugucccaauucuc

SEQ ID NO: 2901927 - RNA, 19 nt, Artificial Sequence
  Description of Artificial Sequence: Synthetic oligonucleotide
agcauucgcuucaucgucg

SEQ ID NO: 2901928 - RNA, 19 nt, Artificial Sequence
  Description of Artificial Sequence: Synthetic oligonucleotide
uccuuguuuucuuuugcuu

SEQ ID NO: 2901929 - RNA, 19 nt, Artificial Sequence
  Description of Artificial Sequence: Synthetic oligonucleotide
uguaacacuugugcugagu

SEQ ID NO: 2901930 - RNA, 19 nt, Artificial Sequence
  Description of Artificial Sequence: Synthetic oligonucleotide
acucucuguaccaagcagu

SEQ ID NO: 2901931 - RNA, 19 nt, Artificial Sequence
  Description of Artificial Sequence: Synthetic oligonucleotide
guccuuugugugugcacgg

SEQ ID NO: 2901932 - RNA, 19 nt, Artificial Sequence
  Description of Artificial Sequence: Synthetic oligonucleotide
caguccaucauugacugca

SEQ ID NO: 2901933 - RNA, 19 nt, Artificial Sequence
  Description of Artificial Sequence: Synthetic oligonucleotide
aucauugacugcacuaagu

SEQ ID NO: 2901934 - RNA, 19 nt, Artificial Sequence
  Description of Artificial Sequence: Synthetic oligonucleotide
guaucaacaaggauguggu

SEQ ID NO: 2901935 - RNA, 19 nt, Artificial Sequence
  Description of Artificial Sequence: Synthetic oligonucleotide
agcagucaucagcauaggu

SEQ ID NO: 2901936 - RNA, 19 nt, Artificial Sequence
  Description of Artificial Sequence: Synthetic oligonucleotide
acagacaguccaucauuga

SEQ ID NO: 2901937 - RNA, 19 nt, Artificial Sequence
  Description of Artificial Sequence: Synthetic oligonucleotide
cuuggcaauccuuagugcu

SEQ ID NO: 2901938 - RNA, 19 nt, Artificial Sequence
  Description of Artificial Sequence: Synthetic oligonucleotide
ucucaauuucagccaucac

SEQ ID NO: 2901939 - RNA, 19 nt, Artificial Sequence
  Description of Artificial Sequence: Synthetic oligonucleotide
ucuguaccaagcagucauc

SEQ ID NO: 2901940 - RNA, 19 nt, Artificial Sequence
  Description of Artificial Sequence: Synthetic oligonucleotide
uagugcuacucgauacuuc

SEQ ID NO: 2901941 - RNA, 19 nt, Artificial Sequence
  Description of Artificial Sequence: Synthetic oligonucleotide
aagguggacccaguugugu

SEQ ID NO: 2901942 - RNA, 19 nt, Artificial Sequence
  Description of Artificial Sequence: Synthetic oligonucleotide
auucgcuucaucgucgcau

SEQ ID NO: 2901943 - RNA, 19 nt, Artificial Sequence
  Description of Artificial Sequence: Synthetic oligonucleotide
aagcagucaucagcauagg

SEQ ID NO: 2901944 - RNA, 19 nt, Artificial Sequence
  Description of Artificial Sequence: Synthetic oligonucleotide
auccuuggcaauccuuagu

SEQ ID NO: 2901945 - RNA, 19 nt, Artificial Sequence
  Description of Artificial Sequence: Synthetic oligonucleotide
ccuuagugcuacucgauac

SEQ ID NO: 2901946 - RNA, 19 nt, Artificial Sequence
  Description of Artificial Sequence: Synthetic oligonucleotide
uuagugcuacucgauacuu

SEQ ID NO: 2901947 - RNA, 19 nt, Artificial Sequence
  Description of Artificial Sequence: Synthetic oligonucleotide
gucaaaucguggauccuug

SEQ ID NO: 2901948 - RNA, 19 nt, Artificial Sequence
  Description of Artificial Sequence: Synthetic oligonucleotide
gcuuuaaucuauccuuuuc

SEQ ID NO: 2901949 - RNA, 19 nt, Artificial Sequence
  Description of Artificial Sequence: Synthetic oligonucleotide
uucugucccaauucucaau

SEQ ID NO: 2901950 - RNA, 19 nt, Artificial Sequence
  Description of Artificial Sequence: Synthetic oligonucleotide
gugacucucuguaccaagc

SEQ ID NO: 2901951 - RNA, 19 nt, Artificial Sequence
  Description of Artificial Sequence: Synthetic oligonucleotide
uggcaauccuuagugcuac

SEQ ID NO: 2901952 - RNA, 19 nt, Artificial Sequence
  Description of Artificial Sequence: Synthetic oligonucleotide
uggcauacagacaguccau

SEQ ID NO: 2901953 - RNA, 19 nt, Artificial Sequence
  Description of Artificial Sequence: Synthetic oligonucleotide
aucaguuauacaagggaua

SEQ ID NO: 2901954 - RNA, 19 nt, Artificial Sequence
  Description of Artificial Sequence: Synthetic oligonucleotide
gcagucaucagcauagguc

SEQ ID NO: 2901955 - RNA, 19 nt, Artificial Sequence
  Description of Artificial Sequence: Synthetic oligonucleotide
ucuuuccuucagcgcacug

SEQ ID NO: 2901956 - RNA, 19 nt, Artificial Sequence
  Description of Artificial Sequence: Synthetic oligonucleotide
cagucggucaaaucgugga

SEQ ID NO: 2901957 - RNA, 19 nt, Artificial Sequence
  Description of Artificial Sequence: Synthetic oligonucleotide
acuugugcugagugacucu

SEQ ID NO: 2901958 - RNA, 19 nt, Artificial Sequence
  Description of Artificial Sequence: Synthetic oligonucleotide
gucccaauucucaauuuca

SEQ ID NO: 2901959 - RNA, 19 nt, Artificial Sequence
  Description of Artificial Sequence: Synthetic oligonucleotide
gaagaacaagcaggaagga

SEQ ID NO: 2901960 - RNA, 19 nt, Artificial Sequence
  Description of Artificial Sequence: Synthetic oligonucleotide
ccaguuguguauuguacug

SEQ ID NO: 2901961 - RNA, 19 nt, Artificial Sequence
  Description of Artificial Sequence: Synthetic oligonucleotide
cccaauucucaauuucagc

SEQ ID NO: 2901962 - RNA, 19 nt, Artificial Sequence
  Description of Artificial Sequence: Synthetic oligonucleotide
ucuuuugcuuucccauguu

SEQ ID NO: 2901963 - RNA, 19 nt, Artificial Sequence
  Description of Artificial Sequence: Synthetic oligonucleotide
agucggucaaaucguggau

SEQ ID NO: 2901964 - RNA, 19 nt, Artificial Sequence
  Description of Artificial Sequence: Synthetic oligonucleotide
caagggauacauuuggcau

SEQ ID NO: 2901965 - RNA, 19 nt, Artificial Sequence
  Description of Artificial Sequence: Synthetic oligonucleotide
uucgcuucaucgucgcaua

SEQ ID NO: 2901966 - RNA, 19 nt, Artificial Sequence
  Description of Artificial Sequence: Synthetic oligonucleotide
gaacaagcaggaaggaugu

SEQ ID NO: 2901967 - RNA, 19 nt, Artificial Sequence
  Description of Artificial Sequence: Synthetic oligonucleotide
uugugcugagugacucucu

SEQ ID NO: 2901968 - RNA, 19 nt, Artificial Sequence
  Description of Artificial Sequence: Synthetic oligonucleotide
ugugcacggcagucgguca

SEQ ID NO: 2901969 - RNA, 19 nt, Artificial Sequence
  Description of Artificial Sequence: Synthetic oligonucleotide
caguuuggcuuuaauggaa

SEQ ID NO: 2901970 - RNA, 19 nt, Artificial Sequence
  Description of Artificial Sequence: Synthetic oligonucleotide
uggacccaguuguguauug

SEQ ID NO: 2901971 - RNA, 19 nt, Artificial Sequence
  Description of Artificial Sequence: Synthetic oligonucleotide
acucgauacuucuguccca

SEQ ID NO: 2901972 - RNA, 19 nt, Artificial Sequence
  Description of Artificial Sequence: Synthetic oligonucleotide
ggaugugguaagguggacc

SEQ ID NO: 2901973 - RNA, 19 nt, Artificial Sequence
  Description of Artificial Sequence: Synthetic oligonucleotide
uggauccuuggcaauccuu

SEQ ID NO: 2901974 - RNA, 19 nt, Artificial Sequence
  Description of Artificial Sequence: Synthetic oligonucleotide
uccuuugugugugcacggc

SEQ ID NO: 2901975 - RNA, 19 nt, Artificial Sequence
  Description of Artificial Sequence: Synthetic oligonucleotide
cucugagacuaagcauucg

SEQ ID NO: 2901976 - RNA, 19 nt, Artificial Sequence
  Description of Artificial Sequence: Synthetic oligonucleotide
uaucaacaaggauguggua

SEQ ID NO: 2901977 - RNA, 19 nt, Artificial Sequence
  Description of Artificial Sequence: Synthetic oligonucleotide
ucgucgcauauuuccuugu

SEQ ID NO: 2901978 - RNA, 19 nt, Artificial Sequence
  Description of Artificial Sequence: Synthetic oligonucleotide
aguuuggcuuuaauggaaa

SEQ ID NO: 2901979 - RNA, 19 nt, Artificial Sequence
  Description of Artificial Sequence: Synthetic oligonucleotide
ucucuguaccaagcaguca

SEQ ID NO: 2901980 - RNA, 19 nt, Artificial Sequence
  Description of Artificial Sequence: Synthetic oligonucleotide
ggggacuucucuuuccuuc

SEQ ID NO: 2901981 - RNA, 19 nt, Artificial Sequence
  Description of Artificial Sequence: Synthetic oligonucleotide
cucuguaccaagcagucau

SEQ ID NO: 2901982 - RNA, 19 nt, Artificial Sequence
  Description of Artificial Sequence: Synthetic oligonucleotide
ugguaagguggacccaguu

SEQ ID NO: 2901983 - RNA, 19 nt, Artificial Sequence
  Description of Artificial Sequence: Synthetic oligonucleotide
cuucaucgucgcauauuuc

SEQ ID NO: 2901984 - RNA, 19 nt, Artificial Sequence
  Description of Artificial Sequence: Synthetic oligonucleotide
guguauuguacuggaagaa

SEQ ID NO: 2901985 - RNA, 19 nt, Artificial Sequence
  Description of Artificial Sequence: Synthetic oligonucleotide
agcgcacugggaucuuucu

SEQ ID NO: 2901986 - RNA, 19 nt, Artificial Sequence
  Description of Artificial Sequence: Synthetic oligonucleotide
cacuugugcugagugacuc

SEQ ID NO: 2901987 - RNA, 19 nt, Artificial Sequence
  Description of Artificial Sequence: Synthetic oligonucleotide
auguaacacuugugcugag

SEQ ID NO: 2901988 - RNA, 19 nt, Artificial Sequence
  Description of Artificial Sequence: Synthetic oligonucleotide
gucggucaaaucguggauc

SEQ ID NO: 2901989 - RNA, 19 nt, Artificial Sequence
  Description of Artificial Sequence: Synthetic oligonucleotide
gacccaguuguguauugua

SEQ ID NO: 2901990 - RNA, 19 nt, Artificial Sequence
  Description of Artificial Sequence: Synthetic oligonucleotide
guuuggcuuuaauggaaaa

SEQ ID NO: 2901991 - RNA, 19 nt, Artificial Sequence
  Description of Artificial Sequence: Synthetic oligonucleotide
agccaucacacaaucaguu

SEQ ID NO: 2901992 - RNA, 19 nt, Artificial Sequence
  Description of Artificial Sequence: Synthetic oligonucleotide
uugugugugcacggcaguc

SEQ ID NO: 2901993 - RNA, 19 nt, Artificial Sequence
  Description of Artificial Sequence: Synthetic oligonucleotide
cuuuaauggaaaaguugau

SEQ ID NO: 2901994 - RNA, 19 nt, Artificial Sequence
  Description of Artificial Sequence: Synthetic oligonucleotide
cuuagugcuacucgauacu

SEQ ID NO: 2901995 - RNA, 19 nt, Artificial Sequence
  Description of Artificial Sequence: Synthetic oligonucleotide
aguccaguuuggcuuuaau

SEQ ID NO: 2901996 - RNA, 19 nt, Artificial Sequence
  Description of Artificial Sequence: Synthetic oligonucleotide
aggaugugguaagguggac

SEQ ID NO: 2901997 - RNA, 19 nt, Artificial Sequence
  Description of Artificial Sequence: Synthetic oligonucleotide
ugugugcacggcagucggu

SEQ ID NO: 2901998 - RNA, 19 nt, Artificial Sequence
  Description of Artificial Sequence: Synthetic oligonucleotide
cugagacuaagcauucgcu

SEQ ID NO: 2901999 - RNA, 19 nt, Artificial Sequence
  Description of Artificial Sequence: Synthetic oligonucleotide
ucguggauccuuggcaauc

SEQ ID NO: 2902000 - RNA, 19 nt, Artificial Sequence
  Description of Artificial Sequence: Synthetic oligonucleotide
agguggacccaguugugua

SEQ ID NO: 2902001 - RNA, 19 nt, Artificial Sequence
  Description of Artificial Sequence: Synthetic oligonucleotide
uuccuucagcgcacuggga

SEQ ID NO: 2902002 - RNA, 19 nt, Artificial Sequence
  Description of Artificial Sequence: Synthetic oligonucleotide
caucagcauagguccuuug

SEQ ID NO: 2902003 - RNA, 19 nt, Artificial Sequence
  Description of Artificial Sequence: Synthetic oligonucleotide
cuucugucccaauucucaa

SEQ ID NO: 2902004 - RNA, 19 nt, Artificial Sequence
  Description of Artificial Sequence: Synthetic oligonucleotide
cuguaccaagcagucauca

SEQ ID NO: 2902005 - RNA, 19 nt, Artificial Sequence
  Description of Artificial Sequence: Synthetic oligonucleotide
cagcauagguccuuugugu

SEQ ID NO: 2902006 - RNA, 19 nt, Artificial Sequence
  Description of Artificial Sequence: Synthetic oligonucleotide
ccuuggcaauccuuagugc

SEQ ID NO: 2902007 - RNA, 19 nt, Artificial Sequence
  Description of Artificial Sequence: Synthetic oligonucleotide
gacugcacuaaguccaguu

SEQ ID NO: 2902008 - RNA, 19 nt, Artificial Sequence
  Description of Artificial Sequence: Synthetic oligonucleotide
aucguggauccuuggcaau

SEQ ID NO: 2902009 - RNA, 19 nt, Artificial Sequence
  Description of Artificial Sequence: Synthetic oligonucleotide
ggaucuuucuuuucuuccu

SEQ ID NO: 2902010 - RNA, 19 nt, Artificial Sequence
  Description of Artificial Sequence: Synthetic oligonucleotide
cacuaaguccaguuuggcu

SEQ ID NO: 2902011 - RNA, 19 nt, Artificial Sequence
  Description of Artificial Sequence: Synthetic oligonucleotide
ucaucagcauagguccuuu

SEQ ID NO: 2902012 - RNA, 19 nt, Artificial Sequence
  Description of Artificial Sequence: Synthetic oligonucleotide
cauacagacaguccaucau

SEQ ID NO: 2902013 - RNA, 19 nt, Artificial Sequence
  Description of Artificial Sequence: Synthetic oligonucleotide
ccaguuuggcuuuaaugga

SEQ ID NO: 2902014 - RNA, 19 nt, Artificial Sequence
  Description of Artificial Sequence: Synthetic oligonucleotide
gcugagugacucucuguac

SEQ ID NO: 2902015 - RNA, 19 nt, Artificial Sequence
  Description of Artificial Sequence: Synthetic oligonucleotide
caucucugagacuaagcau

SEQ ID NO: 2902016 - RNA, 19 nt, Artificial Sequence
  Description of Artificial Sequence: Synthetic oligonucleotide
ggacuucucuuuccuucag

SEQ ID NO: 2902017 - RNA, 19 nt, Artificial Sequence
  Description of Artificial Sequence: Synthetic oligonucleotide
aggcuuuaaucuauccuuu

SEQ ID NO: 2902018 - RNA, 19 nt, Artificial Sequence
  Description of Artificial Sequence: Synthetic oligonucleotide
gggacuucucuuuccuuca

SEQ ID NO: 2902019 - RNA, 19 nt, Artificial Sequence
  Description of Artificial Sequence: Synthetic oligonucleotide
gcuacucgauacuucuguc

SEQ ID NO: 2902020 - RNA, 19 nt, Artificial Sequence
  Description of Artificial Sequence: Synthetic oligonucleotide
gcagucggucaaaucgugg

SEQ ID NO: 2902021 - RNA, 19 nt, Artificial Sequence
  Description of Artificial Sequence: Synthetic oligonucleotide
gcauucgcuucaucgucgc

SEQ ID NO: 2902022 - RNA, 19 nt, Artificial Sequence
  Description of Artificial Sequence: Synthetic oligonucleotide
gugugcacggcagucgguc

SEQ ID NO: 2902023 - RNA, 19 nt, Artificial Sequence
  Description of Artificial Sequence: Synthetic oligonucleotide
cucgauacuucugucccaa

SEQ ID NO: 2902024 - RNA, 19 nt, Artificial Sequence
  Description of Artificial Sequence: Synthetic oligonucleotide
accaagcagucaucagcau

SEQ ID NO: 2902025 - RNA, 19 nt, Artificial Sequence
  Description of Artificial Sequence: Synthetic oligonucleotide
cagcgcacugggaucuuuc

SEQ ID NO: 2902026 - RNA, 19 nt, Artificial Sequence
  Description of Artificial Sequence: Synthetic oligonucleotide
ucgcuucaucgucgcauau

SEQ ID NO: 2902027 - RNA, 19 nt, Artificial Sequence
  Description of Artificial Sequence: Synthetic oligonucleotide
cacggcagucggucaaauc

SEQ ID NO: 2902028 - RNA, 19 nt, Artificial Sequence
  Description of Artificial Sequence: Synthetic oligonucleotide
guuguguauuguacuggaa

SEQ ID NO: 2902029 - RNA, 19 nt, Artificial Sequence
  Description of Artificial Sequence: Synthetic oligonucleotide
agucaucagcauagguccu

SEQ ID NO: 2902030 - RNA, 19 nt, Artificial Sequence
  Description of Artificial Sequence: Synthetic oligonucleotide
ugguaucaacaaggaugug

SEQ ID NO: 2902031 - RNA, 19 nt, Artificial Sequence
  Description of Artificial Sequence: Synthetic oligonucleotide
ggauccuuggcaauccuua

SEQ ID NO: 2902032 - RNA, 19 nt, Artificial Sequence
  Description of Artificial Sequence: Synthetic oligonucleotide
auccuuagugcuacucgau

SEQ ID NO: 2902033 - RNA, 19 nt, Artificial Sequence
  Description of Artificial Sequence: Synthetic oligonucleotide
ucgauacuucugucccaau

SEQ ID NO: 2902034 - RNA, 19 nt, Artificial Sequence
  Description of Artificial Sequence: Synthetic oligonucleotide
aaguccaguuuggcuuuaa

SEQ ID NO: 2902035 - RNA, 19 nt, Artificial Sequence
  Description of Artificial Sequence: Synthetic oligonucleotide
caguuauacaagggauaca

SEQ ID NO: 2902036 - RNA, 19 nt, Artificial Sequence
  Description of Artificial Sequence: Synthetic oligonucleotide
gugcuacucgauacuucug

SEQ ID NO: 2902037 - RNA, 19 nt, Artificial Sequence
  Description of Artificial Sequence: Synthetic oligonucleotide
aacaagcaggaaggauguu

SEQ ID NO: 2902038 - RNA, 19 nt, Artificial Sequence
  Description of Artificial Sequence: Synthetic oligonucleotide
acacuugugcugagugacu

SEQ ID NO: 2902039 - RNA, 19 nt, Artificial Sequence
  Description of Artificial Sequence: Synthetic oligonucleotide
gcuucaucgucgcauauuu

SEQ ID NO: 2902040 - RNA, 19 nt, Artificial Sequence
  Description of Artificial Sequence: Synthetic oligonucleotide
ugacugcacuaaguccagu

SEQ ID NO: 2902041 - RNA, 19 nt, Artificial Sequence
  Description of Artificial Sequence: Synthetic oligonucleotide
gcaauccuuagugcuacuc

SEQ ID NO: 2902042 - RNA, 19 nt, Artificial Sequence
  Description of Artificial Sequence: Synthetic oligonucleotide
gucgcauauuuccuuguuu

SEQ ID NO: 2902043 - RNA, 19 nt, Artificial Sequence
  Description of Artificial Sequence: Synthetic oligonucleotide
cuaaguccaguuuggcuuu

SEQ ID NO: 2902044 - RNA, 19 nt, Artificial Sequence
  Description of Artificial Sequence: Synthetic oligonucleotide
ggcauacagacaguccauc

SEQ ID NO: 2902045 - RNA, 19 nt, Artificial Sequence
  Description of Artificial Sequence: Synthetic oligonucleotide
gcacuaaguccaguuuggc

SEQ ID NO: 2902046 - RNA, 19 nt, Artificial Sequence
  Description of Artificial Sequence: Synthetic oligonucleotide
ccuucagcgcacugggauc

SEQ ID NO: 2902047 - RNA, 19 nt, Artificial Sequence
  Description of Artificial Sequence: Synthetic oligonucleotide
augugguaagguggaccca

SEQ ID NO: 2902048 - RNA, 19 nt, Artificial Sequence
  Description of Artificial Sequence: Synthetic oligonucleotide
ugcacggcagucggucaaa

SEQ ID NO: 2902049 - RNA, 19 nt, Artificial Sequence
  Description of Artificial Sequence: Synthetic oligonucleotide
ggcagucggucaaaucgug

SEQ ID NO: 2902050 - RNA, 19 nt, Artificial Sequence
  Description of Artificial Sequence: Synthetic oligonucleotide
cgcauauuuccuuguuuuc

SEQ ID NO: 2902051 - RNA, 19 nt, Artificial Sequence
  Description of Artificial Sequence: Synthetic oligonucleotide
cuucagcgcacugggaucu

SEQ ID NO: 2902052 - RNA, 19 nt, Artificial Sequence
  Description of Artificial Sequence: Synthetic oligonucleotide
uaaguccaguuuggcuuua

SEQ ID NO: 2902053 - RNA, 19 nt, Artificial Sequence
  Description of Artificial Sequence: Synthetic oligonucleotide
gccaucacacaaucaguua

SEQ ID NO: 2902054 - RNA, 19 nt, Artificial Sequence
  Description of Artificial Sequence: Synthetic oligonucleotide
ccaucacacaaucaguuau

SEQ ID NO: 2902055 - RNA, 19 nt, Artificial Sequence
  Description of Artificial Sequence: Synthetic oligonucleotide
ccaucauugacugcacuaa

SEQ ID NO: 2902056 - RNA, 19 nt, Artificial Sequence
  Description of Artificial Sequence: Synthetic oligonucleotide
cauuuggcauacagacagu

SEQ ID NO: 2902057 - RNA, 19 nt, Artificial Sequence
  Description of Artificial Sequence: Synthetic oligonucleotide
gugcacggcagucggucaa

SEQ ID NO: 2902058 - RNA, 19 nt, Artificial Sequence
  Description of Artificial Sequence: Synthetic oligonucleotide
gcauagguccuuugugugu

SEQ ID NO: 2902059 - RNA, 19 nt, Artificial Sequence
  Description of Artificial Sequence: Synthetic oligonucleotide
cauucgcuucaucgucgca

SEQ ID NO: 2902060 - RNA, 19 nt, Artificial Sequence
  Description of Artificial Sequence: Synthetic oligonucleotide
cucucaucucugagacuaa

SEQ ID NO: 2902061 - RNA, 19 nt, Artificial Sequence
  Description of Artificial Sequence: Synthetic oligonucleotide
guuauacaagggauacauu

SEQ ID NO: 2902062 - RNA, 19 nt, Artificial Sequence
  Description of Artificial Sequence: Synthetic oligonucleotide
ucagcgcacugggaucuuu

SEQ ID NO: 2902063 - RNA, 19 nt, Artificial Sequence
  Description of Artificial Sequence: Synthetic oligonucleotide
guccaucauugacugcacu

SEQ ID NO: 2902064 - RNA, 19 nt, Artificial Sequence
  Description of Artificial Sequence: Synthetic oligonucleotide
cguggauccuuggcaaucc

SEQ ID NO: 2902065 - RNA, 19 nt, Artificial Sequence
  Description of Artificial Sequence: Synthetic oligonucleotide
ccaagcagucaucagcaua

SEQ ID NO: 2902066 - RNA, 19 nt, Artificial Sequence
  Description of Artificial Sequence: Synthetic oligonucleotide
gugcugagugacucucugu

SEQ ID NO: 2902067 - RNA, 19 nt, Artificial Sequence
  Description of Artificial Sequence: Synthetic oligonucleotide
cccaguuguguauuguacu

SEQ ID NO: 2902068 - RNA, 19 nt, Artificial Sequence
  Description of Artificial Sequence: Synthetic oligonucleotide
caucgucgcauauuuccuu

SEQ ID NO: 2902069 - RNA, 19 nt, Artificial Sequence
  Description of Artificial Sequence: Synthetic oligonucleotide
ggucaaaucguggauccuu

SEQ ID NO: 2902070 - RNA, 19 nt, Artificial Sequence
  Description of Artificial Sequence: Synthetic oligonucleotide
gguggacccaguuguguau

SEQ ID NO: 2902071 - RNA, 19 nt, Artificial Sequence
  Description of Artificial Sequence: Synthetic oligonucleotide
gucucucaucucugagacu

SEQ ID NO: 2902072 - RNA, 19 nt, Artificial Sequence
  Description of Artificial Sequence: Synthetic oligonucleotide
gacuaagcauucgcuucau

SEQ ID NO: 2902073 - RNA, 19 nt, Artificial Sequence
  Description of Artificial Sequence: Synthetic oligonucleotide
ggcuuuaaucuauccuuuu

SEQ ID NO: 2902074 - RNA, 19 nt, Artificial Sequence
  Description of Artificial Sequence: Synthetic oligonucleotide
cugucccaauucucaauuu

SEQ ID NO: 2902075 - RNA, 19 nt, Artificial Sequence
  Description of Artificial Sequence: Synthetic oligonucleotide
gucaucagcauagguccuu

SEQ ID NO: 2902076 - RNA, 19 nt, Artificial Sequence
  Description of Artificial Sequence: Synthetic oligonucleotide
uucagcgcacugggaucuu

SEQ ID NO: 2902077 - RNA, 19 nt, Artificial Sequence
  Description of Artificial Sequence: Synthetic oligonucleotide
gugguaagguggacccagu

SEQ ID NO: 2902078 - RNA, 19 nt, Artificial Sequence
  Description of Artificial Sequence: Synthetic oligonucleotide
guggacccaguuguguauu

SEQ ID NO: 2902079 - RNA, 19 nt, Artificial Sequence
  Description of Artificial Sequence: Synthetic oligonucleotide
ggacccaguuguguauugu

SEQ ID NO: 2902080 - RNA, 19 nt, Artificial Sequence
  Description of Artificial Sequence: Synthetic oligonucleotide
gcacugggaucuuucuuuu

SEQ ID NO: 2902081 - RNA, 19 nt, Artificial Sequence
  Description of Artificial Sequence: Synthetic oligonucleotide
cgcacugggaucuuucuuu

SEQ ID NO: 2902082 - RNA, 19 nt, Artificial Sequence
  Description of Artificial Sequence: Synthetic oligonucleotide
ggcaauccuuagugcuacu

SEQ ID NO: 2902083 - RNA, 19 nt, Artificial Sequence
  Description of Artificial Sequence: Synthetic oligonucleotide
cucuuuccuucagcgcacu

SEQ ID NO: 2902084 - RNA, 19 nt, Artificial Sequence
  Description of Artificial Sequence: Synthetic oligonucleotide
cgauacuucugucccaauu

SEQ ID NO: 2902085 - RNA, 19 nt, Artificial Sequence
  Description of Artificial Sequence: Synthetic oligonucleotide
gggauacauuuggcauaca

SEQ ID NO: 2902086 - RNA, 19 nt, Artificial Sequence
  Description of Artificial Sequence: Synthetic oligonucleotide
gcgcacugggaucuuucuu

SEQ ID NO: 2902087 - RNA, 19 nt, Artificial Sequence
  Description of Artificial Sequence: Synthetic oligonucleotide
cggcagucggucaaaucgu

SEQ ID NO: 2902088 - RNA, 19 nt, Artificial Sequence
  Description of Artificial Sequence: Synthetic oligonucleotide
cgucgcauauuuccuuguu

SEQ ID NO: 2902089 - RNA, 19 nt, Artificial Sequence
  Description of Artificial Sequence: Synthetic oligonucleotide
gcacggcagucggucaaau

SEQ ID NO: 2902090 - RNA, 19 nt, Artificial Sequence
  Description of Artificial Sequence: Synthetic oligonucleotide
cgcuucaucgucgcauauu

SEQ ID NO: 2902091 - RNA, 19 nt, Artificial Sequence
  Description of Artificial Sequence: Synthetic oligonucleotide
cggucaaaucguggauccu

SEQ ID NO: 2902092 - RNA, 19 nt, Artificial Sequence
  Description of Artificial Sequence: Synthetic oligonucleotide
uuuaauaaccuccugcugg

SEQ ID NO: 2902093 - RNA, 19 nt, Artificial Sequence
  Description of Artificial Sequence: Synthetic oligonucleotide
aagaacaaaucucaggagg

SEQ ID NO: 2902094 - RNA, 19 nt, Artificial Sequence
  Description of Artificial Sequence: Synthetic oligonucleotide
uuuauuauccucuggaaca

SEQ ID NO: 2902095 - RNA, 19 nt, Artificial Sequence
  Description of Artificial Sequence: Synthetic oligonucleotide
auuuauuauccucuggaac

SEQ ID NO: 2902096 - RNA, 19 nt, Artificial Sequence
  Description of Artificial Sequence: Synthetic oligonucleotide
aacuuaaggacaccuuccc

SEQ ID NO: 2902097 - RNA, 19 nt, Artificial Sequence
  Description of Artificial Sequence: Synthetic oligonucleotide
uaagacuugacuaggcggg

SEQ ID NO: 2902098 - RNA, 19 nt, Artificial Sequence
  Description of Artificial Sequence: Synthetic oligonucleotide
acaagaacaaaucucagga

SEQ ID NO: 2902099 - RNA, 19 nt, Artificial Sequence
  Description of Artificial Sequence: Synthetic oligonucleotide
auugucucuagccucgucc

SEQ ID NO: 2902100 - RNA, 19 nt, Artificial Sequence
  Description of Artificial Sequence: Synthetic oligonucleotide
ugguacacagacaagaaca

SEQ ID NO: 2902101 - RNA, 19 nt, Artificial Sequence
  Description of Artificial Sequence: Synthetic oligonucleotide
uucacaagcacauuuauua

SEQ ID NO: 2902102 - RNA, 19 nt, Artificial Sequence
  Description of Artificial Sequence: Synthetic oligonucleotide
uauccucuggaacacaggg

SEQ ID NO: 2902103 - RNA, 19 nt, Artificial Sequence
  Description of Artificial Sequence: Synthetic oligonucleotide
cuuaaggacaccuuccccg

SEQ ID NO: 2902104 - RNA, 19 nt, Artificial Sequence
  Description of Artificial Sequence: Synthetic oligonucleotide
aaagccauaggcuuuaaua

SEQ ID NO: 2902105 - RNA, 19 nt, Artificial Sequence
  Description of Artificial Sequence: Synthetic oligonucleotide
acaagcacauuuauuaucc

SEQ ID NO: 2902106 - RNA, 19 nt, Artificial Sequence
  Description of Artificial Sequence: Synthetic oligonucleotide
auaggcuuuaauaaccucc

SEQ ID NO: 2902107 - RNA, 19 nt, Artificial Sequence
  Description of Artificial Sequence: Synthetic oligonucleotide
gacaagaacaaaucucagg

SEQ ID NO: 2902108 - RNA, 19 nt, Artificial Sequence
  Description of Artificial Sequence: Synthetic oligonucleotide
aaacuuaaggacaccuucc

SEQ ID NO: 2902109 - RNA, 19 nt, Artificial Sequence
  Description of Artificial Sequence: Synthetic oligonucleotide
aagcacauuuauuauccuc

SEQ ID NO: 2902110 - RNA, 19 nt, Artificial Sequence
  Description of Artificial Sequence: Synthetic oligonucleotide
aauaaccuccugcuggauc

SEQ ID NO: 2902111 - RNA, 19 nt, Artificial Sequence
  Description of Artificial Sequence: Synthetic oligonucleotide
guaagacuugacuaggcgg

SEQ ID NO: 2902112 - RNA, 19 nt, Artificial Sequence
  Description of Artificial Sequence: Synthetic oligonucleotide
uccgcuaagaccaccuugg

SEQ ID NO: 2902113 - RNA, 19 nt, Artificial Sequence
  Description of Artificial Sequence: Synthetic oligonucleotide
acauuuauuauccucugga

SEQ ID NO: 2902114 - RNA, 19 nt, Artificial Sequence
  Description of Artificial Sequence: Synthetic oligonucleotide
aacacagggucuucuuccc

SEQ ID NO: 2902115 - RNA, 19 nt, Artificial Sequence
  Description of Artificial Sequence: Synthetic oligonucleotide
uacacagacaagaacaaau

SEQ ID NO: 2902116 - RNA, 19 nt, Artificial Sequence
  Description of Artificial Sequence: Synthetic oligonucleotide
gaacgcuugaaucaccucc

SEQ ID NO: 2902117 - RNA, 19 nt, Artificial Sequence
  Description of Artificial Sequence: Synthetic oligonucleotide
agaacaaaucucaggaggc

SEQ ID NO: 2902118 - RNA, 19 nt, Artificial Sequence
  Description of Artificial Sequence: Synthetic oligonucleotide
uaggcgggcaaacuuaagg

SEQ ID NO: 2902119 - RNA, 19 nt, Artificial Sequence
  Description of Artificial Sequence: Synthetic oligonucleotide
aagccauaggcuuuaauaa

SEQ ID NO: 2902120 - RNA, 19 nt, Artificial Sequence
  Description of Artificial Sequence: Synthetic oligonucleotide
uucucuggggccgagaacg

SEQ ID NO: 2902121 - RNA, 19 nt, Artificial Sequence
  Description of Artificial Sequence: Synthetic oligonucleotide
cuagcagugguacacagac

SEQ ID NO: 2902122 - RNA, 19 nt, Artificial Sequence
  Description of Artificial Sequence: Synthetic oligonucleotide
aacaaaucucaggaggcgg

SEQ ID NO: 2902123 - RNA, 19 nt, Artificial Sequence
  Description of Artificial Sequence: Synthetic oligonucleotide
uuaguucacaagcacauuu

SEQ ID NO: 2902124 - RNA, 19 nt, Artificial Sequence
  Description of Artificial Sequence: Synthetic oligonucleotide
uguggcuacuggaagcacg

SEQ ID NO: 2902125 - RNA, 19 nt, Artificial Sequence
  Description of Artificial Sequence: Synthetic oligonucleotide
acagacaagaacaaaucuc

SEQ ID NO: 2902126 - RNA, 19 nt, Artificial Sequence
  Description of Artificial Sequence: Synthetic oligonucleotide
cuucguaagacuugacuag

SEQ ID NO: 2902127 - RNA, 19 nt, Artificial Sequence
  Description of Artificial Sequence: Synthetic oligonucleotide
aggaacagggccuuuagcu

SEQ ID NO: 2902128 - RNA, 19 nt, Artificial Sequence
  Description of Artificial Sequence: Synthetic oligonucleotide
agccauaggcuuuaauaac

SEQ ID NO: 2902129 - RNA, 19 nt, Artificial Sequence
  Description of Artificial Sequence: Synthetic oligonucleotide
gaacacagggucuucuucc

SEQ ID NO: 2902130 - RNA, 19 nt, Artificial Sequence
  Description of Artificial Sequence: Synthetic oligonucleotide
uuccccauaucguugcacg

SEQ ID NO: 2902131 - RNA, 19 nt, Artificial Sequence
  Description of Artificial Sequence: Synthetic oligonucleotide
aaucucaggaggcggccac

SEQ ID NO: 2902132 - RNA, 19 nt, Artificial Sequence
  Description of Artificial Sequence: Synthetic oligonucleotide
aggcggacgccauagaacg

SEQ ID NO: 2902133 - RNA, 19 nt, Artificial Sequence
  Description of Artificial Sequence: Synthetic oligonucleotide
agggccuuuagcuugccgg

SEQ ID NO: 2902134 - RNA, 19 nt, Artificial Sequence
  Description of Artificial Sequence: Synthetic oligonucleotide
uuaauaaccuccugcugga

SEQ ID NO: 2902135 - RNA, 19 nt, Artificial Sequence
  Description of Artificial Sequence: Synthetic oligonucleotide
uuuagcuugccggacaggc

SEQ ID NO: 2902136 - RNA, 19 nt, Artificial Sequence
  Description of Artificial Sequence: Synthetic oligonucleotide
auaaccuccugcuggaucu

SEQ ID NO: 2902137 - RNA, 19 nt, Artificial Sequence
  Description of Artificial Sequence: Synthetic oligonucleotide
caaacuuaaggacaccuuc

SEQ ID NO: 2902138 - RNA, 19 nt, Artificial Sequence
  Description of Artificial Sequence: Synthetic oligonucleotide
uccucuggaacacaggguc

SEQ ID NO: 2902139 - RNA, 19 nt, Artificial Sequence
  Description of Artificial Sequence: Synthetic oligonucleotide
ucuguguggcuacuggaag

SEQ ID NO: 2902140 - RNA, 19 nt, Artificial Sequence
  Description of Artificial Sequence: Synthetic oligonucleotide
cagacaagaacaaaucuca

SEQ ID NO: 2902141 - RNA, 19 nt, Artificial Sequence
  Description of Artificial Sequence: Synthetic oligonucleotide
uaggcuuuaauaaccuccu

SEQ ID NO: 2902142 - RNA, 19 nt, Artificial Sequence
  Description of Artificial Sequence: Synthetic oligonucleotide
ucuagccucguccaugcgc

SEQ ID NO: 2902143 - RNA, 19 nt, Artificial Sequence
  Description of Artificial Sequence: Synthetic oligonucleotide
ugggguggcagugucaugg

SEQ ID NO: 2902144 - RNA, 19 nt, Artificial Sequence
  Description of Artificial Sequence: Synthetic oligonucleotide
uucguaagacuugacuagg

SEQ ID NO: 2902145 - RNA, 19 nt, Artificial Sequence
  Description of Artificial Sequence: Synthetic oligonucleotide
aucaccuccgcuaagacca

SEQ ID NO: 2902146 - RNA, 19 nt, Artificial Sequence
  Description of Artificial Sequence: Synthetic oligonucleotide
aacgcuugaaucaccuccg

SEQ ID NO: 2902147 - RNA, 19 nt, Artificial Sequence
  Description of Artificial Sequence: Synthetic oligonucleotide
uuauccucuggaacacagg

SEQ ID NO: 2902148 - RNA, 19 nt, Artificial Sequence
  Description of Artificial Sequence: Synthetic oligonucleotide
gaacagggccuuuagcuug

SEQ ID NO: 2902149 - RNA, 19 nt, Artificial Sequence
  Description of Artificial Sequence: Synthetic oligonucleotide
gaacaaaucucaggaggcg

SEQ ID NO: 2902150 - RNA, 19 nt, Artificial Sequence
  Description of Artificial Sequence: Synthetic oligonucleotide
uaucguugcacgcauuguc

SEQ ID NO: 2902151 - RNA, 19 nt, Artificial Sequence
  Description of Artificial Sequence: Synthetic oligonucleotide
caagaacaaaucucaggag

SEQ ID NO: 2902152 - RNA, 19 nt, Artificial Sequence
  Description of Artificial Sequence: Synthetic oligonucleotide
aagcacgaacugcagcauc

SEQ ID NO: 2902153 - RNA, 19 nt, Artificial Sequence
  Description of Artificial Sequence: Synthetic oligonucleotide
uagcuugccggacaggcug

SEQ ID NO: 2902154 - RNA, 19 nt, Artificial Sequence
  Description of Artificial Sequence: Synthetic oligonucleotide
acaaaucucaggaggcggc

SEQ ID NO: 2902155 - RNA, 19 nt, Artificial Sequence
  Description of Artificial Sequence: Synthetic oligonucleotide
agcacauuuauuauccucu

SEQ ID NO: 2902156 - RNA, 19 nt, Artificial Sequence
  Description of Artificial Sequence: Synthetic oligonucleotide
uuccccgucgcaacuaaag

SEQ ID NO: 2902157 - RNA, 19 nt, Artificial Sequence
  Description of Artificial Sequence: Synthetic oligonucleotide
cauaucguugcacgcauug

SEQ ID NO: 2902158 - RNA, 19 nt, Artificial Sequence
  Description of Artificial Sequence: Synthetic oligonucleotide
aagacuugacuaggcgggc

SEQ ID NO: 2902159 - RNA, 19 nt, Artificial Sequence
  Description of Artificial Sequence: Synthetic oligonucleotide
acacagacaagaacaaauc

SEQ ID NO: 2902160 - RNA, 19 nt, Artificial Sequence
  Description of Artificial Sequence: Synthetic oligonucleotide
ggcuuuaauaaccuccugc

SEQ ID NO: 2902161 - RNA, 19 nt, Artificial Sequence
  Description of Artificial Sequence: Synthetic oligonucleotide
cacauuuauuauccucugg

SEQ ID NO: 2902162 - RNA, 19 nt, Artificial Sequence
  Description of Artificial Sequence: Synthetic oligonucleotide
ucuucuucccuagcagugg

SEQ ID NO: 2902163 - RNA, 19 nt, Artificial Sequence
  Description of Artificial Sequence: Synthetic oligonucleotide
cuuuaauaaccuccugcug

SEQ ID NO: 2902164 - RNA, 19 nt, Artificial Sequence
  Description of Artificial Sequence: Synthetic oligonucleotide
ugaaucaccuccgcuaaga

SEQ ID NO: 2902165 - RNA, 19 nt, Artificial Sequence
  Description of Artificial Sequence: Synthetic oligonucleotide
ugcagcaucuuccccauau

SEQ ID NO: 2902166 - RNA, 19 nt, Artificial Sequence
  Description of Artificial Sequence: Synthetic oligonucleotide
auggguggcaggaacaggg

SEQ ID NO: 2902167 - RNA, 19 nt, Artificial Sequence
  Description of Artificial Sequence: Synthetic oligonucleotide
cacaagcacauuuauuauc

SEQ ID NO: 2902168 - RNA, 19 nt, Artificial Sequence
  Description of Artificial Sequence: Synthetic oligonucleotide
ucguaagacuugacuaggc

SEQ ID NO: 2902169 - RNA, 19 nt, Artificial Sequence
  Description of Artificial Sequence: Synthetic oligonucleotide
uuauuauccucuggaacac

SEQ ID NO: 2902170 - RNA, 19 nt, Artificial Sequence
  Description of Artificial Sequence: Synthetic oligonucleotide
cacugcuuccggaagcugg

SEQ ID NO: 2902171 - RNA, 19 nt, Artificial Sequence
  Description of Artificial Sequence: Synthetic oligonucleotide
guggcagugucaugggugg

SEQ ID NO: 2902172 - RNA, 19 nt, Artificial Sequence
  Description of Artificial Sequence: Synthetic oligonucleotide
uuaaggacaccuuccccgu

SEQ ID NO: 2902173 - RNA, 19 nt, Artificial Sequence
  Description of Artificial Sequence: Synthetic oligonucleotide
gucgcaacuaaagccauag

SEQ ID NO: 2902174 - RNA, 19 nt, Artificial Sequence
  Description of Artificial Sequence: Synthetic oligonucleotide
ucucuagccucguccaugc

SEQ ID NO: 2902175 - RNA, 19 nt, Artificial Sequence
  Description of Artificial Sequence: Synthetic oligonucleotide
acgcauugucucuagccuc

SEQ ID NO: 2902176 - RNA, 19 nt, Artificial Sequence
  Description of Artificial Sequence: Synthetic oligonucleotide
ugucauggguggcaggaac

SEQ ID NO: 2902177 - RNA, 19 nt, Artificial Sequence
  Description of Artificial Sequence: Synthetic oligonucleotide
ugcucugcgcucagggccg

SEQ ID NO: 2902178 - RNA, 19 nt, Artificial Sequence
  Description of Artificial Sequence: Synthetic oligonucleotide
aacagggccuuuagcuugc

SEQ ID NO: 2902179 - RNA, 19 nt, Artificial Sequence
  Description of Artificial Sequence: Synthetic oligonucleotide
gaucucaggauccugggcu

SEQ ID NO: 2902180 - RNA, 19 nt, Artificial Sequence
  Description of Artificial Sequence: Synthetic oligonucleotide
uaguucacaagcacauuua

SEQ ID NO: 2902181 - RNA, 19 nt, Artificial Sequence
  Description of Artificial Sequence: Synthetic oligonucleotide
aguucacaagcacauuuau

SEQ ID NO: 2902182 - RNA, 19 nt, Artificial Sequence
  Description of Artificial Sequence: Synthetic oligonucleotide
uugucucuagccucgucca

SEQ ID NO: 2902183 - RNA, 19 nt, Artificial Sequence
  Description of Artificial Sequence: Synthetic oligonucleotide
ucacaagcacauuuauuau

SEQ ID NO: 2902184 - RNA, 19 nt, Artificial Sequence
  Description of Artificial Sequence: Synthetic oligonucleotide
cuguguggcuacuggaagc

SEQ ID NO: 2902185 - RNA, 19 nt, Artificial Sequence
  Description of Artificial Sequence: Synthetic oligonucleotide
gaagcuggcccauggggug

SEQ ID NO: 2902186 - RNA, 19 nt, Artificial Sequence
  Description of Artificial Sequence: Synthetic oligonucleotide
aggcgggcaaacuuaagga

SEQ ID NO: 2902187 - RNA, 19 nt, Artificial Sequence
  Description of Artificial Sequence: Synthetic oligonucleotide
acaccuuccccgucgcaac

SEQ ID NO: 2902188 - RNA, 19 nt, Artificial Sequence
  Description of Artificial Sequence: Synthetic oligonucleotide
uguguggcuacuggaagca

SEQ ID NO: 2902189 - RNA, 19 nt, Artificial Sequence
  Description of Artificial Sequence: Synthetic oligonucleotide
cugcucugcgcucagggcc

SEQ ID NO: 2902190 - RNA, 19 nt, Artificial Sequence
  Description of Artificial Sequence: Synthetic oligonucleotide
acuggaagcacgaacugca

SEQ ID NO: 2902191 - RNA, 19 nt, Artificial Sequence
  Description of Artificial Sequence: Synthetic oligonucleotide
ucuucccuagcagugguac

SEQ ID NO: 2902192 - RNA, 19 nt, Artificial Sequence
  Description of Artificial Sequence: Synthetic oligonucleotide
uccccgucgcaacuaaagc

SEQ ID NO: 2902193 - RNA, 19 nt, Artificial Sequence
  Description of Artificial Sequence: Synthetic oligonucleotide
gcuaagaccaccuuggccu

SEQ ID NO: 2902194 - RNA, 19 nt, Artificial Sequence
  Description of Artificial Sequence: Synthetic oligonucleotide
ggaagcacgaacugcagca

SEQ ID NO: 2902195 - RNA, 19 nt, Artificial Sequence
  Description of Artificial Sequence: Synthetic oligonucleotide
ucgcaacuaaagccauagg

SEQ ID NO: 2902196 - RNA, 19 nt, Artificial Sequence
  Description of Artificial Sequence: Synthetic oligonucleotide
agaacgcuugaaucaccuc

SEQ ID NO: 2902197 - RNA, 19 nt, Artificial Sequence
  Description of Artificial Sequence: Synthetic oligonucleotide
gaggcggccacacugcuuc

SEQ ID NO: 2902198 - RNA, 19 nt, Artificial Sequence
  Description of Artificial Sequence: Synthetic oligonucleotide
uacuggaagcacgaacugc

SEQ ID NO: 2902199 - RNA, 19 nt, Artificial Sequence
  Description of Artificial Sequence: Synthetic oligonucleotide
cgcaacuaaagccauaggc

SEQ ID NO: 2902200 - RNA, 19 nt, Artificial Sequence
  Description of Artificial Sequence: Synthetic oligonucleotide
auucucuggggccgagaac

SEQ ID NO: 2902201 - RNA, 19 nt, Artificial Sequence
  Description of Artificial Sequence: Synthetic oligonucleotide
uugaaucaccuccgcuaag

SEQ ID NO: 2902202 - RNA, 19 nt, Artificial Sequence
  Description of Artificial Sequence: Synthetic oligonucleotide
cauuuauuauccucuggaa

SEQ ID NO: 2902203 - RNA, 19 nt, Artificial Sequence
  Description of Artificial Sequence: Synthetic oligonucleotide
ggaucuguguggcuacugg

SEQ ID NO: 2902204 - RNA, 19 nt, Artificial Sequence
  Description of Artificial Sequence: Synthetic oligonucleotide
gugguacacagacaagaac

SEQ ID NO: 2902205 - RNA, 19 nt, Artificial Sequence
  Description of Artificial Sequence: Synthetic oligonucleotide
gaucuguguggcuacugga

SEQ ID NO: 2902206 - RNA, 19 nt, Artificial Sequence
  Description of Artificial Sequence: Synthetic oligonucleotide
agggucuucuucccuagca

SEQ ID NO: 2902207 - RNA, 19 nt, Artificial Sequence
  Description of Artificial Sequence: Synthetic oligonucleotide
uucccuagcagugguacac

SEQ ID NO: 2902208 - RNA, 19 nt, Artificial Sequence
  Description of Artificial Sequence: Synthetic oligonucleotide
ugcuuccggaagcuggccc

SEQ ID NO: 2902209 - RNA, 19 nt, Artificial Sequence
  Description of Artificial Sequence: Synthetic oligonucleotide
caucuuccccauaucguug

SEQ ID NO: 2902210 - RNA, 19 nt, Artificial Sequence
  Description of Artificial Sequence: Synthetic oligonucleotide
agugucauggguggcagga

SEQ ID NO: 2902211 - RNA, 19 nt, Artificial Sequence
  Description of Artificial Sequence: Synthetic oligonucleotide
uugccggacaggcuggcga

SEQ ID NO: 2902212 - RNA, 19 nt, Artificial Sequence
  Description of Artificial Sequence: Synthetic oligonucleotide
uuagcuugccggacaggcu

SEQ ID NO: 2902213 - RNA, 19 nt, Artificial Sequence
  Description of Artificial Sequence: Synthetic oligonucleotide
ugacuaggcgggcaaacuu

SEQ ID NO: 2902214 - RNA, 19 nt, Artificial Sequence
  Description of Artificial Sequence: Synthetic oligonucleotide
accuuggccugcucugcgc

SEQ ID NO: 2902215 - RNA, 19 nt, Artificial Sequence
  Description of Artificial Sequence: Synthetic oligonucleotide
cauaggcuuuaauaaccuc

SEQ ID NO: 2902216 - RNA, 19 nt, Artificial Sequence
  Description of Artificial Sequence: Synthetic oligonucleotide
acgcuugaaucaccuccgc

SEQ ID NO: 2902217 - RNA, 19 nt, Artificial Sequence
  Description of Artificial Sequence: Synthetic oligonucleotide
augcgcaccgcauucucug

SEQ ID NO: 2902218 - RNA, 19 nt, Artificial Sequence
  Description of Artificial Sequence: Synthetic oligonucleotide
aggacaccuuccccgucgc

SEQ ID NO: 2902219 - RNA, 19 nt, Artificial Sequence
  Description of Artificial Sequence: Synthetic oligonucleotide
acgccauagaacgccaguc

SEQ ID NO: 2902220 - RNA, 19 nt, Artificial Sequence
  Description of Artificial Sequence: Synthetic oligonucleotide
uaaagccauaggcuuuaau

SEQ ID NO: 2902221 - RNA, 19 nt, Artificial Sequence
  Description of Artificial Sequence: Synthetic oligonucleotide
cuagccucguccaugcgca

SEQ ID NO: 2902222 - RNA, 19 nt, Artificial Sequence
  Description of Artificial Sequence: Synthetic oligonucleotide
ugggcuucguaagacuuga

SEQ ID NO: 2902223 - RNA, 19 nt, Artificial Sequence
  Description of Artificial Sequence: Synthetic oligonucleotide
agacaagaacaaaucucag

SEQ ID NO: 2902224 - RNA, 19 nt, Artificial Sequence
  Description of Artificial Sequence: Synthetic oligonucleotide
accgcauucucuggggccg

SEQ ID NO: 2902225 - RNA, 19 nt, Artificial Sequence
  Description of Artificial Sequence: Synthetic oligonucleotide
gccauaggcuuuaauaacc

SEQ ID NO: 2902226 - RNA, 19 nt, Artificial Sequence
  Description of Artificial Sequence: Synthetic oligonucleotide
cuacuggaagcacgaacug

SEQ ID NO: 2902227 - RNA, 19 nt, Artificial Sequence
  Description of Artificial Sequence: Synthetic oligonucleotide
aacuaaagccauaggcuuu

SEQ ID NO: 2902228 - RNA, 19 nt, Artificial Sequence
  Description of Artificial Sequence: Synthetic oligonucleotide
uccccauaucguugcacgc

SEQ ID NO: 2902229 - RNA, 19 nt, Artificial Sequence
  Description of Artificial Sequence: Synthetic oligonucleotide
gcuucguaagacuugacua

SEQ ID NO: 2902230 - RNA, 19 nt, Artificial Sequence
  Description of Artificial Sequence: Synthetic oligonucleotide
ggauccugggcuucguaag

SEQ ID NO: 2902231 - RNA, 19 nt, Artificial Sequence
  Description of Artificial Sequence: Synthetic oligonucleotide
cagugguacacagacaaga

SEQ ID NO: 2902232 - RNA, 19 nt, Artificial Sequence
  Description of Artificial Sequence: Synthetic oligonucleotide
cuaagaccaccuuggccug

SEQ ID NO: 2902233 - RNA, 19 nt, Artificial Sequence
  Description of Artificial Sequence: Synthetic oligonucleotide
cuugaaucaccuccgcuaa

SEQ ID NO: 2902234 - RNA, 19 nt, Artificial Sequence
  Description of Artificial Sequence: Synthetic oligonucleotide
gcacgcauugucucuagcc

SEQ ID NO: 2902235 - RNA, 19 nt, Artificial Sequence
  Description of Artificial Sequence: Synthetic oligonucleotide
aggauccugggcuucguaa

SEQ ID NO: 2902236 - RNA, 19 nt, Artificial Sequence
  Description of Artificial Sequence: Synthetic oligonucleotide
gucuucuucccuagcagug

SEQ ID NO: 2902237 - RNA, 19 nt, Artificial Sequence
  Description of Artificial Sequence: Synthetic oligonucleotide
gcuuuaauaaccuccugcu

SEQ ID NO: 2902238 - RNA, 19 nt, Artificial Sequence
  Description of Artificial Sequence: Synthetic oligonucleotide
ugcgcaccgcauucucugg

SEQ ID NO: 2902239 - RNA, 19 nt, Artificial Sequence
  Description of Artificial Sequence: Synthetic oligonucleotide
cuccgcuaagaccaccuug

SEQ ID NO: 2902240 - RNA, 19 nt, Artificial Sequence
  Description of Artificial Sequence: Synthetic oligonucleotide
uauuauccucuggaacaca

SEQ ID NO: 2902241 - RNA, 19 nt, Artificial Sequence
  Description of Artificial Sequence: Synthetic oligonucleotide
gauccugggcuucguaaga

SEQ ID NO: 2902242 - RNA, 19 nt, Artificial Sequence
  Description of Artificial Sequence: Synthetic oligonucleotide
uugacuaggcgggcaaacu

SEQ ID NO: 2902243 - RNA, 19 nt, Artificial Sequence
  Description of Artificial Sequence: Synthetic oligonucleotide
caaaucucaggaggcggcc

SEQ ID NO: 2902244 - RNA, 19 nt, Artificial Sequence
  Description of Artificial Sequence: Synthetic oligonucleotide
uggguggcaggaacagggc

SEQ ID NO: 2902245 - RNA, 19 nt, Artificial Sequence
  Description of Artificial Sequence: Synthetic oligonucleotide
aagcuggcccauggggugg

SEQ ID NO: 2902246 - RNA, 19 nt, Artificial Sequence
  Description of Artificial Sequence: Synthetic oligonucleotide
ugcacgcauugucucuagc

SEQ ID NO: 2902247 - RNA, 19 nt, Artificial Sequence
  Description of Artificial Sequence: Synthetic oligonucleotide
acaggcuggcgaucucagg

SEQ ID NO: 2902248 - RNA, 19 nt, Artificial Sequence
  Description of Artificial Sequence: Synthetic oligonucleotide
ucguugcacgcauugucuc

SEQ ID NO: 2902249 - RNA, 19 nt, Artificial Sequence
  Description of Artificial Sequence: Synthetic oligonucleotide
cuggaagcacgaacugcag

SEQ ID NO: 2902250 - RNA, 19 nt, Artificial Sequence
  Description of Artificial Sequence: Synthetic oligonucleotide
ucuggggccgagaacgcuu

SEQ ID NO: 2902251 - RNA, 19 nt, Artificial Sequence
  Description of Artificial Sequence: Synthetic oligonucleotide
aucguugcacgcauugucu

SEQ ID NO: 2902252 - RNA, 19 nt, Artificial Sequence
  Description of Artificial Sequence: Synthetic oligonucleotide
cuugacuaggcgggcaaac

SEQ ID NO: 2902253 - RNA, 19 nt, Artificial Sequence
  Description of Artificial Sequence: Synthetic oligonucleotide
gaggcggacgccauagaac

SEQ ID NO: 2902254 - RNA, 19 nt, Artificial Sequence
  Description of Artificial Sequence: Synthetic oligonucleotide
cugggcuucguaagacuug

SEQ ID NO: 2902255 - RNA, 19 nt, Artificial Sequence
  Description of Artificial Sequence: Synthetic oligonucleotide
caggcuggcgaucucagga

SEQ ID NO: 2902256 - RNA, 19 nt, Artificial Sequence
  Description of Artificial Sequence: Synthetic oligonucleotide
caggaacagggccuuuagc

SEQ ID NO: 2902257 - RNA, 19 nt, Artificial Sequence
  Description of Artificial Sequence: Synthetic oligonucleotide
cguaagacuugacuaggcg

SEQ ID NO: 2902258 - RNA, 19 nt, Artificial Sequence
  Description of Artificial Sequence: Synthetic oligonucleotide
ugcuggaucuguguggcua

SEQ ID NO: 2902259 - RNA, 19 nt, Artificial Sequence
  Description of Artificial Sequence: Synthetic oligonucleotide
acuaaagccauaggcuuua

SEQ ID NO: 2902260 - RNA, 19 nt, Artificial Sequence
  Description of Artificial Sequence: Synthetic oligonucleotide
uuuaguucacaagcacauu

SEQ ID NO: 2902261 - RNA, 19 nt, Artificial Sequence
  Description of Artificial Sequence: Synthetic oligonucleotide
agugguacacagacaagaa

SEQ ID NO: 2902262 - RNA, 19 nt, Artificial Sequence
  Description of Artificial Sequence: Synthetic oligonucleotide
cacagacaagaacaaaucu

SEQ ID NO: 2902263 - RNA, 19 nt, Artificial Sequence
  Description of Artificial Sequence: Synthetic oligonucleotide
caggaggcggccacacugc

SEQ ID NO: 2902264 - RNA, 19 nt, Artificial Sequence
  Description of Artificial Sequence: Synthetic oligonucleotide
aggcuuuaauaaccuccug

SEQ ID NO: 2902265 - RNA, 19 nt, Artificial Sequence
  Description of Artificial Sequence: Synthetic oligonucleotide
gggucuucuucccuagcag

SEQ ID NO: 2902266 - RNA, 19 nt, Artificial Sequence
  Description of Artificial Sequence: Synthetic oligonucleotide
uugcacgcauugucucuag

SEQ ID NO: 2902267 - RNA, 19 nt, Artificial Sequence
  Description of Artificial Sequence: Synthetic oligonucleotide
ggcgaucucaggauccugg

SEQ ID NO: 2902268 - RNA, 19 nt, Artificial Sequence
  Description of Artificial Sequence: Synthetic oligonucleotide
gccgagaacgcuugaauca

SEQ ID NO: 2902269 - RNA, 19 nt, Artificial Sequence
  Description of Artificial Sequence: Synthetic oligonucleotide
gcuugaaucaccuccgcua

SEQ ID NO: 2902270 - RNA, 19 nt, Artificial Sequence
  Description of Artificial Sequence: Synthetic oligonucleotide
ucucuggggccgagaacgc

SEQ ID NO: 2902271 - RNA, 19 nt, Artificial Sequence
  Description of Artificial Sequence: Synthetic oligonucleotide
gguggcagugucaugggug

SEQ ID NO: 2902272 - RNA, 19 nt, Artificial Sequence
  Description of Artificial Sequence: Synthetic oligonucleotide
gcacauuuauuauccucug

SEQ ID NO: 2902273 - RNA, 19 nt, Artificial Sequence
  Description of Artificial Sequence: Synthetic oligonucleotide
auaucguugcacgcauugu

SEQ ID NO: 2902274 - RNA, 19 nt, Artificial Sequence
  Description of Artificial Sequence: Synthetic oligonucleotide
gacaggcuggcgaucucag

SEQ ID NO: 2902275 - RNA, 19 nt, Artificial Sequence
  Description of Artificial Sequence: Synthetic oligonucleotide
ggcuacuggaagcacgaac

SEQ ID NO: 2902276 - RNA, 19 nt, Artificial Sequence
  Description of Artificial Sequence: Synthetic oligonucleotide
agccucguccaugcgcacc

SEQ ID NO: 2902277 - RNA, 19 nt, Artificial Sequence
  Description of Artificial Sequence: Synthetic oligonucleotide
cuccugcuggaucugugug

SEQ ID NO: 2902278 - RNA, 19 nt, Artificial Sequence
  Description of Artificial Sequence: Synthetic oligonucleotide
gcaacuaaagccauaggcu

SEQ ID NO: 2902279 - RNA, 19 nt, Artificial Sequence
  Description of Artificial Sequence: Synthetic oligonucleotide
gacuugacuaggcgggcaa

SEQ ID NO: 2902280 - RNA, 19 nt, Artificial Sequence
  Description of Artificial Sequence: Synthetic oligonucleotide
ccccgucgcaacuaaagcc

SEQ ID NO: 2902281 - RNA, 19 nt, Artificial Sequence
  Description of Artificial Sequence: Synthetic oligonucleotide
ggcgggcaaacuuaaggac

SEQ ID NO: 2902282 - RNA, 19 nt, Artificial Sequence
  Description of Artificial Sequence: Synthetic oligonucleotide
ucguccaugcgcaccgcau

SEQ ID NO: 2902283 - RNA, 19 nt, Artificial Sequence
  Description of Artificial Sequence: Synthetic oligonucleotide
gucucuagccucguccaug

SEQ ID NO: 2902284 - RNA, 19 nt, Artificial Sequence
  Description of Artificial Sequence: Synthetic oligonucleotide
uggaacacagggucuucuu

SEQ ID NO: 2902285 - RNA, 19 nt, Artificial Sequence
  Description of Artificial Sequence: Synthetic oligonucleotide
aagaccaccuuggccugcu

SEQ ID NO: 2902286 - RNA, 19 nt, Artificial Sequence
  Description of Artificial Sequence: Synthetic oligonucleotide
cuaggcgggcaaacuuaag

SEQ ID NO: 2902287 - RNA, 19 nt, Artificial Sequence
  Description of Artificial Sequence: Synthetic oligonucleotide
uggaucuguguggcuacug

SEQ ID NO: 2902288 - RNA, 19 nt, Artificial Sequence
  Description of Artificial Sequence: Synthetic oligonucleotide
ggaacacagggucuucuuc

SEQ ID NO: 2902289 - RNA, 19 nt, Artificial Sequence
  Description of Artificial Sequence: Synthetic oligonucleotide
cuuuagcuugccggacagg

SEQ ID NO: 2902290 - RNA, 19 nt, Artificial Sequence
  Description of Artificial Sequence: Synthetic oligonucleotide
cauggguggcaggaacagg

SEQ ID NO: 2902291 - RNA, 19 nt, Artificial Sequence
  Description of Artificial Sequence: Synthetic oligonucleotide
uaaggacaccuuccccguc

SEQ ID NO: 2902292 - RNA, 19 nt, Artificial Sequence
  Description of Artificial Sequence: Synthetic oligonucleotide
aucuguguggcuacuggaa

SEQ ID NO: 2902293 - RNA, 19 nt, Artificial Sequence
  Description of Artificial Sequence: Synthetic oligonucleotide
gacaccuuccccgucgcaa

SEQ ID NO: 2902294 - RNA, 19 nt, Artificial Sequence
  Description of Artificial Sequence: Synthetic oligonucleotide
cauucucuggggccgagaa

SEQ ID NO: 2902295 - RNA, 19 nt, Artificial Sequence
  Description of Artificial Sequence: Synthetic oligonucleotide
cacgaacugcagcaucuuc

SEQ ID NO: 2902296 - RNA, 19 nt, Artificial Sequence
  Description of Artificial Sequence: Synthetic oligonucleotide
caccuuggccugcucugcg

SEQ ID NO: 2902297 - RNA, 19 nt, Artificial Sequence
  Description of Artificial Sequence: Synthetic oligonucleotide
gccucguccaugcgcaccg

SEQ ID NO: 2902298 - RNA, 19 nt, Artificial Sequence
  Description of Artificial Sequence: Synthetic oligonucleotide
ugucucuagccucguccau

SEQ ID NO: 2902299 - RNA, 19 nt, Artificial Sequence
  Description of Artificial Sequence: Synthetic oligonucleotide
uuggccugcucugcgcuca

SEQ ID NO: 2902300 - RNA, 19 nt, Artificial Sequence
  Description of Artificial Sequence: Synthetic oligonucleotide
gagaacgcuugaaucaccu

SEQ ID NO: 2902301 - RNA, 19 nt, Artificial Sequence
  Description of Artificial Sequence: Synthetic oligonucleotide
acacagggucuucuucccu

SEQ ID NO: 2902302 - RNA, 19 nt, Artificial Sequence
  Description of Artificial Sequence: Synthetic oligonucleotide
gcaggaacagggccuuuag

SEQ ID NO: 2902303 - RNA, 19 nt, Artificial Sequence
  Description of Artificial Sequence: Synthetic oligonucleotide
aucucaggauccugggcuu

SEQ ID NO: 2902304 - RNA, 19 nt, Artificial Sequence
  Description of Artificial Sequence: Synthetic oligonucleotide
cuuccccauaucguugcac

SEQ ID NO: 2902305 - RNA, 19 nt, Artificial Sequence
  Description of Artificial Sequence: Synthetic oligonucleotide
gacuaggcgggcaaacuua

SEQ ID NO: 2902306 - RNA, 19 nt, Artificial Sequence
  Description of Artificial Sequence: Synthetic oligonucleotide
ggccgagaacgcuugaauc

SEQ ID NO: 2902307 - RNA, 19 nt, Artificial Sequence
  Description of Artificial Sequence: Synthetic oligonucleotide
uggcccaugggguggcagu

SEQ ID NO: 2902308 - RNA, 19 nt, Artificial Sequence
  Description of Artificial Sequence: Synthetic oligonucleotide
ucucaggaggcggccacac

SEQ ID NO: 2902309 - RNA, 19 nt, Artificial Sequence
  Description of Artificial Sequence: Synthetic oligonucleotide
guggcuacuggaagcacga

SEQ ID NO: 2902310 - RNA, 19 nt, Artificial Sequence
  Description of Artificial Sequence: Synthetic oligonucleotide
cgcauugucucuagccucg

SEQ ID NO: 2902311 - RNA, 19 nt, Artificial Sequence
  Description of Artificial Sequence: Synthetic oligonucleotide
guccaugcgcaccgcauuc

SEQ ID NO: 2902312 - RNA, 19 nt, Artificial Sequence
  Description of Artificial Sequence: Synthetic oligonucleotide
gcuacuggaagcacgaacu

SEQ ID NO: 2902313 - RNA, 19 nt, Artificial Sequence
  Description of Artificial Sequence: Synthetic oligonucleotide
cagugucauggguggcagg

SEQ ID NO: 2902314 - RNA, 19 nt, Artificial Sequence
  Description of Artificial Sequence: Synthetic oligonucleotide
ccuuuagcuugccggacag

SEQ ID NO: 2902315 - RNA, 19 nt, Artificial Sequence
  Description of Artificial Sequence: Synthetic oligonucleotide
uaagaccaccuuggccugc

SEQ ID NO: 2902316 - RNA, 19 nt, Artificial Sequence
  Description of Artificial Sequence: Synthetic oligonucleotide
uucuucccuagcaguggua

SEQ ID NO: 2902317 - RNA, 19 nt, Artificial Sequence
  Description of Artificial Sequence: Synthetic oligonucleotide
cuggggccgagaacgcuug

SEQ ID NO: 2902318 - RNA, 19 nt, Artificial Sequence
  Description of Artificial Sequence: Synthetic oligonucleotide
aggcuggcgaucucaggau

SEQ ID NO: 2902319 - RNA, 19 nt, Artificial Sequence
  Description of Artificial Sequence: Synthetic oligonucleotide
gucauggguggcaggaaca

SEQ ID NO: 2902320 - RNA, 19 nt, Artificial Sequence
  Description of Artificial Sequence: Synthetic oligonucleotide
cacgcauugucucuagccu

SEQ ID NO: 2902321 - RNA, 19 nt, Artificial Sequence
  Description of Artificial Sequence: Synthetic oligonucleotide
ucuggaacacagggucuuc

SEQ ID NO: 2902322 - RNA, 19 nt, Artificial Sequence
  Description of Artificial Sequence: Synthetic oligonucleotide
ggguggcaggaacagggcc

SEQ ID NO: 2902323 - RNA, 19 nt, Artificial Sequence
  Description of Artificial Sequence: Synthetic oligonucleotide
ucccuagcagugguacaca

SEQ ID NO: 2902324 - RNA, 19 nt, Artificial Sequence
  Description of Artificial Sequence: Synthetic oligonucleotide
agacuugacuaggcgggca

SEQ ID NO: 2902325 - RNA, 19 nt, Artificial Sequence
  Description of Artificial Sequence: Synthetic oligonucleotide
gacgccauagaacgccagu

SEQ ID NO: 2902326 - RNA, 19 nt, Artificial Sequence
  Description of Artificial Sequence: Synthetic oligonucleotide
uccaugcgcaccgcauucu

SEQ ID NO: 2902327 - RNA, 19 nt, Artificial Sequence
  Description of Artificial Sequence: Synthetic oligonucleotide
cagggccuuuagcuugccg

SEQ ID NO: 2902328 - RNA, 19 nt, Artificial Sequence
  Description of Artificial Sequence: Synthetic oligonucleotide
acuaggcgggcaaacuuaa

SEQ ID NO: 2902329 - RNA, 19 nt, Artificial Sequence
  Description of Artificial Sequence: Synthetic oligonucleotide
uaauaaccuccugcuggau

SEQ ID NO: 2902330 - RNA, 19 nt, Artificial Sequence
  Description of Artificial Sequence: Synthetic oligonucleotide
aggcggccacacugcuucc

SEQ ID NO: 2902331 - RNA, 19 nt, Artificial Sequence
  Description of Artificial Sequence: Synthetic oligonucleotide
auccucuggaacacagggu

SEQ ID NO: 2902332 - RNA, 19 nt, Artificial Sequence
  Description of Artificial Sequence: Synthetic oligonucleotide
cauugucucuagccucguc

SEQ ID NO: 2902333 - RNA, 19 nt, Artificial Sequence
  Description of Artificial Sequence: Synthetic oligonucleotide
ugccggacaggcuggcgau

SEQ ID NO: 2902334 - RNA, 19 nt, Artificial Sequence
  Description of Artificial Sequence: Synthetic oligonucleotide
ggcuucguaagacuugacu

SEQ ID NO: 2902335 - RNA, 19 nt, Artificial Sequence
  Description of Artificial Sequence: Synthetic oligonucleotide
cccgucgcaacuaaagcca

SEQ ID NO: 2902336 - RNA, 19 nt, Artificial Sequence
  Description of Artificial Sequence: Synthetic oligonucleotide
gccacacugcuuccggaag

SEQ ID NO: 2902337 - RNA, 19 nt, Artificial Sequence
  Description of Artificial Sequence: Synthetic oligonucleotide
agcuugccggacaggcugg

SEQ ID NO: 2902338 - RNA, 19 nt, Artificial Sequence
  Description of Artificial Sequence: Synthetic oligonucleotide
ucaccuccgcuaagaccac

SEQ ID NO: 2902339 - RNA, 19 nt, Artificial Sequence
  Description of Artificial Sequence: Synthetic oligonucleotide
gcuggaucuguguggcuac

SEQ ID NO: 2902340 - RNA, 19 nt, Artificial Sequence
  Description of Artificial Sequence: Synthetic oligonucleotide
cuucccuagcagugguaca

SEQ ID NO: 2902341 - RNA, 19 nt, Artificial Sequence
  Description of Artificial Sequence: Synthetic oligonucleotide
cgccauagaacgccagucg

SEQ ID NO: 2902342 - RNA, 19 nt, Artificial Sequence
  Description of Artificial Sequence: Synthetic oligonucleotide
uaaccuccugcuggaucug

SEQ ID NO: 2902343 - RNA, 19 nt, Artificial Sequence
  Description of Artificial Sequence: Synthetic oligonucleotide
cucuagccucguccaugcg

SEQ ID NO: 2902344 - RNA, 19 nt, Artificial Sequence
  Description of Artificial Sequence: Synthetic oligonucleotide
cacagggucuucuucccua

SEQ ID NO: 2902345 - RNA, 19 nt, Artificial Sequence
  Description of Artificial Sequence: Synthetic oligonucleotide
cuugccggacaggcuggcg

SEQ ID NO: 2902346 - RNA, 19 nt, Artificial Sequence
  Description of Artificial Sequence: Synthetic oligonucleotide
cagggucuucuucccuagc

SEQ ID NO: 2902347 - RNA, 19 nt, Artificial Sequence
  Description of Artificial Sequence: Synthetic oligonucleotide
accuccgcuaagaccaccu

SEQ ID NO: 2902348 - RNA, 19 nt, Artificial Sequence
  Description of Artificial Sequence: Synthetic oligonucleotide
aggaggcggccacacugcu

SEQ ID NO: 2902349 - RNA, 19 nt, Artificial Sequence
  Description of Artificial Sequence: Synthetic oligonucleotide
gcggacgccauagaacgcc

SEQ ID NO: 2902350 - RNA, 19 nt, Artificial Sequence
  Description of Artificial Sequence: Synthetic oligonucleotide
gcgggcaaacuuaaggaca

SEQ ID NO: 2902351 - RNA, 19 nt, Artificial Sequence
  Description of Artificial Sequence: Synthetic oligonucleotide
cuuggccugcucugcgcuc

SEQ ID NO: 2902352 - RNA, 19 nt, Artificial Sequence
  Description of Artificial Sequence: Synthetic oligonucleotide
gggguggcagugucauggg

SEQ ID NO: 2902353 - RNA, 19 nt, Artificial Sequence
  Description of Artificial Sequence: Synthetic oligonucleotide
ggcaaacuuaaggacaccu

SEQ ID NO: 2902354 - RNA, 19 nt, Artificial Sequence
  Description of Artificial Sequence: Synthetic oligonucleotide
cugcgcucagggccgcggg

SEQ ID NO: 2902355 - RNA, 19 nt, Artificial Sequence
  Description of Artificial Sequence: Synthetic oligonucleotide
ucaggauccugggcuucgu

SEQ ID NO: 2902356 - RNA, 19 nt, Artificial Sequence
  Description of Artificial Sequence: Synthetic oligonucleotide
agaccaccuuggccugcuc

SEQ ID NO: 2902357 - RNA, 19 nt, Artificial Sequence
  Description of Artificial Sequence: Synthetic oligonucleotide
gcagugucauggguggcag

SEQ ID NO: 2902358 - RNA, 19 nt, Artificial Sequence
  Description of Artificial Sequence: Synthetic oligonucleotide
ggucuucuucccuagcagu

SEQ ID NO: 2902359 - RNA, 19 nt, Artificial Sequence
  Description of Artificial Sequence: Synthetic oligonucleotide
cgcuaagaccaccuuggcc

SEQ ID NO: 2902360 - RNA, 19 nt, Artificial Sequence
  Description of Artificial Sequence: Synthetic oligonucleotide
guugcacgcauugucucua

SEQ ID NO: 2902361 - RNA, 19 nt, Artificial Sequence
  Description of Artificial Sequence: Synthetic oligonucleotide
gcuuccggaagcuggccca

SEQ ID NO: 2902362 - RNA, 19 nt, Artificial Sequence
  Description of Artificial Sequence: Synthetic oligonucleotide
gggccuuuagcuugccgga

SEQ ID NO: 2902363 - RNA, 19 nt, Artificial Sequence
  Description of Artificial Sequence: Synthetic oligonucleotide
cccuagcagugguacacag

SEQ ID NO: 2902364 - RNA, 19 nt, Artificial Sequence
  Description of Artificial Sequence: Synthetic oligonucleotide
caagcacauuuauuauccu

SEQ ID NO: 2902365 - RNA, 19 nt, Artificial Sequence
  Description of Artificial Sequence: Synthetic oligonucleotide
gcgcaccgcauucucuggg

SEQ ID NO: 2902366 - RNA, 19 nt, Artificial Sequence
  Description of Artificial Sequence: Synthetic oligonucleotide
augggguggcagugucaug

SEQ ID NO: 2902367 - RNA, 19 nt, Artificial Sequence
  Description of Artificial Sequence: Synthetic oligonucleotide
ccugcucugcgcucagggc

SEQ ID NO: 2902368 - RNA, 19 nt, Artificial Sequence
  Description of Artificial Sequence: Synthetic oligonucleotide
acuugacuaggcgggcaaa

SEQ ID NO: 2902369 - RNA, 19 nt, Artificial Sequence
  Description of Artificial Sequence: Synthetic oligonucleotide
ccgagaacgcuugaaucac

SEQ ID NO: 2902370 - RNA, 19 nt, Artificial Sequence
  Description of Artificial Sequence: Synthetic oligonucleotide
gcgggcugggccgaggcgg

SEQ ID NO: 2902371 - RNA, 19 nt, Artificial Sequence
  Description of Artificial Sequence: Synthetic oligonucleotide
gcaccgcauucucuggggc

SEQ ID NO: 2902372 - RNA, 19 nt, Artificial Sequence
  Description of Artificial Sequence: Synthetic oligonucleotide
uggcagugucauggguggc

SEQ ID NO: 2902373 - RNA, 19 nt, Artificial Sequence
  Description of Artificial Sequence: Synthetic oligonucleotide
gccuuuagcuugccggaca

SEQ ID NO: 2902374 - RNA, 19 nt, Artificial Sequence
  Description of Artificial Sequence: Synthetic oligonucleotide
cuucuucccuagcaguggu

SEQ ID NO: 2902375 - RNA, 19 nt, Artificial Sequence
  Description of Artificial Sequence: Synthetic oligonucleotide
uggggccgagaacgcuuga

SEQ ID NO: 2902376 - RNA, 19 nt, Artificial Sequence
  Description of Artificial Sequence: Synthetic oligonucleotide
acacugcuuccggaagcug

SEQ ID NO: 2902377 - RNA, 19 nt, Artificial Sequence
  Description of Artificial Sequence: Synthetic oligonucleotide
guucacaagcacauuuauu

SEQ ID NO: 2902378 - RNA, 19 nt, Artificial Sequence
  Description of Artificial Sequence: Synthetic oligonucleotide
gcagugguacacagacaag

SEQ ID NO: 2902379 - RNA, 19 nt, Artificial Sequence
  Description of Artificial Sequence: Synthetic oligonucleotide
cgagaacgcuugaaucacc

SEQ ID NO: 2902380 - RNA, 19 nt, Artificial Sequence
  Description of Artificial Sequence: Synthetic oligonucleotide
gcaucuuccccauaucguu

SEQ ID NO: 2902381 - RNA, 19 nt, Artificial Sequence
  Description of Artificial Sequence: Synthetic oligonucleotide
accuccugcuggaucugug

SEQ ID NO: 2902382 - RNA, 19 nt, Artificial Sequence
  Description of Artificial Sequence: Synthetic oligonucleotide
ggcagugucauggguggca

SEQ ID NO: 2902383 - RNA, 19 nt, Artificial Sequence
  Description of Artificial Sequence: Synthetic oligonucleotide
cucagggccgcgggcuggg

SEQ ID NO: 2902384 - RNA, 19 nt, Artificial Sequence
  Description of Artificial Sequence: Synthetic oligonucleotide
ggaacagggccuuuagcuu

SEQ ID NO: 2902385 - RNA, 19 nt, Artificial Sequence
  Description of Artificial Sequence: Synthetic oligonucleotide
gccgaggcggacgccauag

SEQ ID NO: 2902386 - RNA, 19 nt, Artificial Sequence
  Description of Artificial Sequence: Synthetic oligonucleotide
aucucaggaggcggccaca

SEQ ID NO: 2902387 - RNA, 19 nt, Artificial Sequence
  Description of Artificial Sequence: Synthetic oligonucleotide
gcugggccgaggcggacgc

SEQ ID NO: 2902388 - RNA, 19 nt, Artificial Sequence
  Description of Artificial Sequence: Synthetic oligonucleotide
gcagcaucuuccccauauc

SEQ ID NO: 2902389 - RNA, 19 nt, Artificial Sequence
  Description of Artificial Sequence: Synthetic oligonucleotide
gaagcacgaacugcagcau

SEQ ID NO: 2902390 - RNA, 19 nt, Artificial Sequence
  Description of Artificial Sequence: Synthetic oligonucleotide
uuccggaagcuggcccaug

SEQ ID NO: 2902391 - RNA, 19 nt, Artificial Sequence
  Description of Artificial Sequence: Synthetic oligonucleotide
ggcuggcgaucucaggauc

SEQ ID NO: 2902392 - RNA, 19 nt, Artificial Sequence
  Description of Artificial Sequence: Synthetic oligonucleotide
cuggcccaugggguggcag

SEQ ID NO: 2902393 - RNA, 19 nt, Artificial Sequence
  Description of Artificial Sequence: Synthetic oligonucleotide
caugcgcaccgcauucucu

SEQ ID NO: 2902394 - RNA, 19 nt, Artificial Sequence
  Description of Artificial Sequence: Synthetic oligonucleotide
uagccucguccaugcgcac

SEQ ID NO: 2902395 - RNA, 19 nt, Artificial Sequence
  Description of Artificial Sequence: Synthetic oligonucleotide
cucguccaugcgcaccgca

SEQ ID NO: 2902396 - RNA, 19 nt, Artificial Sequence
  Description of Artificial Sequence: Synthetic oligonucleotide
cgcaccgcauucucugggg

SEQ ID NO: 2902397 - RNA, 19 nt, Artificial Sequence
  Description of Artificial Sequence: Synthetic oligonucleotide
gguggcaggaacagggccu

SEQ ID NO: 2902398 - RNA, 19 nt, Artificial Sequence
  Description of Artificial Sequence: Synthetic oligonucleotide
ccuagcagugguacacaga

SEQ ID NO: 2902399 - RNA, 19 nt, Artificial Sequence
  Description of Artificial Sequence: Synthetic oligonucleotide
ggacaggcuggcgaucuca

SEQ ID NO: 2902400 - RNA, 19 nt, Artificial Sequence
  Description of Artificial Sequence: Synthetic oligonucleotide
guguggcuacuggaagcac

SEQ ID NO: 2902401 - RNA, 19 nt, Artificial Sequence
  Description of Artificial Sequence: Synthetic oligonucleotide
ggccacacugcuuccggaa

SEQ ID NO: 2902402 - RNA, 19 nt, Artificial Sequence
  Description of Artificial Sequence: Synthetic oligonucleotide
caugggguggcagugucau

SEQ ID NO: 2902403 - RNA, 19 nt, Artificial Sequence
  Description of Artificial Sequence: Synthetic oligonucleotide
caccuccgcuaagaccacc

SEQ ID NO: 2902404 - RNA, 19 nt, Artificial Sequence
  Description of Artificial Sequence: Synthetic oligonucleotide
uggcuacuggaagcacgaa

SEQ ID NO: 2902405 - RNA, 19 nt, Artificial Sequence
  Description of Artificial Sequence: Synthetic oligonucleotide
ggcggccacacugcuuccg

SEQ ID NO: 2902406 - RNA, 19 nt, Artificial Sequence
  Description of Artificial Sequence: Synthetic oligonucleotide
ggacgccauagaacgccag

SEQ ID NO: 2902407 - RNA, 19 nt, Artificial Sequence
  Description of Artificial Sequence: Synthetic oligonucleotide
ggcugggccgaggcggacg

SEQ ID NO: 2902408 - RNA, 19 nt, Artificial Sequence
  Description of Artificial Sequence: Synthetic oligonucleotide
gggcaaacuuaaggacacc

SEQ ID NO: 2902409 - RNA, 19 nt, Artificial Sequence
  Description of Artificial Sequence: Synthetic oligonucleotide
cuuccccgucgcaacuaaa

SEQ ID NO: 2902410 - RNA, 19 nt, Artificial Sequence
  Description of Artificial Sequence: Synthetic oligonucleotide
cacacugcuuccggaagcu

SEQ ID NO: 2902411 - RNA, 19 nt, Artificial Sequence
  Description of Artificial Sequence: Synthetic oligonucleotide
ccgcuaagaccaccuuggc

SEQ ID NO: 2902412 - RNA, 19 nt, Artificial Sequence
  Description of Artificial Sequence: Synthetic oligonucleotide
cuggaacacagggucuucu

SEQ ID NO: 2902413 - RNA, 19 nt, Artificial Sequence
  Description of Artificial Sequence: Synthetic oligonucleotide
ggcccaugggguggcagug

SEQ ID NO: 2902414 - RNA, 19 nt, Artificial Sequence
  Description of Artificial Sequence: Synthetic oligonucleotide
ccaugcgcaccgcauucuc

SEQ ID NO: 2902415 - RNA, 19 nt, Artificial Sequence
  Description of Artificial Sequence: Synthetic oligonucleotide
ggccuuuagcuugccggac

SEQ ID NO: 2902416 - RNA, 19 nt, Artificial Sequence
  Description of Artificial Sequence: Synthetic oligonucleotide
cuaaagccauaggcuuuaa

SEQ ID NO: 2902417 - RNA, 19 nt, Artificial Sequence
  Description of Artificial Sequence: Synthetic oligonucleotide
cccaugggguggcaguguc

SEQ ID NO: 2902418 - RNA, 19 nt, Artificial Sequence
  Description of Artificial Sequence: Synthetic oligonucleotide
gugucauggguggcaggaa

SEQ ID NO: 2902419 - RNA, 19 nt, Artificial Sequence
  Description of Artificial Sequence: Synthetic oligonucleotide
accuuccccgucgcaacua

SEQ ID NO: 2902420 - RNA, 19 nt, Artificial Sequence
  Description of Artificial Sequence: Synthetic oligonucleotide
ggcggacgccauagaacgc

SEQ ID NO: 2902421 - RNA, 19 nt, Artificial Sequence
  Description of Artificial Sequence: Synthetic oligonucleotide
ccccauaucguugcacgca

SEQ ID NO: 2902422 - RNA, 19 nt, Artificial Sequence
  Description of Artificial Sequence: Synthetic oligonucleotide
cucugcgcucagggccgcg

SEQ ID NO: 2902423 - RNA, 19 nt, Artificial Sequence
  Description of Artificial Sequence: Synthetic oligonucleotide
gcaaacuuaaggacaccuu

SEQ ID NO: 2902424 - RNA, 19 nt, Artificial Sequence
  Description of Artificial Sequence: Synthetic oligonucleotide
caggauccugggcuucgua

SEQ ID NO: 2902425 - RNA, 19 nt, Artificial Sequence
  Description of Artificial Sequence: Synthetic oligonucleotide
gggccgagaacgcuugaau

SEQ ID NO: 2902426 - RNA, 19 nt, Artificial Sequence
  Description of Artificial Sequence: Synthetic oligonucleotide
ggcaggaacagggccuuua

SEQ ID NO: 2902427 - RNA, 19 nt, Artificial Sequence
  Description of Artificial Sequence: Synthetic oligonucleotide
ccaugggguggcaguguca

SEQ ID NO: 2902428 - RNA, 19 nt, Artificial Sequence
  Description of Artificial Sequence: Synthetic oligonucleotide
gcuugccggacaggcuggc

SEQ ID NO: 2902429 - RNA, 19 nt, Artificial Sequence
  Description of Artificial Sequence: Synthetic oligonucleotide
ccugggcuucguaagacuu

SEQ ID NO: 2902430 - RNA, 19 nt, Artificial Sequence
  Description of Artificial Sequence: Synthetic oligonucleotide
ggacaccuuccccgucgca

SEQ ID NO: 2902431 - RNA, 19 nt, Artificial Sequence
  Description of Artificial Sequence: Synthetic oligonucleotide
cugggccgaggcggacgcc

SEQ ID NO: 2902432 - RNA, 19 nt, Artificial Sequence
  Description of Artificial Sequence: Synthetic oligonucleotide
ggggccgagaacgcuugaa

SEQ ID NO: 2902433 - RNA, 19 nt, Artificial Sequence
  Description of Artificial Sequence: Synthetic oligonucleotide
caccuuccccgucgcaacu

SEQ ID NO: 2902434 - RNA, 19 nt, Artificial Sequence
  Description of Artificial Sequence: Synthetic oligonucleotide
guggcaggaacagggccuu

SEQ ID NO: 2902435 - RNA, 19 nt, Artificial Sequence
  Description of Artificial Sequence: Synthetic oligonucleotide
cucaggaggcggccacacu

SEQ ID NO: 2902436 - RNA, 19 nt, Artificial Sequence
  Description of Artificial Sequence: Synthetic oligonucleotide
gcauucucuggggccgaga

SEQ ID NO: 2902437 - RNA, 19 nt, Artificial Sequence
  Description of Artificial Sequence: Synthetic oligonucleotide
gggcuucguaagacuugac

SEQ ID NO: 2902438 - RNA, 19 nt, Artificial Sequence
  Description of Artificial Sequence: Synthetic oligonucleotide
cccauaucguugcacgcau

SEQ ID NO: 2902439 - RNA, 19 nt, Artificial Sequence
  Description of Artificial Sequence: Synthetic oligonucleotide
ccuccugcuggaucugugu

SEQ ID NO: 2902440 - RNA, 19 nt, Artificial Sequence
  Description of Artificial Sequence: Synthetic oligonucleotide
uggcaggaacagggccuuu

SEQ ID NO: 2902441 - RNA, 19 nt, Artificial Sequence
  Description of Artificial Sequence: Synthetic oligonucleotide
ccgcgggcugggccgaggc

SEQ ID NO: 2902442 - RNA, 19 nt, Artificial Sequence
  Description of Artificial Sequence: Synthetic oligonucleotide
cuggaucuguguggcuacu

SEQ ID NO: 2902443 - RNA, 19 nt, Artificial Sequence
  Description of Artificial Sequence: Synthetic oligonucleotide
cucuggggccgagaacgcu

SEQ ID NO: 2902444 - RNA, 19 nt, Artificial Sequence
  Description of Artificial Sequence: Synthetic oligonucleotide
ccuuccccgucgcaacuaa

SEQ ID NO: 2902445 - RNA, 19 nt, Artificial Sequence
  Description of Artificial Sequence: Synthetic oligonucleotide
cguugcacgcauugucucu

SEQ ID NO: 2902446 - RNA, 19 nt, Artificial Sequence
  Description of Artificial Sequence: Synthetic oligonucleotide
ccuuggccugcucugcgcu

SEQ ID NO: 2902447 - RNA, 19 nt, Artificial Sequence
  Description of Artificial Sequence: Synthetic oligonucleotide
cuuccggaagcuggcccau

SEQ ID NO: 2902448 - RNA, 19 nt, Artificial Sequence
  Description of Artificial Sequence: Synthetic oligonucleotide
cggacgccauagaacgcca

SEQ ID NO: 2902449 - RNA, 19 nt, Artificial Sequence
  Description of Artificial Sequence: Synthetic oligonucleotide
cgcgggcugggccgaggcg

SEQ ID NO: 2902450 - RNA, 19 nt, Artificial Sequence
  Description of Artificial Sequence: Synthetic oligonucleotide
ccucguccaugcgcaccgc

SEQ ID NO: 2902451 - RNA, 19 nt, Artificial Sequence
  Description of Artificial Sequence: Synthetic oligonucleotide
gcucugcgcucagggccgc

SEQ ID NO: 2902452 - RNA, 19 nt, Artificial Sequence
  Description of Artificial Sequence: Synthetic oligonucleotide
gccgcgggcugggccgagg

SEQ ID NO: 2902453 - RNA, 19 nt, Artificial Sequence
  Description of Artificial Sequence: Synthetic oligonucleotide
cgcuugaaucaccuccgcu

SEQ ID NO: 2902454 - RNA, 19 nt, Artificial Sequence
  Description of Artificial Sequence: Synthetic oligonucleotide
gccggacaggcuggcgauc

SEQ ID NO: 2902455 - RNA, 19 nt, Artificial Sequence
  Description of Artificial Sequence: Synthetic oligonucleotide
gcauugucucuagccucgu

SEQ ID NO: 2902456 - RNA, 19 nt, Artificial Sequence
  Description of Artificial Sequence: Synthetic oligonucleotide
cgucgcaacuaaagccaua

SEQ ID NO: 2902457 - RNA, 19 nt, Artificial Sequence
  Description of Artificial Sequence: Synthetic oligonucleotide
ccgucgcaacuaaagccau

SEQ ID NO: 2902458 - RNA, 19 nt, Artificial Sequence
  Description of Artificial Sequence: Synthetic oligonucleotide
cgcauucucuggggccgag

SEQ ID NO: 2902459 - RNA, 19 nt, Artificial Sequence
  Description of Artificial Sequence: Synthetic oligonucleotide
ccggacaggcuggcgaucu

SEQ ID NO: 2902460 - RNA, 19 nt, Artificial Sequence
  Description of Artificial Sequence: Synthetic oligonucleotide
ggccgaggcggacgccaua

SEQ ID NO: 2902461 - RNA, 19 nt, Artificial Sequence
  Description of Artificial Sequence: Synthetic oligonucleotide
ccgaggcggacgccauaga

SEQ ID NO: 2902462 - RNA, 19 nt, Artificial Sequence
  Description of Artificial Sequence: Synthetic oligonucleotide
cggccacacugcuuccgga

SEQ ID NO: 2902463 - RNA, 19 nt, Artificial Sequence
  Description of Artificial Sequence: Synthetic oligonucleotide
ccauaucguugcacgcauu

SEQ ID NO: 2902464 - RNA, 19 nt, Artificial Sequence
  Description of Artificial Sequence: Synthetic oligonucleotide
cggacaggcuggcgaucuc

SEQ ID NO: 2902465 - RNA, 19 nt, Artificial Sequence
  Description of Artificial Sequence: Synthetic oligonucleotide
gcccaugggguggcagugu

SEQ ID NO: 2902466 - RNA, 19 nt, Artificial Sequence
  Description of Artificial Sequence: Synthetic oligonucleotide
ggaggcggccacacugcuu

SEQ ID NO: 2902467 - RNA, 19 nt, Artificial Sequence
  Description of Artificial Sequence: Synthetic oligonucleotide
cguccaugcgcaccgcauu

SEQ ID NO: 2902468 - RNA, 19 nt, Artificial Sequence
  Description of Artificial Sequence: Synthetic oligonucleotide
ccgcauucucuggggccga

SEQ ID NO: 2902469 - RNA, 19 nt, Artificial Sequence
  Description of Artificial Sequence: Synthetic oligonucleotide
ccuccgcuaagaccaccuu

SEQ ID NO: 2902470 - RNA, 19 nt, Artificial Sequence
  Description of Artificial Sequence: Synthetic oligonucleotide
ggccgcgggcugggccgag

SEQ ID NO: 2902471 - RNA, 19 nt, Artificial Sequence
  Description of Artificial Sequence: Synthetic oligonucleotide
gggccgcgggcugggccga

SEQ ID NO: 2902472 - RNA, 19 nt, Artificial Sequence
  Description of Artificial Sequence: Synthetic oligonucleotide
gggccgaggcggacgccau

SEQ ID NO: 2902473 - RNA, 19 nt, Artificial Sequence
  Description of Artificial Sequence: Synthetic oligonucleotide
uuaaaguccgucuucaugu

SEQ ID NO: 2902474 - RNA, 19 nt, Artificial Sequence
  Description of Artificial Sequence: Synthetic oligonucleotide
ugacauaaaugucauuggg

SEQ ID NO: 2902475 - RNA, 19 nt, Artificial Sequence
  Description of Artificial Sequence: Synthetic oligonucleotide
aaagcugcccgccugcagc

SEQ ID NO: 2902476 - RNA, 19 nt, Artificial Sequence
  Description of Artificial Sequence: Synthetic oligonucleotide
guugacauaaaugucauug

SEQ ID NO: 2902477 - RNA, 19 nt, Artificial Sequence
  Description of Artificial Sequence: Synthetic oligonucleotide
ugcagggcgauguugaugg

SEQ ID NO: 2902478 - RNA, 19 nt, Artificial Sequence
  Description of Artificial Sequence: Synthetic oligonucleotide
aauggccagacccaagccg

SEQ ID NO: 2902479 - RNA, 19 nt, Artificial Sequence
  Description of Artificial Sequence: Synthetic oligonucleotide
aauacucugguuccuagcu

SEQ ID NO: 2902480 - RNA, 19 nt, Artificial Sequence
  Description of Artificial Sequence: Synthetic oligonucleotide
uugacauaaaugucauugg

SEQ ID NO: 2902481 - RNA, 19 nt, Artificial Sequence
  Description of Artificial Sequence: Synthetic oligonucleotide
aagaaggaagaagcgaugg

SEQ ID NO: 2902482 - RNA, 19 nt, Artificial Sequence
  Description of Artificial Sequence: Synthetic oligonucleotide
uuaauggccagacccaagc

SEQ ID NO: 2902483 - RNA, 19 nt, Artificial Sequence
  Description of Artificial Sequence: Synthetic oligonucleotide
aagccguggauguagaucu

SEQ ID NO: 2902484 - RNA, 19 nt, Artificial Sequence
  Description of Artificial Sequence: Synthetic oligonucleotide
aagcgaugggagcaggagc

SEQ ID NO: 2902485 - RNA, 19 nt, Artificial Sequence
  Description of Artificial Sequence: Synthetic oligonucleotide
uuggcagcgggcaagcugg

SEQ ID NO: 2902486 - RNA, 19 nt, Artificial Sequence
  Description of Artificial Sequence: Synthetic oligonucleotide
auaaaugucauugggccuc

SEQ ID NO: 2902487 - RNA, 19 nt, Artificial Sequence
  Description of Artificial Sequence: Synthetic oligonucleotide
cauguugacauaaauguca

SEQ ID NO: 2902488 - RNA, 19 nt, Artificial Sequence
  Description of Artificial Sequence: Synthetic oligonucleotide
aaugucauugggccuccgg

SEQ ID NO: 2902489 - RNA, 19 nt, Artificial Sequence
  Description of Artificial Sequence: Synthetic oligonucleotide
guggauguagaucucggcg

SEQ ID NO: 2902490 - RNA, 19 nt, Artificial Sequence
  Description of Artificial Sequence: Synthetic oligonucleotide
gaagaagaaggaagaagcg

SEQ ID NO: 2902491 - RNA, 19 nt, Artificial Sequence
  Description of Artificial Sequence: Synthetic oligonucleotide
uucucggccaugcugagug

SEQ ID NO: 2902492 - RNA, 19 nt, Artificial Sequence
  Description of Artificial Sequence: Synthetic oligonucleotide
gacauaaaugucauugggc

SEQ ID NO: 2902493 - RNA, 19 nt, Artificial Sequence
  Description of Artificial Sequence: Synthetic oligonucleotide
uugauggcgcgguuaaugg

SEQ ID NO: 2902494 - RNA, 19 nt, Artificial Sequence
  Description of Artificial Sequence: Synthetic oligonucleotide
gagucaauacucugguucc

SEQ ID NO: 2902495 - RNA, 19 nt, Artificial Sequence
  Description of Artificial Sequence: Synthetic oligonucleotide
uccagcucggccucgacgg

SEQ ID NO: 2902496 - RNA, 19 nt, Artificial Sequence
  Description of Artificial Sequence: Synthetic oligonucleotide
uggauguagaucucggcgc

SEQ ID NO: 2902497 - RNA, 19 nt, Artificial Sequence
  Description of Artificial Sequence: Synthetic oligonucleotide
aagaagaaggaagaagcga

SEQ ID NO: 2902498 - RNA, 19 nt, Artificial Sequence
  Description of Artificial Sequence: Synthetic oligonucleotide
uagaucucggcgcaggcgc

SEQ ID NO: 2902499 - RNA, 19 nt, Artificial Sequence
  Description of Artificial Sequence: Synthetic oligonucleotide
gaggguguacuccacgggg

SEQ ID NO: 2902500 - RNA, 19 nt, Artificial Sequence
  Description of Artificial Sequence: Synthetic oligonucleotide
augucauugggccuccggg

SEQ ID NO: 2902501 - RNA, 19 nt, Artificial Sequence
  Description of Artificial Sequence: Synthetic oligonucleotide
cuuaaaguccgucuucaug

SEQ ID NO: 2902502 - RNA, 19 nt, Artificial Sequence
  Description of Artificial Sequence: Synthetic oligonucleotide
ugucauugggccuccgggg

SEQ ID NO: 2902503 - RNA, 19 nt, Artificial Sequence
  Description of Artificial Sequence: Synthetic oligonucleotide
ucuucauguugacauaaau

SEQ ID NO: 2902504 - RNA, 19 nt, Artificial Sequence
  Description of Artificial Sequence: Synthetic oligonucleotide
ucaauacucugguuccuag

SEQ ID NO: 2902505 - RNA, 19 nt, Artificial Sequence
  Description of Artificial Sequence: Synthetic oligonucleotide
ugcucaggcacucggaaga

SEQ ID NO: 2902506 - RNA, 19 nt, Artificial Sequence
  Description of Artificial Sequence: Synthetic oligonucleotide
ucauguugacauaaauguc

SEQ ID NO: 2902507 - RNA, 19 nt, Artificial Sequence
  Description of Artificial Sequence: Synthetic oligonucleotide
caagcugggccuuaaaguc

SEQ ID NO: 2902508 - RNA, 19 nt, Artificial Sequence
  Description of Artificial Sequence: Synthetic oligonucleotide
ugcagggacccaaagcugc

SEQ ID NO: 2902509 - RNA, 19 nt, Artificial Sequence
  Description of Artificial Sequence: Synthetic oligonucleotide
uacucugguuccuagcuca

SEQ ID NO: 2902510 - RNA, 19 nt, Artificial Sequence
  Description of Artificial Sequence: Synthetic oligonucleotide
aagcugggccuuaaagucc

SEQ ID NO: 2902511 - RNA, 19 nt, Artificial Sequence
  Description of Artificial Sequence: Synthetic oligonucleotide
uccuagcucauccaccagc

SEQ ID NO: 2902512 - RNA, 19 nt, Artificial Sequence
  Description of Artificial Sequence: Synthetic oligonucleotide
accugcagggacccaaagc

SEQ ID NO: 2902513 - RNA, 19 nt, Artificial Sequence
  Description of Artificial Sequence: Synthetic oligonucleotide
aaaguccgucuucauguug

SEQ ID NO: 2902514 - RNA, 19 nt, Artificial Sequence
  Description of Artificial Sequence: Synthetic oligonucleotide
ugcugagugcuucucccgg

SEQ ID NO: 2902515 - RNA, 19 nt, Artificial Sequence
  Description of Artificial Sequence: Synthetic oligonucleotide
caugcugagugcuucuccc

SEQ ID NO: 2902516 - RNA, 19 nt, Artificial Sequence
  Description of Artificial Sequence: Synthetic oligonucleotide
gaaggaagaagcgauggga

SEQ ID NO: 2902517 - RNA, 19 nt, Artificial Sequence
  Description of Artificial Sequence: Synthetic oligonucleotide
acucggaagaagaaggaag

SEQ ID NO: 2902518 - RNA, 19 nt, Artificial Sequence
  Description of Artificial Sequence: Synthetic oligonucleotide
gauggcgcgguuaauggcc

SEQ ID NO: 2902519 - RNA, 19 nt, Artificial Sequence
  Description of Artificial Sequence: Synthetic oligonucleotide
agcagcuuuuggcagcggg

SEQ ID NO: 2902520 - RNA, 19 nt, Artificial Sequence
  Description of Artificial Sequence: Synthetic oligonucleotide
gcgguuaauggccagaccc

SEQ ID NO: 2902521 - RNA, 19 nt, Artificial Sequence
  Description of Artificial Sequence: Synthetic oligonucleotide
agaagaaggaagaagcgau

SEQ ID NO: 2902522 - RNA, 19 nt, Artificial Sequence
  Description of Artificial Sequence: Synthetic oligonucleotide
agcgaugggagcaggagcg

SEQ ID NO: 2902523 - RNA, 19 nt, Artificial Sequence
  Description of Artificial Sequence: Synthetic oligonucleotide
uaauggccagacccaagcc

SEQ ID NO: 2902524 - RNA, 19 nt, Artificial Sequence
  Description of Artificial Sequence: Synthetic oligonucleotide
auacucugguuccuagcuc

SEQ ID NO: 2902525 - RNA, 19 nt, Artificial Sequence
  Description of Artificial Sequence: Synthetic oligonucleotide
uguagaucucggcgcaggc

SEQ ID NO: 2902526 - RNA, 19 nt, Artificial Sequence
  Description of Artificial Sequence: Synthetic oligonucleotide
agggcgauguugauggcgc

SEQ ID NO: 2902527 - RNA, 19 nt, Artificial Sequence
  Description of Artificial Sequence: Synthetic oligonucleotide
gguguuggcagccaccugc

SEQ ID NO: 2902528 - RNA, 19 nt, Artificial Sequence
  Description of Artificial Sequence: Synthetic oligonucleotide
aaguccgucuucauguuga

SEQ ID NO: 2902529 - RNA, 19 nt, Artificial Sequence
  Description of Artificial Sequence: Synthetic oligonucleotide
caauacucugguuccuagc

SEQ ID NO: 2902530 - RNA, 19 nt, Artificial Sequence
  Description of Artificial Sequence: Synthetic oligonucleotide
ggcacucggaagaagaagg

SEQ ID NO: 2902531 - RNA, 19 nt, Artificial Sequence
  Description of Artificial Sequence: Synthetic oligonucleotide
guugauggcgcgguuaaug

SEQ ID NO: 2902532 - RNA, 19 nt, Artificial Sequence
  Description of Artificial Sequence: Synthetic oligonucleotide
gaagaaggaagaagcgaug

SEQ ID NO: 2902533 - RNA, 19 nt, Artificial Sequence
  Description of Artificial Sequence: Synthetic oligonucleotide
cucggaagaagaaggaaga

SEQ ID NO: 2902534 - RNA, 19 nt, Artificial Sequence
  Description of Artificial Sequence: Synthetic oligonucleotide
accagcuccacgguggagg

SEQ ID NO: 2902535 - RNA, 19 nt, Artificial Sequence
  Description of Artificial Sequence: Synthetic oligonucleotide
ugggccuuaaaguccgucu

SEQ ID NO: 2902536 - RNA, 19 nt, Artificial Sequence
  Description of Artificial Sequence: Synthetic oligonucleotide
gaagcgaugggagcaggag

SEQ ID NO: 2902537 - RNA, 19 nt, Artificial Sequence
  Description of Artificial Sequence: Synthetic oligonucleotide
gcuucucccggccacagcg

SEQ ID NO: 2902538 - RNA, 19 nt, Artificial Sequence
  Description of Artificial Sequence: Synthetic oligonucleotide
guuccuagcucauccacca

SEQ ID NO: 2902539 - RNA, 19 nt, Artificial Sequence
  Description of Artificial Sequence: Synthetic oligonucleotide
cuccacgggguccagcucg

SEQ ID NO: 2902540 - RNA, 19 nt, Artificial Sequence
  Description of Artificial Sequence: Synthetic oligonucleotide
agggacccaaagcugcccg

SEQ ID NO: 2902541 - RNA, 19 nt, Artificial Sequence
  Description of Artificial Sequence: Synthetic oligonucleotide
gacgccgcugcucaggcac

SEQ ID NO: 2902542 - RNA, 19 nt, Artificial Sequence
  Description of Artificial Sequence: Synthetic oligonucleotide
gaugggagcaggagcgccg

SEQ ID NO: 2902543 - RNA, 19 nt, Artificial Sequence
  Description of Artificial Sequence: Synthetic oligonucleotide
ugguuccuagcucauccac

SEQ ID NO: 2902544 - RNA, 19 nt, Artificial Sequence
  Description of Artificial Sequence: Synthetic oligonucleotide
uccagcagcuuuuggcagc

SEQ ID NO: 2902545 - RNA, 19 nt, Artificial Sequence
  Description of Artificial Sequence: Synthetic oligonucleotide
ugauggcgcgguuaauggc

SEQ ID NO: 2902546 - RNA, 19 nt, Artificial Sequence
  Description of Artificial Sequence: Synthetic oligonucleotide
agacccaagccguggaugu

SEQ ID NO: 2902547 - RNA, 19 nt, Artificial Sequence
  Description of Artificial Sequence: Synthetic oligonucleotide
acgguggagguguuggcag

SEQ ID NO: 2902548 - RNA, 19 nt, Artificial Sequence
  Description of Artificial Sequence: Synthetic oligonucleotide
gaagaagcgaugggagcag

SEQ ID NO: 2902549 - RNA, 19 nt, Artificial Sequence
  Description of Artificial Sequence: Synthetic oligonucleotide
aagaagcgaugggagcagg

SEQ ID NO: 2902550 - RNA, 19 nt, Artificial Sequence
  Description of Artificial Sequence: Synthetic oligonucleotide
aguccgucuucauguugac

SEQ ID NO: 2902551 - RNA, 19 nt, Artificial Sequence
  Description of Artificial Sequence: Synthetic oligonucleotide
auguagaucucggcgcagg

SEQ ID NO: 2902552 - RNA, 19 nt, Artificial Sequence
  Description of Artificial Sequence: Synthetic oligonucleotide
gucauugggccuccggggc

SEQ ID NO: 2902553 - RNA, 19 nt, Artificial Sequence
  Description of Artificial Sequence: Synthetic oligonucleotide
cuguucucggccaugcuga

SEQ ID NO: 2902554 - RNA, 19 nt, Artificial Sequence
  Description of Artificial Sequence: Synthetic oligonucleotide
guagaucucggcgcaggcg

SEQ ID NO: 2902555 - RNA, 19 nt, Artificial Sequence
  Description of Artificial Sequence: Synthetic oligonucleotide
agcugggccuuaaaguccg

SEQ ID NO: 2902556 - RNA, 19 nt, Artificial Sequence
  Description of Artificial Sequence: Synthetic oligonucleotide
uuccggaggguguacucca

SEQ ID NO: 2902557 - RNA, 19 nt, Artificial Sequence
  Description of Artificial Sequence: Synthetic oligonucleotide
uucucccggccacagcgcc

SEQ ID NO: 2902558 - RNA, 19 nt, Artificial Sequence
  Description of Artificial Sequence: Synthetic oligonucleotide
auguugauggcgcgguuaa

SEQ ID NO: 2902559 - RNA, 19 nt, Artificial Sequence
  Description of Artificial Sequence: Synthetic oligonucleotide
uaaaugucauugggccucc

SEQ ID NO: 2902560 - RNA, 19 nt, Artificial Sequence
  Description of Artificial Sequence: Synthetic oligonucleotide
ggaagucgcuuccggaggg

SEQ ID NO: 2902561 - RNA, 19 nt, Artificial Sequence
  Description of Artificial Sequence: Synthetic oligonucleotide
uccguccagcagcuuuugg

SEQ ID NO: 2902562 - RNA, 19 nt, Artificial Sequence
  Description of Artificial Sequence: Synthetic oligonucleotide
ggggaagucgcuuccggag

SEQ ID NO: 2902563 - RNA, 19 nt, Artificial Sequence
  Description of Artificial Sequence: Synthetic oligonucleotide
guggggaagucgcuuccgg

SEQ ID NO: 2902564 - RNA, 19 nt, Artificial Sequence
  Description of Artificial Sequence: Synthetic oligonucleotide
cugagugcuucucccggcc

SEQ ID NO: 2902565 - RNA, 19 nt, Artificial Sequence
  Description of Artificial Sequence: Synthetic oligonucleotide
agcuccacgguggaggugu

SEQ ID NO: 2902566 - RNA, 19 nt, Artificial Sequence
  Description of Artificial Sequence: Synthetic oligonucleotide
uguucucggccaugcugag

SEQ ID NO: 2902567 - RNA, 19 nt, Artificial Sequence
  Description of Artificial Sequence: Synthetic oligonucleotide
uuccuagcucauccaccag

SEQ ID NO: 2902568 - RNA, 19 nt, Artificial Sequence
  Description of Artificial Sequence: Synthetic oligonucleotide
guuaauggccagacccaag

SEQ ID NO: 2902569 - RNA, 19 nt, Artificial Sequence
  Description of Artificial Sequence: Synthetic oligonucleotide
uggggaagucgcuuccgga

SEQ ID NO: 2902570 - RNA, 19 nt, Artificial Sequence
  Description of Artificial Sequence: Synthetic oligonucleotide
gggaagucgcuuccggagg

SEQ ID NO: 2902571 - RNA, 19 nt, Artificial Sequence
  Description of Artificial Sequence: Synthetic oligonucleotide
aagcugcccgccugcagcu

SEQ ID NO: 2902572 - RNA, 19 nt, Artificial Sequence
  Description of Artificial Sequence: Synthetic oligonucleotide
caagccguggauguagauc

SEQ ID NO: 2902573 - RNA, 19 nt, Artificial Sequence
  Description of Artificial Sequence: Synthetic oligonucleotide
uccacgggguccagcucgg

SEQ ID NO: 2902574 - RNA, 19 nt, Artificial Sequence
  Description of Artificial Sequence: Synthetic oligonucleotide
cuuccggaggguguacucc

SEQ ID NO: 2902575 - RNA, 19 nt, Artificial Sequence
  Description of Artificial Sequence: Synthetic oligonucleotide
guccagcucggccucgacg

SEQ ID NO: 2902576 - RNA, 19 nt, Artificial Sequence
  Description of Artificial Sequence: Synthetic oligonucleotide
cagggcgauguugauggcg

SEQ ID NO: 2902577 - RNA, 19 nt, Artificial Sequence
  Description of Artificial Sequence: Synthetic oligonucleotide
gauguagaucucggcgcag

SEQ ID NO: 2902578 - RNA, 19 nt, Artificial Sequence
  Description of Artificial Sequence: Synthetic oligonucleotide
aggcacucggaagaagaag

SEQ ID NO: 2902579 - RNA, 19 nt, Artificial Sequence
  Description of Artificial Sequence: Synthetic oligonucleotide
uaaaguccgucuucauguu

SEQ ID NO: 2902580 - RNA, 19 nt, Artificial Sequence
  Description of Artificial Sequence: Synthetic oligonucleotide
cuuuuggcagcgggcaagc

SEQ ID NO: 2902581 - RNA, 19 nt, Artificial Sequence
  Description of Artificial Sequence: Synthetic oligonucleotide
uguuggcagccaccugcag

SEQ ID NO: 2902582 - RNA, 19 nt, Artificial Sequence
  Description of Artificial Sequence: Synthetic oligonucleotide
uggagguguuggcagccac

SEQ ID NO: 2902583 - RNA, 19 nt, Artificial Sequence
  Description of Artificial Sequence: Synthetic oligonucleotide
cugcucaggcacucggaag

SEQ ID NO: 2902584 - RNA, 19 nt, Artificial Sequence
  Description of Artificial Sequence: Synthetic oligonucleotide
auguugacauaaaugucau

SEQ ID NO: 2902585 - RNA, 19 nt, Artificial Sequence
  Description of Artificial Sequence: Synthetic oligonucleotide
uucgcucgcgagcgccucg

SEQ ID NO: 2902586 - RNA, 19 nt, Artificial Sequence
  Description of Artificial Sequence: Synthetic oligonucleotide
ucggaagaagaaggaagaa

SEQ ID NO: 2902587 - RNA, 19 nt, Artificial Sequence
  Description of Artificial Sequence: Synthetic oligonucleotide
aaaugucauugggccuccg

SEQ ID NO: 2902588 - RNA, 19 nt, Artificial Sequence
  Description of Artificial Sequence: Synthetic oligonucleotide
ggaggguguacuccacggg

SEQ ID NO: 2902589 - RNA, 19 nt, Artificial Sequence
  Description of Artificial Sequence: Synthetic oligonucleotide
aagucgcuuccggagggug

SEQ ID NO: 2902590 - RNA, 19 nt, Artificial Sequence
  Description of Artificial Sequence: Synthetic oligonucleotide
acccaagccguggauguag

SEQ ID NO: 2902591 - RNA, 19 nt, Artificial Sequence
  Description of Artificial Sequence: Synthetic oligonucleotide
cauaaaugucauugggccu

SEQ ID NO: 2902592 - RNA, 19 nt, Artificial Sequence
  Description of Artificial Sequence: Synthetic oligonucleotide
uguugacauaaaugucauu

SEQ ID NO: 2902593 - RNA, 19 nt, Artificial Sequence
  Description of Artificial Sequence: Synthetic oligonucleotide
cugcagggacccaaagcug

SEQ ID NO: 2902594 - RNA, 19 nt, Artificial Sequence
  Description of Artificial Sequence: Synthetic oligonucleotide
gauguugauggcgcgguua

SEQ ID NO: 2902595 - RNA, 19 nt, Artificial Sequence
  Description of Artificial Sequence: Synthetic oligonucleotide
auggccagacccaagccgu

SEQ ID NO: 2902596 - RNA, 19 nt, Artificial Sequence
  Description of Artificial Sequence: Synthetic oligonucleotide
ccguccagcagcuuuuggc

SEQ ID NO: 2902597 - RNA, 19 nt, Artificial Sequence
  Description of Artificial Sequence: Synthetic oligonucleotide
gcagcgggcaagcugggcc

SEQ ID NO: 2902598 - RNA, 19 nt, Artificial Sequence
  Description of Artificial Sequence: Synthetic oligonucleotide
acccaaagcugcccgccug

SEQ ID NO: 2902599 - RNA, 19 nt, Artificial Sequence
  Description of Artificial Sequence: Synthetic oligonucleotide
ucccuguucucggccaugc

SEQ ID NO: 2902600 - RNA, 19 nt, Artificial Sequence
  Description of Artificial Sequence: Synthetic oligonucleotide
cuucucccggccacagcgc

SEQ ID NO: 2902601 - RNA, 19 nt, Artificial Sequence
  Description of Artificial Sequence: Synthetic oligonucleotide
gguuccuagcucauccacc

SEQ ID NO: 2902602 - RNA, 19 nt, Artificial Sequence
  Description of Artificial Sequence: Synthetic oligonucleotide
caaagcugcccgccugcag

SEQ ID NO: 2902603 - RNA, 19 nt, Artificial Sequence
  Description of Artificial Sequence: Synthetic oligonucleotide
agucaauacucugguuccu

SEQ ID NO: 2902604 - RNA, 19 nt, Artificial Sequence
  Description of Artificial Sequence: Synthetic oligonucleotide
ggauguagaucucggcgca

SEQ ID NO: 2902605 - RNA, 19 nt, Artificial Sequence
  Description of Artificial Sequence: Synthetic oligonucleotide
agcucauccaccagcucca

SEQ ID NO: 2902606 - RNA, 19 nt, Artificial Sequence
  Description of Artificial Sequence: Synthetic oligonucleotide
agcugcagggcgauguuga

SEQ ID NO: 2902607 - RNA, 19 nt, Artificial Sequence
  Description of Artificial Sequence: Synthetic oligonucleotide
cacgggguccagcucggcc

SEQ ID NO: 2902608 - RNA, 19 nt, Artificial Sequence
  Description of Artificial Sequence: Synthetic oligonucleotide
ccuguucucggccaugcug

SEQ ID NO: 2902609 - RNA, 19 nt, Artificial Sequence
  Description of Artificial Sequence: Synthetic oligonucleotide
ucucccggccacagcgccc

SEQ ID NO: 2902610 - RNA, 19 nt, Artificial Sequence
  Description of Artificial Sequence: Synthetic oligonucleotide
agcucggccucgacggcgc

SEQ ID NO: 2902611 - RNA, 19 nt, Artificial Sequence
  Description of Artificial Sequence: Synthetic oligonucleotide
uggccagacccaagccgug

SEQ ID NO: 2902612 - RNA, 19 nt, Artificial Sequence
  Description of Artificial Sequence: Synthetic oligonucleotide
ucucggccaugcugagugc

SEQ ID NO: 2902613 - RNA, 19 nt, Artificial Sequence
  Description of Artificial Sequence: Synthetic oligonucleotide
gcuuuuggcagcgggcaag

SEQ ID NO: 2902614 - RNA, 19 nt, Artificial Sequence
  Description of Artificial Sequence: Synthetic oligonucleotide
uccggaggguguacuccac

SEQ ID NO: 2902615 - RNA, 19 nt, Artificial Sequence
  Description of Artificial Sequence: Synthetic oligonucleotide
cucgcgagcgccucgccga

SEQ ID NO: 2902616 - RNA, 19 nt, Artificial Sequence
  Description of Artificial Sequence: Synthetic oligonucleotide
ccguggauguagaucucgg

SEQ ID NO: 2902617 - RNA, 19 nt, Artificial Sequence
  Description of Artificial Sequence: Synthetic oligonucleotide
ggcgauguugauggcgcgg

SEQ ID NO: 2902618 - RNA, 19 nt, Artificial Sequence
  Description of Artificial Sequence: Synthetic oligonucleotide
agaagcgaugggagcagga

SEQ ID NO: 2902619 - RNA, 19 nt, Artificial Sequence
  Description of Artificial Sequence: Synthetic oligonucleotide
ucggccucgacggcgccgc

SEQ ID NO: 2902620 - RNA, 19 nt, Artificial Sequence
  Description of Artificial Sequence: Synthetic oligonucleotide
cauugggccuccggggcag

SEQ ID NO: 2902621 - RNA, 19 nt, Artificial Sequence
  Description of Artificial Sequence: Synthetic oligonucleotide
gccguggauguagaucucg

SEQ ID NO: 2902622 - RNA, 19 nt, Artificial Sequence
  Description of Artificial Sequence: Synthetic oligonucleotide
agcuuuuggcagcgggcaa

SEQ ID NO: 2902623 - RNA, 19 nt, Artificial Sequence
  Description of Artificial Sequence: Synthetic oligonucleotide
ugggccuccggggcaggcg

SEQ ID NO: 2902624 - RNA, 19 nt, Artificial Sequence
  Description of Artificial Sequence: Synthetic oligonucleotide
uggcagcgggcaagcuggg

SEQ ID NO: 2902625 - RNA, 19 nt, Artificial Sequence
  Description of Artificial Sequence: Synthetic oligonucleotide
aggguguacuccacggggu

SEQ ID NO: 2902626 - RNA, 19 nt, Artificial Sequence
  Description of Artificial Sequence: Synthetic oligonucleotide
agcgcccuucgcucgcgag

SEQ ID NO: 2902627 - RNA, 19 nt, Artificial Sequence
  Description of Artificial Sequence: Synthetic oligonucleotide
cuccccgggacgccgcugc

SEQ ID NO: 2902628 - RNA, 19 nt, Artificial Sequence
  Description of Artificial Sequence: Synthetic oligonucleotide
ucgacggcgccgcggggcu

SEQ ID NO: 2902629 - RNA, 19 nt, Artificial Sequence
  Description of Artificial Sequence: Synthetic oligonucleotide
cugguuccuagcucaucca

SEQ ID NO: 2902630 - RNA, 19 nt, Artificial Sequence
  Description of Artificial Sequence: Synthetic oligonucleotide
ccaugcugagugcuucucc

SEQ ID NO: 2902631 - RNA, 19 nt, Artificial Sequence
  Description of Artificial Sequence: Synthetic oligonucleotide
gagguguuggcagccaccu

SEQ ID NO: 2902632 - RNA, 19 nt, Artificial Sequence
  Description of Artificial Sequence: Synthetic oligonucleotide
cagcuuuuggcagcgggca

SEQ ID NO: 2902633 - RNA, 19 nt, Artificial Sequence
  Description of Artificial Sequence: Synthetic oligonucleotide
gcagcuuuuggcagcgggc

SEQ ID NO: 2902634 - RNA, 19 nt, Artificial Sequence
  Description of Artificial Sequence: Synthetic oligonucleotide
cucgacggcgccgcggggc

SEQ ID NO: 2902635 - RNA, 19 nt, Artificial Sequence
  Description of Artificial Sequence: Synthetic oligonucleotide
cugcagggcgauguugaug

SEQ ID NO: 2902636 - RNA, 19 nt, Artificial Sequence
  Description of Artificial Sequence: Synthetic oligonucleotide
gcugagugcuucucccggc

SEQ ID NO: 2902637 - RNA, 19 nt, Artificial Sequence
  Description of Artificial Sequence: Synthetic oligonucleotide
gcgagcgccucgccgaccg

SEQ ID NO: 2902638 - RNA, 19 nt, Artificial Sequence
  Description of Artificial Sequence: Synthetic oligonucleotide
ccugcagggacccaaagcu

SEQ ID NO: 2902639 - RNA, 19 nt, Artificial Sequence
  Description of Artificial Sequence: Synthetic oligonucleotide
ucggccaugcugagugcuu

SEQ ID NO: 2902640 - RNA, 19 nt, Artificial Sequence
  Description of Artificial Sequence: Synthetic oligonucleotide
gguguacuccacggggucc

SEQ ID NO: 2902641 - RNA, 19 nt, Artificial Sequence
  Description of Artificial Sequence: Synthetic oligonucleotide
agugcuucucccggccaca

SEQ ID NO: 2902642 - RNA, 19 nt, Artificial Sequence
  Description of Artificial Sequence: Synthetic oligonucleotide
uuuuggcagcgggcaagcu

SEQ ID NO: 2902643 - RNA, 19 nt, Artificial Sequence
  Description of Artificial Sequence: Synthetic oligonucleotide
cacagcgcccuucgcucgc

SEQ ID NO: 2902644 - RNA, 19 nt, Artificial Sequence
  Description of Artificial Sequence: Synthetic oligonucleotide
gguggagguguuggcagcc

SEQ ID NO: 2902645 - RNA, 19 nt, Artificial Sequence
  Description of Artificial Sequence: Synthetic oligonucleotide
caccugcagggacccaaag

SEQ ID NO: 2902646 - RNA, 19 nt, Artificial Sequence
  Description of Artificial Sequence: Synthetic oligonucleotide
gguggggaagucgcuuccg

SEQ ID NO: 2902647 - RNA, 19 nt, Artificial Sequence
  Description of Artificial Sequence: Synthetic oligonucleotide
cagggacccaaagcugccc

SEQ ID NO: 2902648 - RNA, 19 nt, Artificial Sequence
  Description of Artificial Sequence: Synthetic oligonucleotide
uccggggcaggcggugggg

SEQ ID NO: 2902649 - RNA, 19 nt, Artificial Sequence
  Description of Artificial Sequence: Synthetic oligonucleotide
cagcucggccucgacggcg

SEQ ID NO: 2902650 - RNA, 19 nt, Artificial Sequence
  Description of Artificial Sequence: Synthetic oligonucleotide
caggcacucggaagaagaa

SEQ ID NO: 2902651 - RNA, 19 nt, Artificial Sequence
  Description of Artificial Sequence: Synthetic oligonucleotide
uggcgcgguuaauggccag

SEQ ID NO: 2902652 - RNA, 19 nt, Artificial Sequence
  Description of Artificial Sequence: Synthetic oligonucleotide
cggaggguguacuccacgg

SEQ ID NO: 2902653 - RNA, 19 nt, Artificial Sequence
  Description of Artificial Sequence: Synthetic oligonucleotide
ggagguguuggcagccacc

SEQ ID NO: 2902654 - RNA, 19 nt, Artificial Sequence
  Description of Artificial Sequence: Synthetic oligonucleotide
gucaauacucugguuccua

SEQ ID NO: 2902655 - RNA, 19 nt, Artificial Sequence
  Description of Artificial Sequence: Synthetic oligonucleotide
guguacuccacggggucca

SEQ ID NO: 2902656 - RNA, 19 nt, Artificial Sequence
  Description of Artificial Sequence: Synthetic oligonucleotide
cacucggaagaagaaggaa

SEQ ID NO: 2902657 - RNA, 19 nt, Artificial Sequence
  Description of Artificial Sequence: Synthetic oligonucleotide
gccucgacggcgccgcggg

SEQ ID NO: 2902658 - RNA, 19 nt, Artificial Sequence
  Description of Artificial Sequence: Synthetic oligonucleotide
cuccggggcaggcgguggg

SEQ ID NO: 2902659 - RNA, 19 nt, Artificial Sequence
  Description of Artificial Sequence: Synthetic oligonucleotide
gccacagcgcccuucgcuc

SEQ ID NO: 2902660 - RNA, 19 nt, Artificial Sequence
  Description of Artificial Sequence: Synthetic oligonucleotide
gcucgcgagcgccucgccg

SEQ ID NO: 2902661 - RNA, 19 nt, Artificial Sequence
  Description of Artificial Sequence: Synthetic oligonucleotide
ggacccaaagcugcccgcc

SEQ ID NO: 2902662 - RNA, 19 nt, Artificial Sequence
  Description of Artificial Sequence: Synthetic oligonucleotide
uguugauggcgcgguuaau

SEQ ID NO: 2902663 - RNA, 19 nt, Artificial Sequence
  Description of Artificial Sequence: Synthetic oligonucleotide
agucgcuuccggagggugu

SEQ ID NO: 2902664 - RNA, 19 nt, Artificial Sequence
  Description of Artificial Sequence: Synthetic oligonucleotide
gggccuccggggcaggcgg

SEQ ID NO: 2902665 - RNA, 19 nt, Artificial Sequence
  Description of Artificial Sequence: Synthetic oligonucleotide
accgcuccccgggacgccg

SEQ ID NO: 2902666 - RNA, 19 nt, Artificial Sequence
  Description of Artificial Sequence: Synthetic oligonucleotide
cacgguggagguguuggca

SEQ ID NO: 2902667 - RNA, 19 nt, Artificial Sequence
  Description of Artificial Sequence: Synthetic oligonucleotide
gguuaauggccagacccaa

SEQ ID NO: 2902668 - RNA, 19 nt, Artificial Sequence
  Description of Artificial Sequence: Synthetic oligonucleotide
ccagcagcuuuuggcagcg

SEQ ID NO: 2902669 - RNA, 19 nt, Artificial Sequence
  Description of Artificial Sequence: Synthetic oligonucleotide
cugggccuuaaaguccguc

SEQ ID NO: 2902670 - RNA, 19 nt, Artificial Sequence
  Description of Artificial Sequence: Synthetic oligonucleotide
gggcgauguugauggcgcg

SEQ ID NO: 2902671 - RNA, 19 nt, Artificial Sequence
  Description of Artificial Sequence: Synthetic oligonucleotide
gucuucauguugacauaaa

SEQ ID NO: 2902672 - RNA, 19 nt, Artificial Sequence
  Description of Artificial Sequence: Synthetic oligonucleotide
acagcgcccuucgcucgcg

SEQ ID NO: 2902673 - RNA, 19 nt, Artificial Sequence
  Description of Artificial Sequence: Synthetic oligonucleotide
ggguguacuccacgggguc

SEQ ID NO: 2902674 - RNA, 19 nt, Artificial Sequence
  Description of Artificial Sequence: Synthetic oligonucleotide
gggacccaaagcugcccgc

SEQ ID NO: 2902675 - RNA, 19 nt, Artificial Sequence
  Description of Artificial Sequence: Synthetic oligonucleotide
gacggcgccgcggggcucc

SEQ ID NO: 2902676 - RNA, 19 nt, Artificial Sequence
  Description of Artificial Sequence: Synthetic oligonucleotide
gcaggcgguggggaagucg

SEQ ID NO: 2902677 - RNA, 19 nt, Artificial Sequence
  Description of Artificial Sequence: Synthetic oligonucleotide
cccaaagcugcccgccugc

SEQ ID NO: 2902678 - RNA, 19 nt, Artificial Sequence
  Description of Artificial Sequence: Synthetic oligonucleotide
ucgcucgcgagcgccucgc

SEQ ID NO: 2902679 - RNA, 19 nt, Artificial Sequence
  Description of Artificial Sequence: Synthetic oligonucleotide
gcugcucaggcacucggaa

SEQ ID NO: 2902680 - RNA, 19 nt, Artificial Sequence
  Description of Artificial Sequence: Synthetic oligonucleotide
auggcgcgguuaauggcca

SEQ ID NO: 2902681 - RNA, 19 nt, Artificial Sequence
  Description of Artificial Sequence: Synthetic oligonucleotide
cagcugcagggcgauguug

SEQ ID NO: 2902682 - RNA, 19 nt, Artificial Sequence
  Description of Artificial Sequence: Synthetic oligonucleotide
guguuggcagccaccugca

SEQ ID NO: 2902683 - RNA, 19 nt, Artificial Sequence
  Description of Artificial Sequence: Synthetic oligonucleotide
gugcuucucccggccacag

SEQ ID NO: 2902684 - RNA, 19 nt, Artificial Sequence
  Description of Artificial Sequence: Synthetic oligonucleotide
gggacgccgcugcucaggc

SEQ ID NO: 2902685 - RNA, 19 nt, Artificial Sequence
  Description of Artificial Sequence: Synthetic oligonucleotide
cucugguuccuagcucauc

SEQ ID NO: 2902686 - RNA, 19 nt, Artificial Sequence
  Description of Artificial Sequence: Synthetic oligonucleotide
cucggcgcaggcgcucugc

SEQ ID NO: 2902687 - RNA, 19 nt, Artificial Sequence
  Description of Artificial Sequence: Synthetic oligonucleotide
ggccagacccaagccgugg

SEQ ID NO: 2902688 - RNA, 19 nt, Artificial Sequence
  Description of Artificial Sequence: Synthetic oligonucleotide
cguccagcagcuuuuggca

SEQ ID NO: 2902689 - RNA, 19 nt, Artificial Sequence
  Description of Artificial Sequence: Synthetic oligonucleotide
gaucucggcgcaggcgcuc

SEQ ID NO: 2902690 - RNA, 19 nt, Artificial Sequence
  Description of Artificial Sequence: Synthetic oligonucleotide
agccguggauguagaucuc

SEQ ID NO: 2902691 - RNA, 19 nt, Artificial Sequence
  Description of Artificial Sequence: Synthetic oligonucleotide
cucggccucgacggcgccg

SEQ ID NO: 2902692 - RNA, 19 nt, Artificial Sequence
  Description of Artificial Sequence: Synthetic oligonucleotide
ccggaggguguacuccacg

SEQ ID NO: 2902693 - RNA, 19 nt, Artificial Sequence
  Description of Artificial Sequence: Synthetic oligonucleotide
gcugcccgccugcagcugc

SEQ ID NO: 2902694 - RNA, 19 nt, Artificial Sequence
  Description of Artificial Sequence: Synthetic oligonucleotide
ccacagcgcccuucgcucg

SEQ ID NO: 2902695 - RNA, 19 nt, Artificial Sequence
  Description of Artificial Sequence: Synthetic oligonucleotide
gacccaaagcugcccgccu

SEQ ID NO: 2902696 - RNA, 19 nt, Artificial Sequence
  Description of Artificial Sequence: Synthetic oligonucleotide
gcuuccggaggguguacuc

SEQ ID NO: 2902697 - RNA, 19 nt, Artificial Sequence
  Description of Artificial Sequence: Synthetic oligonucleotide
guacuccacgggguccagc

SEQ ID NO: 2902698 - RNA, 19 nt, Artificial Sequence
  Description of Artificial Sequence: Synthetic oligonucleotide
agcgccucgccgaccgcuc

SEQ ID NO: 2902699 - RNA, 19 nt, Artificial Sequence
  Description of Artificial Sequence: Synthetic oligonucleotide
ccggccacagcgcccuucg

SEQ ID NO: 2902700 - RNA, 19 nt, Artificial Sequence
  Description of Artificial Sequence: Synthetic oligonucleotide
agaucucggcgcaggcgcu

SEQ ID NO: 2902701 - RNA, 19 nt, Artificial Sequence
  Description of Artificial Sequence: Synthetic oligonucleotide
guccgucuucauguugaca

SEQ ID NO: 2902702 - RNA, 19 nt, Artificial Sequence
  Description of Artificial Sequence: Synthetic oligonucleotide
aucucggcgcaggcgcucu

SEQ ID NO: 2902703 - RNA, 19 nt, Artificial Sequence
  Description of Artificial Sequence: Synthetic oligonucleotide
uugggccuccggggcaggc

SEQ ID NO: 2902704 - RNA, 19 nt, Artificial Sequence
  Description of Artificial Sequence: Synthetic oligonucleotide
gcacucggaagaagaagga

SEQ ID NO: 2902705 - RNA, 19 nt, Artificial Sequence
  Description of Artificial Sequence: Synthetic oligonucleotide
gcagggacccaaagcugcc

SEQ ID NO: 2902706 - RNA, 19 nt, Artificial Sequence
  Description of Artificial Sequence: Synthetic oligonucleotide
gcgcccuucgcucgcgagc

SEQ ID NO: 2902707 - RNA, 19 nt, Artificial Sequence
  Description of Artificial Sequence: Synthetic oligonucleotide
ccuagcucauccaccagcu

SEQ ID NO: 2902708 - RNA, 19 nt, Artificial Sequence
  Description of Artificial Sequence: Synthetic oligonucleotide
gggcucccuguucucggcc

SEQ ID NO: 2902709 - RNA, 19 nt, Artificial Sequence
  Description of Artificial Sequence: Synthetic oligonucleotide
cuccguccagcagcuuuug

SEQ ID NO: 2902710 - RNA, 19 nt, Artificial Sequence
  Description of Artificial Sequence: Synthetic oligonucleotide
ggggcucccuguucucggc

SEQ ID NO: 2902711 - RNA, 19 nt, Artificial Sequence
  Description of Artificial Sequence: Synthetic oligonucleotide
ggcucccuguucucggcca

SEQ ID NO: 2902712 - RNA, 19 nt, Artificial Sequence
  Description of Artificial Sequence: Synthetic oligonucleotide
ccgcugcucaggcacucgg

SEQ ID NO: 2902713 - RNA, 19 nt, Artificial Sequence
  Description of Artificial Sequence: Synthetic oligonucleotide
gcgguggggaagucgcuuc

SEQ ID NO: 2902714 - RNA, 19 nt, Artificial Sequence
  Description of Artificial Sequence: Synthetic oligonucleotide
cucccuguucucggccaug

SEQ ID NO: 2902715 - RNA, 19 nt, Artificial Sequence
  Description of Artificial Sequence: Synthetic oligonucleotide
acucugguuccuagcucau

SEQ ID NO: 2902716 - RNA, 19 nt, Artificial Sequence
  Description of Artificial Sequence: Synthetic oligonucleotide
cuucgcucgcgagcgccuc

SEQ ID NO: 2902717 - RNA, 19 nt, Artificial Sequence
  Description of Artificial Sequence: Synthetic oligonucleotide
gucgcuuccggagggugua

SEQ ID NO: 2902718 - RNA, 19 nt, Artificial Sequence
  Description of Artificial Sequence: Synthetic oligonucleotide
ccgaccgcuccccgggacg

SEQ ID NO: 2902719 - RNA, 19 nt, Artificial Sequence
  Description of Artificial Sequence: Synthetic oligonucleotide
cgguuaauggccagaccca

SEQ ID NO: 2902720 - RNA, 19 nt, Artificial Sequence
  Description of Artificial Sequence: Synthetic oligonucleotide
guggagguguuggcagcca

SEQ ID NO: 2902721 - RNA, 19 nt, Artificial Sequence
  Description of Artificial Sequence: Synthetic oligonucleotide
gccagacccaagccgugga

SEQ ID NO: 2902722 - RNA, 19 nt, Artificial Sequence
  Description of Artificial Sequence: Synthetic oligonucleotide
gaagucgcuuccggagggu

SEQ ID NO: 2902723 - RNA, 19 nt, Artificial Sequence
  Description of Artificial Sequence: Synthetic oligonucleotide
ucgcuuccggaggguguac

SEQ ID NO: 2902724 - RNA, 19 nt, Artificial Sequence
  Description of Artificial Sequence: Synthetic oligonucleotide
uccccgggacgccgcugcu

SEQ ID NO: 2902725 - RNA, 19 nt, Artificial Sequence
  Description of Artificial Sequence: Synthetic oligonucleotide
gcgcgguuaauggccagac

SEQ ID NO: 2902726 - RNA, 19 nt, Artificial Sequence
  Description of Artificial Sequence: Synthetic oligonucleotide
cuccacgguggagguguug

SEQ ID NO: 2902727 - RNA, 19 nt, Artificial Sequence
  Description of Artificial Sequence: Synthetic oligonucleotide
ggccacagcgcccuucgcu

SEQ ID NO: 2902728 - RNA, 19 nt, Artificial Sequence
  Description of Artificial Sequence: Synthetic oligonucleotide
caccagcuccacgguggag

SEQ ID NO: 2902729 - RNA, 19 nt, Artificial Sequence
  Description of Artificial Sequence: Synthetic oligonucleotide
cgcccuucgcucgcgagcg

SEQ ID NO: 2902730 - RNA, 19 nt, Artificial Sequence
  Description of Artificial Sequence: Synthetic oligonucleotide
cagcgggcaagcugggccu

SEQ ID NO: 2902731 - RNA, 19 nt, Artificial Sequence
  Description of Artificial Sequence: Synthetic oligonucleotide
cccuucgcucgcgagcgcc

SEQ ID NO: 2902732 - RNA, 19 nt, Artificial Sequence
  Description of Artificial Sequence: Synthetic oligonucleotide
cagcagcuuuuggcagcgg

SEQ ID NO: 2902733 - RNA, 19 nt, Artificial Sequence
  Description of Artificial Sequence: Synthetic oligonucleotide
gggccuuaaaguccgucuu

SEQ ID NO: 2902734 - RNA, 19 nt, Artificial Sequence
  Description of Artificial Sequence: Synthetic oligonucleotide
ggcgccgcggggcucccug

SEQ ID NO: 2902735 - RNA, 19 nt, Artificial Sequence
  Description of Artificial Sequence: Synthetic oligonucleotide
cgaugggagcaggagcgcc

SEQ ID NO: 2902736 - RNA, 19 nt, Artificial Sequence
  Description of Artificial Sequence: Synthetic oligonucleotide
gaccgcuccccgggacgcc

SEQ ID NO: 2902737 - RNA, 19 nt, Artificial Sequence
  Description of Artificial Sequence: Synthetic oligonucleotide
gcagggcgauguugauggc

SEQ ID NO: 2902738 - RNA, 19 nt, Artificial Sequence
  Description of Artificial Sequence: Synthetic oligonucleotide
gacccaagccguggaugua

SEQ ID NO: 2902739 - RNA, 19 nt, Artificial Sequence
  Description of Artificial Sequence: Synthetic oligonucleotide
ggcgcgguuaauggccaga

SEQ ID NO: 2902740 - RNA, 19 nt, Artificial Sequence
  Description of Artificial Sequence: Synthetic oligonucleotide
cucggccaugcugagugcu

SEQ ID NO: 2902741 - RNA, 19 nt, Artificial Sequence
  Description of Artificial Sequence: Synthetic oligonucleotide
cgucuucauguugacauaa

SEQ ID NO: 2902742 - RNA, 19 nt, Artificial Sequence
  Description of Artificial Sequence: Synthetic oligonucleotide
cugccuccguccagcagcu

SEQ ID NO: 2902743 - RNA, 19 nt, Artificial Sequence
  Description of Artificial Sequence: Synthetic oligonucleotide
ggccucgacggcgccgcgg

SEQ ID NO: 2902744 - RNA, 19 nt, Artificial Sequence
  Description of Artificial Sequence: Synthetic oligonucleotide
gcgaugggagcaggagcgc

SEQ ID NO: 2902745 - RNA, 19 nt, Artificial Sequence
  Description of Artificial Sequence: Synthetic oligonucleotide
gccgcugcucaggcacucg

SEQ ID NO: 2902746 - RNA, 19 nt, Artificial Sequence
  Description of Artificial Sequence: Synthetic oligonucleotide
agcugcccgccugcagcug

SEQ ID NO: 2902747 - RNA, 19 nt, Artificial Sequence
  Description of Artificial Sequence: Synthetic oligonucleotide
cugcccgccugcagcugca

SEQ ID NO: 2902748 - RNA, 19 nt, Artificial Sequence
  Description of Artificial Sequence: Synthetic oligonucleotide
gccaugcugagugcuucuc

SEQ ID NO: 2902749 - RNA, 19 nt, Artificial Sequence
  Description of Artificial Sequence: Synthetic oligonucleotide
gagcgccucgccgaccgcu

SEQ ID NO: 2902750 - RNA, 19 nt, Artificial Sequence
  Description of Artificial Sequence: Synthetic oligonucleotide
cgguggggaagucgcuucc

SEQ ID NO: 2902751 - RNA, 19 nt, Artificial Sequence
  Description of Artificial Sequence: Synthetic oligonucleotide
gguccagcucggccucgac

SEQ ID NO: 2902752 - RNA, 19 nt, Artificial Sequence
  Description of Artificial Sequence: Synthetic oligonucleotide
gccaccugcagggacccaa

SEQ ID NO: 2902753 - RNA, 19 nt, Artificial Sequence
  Description of Artificial Sequence: Synthetic oligonucleotide
gcgauguugauggcgcggu

SEQ ID NO: 2902754 - RNA, 19 nt, Artificial Sequence
  Description of Artificial Sequence: Synthetic oligonucleotide
cagcuccacgguggaggug

SEQ ID NO: 2902755 - RNA, 19 nt, Artificial Sequence
  Description of Artificial Sequence: Synthetic oligonucleotide
ccgccugcagcugcagggc

SEQ ID NO: 2902756 - RNA, 19 nt, Artificial Sequence
  Description of Artificial Sequence: Synthetic oligonucleotide
cccgggacgccgcugcuca

SEQ ID NO: 2902757 - RNA, 19 nt, Artificial Sequence
  Description of Artificial Sequence: Synthetic oligonucleotide
aggcgguggggaagucgcu

SEQ ID NO: 2902758 - RNA, 19 nt, Artificial Sequence
  Description of Artificial Sequence: Synthetic oligonucleotide
cccaagccguggauguaga

SEQ ID NO: 2902759 - RNA, 19 nt, Artificial Sequence
  Description of Artificial Sequence: Synthetic oligonucleotide
guucucggccaugcugagu

SEQ ID NO: 2902760 - RNA, 19 nt, Artificial Sequence
  Description of Artificial Sequence: Synthetic oligonucleotide
cgccugcagcugcagggcg

SEQ ID NO: 2902761 - RNA, 19 nt, Artificial Sequence
  Description of Artificial Sequence: Synthetic oligonucleotide
gccgaccgcuccccgggac

SEQ ID NO: 2902762 - RNA, 19 nt, Artificial Sequence
  Description of Artificial Sequence: Synthetic oligonucleotide
gggguccagcucggccucg

SEQ ID NO: 2902763 - RNA, 19 nt, Artificial Sequence
  Description of Artificial Sequence: Synthetic oligonucleotide
acgccgcugcucaggcacu

SEQ ID NO: 2902764 - RNA, 19 nt, Artificial Sequence
  Description of Artificial Sequence: Synthetic oligonucleotide
gccuccguccagcagcuuu

SEQ ID NO: 2902765 - RNA, 19 nt, Artificial Sequence
  Description of Artificial Sequence: Synthetic oligonucleotide
agcgggcaagcugggccuu

SEQ ID NO: 2902766 - RNA, 19 nt, Artificial Sequence
  Description of Artificial Sequence: Synthetic oligonucleotide
ccgucuucauguugacaua

SEQ ID NO: 2902767 - RNA, 19 nt, Artificial Sequence
  Description of Artificial Sequence: Synthetic oligonucleotide
cucccggccacagcgcccu

SEQ ID NO: 2902768 - RNA, 19 nt, Artificial Sequence
  Description of Artificial Sequence: Synthetic oligonucleotide
gcgccucgccgaccgcucc

SEQ ID NO: 2902769 - RNA, 19 nt, Artificial Sequence
  Description of Artificial Sequence: Synthetic oligonucleotide
ccuccggggcaggcggugg

SEQ ID NO: 2902770 - RNA, 19 nt, Artificial Sequence
  Description of Artificial Sequence: Synthetic oligonucleotide
ggacgccgcugcucaggca

SEQ ID NO: 2902771 - RNA, 19 nt, Artificial Sequence
  Description of Artificial Sequence: Synthetic oligonucleotide
ccuuaaaguccgucuucau

SEQ ID NO: 2902772 - RNA, 19 nt, Artificial Sequence
  Description of Artificial Sequence: Synthetic oligonucleotide
cgggacgccgcugcucagg

SEQ ID NO: 2902773 - RNA, 19 nt, Artificial Sequence
  Description of Artificial Sequence: Synthetic oligonucleotide
cccugcugccuccguccag

SEQ ID NO: 2902774 - RNA, 19 nt, Artificial Sequence
  Description of Artificial Sequence: Synthetic oligonucleotide
ccucgccgaccgcuccccg

SEQ ID NO: 2902775 - RNA, 19 nt, Artificial Sequence
  Description of Artificial Sequence: Synthetic oligonucleotide
gccgcggggcucccuguuc

SEQ ID NO: 2902776 - RNA, 19 nt, Artificial Sequence
  Description of Artificial Sequence: Synthetic oligonucleotide
gggcaagcugggccuuaaa

SEQ ID NO: 2902777 - RNA, 19 nt, Artificial Sequence
  Description of Artificial Sequence: Synthetic oligonucleotide
ccaccugcagggacccaaa

SEQ ID NO: 2902778 - RNA, 19 nt, Artificial Sequence
  Description of Artificial Sequence: Synthetic oligonucleotide
agccaccugcagggaccca

SEQ ID NO: 2902779 - RNA, 19 nt, Artificial Sequence
  Description of Artificial Sequence: Synthetic oligonucleotide
cgaccgcuccccgggacgc

SEQ ID NO: 2902780 - RNA, 19 nt, Artificial Sequence
  Description of Artificial Sequence: Synthetic oligonucleotide
ccagcuccacgguggaggu

SEQ ID NO: 2902781 - RNA, 19 nt, Artificial Sequence
  Description of Artificial Sequence: Synthetic oligonucleotide
gcucggccucgacggcgcc

SEQ ID NO: 2902782 - RNA, 19 nt, Artificial Sequence
  Description of Artificial Sequence: Synthetic oligonucleotide
ccaaagcugcccgccugca

SEQ ID NO: 2902783 - RNA, 19 nt, Artificial Sequence
  Description of Artificial Sequence: Synthetic oligonucleotide
ccucgacggcgccgcgggg

SEQ ID NO: 2902784 - RNA, 19 nt, Artificial Sequence
  Description of Artificial Sequence: Synthetic oligonucleotide
gcugcagggcgauguugau

SEQ ID NO: 2902785 - RNA, 19 nt, Artificial Sequence
  Description of Artificial Sequence: Synthetic oligonucleotide
cagcgcccuucgcucgcga

SEQ ID NO: 2902786 - RNA, 19 nt, Artificial Sequence
  Description of Artificial Sequence: Synthetic oligonucleotide
gccuccggggcaggcggug

SEQ ID NO: 2902787 - RNA, 19 nt, Artificial Sequence
  Description of Artificial Sequence: Synthetic oligonucleotide
gcccuucgcucgcgagcgc

SEQ ID NO: 2902788 - RNA, 19 nt, Artificial Sequence
  Description of Artificial Sequence: Synthetic oligonucleotide
cgcugcucaggcacucgga

SEQ ID NO: 2902789 - RNA, 19 nt, Artificial Sequence
  Description of Artificial Sequence: Synthetic oligonucleotide
ccuccguccagcagcuuuu

SEQ ID NO: 2902790 - RNA, 19 nt, Artificial Sequence
  Description of Artificial Sequence: Synthetic oligonucleotide
ccgggacgccgcugcucag

SEQ ID NO: 2902791 - RNA, 19 nt, Artificial Sequence
  Description of Artificial Sequence: Synthetic oligonucleotide
ccgcuccccgggacgccgc

SEQ ID NO: 2902792 - RNA, 19 nt, Artificial Sequence
  Description of Artificial Sequence: Synthetic oligonucleotide
gcagcugcagggcgauguu

SEQ ID NO: 2902793 - RNA, 19 nt, Artificial Sequence
  Description of Artificial Sequence: Synthetic oligonucleotide
ucccggccacagcgcccuu

SEQ ID NO: 2902794 - RNA, 19 nt, Artificial Sequence
  Description of Artificial Sequence: Synthetic oligonucleotide
ugccuccguccagcagcuu

SEQ ID NO: 2902795 - RNA, 19 nt, Artificial Sequence
  Description of Artificial Sequence: Synthetic oligonucleotide
ggcgguggggaagucgcuu

SEQ ID NO: 2902796 - RNA, 19 nt, Artificial Sequence
  Description of Artificial Sequence: Synthetic oligonucleotide
gcucccuguucucggccau

SEQ ID NO: 2902797 - RNA, 19 nt, Artificial Sequence
  Description of Artificial Sequence: Synthetic oligonucleotide
gcuccccgggacgccgcug

SEQ ID NO: 2902798 - RNA, 19 nt, Artificial Sequence
  Description of Artificial Sequence: Synthetic oligonucleotide
ccaagccguggauguagau

SEQ ID NO: 2902799 - RNA, 19 nt, Artificial Sequence
  Description of Artificial Sequence: Synthetic oligonucleotide
ccuucgcucgcgagcgccu

SEQ ID NO: 2902800 - RNA, 19 nt, Artificial Sequence
  Description of Artificial Sequence: Synthetic oligonucleotide
ccccugcugccuccgucca

SEQ ID NO: 2902801 - RNA, 19 nt, Artificial Sequence
  Description of Artificial Sequence: Synthetic oligonucleotide
ccacgggguccagcucggc

SEQ ID NO: 2902802 - RNA, 19 nt, Artificial Sequence
  Description of Artificial Sequence: Synthetic oligonucleotide
ggcaggcgguggggaaguc

SEQ ID NO: 2902803 - RNA, 19 nt, Artificial Sequence
  Description of Artificial Sequence: Synthetic oligonucleotide
cccggccacagcgcccuuc

SEQ ID NO: 2902804 - RNA, 19 nt, Artificial Sequence
  Description of Artificial Sequence: Synthetic oligonucleotide
cgcucgcgagcgccucgcc

SEQ ID NO: 2902805 - RNA, 19 nt, Artificial Sequence
  Description of Artificial Sequence: Synthetic oligonucleotide
ccccgggacgccgcugcuc

SEQ ID NO: 2902806 - RNA, 19 nt, Artificial Sequence
  Description of Artificial Sequence: Synthetic oligonucleotide
ccgcggggcucccuguucu

SEQ ID NO: 2902807 - RNA, 19 nt, Artificial Sequence
  Description of Artificial Sequence: Synthetic oligonucleotide
cgagcgccucgccgaccgc

SEQ ID NO: 2902808 - RNA, 19 nt, Artificial Sequence
  Description of Artificial Sequence: Synthetic oligonucleotide
cggccacagcgcccuucgc

SEQ ID NO: 2902809 - RNA, 19 nt, Artificial Sequence
  Description of Artificial Sequence: Synthetic oligonucleotide
ccggggcaggcggugggga

SEQ ID NO: 2902810 - RNA, 19 nt, Artificial Sequence
  Description of Artificial Sequence: Synthetic oligonucleotide
cccuguucucggccaugcu

SEQ ID NO: 2902811 - RNA, 19 nt, Artificial Sequence
  Description of Artificial Sequence: Synthetic oligonucleotide
cgcgagcgccucgccgacc

SEQ ID NO: 2902812 - RNA, 19 nt, Artificial Sequence
  Description of Artificial Sequence: Synthetic oligonucleotide
cgccgcugcucaggcacuc

SEQ ID NO: 2902813 - RNA, 19 nt, Artificial Sequence
  Description of Artificial Sequence: Synthetic oligonucleotide
gcgggcaagcugggccuua

SEQ ID NO: 2902814 - RNA, 19 nt, Artificial Sequence
  Description of Artificial Sequence: Synthetic oligonucleotide
gcugggccuuaaaguccgu

SEQ ID NO: 2902815 - RNA, 19 nt, Artificial Sequence
  Description of Artificial Sequence: Synthetic oligonucleotide
cggccucgacggcgccgcg

SEQ ID NO: 2902816 - RNA, 19 nt, Artificial Sequence
  Description of Artificial Sequence: Synthetic oligonucleotide
cgggcaagcugggccuuaa

SEQ ID NO: 2902817 - RNA, 19 nt, Artificial Sequence
  Description of Artificial Sequence: Synthetic oligonucleotide
gcgccgcggggcucccugu

SEQ ID NO: 2902818 - RNA, 19 nt, Artificial Sequence
  Description of Artificial Sequence: Synthetic oligonucleotide
cgauguugauggcgcgguu

SEQ ID NO: 2902819 - RNA, 19 nt, Artificial Sequence
  Description of Artificial Sequence: Synthetic oligonucleotide
ggccuccggggcaggcggu

SEQ ID NO: 2902820 - RNA, 19 nt, Artificial Sequence
  Description of Artificial Sequence: Synthetic oligonucleotide
gcuccacgguggagguguu

SEQ ID NO: 2902821 - RNA, 19 nt, Artificial Sequence
  Description of Artificial Sequence: Synthetic oligonucleotide
cgacggcgccgcggggcuc

SEQ ID NO: 2902822 - RNA, 19 nt, Artificial Sequence
  Description of Artificial Sequence: Synthetic oligonucleotide
cgcuccccgggacgccgcu

SEQ ID NO: 2902823 - RNA, 19 nt, Artificial Sequence
  Description of Artificial Sequence: Synthetic oligonucleotide
cgccgcggggcucccuguu

SEQ ID NO: 2902824 - RNA, 19 nt, Artificial Sequence
  Description of Artificial Sequence: Synthetic oligonucleotide
cuuagaaucaucauguugg

SEQ ID NO: 2902825 - RNA, 19 nt, Artificial Sequence
  Description of Artificial Sequence: Synthetic oligonucleotide
ugaaacuuuucaaagaacc

SEQ ID NO: 2902826 - RNA, 19 nt, Artificial Sequence
  Description of Artificial Sequence: Synthetic oligonucleotide
uucugaaacaccaugugcg

SEQ ID NO: 2902827 - RNA, 19 nt, Artificial Sequence
  Description of Artificial Sequence: Synthetic oligonucleotide
  modified_base (5)..(5): a, c, u, g, unknown or other
aaacnugaaauugucuucc

SEQ ID NO: 2902828 - RNA, 19 nt, Artificial Sequence
  Description of Artificial Sequence: Synthetic oligonucleotide
uuuucaaagaaccaucuac

SEQ ID NO: 2902829 - RNA, 19 nt, Artificial Sequence
  Description of Artificial Sequence: Synthetic oligonucleotide
uccacuaugacugauggcg

SEQ ID NO: 2902830 - RNA, 19 nt, Artificial Sequence
  Description of Artificial Sequence: Synthetic oligonucleotide
auuuguuuaucacagacca

SEQ ID NO: 2902831 - RNA, 19 nt, Artificial Sequence
  Description of Artificial Sequence: Synthetic oligonucleotide
aauuuguuuaucacagacc

SEQ ID NO: 2902832 - RNA, 19 nt, Artificial Sequence
  Description of Artificial Sequence: Synthetic oligonucleotide
uuucaaagaaccaucuacc

SEQ ID NO: 2902833 - RNA, 19 nt, Artificial Sequence
  Description of Artificial Sequence: Synthetic oligonucleotide
acagauacaugcuuguugg

SEQ ID NO: 2902834 - RNA, 19 nt, Artificial Sequence
  Description of Artificial Sequence: Synthetic oligonucleotide
agaaucaucauguugggca

SEQ ID NO: 2902835 - RNA, 19 nt, Artificial Sequence
  Description of Artificial Sequence: Synthetic oligonucleotide
aaauugucuuccuuaguuc

SEQ ID NO: 2902836 - RNA, 19 nt, Artificial Sequence
  Description of Artificial Sequence: Synthetic oligonucleotide
uggaucaucuuuuacacug

SEQ ID NO: 2902837 - RNA, 19 nt, Artificial Sequence
  Description of Artificial Sequence: Synthetic oligonucleotide
  modified_base (7)..(7): a, c, u, g, unknown or other
ugaaacnugaaauugucuu

SEQ ID NO: 2902838 - RNA, 19 nt, Artificial Sequence
  Description of Artificial Sequence: Synthetic oligonucleotide
aucuuuuacacugccaucc

SEQ ID NO: 2902839 - RNA, 19 nt, Artificial Sequence
  Description of Artificial Sequence: Synthetic oligonucleotide
uuaaacaucauuggcaucu

SEQ ID NO: 2902840 - RNA, 19 nt, Artificial Sequence
  Description of Artificial Sequence: Synthetic oligonucleotide
ugugaauuuguuuaucaca

SEQ ID NO: 2902841 - RNA, 19 nt, Artificial Sequence
  Description of Artificial Sequence: Synthetic oligonucleotide
gaauuuguuuaucacagac

SEQ ID NO: 2902842 - RNA, 19 nt, Artificial Sequence
  Description of Artificial Sequence: Synthetic oligonucleotide
gaaccaucuaccuuugggg

SEQ ID NO: 2902843 - RNA, 19 nt, Artificial Sequence
  Description of Artificial Sequence: Synthetic oligonucleotide
uggacuuagaaucaucaug

SEQ ID NO: 2902844 - RNA, 19 nt, Artificial Sequence
  Description of Artificial Sequence: Synthetic oligonucleotide
gacaccaucauguaauggc

SEQ ID NO: 2902845 - RNA, 19 nt, Artificial Sequence
  Description of Artificial Sequence: Synthetic oligonucleotide
aacaccaugugcgugaguc

SEQ ID NO: 2902846 - RNA, 19 nt, Artificial Sequence
  Description of Artificial Sequence: Synthetic oligonucleotide
aauugucuuccuuaguucu

SEQ ID NO: 2902847 - RNA, 19 nt, Artificial Sequence
  Description of Artificial Sequence: Synthetic oligonucleotide
auuuggaucaucuuuuaca

SEQ ID NO: 2902848 - RNA, 19 nt, Artificial Sequence
  Description of Artificial Sequence: Synthetic oligonucleotide
acugagaagacccaugucu

SEQ ID NO: 2902849 - RNA, 19 nt, Artificial Sequence
  Description of Artificial Sequence: Synthetic oligonucleotide
guugugaaacuuuucaaag

SEQ ID NO: 2902850 - RNA, 19 nt, Artificial Sequence
  Description of Artificial Sequence: Synthetic oligonucleotide
uuuuaaacaucauuggcau

SEQ ID NO: 2902851 - RNA, 19 nt, Artificial Sequence
  Description of Artificial Sequence: Synthetic oligonucleotide
gaguccauugcacaguacg

SEQ ID NO: 2902852 - RNA, 19 nt, Artificial Sequence
  Description of Artificial Sequence: Synthetic oligonucleotide
aucauuggcaucucaaguc

SEQ ID NO: 2902853 - RNA, 19 nt, Artificial Sequence
  Description of Artificial Sequence: Synthetic oligonucleotide
uaaucuuacgcaccucugg

SEQ ID NO: 2902854 - RNA, 19 nt, Artificial Sequence
  Description of Artificial Sequence: Synthetic oligonucleotide
auaguugugaauuuguuua

SEQ ID NO: 2902855 - RNA, 19 nt, Artificial Sequence
  Description of Artificial Sequence: Synthetic oligonucleotide
uuuggaucaucuuuuacac

SEQ ID NO: 2902856 - RNA, 19 nt, Artificial Sequence
  Description of Artificial Sequence: Synthetic oligonucleotide
agaaccaucuaccuuuggg

SEQ ID NO: 2902857 - RNA, 19 nt, Artificial Sequence
  Description of Artificial Sequence: Synthetic oligonucleotide
uuugcuaccaucucuucug

SEQ ID NO: 2902858 - RNA, 19 nt, Artificial Sequence
  Description of Artificial Sequence: Synthetic oligonucleotide
uucuuggacaccaucaugu

SEQ ID NO: 2902859 - RNA, 19 nt, Artificial Sequence
  Description of Artificial Sequence: Synthetic oligonucleotide
gucucuuggacuuagaauc

SEQ ID NO: 2902860 - RNA, 19 nt, Artificial Sequence
  Description of Artificial Sequence: Synthetic oligonucleotide
uacacugccauccacuaug

SEQ ID NO: 2902861 - RNA, 19 nt, Artificial Sequence
  Description of Artificial Sequence: Synthetic oligonucleotide
aauaguugugaauuuguuu

SEQ ID NO: 2902862 - RNA, 19 nt, Artificial Sequence
  Description of Artificial Sequence: Synthetic oligonucleotide
ucaucuuuuacacugccau

SEQ ID NO: 2902863 - RNA, 19 nt, Artificial Sequence
  Description of Artificial Sequence: Synthetic oligonucleotide
aacuuuucaaagaaccauc

SEQ ID NO: 2902864 - RNA, 19 nt, Artificial Sequence
  Description of Artificial Sequence: Synthetic oligonucleotide
ucuaaucuuacgcaccucu

SEQ ID NO: 2902865 - RNA, 19 nt, Artificial Sequence
  Description of Artificial Sequence: Synthetic oligonucleotide
gauacaugcuuguuggggc

SEQ ID NO: 2902866 - RNA, 19 nt, Artificial Sequence
  Description of Artificial Sequence: Synthetic oligonucleotide
uguccaauccaaaggaccc

SEQ ID NO: 2902867 - RNA, 19 nt, Artificial Sequence
  Description of Artificial Sequence: Synthetic oligonucleotide
uauuacagcacagauacau

SEQ ID NO: 2902868 - RNA, 19 nt, Artificial Sequence
  Description of Artificial Sequence: Synthetic oligonucleotide
ucuaccuuuggggaaauag

SEQ ID NO: 2902869 - RNA, 19 nt, Artificial Sequence
  Description of Artificial Sequence: Synthetic oligonucleotide
uuuuauuacagcacagaua

SEQ ID NO: 2902870 - RNA, 19 nt, Artificial Sequence
  Description of Artificial Sequence: Synthetic oligonucleotide
uuuuacacugccauccacu

SEQ ID NO: 2902871 - RNA, 19 nt, Artificial Sequence
  Description of Artificial Sequence: Synthetic oligonucleotide
uuagaaucaucauguuggg

SEQ ID NO: 2902872 - RNA, 19 nt, Artificial Sequence
  Description of Artificial Sequence: Synthetic oligonucleotide
  modified_base (13)..(13): a, c, u, g, unknown or other
uccggaugaaacnugaaau

SEQ ID NO: 2902873 - RNA, 19 nt, Artificial Sequence
  Description of Artificial Sequence: Synthetic oligonucleotide
acuuagaaucaucauguug

SEQ ID NO: 2902874 - RNA, 19 nt, Artificial Sequence
  Description of Artificial Sequence: Synthetic oligonucleotide
ucauguugggcauuggugu

SEQ ID NO: 2902875 - RNA, 19 nt, Artificial Sequence
  Description of Artificial Sequence: Synthetic oligonucleotide
cugccauccacuaugacug

SEQ ID NO: 2902876 - RNA, 19 nt, Artificial Sequence
  Description of Artificial Sequence: Synthetic oligonucleotide
aaucuuacgcaccucugga

SEQ ID NO: 2902877 - RNA, 19 nt, Artificial Sequence
  Description of Artificial Sequence: Synthetic oligonucleotide
  modified_base (6)..(6): a, c, u, g, unknown or other
gaaacnugaaauugucuuc

SEQ ID NO: 2902878 - RNA, 19 nt, Artificial Sequence
  Description of Artificial Sequence: Synthetic oligonucleotide
aaacuuuucaaagaaccau

SEQ ID NO: 2902879 - RNA, 19 nt, Artificial Sequence
  Description of Artificial Sequence: Synthetic oligonucleotide
agacccaugucucuuggac

SEQ ID NO: 2902880 - RNA, 19 nt, Artificial Sequence
  Description of Artificial Sequence: Synthetic oligonucleotide
ucugcaaggguugugaaac

SEQ ID NO: 2902881 - RNA, 19 nt, Artificial Sequence
  Description of Artificial Sequence: Synthetic oligonucleotide
uuggacaccaucauguaau

SEQ ID NO: 2902882 - RNA, 19 nt, Artificial Sequence
  Description of Artificial Sequence: Synthetic oligonucleotide
acugauggcguuugcuacc

SEQ ID NO: 2902883 - RNA, 19 nt, Artificial Sequence
  Description of Artificial Sequence: Synthetic oligonucleotide
cauguaauggcuguuugcc

SEQ ID NO: 2902884 - RNA, 19 nt, Artificial Sequence
  Description of Artificial Sequence: Synthetic oligonucleotide
acugccauccacuaugacu

SEQ ID NO: 2902885 - RNA, 19 nt, Artificial Sequence
  Description of Artificial Sequence: Synthetic oligonucleotide
auggcuguuugccaagugg

SEQ ID NO: 2902886 - RNA, 19 nt, Artificial Sequence
  Description of Artificial Sequence: Synthetic oligonucleotide
uugugaaacuuuucaaaga

SEQ ID NO: 2902887 - RNA, 19 nt, Artificial Sequence
  Description of Artificial Sequence: Synthetic oligonucleotide
aaccaucuaccuuugggga

SEQ ID NO: 2902888 - RNA, 19 nt, Artificial Sequence
  Description of Artificial Sequence: Synthetic oligonucleotide
uguaauggcuguuugccaa

SEQ ID NO: 2902889 - RNA, 19 nt, Artificial Sequence
  Description of Artificial Sequence: Synthetic oligonucleotide
ucauuggcaucucaagucu

SEQ ID NO: 2902890 - RNA, 19 nt, Artificial Sequence
  Description of Artificial Sequence: Synthetic oligonucleotide
agauacaugcuuguugggg

SEQ ID NO: 2902891 - RNA, 19 nt, Artificial Sequence
  Description of Artificial Sequence: Synthetic oligonucleotide
uucaaagaaccaucuaccu

SEQ ID NO: 2902892 - RNA, 19 nt, Artificial Sequence
  Description of Artificial Sequence: Synthetic oligonucleotide
cauccacuaugacugaugg

SEQ ID NO: 2902893 - RNA, 19 nt, Artificial Sequence
  Description of Artificial Sequence: Synthetic oligonucleotide
aaaggacccuuuuauuaca

SEQ ID NO: 2902894 - RNA, 19 nt, Artificial Sequence
  Description of Artificial Sequence: Synthetic oligonucleotide
ugucuaaucuuacgcaccu

SEQ ID NO: 2902895 - RNA, 19 nt, Artificial Sequence
  Description of Artificial Sequence: Synthetic oligonucleotide
aggguugugaaacuuuuca

SEQ ID NO: 2902896 - RNA, 19 nt, Artificial Sequence
  Description of Artificial Sequence: Synthetic oligonucleotide
augugcgugaguccauugc

SEQ ID NO: 2902897 - RNA, 19 nt, Artificial Sequence
  Description of Artificial Sequence: Synthetic oligonucleotide
acaucauuggcaucucaag

SEQ ID NO: 2902898 - RNA, 19 nt, Artificial Sequence
  Description of Artificial Sequence: Synthetic oligonucleotide
cuguccaauccaaaggacc

SEQ ID NO: 2902899 - RNA, 19 nt, Artificial Sequence
  Description of Artificial Sequence: Synthetic oligonucleotide
caaaggacccuuuuauuac

SEQ ID NO: 2902900 - RNA, 19 nt, Artificial Sequence
  Description of Artificial Sequence: Synthetic oligonucleotide
  modified_base (9)..(9): a, c, u, g, unknown or other
gaugaaacnugaaauuguc

SEQ ID NO: 2902901 - RNA, 19 nt, Artificial Sequence
  Description of Artificial Sequence: Synthetic oligonucleotide
ucauguaauggcuguuugc

SEQ ID NO: 2902902 - RNA, 19 nt, Artificial Sequence
  Description of Artificial Sequence: Synthetic oligonucleotide
  modified_base (19)..(19): a, c, u, g, unknown or other
ucuggauccggaugaaacn

SEQ ID NO: 2902903 - RNA, 19 nt, Artificial Sequence
  Description of Artificial Sequence: Synthetic oligonucleotide
ucuuccuuaguucuccguc

SEQ ID NO: 2902904 - RNA, 19 nt, Artificial Sequence
  Description of Artificial Sequence: Synthetic oligonucleotide
uuucuuggacaccaucaug

SEQ ID NO: 2902905 - RNA, 19 nt, Artificial Sequence
  Description of Artificial Sequence: Synthetic oligonucleotide
guugugaauuuguuuauca

SEQ ID NO: 2902906 - RNA, 19 nt, Artificial Sequence
  Description of Artificial Sequence: Synthetic oligonucleotide
ugugcgugaguccauugca

SEQ ID NO: 2902907 - RNA, 19 nt, Artificial Sequence
  Description of Artificial Sequence: Synthetic oligonucleotide
uugugaauuuguuuaucac

SEQ ID NO: 2902908 - RNA, 19 nt, Artificial Sequence
  Description of Artificial Sequence: Synthetic oligonucleotide
uuguuuaucacagaccauu

SEQ ID NO: 2902909 - RNA, 19 nt, Artificial Sequence
  Description of Artificial Sequence: Synthetic oligonucleotide
  modified_base (4)..(4): a, c, u, g, unknown or other
aacnugaaauugucuuccu

SEQ ID NO: 2902910 - RNA, 19 nt, Artificial Sequence
  Description of Artificial Sequence: Synthetic oligonucleotide
uuuggggaaauaguuguga

SEQ ID NO: 2902911 - RNA, 19 nt, Artificial Sequence
  Description of Artificial Sequence: Synthetic oligonucleotide
uccauugcacaguacgggc

SEQ ID NO: 2902912 - RNA, 19 nt, Artificial Sequence
  Description of Artificial Sequence: Synthetic oligonucleotide
uuuucuuggacaccaucau

SEQ ID NO: 2902913 - RNA, 19 nt, Artificial Sequence
  Description of Artificial Sequence: Synthetic oligonucleotide
cuuggacuuagaaucauca

SEQ ID NO: 2902914 - RNA, 19 nt, Artificial Sequence
  Description of Artificial Sequence: Synthetic oligonucleotide
cuuacgcaccucuggaucc

SEQ ID NO: 2902915 - RNA, 19 nt, Artificial Sequence
  Description of Artificial Sequence: Synthetic oligonucleotide
cacagauacaugcuuguug

SEQ ID NO: 2902916 - RNA, 19 nt, Artificial Sequence
  Description of Artificial Sequence: Synthetic oligonucleotide
gaucaucuuuuacacugcc

SEQ ID NO: 2902917 - RNA, 19 nt, Artificial Sequence
  Description of Artificial Sequence: Synthetic oligonucleotide
ugcugucuaaucuuacgca

SEQ ID NO: 2902918 - RNA, 19 nt, Artificial Sequence
  Description of Artificial Sequence: Synthetic oligonucleotide
ucuuacgcaccucuggauc

SEQ ID NO: 2902919 - RNA, 19 nt, Artificial Sequence
  Description of Artificial Sequence: Synthetic oligonucleotide
ucaagucuucugaaacacc

SEQ ID NO: 2902920 - RNA, 19 nt, Artificial Sequence
  Description of Artificial Sequence: Synthetic oligonucleotide
caagucuucugaaacacca

SEQ ID NO: 2902921 - RNA, 19 nt, Artificial Sequence
  Description of Artificial Sequence: Synthetic oligonucleotide
ucaaagaaccaucuaccuu

SEQ ID NO: 2902922 - RNA, 19 nt, Artificial Sequence
  Description of Artificial Sequence: Synthetic oligonucleotide
uucuccgucaggugcacag

SEQ ID NO: 2902923 - RNA, 19 nt, Artificial Sequence
  Description of Artificial Sequence: Synthetic oligonucleotide
cuuguuggggcacuccugc

SEQ ID NO: 2902924 - RNA, 19 nt, Artificial Sequence
  Description of Artificial Sequence: Synthetic oligonucleotide
cugcugucuaaucuuacgc

SEQ ID NO: 2902925 - RNA, 19 nt, Artificial Sequence
  Description of Artificial Sequence: Synthetic oligonucleotide
cucuggauccggaugaaac

SEQ ID NO: 2902926 - RNA, 19 nt, Artificial Sequence
  Description of Artificial Sequence: Synthetic oligonucleotide
ucucuuggacuuagaauca

SEQ ID NO: 2902927 - RNA, 19 nt, Artificial Sequence
  Description of Artificial Sequence: Synthetic oligonucleotide
uggagcugcugucuaaucu

SEQ ID NO: 2902928 - RNA, 19 nt, Artificial Sequence
  Description of Artificial Sequence: Synthetic oligonucleotide
uggcuguuugccaagugga

SEQ ID NO: 2902929 - RNA, 19 nt, Artificial Sequence
  Description of Artificial Sequence: Synthetic oligonucleotide
gaaacuuuucaaagaacca

SEQ ID NO: 2902930 - RNA, 19 nt, Artificial Sequence
  Description of Artificial Sequence: Synthetic oligonucleotide
gaagacccaugucucuugg

SEQ ID NO: 2902931 - RNA, 19 nt, Artificial Sequence
  Description of Artificial Sequence: Synthetic oligonucleotide
ugccacgugguacugagaa

SEQ ID NO: 2902932 - RNA, 19 nt, Artificial Sequence
  Description of Artificial Sequence: Synthetic oligonucleotide
aucauguaauggcuguuug

SEQ ID NO: 2902933 - RNA, 19 nt, Artificial Sequence
  Description of Artificial Sequence: Synthetic oligonucleotide
  modified_base (14)..(14): a, c, u, g, unknown or other
auccggaugaaacnugaaa

SEQ ID NO: 2902934 - RNA, 19 nt, Artificial Sequence
  Description of Artificial Sequence: Synthetic oligonucleotide
cugucuaaucuuacgcacc

SEQ ID NO: 2902935 - RNA, 19 nt, Artificial Sequence
  Description of Artificial Sequence: Synthetic oligonucleotide
ucugaaacaccaugugcgu

SEQ ID NO: 2902936 - RNA, 19 nt, Artificial Sequence
  Description of Artificial Sequence: Synthetic oligonucleotide
  modified_base (2)..(2): a, c, u, g, unknown or other
cnugaaauugucuuccuua

SEQ ID NO: 2902937 - RNA, 19 nt, Artificial Sequence
  Description of Artificial Sequence: Synthetic oligonucleotide
gaaauugucuuccuuaguu

SEQ ID NO: 2902938 - RNA, 19 nt, Artificial Sequence
  Description of Artificial Sequence: Synthetic oligonucleotide
uacagcacagauacaugcu

SEQ ID NO: 2902939 - RNA, 19 nt, Artificial Sequence
  Description of Artificial Sequence: Synthetic oligonucleotide
ugaaauugucuuccuuagu

SEQ ID NO: 2902940 - RNA, 19 nt, Artificial Sequence
  Description of Artificial Sequence: Synthetic oligonucleotide
ugaauuuguuuaucacaga

SEQ ID NO: 2902941 - RNA, 19 nt, Artificial Sequence
  Description of Artificial Sequence: Synthetic oligonucleotide
auccaaaggacccuuuuau

SEQ ID NO: 2902942 - RNA, 19 nt, Artificial Sequence
  Description of Artificial Sequence: Synthetic oligonucleotide
aguacgggcagccaucuaa

SEQ ID NO: 2902943 - RNA, 19 nt, Artificial Sequence
  Description of Artificial Sequence: Synthetic oligonucleotide
ucuuuuacacugccaucca

SEQ ID NO: 2902944 - RNA, 19 nt, Artificial Sequence
  Description of Artificial Sequence: Synthetic oligonucleotide
uaccuuuggggaaauaguu

SEQ ID NO: 2902945 - RNA, 19 nt, Artificial Sequence
  Description of Artificial Sequence: Synthetic oligonucleotide
aggacccuuuuauuacagc

SEQ ID NO: 2902946 - RNA, 19 nt, Artificial Sequence
  Description of Artificial Sequence: Synthetic oligonucleotide
uuccuuaguucuccgucag

SEQ ID NO: 2902947 - RNA, 19 nt, Artificial Sequence
  Description of Artificial Sequence: Synthetic oligonucleotide
ugggcauugguguuuucug

SEQ ID NO: 2902948 - RNA, 19 nt, Artificial Sequence
  Description of Artificial Sequence: Synthetic oligonucleotide
aauggcuguuugccaagug

SEQ ID NO: 2902949 - RNA, 19 nt, Artificial Sequence
  Description of Artificial Sequence: Synthetic oligonucleotide
aagaaccaucuaccuuugg

SEQ ID NO: 2902950 - RNA, 19 nt, Artificial Sequence
  Description of Artificial Sequence: Synthetic oligonucleotide
auccacuaugacugauggc

SEQ ID NO: 2902951 - RNA, 19 nt, Artificial Sequence
  Description of Artificial Sequence: Synthetic oligonucleotide
aguugugaauuuguuuauc

SEQ ID NO: 2902952 - RNA, 19 nt, Artificial Sequence
  Description of Artificial Sequence: Synthetic oligonucleotide
aaacaucauuggcaucuca

SEQ ID NO: 2902953 - RNA, 19 nt, Artificial Sequence
  Description of Artificial Sequence: Synthetic oligonucleotide
gacugauggcguuugcuac

SEQ ID NO: 2902954 - RNA, 19 nt, Artificial Sequence
  Description of Artificial Sequence: Synthetic oligonucleotide
acaccaugugcgugagucc

SEQ ID NO: 2902955 - RNA, 19 nt, Artificial Sequence
  Description of Artificial Sequence: Synthetic oligonucleotide
gcuaccaucucuucugucc

SEQ ID NO: 2902956 - RNA, 19 nt, Artificial Sequence
  Description of Artificial Sequence: Synthetic oligonucleotide
uuuacacugccauccacua

SEQ ID NO: 2902957 - RNA, 19 nt, Artificial Sequence
  Description of Artificial Sequence: Synthetic oligonucleotide
accaucauguaauggcugu

SEQ ID NO: 2902958 - RNA, 19 nt, Artificial Sequence
  Description of Artificial Sequence: Synthetic oligonucleotide
uguuuaucacagaccauuu

SEQ ID NO: 2902959 - RNA, 19 nt, Artificial Sequence
  Description of Artificial Sequence: Synthetic oligonucleotide
aacaucauuggcaucucaa

SEQ ID NO: 2902960 - RNA, 19 nt, Artificial Sequence
  Description of Artificial Sequence: Synthetic oligonucleotide
cugagaagacccaugucuc

SEQ ID NO: 2902961 - RNA, 19 nt, Artificial Sequence
  Description of Artificial Sequence: Synthetic oligonucleotide
uguuggggcacuccugcca

SEQ ID NO: 2902962 - RNA, 19 nt, Artificial Sequence
  Description of Artificial Sequence: Synthetic oligonucleotide
cuaaucuuacgcaccucug

SEQ ID NO: 2902963 - RNA, 19 nt, Artificial Sequence
  Description of Artificial Sequence: Synthetic oligonucleotide
cauugcacaguacgggcag

SEQ ID NO: 2902964 - RNA, 19 nt, Artificial Sequence
  Description of Artificial Sequence: Synthetic oligonucleotide
ugccaaguggagcugcugu

SEQ ID NO: 2902965 - RNA, 19 nt, Artificial Sequence
  Description of Artificial Sequence: Synthetic oligonucleotide
aucauguugggcauuggug

SEQ ID NO: 2902966 - RNA, 19 nt, Artificial Sequence
  Description of Artificial Sequence: Synthetic oligonucleotide
uuuaaacaucauuggcauc

SEQ ID NO: 2902967 - RNA, 19 nt, Artificial Sequence
  Description of Artificial Sequence: Synthetic oligonucleotide
ugguguuuucugcaagggu

SEQ ID NO: 2902968 - RNA, 19 nt, Artificial Sequence
  Description of Artificial Sequence: Synthetic oligonucleotide
ucuuggacuuagaaucauc

SEQ ID NO: 2902969 - RNA, 19 nt, Artificial Sequence
  Description of Artificial Sequence: Synthetic oligonucleotide
agcacagauacaugcuugu

SEQ ID NO: 2902970 - RNA, 19 nt, Artificial Sequence
  Description of Artificial Sequence: Synthetic oligonucleotide
cgugguacugagaagaccc

SEQ ID NO: 2902971 - RNA, 19 nt, Artificial Sequence
  Description of Artificial Sequence: Synthetic oligonucleotide
aaauaguugugaauuuguu

SEQ ID NO: 2902972 - RNA, 19 nt, Artificial Sequence
  Description of Artificial Sequence: Synthetic oligonucleotide
acuuuucaaagaaccaucu

SEQ ID NO: 2902973 - RNA, 19 nt, Artificial Sequence
  Description of Artificial Sequence: Synthetic oligonucleotide
aguccauugcacaguacgg

SEQ ID NO: 2902974 - RNA, 19 nt, Artificial Sequence
  Description of Artificial Sequence: Synthetic oligonucleotide
uaguucuccgucaggugca

SEQ ID NO: 2902975 - RNA, 19 nt, Artificial Sequence
  Description of Artificial Sequence: Synthetic oligonucleotide
ucucuucuguccaauccaa

SEQ ID NO: 2902976 - RNA, 19 nt, Artificial Sequence
  Description of Artificial Sequence: Synthetic oligonucleotide
ugacugauggcguuugcua

SEQ ID NO: 2902977 - RNA, 19 nt, Artificial Sequence
  Description of Artificial Sequence: Synthetic oligonucleotide
ugagaagacccaugucucu

SEQ ID NO: 2902978 - RNA, 19 nt, Artificial Sequence
  Description of Artificial Sequence: Synthetic oligonucleotide
caaagaaccaucuaccuuu

SEQ ID NO: 2902979 - RNA, 19 nt, Artificial Sequence
  Description of Artificial Sequence: Synthetic oligonucleotide
  modified_base (17)..(17): a, c, u, g, unknown or other
uggauccggaugaaacnug

SEQ ID NO: 2902980 - RNA, 19 nt, Artificial Sequence
  Description of Artificial Sequence: Synthetic oligonucleotide
guccauugcacaguacggg

SEQ ID NO: 2902981 - RNA, 19 nt, Artificial Sequence
  Description of Artificial Sequence: Synthetic oligonucleotide
uccuuaguucuccgucagg

SEQ ID NO: 2902982 - RNA, 19 nt, Artificial Sequence
  Description of Artificial Sequence: Synthetic oligonucleotide
ugcgugaguccauugcaca

SEQ ID NO: 2902983 - RNA, 19 nt, Artificial Sequence
  Description of Artificial Sequence: Synthetic oligonucleotide
cauugguguuuucugcaag

SEQ ID NO: 2902984 - RNA, 19 nt, Artificial Sequence
  Description of Artificial Sequence: Synthetic oligonucleotide
aaggguugugaaacuuuuc

SEQ ID NO: 2902985 - RNA, 19 nt, Artificial Sequence
  Description of Artificial Sequence: Synthetic oligonucleotide
gauggcguuugcuaccauc

SEQ ID NO: 2902986 - RNA, 19 nt, Artificial Sequence
  Description of Artificial Sequence: Synthetic oligonucleotide
aaggacccuuuuauuacag

SEQ ID NO: 2902987 - RNA, 19 nt, Artificial Sequence
  Description of Artificial Sequence: Synthetic oligonucleotide
auuggcaucucaagucuuc

SEQ ID NO: 2902988 - RNA, 19 nt, Artificial Sequence
  Description of Artificial Sequence: Synthetic oligonucleotide
ugucuuccuuaguucuccg

SEQ ID NO: 2902989 - RNA, 19 nt, Artificial Sequence
  Description of Artificial Sequence: Synthetic oligonucleotide
agaagacccaugucucuug

SEQ ID NO: 2902990 - RNA, 19 nt, Artificial Sequence
  Description of Artificial Sequence: Synthetic oligonucleotide
uuggggaaauaguugugaa

SEQ ID NO: 2902991 - RNA, 19 nt, Artificial Sequence
  Description of Artificial Sequence: Synthetic oligonucleotide
uuuguuuaucacagaccau

SEQ ID NO: 2902992 - RNA, 19 nt, Artificial Sequence
  Description of Artificial Sequence: Synthetic oligonucleotide
gaaauaguugugaauuugu

SEQ ID NO: 2902993 - RNA, 19 nt, Artificial Sequence
  Description of Artificial Sequence: Synthetic oligonucleotide
guaauggcuguuugccaag

SEQ ID NO: 2902994 - RNA, 19 nt, Artificial Sequence
  Description of Artificial Sequence: Synthetic oligonucleotide
cauuuggaucaucuuuuac

SEQ ID NO: 2902995 - RNA, 19 nt, Artificial Sequence
  Description of Artificial Sequence: Synthetic oligonucleotide
auacaugcuuguuggggca

SEQ ID NO: 2902996 - RNA, 19 nt, Artificial Sequence
  Description of Artificial Sequence: Synthetic oligonucleotide
aaagaaccaucuaccuuug

SEQ ID NO: 2902997 - RNA, 19 nt, Artificial Sequence
  Description of Artificial Sequence: Synthetic oligonucleotide
cuuuggggaaauaguugug

SEQ ID NO: 2902998 - RNA, 19 nt, Artificial Sequence
  Description of Artificial Sequence: Synthetic oligonucleotide
gacccuuuuauuacagcac

SEQ ID NO: 2902999 - RNA, 19 nt, Artificial Sequence
  Description of Artificial Sequence: Synthetic oligonucleotide
gguugugaaacuuuucaaa

SEQ ID NO: 2903000 - RNA, 19 nt, Artificial Sequence
  Description of Artificial Sequence: Synthetic oligonucleotide
acgugguacugagaagacc

SEQ ID NO: 2903001 - RNA, 19 nt, Artificial Sequence
  Description of Artificial Sequence: Synthetic oligonucleotide
auguaauggcuguuugcca

SEQ ID NO: 2903002 - RNA, 19 nt, Artificial Sequence
  Description of Artificial Sequence: Synthetic oligonucleotide
cagcacagauacaugcuug

SEQ ID NO: 2903003 - RNA, 19 nt, Artificial Sequence
  Description of Artificial Sequence: Synthetic oligonucleotide
uuauuacagcacagauaca

SEQ ID NO: 2903004 - RNA, 19 nt, Artificial Sequence
  Description of Artificial Sequence: Synthetic oligonucleotide
uaguugugaauuuguuuau

SEQ ID NO: 2903005 - RNA, 19 nt, Artificial Sequence
  Description of Artificial Sequence: Synthetic oligonucleotide
uaugacugauggcguuugc

SEQ ID NO: 2903006 - RNA, 19 nt, Artificial Sequence
  Description of Artificial Sequence: Synthetic oligonucleotide
augucucuuggacuuagaa

SEQ ID NO: 2903007 - RNA, 19 nt, Artificial Sequence
  Description of Artificial Sequence: Synthetic oligonucleotide
uuggacuuagaaucaucau

SEQ ID NO: 2903008 - RNA, 19 nt, Artificial Sequence
  Description of Artificial Sequence: Synthetic oligonucleotide
uggacaccaucauguaaug

SEQ ID NO: 2903009 - RNA, 19 nt, Artificial Sequence
  Description of Artificial Sequence: Synthetic oligonucleotide
uggggaaauaguugugaau

SEQ ID NO: 2903010 - RNA, 19 nt, Artificial Sequence
  Description of Artificial Sequence: Synthetic oligonucleotide
cuuuuacacugccauccac

SEQ ID NO: 2903011 - RNA, 19 nt, Artificial Sequence
  Description of Artificial Sequence: Synthetic oligonucleotide
uagaaucaucauguugggc

SEQ ID NO: 2903012 - RNA, 19 nt, Artificial Sequence
  Description of Artificial Sequence: Synthetic oligonucleotide
uuggaucaucuuuuacacu

SEQ ID NO: 2903013 - RNA, 19 nt, Artificial Sequence
  Description of Artificial Sequence: Synthetic oligonucleotide
uugggcauugguguuuucu

SEQ ID NO: 2903014 - RNA, 19 nt, Artificial Sequence
  Description of Artificial Sequence: Synthetic oligonucleotide
gcugcugucuaaucuuacg

SEQ ID NO: 2903015 - RNA, 19 nt, Artificial Sequence
  Description of Artificial Sequence: Synthetic oligonucleotide
ggacccuuuuauuacagca

SEQ ID NO: 2903016 - RNA, 19 nt, Artificial Sequence
  Description of Artificial Sequence: Synthetic oligonucleotide
auugucuuccuuaguucuc

SEQ ID NO: 2903017 - RNA, 19 nt, Artificial Sequence
  Description of Artificial Sequence: Synthetic oligonucleotide
acagcacagauacaugcuu

SEQ ID NO: 2903018 - RNA, 19 nt, Artificial Sequence
  Description of Artificial Sequence: Synthetic oligonucleotide
acuccugccacgugguacu

SEQ ID NO: 2903019 - RNA, 19 nt, Artificial Sequence
  Description of Artificial Sequence: Synthetic oligonucleotide
aucaucauguugggcauug

SEQ ID NO: 2903020 - RNA, 19 nt, Artificial Sequence
  Description of Artificial Sequence: Synthetic oligonucleotide
auuacagcacagauacaug

SEQ ID NO: 2903021 - RNA, 19 nt, Artificial Sequence
  Description of Artificial Sequence: Synthetic oligonucleotide
cagauacaugcuuguuggg

SEQ ID NO: 2903022 - RNA, 19 nt, Artificial Sequence
  Description of Artificial Sequence: Synthetic oligonucleotide
ucauuuggaucaucuuuua

SEQ ID NO: 2903023 - RNA, 19 nt, Artificial Sequence
  Description of Artificial Sequence: Synthetic oligonucleotide
uuugccaaguggagcugcu

SEQ ID NO: 2903024 - RNA, 19 nt, Artificial Sequence
  Description of Artificial Sequence: Synthetic oligonucleotide
gcugucuaaucuuacgcac

SEQ ID NO: 2903025 - RNA, 19 nt, Artificial Sequence
  Description of Artificial Sequence: Synthetic oligonucleotide
  modified_base (8)..(8): a, c, u, g, unknown or other
augaaacnugaaauugucu

SEQ ID NO: 2903026 - RNA, 19 nt, Artificial Sequence
  Description of Artificial Sequence: Synthetic oligonucleotide
  modified_base (3)..(3): a, c, u, g, unknown or other
acnugaaauugucuuccuu

SEQ ID NO: 2903027 - RNA, 19 nt, Artificial Sequence
  Description of Artificial Sequence: Synthetic oligonucleotide
uucugcaaggguugugaaa

SEQ ID NO: 2903028 - RNA, 19 nt, Artificial Sequence
  Description of Artificial Sequence: Synthetic oligonucleotide
cuuuuauuacagcacagau

SEQ ID NO: 2903029 - RNA, 19 nt, Artificial Sequence
  Description of Artificial Sequence: Synthetic oligonucleotide
caucuuuuacacugccauc

SEQ ID NO: 2903030 - RNA, 19 nt, Artificial Sequence
  Description of Artificial Sequence: Synthetic oligonucleotide
uccaaaggacccuuuuauu

SEQ ID NO: 2903031 - RNA, 19 nt, Artificial Sequence
  Description of Artificial Sequence: Synthetic oligonucleotide
aagacccaugucucuugga

SEQ ID NO: 2903032 - RNA, 19 nt, Artificial Sequence
  Description of Artificial Sequence: Synthetic oligonucleotide
acgggcagccaucuaauaa

SEQ ID NO: 2903033 - RNA, 19 nt, Artificial Sequence
  Description of Artificial Sequence: Synthetic oligonucleotide
guguuuucugcaaggguug

SEQ ID NO: 2903034 - RNA, 19 nt, Artificial Sequence
  Description of Artificial Sequence: Synthetic oligonucleotide
auugcacaguacgggcagc

SEQ ID NO: 2903035 - RNA, 19 nt, Artificial Sequence
  Description of Artificial Sequence: Synthetic oligonucleotide
caccaucauguaauggcug

SEQ ID NO: 2903036 - RNA, 19 nt, Artificial Sequence
  Description of Artificial Sequence: Synthetic oligonucleotide
acccaugucucuuggacuu

SEQ ID NO: 2903037 - RNA, 19 nt, Artificial Sequence
  Description of Artificial Sequence: Synthetic oligonucleotide
uuacgcaccucuggauccg

SEQ ID NO: 2903038 - RNA, 19 nt, Artificial Sequence
  Description of Artificial Sequence: Synthetic oligonucleotide
cuuccuuaguucuccguca

SEQ ID NO: 2903039 - RNA, 19 nt, Artificial Sequence
  Description of Artificial Sequence: Synthetic oligonucleotide
gugaaacuuuucaaagaac

SEQ ID NO: 2903040 - RNA, 19 nt, Artificial Sequence
  Description of Artificial Sequence: Synthetic oligonucleotide
auggcguuugcuaccaucu

SEQ ID NO: 2903041 - RNA, 19 nt, Artificial Sequence
  Description of Artificial Sequence: Synthetic oligonucleotide
uacugagaagacccauguc

SEQ ID NO: 2903042 - RNA, 19 nt, Artificial Sequence
  Description of Artificial Sequence: Synthetic oligonucleotide
accuuuggggaaauaguug

SEQ ID NO: 2903043 - RNA, 19 nt, Artificial Sequence
  Description of Artificial Sequence: Synthetic oligonucleotide
acaccaucauguaauggcu

SEQ ID NO: 2903044 - RNA, 19 nt, Artificial Sequence
  Description of Artificial Sequence: Synthetic oligonucleotide
uggcaucucaagucuucug

SEQ ID NO: 2903045 - RNA, 19 nt, Artificial Sequence
  Description of Artificial Sequence: Synthetic oligonucleotide
ggacuuagaaucaucaugu

SEQ ID NO: 2903046 - RNA, 19 nt, Artificial Sequence
  Description of Artificial Sequence: Synthetic oligonucleotide
ggcaucucaagucuucuga

SEQ ID NO: 2903047 - RNA, 19 nt, Artificial Sequence
  Description of Artificial Sequence: Synthetic oligonucleotide
accaucuaccuuuggggaa

SEQ ID NO: 2903048 - RNA, 19 nt, Artificial Sequence
  Description of Artificial Sequence: Synthetic oligonucleotide
uugcuaccaucucuucugu

SEQ ID NO: 2903049 - RNA, 19 nt, Artificial Sequence
  Description of Artificial Sequence: Synthetic oligonucleotide
ucuuggacaccaucaugua

SEQ ID NO: 2903050 - RNA, 19 nt, Artificial Sequence
  Description of Artificial Sequence: Synthetic oligonucleotide
aaguggagcugcugucuaa

SEQ ID NO: 2903051 - RNA, 19 nt, Artificial Sequence
  Description of Artificial Sequence: Synthetic oligonucleotide
uuacacugccauccacuau

SEQ ID NO: 2903052 - RNA, 19 nt, Artificial Sequence
  Description of Artificial Sequence: Synthetic oligonucleotide
uugcacaguacgggcagcc

SEQ ID NO: 2903053 - RNA, 19 nt, Artificial Sequence
  Description of Artificial Sequence: Synthetic oligonucleotide
augacugauggcguuugcu

SEQ ID NO: 2903054 - RNA, 19 nt, Artificial Sequence
  Description of Artificial Sequence: Synthetic oligonucleotide
guacugagaagacccaugu

SEQ ID NO: 2903055 - RNA, 19 nt, Artificial Sequence
  Description of Artificial Sequence: Synthetic oligonucleotide
cacaguacgggcagccauc

SEQ ID NO: 2903056 - RNA, 19 nt, Artificial Sequence
  Description of Artificial Sequence: Synthetic oligonucleotide
guuggggcacuccugccac

SEQ ID NO: 2903057 - RNA, 19 nt, Artificial Sequence
  Description of Artificial Sequence: Synthetic oligonucleotide
aucuuacgcaccucuggau

SEQ ID NO: 2903058 - RNA, 19 nt, Artificial Sequence
  Description of Artificial Sequence: Synthetic oligonucleotide
uguuuucugcaaggguugu

SEQ ID NO: 2903059 - RNA, 19 nt, Artificial Sequence
  Description of Artificial Sequence: Synthetic oligonucleotide
uuggcaucucaagucuucu

SEQ ID NO: 2903060 - RNA, 19 nt, Artificial Sequence
  Description of Artificial Sequence: Synthetic oligonucleotide
cuaccaucucuucugucca

SEQ ID NO: 2903061 - RNA, 19 nt, Artificial Sequence
  Description of Artificial Sequence: Synthetic oligonucleotide
cuaugacugauggcguuug

SEQ ID NO: 2903062 - RNA, 19 nt, Artificial Sequence
  Description of Artificial Sequence: Synthetic oligonucleotide
gaaucaucauguugggcau

SEQ ID NO: 2903063 - RNA, 19 nt, Artificial Sequence
  Description of Artificial Sequence: Synthetic oligonucleotide
augcuuguuggggcacucc

SEQ ID NO: 2903064 - RNA, 19 nt, Artificial Sequence
  Description of Artificial Sequence: Synthetic oligonucleotide
guuugccaaguggagcugc

SEQ ID NO: 2903065 - RNA, 19 nt, Artificial Sequence
  Description of Artificial Sequence: Synthetic oligonucleotide
cugaaacaccaugugcgug

SEQ ID NO: 2903066 - RNA, 19 nt, Artificial Sequence
  Description of Artificial Sequence: Synthetic oligonucleotide
  modified_base (10)..(10): a, c, u, g, unknown or other
ggaugaaacnugaaauugu

SEQ ID NO: 2903067 - RNA, 19 nt, Artificial Sequence
  Description of Artificial Sequence: Synthetic oligonucleotide
ugaguccauugcacaguac

SEQ ID NO: 2903068 - RNA, 19 nt, Artificial Sequence
  Description of Artificial Sequence: Synthetic oligonucleotide
uuguuggggcacuccugcc

SEQ ID NO: 2903069 - RNA, 19 nt, Artificial Sequence
  Description of Artificial Sequence: Synthetic oligonucleotide
cacgugguacugagaagac

SEQ ID NO: 2903070 - RNA, 19 nt, Artificial Sequence
  Description of Artificial Sequence: Synthetic oligonucleotide
gguacugagaagacccaug

SEQ ID NO: 2903071 - RNA, 19 nt, Artificial Sequence
  Description of Artificial Sequence: Synthetic oligonucleotide
aagucuucugaaacaccau

SEQ ID NO: 2903072 - RNA, 19 nt, Artificial Sequence
  Description of Artificial Sequence: Synthetic oligonucleotide
caugugcgugaguccauug

SEQ ID NO: 2903073 - RNA, 19 nt, Artificial Sequence
  Description of Artificial Sequence: Synthetic oligonucleotide
guuugcuaccaucucuucu

SEQ ID NO: 2903074 - RNA, 19 nt, Artificial Sequence
  Description of Artificial Sequence: Synthetic oligonucleotide
uaauggcuguuugccaagu

SEQ ID NO: 2903075 - RNA, 19 nt, Artificial Sequence
  Description of Artificial Sequence: Synthetic oligonucleotide
caucauuggcaucucaagu

SEQ ID NO: 2903076 - RNA, 19 nt, Artificial Sequence
  Description of Artificial Sequence: Synthetic oligonucleotide
uguuugccaaguggagcug

SEQ ID NO: 2903077 - RNA, 19 nt, Artificial Sequence
  Description of Artificial Sequence: Synthetic oligonucleotide
ggcauugguguuuucugca

SEQ ID NO: 2903078 - RNA, 19 nt, Artificial Sequence
  Description of Artificial Sequence: Synthetic oligonucleotide
cuaccuuuggggaaauagu

SEQ ID NO: 2903079 - RNA, 19 nt, Artificial Sequence
  Description of Artificial Sequence: Synthetic oligonucleotide
cuuggacaccaucauguaa

SEQ ID NO: 2903080 - RNA, 19 nt, Artificial Sequence
  Description of Artificial Sequence: Synthetic oligonucleotide
gggcacuccugccacgugg

SEQ ID NO: 2903081 - RNA, 19 nt, Artificial Sequence
  Description of Artificial Sequence: Synthetic oligonucleotide
aaacaccaugugcgugagu

SEQ ID NO: 2903082 - RNA, 19 nt, Artificial Sequence
  Description of Artificial Sequence: Synthetic oligonucleotide
ugcaaggguugugaaacuu

SEQ ID NO: 2903083 - RNA, 19 nt, Artificial Sequence
  Description of Artificial Sequence: Synthetic oligonucleotide
caucucaagucuucugaaa

SEQ ID NO: 2903084 - RNA, 19 nt, Artificial Sequence
  Description of Artificial Sequence: Synthetic oligonucleotide
gcuguuugccaaguggagc

SEQ ID NO: 2903085 - RNA, 19 nt, Artificial Sequence
  Description of Artificial Sequence: Synthetic oligonucleotide
cuuuucaaagaaccaucua

SEQ ID NO: 2903086 - RNA, 19 nt, Artificial Sequence
  Description of Artificial Sequence: Synthetic oligonucleotide
caccucuggauccggauga

SEQ ID NO: 2903087 - RNA, 19 nt, Artificial Sequence
  Description of Artificial Sequence: Synthetic oligonucleotide
uccaauccaaaggacccuu

SEQ ID NO: 2903088 - RNA, 19 nt, Artificial Sequence
  Description of Artificial Sequence: Synthetic oligonucleotide
aguucuccgucaggugcac

SEQ ID NO: 2903089 - RNA, 19 nt, Artificial Sequence
  Description of Artificial Sequence: Synthetic oligonucleotide
guuuucugcaaggguugug

SEQ ID NO: 2903090 - RNA, 19 nt, Artificial Sequence
  Description of Artificial Sequence: Synthetic oligonucleotide
uuggggcacuccugccacg

SEQ ID NO: 2903091 - RNA, 19 nt, Artificial Sequence
  Description of Artificial Sequence: Synthetic oligonucleotide
acuaugacugauggcguuu

SEQ ID NO: 2903092 - RNA, 19 nt, Artificial Sequence
  Description of Artificial Sequence: Synthetic oligonucleotide
ugguacugagaagacccau

SEQ ID NO: 2903093 - RNA, 19 nt, Artificial Sequence
  Description of Artificial Sequence: Synthetic oligonucleotide
  modified_base (16)..(16): a, c, u, g, unknown or other
ggauccggaugaaacnuga

SEQ ID NO: 2903094 - RNA, 19 nt, Artificial Sequence
  Description of Artificial Sequence: Synthetic oligonucleotide
ccaaaggacccuuuuauua

SEQ ID NO: 2903095 - RNA, 19 nt, Artificial Sequence
  Description of Artificial Sequence: Synthetic oligonucleotide
uacaugcuuguuggggcac

SEQ ID NO: 2903096 - RNA, 19 nt, Artificial Sequence
  Description of Artificial Sequence: Synthetic oligonucleotide
gcgugaguccauugcacag

SEQ ID NO: 2903097 - RNA, 19 nt, Artificial Sequence
  Description of Artificial Sequence: Synthetic oligonucleotide
gacccaugucucuuggacu

SEQ ID NO: 2903098 - RNA, 19 nt, Artificial Sequence
  Description of Artificial Sequence: Synthetic oligonucleotide
cccuuuuauuacagcacag

SEQ ID NO: 2903099 - RNA, 19 nt, Artificial Sequence
  Description of Artificial Sequence: Synthetic oligonucleotide
ggucauuuggaucaucuuu

SEQ ID NO: 2903100 - RNA, 19 nt, Artificial Sequence
  Description of Artificial Sequence: Synthetic oligonucleotide
  modified_base (11)..(11): a, c, u, g, unknown or other
cggaugaaacnugaaauug

SEQ ID NO: 2903101 - RNA, 19 nt, Artificial Sequence
  Description of Artificial Sequence: Synthetic oligonucleotide
aaucaucauguugggcauu

SEQ ID NO: 2903102 - RNA, 19 nt, Artificial Sequence
  Description of Artificial Sequence: Synthetic oligonucleotide
ggaucaucuuuuacacugc

SEQ ID NO: 2903103 - RNA, 19 nt, Artificial Sequence
  Description of Artificial Sequence: Synthetic oligonucleotide
gucauuuggaucaucuuuu

SEQ ID NO: 2903104 - RNA, 19 nt, Artificial Sequence
  Description of Artificial Sequence: Synthetic oligonucleotide
aguggagcugcugucuaau

SEQ ID NO: 2903105 - RNA, 19 nt, Artificial Sequence
  Description of Artificial Sequence: Synthetic oligonucleotide
gucuucugaaacaccaugu

SEQ ID NO: 2903106 - RNA, 19 nt, Artificial Sequence
  Description of Artificial Sequence: Synthetic oligonucleotide
cgggcagccaucuaauaag

SEQ ID NO: 2903107 - RNA, 19 nt, Artificial Sequence
  Description of Artificial Sequence: Synthetic oligonucleotide
uccgucaggugcacaguuu

SEQ ID NO: 2903108 - RNA, 19 nt, Artificial Sequence
  Description of Artificial Sequence: Synthetic oligonucleotide
uggcguuugcuaccaucuc

SEQ ID NO: 2903109 - RNA, 19 nt, Artificial Sequence
  Description of Artificial Sequence: Synthetic oligonucleotide
acaguacgggcagccaucu

SEQ ID NO: 2903110 - RNA, 19 nt, Artificial Sequence
  Description of Artificial Sequence: Synthetic oligonucleotide
ccugccacgugguacugag

SEQ ID NO: 2903111 - RNA, 19 nt, Artificial Sequence
  Description of Artificial Sequence: Synthetic oligonucleotide
ugcuaccaucucuucuguc

SEQ ID NO: 2903112 - RNA, 19 nt, Artificial Sequence
  Description of Artificial Sequence: Synthetic oligonucleotide
ggguugugaaacuuuucaa

SEQ ID NO: 2903113 - RNA, 19 nt, Artificial Sequence
  Description of Artificial Sequence: Synthetic oligonucleotide
uacgcaccucuggauccgg

SEQ ID NO: 2903114 - RNA, 19 nt, Artificial Sequence
  Description of Artificial Sequence: Synthetic oligonucleotide
ggggaaauaguugugaauu

SEQ ID NO: 2903115 - RNA, 19 nt, Artificial Sequence
  Description of Artificial Sequence: Synthetic oligonucleotide
uaccaucucuucuguccaa

SEQ ID NO: 2903116 - RNA, 19 nt, Artificial Sequence
  Description of Artificial Sequence: Synthetic oligonucleotide
ccauccacuaugacugaug

SEQ ID NO: 2903117 - RNA, 19 nt, Artificial Sequence
  Description of Artificial Sequence: Synthetic oligonucleotide
uguugggcauugguguuuu

SEQ ID NO: 2903118 - RNA, 19 nt, Artificial Sequence
  Description of Artificial Sequence: Synthetic oligonucleotide
gugaguccauugcacagua

SEQ ID NO: 2903119 - RNA, 19 nt, Artificial Sequence
  Description of Artificial Sequence: Synthetic oligonucleotide
ugcacaguacgggcagcca

SEQ ID NO: 2903120 - RNA, 19 nt, Artificial Sequence
  Description of Artificial Sequence: Synthetic oligonucleotide
caccaugugcgugagucca

SEQ ID NO: 2903121 - RNA, 19 nt, Artificial Sequence
  Description of Artificial Sequence: Synthetic oligonucleotide
ugccauccacuaugacuga

SEQ ID NO: 2903122 - RNA, 19 nt, Artificial Sequence
  Description of Artificial Sequence: Synthetic oligonucleotide
caucauguugggcauuggu

SEQ ID NO: 2903123 - RNA, 19 nt, Artificial Sequence
  Description of Artificial Sequence: Synthetic oligonucleotide
gguguuuucugcaaggguu

SEQ ID NO: 2903124 - RNA, 19 nt, Artificial Sequence
  Description of Artificial Sequence: Synthetic oligonucleotide
gugcgugaguccauugcac

SEQ ID NO: 2903125 - RNA, 19 nt, Artificial Sequence
  Description of Artificial Sequence: Synthetic oligonucleotide
guuuaucacagaccauuuu

SEQ ID NO: 2903126 - RNA, 19 nt, Artificial Sequence
  Description of Artificial Sequence: Synthetic oligonucleotide
ccuuuggggaaauaguugu

SEQ ID NO: 2903127 - RNA, 19 nt, Artificial Sequence
  Description of Artificial Sequence: Synthetic oligonucleotide
ucuccgucaggugcacagu

SEQ ID NO: 2903128 - RNA, 19 nt, Artificial Sequence
  Description of Artificial Sequence: Synthetic oligonucleotide
uacgggcagccaucuaaua

SEQ ID NO: 2903129 - RNA, 19 nt, Artificial Sequence
  Description of Artificial Sequence: Synthetic oligonucleotide
uggggcacuccugccacgu

SEQ ID NO: 2903130 - RNA, 19 nt, Artificial Sequence
  Description of Artificial Sequence: Synthetic oligonucleotide
ggcuguuugccaaguggag

SEQ ID NO: 2903131 - RNA, 19 nt, Artificial Sequence
  Description of Artificial Sequence: Synthetic oligonucleotide
gcaccucuggauccggaug

SEQ ID NO: 2903132 - RNA, 19 nt, Artificial Sequence
  Description of Artificial Sequence: Synthetic oligonucleotide
ccuuuuauuacagcacaga

SEQ ID NO: 2903133 - RNA, 19 nt, Artificial Sequence
  Description of Artificial Sequence: Synthetic oligonucleotide
accaucucuucuguccaau

SEQ ID NO: 2903134 - RNA, 19 nt, Artificial Sequence
  Description of Artificial Sequence: Synthetic oligonucleotide
caaggguugugaaacuuuu

SEQ ID NO: 2903135 - RNA, 19 nt, Artificial Sequence
  Description of Artificial Sequence: Synthetic oligonucleotide
guggagcugcugucuaauc

SEQ ID NO: 2903136 - RNA, 19 nt, Artificial Sequence
  Description of Artificial Sequence: Synthetic oligonucleotide
gcaucucaagucuucugaa

SEQ ID NO: 2903137 - RNA, 19 nt, Artificial Sequence
  Description of Artificial Sequence: Synthetic oligonucleotide
acaugcuuguuggggcacu

SEQ ID NO: 2903138 - RNA, 19 nt, Artificial Sequence
  Description of Artificial Sequence: Synthetic oligonucleotide
gacuuagaaucaucauguu

SEQ ID NO: 2903139 - RNA, 19 nt, Artificial Sequence
  Description of Artificial Sequence: Synthetic oligonucleotide
cugauggcguuugcuacca

SEQ ID NO: 2903140 - RNA, 19 nt, Artificial Sequence
  Description of Artificial Sequence: Synthetic oligonucleotide
  modified_base (15)..(15): a, c, u, g, unknown or other
gauccggaugaaacnugaa

SEQ ID NO: 2903141 - RNA, 19 nt, Artificial Sequence
  Description of Artificial Sequence: Synthetic oligonucleotide
cucuucuguccaauccaaa

SEQ ID NO: 2903142 - RNA, 19 nt, Artificial Sequence
  Description of Artificial Sequence: Synthetic oligonucleotide
caugucucuuggacuuaga

SEQ ID NO: 2903143 - RNA, 19 nt, Artificial Sequence
  Description of Artificial Sequence: Synthetic oligonucleotide
acacugccauccacuauga

SEQ ID NO: 2903144 - RNA, 19 nt, Artificial Sequence
  Description of Artificial Sequence: Synthetic oligonucleotide
caugcuuguuggggcacuc

SEQ ID NO: 2903145 - RNA, 19 nt, Artificial Sequence
  Description of Artificial Sequence: Synthetic oligonucleotide
gccacgugguacugagaag

SEQ ID NO: 2903146 - RNA, 19 nt, Artificial Sequence
  Description of Artificial Sequence: Synthetic oligonucleotide
ggcguuugcuaccaucucu

SEQ ID NO: 2903147 - RNA, 19 nt, Artificial Sequence
  Description of Artificial Sequence: Synthetic oligonucleotide
auguugggcauugguguuu

SEQ ID NO: 2903148 - RNA, 19 nt, Artificial Sequence
  Description of Artificial Sequence: Synthetic oligonucleotide
cacugccauccacuaugac

SEQ ID NO: 2903149 - RNA, 19 nt, Artificial Sequence
  Description of Artificial Sequence: Synthetic oligonucleotide
gcauugguguuuucugcaa

SEQ ID NO: 2903150 - RNA, 19 nt, Artificial Sequence
  Description of Artificial Sequence: Synthetic oligonucleotide
gugguacugagaagaccca

SEQ ID NO: 2903151 - RNA, 19 nt, Artificial Sequence
  Description of Artificial Sequence: Synthetic oligonucleotide
gagaagacccaugucucuu

SEQ ID NO: 2903152 - RNA, 19 nt, Artificial Sequence
  Description of Artificial Sequence: Synthetic oligonucleotide
caaguggagcugcugucua

SEQ ID NO: 2903153 - RNA, 19 nt, Artificial Sequence
  Description of Artificial Sequence: Synthetic oligonucleotide
ugauggcguuugcuaccau

SEQ ID NO: 2903154 - RNA, 19 nt, Artificial Sequence
  Description of Artificial Sequence: Synthetic oligonucleotide
gccaaguggagcugcuguc

SEQ ID NO: 2903155 - RNA, 19 nt, Artificial Sequence
  Description of Artificial Sequence: Synthetic oligonucleotide
gucuaaucuuacgcaccuc

SEQ ID NO: 2903156 - RNA, 19 nt, Artificial Sequence
  Description of Artificial Sequence: Synthetic oligonucleotide
ccauugcacaguacgggca

SEQ ID NO: 2903157 - RNA, 19 nt, Artificial Sequence
  Description of Artificial Sequence: Synthetic oligonucleotide
  modified_base (18)..(18): a, c, u, g, unknown or other
cuggauccggaugaaacnu

SEQ ID NO: 2903158 - RNA, 19 nt, Artificial Sequence
  Description of Artificial Sequence: Synthetic oligonucleotide
gucuuccuuaguucuccgu

SEQ ID NO: 2903159 - RNA, 19 nt, Artificial Sequence
  Description of Artificial Sequence: Synthetic oligonucleotide
gcuuguuggggcacuccug

SEQ ID NO: 2903160 - RNA, 19 nt, Artificial Sequence
  Description of Artificial Sequence: Synthetic oligonucleotide
ccaucucuucuguccaauc

SEQ ID NO: 2903161 - RNA, 19 nt, Artificial Sequence
  Description of Artificial Sequence: Synthetic oligonucleotide
gggaaauaguugugaauuu

SEQ ID NO: 2903162 - RNA, 19 nt, Artificial Sequence
  Description of Artificial Sequence: Synthetic oligonucleotide
caauccaaaggacccuuuu

SEQ ID NO: 2903163 - RNA, 19 nt, Artificial Sequence
  Description of Artificial Sequence: Synthetic oligonucleotide
caucauguaauggcuguuu

SEQ ID NO: 2903164 - RNA, 19 nt, Artificial Sequence
  Description of Artificial Sequence: Synthetic oligonucleotide
ccuuaguucuccgucaggu

SEQ ID NO: 2903165 - RNA, 19 nt, Artificial Sequence
  Description of Artificial Sequence: Synthetic oligonucleotide
guugggcauugguguuuuc

SEQ ID NO: 2903166 - RNA, 19 nt, Artificial Sequence
  Description of Artificial Sequence: Synthetic oligonucleotide
guccaauccaaaggacccu

SEQ ID NO: 2903167 - RNA, 19 nt, Artificial Sequence
  Description of Artificial Sequence: Synthetic oligonucleotide
cacuaugacugauggcguu

SEQ ID NO: 2903168 - RNA, 19 nt, Artificial Sequence
  Description of Artificial Sequence: Synthetic oligonucleotide
cauuggcaucucaagucuu

SEQ ID NO: 2903169 - RNA, 19 nt, Artificial Sequence
  Description of Artificial Sequence: Synthetic oligonucleotide
cugcaaggguugugaaacu

SEQ ID NO: 2903170 - RNA, 19 nt, Artificial Sequence
  Description of Artificial Sequence: Synthetic oligonucleotide
  modified_base (12)..(12): a, c, u, g, unknown or other
ccggaugaaacnugaaauu

SEQ ID NO: 2903171 - RNA, 19 nt, Artificial Sequence
  Description of Artificial Sequence: Synthetic oligonucleotide
ccaucuaccuuuggggaaa

SEQ ID NO: 2903172 - RNA, 19 nt, Artificial Sequence
  Description of Artificial Sequence: Synthetic oligonucleotide
guacgggcagccaucuaau

SEQ ID NO: 2903173 - RNA, 19 nt, Artificial Sequence
  Description of Artificial Sequence: Synthetic oligonucleotide
cugccacgugguacugaga

SEQ ID NO: 2903174 - RNA, 19 nt, Artificial Sequence
  Description of Artificial Sequence: Synthetic oligonucleotide
cguuugcuaccaucucuuc

SEQ ID NO: 2903175 - RNA, 19 nt, Artificial Sequence
  Description of Artificial Sequence: Synthetic oligonucleotide
gcacaguacgggcagccau

SEQ ID NO: 2903176 - RNA, 19 nt, Artificial Sequence
  Description of Artificial Sequence: Synthetic oligonucleotide
aucuaccuuuggggaaaua

SEQ ID NO: 2903177 - RNA, 19 nt, Artificial Sequence
  Description of Artificial Sequence: Synthetic oligonucleotide
cuccugccacgugguacug

SEQ ID NO: 2903178 - RNA, 19 nt, Artificial Sequence
  Description of Artificial Sequence: Synthetic oligonucleotide
cucuuggacuuagaaucau

SEQ ID NO: 2903179 - RNA, 19 nt, Artificial Sequence
  Description of Artificial Sequence: Synthetic oligonucleotide
guucuccgucaggugcaca

SEQ ID NO: 2903180 - RNA, 19 nt, Artificial Sequence
  Description of Artificial Sequence: Synthetic oligonucleotide
cuccgucaggugcacaguu

SEQ ID NO: 2903181 - RNA, 19 nt, Artificial Sequence
  Description of Artificial Sequence: Synthetic oligonucleotide
ccacuaugacugauggcgu

SEQ ID NO: 2903182 - RNA, 19 nt, Artificial Sequence
  Description of Artificial Sequence: Synthetic oligonucleotide
gcaaggguugugaaacuuu

SEQ ID NO: 2903183 - RNA, 19 nt, Artificial Sequence
  Description of Artificial Sequence: Synthetic oligonucleotide
acgcaccucuggauccgga

SEQ ID NO: 2903184 - RNA, 19 nt, Artificial Sequence
  Description of Artificial Sequence: Synthetic oligonucleotide
ggggcacuccugccacgug

SEQ ID NO: 2903185 - RNA, 19 nt, Artificial Sequence
  Description of Artificial Sequence: Synthetic oligonucleotide
gcguuugcuaccaucucuu

SEQ ID NO: 2903186 - RNA, 19 nt, Artificial Sequence
  Description of Artificial Sequence: Synthetic oligonucleotide
ccaaguggagcugcugucu

SEQ ID NO: 2903187 - RNA, 19 nt, Artificial Sequence
  Description of Artificial Sequence: Synthetic oligonucleotide
caguacgggcagccaucua

SEQ ID NO: 2903188 - RNA, 19 nt, Artificial Sequence
  Description of Artificial Sequence: Synthetic oligonucleotide
ccgucaggugcacaguuuu

SEQ ID NO: 2903189 - RNA, 19 nt, Artificial Sequence
  Description of Artificial Sequence: Synthetic oligonucleotide
caucuaccuuuggggaaau

SEQ ID NO: 2903190 - RNA, 19 nt, Artificial Sequence
  Description of Artificial Sequence: Synthetic oligonucleotide
gcacagauacaugcuuguu

SEQ ID NO: 2903191 - RNA, 19 nt, Artificial Sequence
  Description of Artificial Sequence: Synthetic oligonucleotide
cgugaguccauugcacagu

SEQ ID NO: 2903192 - RNA, 19 nt, Artificial Sequence
  Description of Artificial Sequence: Synthetic oligonucleotide
gccauccacuaugacugau

SEQ ID NO: 2903193 - RNA, 19 nt, Artificial Sequence
  Description of Artificial Sequence: Synthetic oligonucleotide
ccaauccaaaggacccuuu

SEQ ID NO: 2903194 - RNA, 19 nt, Artificial Sequence
  Description of Artificial Sequence: Synthetic oligonucleotide
ccucuggauccggaugaaa

SEQ ID NO: 2903195 - RNA, 19 nt, Artificial Sequence
  Description of Artificial Sequence: Synthetic oligonucleotide
ccaucauguaauggcuguu

SEQ ID NO: 2903196 - RNA, 19 nt, Artificial Sequence
  Description of Artificial Sequence: Synthetic oligonucleotide
cccaugucucuuggacuua

SEQ ID NO: 2903197 - RNA, 19 nt, Artificial Sequence
  Description of Artificial Sequence: Synthetic oligonucleotide
cgcaccucuggauccggau

SEQ ID NO: 2903198 - RNA, 19 nt, Artificial Sequence
  Description of Artificial Sequence: Synthetic oligonucleotide
ccaugugcgugaguccauu

SEQ ID NO: 2903199 - RNA, 19 nt, Artificial Sequence
  Description of Artificial Sequence: Synthetic oligonucleotide
  modified_base (1)..(1): a, c, u, g, unknown or other
nugaaauugucuuccuuag

SEQ ID NO: 2903200 - RNA, 19 nt, Artificial Sequence
  Description of Artificial Sequence: Synthetic oligonucleotide
uucaguuucuccaagaccu

SEQ ID NO: 2903201 - RNA, 19 nt, Artificial Sequence
  Description of Artificial Sequence: Synthetic oligonucleotide
acagcauucuguuuggagc

SEQ ID NO: 2903202 - RNA, 19 nt, Artificial Sequence
  Description of Artificial Sequence: Synthetic oligonucleotide
uagacaggaaucuagcagg

SEQ ID NO: 2903203 - RNA, 19 nt, Artificial Sequence
  Description of Artificial Sequence: Synthetic oligonucleotide
aguuguagaggccaagagc

SEQ ID NO: 2903204 - RNA, 19 nt, Artificial Sequence
  Description of Artificial Sequence: Synthetic oligonucleotide
accacccuuauccagaacc

SEQ ID NO: 2903205 - RNA, 19 nt, Artificial Sequence
  Description of Artificial Sequence: Synthetic oligonucleotide
acaggaaucuagcaggggc

SEQ ID NO: 2903206 - RNA, 19 nt, Artificial Sequence
  Description of Artificial Sequence: Synthetic oligonucleotide
aagauaccgacagagcucc

SEQ ID NO: 2903207 - RNA, 19 nt, Artificial Sequence
  Description of Artificial Sequence: Synthetic oligonucleotide
agaaccacaucacucuucc

SEQ ID NO: 2903208 - RNA, 19 nt, Artificial Sequence
  Description of Artificial Sequence: Synthetic oligonucleotide
uugcuucucccucagaugg

SEQ ID NO: 2903209 - RNA, 19 nt, Artificial Sequence
  Description of Artificial Sequence: Synthetic oligonucleotide
cuuggaaagauaccgacag

SEQ ID NO: 2903210 - RNA, 19 nt, Artificial Sequence
  Description of Artificial Sequence: Synthetic oligonucleotide
aaccacaucacucuuccug

SEQ ID NO: 2903211 - RNA, 19 nt, Artificial Sequence
  Description of Artificial Sequence: Synthetic oligonucleotide
aaccuuuaggaucaguugu

SEQ ID NO: 2903212 - RNA, 19 nt, Artificial Sequence
  Description of Artificial Sequence: Synthetic oligonucleotide
uaagaccuuggaaagauac

SEQ ID NO: 2903213 - RNA, 19 nt, Artificial Sequence
  Description of Artificial Sequence: Synthetic oligonucleotide
aggaucaguugucacaggc

SEQ ID NO: 2903214 - RNA, 19 nt, Artificial Sequence
  Description of Artificial Sequence: Synthetic oligonucleotide
uuuaggaucaguugucaca

SEQ ID NO: 2903215 - RNA, 19 nt, Artificial Sequence
  Description of Artificial Sequence: Synthetic oligonucleotide
uggaaagauaccgacagag

SEQ ID NO: 2903216 - RNA, 19 nt, Artificial Sequence
  Description of Artificial Sequence: Synthetic oligonucleotide
aacuagacaggaaucuagc

SEQ ID NO: 2903217 - RNA, 19 nt, Artificial Sequence
  Description of Artificial Sequence: Synthetic oligonucleotide
uuaggaucaguugucacag

SEQ ID NO: 2903218 - RNA, 19 nt, Artificial Sequence
  Description of Artificial Sequence: Synthetic oligonucleotide
aaagauaccgacagagcuc

SEQ ID NO: 2903219 - RNA, 19 nt, Artificial Sequence
  Description of Artificial Sequence: Synthetic oligonucleotide
agaccuuggaaagauaccg

SEQ ID NO: 2903220 - RNA, 19 nt, Artificial Sequence
  Description of Artificial Sequence: Synthetic oligonucleotide
agcucuaagaccuuggaaa

SEQ ID NO: 2903221 - RNA, 19 nt, Artificial Sequence
  Description of Artificial Sequence: Synthetic oligonucleotide
ucuccaagaccucuucugg

SEQ ID NO: 2903222 - RNA, 19 nt, Artificial Sequence
  Description of Artificial Sequence: Synthetic oligonucleotide
cuagacaggaaucuagcag

SEQ ID NO: 2903223 - RNA, 19 nt, Artificial Sequence
  Description of Artificial Sequence: Synthetic oligonucleotide
ucuuccugagcucuaagac

SEQ ID NO: 2903224 - RNA, 19 nt, Artificial Sequence
  Description of Artificial Sequence: Synthetic oligonucleotide
ucuagcaggggccgaaccg

SEQ ID NO: 2903225 - RNA, 19 nt, Artificial Sequence
  Description of Artificial Sequence: Synthetic oligonucleotide
uuccugagcucuaagaccu

SEQ ID NO: 2903226 - RNA, 19 nt, Artificial Sequence
  Description of Artificial Sequence: Synthetic oligonucleotide
accuuggaaagauaccgac

SEQ ID NO: 2903227 - RNA, 19 nt, Artificial Sequence
  Description of Artificial Sequence: Synthetic oligonucleotide
uucccgacgauuuaccacc

SEQ ID NO: 2903228 - RNA, 19 nt, Artificial Sequence
  Description of Artificial Sequence: Synthetic oligonucleotide
uuacccuugcucaucgucc

SEQ ID NO: 2903229 - RNA, 19 nt, Artificial Sequence
  Description of Artificial Sequence: Synthetic oligonucleotide
aagaccuuggaaagauacc

SEQ ID NO: 2903230 - RNA, 19 nt, Artificial Sequence
  Description of Artificial Sequence: Synthetic oligonucleotide
ugacacaaccuuuaggauc

SEQ ID NO: 2903231 - RNA, 19 nt, Artificial Sequence
  Description of Artificial Sequence: Synthetic oligonucleotide
gcaucguggaacuagacag

SEQ ID NO: 2903232 - RNA, 19 nt, Artificial Sequence
  Description of Artificial Sequence: Synthetic oligonucleotide
ggugacacaaccuuuagga

SEQ ID NO: 2903233 - RNA, 19 nt, Artificial Sequence
  Description of Artificial Sequence: Synthetic oligonucleotide
ugguguuucagguuccuug

SEQ ID NO: 2903234 - RNA, 19 nt, Artificial Sequence
  Description of Artificial Sequence: Synthetic oligonucleotide
ucuucuggaguuguagagg

SEQ ID NO: 2903235 - RNA, 19 nt, Artificial Sequence
  Description of Artificial Sequence: Synthetic oligonucleotide
cuuauccagaaccacauca

SEQ ID NO: 2903236 - RNA, 19 nt, Artificial Sequence
  Description of Artificial Sequence: Synthetic oligonucleotide
uuaggcaucguggaacuag

SEQ ID NO: 2903237 - RNA, 19 nt, Artificial Sequence
  Description of Artificial Sequence: Synthetic oligonucleotide
uccagaaccacaucacucu

SEQ ID NO: 2903238 - RNA, 19 nt, Artificial Sequence
  Description of Artificial Sequence: Synthetic oligonucleotide
cuuccugagcucuaagacc

SEQ ID NO: 2903239 - RNA, 19 nt, Artificial Sequence
  Description of Artificial Sequence: Synthetic oligonucleotide
cgauuuaccacccuuaucc

SEQ ID NO: 2903240 - RNA, 19 nt, Artificial Sequence
  Description of Artificial Sequence: Synthetic oligonucleotide
gaacuagacaggaaucuag

SEQ ID NO: 2903241 - RNA, 19 nt, Artificial Sequence
  Description of Artificial Sequence: Synthetic oligonucleotide
auuugcuucucccucagau

SEQ ID NO: 2903242 - RNA, 19 nt, Artificial Sequence
  Description of Artificial Sequence: Synthetic oligonucleotide
uggugacacaaccuuuagg

SEQ ID NO: 2903243 - RNA, 19 nt, Artificial Sequence
  Description of Artificial Sequence: Synthetic oligonucleotide
uccaagaccucuucuggag

SEQ ID NO: 2903244 - RNA, 19 nt, Artificial Sequence
  Description of Artificial Sequence: Synthetic oligonucleotide
auuuaccacccuuauccag

SEQ ID NO: 2903245 - RNA, 19 nt, Artificial Sequence
  Description of Artificial Sequence: Synthetic oligonucleotide
agagcuccgcauuugcuuc

SEQ ID NO: 2903246 - RNA, 19 nt, Artificial Sequence
  Description of Artificial Sequence: Synthetic oligonucleotide
aaccgcugcgaccaaccac

SEQ ID NO: 2903247 - RNA, 19 nt, Artificial Sequence
  Description of Artificial Sequence: Synthetic oligonucleotide
uggcaauggugacacaacc

SEQ ID NO: 2903248 - RNA, 19 nt, Artificial Sequence
  Description of Artificial Sequence: Synthetic oligonucleotide
uuuacccuugcucaucguc

SEQ ID NO: 2903249 - RNA, 19 nt, Artificial Sequence
  Description of Artificial Sequence: Synthetic oligonucleotide
gacacaaccuuuaggauca

SEQ ID NO: 2903250 - RNA, 19 nt, Artificial Sequence
  Description of Artificial Sequence: Synthetic oligonucleotide
ucacaggcccagcaggagg

SEQ ID NO: 2903251 - RNA, 19 nt, Artificial Sequence
  Description of Artificial Sequence: Synthetic oligonucleotide
gaggaggugguguuucagg

SEQ ID NO: 2903252 - RNA, 19 nt, Artificial Sequence
  Description of Artificial Sequence: Synthetic oligonucleotide
uuugcuucucccucagaug

SEQ ID NO: 2903253 - RNA, 19 nt, Artificial Sequence
  Description of Artificial Sequence: Synthetic oligonucleotide
acaccgacagccucagugg

SEQ ID NO: 2903254 - RNA, 19 nt, Artificial Sequence
  Description of Artificial Sequence: Synthetic oligonucleotide
ucuaagaccuuggaaagau

SEQ ID NO: 2903255 - RNA, 19 nt, Artificial Sequence
  Description of Artificial Sequence: Synthetic oligonucleotide
gaguuguagaggccaagag

SEQ ID NO: 2903256 - RNA, 19 nt, Artificial Sequence
  Description of Artificial Sequence: Synthetic oligonucleotide
agccucaguggucagaucu

SEQ ID NO: 2903257 - RNA, 19 nt, Artificial Sequence
  Description of Artificial Sequence: Synthetic oligonucleotide
ucuguuuggagcccgguuu

SEQ ID NO: 2903258 - RNA, 19 nt, Artificial Sequence
  Description of Artificial Sequence: Synthetic oligonucleotide
uauccagaaccacaucacu

SEQ ID NO: 2903259 - RNA, 19 nt, Artificial Sequence
  Description of Artificial Sequence: Synthetic oligonucleotide
uuggcauggauggcaaugg

SEQ ID NO: 2903260 - RNA, 19 nt, Artificial Sequence
  Description of Artificial Sequence: Synthetic oligonucleotide
gauggaggggccgcaaucg

SEQ ID NO: 2903261 - RNA, 19 nt, Artificial Sequence
  Description of Artificial Sequence: Synthetic oligonucleotide
aaccacgagcugcagcauc

SEQ ID NO: 2903262 - RNA, 19 nt, Artificial Sequence
  Description of Artificial Sequence: Synthetic oligonucleotide
agagcuucaccaccuuuuc

SEQ ID NO: 2903263 - RNA, 19 nt, Artificial Sequence
  Description of Artificial Sequence: Synthetic oligonucleotide
cacaccgacagccucagug

SEQ ID NO: 2903264 - RNA, 19 nt, Artificial Sequence
  Description of Artificial Sequence: Synthetic oligonucleotide
caaccuuuaggaucaguug

SEQ ID NO: 2903265 - RNA, 19 nt, Artificial Sequence
  Description of Artificial Sequence: Synthetic oligonucleotide
gguguuucagguuccuugg

SEQ ID NO: 2903266 - RNA, 19 nt, Artificial Sequence
  Description of Artificial Sequence: Synthetic oligonucleotide
uucuuaggcaucguggaac

SEQ ID NO: 2903267 - RNA, 19 nt, Artificial Sequence
  Description of Artificial Sequence: Synthetic oligonucleotide
caggaaucuagcaggggcc

SEQ ID NO: 2903268 - RNA, 19 nt, Artificial Sequence
  Description of Artificial Sequence: Synthetic oligonucleotide
uuucagguuccuugguuug

SEQ ID NO: 2903269 - RNA, 19 nt, Artificial Sequence
  Description of Artificial Sequence: Synthetic oligonucleotide
uggaacuagacaggaaucu

SEQ ID NO: 2903270 - RNA, 19 nt, Artificial Sequence
  Description of Artificial Sequence: Synthetic oligonucleotide
acuagacaggaaucuagca

SEQ ID NO: 2903271 - RNA, 19 nt, Artificial Sequence
  Description of Artificial Sequence: Synthetic oligonucleotide
aucuagcaggggccgaacc

SEQ ID NO: 2903272 - RNA, 19 nt, Artificial Sequence
  Description of Artificial Sequence: Synthetic oligonucleotide
accaaccacgagcugcagc

SEQ ID NO: 2903273 - RNA, 19 nt, Artificial Sequence
  Description of Artificial Sequence: Synthetic oligonucleotide
cuuuucccgacgauuuacc

SEQ ID NO: 2903274 - RNA, 19 nt, Artificial Sequence
  Description of Artificial Sequence: Synthetic oligonucleotide
ucugucacagcauucuguu

SEQ ID NO: 2903275 - RNA, 19 nt, Artificial Sequence
  Description of Artificial Sequence: Synthetic oligonucleotide
ucuuaggcaucguggaacu

SEQ ID NO: 2903276 - RNA, 19 nt, Artificial Sequence
  Description of Artificial Sequence: Synthetic oligonucleotide
uuucccgacgauuuaccac

SEQ ID NO: 2903277 - RNA, 19 nt, Artificial Sequence
  Description of Artificial Sequence: Synthetic oligonucleotide
ugagcucuaagaccuugga

SEQ ID NO: 2903278 - RNA, 19 nt, Artificial Sequence
  Description of Artificial Sequence: Synthetic oligonucleotide
uggauggcaauggugacac

SEQ ID NO: 2903279 - RNA, 19 nt, Artificial Sequence
  Description of Artificial Sequence: Synthetic oligonucleotide
ucagaucugucacagcauu

SEQ ID NO: 2903280 - RNA, 19 nt, Artificial Sequence
  Description of Artificial Sequence: Synthetic oligonucleotide
cuuucuuaggcaucgugga

SEQ ID NO: 2903281 - RNA, 19 nt, Artificial Sequence
  Description of Artificial Sequence: Synthetic oligonucleotide
uuuucccgacgauuuacca

SEQ ID NO: 2903282 - RNA, 19 nt, Artificial Sequence
  Description of Artificial Sequence: Synthetic oligonucleotide
caucguggaacuagacagg

SEQ ID NO: 2903283 - RNA, 19 nt, Artificial Sequence
  Description of Artificial Sequence: Synthetic oligonucleotide
guuguagaggccaagagcu

SEQ ID NO: 2903284 - RNA, 19 nt, Artificial Sequence
  Description of Artificial Sequence: Synthetic oligonucleotide
acgauuuaccacccuuauc

SEQ ID NO: 2903285 - RNA, 19 nt, Artificial Sequence
  Description of Artificial Sequence: Synthetic oligonucleotide
gcaaucgccacaccgacag

SEQ ID NO: 2903286 - RNA, 19 nt, Artificial Sequence
  Description of Artificial Sequence: Synthetic oligonucleotide
cacagcauucuguuuggag

SEQ ID NO: 2903287 - RNA, 19 nt, Artificial Sequence
  Description of Artificial Sequence: Synthetic oligonucleotide
accacaucacucuuccuga

SEQ ID NO: 2903288 - RNA, 19 nt, Artificial Sequence
  Description of Artificial Sequence: Synthetic oligonucleotide
gucacagcauucuguuugg

SEQ ID NO: 2903289 - RNA, 19 nt, Artificial Sequence
  Description of Artificial Sequence: Synthetic oligonucleotide
uuuggagcccgguuuggca

SEQ ID NO: 2903290 - RNA, 19 nt, Artificial Sequence
  Description of Artificial Sequence: Synthetic oligonucleotide
auccagaaccacaucacuc

SEQ ID NO: 2903291 - RNA, 19 nt, Artificial Sequence
  Description of Artificial Sequence: Synthetic oligonucleotide
guugucacaggcccagcag

SEQ ID NO: 2903292 - RNA, 19 nt, Artificial Sequence
  Description of Artificial Sequence: Synthetic oligonucleotide
cuuuaggaucaguugucac

SEQ ID NO: 2903293 - RNA, 19 nt, Artificial Sequence
  Description of Artificial Sequence: Synthetic oligonucleotide
gcugcgaccaaccacgagc

SEQ ID NO: 2903294 - RNA, 19 nt, Artificial Sequence
  Description of Artificial Sequence: Synthetic oligonucleotide
aauggugacacaaccuuua

SEQ ID NO: 2903295 - RNA, 19 nt, Artificial Sequence
  Description of Artificial Sequence: Synthetic oligonucleotide
agaucugucacagcauucu

SEQ ID NO: 2903296 - RNA, 19 nt, Artificial Sequence
  Description of Artificial Sequence: Synthetic oligonucleotide
agaggccaagagcuucacc

SEQ ID NO: 2903297 - RNA, 19 nt, Artificial Sequence
  Description of Artificial Sequence: Synthetic oligonucleotide
uuucuccaagaccucuucu

SEQ ID NO: 2903298 - RNA, 19 nt, Artificial Sequence
  Description of Artificial Sequence: Synthetic oligonucleotide
ggucagaucugucacagca

SEQ ID NO: 2903299 - RNA, 19 nt, Artificial Sequence
  Description of Artificial Sequence: Synthetic oligonucleotide
uguuucagguuccuugguu

SEQ ID NO: 2903300 - RNA, 19 nt, Artificial Sequence
  Description of Artificial Sequence: Synthetic oligonucleotide
gacagagcuccgcauuugc

SEQ ID NO: 2903301 - RNA, 19 nt, Artificial Sequence
  Description of Artificial Sequence: Synthetic oligonucleotide
aggccaagagcuucaccac

SEQ ID NO: 2903302 - RNA, 19 nt, Artificial Sequence
  Description of Artificial Sequence: Synthetic oligonucleotide
ugucacaggcccagcagga

SEQ ID NO: 2903303 - RNA, 19 nt, Artificial Sequence
  Description of Artificial Sequence: Synthetic oligonucleotide
cugagcucuaagaccuugg

SEQ ID NO: 2903304 - RNA, 19 nt, Artificial Sequence
  Description of Artificial Sequence: Synthetic oligonucleotide
gcuuucuuaggcaucgugg

SEQ ID NO: 2903305 - RNA, 19 nt, Artificial Sequence
  Description of Artificial Sequence: Synthetic oligonucleotide
uuucuuaggcaucguggaa

SEQ ID NO: 2903306 - RNA, 19 nt, Artificial Sequence
  Description of Artificial Sequence: Synthetic oligonucleotide
uucaccaccuuuucccgac

SEQ ID NO: 2903307 - RNA, 19 nt, Artificial Sequence
  Description of Artificial Sequence: Synthetic oligonucleotide
gauggcaauggugacacaa

SEQ ID NO: 2903308 - RNA, 19 nt, Artificial Sequence
  Description of Artificial Sequence: Synthetic oligonucleotide
gauuuaccacccuuaucca

SEQ ID NO: 2903309 - RNA, 19 nt, Artificial Sequence
  Description of Artificial Sequence: Synthetic oligonucleotide
accacgagcugcagcaucc

SEQ ID NO: 2903310 - RNA, 19 nt, Artificial Sequence
  Description of Artificial Sequence: Synthetic oligonucleotide
aaucuagcaggggccgaac

SEQ ID NO: 2903311 - RNA, 19 nt, Artificial Sequence
  Description of Artificial Sequence: Synthetic oligonucleotide
uucagguuccuugguuugg

SEQ ID NO: 2903312 - RNA, 19 nt, Artificial Sequence
  Description of Artificial Sequence: Synthetic oligonucleotide
uguagaggccaagagcuuc

SEQ ID NO: 2903313 - RNA, 19 nt, Artificial Sequence
  Description of Artificial Sequence: Synthetic oligonucleotide
uaggcaucguggaacuaga

SEQ ID NO: 2903314 - RNA, 19 nt, Artificial Sequence
  Description of Artificial Sequence: Synthetic oligonucleotide
uuggaaagauaccgacaga

SEQ ID NO: 2903315 - RNA, 19 nt, Artificial Sequence
  Description of Artificial Sequence: Synthetic oligonucleotide
aucgucccggcuuucuuag

SEQ ID NO: 2903316 - RNA, 19 nt, Artificial Sequence
  Description of Artificial Sequence: Synthetic oligonucleotide
cccgguuuggcauggaugg

SEQ ID NO: 2903317 - RNA, 19 nt, Artificial Sequence
  Description of Artificial Sequence: Synthetic oligonucleotide
gcucuaagaccuuggaaag

SEQ ID NO: 2903318 - RNA, 19 nt, Artificial Sequence
  Description of Artificial Sequence: Synthetic oligonucleotide
auggaggggccgcaaucgc

SEQ ID NO: 2903319 - RNA, 19 nt, Artificial Sequence
  Description of Artificial Sequence: Synthetic oligonucleotide
auggugacacaaccuuuag

SEQ ID NO: 2903320 - RNA, 19 nt, Artificial Sequence
  Description of Artificial Sequence: Synthetic oligonucleotide
aguugucacaggcccagca

SEQ ID NO: 2903321 - RNA, 19 nt, Artificial Sequence
  Description of Artificial Sequence: Synthetic oligonucleotide
gauaccgacagagcuccgc

SEQ ID NO: 2903322 - RNA, 19 nt, Artificial Sequence
  Description of Artificial Sequence: Synthetic oligonucleotide
uccgcauuugcuucucccu

SEQ ID NO: 2903323 - RNA, 19 nt, Artificial Sequence
  Description of Artificial Sequence: Synthetic oligonucleotide
acaaccuuuaggaucaguu

SEQ ID NO: 2903324 - RNA, 19 nt, Artificial Sequence
  Description of Artificial Sequence: Synthetic oligonucleotide
accuuuaggaucaguuguc

SEQ ID NO: 2903325 - RNA, 19 nt, Artificial Sequence
  Description of Artificial Sequence: Synthetic oligonucleotide
aggaaucuagcaggggccg

SEQ ID NO: 2903326 - RNA, 19 nt, Artificial Sequence
  Description of Artificial Sequence: Synthetic oligonucleotide
uacccuugcucaucguccc

SEQ ID NO: 2903327 - RNA, 19 nt, Artificial Sequence
  Description of Artificial Sequence: Synthetic oligonucleotide
aagagcuucaccaccuuuu

SEQ ID NO: 2903328 - RNA, 19 nt, Artificial Sequence
  Description of Artificial Sequence: Synthetic oligonucleotide
cuguuucgccauuucuugc

SEQ ID NO: 2903329 - RNA, 19 nt, Artificial Sequence
  Description of Artificial Sequence: Synthetic oligonucleotide
auggcaauggugacacaac

SEQ ID NO: 2903330 - RNA, 19 nt, Artificial Sequence
  Description of Artificial Sequence: Synthetic oligonucleotide
guggucagaucugucacag

SEQ ID NO: 2903331 - RNA, 19 nt, Artificial Sequence
  Description of Artificial Sequence: Synthetic oligonucleotide
auaccgacagagcuccgca

SEQ ID NO: 2903332 - RNA, 19 nt, Artificial Sequence
  Description of Artificial Sequence: Synthetic oligonucleotide
gcuguuucgccauuucuug

SEQ ID NO: 2903333 - RNA, 19 nt, Artificial Sequence
  Description of Artificial Sequence: Synthetic oligonucleotide
aguggucagaucugucaca

SEQ ID NO: 2903334 - RNA, 19 nt, Artificial Sequence
  Description of Artificial Sequence: Synthetic oligonucleotide
agacaggaaucuagcaggg

SEQ ID NO: 2903335 - RNA, 19 nt, Artificial Sequence
  Description of Artificial Sequence: Synthetic oligonucleotide
agcauucuguuuggagccc

SEQ ID NO: 2903336 - RNA, 19 nt, Artificial Sequence
  Description of Artificial Sequence: Synthetic oligonucleotide
uucuggaguuguagaggcc

SEQ ID NO: 2903337 - RNA, 19 nt, Artificial Sequence
  Description of Artificial Sequence: Synthetic oligonucleotide
caguggucagaucugucac

SEQ ID NO: 2903338 - RNA, 19 nt, Artificial Sequence
  Description of Artificial Sequence: Synthetic oligonucleotide
cuccgcauuugcuucuccc

SEQ ID NO: 2903339 - RNA, 19 nt, Artificial Sequence
  Description of Artificial Sequence: Synthetic oligonucleotide
cauucuguuuggagcccgg

SEQ ID NO: 2903340 - RNA, 19 nt, Artificial Sequence
  Description of Artificial Sequence: Synthetic oligonucleotide
accucuucuggaguuguag

SEQ ID NO: 2903341 - RNA, 19 nt, Artificial Sequence
  Description of Artificial Sequence: Synthetic oligonucleotide
cacaucacucuuccugagc

SEQ ID NO: 2903342 - RNA, 19 nt, Artificial Sequence
  Description of Artificial Sequence: Synthetic oligonucleotide
uggaggggccgcaaucgcc

SEQ ID NO: 2903343 - RNA, 19 nt, Artificial Sequence
  Description of Artificial Sequence: Synthetic oligonucleotide
uaggaucaguugucacagg

SEQ ID NO: 2903344 - RNA, 19 nt, Artificial Sequence
  Description of Artificial Sequence: Synthetic oligonucleotide
gacaggaaucuagcagggg

SEQ ID NO: 2903345 - RNA, 19 nt, Artificial Sequence
  Description of Artificial Sequence: Synthetic oligonucleotide
uguuuggagcccgguuugg

SEQ ID NO: 2903346 - RNA, 19 nt, Artificial Sequence
  Description of Artificial Sequence: Synthetic oligonucleotide
cauggauggcaauggugac

SEQ ID NO: 2903347 - RNA, 19 nt, Artificial Sequence
  Description of Artificial Sequence: Synthetic oligonucleotide
ucaccaccuuuucccgacg

SEQ ID NO: 2903348 - RNA, 19 nt, Artificial Sequence
  Description of Artificial Sequence: Synthetic oligonucleotide
ucucccucagauggagggg

SEQ ID NO: 2903349 - RNA, 19 nt, Artificial Sequence
  Description of Artificial Sequence: Synthetic oligonucleotide
cuagcaggggccgaaccgc

SEQ ID NO: 2903350 - RNA, 19 nt, Artificial Sequence
  Description of Artificial Sequence: Synthetic oligonucleotide
uugcucaucgucccggcuu

SEQ ID NO: 2903351 - RNA, 19 nt, Artificial Sequence
  Description of Artificial Sequence: Synthetic oligonucleotide
aagaccucuucuggaguug

SEQ ID NO: 2903352 - RNA, 19 nt, Artificial Sequence
  Description of Artificial Sequence: Synthetic oligonucleotide
uuaccacccuuauccagaa

SEQ ID NO: 2903353 - RNA, 19 nt, Artificial Sequence
  Description of Artificial Sequence: Synthetic oligonucleotide
aucguggaacuagacagga

SEQ ID NO: 2903354 - RNA, 19 nt, Artificial Sequence
  Description of Artificial Sequence: Synthetic oligonucleotide
cuguuuggagcccgguuug

SEQ ID NO: 2903355 - RNA, 19 nt, Artificial Sequence
  Description of Artificial Sequence: Synthetic oligonucleotide
uuggagcccgguuuggcau

SEQ ID NO: 2903356 - RNA, 19 nt, Artificial Sequence
  Description of Artificial Sequence: Synthetic oligonucleotide
uucuguuuggagcccgguu

SEQ ID NO: 2903357 - RNA, 19 nt, Artificial Sequence
  Description of Artificial Sequence: Synthetic oligonucleotide
cagaaccacaucacucuuc

SEQ ID NO: 2903358 - RNA, 19 nt, Artificial Sequence
  Description of Artificial Sequence: Synthetic oligonucleotide
acucuuccugagcucuaag

SEQ ID NO: 2903359 - RNA, 19 nt, Artificial Sequence
  Description of Artificial Sequence: Synthetic oligonucleotide
ggaaagauaccgacagagc

SEQ ID NO: 2903360 - RNA, 19 nt, Artificial Sequence
  Description of Artificial Sequence: Synthetic oligonucleotide
gcauggauggcaaugguga

SEQ ID NO: 2903361 - RNA, 19 nt, Artificial Sequence
  Description of Artificial Sequence: Synthetic oligonucleotide
uggaguuguagaggccaag

SEQ ID NO: 2903362 - RNA, 19 nt, Artificial Sequence
  Description of Artificial Sequence: Synthetic oligonucleotide
agguuccuugguuugguuu

SEQ ID NO: 2903363 - RNA, 19 nt, Artificial Sequence
  Description of Artificial Sequence: Synthetic oligonucleotide
cagaucugucacagcauuc

SEQ ID NO: 2903364 - RNA, 19 nt, Artificial Sequence
  Description of Artificial Sequence: Synthetic oligonucleotide
gagcucuaagaccuuggaa

SEQ ID NO: 2903365 - RNA, 19 nt, Artificial Sequence
  Description of Artificial Sequence: Synthetic oligonucleotide
ucagguuccuugguuuggu

SEQ ID NO: 2903366 - RNA, 19 nt, Artificial Sequence
  Description of Artificial Sequence: Synthetic oligonucleotide
ggccgcaaucgccacaccg

SEQ ID NO: 2903367 - RNA, 19 nt, Artificial Sequence
  Description of Artificial Sequence: Synthetic oligonucleotide
cucccucagauggaggggc

SEQ ID NO: 2903368 - RNA, 19 nt, Artificial Sequence
  Description of Artificial Sequence: Synthetic oligonucleotide
auggauggcaauggugaca

SEQ ID NO: 2903369 - RNA, 19 nt, Artificial Sequence
  Description of Artificial Sequence: Synthetic oligonucleotide
ugcuucucccucagaugga

SEQ ID NO: 2903370 - RNA, 19 nt, Artificial Sequence
  Description of Artificial Sequence: Synthetic oligonucleotide
uggcauggauggcaauggu

SEQ ID NO: 2903371 - RNA, 19 nt, Artificial Sequence
  Description of Artificial Sequence: Synthetic oligonucleotide
guggaacuagacaggaauc

SEQ ID NO: 2903372 - RNA, 19 nt, Artificial Sequence
  Description of Artificial Sequence: Synthetic oligonucleotide
acccuuauccagaaccaca

SEQ ID NO: 2903373 - RNA, 19 nt, Artificial Sequence
  Description of Artificial Sequence: Synthetic oligonucleotide
uuuuacccuugcucaucgu

SEQ ID NO: 2903374 - RNA, 19 nt, Artificial Sequence
  Description of Artificial Sequence: Synthetic oligonucleotide
ggcaucguggaacuagaca

SEQ ID NO: 2903375 - RNA, 19 nt, Artificial Sequence
  Description of Artificial Sequence: Synthetic oligonucleotide
aggugguguuucagguucc

SEQ ID NO: 2903376 - RNA, 19 nt, Artificial Sequence
  Description of Artificial Sequence: Synthetic oligonucleotide
ucccucagauggaggggcc

SEQ ID NO: 2903377 - RNA, 19 nt, Artificial Sequence
  Description of Artificial Sequence: Synthetic oligonucleotide
ggaucaguugucacaggcc

SEQ ID NO: 2903378 - RNA, 19 nt, Artificial Sequence
  Description of Artificial Sequence: Synthetic oligonucleotide
ucccgacgauuuaccaccc

SEQ ID NO: 2903379 - RNA, 19 nt, Artificial Sequence
  Description of Artificial Sequence: Synthetic oligonucleotide
ugcucaucgucccggcuuu

SEQ ID NO: 2903380 - RNA, 19 nt, Artificial Sequence
  Description of Artificial Sequence: Synthetic oligonucleotide
ucguggaacuagacaggaa

SEQ ID NO: 2903381 - RNA, 19 nt, Artificial Sequence
  Description of Artificial Sequence: Synthetic oligonucleotide
gaccuuggaaagauaccga

SEQ ID NO: 2903382 - RNA, 19 nt, Artificial Sequence
  Description of Artificial Sequence: Synthetic oligonucleotide
ccaaccacgagcugcagca

SEQ ID NO: 2903383 - RNA, 19 nt, Artificial Sequence
  Description of Artificial Sequence: Synthetic oligonucleotide
ggcuuucuuaggcaucgug

SEQ ID NO: 2903384 - RNA, 19 nt, Artificial Sequence
  Description of Artificial Sequence: Synthetic oligonucleotide
uuguagaggccaagagcuu

SEQ ID NO: 2903385 - RNA, 19 nt, Artificial Sequence
  Description of Artificial Sequence: Synthetic oligonucleotide
cauuucuugccuuuauuuu

SEQ ID NO: 2903386 - RNA, 19 nt, Artificial Sequence
  Description of Artificial Sequence: Synthetic oligonucleotide
guuucagguuccuugguuu

SEQ ID NO: 2903387 - RNA, 19 nt, Artificial Sequence
  Description of Artificial Sequence: Synthetic oligonucleotide
uggucagaucugucacagc

SEQ ID NO: 2903388 - RNA, 19 nt, Artificial Sequence
  Description of Artificial Sequence: Synthetic oligonucleotide
uggagcccgguuuggcaug

SEQ ID NO: 2903389 - RNA, 19 nt, Artificial Sequence
  Description of Artificial Sequence: Synthetic oligonucleotide
gacgauuuaccacccuuau

SEQ ID NO: 2903390 - RNA, 19 nt, Artificial Sequence
  Description of Artificial Sequence: Synthetic oligonucleotide
guuuggagcccgguuuggc

SEQ ID NO: 2903391 - RNA, 19 nt, Artificial Sequence
  Description of Artificial Sequence: Synthetic oligonucleotide
accgacagagcuccgcauu

SEQ ID NO: 2903392 - RNA, 19 nt, Artificial Sequence
  Description of Artificial Sequence: Synthetic oligonucleotide
caucacucuuccugagcuc

SEQ ID NO: 2903393 - RNA, 19 nt, Artificial Sequence
  Description of Artificial Sequence: Synthetic oligonucleotide
cuccaagaccucuucugga

SEQ ID NO: 2903394 - RNA, 19 nt, Artificial Sequence
  Description of Artificial Sequence: Synthetic oligonucleotide
acccuugcucaucgucccg

SEQ ID NO: 2903395 - RNA, 19 nt, Artificial Sequence
  Description of Artificial Sequence: Synthetic oligonucleotide
agcaggaggaggugguguu

SEQ ID NO: 2903396 - RNA, 19 nt, Artificial Sequence
  Description of Artificial Sequence: Synthetic oligonucleotide
ucaucgucccggcuuucuu

SEQ ID NO: 2903397 - RNA, 19 nt, Artificial Sequence
  Description of Artificial Sequence: Synthetic oligonucleotide
ucccggcuuucuuaggcau

SEQ ID NO: 2903398 - RNA, 19 nt, Artificial Sequence
  Description of Artificial Sequence: Synthetic oligonucleotide
ggccaagagcuucaccacc

SEQ ID NO: 2903399 - RNA, 19 nt, Artificial Sequence
  Description of Artificial Sequence: Synthetic oligonucleotide
gcgaccaaccacgagcugc

SEQ ID NO: 2903400 - RNA, 19 nt, Artificial Sequence
  Description of Artificial Sequence: Synthetic oligonucleotide
cacaggcccagcaggagga

SEQ ID NO: 2903401 - RNA, 19 nt, Artificial Sequence
  Description of Artificial Sequence: Synthetic oligonucleotide
ggcauggauggcaauggug

SEQ ID NO: 2903402 - RNA, 19 nt, Artificial Sequence
  Description of Artificial Sequence: Synthetic oligonucleotide
gaaucuagcaggggccgaa

SEQ ID NO: 2903403 - RNA, 19 nt, Artificial Sequence
  Description of Artificial Sequence: Synthetic oligonucleotide
uagcaggggccgaaccgcu

SEQ ID NO: 2903404 - RNA, 19 nt, Artificial Sequence
  Description of Artificial Sequence: Synthetic oligonucleotide
ucgucccggcuuucuuagg

SEQ ID NO: 2903405 - RNA, 19 nt, Artificial Sequence
  Description of Artificial Sequence: Synthetic oligonucleotide
gcauuugcuucucccucag

SEQ ID NO: 2903406 - RNA, 19 nt, Artificial Sequence
  Description of Artificial Sequence: Synthetic oligonucleotide
agaccucuucuggaguugu

SEQ ID NO: 2903407 - RNA, 19 nt, Artificial Sequence
  Description of Artificial Sequence: Synthetic oligonucleotide
aggaggaggugguguuuca

SEQ ID NO: 2903408 - RNA, 19 nt, Artificial Sequence
  Description of Artificial Sequence: Synthetic oligonucleotide
aggcaucguggaacuagac

SEQ ID NO: 2903409 - RNA, 19 nt, Artificial Sequence
  Description of Artificial Sequence: Synthetic oligonucleotide
gaaccgcugcgaccaacca

SEQ ID NO: 2903410 - RNA, 19 nt, Artificial Sequence
  Description of Artificial Sequence: Synthetic oligonucleotide
ugcgaccaaccacgagcug

SEQ ID NO: 2903411 - RNA, 19 nt, Artificial Sequence
  Description of Artificial Sequence: Synthetic oligonucleotide
gcauucuguuuggagcccg

SEQ ID NO: 2903412 - RNA, 19 nt, Artificial Sequence
  Description of Artificial Sequence: Synthetic oligonucleotide
accaccuuuucccgacgau

SEQ ID NO: 2903413 - RNA, 19 nt, Artificial Sequence
  Description of Artificial Sequence: Synthetic oligonucleotide
accgacagccucagugguc

SEQ ID NO: 2903414 - RNA, 19 nt, Artificial Sequence
  Description of Artificial Sequence: Synthetic oligonucleotide
ucacagcauucuguuugga

SEQ ID NO: 2903415 - RNA, 19 nt, Artificial Sequence
  Description of Artificial Sequence: Synthetic oligonucleotide
cuucaccaccuuuucccga

SEQ ID NO: 2903416 - RNA, 19 nt, Artificial Sequence
  Description of Artificial Sequence: Synthetic oligonucleotide
aucaguugucacaggccca

SEQ ID NO: 2903417 - RNA, 19 nt, Artificial Sequence
  Description of Artificial Sequence: Synthetic oligonucleotide
ggaguuguagaggccaaga

SEQ ID NO: 2903418 - RNA, 19 nt, Artificial Sequence
  Description of Artificial Sequence: Synthetic oligonucleotide
ucgccacaccgacagccuc

SEQ ID NO: 2903419 - RNA, 19 nt, Artificial Sequence
  Description of Artificial Sequence: Synthetic oligonucleotide
acagagcuccgcauuugcu

SEQ ID NO: 2903420 - RNA, 19 nt, Artificial Sequence
  Description of Artificial Sequence: Synthetic oligonucleotide
auucuguuuggagcccggu

SEQ ID NO: 2903421 - RNA, 19 nt, Artificial Sequence
  Description of Artificial Sequence: Synthetic oligonucleotide
cucuaagaccuuggaaaga

SEQ ID NO: 2903422 - RNA, 19 nt, Artificial Sequence
  Description of Artificial Sequence: Synthetic oligonucleotide
ccggcuuucuuaggcaucg

SEQ ID NO: 2903423 - RNA, 19 nt, Artificial Sequence
  Description of Artificial Sequence: Synthetic oligonucleotide
gucacaggcccagcaggag

SEQ ID NO: 2903424 - RNA, 19 nt, Artificial Sequence
  Description of Artificial Sequence: Synthetic oligonucleotide
uaccgacagagcuccgcau

SEQ ID NO: 2903425 - RNA, 19 nt, Artificial Sequence
  Description of Artificial Sequence: Synthetic oligonucleotide
aguuucuccaagaccucuu

SEQ ID NO: 2903426 - RNA, 19 nt, Artificial Sequence
  Description of Artificial Sequence: Synthetic oligonucleotide
accuuuucccgacgauuua

SEQ ID NO: 2903427 - RNA, 19 nt, Artificial Sequence
  Description of Artificial Sequence: Synthetic oligonucleotide
ucagauggaggggccgcaa

SEQ ID NO: 2903428 - RNA, 19 nt, Artificial Sequence
  Description of Artificial Sequence: Synthetic oligonucleotide
cuaagaccuuggaaagaua

SEQ ID NO: 2903429 - RNA, 19 nt, Artificial Sequence
  Description of Artificial Sequence: Synthetic oligonucleotide
acgagcugcagcaucccaa

SEQ ID NO: 2903430 - RNA, 19 nt, Artificial Sequence
  Description of Artificial Sequence: Synthetic oligonucleotide
ccuuggaaagauaccgaca

SEQ ID NO: 2903431 - RNA, 19 nt, Artificial Sequence
  Description of Artificial Sequence: Synthetic oligonucleotide
uaccacccuuauccagaac

SEQ ID NO: 2903432 - RNA, 19 nt, Artificial Sequence
  Description of Artificial Sequence: Synthetic oligonucleotide
gucccggcuuucuuaggca

SEQ ID NO: 2903433 - RNA, 19 nt, Artificial Sequence
  Description of Artificial Sequence: Synthetic oligonucleotide
gcaauggugacacaaccuu

SEQ ID NO: 2903434 - RNA, 19 nt, Artificial Sequence
  Description of Artificial Sequence: Synthetic oligonucleotide
ccuuuucccgacgauuuac

SEQ ID NO: 2903435 - RNA, 19 nt, Artificial Sequence
  Description of Artificial Sequence: Synthetic oligonucleotide
agcuccgcauuugcuucuc

SEQ ID NO: 2903436 - RNA, 19 nt, Artificial Sequence
  Description of Artificial Sequence: Synthetic oligonucleotide
gugacacaaccuuuaggau

SEQ ID NO: 2903437 - RNA, 19 nt, Artificial Sequence
  Description of Artificial Sequence: Synthetic oligonucleotide
ggaggaggugguguuucag

SEQ ID NO: 2903438 - RNA, 19 nt, Artificial Sequence
  Description of Artificial Sequence: Synthetic oligonucleotide
caaucgccacaccgacagc

SEQ ID NO: 2903439 - RNA, 19 nt, Artificial Sequence
  Description of Artificial Sequence: Synthetic oligonucleotide
uagaggccaagagcuucac

SEQ ID NO: 2903440 - RNA, 19 nt, Artificial Sequence
  Description of Artificial Sequence: Synthetic oligonucleotide
caggggccgaaccgcugcg

SEQ ID NO: 2903441 - RNA, 19 nt, Artificial Sequence
  Description of Artificial Sequence: Synthetic oligonucleotide
cugcgaccaaccacgagcu

SEQ ID NO: 2903442 - RNA, 19 nt, Artificial Sequence
  Description of Artificial Sequence: Synthetic oligonucleotide
gcaggggccgaaccgcugc

SEQ ID NO: 2903443 - RNA, 19 nt, Artificial Sequence
  Description of Artificial Sequence: Synthetic oligonucleotide
gacagccucaguggucaga

SEQ ID NO: 2903444 - RNA, 19 nt, Artificial Sequence
  Description of Artificial Sequence: Synthetic oligonucleotide
cgaaccgcugcgaccaacc

SEQ ID NO: 2903445 - RNA, 19 nt, Artificial Sequence
  Description of Artificial Sequence: Synthetic oligonucleotide
agcccgguuuggcauggau

SEQ ID NO: 2903446 - RNA, 19 nt, Artificial Sequence
  Description of Artificial Sequence: Synthetic oligonucleotide
caucgucccggcuuucuua

SEQ ID NO: 2903447 - RNA, 19 nt, Artificial Sequence
  Description of Artificial Sequence: Synthetic oligonucleotide
caccuuuucccgacgauuu

SEQ ID NO: 2903448 - RNA, 19 nt, Artificial Sequence
  Description of Artificial Sequence: Synthetic oligonucleotide
gguuccuugguuugguuuu

SEQ ID NO: 2903449 - RNA, 19 nt, Artificial Sequence
  Description of Artificial Sequence: Synthetic oligonucleotide
cuggaguuguagaggccaa

SEQ ID NO: 2903450 - RNA, 19 nt, Artificial Sequence
  Description of Artificial Sequence: Synthetic oligonucleotide
ggaacuagacaggaaucua

SEQ ID NO: 2903451 - RNA, 19 nt, Artificial Sequence
  Description of Artificial Sequence: Synthetic oligonucleotide
aucgccacaccgacagccu

SEQ ID NO: 2903452 - RNA, 19 nt, Artificial Sequence
  Description of Artificial Sequence: Synthetic oligonucleotide
ccacaucacucuuccugag

SEQ ID NO: 2903453 - RNA, 19 nt, Artificial Sequence
  Description of Artificial Sequence: Synthetic oligonucleotide
caauggugacacaaccuuu

SEQ ID NO: 2903454 - RNA, 19 nt, Artificial Sequence
  Description of Artificial Sequence: Synthetic oligonucleotide
ggccgaaccgcugcgacca

SEQ ID NO: 2903455 - RNA, 19 nt, Artificial Sequence
  Description of Artificial Sequence: Synthetic oligonucleotide
gaggggccgcaaucgccac

SEQ ID NO: 2903456 - RNA, 19 nt, Artificial Sequence
  Description of Artificial Sequence: Synthetic oligonucleotide
caagaccucuucuggaguu

SEQ ID NO: 2903457 - RNA, 19 nt, Artificial Sequence
  Description of Artificial Sequence: Synthetic oligonucleotide
cgucccggcuuucuuaggc

SEQ ID NO: 2903458 - RNA, 19 nt, Artificial Sequence
  Description of Artificial Sequence: Synthetic oligonucleotide
ccucuucuggaguuguaga

SEQ ID NO: 2903459 - RNA, 19 nt, Artificial Sequence
  Description of Artificial Sequence: Synthetic oligonucleotide
agauaccgacagagcuccg

SEQ ID NO: 2903460 - RNA, 19 nt, Artificial Sequence
  Description of Artificial Sequence: Synthetic oligonucleotide
cagagcuccgcauuugcuu

SEQ ID NO: 2903461 - RNA, 19 nt, Artificial Sequence
  Description of Artificial Sequence: Synthetic oligonucleotide
uccugagcucuaagaccuu

SEQ ID NO: 2903462 - RNA, 19 nt, Artificial Sequence
  Description of Artificial Sequence: Synthetic oligonucleotide
gaccaaccacgagcugcag

SEQ ID NO: 2903463 - RNA, 19 nt, Artificial Sequence
  Description of Artificial Sequence: Synthetic oligonucleotide
caccaccuuuucccgacga

SEQ ID NO: 2903464 - RNA, 19 nt, Artificial Sequence
  Description of Artificial Sequence: Synthetic oligonucleotide
cauuugcuucucccucaga

SEQ ID NO: 2903465 - RNA, 19 nt, Artificial Sequence
  Description of Artificial Sequence: Synthetic oligonucleotide
ggaggggccgcaaucgcca

SEQ ID NO: 2903466 - RNA, 19 nt, Artificial Sequence
  Description of Artificial Sequence: Synthetic oligonucleotide
ccuugcucaucgucccggc

SEQ ID NO: 2903467 - RNA, 19 nt, Artificial Sequence
  Description of Artificial Sequence: Synthetic oligonucleotide
gcccgguuuggcauggaug

SEQ ID NO: 2903468 - RNA, 19 nt, Artificial Sequence
  Description of Artificial Sequence: Synthetic oligonucleotide
aggggccgcaaucgccaca

SEQ ID NO: 2903469 - RNA, 19 nt, Artificial Sequence
  Description of Artificial Sequence: Synthetic oligonucleotide
ggagcccgguuuggcaugg

SEQ ID NO: 2903470 - RNA, 19 nt, Artificial Sequence
  Description of Artificial Sequence: Synthetic oligonucleotide
gaaccacaucacucuuccu

SEQ ID NO: 2903471 - RNA, 19 nt, Artificial Sequence
  Description of Artificial Sequence: Synthetic oligonucleotide
ccugagcucuaagaccuug

SEQ ID NO: 2903472 - RNA, 19 nt, Artificial Sequence
  Description of Artificial Sequence: Synthetic oligonucleotide
cccuugcucaucgucccgg

SEQ ID NO: 2903473 - RNA, 19 nt, Artificial Sequence
  Description of Artificial Sequence: Synthetic oligonucleotide
cacgagcugcagcauccca

SEQ ID NO: 2903474 - RNA, 19 nt, Artificial Sequence
  Description of Artificial Sequence: Synthetic oligonucleotide
gguuuggcauggauggcaa

SEQ ID NO: 2903475 - RNA, 19 nt, Artificial Sequence
  Description of Artificial Sequence: Synthetic oligonucleotide
ggcaauggugacacaaccu

SEQ ID NO: 2903476 - RNA, 19 nt, Artificial Sequence
  Description of Artificial Sequence: Synthetic oligonucleotide
acacaaccuuuaggaucag

SEQ ID NO: 2903477 - RNA, 19 nt, Artificial Sequence
  Description of Artificial Sequence: Synthetic oligonucleotide
guguuucagguuccuuggu

SEQ ID NO: 2903478 - RNA, 19 nt, Artificial Sequence
  Description of Artificial Sequence: Synthetic oligonucleotide
cagcuguuucgccauuucu

SEQ ID NO: 2903479 - RNA, 19 nt, Artificial Sequence
  Description of Artificial Sequence: Synthetic oligonucleotide
ccuuuaggaucaguuguca

SEQ ID NO: 2903480 - RNA, 19 nt, Artificial Sequence
  Description of Artificial Sequence: Synthetic oligonucleotide
gagcuccgcauuugcuucu

SEQ ID NO: 2903481 - RNA, 19 nt, Artificial Sequence
  Description of Artificial Sequence: Synthetic oligonucleotide
ccgcaaucgccacaccgac

SEQ ID NO: 2903482 - RNA, 19 nt, Artificial Sequence
  Description of Artificial Sequence: Synthetic oligonucleotide
gggccgaaccgcugcgacc

SEQ ID NO: 2903483 - RNA, 19 nt, Artificial Sequence
  Description of Artificial Sequence: Synthetic oligonucleotide
gccgcaaucgccacaccga

SEQ ID NO: 2903484 - RNA, 19 nt, Artificial Sequence
  Description of Artificial Sequence: Synthetic oligonucleotide
ggggccgaaccgcugcgac

SEQ ID NO: 2903485 - RNA, 19 nt, Artificial Sequence
  Description of Artificial Sequence: Synthetic oligonucleotide
cguggaacuagacaggaau

SEQ ID NO: 2903486 - RNA, 19 nt, Artificial Sequence
  Description of Artificial Sequence: Synthetic oligonucleotide
gccucaguggucagaucug

SEQ ID NO: 2903487 - RNA, 19 nt, Artificial Sequence
  Description of Artificial Sequence: Synthetic oligonucleotide
ccucagauggaggggccgc

SEQ ID NO: 2903488 - RNA, 19 nt, Artificial Sequence
  Description of Artificial Sequence: Synthetic oligonucleotide
cucagauggaggggccgca

SEQ ID NO: 2903489 - RNA, 19 nt, Artificial Sequence
  Description of Artificial Sequence: Synthetic oligonucleotide
gucagaucugucacagcau

SEQ ID NO: 2903490 - RNA, 19 nt, Artificial Sequence
  Description of Artificial Sequence: Synthetic oligonucleotide
caguuucuccaagaccucu

SEQ ID NO: 2903491 - RNA, 19 nt, Artificial Sequence
  Description of Artificial Sequence: Synthetic oligonucleotide
ccgacagccucagugguca

SEQ ID NO: 2903492 - RNA, 19 nt, Artificial Sequence
  Description of Artificial Sequence: Synthetic oligonucleotide
agcaggggccgaaccgcug

SEQ ID NO: 2903493 - RNA, 19 nt, Artificial Sequence
  Description of Artificial Sequence: Synthetic oligonucleotide
gccacaccgacagccucag

SEQ ID NO: 2903494 - RNA, 19 nt, Artificial Sequence
  Description of Artificial Sequence: Synthetic oligonucleotide
cagccucaguggucagauc

SEQ ID NO: 2903495 - RNA, 19 nt, Artificial Sequence
  Description of Artificial Sequence: Synthetic oligonucleotide
cacucuuccugagcucuaa

SEQ ID NO: 2903496 - RNA, 19 nt, Artificial Sequence
  Description of Artificial Sequence: Synthetic oligonucleotide
gcuccgcauuugcuucucc

SEQ ID NO: 2903497 - RNA, 19 nt, Artificial Sequence
  Description of Artificial Sequence: Synthetic oligonucleotide
cccucagauggaggggccg

SEQ ID NO: 2903498 - RNA, 19 nt, Artificial Sequence
  Description of Artificial Sequence: Synthetic oligonucleotide
cccuuauccagaaccacau

SEQ ID NO: 2903499 - RNA, 19 nt, Artificial Sequence
  Description of Artificial Sequence: Synthetic oligonucleotide
ggaaucuagcaggggccga

SEQ ID NO: 2903500 - RNA, 19 nt, Artificial Sequence
  Description of Artificial Sequence: Synthetic oligonucleotide
cuugcucaucgucccggcu

SEQ ID NO: 2903501 - RNA, 19 nt, Artificial Sequence
  Description of Artificial Sequence: Synthetic oligonucleotide
guuuggcauggauggcaau

SEQ ID NO: 2903502 - RNA, 19 nt, Artificial Sequence
  Description of Artificial Sequence: Synthetic oligonucleotide
cgcauuugcuucucccuca

SEQ ID NO: 2903503 - RNA, 19 nt, Artificial Sequence
  Description of Artificial Sequence: Synthetic oligonucleotide
gccaagagcuucaccaccu

SEQ ID NO: 2903504 - RNA, 19 nt, Artificial Sequence
  Description of Artificial Sequence: Synthetic oligonucleotide
cccggcuuucuuaggcauc

SEQ ID NO: 2903505 - RNA, 19 nt, Artificial Sequence
  Description of Artificial Sequence: Synthetic oligonucleotide
caccgacagccucaguggu

SEQ ID NO: 2903506 - RNA, 19 nt, Artificial Sequence
  Description of Artificial Sequence: Synthetic oligonucleotide
aggggccgaaccgcugcga

SEQ ID NO: 2903507 - RNA, 19 nt, Artificial Sequence
  Description of Artificial Sequence: Synthetic oligonucleotide
cgaccaaccacgagcugca

SEQ ID NO: 2903508 - RNA, 19 nt, Artificial Sequence
  Description of Artificial Sequence: Synthetic oligonucleotide
gaccucuucuggaguugua

SEQ ID NO: 2903509 - RNA, 19 nt, Artificial Sequence
  Description of Artificial Sequence: Synthetic oligonucleotide
ggaggugguguuucagguu

SEQ ID NO: 2903510 - RNA, 19 nt, Artificial Sequence
  Description of Artificial Sequence: Synthetic oligonucleotide
cuuaggcaucguggaacua

SEQ ID NO: 2903511 - RNA, 19 nt, Artificial Sequence
  Description of Artificial Sequence: Synthetic oligonucleotide
cgacgauuuaccacccuua

SEQ ID NO: 2903512 - RNA, 19 nt, Artificial Sequence
  Description of Artificial Sequence: Synthetic oligonucleotide
cugucacagcauucuguuu

SEQ ID NO: 2903513 - RNA, 19 nt, Artificial Sequence
  Description of Artificial Sequence: Synthetic oligonucleotide
cucaucgucccggcuuucu

SEQ ID NO: 2903514 - RNA, 19 nt, Artificial Sequence
  Description of Artificial Sequence: Synthetic oligonucleotide
cacaaccuuuaggaucagu

SEQ ID NO: 2903515 - RNA, 19 nt, Artificial Sequence
  Description of Artificial Sequence: Synthetic oligonucleotide
ccgguuuggcauggauggc

SEQ ID NO: 2903516 - RNA, 19 nt, Artificial Sequence
  Description of Artificial Sequence: Synthetic oligonucleotide
ccacgagcugcagcauccc

SEQ ID NO: 2903517 - RNA, 19 nt, Artificial Sequence
  Description of Artificial Sequence: Synthetic oligonucleotide
ggauggcaauggugacaca

SEQ ID NO: 2903518 - RNA, 19 nt, Artificial Sequence
  Description of Artificial Sequence: Synthetic oligonucleotide
ccaagaccucuucuggagu

SEQ ID NO: 2903519 - RNA, 19 nt, Artificial Sequence
  Description of Artificial Sequence: Synthetic oligonucleotide
cagauggaggggccgcaau

SEQ ID NO: 2903520 - RNA, 19 nt, Artificial Sequence
  Description of Artificial Sequence: Synthetic oligonucleotide
ggugguguuucagguuccu

SEQ ID NO: 2903521 - RNA, 19 nt, Artificial Sequence
  Description of Artificial Sequence: Synthetic oligonucleotide
cgacagagcuccgcauuug

SEQ ID NO: 2903522 - RNA, 19 nt, Artificial Sequence
  Description of Artificial Sequence: Synthetic oligonucleotide
cagguuccuugguuugguu

SEQ ID NO: 2903523 - RNA, 19 nt, Artificial Sequence
  Description of Artificial Sequence: Synthetic oligonucleotide
ccgacgauuuaccacccuu

SEQ ID NO: 2903524 - RNA, 19 nt, Artificial Sequence
  Description of Artificial Sequence: Synthetic oligonucleotide
cgccacaccgacagccuca

SEQ ID NO: 2903525 - RNA, 19 nt, Artificial Sequence
  Description of Artificial Sequence: Synthetic oligonucleotide
ccgaaccgcugcgaccaac

SEQ ID NO: 2903526 - RNA, 19 nt, Artificial Sequence
  Description of Artificial Sequence: Synthetic oligonucleotide
gugguguuucagguuccuu

SEQ ID NO: 2903527 - RNA, 19 nt, Artificial Sequence
  Description of Artificial Sequence: Synthetic oligonucleotide
gggccgcaaucgccacacc

SEQ ID NO: 2903528 - RNA, 19 nt, Artificial Sequence
  Description of Artificial Sequence: Synthetic oligonucleotide
gagcccgguuuggcaugga

SEQ ID NO: 2903529 - RNA, 19 nt, Artificial Sequence
  Description of Artificial Sequence: Synthetic oligonucleotide
cgcaaucgccacaccgaca

SEQ ID NO: 2903530 - RNA, 19 nt, Artificial Sequence
  Description of Artificial Sequence: Synthetic oligonucleotide
cgcugcgaccaaccacgag

SEQ ID NO: 2903531 - RNA, 19 nt, Artificial Sequence
  Description of Artificial Sequence: Synthetic oligonucleotide
ccucaguggucagaucugu

SEQ ID NO: 2903532 - RNA, 19 nt, Artificial Sequence
  Description of Artificial Sequence: Synthetic oligonucleotide
cgacagccucaguggucag

SEQ ID NO: 2903533 - RNA, 19 nt, Artificial Sequence
  Description of Artificial Sequence: Synthetic oligonucleotide
ccaccuuuucccgacgauu

SEQ ID NO: 2903534 - RNA, 19 nt, Artificial Sequence
  Description of Artificial Sequence: Synthetic oligonucleotide
caaccacgagcugcagcau

SEQ ID NO: 2903535 - RNA, 19 nt, Artificial Sequence
  Description of Artificial Sequence: Synthetic oligonucleotide
ccgacagagcuccgcauuu

SEQ ID NO: 2903536 - RNA, 19 nt, Artificial Sequence
  Description of Artificial Sequence: Synthetic oligonucleotide
gcucaucgucccggcuuuc

SEQ ID NO: 2903537 - RNA, 19 nt, Artificial Sequence
  Description of Artificial Sequence: Synthetic oligonucleotide
gcaggaggaggugguguuu

SEQ ID NO: 2903538 - RNA, 19 nt, Artificial Sequence
  Description of Artificial Sequence: Synthetic oligonucleotide
ccgcugcgaccaaccacga

SEQ ID NO: 2903539 - RNA, 19 nt, Artificial Sequence
  Description of Artificial Sequence: Synthetic oligonucleotide
gccgaaccgcugcgaccaa

SEQ ID NO: 2903540 - RNA, 19 nt, Artificial Sequence
  Description of Artificial Sequence: Synthetic oligonucleotide
cccgacgauuuaccacccu

SEQ ID NO: 2903541 - RNA, 19 nt, Artificial Sequence
  Description of Artificial Sequence: Synthetic oligonucleotide
ccacaccgacagccucagu

SEQ ID NO: 2903542 - RNA, 19 nt, Artificial Sequence
  Description of Artificial Sequence: Synthetic oligonucleotide
cggcuuucuuaggcaucgu

SEQ ID NO: 2903543 - RNA, 19 nt, Artificial Sequence
  Description of Artificial Sequence: Synthetic oligonucleotide
ucaaauagguacuuaacag

SEQ ID NO: 2903544 - RNA, 19 nt, Artificial Sequence
  Description of Artificial Sequence: Synthetic oligonucleotide
aacagcaauaggcacgggc

SEQ ID NO: 2903545 - RNA, 19 nt, Artificial Sequence
  Description of Artificial Sequence: Synthetic oligonucleotide
uaggaagucaaauagguac

SEQ ID NO: 2903546 - RNA, 19 nt, Artificial Sequence
  Description of Artificial Sequence: Synthetic oligonucleotide
  modified_base (2)..(2): a, c, u, g, unknown or other
gngguuuugagucacggag

SEQ ID NO: 2903547 - RNA, 19 nt, Artificial Sequence
  Description of Artificial Sequence: Synthetic oligonucleotide
uuccuaggaagucaaauag

SEQ ID NO: 2903548 - RNA, 19 nt, Artificial Sequence
  Description of Artificial Sequence: Synthetic oligonucleotide
ugaucuaacaccuucuccu

SEQ ID NO: 2903549 - RNA, 19 nt, Artificial Sequence
  Description of Artificial Sequence: Synthetic oligonucleotide
  modified_base (5)..(5): a, c, u, g, unknown or other
agggnguugagucucuucc

SEQ ID NO: 2903550 - RNA, 19 nt, Artificial Sequence
  Description of Artificial Sequence: Synthetic oligonucleotide
uguacugaaggccucuggg

SEQ ID NO: 2903551 - RNA, 19 nt, Artificial Sequence
  Description of Artificial Sequence: Synthetic oligonucleotide
guagacuugaucuaacacc

SEQ ID NO: 2903552 - RNA, 19 nt, Artificial Sequence
  Description of Artificial Sequence: Synthetic oligonucleotide
guacuuaacagcaauaggc

SEQ ID NO: 2903553 - RNA, 19 nt, Artificial Sequence
  Description of Artificial Sequence: Synthetic oligonucleotide
uagaugaccagcuaggccu

SEQ ID NO: 2903554 - RNA, 19 nt, Artificial Sequence
  Description of Artificial Sequence: Synthetic oligonucleotide
caaauagguacuuaacagc

SEQ ID NO: 2903555 - RNA, 19 nt, Artificial Sequence
  Description of Artificial Sequence: Synthetic oligonucleotide
uagacuugaucuaacaccu

SEQ ID NO: 2903556 - RNA, 19 nt, Artificial Sequence
  Description of Artificial Sequence: Synthetic oligonucleotide
agugucaucaaggucaagg

SEQ ID NO: 2903557 - RNA, 19 nt, Artificial Sequence
  Description of Artificial Sequence: Synthetic oligonucleotide
acuagugucaucaagguca

SEQ ID NO: 2903558 - RNA, 19 nt, Artificial Sequence
  Description of Artificial Sequence: Synthetic oligonucleotide
aacaccuucuccuugacuu

SEQ ID NO: 2903559 - RNA, 19 nt, Artificial Sequence
  Description of Artificial Sequence: Synthetic oligonucleotide
ucccauaagucccaggucc

SEQ ID NO: 2903560 - RNA, 19 nt, Artificial Sequence
  Description of Artificial Sequence: Synthetic oligonucleotide
aaauagguacuuaacagca

SEQ ID NO: 2903561 - RNA, 19 nt, Artificial Sequence
  Description of Artificial Sequence: Synthetic oligonucleotide
uuuugagucacggagguca

SEQ ID NO: 2903562 - RNA, 19 nt, Artificial Sequence
  Description of Artificial Sequence: Synthetic oligonucleotide
uacuuaacagcaauaggca

SEQ ID NO: 2903563 - RNA, 19 nt, Artificial Sequence
  Description of Artificial Sequence: Synthetic oligonucleotide
uaugccauguuucucugcc

SEQ ID NO: 2903564 - RNA, 19 nt, Artificial Sequence
  Description of Artificial Sequence: Synthetic oligonucleotide
ucccuuguagacuugaucu

SEQ ID NO: 2903565 - RNA, 19 nt, Artificial Sequence
  Description of Artificial Sequence: Synthetic oligonucleotide
uuaacagcaauaggcacgg

SEQ ID NO: 2903566 - RNA, 19 nt, Artificial Sequence
  Description of Artificial Sequence: Synthetic oligonucleotide
acuuaacagcaauaggcac

SEQ ID NO: 2903567 - RNA, 19 nt, Artificial Sequence
  Description of Artificial Sequence: Synthetic oligonucleotide
auucacacuaagaauggcc

SEQ ID NO: 2903568 - RNA, 19 nt, Artificial Sequence
  Description of Artificial Sequence: Synthetic oligonucleotide
aagucaaauagguacuuaa

SEQ ID NO: 2903569 - RNA, 19 nt, Artificial Sequence
  Description of Artificial Sequence: Synthetic oligonucleotide
uucacacuaagaauggccu

SEQ ID NO: 2903570 - RNA, 19 nt, Artificial Sequence
  Description of Artificial Sequence: Synthetic oligonucleotide
ucaaguccucaucugacag

SEQ ID NO: 2903571 - RNA, 19 nt, Artificial Sequence
  Description of Artificial Sequence: Synthetic oligonucleotide
agucacggaggucaagucc

SEQ ID NO: 2903572 - RNA, 19 nt, Artificial Sequence
  Description of Artificial Sequence: Synthetic oligonucleotide
uguagacuugaucuaacac

SEQ ID NO: 2903573 - RNA, 19 nt, Artificial Sequence
  Description of Artificial Sequence: Synthetic oligonucleotide
uccuaggaagucaaauagg

SEQ ID NO: 2903574 - RNA, 19 nt, Artificial Sequence
  Description of Artificial Sequence: Synthetic oligonucleotide
aaguccucaucugacaggg

SEQ ID NO: 2903575 - RNA, 19 nt, Artificial Sequence
  Description of Artificial Sequence: Synthetic oligonucleotide
cuagggaguguacugaagg

SEQ ID NO: 2903576 - RNA, 19 nt, Artificial Sequence
  Description of Artificial Sequence: Synthetic oligonucleotide
ucaucaaggucaagggccg

SEQ ID NO: 2903577 - RNA, 19 nt, Artificial Sequence
  Description of Artificial Sequence: Synthetic oligonucleotide
acagcaauaggcacgggcc

SEQ ID NO: 2903578 - RNA, 19 nt, Artificial Sequence
  Description of Artificial Sequence: Synthetic oligonucleotide
ugucccauaagucccaggu

SEQ ID NO: 2903579 - RNA, 19 nt, Artificial Sequence
  Description of Artificial Sequence: Synthetic oligonucleotide
  modified_base (17)..(17): a, c, u, g, unknown or other
ugagucucuucccuagngg

SEQ ID NO: 2903580 - RNA, 19 nt, Artificial Sequence
  Description of Artificial Sequence: Synthetic oligonucleotide
aagcagguggcuaucauuc

SEQ ID NO: 2903581 - RNA, 19 nt, Artificial Sequence
  Description of Artificial Sequence: Synthetic oligonucleotide
aaaugugcaggucucugga

SEQ ID NO: 2903582 - RNA, 19 nt, Artificial Sequence
  Description of Artificial Sequence: Synthetic oligonucleotide
uugaucuaacaccuucucc

SEQ ID NO: 2903583 - RNA, 19 nt, Artificial Sequence
  Description of Artificial Sequence: Synthetic oligonucleotide
uugacuugggugauggugu

SEQ ID NO: 2903584 - RNA, 19 nt, Artificial Sequence
  Description of Artificial Sequence: Synthetic oligonucleotide
  modified_base (11)..(11): a, c, u, g, unknown or other
uguugcagggnguugaguc

SEQ ID NO: 2903585 - RNA, 19 nt, Artificial Sequence
  Description of Artificial Sequence: Synthetic oligonucleotide
uguuugucuuccaaaugug

SEQ ID NO: 2903586 - RNA, 19 nt, Artificial Sequence
  Description of Artificial Sequence: Synthetic oligonucleotide
gucaaauagguacuuaaca

SEQ ID NO: 2903587 - RNA, 19 nt, Artificial Sequence
  Description of Artificial Sequence: Synthetic oligonucleotide
aaggucaagggccggaacu

SEQ ID NO: 2903588 - RNA, 19 nt, Artificial Sequence
  Description of Artificial Sequence: Synthetic oligonucleotide
gucaucaaggucaagggcc

SEQ ID NO: 2903589 - RNA, 19 nt, Artificial Sequence
  Description of Artificial Sequence: Synthetic oligonucleotide
aucugacaggguuagauga

SEQ ID NO: 2903590 - RNA, 19 nt, Artificial Sequence
  Description of Artificial Sequence: Synthetic oligonucleotide
ugucaucaaggucaagggc

SEQ ID NO: 2903591 - RNA, 19 nt, Artificial Sequence
  Description of Artificial Sequence: Synthetic oligonucleotide
acuaagaauggccuggaau

SEQ ID NO: 2903592 - RNA, 19 nt, Artificial Sequence
  Description of Artificial Sequence: Synthetic oligonucleotide
agggaguucccuuguagac

SEQ ID NO: 2903593 - RNA, 19 nt, Artificial Sequence
  Description of Artificial Sequence: Synthetic oligonucleotide
ucuaacaccuucuccuuga

SEQ ID NO: 2903594 - RNA, 19 nt, Artificial Sequence
  Description of Artificial Sequence: Synthetic oligonucleotide
acaggguuagaugaccagc

SEQ ID NO: 2903595 - RNA, 19 nt, Artificial Sequence
  Description of Artificial Sequence: Synthetic oligonucleotide
uucucugccagcucaauuc

SEQ ID NO: 2903596 - RNA, 19 nt, Artificial Sequence
  Description of Artificial Sequence: Synthetic oligonucleotide
  modified_base (18)..(18): a, c, u, g, unknown or other
uugagucucuucccuagng

SEQ ID NO: 2903597 - RNA, 19 nt, Artificial Sequence
  Description of Artificial Sequence: Synthetic oligonucleotide
gaccagcuaggccugagcg

SEQ ID NO: 2903598 - RNA, 19 nt, Artificial Sequence
  Description of Artificial Sequence: Synthetic oligonucleotide
aauuccuaggaagucaaau

SEQ ID NO: 2903599 - RNA, 19 nt, Artificial Sequence
  Description of Artificial Sequence: Synthetic oligonucleotide
gucugugucaagcacccgg

SEQ ID NO: 2903600 - RNA, 19 nt, Artificial Sequence
  Description of Artificial Sequence: Synthetic oligonucleotide
ucaauuccuaggaagucaa

SEQ ID NO: 2903601 - RNA, 19 nt, Artificial Sequence
  Description of Artificial Sequence: Synthetic oligonucleotide
aagggaguucccuuguaga

SEQ ID NO: 2903602 - RNA, 19 nt, Artificial Sequence
  Description of Artificial Sequence: Synthetic oligonucleotide
  modified_base (8)..(8): a, c, u, g, unknown or other
ucccuagngguuuugaguc

SEQ ID NO: 2903603 - RNA, 19 nt, Artificial Sequence
  Description of Artificial Sequence: Synthetic oligonucleotide
  modified_base (16)..(16): a, c, u, g, unknown or other
aauaguguugcagggnguu

SEQ ID NO: 2903604 - RNA, 19 nt, Artificial Sequence
  Description of Artificial Sequence: Synthetic oligonucleotide
agggaguguacugaaggcc

SEQ ID NO: 2903605 - RNA, 19 nt, Artificial Sequence
  Description of Artificial Sequence: Synthetic oligonucleotide
  modified_base (18)..(18): a, c, u, g, unknown or other
ggaauaguguugcagggng

SEQ ID NO: 2903606 - RNA, 19 nt, Artificial Sequence
  Description of Artificial Sequence: Synthetic oligonucleotide
  modified_base (4)..(4): a, c, u, g, unknown or other
uagngguuuugagucacgg

SEQ ID NO: 2903607 - RNA, 19 nt, Artificial Sequence
  Description of Artificial Sequence: Synthetic oligonucleotide
ugccauguuucucugccag

SEQ ID NO: 2903608 - RNA, 19 nt, Artificial Sequence
  Description of Artificial Sequence: Synthetic oligonucleotide
gaagggaguucccuuguag

SEQ ID NO: 2903609 - RNA, 19 nt, Artificial Sequence
  Description of Artificial Sequence: Synthetic oligonucleotide
auagguacuuaacagcaau

SEQ ID NO: 2903610 - RNA, 19 nt, Artificial Sequence
  Description of Artificial Sequence: Synthetic oligonucleotide
cuccacauccucucgaagc

SEQ ID NO: 2903611 - RNA, 19 nt, Artificial Sequence
  Description of Artificial Sequence: Synthetic oligonucleotide
agguacuuaacagcaauag

SEQ ID NO: 2903612 - RNA, 19 nt, Artificial Sequence
  Description of Artificial Sequence: Synthetic oligonucleotide
agucaaauagguacuuaac

SEQ ID NO: 2903613 - RNA, 19 nt, Artificial Sequence
  Description of Artificial Sequence: Synthetic oligonucleotide
aauggccuggaauaguguu

SEQ ID NO: 2903614 - RNA, 19 nt, Artificial Sequence
  Description of Artificial Sequence: Synthetic oligonucleotide
ucugggagaagggaguucc

SEQ ID NO: 2903615 - RNA, 19 nt, Artificial Sequence
  Description of Artificial Sequence: Synthetic oligonucleotide
caaaugugcaggucucugg

SEQ ID NO: 2903616 - RNA, 19 nt, Artificial Sequence
  Description of Artificial Sequence: Synthetic oligonucleotide
gguacuuaacagcaauagg

SEQ ID NO: 2903617 - RNA, 19 nt, Artificial Sequence
  Description of Artificial Sequence: Synthetic oligonucleotide
ugugcaggucucuggaucc

SEQ ID NO: 2903618 - RNA, 19 nt, Artificial Sequence
  Description of Artificial Sequence: Synthetic oligonucleotide
guggcuaucauucagaguu

SEQ ID NO: 2903619 - RNA, 19 nt, Artificial Sequence
  Description of Artificial Sequence: Synthetic oligonucleotide
uaagaauggccuggaauag

SEQ ID NO: 2903620 - RNA, 19 nt, Artificial Sequence
  Description of Artificial Sequence: Synthetic oligonucleotide
augugcaggucucuggauc

SEQ ID NO: 2903621 - RNA, 19 nt, Artificial Sequence
  Description of Artificial Sequence: Synthetic oligonucleotide
  modified_base (9)..(9): a, c, u, g, unknown or other
uucccuagngguuuugagu

SEQ ID NO: 2903622 - RNA, 19 nt, Artificial Sequence
  Description of Artificial Sequence: Synthetic oligonucleotide
gugucaagcacccggacug

SEQ ID NO: 2903623 - RNA, 19 nt, Artificial Sequence
  Description of Artificial Sequence: Synthetic oligonucleotide
gacuugaucuaacaccuuc

SEQ ID NO: 2903624 - RNA, 19 nt, Artificial Sequence
  Description of Artificial Sequence: Synthetic oligonucleotide
uccacauccucucgaagca

SEQ ID NO: 2903625 - RNA, 19 nt, Artificial Sequence
  Description of Artificial Sequence: Synthetic oligonucleotide
cacacuaagaauggccugg

SEQ ID NO: 2903626 - RNA, 19 nt, Artificial Sequence
  Description of Artificial Sequence: Synthetic oligonucleotide
  modified_base (10)..(10): a, c, u, g, unknown or other
cuucccuagngguuuugag

SEQ ID NO: 2903627 - RNA, 19 nt, Artificial Sequence
  Description of Artificial Sequence: Synthetic oligonucleotide
ugugucaagcacccggacu

SEQ ID NO: 2903628 - RNA, 19 nt, Artificial Sequence
  Description of Artificial Sequence: Synthetic oligonucleotide
uuguagacuugaucuaaca

SEQ ID NO: 2903629 - RNA, 19 nt, Artificial Sequence
  Description of Artificial Sequence: Synthetic oligonucleotide
ucuagggaguguacugaag

SEQ ID NO: 2903630 - RNA, 19 nt, Artificial Sequence
  Description of Artificial Sequence: Synthetic oligonucleotide
ccgauucacacuaagaaug

SEQ ID NO: 2903631 - RNA, 19 nt, Artificial Sequence
  Description of Artificial Sequence: Synthetic oligonucleotide
cagcucaauuccuaggaag

SEQ ID NO: 2903632 - RNA, 19 nt, Artificial Sequence
  Description of Artificial Sequence: Synthetic oligonucleotide
ucugugucaagcacccgga

SEQ ID NO: 2903633 - RNA, 19 nt, Artificial Sequence
  Description of Artificial Sequence: Synthetic oligonucleotide
ucucugccagcucaauucc

SEQ ID NO: 2903634 - RNA, 19 nt, Artificial Sequence
  Description of Artificial Sequence: Synthetic oligonucleotide
auuccuaggaagucaaaua

SEQ ID NO: 2903635 - RNA, 19 nt, Artificial Sequence
  Description of Artificial Sequence: Synthetic oligonucleotide
accagcuaggccugagcgc

SEQ ID NO: 2903636 - RNA, 19 nt, Artificial Sequence
  Description of Artificial Sequence: Synthetic oligonucleotide
ccuggaauaguguugcagg

SEQ ID NO: 2903637 - RNA, 19 nt, Artificial Sequence
  Description of Artificial Sequence: Synthetic oligonucleotide
uagggaguguacugaaggc

SEQ ID NO: 2903638 - RNA, 19 nt, Artificial Sequence
  Description of Artificial Sequence: Synthetic oligonucleotide
  modified_base (14)..(14): a, c, u, g, unknown or other
uaguguugcagggnguuga

SEQ ID NO: 2903639 - RNA, 19 nt, Artificial Sequence
  Description of Artificial Sequence: Synthetic oligonucleotide
ucaucugacaggguuagau

SEQ ID NO: 2903640 - RNA, 19 nt, Artificial Sequence
  Description of Artificial Sequence: Synthetic oligonucleotide
auguuucucugccagcuca

SEQ ID NO: 2903641 - RNA, 19 nt, Artificial Sequence
  Description of Artificial Sequence: Synthetic oligonucleotide
cccacuagugucaucaagg

SEQ ID NO: 2903642 - RNA, 19 nt, Artificial Sequence
  Description of Artificial Sequence: Synthetic oligonucleotide
ucugacaggguuagaugac

SEQ ID NO: 2903643 - RNA, 19 nt, Artificial Sequence
  Description of Artificial Sequence: Synthetic oligonucleotide
ugacaggguuagaugacca

SEQ ID NO: 2903644 - RNA, 19 nt, Artificial Sequence
  Description of Artificial Sequence: Synthetic oligonucleotide
uccucuaugccauguuucu

SEQ ID NO: 2903645 - RNA, 19 nt, Artificial Sequence
  Description of Artificial Sequence: Synthetic oligonucleotide
gaaggccucugggagaagg

SEQ ID NO: 2903646 - RNA, 19 nt, Artificial Sequence
  Description of Artificial Sequence: Synthetic oligonucleotide
gguuagaugaccagcuagg

SEQ ID NO: 2903647 - RNA, 19 nt, Artificial Sequence
  Description of Artificial Sequence: Synthetic oligonucleotide
ugagcgccacucaaggucu

SEQ ID NO: 2903648 - RNA, 19 nt, Artificial Sequence
  Description of Artificial Sequence: Synthetic oligonucleotide
ucccacuagugucaucaag

SEQ ID NO: 2903649 - RNA, 19 nt, Artificial Sequence
  Description of Artificial Sequence: Synthetic oligonucleotide
cuuguagacuugaucuaac

SEQ ID NO: 2903650 - RNA, 19 nt, Artificial Sequence
  Description of Artificial Sequence: Synthetic oligonucleotide
ucacacuaagaauggccug

SEQ ID NO: 2903651 - RNA, 19 nt, Artificial Sequence
  Description of Artificial Sequence: Synthetic oligonucleotide
ccugcugucccauaagucc

SEQ ID NO: 2903652 - RNA, 19 nt, Artificial Sequence
  Description of Artificial Sequence: Synthetic oligonucleotide
gacaggguuagaugaccag

SEQ ID NO: 2903653 - RNA, 19 nt, Artificial Sequence
  Description of Artificial Sequence: Synthetic oligonucleotide
ucuaugccauguuucucug

SEQ ID NO: 2903654 - RNA, 19 nt, Artificial Sequence
  Description of Artificial Sequence: Synthetic oligonucleotide
agguggcuaucauucagag

SEQ ID NO: 2903655 - RNA, 19 nt, Artificial Sequence
  Description of Artificial Sequence: Synthetic oligonucleotide
ugagucacggaggucaagu

SEQ ID NO: 2903656 - RNA, 19 nt, Artificial Sequence
  Description of Artificial Sequence: Synthetic oligonucleotide
cugcugucccauaaguccc

SEQ ID NO: 2903657 - RNA, 19 nt, Artificial Sequence
  Description of Artificial Sequence: Synthetic oligonucleotide
uucccuuguagacuugauc

SEQ ID NO: 2903658 - RNA, 19 nt, Artificial Sequence
  Description of Artificial Sequence: Synthetic oligonucleotide
cuugaucuaacaccuucuc

SEQ ID NO: 2903659 - RNA, 19 nt, Artificial Sequence
  Description of Artificial Sequence: Synthetic oligonucleotide
ucucuggauccucuaugcc

SEQ ID NO: 2903660 - RNA, 19 nt, Artificial Sequence
  Description of Artificial Sequence: Synthetic oligonucleotide
guuugucuuccaaaugugc

SEQ ID NO: 2903661 - RNA, 19 nt, Artificial Sequence
  Description of Artificial Sequence: Synthetic oligonucleotide
cugagcgccacucaagguc

SEQ ID NO: 2903662 - RNA, 19 nt, Artificial Sequence
  Description of Artificial Sequence: Synthetic oligonucleotide
caucugacaggguuagaug

SEQ ID NO: 2903663 - RNA, 19 nt, Artificial Sequence
  Description of Artificial Sequence: Synthetic oligonucleotide
ugccagcucaauuccuagg

SEQ ID NO: 2903664 - RNA, 19 nt, Artificial Sequence
  Description of Artificial Sequence: Synthetic oligonucleotide
aaggucuagggaguguacu

SEQ ID NO: 2903665 - RNA, 19 nt, Artificial Sequence
  Description of Artificial Sequence: Synthetic oligonucleotide
aggucuagggaguguacug

SEQ ID NO: 2903666 - RNA, 19 nt, Artificial Sequence
  Description of Artificial Sequence: Synthetic oligonucleotide
agaauggccuggaauagug

SEQ ID NO: 2903667 - RNA, 19 nt, Artificial Sequence
  Description of Artificial Sequence: Synthetic oligonucleotide
  modified_base (16)..(16): a, c, u, g, unknown or other
gagucucuucccuagnggu

SEQ ID NO: 2903668 - RNA, 19 nt, Artificial Sequence
  Description of Artificial Sequence: Synthetic oligonucleotide
aggucaaguccucaucuga

SEQ ID NO: 2903669 - RNA, 19 nt, Artificial Sequence
  Description of Artificial Sequence: Synthetic oligonucleotide
aacuccacauccucucgaa

SEQ ID NO: 2903670 - RNA, 19 nt, Artificial Sequence
  Description of Artificial Sequence: Synthetic oligonucleotide
gauucacacuaagaauggc

SEQ ID NO: 2903671 - RNA, 19 nt, Artificial Sequence
  Description of Artificial Sequence: Synthetic oligonucleotide
aaugugcaggucucuggau

SEQ ID NO: 2903672 - RNA, 19 nt, Artificial Sequence
  Description of Artificial Sequence: Synthetic oligonucleotide
ggguuagaugaccagcuag

SEQ ID NO: 2903673 - RNA, 19 nt, Artificial Sequence
  Description of Artificial Sequence: Synthetic oligonucleotide
  modified_base (3)..(3): a, c, u, g, unknown or other
agngguuuugagucacgga

SEQ ID NO: 2903674 - RNA, 19 nt, Artificial Sequence
  Description of Artificial Sequence: Synthetic oligonucleotide
uggccuggaauaguguugc

SEQ ID NO: 2903675 - RNA, 19 nt, Artificial Sequence
  Description of Artificial Sequence: Synthetic oligonucleotide
  modified_base (19)..(19): a, c, u, g, unknown or other
uggaauaguguugcagggn

SEQ ID NO: 2903676 - RNA, 19 nt, Artificial Sequence
  Description of Artificial Sequence: Synthetic oligonucleotide
guuagaugaccagcuaggc

SEQ ID NO: 2903677 - RNA, 19 nt, Artificial Sequence
  Description of Artificial Sequence: Synthetic oligonucleotide
uagguacuuaacagcaaua

SEQ ID NO: 2903678 - RNA, 19 nt, Artificial Sequence
  Description of Artificial Sequence: Synthetic oligonucleotide
ccacucaaggucuagggag

SEQ ID NO: 2903679 - RNA, 19 nt, Artificial Sequence
  Description of Artificial Sequence: Synthetic oligonucleotide
acuggcauucgcugcaccu

SEQ ID NO: 2903680 - RNA, 19 nt, Artificial Sequence
  Description of Artificial Sequence: Synthetic oligonucleotide
auccucuaugccauguuuc

SEQ ID NO: 2903681 - RNA, 19 nt, Artificial Sequence
  Description of Artificial Sequence: Synthetic oligonucleotide
cucuggauccucuaugcca

SEQ ID NO: 2903682 - RNA, 19 nt, Artificial Sequence
  Description of Artificial Sequence: Synthetic oligonucleotide
  modified_base (5)..(5): a, c, u, g, unknown or other
cuagngguuuugagucacg

SEQ ID NO: 2903683 - RNA, 19 nt, Artificial Sequence
  Description of Artificial Sequence: Synthetic oligonucleotide
auucgcugcaccucacugu

SEQ ID NO: 2903684 - RNA, 19 nt, Artificial Sequence
  Description of Artificial Sequence: Synthetic oligonucleotide
aucuaacaccuucuccuug

SEQ ID NO: 2903685 - RNA, 19 nt, Artificial Sequence
  Description of Artificial Sequence: Synthetic oligonucleotide
gaggucaaguccucaucug

SEQ ID NO: 2903686 - RNA, 19 nt, Artificial Sequence
  Description of Artificial Sequence: Synthetic oligonucleotide
ucugccagcucaauuccua

SEQ ID NO: 2903687 - RNA, 19 nt, Artificial Sequence
  Description of Artificial Sequence: Synthetic oligonucleotide
aagaauggccuggaauagu

SEQ ID NO: 2903688 - RNA, 19 nt, Artificial Sequence
  Description of Artificial Sequence: Synthetic oligonucleotide
ucaagcacccggacuggca

SEQ ID NO: 2903689 - RNA, 19 nt, Artificial Sequence
  Description of Artificial Sequence: Synthetic oligonucleotide
uggugucugugucaagcac

SEQ ID NO: 2903690 - RNA, 19 nt, Artificial Sequence
  Description of Artificial Sequence: Synthetic oligonucleotide
uggcauucgcugcaccuca

SEQ ID NO: 2903691 - RNA, 19 nt, Artificial Sequence
  Description of Artificial Sequence: Synthetic oligonucleotide
aauagguacuuaacagcaa

SEQ ID NO: 2903692 - RNA, 19 nt, Artificial Sequence
  Description of Artificial Sequence: Synthetic oligonucleotide
agcucaauuccuaggaagu

SEQ ID NO: 2903693 - RNA, 19 nt, Artificial Sequence
  Description of Artificial Sequence: Synthetic oligonucleotide
cagcaauaggcacgggccg

SEQ ID NO: 2903694 - RNA, 19 nt, Artificial Sequence
  Description of Artificial Sequence: Synthetic oligonucleotide
acuugggugauggugucug

SEQ ID NO: 2903695 - RNA, 19 nt, Artificial Sequence
  Description of Artificial Sequence: Synthetic oligonucleotide
guguacugaaggccucugg

SEQ ID NO: 2903696 - RNA, 19 nt, Artificial Sequence
  Description of Artificial Sequence: Synthetic oligonucleotide
auaagucccaggucccacu

SEQ ID NO: 2903697 - RNA, 19 nt, Artificial Sequence
  Description of Artificial Sequence: Synthetic oligonucleotide
cuguuugucuuccaaaugu

SEQ ID NO: 2903698 - RNA, 19 nt, Artificial Sequence
  Description of Artificial Sequence: Synthetic oligonucleotide
uucgcugcaccucacuguu

SEQ ID NO: 2903699 - RNA, 19 nt, Artificial Sequence
  Description of Artificial Sequence: Synthetic oligonucleotide
cauucgcugcaccucacug

SEQ ID NO: 2903700 - RNA, 19 nt, Artificial Sequence
  Description of Artificial Sequence: Synthetic oligonucleotide
aagucccaggucccacuag

SEQ ID NO: 2903701 - RNA, 19 nt, Artificial Sequence
  Description of Artificial Sequence: Synthetic oligonucleotide
aggaagucaaauagguacu

SEQ ID NO: 2903702 - RNA, 19 nt, Artificial Sequence
  Description of Artificial Sequence: Synthetic oligonucleotide
uccucucgaagcagguggc

SEQ ID NO: 2903703 - RNA, 19 nt, Artificial Sequence
  Description of Artificial Sequence: Synthetic oligonucleotide
ucccugcugucccauaagu

SEQ ID NO: 2903704 - RNA, 19 nt, Artificial Sequence
  Description of Artificial Sequence: Synthetic oligonucleotide
acugaaggccucugggaga

SEQ ID NO: 2903705 - RNA, 19 nt, Artificial Sequence
  Description of Artificial Sequence: Synthetic oligonucleotide
ucucgaagcagguggcuau

SEQ ID NO: 2903706 - RNA, 19 nt, Artificial Sequence
  Description of Artificial Sequence: Synthetic oligonucleotide
ugaccagcuaggccugagc

SEQ ID NO: 2903707 - RNA, 19 nt, Artificial Sequence
  Description of Artificial Sequence: Synthetic oligonucleotide
cacuguucccugcuguccc

SEQ ID NO: 2903708 - RNA, 19 nt, Artificial Sequence
  Description of Artificial Sequence: Synthetic oligonucleotide
uccucaucugacaggguua

SEQ ID NO: 2903709 - RNA, 19 nt, Artificial Sequence
  Description of Artificial Sequence: Synthetic oligonucleotide
ucaaggucuagggagugua

SEQ ID NO: 2903710 - RNA, 19 nt, Artificial Sequence
  Description of Artificial Sequence: Synthetic oligonucleotide
agucccaggucccacuagu

SEQ ID NO: 2903711 - RNA, 19 nt, Artificial Sequence
  Description of Artificial Sequence: Synthetic oligonucleotide
uucccugcugucccauaag

SEQ ID NO: 2903712 - RNA, 19 nt, Artificial Sequence
  Description of Artificial Sequence: Synthetic oligonucleotide
ugcaccucacuguucccug

SEQ ID NO: 2903713 - RNA, 19 nt, Artificial Sequence
  Description of Artificial Sequence: Synthetic oligonucleotide
uuucucugccagcucaauu

SEQ ID NO: 2903714 - RNA, 19 nt, Artificial Sequence
  Description of Artificial Sequence: Synthetic oligonucleotide
aaggccucugggagaaggg

SEQ ID NO: 2903715 - RNA, 19 nt, Artificial Sequence
  Description of Artificial Sequence: Synthetic oligonucleotide
acuugaucuaacaccuucu

SEQ ID NO: 2903716 - RNA, 19 nt, Artificial Sequence
  Description of Artificial Sequence: Synthetic oligonucleotide
auaggcacgggccgauuca

SEQ ID NO: 2903717 - RNA, 19 nt, Artificial Sequence
  Description of Artificial Sequence: Synthetic oligonucleotide
auggugucugugucaagca

SEQ ID NO: 2903718 - RNA, 19 nt, Artificial Sequence
  Description of Artificial Sequence: Synthetic oligonucleotide
ucacuguucccugcugucc

SEQ ID NO: 2903719 - RNA, 19 nt, Artificial Sequence
  Description of Artificial Sequence: Synthetic oligonucleotide
uuugagucacggaggucaa

SEQ ID NO: 2903720 - RNA, 19 nt, Artificial Sequence
  Description of Artificial Sequence: Synthetic oligonucleotide
ggagaagggaguucccuug

SEQ ID NO: 2903721 - RNA, 19 nt, Artificial Sequence
  Description of Artificial Sequence: Synthetic oligonucleotide
ucaagggccggaacuccac

SEQ ID NO: 2903722 - RNA, 19 nt, Artificial Sequence
  Description of Artificial Sequence: Synthetic oligonucleotide
aggucaagggccggaacuc

SEQ ID NO: 2903723 - RNA, 19 nt, Artificial Sequence
  Description of Artificial Sequence: Synthetic oligonucleotide
guacugaaggccucuggga

SEQ ID NO: 2903724 - RNA, 19 nt, Artificial Sequence
  Description of Artificial Sequence: Synthetic oligonucleotide
cucaauuccuaggaaguca

SEQ ID NO: 2903725 - RNA, 19 nt, Artificial Sequence
  Description of Artificial Sequence: Synthetic oligonucleotide
gugucugugucaagcaccc

SEQ ID NO: 2903726 - RNA, 19 nt, Artificial Sequence
  Description of Artificial Sequence: Synthetic oligonucleotide
acuccacauccucucgaag

SEQ ID NO: 2903727 - RNA, 19 nt, Artificial Sequence
  Description of Artificial Sequence: Synthetic oligonucleotide
agggccggaacuccacauc

SEQ ID NO: 2903728 - RNA, 19 nt, Artificial Sequence
  Description of Artificial Sequence: Synthetic oligonucleotide
aagggccggaacuccacau

SEQ ID NO: 2903729 - RNA, 19 nt, Artificial Sequence
  Description of Artificial Sequence: Synthetic oligonucleotide
ugucaagcacccggacugg

SEQ ID NO: 2903730 - RNA, 19 nt, Artificial Sequence
  Description of Artificial Sequence: Synthetic oligonucleotide
gaacuccacauccucucga

SEQ ID NO: 2903731 - RNA, 19 nt, Artificial Sequence
  Description of Artificial Sequence: Synthetic oligonucleotide
ggugucugugucaagcacc

SEQ ID NO: 2903732 - RNA, 19 nt, Artificial Sequence
  Description of Artificial Sequence: Synthetic oligonucleotide
gucaaguccucaucugaca

SEQ ID NO: 2903733 - RNA, 19 nt, Artificial Sequence
  Description of Artificial Sequence: Synthetic oligonucleotide
uugggugauggugucugug

SEQ ID NO: 2903734 - RNA, 19 nt, Artificial Sequence
  Description of Artificial Sequence: Synthetic oligonucleotide
ggaacuccacauccucucg

SEQ ID NO: 2903735 - RNA, 19 nt, Artificial Sequence
  Description of Artificial Sequence: Synthetic oligonucleotide
  modified_base (11)..(11): a, c, u, g, unknown or other
ucuucccuagngguuuuga

SEQ ID NO: 2903736 - RNA, 19 nt, Artificial Sequence
  Description of Artificial Sequence: Synthetic oligonucleotide
ggccgauucacacuaagaa

SEQ ID NO: 2903737 - RNA, 19 nt, Artificial Sequence
  Description of Artificial Sequence: Synthetic oligonucleotide
ugcugucccauaaguccca

SEQ ID NO: 2903738 - RNA, 19 nt, Artificial Sequence
  Description of Artificial Sequence: Synthetic oligonucleotide
cucuaugccauguuucucu

SEQ ID NO: 2903739 - RNA, 19 nt, Artificial Sequence
  Description of Artificial Sequence: Synthetic oligonucleotide
uaagucccaggucccacua

SEQ ID NO: 2903740 - RNA, 19 nt, Artificial Sequence
  Description of Artificial Sequence: Synthetic oligonucleotide
cacuagugucaucaagguc

SEQ ID NO: 2903741 - RNA, 19 nt, Artificial Sequence
  Description of Artificial Sequence: Synthetic oligonucleotide
cugccagcucaauuccuag

SEQ ID NO: 2903742 - RNA, 19 nt, Artificial Sequence
  Description of Artificial Sequence: Synthetic oligonucleotide
ucuuccaaaugugcagguc

SEQ ID NO: 2903743 - RNA, 19 nt, Artificial Sequence
  Description of Artificial Sequence: Synthetic oligonucleotide
  modified_base (10)..(10): a, c, u, g, unknown or other
guugcagggnguugagucu

SEQ ID NO: 2903744 - RNA, 19 nt, Artificial Sequence
  Description of Artificial Sequence: Synthetic oligonucleotide
ugggagaagggaguucccu

SEQ ID NO: 2903745 - RNA, 19 nt, Artificial Sequence
  Description of Artificial Sequence: Synthetic oligonucleotide
cucacuguucccugcuguc

SEQ ID NO: 2903746 - RNA, 19 nt, Artificial Sequence
  Description of Artificial Sequence: Synthetic oligonucleotide
caccuucuccuugacuugg

SEQ ID NO: 2903747 - RNA, 19 nt, Artificial Sequence
  Description of Artificial Sequence: Synthetic oligonucleotide
caaggucuagggaguguac

SEQ ID NO: 2903748 - RNA, 19 nt, Artificial Sequence
  Description of Artificial Sequence: Synthetic oligonucleotide
  modified_base (4)..(4): a, c, u, g, unknown or other
gggnguugagucucuuccc

SEQ ID NO: 2903749 - RNA, 19 nt, Artificial Sequence
  Description of Artificial Sequence: Synthetic oligonucleotide
uggcuaucauucagaguuc

SEQ ID NO: 2903750 - RNA, 19 nt, Artificial Sequence
  Description of Artificial Sequence: Synthetic oligonucleotide
ggucccacuagugucauca

SEQ ID NO: 2903751 - RNA, 19 nt, Artificial Sequence
  Description of Artificial Sequence: Synthetic oligonucleotide
gcuguuugucuuccaaaug

SEQ ID NO: 2903752 - RNA, 19 nt, Artificial Sequence
  Description of Artificial Sequence: Synthetic oligonucleotide
gcagguggcuaucauucag

SEQ ID NO: 2903753 - RNA, 19 nt, Artificial Sequence
  Description of Artificial Sequence: Synthetic oligonucleotide
agcacccggacuggcauuc

SEQ ID NO: 2903754 - RNA, 19 nt, Artificial Sequence
  Description of Artificial Sequence: Synthetic oligonucleotide
gagucacggaggucaaguc

SEQ ID NO: 2903755 - RNA, 19 nt, Artificial Sequence
  Description of Artificial Sequence: Synthetic oligonucleotide
gccugagcgccacucaagg

SEQ ID NO: 2903756 - RNA, 19 nt, Artificial Sequence
  Description of Artificial Sequence: Synthetic oligonucleotide
cuaacaccuucuccuugac

SEQ ID NO: 2903757 - RNA, 19 nt, Artificial Sequence
  Description of Artificial Sequence: Synthetic oligonucleotide
aggcuguuugucuuccaaa

SEQ ID NO: 2903758 - RNA, 19 nt, Artificial Sequence
  Description of Artificial Sequence: Synthetic oligonucleotide
cuaggaagucaaauaggua

SEQ ID NO: 2903759 - RNA, 19 nt, Artificial Sequence
  Description of Artificial Sequence: Synthetic oligonucleotide
aguucccuuguagacuuga

SEQ ID NO: 2903760 - RNA, 19 nt, Artificial Sequence
  Description of Artificial Sequence: Synthetic oligonucleotide
  modified_base (9)..(9): a, c, u, g, unknown or other
uugcagggnguugagucuc

SEQ ID NO: 2903761 - RNA, 19 nt, Artificial Sequence
  Description of Artificial Sequence: Synthetic oligonucleotide
cauaagucccaggucccac

SEQ ID NO: 2903762 - RNA, 19 nt, Artificial Sequence
  Description of Artificial Sequence: Synthetic oligonucleotide
uccaaaugugcaggucucu

SEQ ID NO: 2903763 - RNA, 19 nt, Artificial Sequence
  Description of Artificial Sequence: Synthetic oligonucleotide
  modified_base (13)..(13): a, c, u, g, unknown or other
aguguugcagggnguugag

SEQ ID NO: 2903764 - RNA, 19 nt, Artificial Sequence
  Description of Artificial Sequence: Synthetic oligonucleotide
uggauccucuaugccaugu

SEQ ID NO: 2903765 - RNA, 19 nt, Artificial Sequence
  Description of Artificial Sequence: Synthetic oligonucleotide
auggccuggaauaguguug

SEQ ID NO: 2903766 - RNA, 19 nt, Artificial Sequence
  Description of Artificial Sequence: Synthetic oligonucleotide
  modified_base (15)..(15): a, c, u, g, unknown or other
auaguguugcagggnguug

SEQ ID NO: 2903767 - RNA, 19 nt, Artificial Sequence
  Description of Artificial Sequence: Synthetic oligonucleotide
uaggccugagcgccacuca

SEQ ID NO: 2903768 - RNA, 19 nt, Artificial Sequence
  Description of Artificial Sequence: Synthetic oligonucleotide
agcagguggcuaucauuca

SEQ ID NO: 2903769 - RNA, 19 nt, Artificial Sequence
  Description of Artificial Sequence: Synthetic oligonucleotide
gaagucaaauagguacuua

SEQ ID NO: 2903770 - RNA, 19 nt, Artificial Sequence
  Description of Artificial Sequence: Synthetic oligonucleotide
cagguggcuaucauucaga

SEQ ID NO: 2903771 - RNA, 19 nt, Artificial Sequence
  Description of Artificial Sequence: Synthetic oligonucleotide
  modified_base (19)..(19): a, c, u, g, unknown or other
guugagucucuucccuagn

SEQ ID NO: 2903772 - RNA, 19 nt, Artificial Sequence
  Description of Artificial Sequence: Synthetic oligonucleotide
  modified_base (8)..(8): a, c, u, g, unknown or other
ugcagggnguugagucucu

SEQ ID NO: 2903773 - RNA, 19 nt, Artificial Sequence
  Description of Artificial Sequence: Synthetic oligonucleotide
ccagcuaggccugagcgcc

SEQ ID NO: 2903774 - RNA, 19 nt, Artificial Sequence
  Description of Artificial Sequence: Synthetic oligonucleotide
acggaggucaaguccucau

SEQ ID NO: 2903775 - RNA, 19 nt, Artificial Sequence
  Description of Artificial Sequence: Synthetic oligonucleotide
gccagcucaauuccuagga

SEQ ID NO: 2903776 - RNA, 19 nt, Artificial Sequence
  Description of Artificial Sequence: Synthetic oligonucleotide
ggugauggugucuguguca

SEQ ID NO: 2903777 - RNA, 19 nt, Artificial Sequence
  Description of Artificial Sequence: Synthetic oligonucleotide
aguguacugaaggccucug

SEQ ID NO: 2903778 - RNA, 19 nt, Artificial Sequence
  Description of Artificial Sequence: Synthetic oligonucleotide
gacuggcauucgcugcacc

SEQ ID NO: 2903779 - RNA, 19 nt, Artificial Sequence
  Description of Artificial Sequence: Synthetic oligonucleotide
ucgaagcagguggcuauca

SEQ ID NO: 2903780 - RNA, 19 nt, Artificial Sequence
  Description of Artificial Sequence: Synthetic oligonucleotide
acucaaggucuagggagug

SEQ ID NO: 2903781 - RNA, 19 nt, Artificial Sequence
  Description of Artificial Sequence: Synthetic oligonucleotide
cugggagaagggaguuccc

SEQ ID NO: 2903782 - RNA, 19 nt, Artificial Sequence
  Description of Artificial Sequence: Synthetic oligonucleotide
  modified_base (2)..(2): a, c, u, g, unknown or other
gnguugagucucuucccua

SEQ ID NO: 2903783 - RNA, 19 nt, Artificial Sequence
  Description of Artificial Sequence: Synthetic oligonucleotide
caaggucaagggccggaac

SEQ ID NO: 2903784 - RNA, 19 nt, Artificial Sequence
  Description of Artificial Sequence: Synthetic oligonucleotide
ccuaggaagucaaauaggu

SEQ ID NO: 2903785 - RNA, 19 nt, Artificial Sequence
  Description of Artificial Sequence: Synthetic oligonucleotide
agcaauaggcacgggccga

SEQ ID NO: 2903786 - RNA, 19 nt, Artificial Sequence
  Description of Artificial Sequence: Synthetic oligonucleotide
  modified_base (6)..(6): a, c, u, g, unknown or other
cagggnguugagucucuuc

SEQ ID NO: 2903787 - RNA, 19 nt, Artificial Sequence
  Description of Artificial Sequence: Synthetic oligonucleotide
cuagugucaucaaggucaa

SEQ ID NO: 2903788 - RNA, 19 nt, Artificial Sequence
  Description of Artificial Sequence: Synthetic oligonucleotide
ugucugugucaagcacccg

SEQ ID NO: 2903789 - RNA, 19 nt, Artificial Sequence
  Description of Artificial Sequence: Synthetic oligonucleotide
acacuaagaauggccugga

SEQ ID NO: 2903790 - RNA, 19 nt, Artificial Sequence
  Description of Artificial Sequence: Synthetic oligonucleotide
aggucucuggauccucuau

SEQ ID NO: 2903791 - RNA, 19 nt, Artificial Sequence
  Description of Artificial Sequence: Synthetic oligonucleotide
aucaaggucaagggccgga

SEQ ID NO: 2903792 - RNA, 19 nt, Artificial Sequence
  Description of Artificial Sequence: Synthetic oligonucleotide
uugagucacggaggucaag

SEQ ID NO: 2903793 - RNA, 19 nt, Artificial Sequence
  Description of Artificial Sequence: Synthetic oligonucleotide
gaagcagguggcuaucauu

SEQ ID NO: 2903794 - RNA, 19 nt, Artificial Sequence
  Description of Artificial Sequence: Synthetic oligonucleotide
caggguuagaugaccagcu

SEQ ID NO: 2903795 - RNA, 19 nt, Artificial Sequence
  Description of Artificial Sequence: Synthetic oligonucleotide
gauccucuaugccauguuu

SEQ ID NO: 2903796 - RNA, 19 nt, Artificial Sequence
  Description of Artificial Sequence: Synthetic oligonucleotide
acuguucccugcuguccca

SEQ ID NO: 2903797 - RNA, 19 nt, Artificial Sequence
  Description of Artificial Sequence: Synthetic oligonucleotide
gucccauaagucccagguc

SEQ ID NO: 2903798 - RNA, 19 nt, Artificial Sequence
  Description of Artificial Sequence: Synthetic oligonucleotide
gucuagggaguguacugaa

SEQ ID NO: 2903799 - RNA, 19 nt, Artificial Sequence
  Description of Artificial Sequence: Synthetic oligonucleotide
ggucaaguccucaucugac

SEQ ID NO: 2903800 - RNA, 19 nt, Artificial Sequence
  Description of Artificial Sequence: Synthetic oligonucleotide
gaucuaacaccuucuccuu

SEQ ID NO: 2903801 - RNA, 19 nt, Artificial Sequence
  Description of Artificial Sequence: Synthetic oligonucleotide
gguuuugagucacggaggu

SEQ ID NO: 2903802 - RNA, 19 nt, Artificial Sequence
  Description of Artificial Sequence: Synthetic oligonucleotide
gccuggaauaguguugcag

SEQ ID NO: 2903803 - RNA, 19 nt, Artificial Sequence
  Description of Artificial Sequence: Synthetic oligonucleotide
aggguuagaugaccagcua

SEQ ID NO: 2903804 - RNA, 19 nt, Artificial Sequence
  Description of Artificial Sequence: Synthetic oligonucleotide
agaagggaguucccuugua

SEQ ID NO: 2903805 - RNA, 19 nt, Artificial Sequence
  Description of Artificial Sequence: Synthetic oligonucleotide
cugugucaagcacccggac

SEQ ID NO: 2903806 - RNA, 19 nt, Artificial Sequence
  Description of Artificial Sequence: Synthetic oligonucleotide
ggaggucaaguccucaucu

SEQ ID NO: 2903807 - RNA, 19 nt, Artificial Sequence
  Description of Artificial Sequence: Synthetic oligonucleotide
guucccugcugucccauaa

SEQ ID NO: 2903808 - RNA, 19 nt, Artificial Sequence
  Description of Artificial Sequence: Synthetic oligonucleotide
gucacggaggucaaguccu

SEQ ID NO: 2903809 - RNA, 19 nt, Artificial Sequence
  Description of Artificial Sequence: Synthetic oligonucleotide
ggcacgggccgauucacac

SEQ ID NO: 2903810 - RNA, 19 nt, Artificial Sequence
  Description of Artificial Sequence: Synthetic oligonucleotide
agcuaggccugagcgccac

SEQ ID NO: 2903811 - RNA, 19 nt, Artificial Sequence
  Description of Artificial Sequence: Synthetic oligonucleotide
agaugaccagcuaggccug

SEQ ID NO: 2903812 - RNA, 19 nt, Artificial Sequence
  Description of Artificial Sequence: Synthetic oligonucleotide
cuaggccugagcgccacuc

SEQ ID NO: 2903813 - RNA, 19 nt, Artificial Sequence
  Description of Artificial Sequence: Synthetic oligonucleotide
cuggcauucgcugcaccuc

SEQ ID NO: 2903814 - RNA, 19 nt, Artificial Sequence
  Description of Artificial Sequence: Synthetic oligonucleotide
  modified_base (13)..(13): a, c, u, g, unknown or other
ucucuucccuagngguuuu

SEQ ID NO: 2903815 - RNA, 19 nt, Artificial Sequence
  Description of Artificial Sequence: Synthetic oligonucleotide
ucacggaggucaaguccuc

SEQ ID NO: 2903816 - RNA, 19 nt, Artificial Sequence
  Description of Artificial Sequence: Synthetic oligonucleotide
gagaagggaguucccuugu

SEQ ID NO: 2903817 - RNA, 19 nt, Artificial Sequence
  Description of Artificial Sequence: Synthetic oligonucleotide
cccauaagucccagguccc

SEQ ID NO: 2903818 - RNA, 19 nt, Artificial Sequence
  Description of Artificial Sequence: Synthetic oligonucleotide
uaacagcaauaggcacggg

SEQ ID NO: 2903819 - RNA, 19 nt, Artificial Sequence
  Description of Artificial Sequence: Synthetic oligonucleotide
uaggcacgggccgauucac

SEQ ID NO: 2903820 - RNA, 19 nt, Artificial Sequence
  Description of Artificial Sequence: Synthetic oligonucleotide
caucaaggucaagggccgg

SEQ ID NO: 2903821 - RNA, 19 nt, Artificial Sequence
  Description of Artificial Sequence: Synthetic oligonucleotide
augaccagcuaggccugag

SEQ ID NO: 2903822 - RNA, 19 nt, Artificial Sequence
  Description of Artificial Sequence: Synthetic oligonucleotide
  modified_base (3)..(3): a, c, u, g, unknown or other
ggnguugagucucuucccu

SEQ ID NO: 2903823 - RNA, 19 nt, Artificial Sequence
  Description of Artificial Sequence: Synthetic oligonucleotide
aggccugagcgccacucaa

SEQ ID NO: 2903824 - RNA, 19 nt, Artificial Sequence
  Description of Artificial Sequence: Synthetic oligonucleotide
  modified_base (6)..(6): a, c, u, g, unknown or other
ccuagngguuuugagucac

SEQ ID NO: 2903825 - RNA, 19 nt, Artificial Sequence
  Description of Artificial Sequence: Synthetic oligonucleotide
cccaggucccacuaguguc

SEQ ID NO: 2903826 - RNA, 19 nt, Artificial Sequence
  Description of Artificial Sequence: Synthetic oligonucleotide
aagcacccggacuggcauu

SEQ ID NO: 2903827 - RNA, 19 nt, Artificial Sequence
  Description of Artificial Sequence: Synthetic oligonucleotide
guccucaucugacaggguu

SEQ ID NO: 2903828 - RNA, 19 nt, Artificial Sequence
  Description of Artificial Sequence: Synthetic oligonucleotide
cacccggacuggcauucgc

SEQ ID NO: 2903829 - RNA, 19 nt, Artificial Sequence
  Description of Artificial Sequence: Synthetic oligonucleotide
  modified_base (17)..(17): a, c, u, g, unknown or other
gaauaguguugcagggngu

SEQ ID NO: 2903830 - RNA, 19 nt, Artificial Sequence
  Description of Artificial Sequence: Synthetic oligonucleotide
cacgggccgauucacacua

SEQ ID NO: 2903831 - RNA, 19 nt, Artificial Sequence
  Description of Artificial Sequence: Synthetic oligonucleotide
ggucuagggaguguacuga

SEQ ID NO: 2903832 - RNA, 19 nt, Artificial Sequence
  Description of Artificial Sequence: Synthetic oligonucleotide
cacucaaggucuagggagu

SEQ ID NO: 2903833 - RNA, 19 nt, Artificial Sequence
  Description of Artificial Sequence: Synthetic oligonucleotide
gucaagcacccggacuggc

SEQ ID NO: 2903834 - RNA, 19 nt, Artificial Sequence
  Description of Artificial Sequence: Synthetic oligonucleotide
aggccucugggagaaggga

SEQ ID NO: 2903835 - RNA, 19 nt, Artificial Sequence
  Description of Artificial Sequence: Synthetic oligonucleotide
gccauguuucucugccagc

SEQ ID NO: 2903836 - RNA, 19 nt, Artificial Sequence
  Description of Artificial Sequence: Synthetic oligonucleotide
  modified_base (14)..(14): a, c, u, g, unknown or other
gucucuucccuagngguuu

SEQ ID NO: 2903837 - RNA, 19 nt, Artificial Sequence
  Description of Artificial Sequence: Synthetic oligonucleotide
cgccacucaaggucuaggg

SEQ ID NO: 2903838 - RNA, 19 nt, Artificial Sequence
  Description of Artificial Sequence: Synthetic oligonucleotide
cugaaggccucugggagaa

SEQ ID NO: 2903839 - RNA, 19 nt, Artificial Sequence
  Description of Artificial Sequence: Synthetic oligonucleotide
cuggauccucuaugccaug

SEQ ID NO: 2903840 - RNA, 19 nt, Artificial Sequence
  Description of Artificial Sequence: Synthetic oligonucleotide
ccaaaugugcaggucucug

SEQ ID NO: 2903841 - RNA, 19 nt, Artificial Sequence
  Description of Artificial Sequence: Synthetic oligonucleotide
aggucccacuagugucauc

SEQ ID NO: 2903842 - RNA, 19 nt, Artificial Sequence
  Description of Artificial Sequence: Synthetic oligonucleotide
ggcuguuugucuuccaaau

SEQ ID NO: 2903843 - RNA, 19 nt, Artificial Sequence
  Description of Artificial Sequence: Synthetic oligonucleotide
guuuugagucacggagguc

SEQ ID NO: 2903844 - RNA, 19 nt, Artificial Sequence
  Description of Artificial Sequence: Synthetic oligonucleotide
  modified_base (15)..(15): a, c, u, g, unknown or other
agucucuucccuagngguu

SEQ ID NO: 2903845 - RNA, 19 nt, Artificial Sequence
  Description of Artificial Sequence: Synthetic oligonucleotide
agcgccacucaaggucuag

SEQ ID NO: 2903846 - RNA, 19 nt, Artificial Sequence
  Description of Artificial Sequence: Synthetic oligonucleotide
ugcaggucucuggauccuc

SEQ ID NO: 2903847 - RNA, 19 nt, Artificial Sequence
  Description of Artificial Sequence: Synthetic oligonucleotide
ggucaagggccggaacucc

SEQ ID NO: 2903848 - RNA, 19 nt, Artificial Sequence
  Description of Artificial Sequence: Synthetic oligonucleotide
gucuuccaaaugugcaggu

SEQ ID NO: 2903849 - RNA, 19 nt, Artificial Sequence
  Description of Artificial Sequence: Synthetic oligonucleotide
uagugucaucaaggucaag

SEQ ID NO: 2903850 - RNA, 19 nt, Artificial Sequence
  Description of Artificial Sequence: Synthetic oligonucleotide
uguucccugcugucccaua

SEQ ID NO: 2903851 - RNA, 19 nt, Artificial Sequence
  Description of Artificial Sequence: Synthetic oligonucleotide
caauuccuaggaagucaaa

SEQ ID NO: 2903852 - RNA, 19 nt, Artificial Sequence
  Description of Artificial Sequence: Synthetic oligonucleotide
ggaguucccuuguagacuu

SEQ ID NO: 2903853 - RNA, 19 nt, Artificial Sequence
  Description of Artificial Sequence: Synthetic oligonucleotide
gaauggccuggaauagugu

SEQ ID NO: 2903854 - RNA, 19 nt, Artificial Sequence
  Description of Artificial Sequence: Synthetic oligonucleotide
cucgaagcagguggcuauc

SEQ ID NO: 2903855 - RNA, 19 nt, Artificial Sequence
  Description of Artificial Sequence: Synthetic oligonucleotide
gucaagggccggaacucca

SEQ ID NO: 2903856 - RNA, 19 nt, Artificial Sequence
  Description of Artificial Sequence: Synthetic oligonucleotide
ccggacuggcauucgcugc

SEQ ID NO: 2903857 - RNA, 19 nt, Artificial Sequence
  Description of Artificial Sequence: Synthetic oligonucleotide
gccgauucacacuaagaau

SEQ ID NO: 2903858 - RNA, 19 nt, Artificial Sequence
  Description of Artificial Sequence: Synthetic oligonucleotide
cucugggagaagggaguuc

SEQ ID NO: 2903859 - RNA, 19 nt, Artificial Sequence
  Description of Artificial Sequence: Synthetic oligonucleotide
gaguguacugaaggccucu

SEQ ID NO: 2903860 - RNA, 19 nt, Artificial Sequence
  Description of Artificial Sequence: Synthetic oligonucleotide
ucgcugcaccucacuguuc

SEQ ID NO: 2903861 - RNA, 19 nt, Artificial Sequence
  Description of Artificial Sequence: Synthetic oligonucleotide
gggaguguacugaaggccu

SEQ ID NO: 2903862 - RNA, 19 nt, Artificial Sequence
  Description of Artificial Sequence: Synthetic oligonucleotide
ugaaggccucugggagaag

SEQ ID NO: 2903863 - RNA, 19 nt, Artificial Sequence
  Description of Artificial Sequence: Synthetic oligonucleotide
  modified_base (12)..(12): a, c, u, g, unknown or other
cucuucccuagngguuuug

SEQ ID NO: 2903864 - RNA, 19 nt, Artificial Sequence
  Description of Artificial Sequence: Synthetic oligonucleotide
cccugcugucccauaaguc

SEQ ID NO: 2903865 - RNA, 19 nt, Artificial Sequence
  Description of Artificial Sequence: Synthetic oligonucleotide
gaguucccuuguagacuug

SEQ ID NO: 2903866 - RNA, 19 nt, Artificial Sequence
  Description of Artificial Sequence: Synthetic oligonucleotide
ccaggucccacuaguguca

SEQ ID NO: 2903867 - RNA, 19 nt, Artificial Sequence
  Description of Artificial Sequence: Synthetic oligonucleotide
cggaacuccacauccucuc

SEQ ID NO: 2903868 - RNA, 19 nt, Artificial Sequence
  Description of Artificial Sequence: Synthetic oligonucleotide
gcaccucacuguucccugc

SEQ ID NO: 2903869 - RNA, 19 nt, Artificial Sequence
  Description of Artificial Sequence: Synthetic oligonucleotide
gaugaccagcuaggccuga

SEQ ID NO: 2903870 - RNA, 19 nt, Artificial Sequence
  Description of Artificial Sequence: Synthetic oligonucleotide
cacuaagaauggccuggaa

SEQ ID NO: 2903871 - RNA, 19 nt, Artificial Sequence
  Description of Artificial Sequence: Synthetic oligonucleotide
caagcacccggacuggcau

SEQ ID NO: 2903872 - RNA, 19 nt, Artificial Sequence
  Description of Artificial Sequence: Synthetic oligonucleotide
gcgccacucaaggucuagg

SEQ ID NO: 2903873 - RNA, 19 nt, Artificial Sequence
  Description of Artificial Sequence: Synthetic oligonucleotide
ggaguguacugaaggccuc

SEQ ID NO: 2903874 - RNA, 19 nt, Artificial Sequence
  Description of Artificial Sequence: Synthetic oligonucleotide
cucucgaagcagguggcua

SEQ ID NO: 2903875 - RNA, 19 nt, Artificial Sequence
  Description of Artificial Sequence: Synthetic oligonucleotide
  modified_base (7)..(7): a, c, u, g, unknown or other
cccuagngguuuugaguca

SEQ ID NO: 2903876 - RNA, 19 nt, Artificial Sequence
  Description of Artificial Sequence: Synthetic oligonucleotide
ggccugagcgccacucaag

SEQ ID NO: 2903877 - RNA, 19 nt, Artificial Sequence
  Description of Artificial Sequence: Synthetic oligonucleotide
gguggcuaucauucagagu

SEQ ID NO: 2903878 - RNA, 19 nt, Artificial Sequence
  Description of Artificial Sequence: Synthetic oligonucleotide
agacuugaucuaacaccuu

SEQ ID NO: 2903879 - RNA, 19 nt, Artificial Sequence
  Description of Artificial Sequence: Synthetic oligonucleotide
gggccgauucacacuaaga

SEQ ID NO: 2903880 - RNA, 19 nt, Artificial Sequence
  Description of Artificial Sequence: Synthetic oligonucleotide
gucccacuagugucaucaa

SEQ ID NO: 2903881 - RNA, 19 nt, Artificial Sequence
  Description of Artificial Sequence: Synthetic oligonucleotide
gggaguucccuuguagacu

SEQ ID NO: 2903882 - RNA, 19 nt, Artificial Sequence
  Description of Artificial Sequence: Synthetic oligonucleotide
gcugucccauaagucccag

SEQ ID NO: 2903883 - RNA, 19 nt, Artificial Sequence
  Description of Artificial Sequence: Synthetic oligonucleotide
ccacuagugucaucaaggu

SEQ ID NO: 2903884 - RNA, 19 nt, Artificial Sequence
  Description of Artificial Sequence: Synthetic oligonucleotide
gacuugggugauggugucu

SEQ ID NO: 2903885 - RNA, 19 nt, Artificial Sequence
  Description of Artificial Sequence: Synthetic oligonucleotide
cucugccagcucaauuccu

SEQ ID NO: 2903886 - RNA, 19 nt, Artificial Sequence
  Description of Artificial Sequence: Synthetic oligonucleotide
caggucucuggauccucua

SEQ ID NO: 2903887 - RNA, 19 nt, Artificial Sequence
  Description of Artificial Sequence: Synthetic oligonucleotide
aguccucaucugacagggu

SEQ ID NO: 2903888 - RNA, 19 nt, Artificial Sequence
  Description of Artificial Sequence: Synthetic oligonucleotide
cacggaggucaaguccuca

SEQ ID NO: 2903889 - RNA, 19 nt, Artificial Sequence
  Description of Artificial Sequence: Synthetic oligonucleotide
ccacauccucucgaagcag

SEQ ID NO: 2903890 - RNA, 19 nt, Artificial Sequence
  Description of Artificial Sequence: Synthetic oligonucleotide
ccucuaugccauguuucuc

SEQ ID NO: 2903891 - RNA, 19 nt, Artificial Sequence
  Description of Artificial Sequence: Synthetic oligonucleotide
cuugggugauggugucugu

SEQ ID NO: 2903892 - RNA, 19 nt, Artificial Sequence
  Description of Artificial Sequence: Synthetic oligonucleotide
ccauguuucucugccagcu

SEQ ID NO: 2903893 - RNA, 19 nt, Artificial Sequence
  Description of Artificial Sequence: Synthetic oligonucleotide
ccagcucaauuccuaggaa

SEQ ID NO: 2903894 - RNA, 19 nt, Artificial Sequence
  Description of Artificial Sequence: Synthetic oligonucleotide
gggagaagggaguucccuu

SEQ ID NO: 2903895 - RNA, 19 nt, Artificial Sequence
  Description of Artificial Sequence: Synthetic oligonucleotide
aggcacgggccgauucaca

SEQ ID NO: 2903896 - RNA, 19 nt, Artificial Sequence
  Description of Artificial Sequence: Synthetic oligonucleotide
cccuuguagacuugaucua

SEQ ID NO: 2903897 - RNA, 19 nt, Artificial Sequence
  Description of Artificial Sequence: Synthetic oligonucleotide
cgggccgauucacacuaag

SEQ ID NO: 2903898 - RNA, 19 nt, Artificial Sequence
  Description of Artificial Sequence: Synthetic oligonucleotide
cggaggucaaguccucauc

SEQ ID NO: 2903899 - RNA, 19 nt, Artificial Sequence
  Description of Artificial Sequence: Synthetic oligonucleotide
cucaucugacaggguuaga

SEQ ID NO: 2903900 - RNA, 19 nt, Artificial Sequence
  Description of Artificial Sequence: Synthetic oligonucleotide
cucaaggucuagggagugu

SEQ ID NO: 2903901 - RNA, 19 nt, Artificial Sequence
  Description of Artificial Sequence: Synthetic oligonucleotide
  modified_base (12)..(12): a, c, u, g, unknown or other
guguugcagggnguugagu

SEQ ID NO: 2903902 - RNA, 19 nt, Artificial Sequence
  Description of Artificial Sequence: Synthetic oligonucleotide
ggacuggcauucgcugcac

SEQ ID NO: 2903903 - RNA, 19 nt, Artificial Sequence
  Description of Artificial Sequence: Synthetic oligonucleotide
guuucucugccagcucaau

SEQ ID NO: 2903904 - RNA, 19 nt, Artificial Sequence
  Description of Artificial Sequence: Synthetic oligonucleotide
cagcuaggccugagcgcca

SEQ ID NO: 2903905 - RNA, 19 nt, Artificial Sequence
  Description of Artificial Sequence: Synthetic oligonucleotide
guucccuuguagacuugau

SEQ ID NO: 2903906 - RNA, 19 nt, Artificial Sequence
  Description of Artificial Sequence: Synthetic oligonucleotide
ggcauucgcugcaccucac

SEQ ID NO: 2903907 - RNA, 19 nt, Artificial Sequence
  Description of Artificial Sequence: Synthetic oligonucleotide
ggauccucuaugccauguu

SEQ ID NO: 2903908 - RNA, 19 nt, Artificial Sequence
  Description of Artificial Sequence: Synthetic oligonucleotide
gcauucgcugcaccucacu

SEQ ID NO: 2903909 - RNA, 19 nt, Artificial Sequence
  Description of Artificial Sequence: Synthetic oligonucleotide
ggccuggaauaguguugca

SEQ ID NO: 2903910 - RNA, 19 nt, Artificial Sequence
  Description of Artificial Sequence: Synthetic oligonucleotide
cggacuggcauucgcugca

SEQ ID NO: 2903911 - RNA, 19 nt, Artificial Sequence
  Description of Artificial Sequence: Synthetic oligonucleotide
ccauaagucccagguccca

SEQ ID NO: 2903912 - RNA, 19 nt, Artificial Sequence
  Description of Artificial Sequence: Synthetic oligonucleotide
gcacccggacuggcauucg

SEQ ID NO: 2903913 - RNA, 19 nt, Artificial Sequence
  Description of Artificial Sequence: Synthetic oligonucleotide
gccucugggagaagggagu

SEQ ID NO: 2903914 - RNA, 19 nt, Artificial Sequence
  Description of Artificial Sequence: Synthetic oligonucleotide
ccggaacuccacauccucu

SEQ ID NO: 2903915 - RNA, 19 nt, Artificial Sequence
  Description of Artificial Sequence: Synthetic oligonucleotide
gcacgggccgauucacacu

SEQ ID NO: 2903916 - RNA, 19 nt, Artificial Sequence
  Description of Artificial Sequence: Synthetic oligonucleotide
gcaggucucuggauccucu

SEQ ID NO: 2903917 - RNA, 19 nt, Artificial Sequence
  Description of Artificial Sequence: Synthetic oligonucleotide
gagcgccacucaaggucua

SEQ ID NO: 2903918 - RNA, 19 nt, Artificial Sequence
  Description of Artificial Sequence: Synthetic oligonucleotide
acgggccgauucacacuaa

SEQ ID NO: 2903919 - RNA, 19 nt, Artificial Sequence
  Description of Artificial Sequence: Synthetic oligonucleotide
ccugagcgccacucaaggu

SEQ ID NO: 2903920 - RNA, 19 nt, Artificial Sequence
  Description of Artificial Sequence: Synthetic oligonucleotide
gcaauaggcacgggccgau

SEQ ID NO: 2903921 - RNA, 19 nt, Artificial Sequence
  Description of Artificial Sequence: Synthetic oligonucleotide
ggccggaacuccacauccu

SEQ ID NO: 2903922 - RNA, 19 nt, Artificial Sequence
  Description of Artificial Sequence: Synthetic oligonucleotide
caggucccacuagugucau

SEQ ID NO: 2903923 - RNA, 19 nt, Artificial Sequence
  Description of Artificial Sequence: Synthetic oligonucleotide
  modified_base (7)..(7): a, c, u, g, unknown or other
gcagggnguugagucucuu

SEQ ID NO: 2903924 - RNA, 19 nt, Artificial Sequence
  Description of Artificial Sequence: Synthetic oligonucleotide
gcuaggccugagcgccacu

SEQ ID NO: 2903925 - RNA, 19 nt, Artificial Sequence
  Description of Artificial Sequence: Synthetic oligonucleotide
cgaagcagguggcuaucau

SEQ ID NO: 2903926 - RNA, 19 nt, Artificial Sequence
  Description of Artificial Sequence: Synthetic oligonucleotide
ccucucgaagcagguggcu

SEQ ID NO: 2903927 - RNA, 19 nt, Artificial Sequence
  Description of Artificial Sequence: Synthetic oligonucleotide
ccucugggagaagggaguu

SEQ ID NO: 2903928 - RNA, 19 nt, Artificial Sequence
  Description of Artificial Sequence: Synthetic oligonucleotide
  modified_base (1)..(1): a, c, u, g, unknown or other
nguugagucucuucccuag

SEQ ID NO: 2903929 - RNA, 19 nt, Artificial Sequence
  Description of Artificial Sequence: Synthetic oligonucleotide
  modified_base (1)..(1): a, c, u, g, unknown or other
ngguuuugagucacggagg

SEQ ID NO: 2903930 - RNA, 19 nt, Artificial Sequence
  Description of Artificial Sequence: Synthetic oligonucleotide
uccaaugccaccauaaugg

SEQ ID NO: 2903931 - RNA, 19 nt, Artificial Sequence
  Description of Artificial Sequence: Synthetic oligonucleotide
uucacagacacuaacacug

SEQ ID NO: 2903932 - RNA, 19 nt, Artificial Sequence
  Description of Artificial Sequence: Synthetic oligonucleotide
acuacauucagucacaaca

SEQ ID NO: 2903933 - RNA, 19 nt, Artificial Sequence
  Description of Artificial Sequence: Synthetic oligonucleotide
auugucuuuucacagacac

SEQ ID NO: 2903934 - RNA, 19 nt, Artificial Sequence
  Description of Artificial Sequence: Synthetic oligonucleotide
ucaaagucucuuuagcugg

SEQ ID NO: 2903935 - RNA, 19 nt, Artificial Sequence
  Description of Artificial Sequence: Synthetic oligonucleotide
acauugaccacucucagag

SEQ ID NO: 2903936 - RNA, 19 nt, Artificial Sequence
  Description of Artificial Sequence: Synthetic oligonucleotide
aguucaaagucucuuuagc

SEQ ID NO: 2903937 - RNA, 19 nt, Artificial Sequence
  Description of Artificial Sequence: Synthetic oligonucleotide
uaaacauugaccacucuca

SEQ ID NO: 2903938 - RNA, 19 nt, Artificial Sequence
  Description of Artificial Sequence: Synthetic oligonucleotide
agcagcaagacauuucccc

SEQ ID NO: 2903939 - RNA, 19 nt, Artificial Sequence
  Description of Artificial Sequence: Synthetic oligonucleotide
auauugucuuuucacagac

SEQ ID NO: 2903940 - RNA, 19 nt, Artificial Sequence
  Description of Artificial Sequence: Synthetic oligonucleotide
gaauauugucuuuucacag

SEQ ID NO: 2903941 - RNA, 19 nt, Artificial Sequence
  Description of Artificial Sequence: Synthetic oligonucleotide
ugcuuuagagagaauauug

SEQ ID NO: 2903942 - RNA, 19 nt, Artificial Sequence
  Description of Artificial Sequence: Synthetic oligonucleotide
caccauaauggcaagaggg

SEQ ID NO: 2903943 - RNA, 19 nt, Artificial Sequence
  Description of Artificial Sequence: Synthetic oligonucleotide
auugaccacucucagaggg

SEQ ID NO: 2903944 - RNA, 19 nt, Artificial Sequence
  Description of Artificial Sequence: Synthetic oligonucleotide
aaaaccagggagaaguagg

SEQ ID NO: 2903945 - RNA, 19 nt, Artificial Sequence
  Description of Artificial Sequence: Synthetic oligonucleotide
aauauugucuuuucacaga

SEQ ID NO: 2903946 - RNA, 19 nt, Artificial Sequence
  Description of Artificial Sequence: Synthetic oligonucleotide
gagaauauugucuuuucac

SEQ ID NO: 2903947 - RNA, 19 nt, Artificial Sequence
  Description of Artificial Sequence: Synthetic oligonucleotide
uagguuacuacauucaguc

SEQ ID NO: 2903948 - RNA, 19 nt, Artificial Sequence
  Description of Artificial Sequence: Synthetic oligonucleotide
uuuucacagacacuaacac

SEQ ID NO: 2903949 - RNA, 19 nt, Artificial Sequence
  Description of Artificial Sequence: Synthetic oligonucleotide
aauggcaagagggaagggg

SEQ ID NO: 2903950 - RNA, 19 nt, Artificial Sequence
  Description of Artificial Sequence: Synthetic oligonucleotide
uucaaagucucuuuagcug

SEQ ID NO: 2903951 - RNA, 19 nt, Artificial Sequence
  Description of Artificial Sequence: Synthetic oligonucleotide
agaauauugucuuuucaca

SEQ ID NO: 2903952 - RNA, 19 nt, Artificial Sequence
  Description of Artificial Sequence: Synthetic oligonucleotide
aaguucaaagucucuuuag

SEQ ID NO: 2903953 - RNA, 19 nt, Artificial Sequence
  Description of Artificial Sequence: Synthetic oligonucleotide
accagggagaaguaggugg

SEQ ID NO: 2903954 - RNA, 19 nt, Artificial Sequence
  Description of Artificial Sequence: Synthetic oligonucleotide
uaggaagagacaaguaccc

SEQ ID NO: 2903955 - RNA, 19 nt, Artificial Sequence
  Description of Artificial Sequence: Synthetic oligonucleotide
aaacauugaccacucucag

SEQ ID NO: 2903956 - RNA, 19 nt, Artificial Sequence
  Description of Artificial Sequence: Synthetic oligonucleotide
uuagagagaauauugucuu

SEQ ID NO: 2903957 - RNA, 19 nt, Artificial Sequence
  Description of Artificial Sequence: Synthetic oligonucleotide
cauucagucacaacaggag

SEQ ID NO: 2903958 - RNA, 19 nt, Artificial Sequence
  Description of Artificial Sequence: Synthetic oligonucleotide
uacauucagucacaacagg

SEQ ID NO: 2903959 - RNA, 19 nt, Artificial Sequence
  Description of Artificial Sequence: Synthetic oligonucleotide
agggcuuguaaacauugac

SEQ ID NO: 2903960 - RNA, 19 nt, Artificial Sequence
  Description of Artificial Sequence: Synthetic oligonucleotide
gacacuaacacugucaaaa

SEQ ID NO: 2903961 - RNA, 19 nt, Artificial Sequence
  Description of Artificial Sequence: Synthetic oligonucleotide
uauugcuuuagagagaaua

SEQ ID NO: 2903962 - RNA, 19 nt, Artificial Sequence
  Description of Artificial Sequence: Synthetic oligonucleotide
ugucuuuucacagacacua

SEQ ID NO: 2903963 - RNA, 19 nt, Artificial Sequence
  Description of Artificial Sequence: Synthetic oligonucleotide
auaauggcaagagggaagg

SEQ ID NO: 2903964 - RNA, 19 nt, Artificial Sequence
  Description of Artificial Sequence: Synthetic oligonucleotide
cauaauggcaagagggaag

SEQ ID NO: 2903965 - RNA, 19 nt, Artificial Sequence
  Description of Artificial Sequence: Synthetic oligonucleotide
cuacauucagucacaacag

SEQ ID NO: 2903966 - RNA, 19 nt, Artificial Sequence
  Description of Artificial Sequence: Synthetic oligonucleotide
ucuuuucacagacacuaac

SEQ ID NO: 2903967 - RNA, 19 nt, Artificial Sequence
  Description of Artificial Sequence: Synthetic oligonucleotide
acaacaggagucucucccc

SEQ ID NO: 2903968 - RNA, 19 nt, Artificial Sequence
  Description of Artificial Sequence: Synthetic oligonucleotide
acuaacacugucaaaacca

SEQ ID NO: 2903969 - RNA, 19 nt, Artificial Sequence
  Description of Artificial Sequence: Synthetic oligonucleotide
ucagggcuuguaaacauug

SEQ ID NO: 2903970 - RNA, 19 nt, Artificial Sequence
  Description of Artificial Sequence: Synthetic oligonucleotide
aggguagguuacuacauuc

SEQ ID NO: 2903971 - RNA, 19 nt, Artificial Sequence
  Description of Artificial Sequence: Synthetic oligonucleotide
guaaacauugaccacucuc

SEQ ID NO: 2903972 - RNA, 19 nt, Artificial Sequence
  Description of Artificial Sequence: Synthetic oligonucleotide
acacuaacacugucaaaac

SEQ ID NO: 2903973 - RNA, 19 nt, Artificial Sequence
  Description of Artificial Sequence: Synthetic oligonucleotide
acaggguuaaggccucucc

SEQ ID NO: 2903974 - RNA, 19 nt, Artificial Sequence
  Description of Artificial Sequence: Synthetic oligonucleotide
guaggaagagacaaguacc

SEQ ID NO: 2903975 - RNA, 19 nt, Artificial Sequence
  Description of Artificial Sequence: Synthetic oligonucleotide
cuaacacugucaaaaccag

SEQ ID NO: 2903976 - RNA, 19 nt, Artificial Sequence
  Description of Artificial Sequence: Synthetic oligonucleotide
gguuacuacauucagucac

SEQ ID NO: 2903977 - RNA, 19 nt, Artificial Sequence
  Description of Artificial Sequence: Synthetic oligonucleotide
uuucacagacacuaacacu

SEQ ID NO: 2903978 - RNA, 19 nt, Artificial Sequence
  Description of Artificial Sequence: Synthetic oligonucleotide
gguaggaagagacaaguac

SEQ ID NO: 2903979 - RNA, 19 nt, Artificial Sequence
  Description of Artificial Sequence: Synthetic oligonucleotide
aagagggaaggggaguugg

SEQ ID NO: 2903980 - RNA, 19 nt, Artificial Sequence
  Description of Artificial Sequence: Synthetic oligonucleotide
uuccucacaggguuaaggc

SEQ ID NO: 2903981 - RNA, 19 nt, Artificial Sequence
  Description of Artificial Sequence: Synthetic oligonucleotide
cacaacaggagucucuccc

SEQ ID NO: 2903982 - RNA, 19 nt, Artificial Sequence
  Description of Artificial Sequence: Synthetic oligonucleotide
aacauugaccacucucaga

SEQ ID NO: 2903983 - RNA, 19 nt, Artificial Sequence
  Description of Artificial Sequence: Synthetic oligonucleotide
agagaauauugucuuuuca

SEQ ID NO: 2903984 - RNA, 19 nt, Artificial Sequence
  Description of Artificial Sequence: Synthetic oligonucleotide
auucagucacaacaggagu

SEQ ID NO: 2903985 - RNA, 19 nt, Artificial Sequence
  Description of Artificial Sequence: Synthetic oligonucleotide
cacugucaaaaccagggag

SEQ ID NO: 2903986 - RNA, 19 nt, Artificial Sequence
  Description of Artificial Sequence: Synthetic oligonucleotide
cuuuucacagacacuaaca

SEQ ID NO: 2903987 - RNA, 19 nt, Artificial Sequence
  Description of Artificial Sequence: Synthetic oligonucleotide
ugagcccugggcuaggggc

SEQ ID NO: 2903988 - RNA, 19 nt, Artificial Sequence
  Description of Artificial Sequence: Synthetic oligonucleotide
cccuuauugcuuuagagag

SEQ ID NO: 2903989 - RNA, 19 nt, Artificial Sequence
  Description of Artificial Sequence: Synthetic oligonucleotide
cacuaacacugucaaaacc

SEQ ID NO: 2903990 - RNA, 19 nt, Artificial Sequence
  Description of Artificial Sequence: Synthetic oligonucleotide
ggcuuguaaacauugacca

SEQ ID NO: 2903991 - RNA, 19 nt, Artificial Sequence
  Description of Artificial Sequence: Synthetic oligonucleotide
uuguaaacauugaccacuc

SEQ ID NO: 2903992 - RNA, 19 nt, Artificial Sequence
  Description of Artificial Sequence: Synthetic oligonucleotide
aggguuaaggccucuccag

SEQ ID NO: 2903993 - RNA, 19 nt, Artificial Sequence
  Description of Artificial Sequence: Synthetic oligonucleotide
gagaaguagguggaggggc

SEQ ID NO: 2903994 - RNA, 19 nt, Artificial Sequence
  Description of Artificial Sequence: Synthetic oligonucleotide
uccucacaggguuaaggcc

SEQ ID NO: 2903995 - RNA, 19 nt, Artificial Sequence
  Description of Artificial Sequence: Synthetic oligonucleotide
cucuccaggcucaugggcc

SEQ ID NO: 2903996 - RNA, 19 nt, Artificial Sequence
  Description of Artificial Sequence: Synthetic oligonucleotide
uccuccaaugccaccauaa

SEQ ID NO: 2903997 - RNA, 19 nt, Artificial Sequence
  Description of Artificial Sequence: Synthetic oligonucleotide
agaaguagguggaggggcc

SEQ ID NO: 2903998 - RNA, 19 nt, Artificial Sequence
  Description of Artificial Sequence: Synthetic oligonucleotide
aggaagagacaaguacccc

SEQ ID NO: 2903999 - RNA, 19 nt, Artificial Sequence
  Description of Artificial Sequence: Synthetic oligonucleotide
gguagguuacuacauucag

SEQ ID NO: 2904000 - RNA, 19 nt, Artificial Sequence
  Description of Artificial Sequence: Synthetic oligonucleotide
caaagucucuuuagcuggg

SEQ ID NO: 2904001 - RNA, 19 nt, Artificial Sequence
  Description of Artificial Sequence: Synthetic oligonucleotide
gagagaauauugucuuuuc

SEQ ID NO: 2904002 - RNA, 19 nt, Artificial Sequence
  Description of Artificial Sequence: Synthetic oligonucleotide
gggagaaguagguggaggg

SEQ ID NO: 2904003 - RNA, 19 nt, Artificial Sequence
  Description of Artificial Sequence: Synthetic oligonucleotide
uauugucuuuucacagaca

SEQ ID NO: 2904004 - RNA, 19 nt, Artificial Sequence
  Description of Artificial Sequence: Synthetic oligonucleotide
gucaaaaccagggagaagu

SEQ ID NO: 2904005 - RNA, 19 nt, Artificial Sequence
  Description of Artificial Sequence: Synthetic oligonucleotide
cuccaaugccaccauaaug

SEQ ID NO: 2904006 - RNA, 19 nt, Artificial Sequence
  Description of Artificial Sequence: Synthetic oligonucleotide
augggccccaaguucaaag

SEQ ID NO: 2904007 - RNA, 19 nt, Artificial Sequence
  Description of Artificial Sequence: Synthetic oligonucleotide
ucucagaggggaugggaug

SEQ ID NO: 2904008 - RNA, 19 nt, Artificial Sequence
  Description of Artificial Sequence: Synthetic oligonucleotide
acugucaaaaccagggaga

SEQ ID NO: 2904009 - RNA, 19 nt, Artificial Sequence
  Description of Artificial Sequence: Synthetic oligonucleotide
cucagaggggaugggaugg

SEQ ID NO: 2904010 - RNA, 19 nt, Artificial Sequence
  Description of Artificial Sequence: Synthetic oligonucleotide
auugcuuuagagagaauau

SEQ ID NO: 2904011 - RNA, 19 nt, Artificial Sequence
  Description of Artificial Sequence: Synthetic oligonucleotide
aaaccagggagaaguaggu

SEQ ID NO: 2904012 - RNA, 19 nt, Artificial Sequence
  Description of Artificial Sequence: Synthetic oligonucleotide
acauucagucacaacagga

SEQ ID NO: 2904013 - RNA, 19 nt, Artificial Sequence
  Description of Artificial Sequence: Synthetic oligonucleotide
uugucuuuucacagacacu

SEQ ID NO: 2904014 - RNA, 19 nt, Artificial Sequence
  Description of Artificial Sequence: Synthetic oligonucleotide
ccuacacuuccucacaggg

SEQ ID NO: 2904015 - RNA, 19 nt, Artificial Sequence
  Description of Artificial Sequence: Synthetic oligonucleotide
ugcauuggcuguggcaggg

SEQ ID NO: 2904016 - RNA, 19 nt, Artificial Sequence
  Description of Artificial Sequence: Synthetic oligonucleotide
uuaaggccucuccaggcuc

SEQ ID NO: 2904017 - RNA, 19 nt, Artificial Sequence
  Description of Artificial Sequence: Synthetic oligonucleotide
acagacacuaacacuguca

SEQ ID NO: 2904018 - RNA, 19 nt, Artificial Sequence
  Description of Artificial Sequence: Synthetic oligonucleotide
caaaaccagggagaaguag

SEQ ID NO: 2904019 - RNA, 19 nt, Artificial Sequence
  Description of Artificial Sequence: Synthetic oligonucleotide
uggcaagagggaaggggag

SEQ ID NO: 2904020 - RNA, 19 nt, Artificial Sequence
  Description of Artificial Sequence: Synthetic oligonucleotide
uguaaacauugaccacucu

SEQ ID NO: 2904021 - RNA, 19 nt, Artificial Sequence
  Description of Artificial Sequence: Synthetic oligonucleotide
ugggcuaggggcucagggc

SEQ ID NO: 2904022 - RNA, 19 nt, Artificial Sequence
  Description of Artificial Sequence: Synthetic oligonucleotide
guucaaagucucuuuagcu

SEQ ID NO: 2904023 - RNA, 19 nt, Artificial Sequence
  Description of Artificial Sequence: Synthetic oligonucleotide
agagagaauauugucuuuu

SEQ ID NO: 2904024 - RNA, 19 nt, Artificial Sequence
  Description of Artificial Sequence: Synthetic oligonucleotide
ucacagacacuaacacugu

SEQ ID NO: 2904025 - RNA, 19 nt, Artificial Sequence
  Description of Artificial Sequence: Synthetic oligonucleotide
cuuguaaacauugaccacu

SEQ ID NO: 2904026 - RNA, 19 nt, Artificial Sequence
  Description of Artificial Sequence: Synthetic oligonucleotide
cugggcuaggggcucaggg

SEQ ID NO: 2904027 - RNA, 19 nt, Artificial Sequence
  Description of Artificial Sequence: Synthetic oligonucleotide
ugggguaucugagcccugg

SEQ ID NO: 2904028 - RNA, 19 nt, Artificial Sequence
  Description of Artificial Sequence: Synthetic oligonucleotide
gaugggaugggagagggcu

SEQ ID NO: 2904029 - RNA, 19 nt, Artificial Sequence
  Description of Artificial Sequence: Synthetic oligonucleotide
cauugaccacucucagagg

SEQ ID NO: 2904030 - RNA, 19 nt, Artificial Sequence
  Description of Artificial Sequence: Synthetic oligonucleotide
uaaggccucuccaggcuca

SEQ ID NO: 2904031 - RNA, 19 nt, Artificial Sequence
  Description of Artificial Sequence: Synthetic oligonucleotide
ggccucuccaggcucaugg

SEQ ID NO: 2904032 - RNA, 19 nt, Artificial Sequence
  Description of Artificial Sequence: Synthetic oligonucleotide
uacuacauucagucacaac

SEQ ID NO: 2904033 - RNA, 19 nt, Artificial Sequence
  Description of Artificial Sequence: Synthetic oligonucleotide
gguuaaggccucuccaggc

SEQ ID NO: 2904034 - RNA, 19 nt, Artificial Sequence
  Description of Artificial Sequence: Synthetic oligonucleotide
guuacuacauucagucaca

SEQ ID NO: 2904035 - RNA, 19 nt, Artificial Sequence
  Description of Artificial Sequence: Synthetic oligonucleotide
ugaccacucucagagggga

SEQ ID NO: 2904036 - RNA, 19 nt, Artificial Sequence
  Description of Artificial Sequence: Synthetic oligonucleotide
accauaauggcaagaggga

SEQ ID NO: 2904037 - RNA, 19 nt, Artificial Sequence
  Description of Artificial Sequence: Synthetic oligonucleotide
uaucugagcccugggcuag

SEQ ID NO: 2904038 - RNA, 19 nt, Artificial Sequence
  Description of Artificial Sequence: Synthetic oligonucleotide
gaggggaugggaugggaga

SEQ ID NO: 2904039 - RNA, 19 nt, Artificial Sequence
  Description of Artificial Sequence: Synthetic oligonucleotide
gggcuuguaaacauugacc

SEQ ID NO: 2904040 - RNA, 19 nt, Artificial Sequence
  Description of Artificial Sequence: Synthetic oligonucleotide
auggcaagagggaagggga

SEQ ID NO: 2904041 - RNA, 19 nt, Artificial Sequence
  Description of Artificial Sequence: Synthetic oligonucleotide
cauuggcuguggcaggggc

SEQ ID NO: 2904042 - RNA, 19 nt, Artificial Sequence
  Description of Artificial Sequence: Synthetic oligonucleotide
uugcuuuagagagaauauu

SEQ ID NO: 2904043 - RNA, 19 nt, Artificial Sequence
  Description of Artificial Sequence: Synthetic oligonucleotide
ugucaaaaccagggagaag

SEQ ID NO: 2904044 - RNA, 19 nt, Artificial Sequence
  Description of Artificial Sequence: Synthetic oligonucleotide
agguuacuacauucaguca

SEQ ID NO: 2904045 - RNA, 19 nt, Artificial Sequence
  Description of Artificial Sequence: Synthetic oligonucleotide
ggguuaaggccucuccagg

SEQ ID NO: 2904046 - RNA, 19 nt, Artificial Sequence
  Description of Artificial Sequence: Synthetic oligonucleotide
ucacaacaggagucucucc

SEQ ID NO: 2904047 - RNA, 19 nt, Artificial Sequence
  Description of Artificial Sequence: Synthetic oligonucleotide
ggaagggguaggaagagac

SEQ ID NO: 2904048 - RNA, 19 nt, Artificial Sequence
  Description of Artificial Sequence: Synthetic oligonucleotide
agcagcagcaagacauuuc

SEQ ID NO: 2904049 - RNA, 19 nt, Artificial Sequence
  Description of Artificial Sequence: Synthetic oligonucleotide
uaauggcaagagggaaggg

SEQ ID NO: 2904050 - RNA, 19 nt, Artificial Sequence
  Description of Artificial Sequence: Synthetic oligonucleotide
aggcucaugggccccaagu

SEQ ID NO: 2904051 - RNA, 19 nt, Artificial Sequence
  Description of Artificial Sequence: Synthetic oligonucleotide
ugggccccaaguucaaagu

SEQ ID NO: 2904052 - RNA, 19 nt, Artificial Sequence
  Description of Artificial Sequence: Synthetic oligonucleotide
cagacacuaacacugucaa

SEQ ID NO: 2904053 - RNA, 19 nt, Artificial Sequence
  Description of Artificial Sequence: Synthetic oligonucleotide
ugggaugggagagggcucc

SEQ ID NO: 2904054 - RNA, 19 nt, Artificial Sequence
  Description of Artificial Sequence: Synthetic oligonucleotide
uggaggggcccuuccacca

SEQ ID NO: 2904055 - RNA, 19 nt, Artificial Sequence
  Description of Artificial Sequence: Synthetic oligonucleotide
ccugcauuggcuguggcag

SEQ ID NO: 2904056 - RNA, 19 nt, Artificial Sequence
  Description of Artificial Sequence: Synthetic oligonucleotide
aggggaugggaugggagag

SEQ ID NO: 2904057 - RNA, 19 nt, Artificial Sequence
  Description of Artificial Sequence: Synthetic oligonucleotide
ucagaggggaugggauggg

SEQ ID NO: 2904058 - RNA, 19 nt, Artificial Sequence
  Description of Artificial Sequence: Synthetic oligonucleotide
uagagagaauauugucuuu

SEQ ID NO: 2904059 - RNA, 19 nt, Artificial Sequence
  Description of Artificial Sequence: Synthetic oligonucleotide
gccaccauaauggcaagag

SEQ ID NO: 2904060 - RNA, 19 nt, Artificial Sequence
  Description of Artificial Sequence: Synthetic oligonucleotide
gaaguagguggaggggccc

SEQ ID NO: 2904061 - RNA, 19 nt, Artificial Sequence
  Description of Artificial Sequence: Synthetic oligonucleotide
uuacuacauucagucacaa

SEQ ID NO: 2904062 - RNA, 19 nt, Artificial Sequence
  Description of Artificial Sequence: Synthetic oligonucleotide
caaguucaaagucucuuua

SEQ ID NO: 2904063 - RNA, 19 nt, Artificial Sequence
  Description of Artificial Sequence: Synthetic oligonucleotide
ggagaaguagguggagggg

SEQ ID NO: 2904064 - RNA, 19 nt, Artificial Sequence
  Description of Artificial Sequence: Synthetic oligonucleotide
ggggugggguaucugagcc

SEQ ID NO: 2904065 - RNA, 19 nt, Artificial Sequence
  Description of Artificial Sequence: Synthetic oligonucleotide
gucacaacaggagucucuc

SEQ ID NO: 2904066 - RNA, 19 nt, Artificial Sequence
  Description of Artificial Sequence: Synthetic oligonucleotide
accacucucagaggggaug

SEQ ID NO: 2904067 - RNA, 19 nt, Artificial Sequence
  Description of Artificial Sequence: Synthetic oligonucleotide
agaggggaugggaugggag

SEQ ID NO: 2904068 - RNA, 19 nt, Artificial Sequence
  Description of Artificial Sequence: Synthetic oligonucleotide
uagguggaggggcccuucc

SEQ ID NO: 2904069 - RNA, 19 nt, Artificial Sequence
  Description of Artificial Sequence: Synthetic oligonucleotide
ggcaggguagguuacuaca

SEQ ID NO: 2904070 - RNA, 19 nt, Artificial Sequence
  Description of Artificial Sequence: Synthetic oligonucleotide
cugcauuggcuguggcagg

SEQ ID NO: 2904071 - RNA, 19 nt, Artificial Sequence
  Description of Artificial Sequence: Synthetic oligonucleotide
caaugccaccauaauggca

SEQ ID NO: 2904072 - RNA, 19 nt, Artificial Sequence
  Description of Artificial Sequence: Synthetic oligonucleotide
agucacaacaggagucucu

SEQ ID NO: 2904073 - RNA, 19 nt, Artificial Sequence
  Description of Artificial Sequence: Synthetic oligonucleotide
gguaucugagcccugggcu

SEQ ID NO: 2904074 - RNA, 19 nt, Artificial Sequence
  Description of Artificial Sequence: Synthetic oligonucleotide
cacagacacuaacacuguc

SEQ ID NO: 2904075 - RNA, 19 nt, Artificial Sequence
  Description of Artificial Sequence: Synthetic oligonucleotide
ucugagcccugggcuaggg

SEQ ID NO: 2904076 - RNA, 19 nt, Artificial Sequence
  Description of Artificial Sequence: Synthetic oligonucleotide
guggaggggcccuuccacc

SEQ ID NO: 2904077 - RNA, 19 nt, Artificial Sequence
  Description of Artificial Sequence: Synthetic oligonucleotide
aaguagguggaggggcccu

SEQ ID NO: 2904078 - RNA, 19 nt, Artificial Sequence
  Description of Artificial Sequence: Synthetic oligonucleotide
gaagggguaggaagagaca

SEQ ID NO: 2904079 - RNA, 19 nt, Artificial Sequence
  Description of Artificial Sequence: Synthetic oligonucleotide
guaucugagcccugggcua

SEQ ID NO: 2904080 - RNA, 19 nt, Artificial Sequence
  Description of Artificial Sequence: Synthetic oligonucleotide
cucacaggguuaaggccuc

SEQ ID NO: 2904081 - RNA, 19 nt, Artificial Sequence
  Description of Artificial Sequence: Synthetic oligonucleotide
caggguuaaggccucucca

SEQ ID NO: 2904082 - RNA, 19 nt, Artificial Sequence
  Description of Artificial Sequence: Synthetic oligonucleotide
agacacuaacacugucaaa

SEQ ID NO: 2904083 - RNA, 19 nt, Artificial Sequence
  Description of Artificial Sequence: Synthetic oligonucleotide
ggguaucugagcccugggc

SEQ ID NO: 2904084 - RNA, 19 nt, Artificial Sequence
  Description of Artificial Sequence: Synthetic oligonucleotide
ccaaugccaccauaauggc

SEQ ID NO: 2904085 - RNA, 19 nt, Artificial Sequence
  Description of Artificial Sequence: Synthetic oligonucleotide
uuauugcuuuagagagaau

SEQ ID NO: 2904086 - RNA, 19 nt, Artificial Sequence
  Description of Artificial Sequence: Synthetic oligonucleotide
agggguaggaagagacaag

SEQ ID NO: 2904087 - RNA, 19 nt, Artificial Sequence
  Description of Artificial Sequence: Synthetic oligonucleotide
ccaccauaauggcaagagg

SEQ ID NO: 2904088 - RNA, 19 nt, Artificial Sequence
  Description of Artificial Sequence: Synthetic oligonucleotide
augccaccauaauggcaag

SEQ ID NO: 2904089 - RNA, 19 nt, Artificial Sequence
  Description of Artificial Sequence: Synthetic oligonucleotide
guuaaggccucuccaggcu

SEQ ID NO: 2904090 - RNA, 19 nt, Artificial Sequence
  Description of Artificial Sequence: Synthetic oligonucleotide
guagguuacuacauucagu

SEQ ID NO: 2904091 - RNA, 19 nt, Artificial Sequence
  Description of Artificial Sequence: Synthetic oligonucleotide
uccccugcauuggcugugg

SEQ ID NO: 2904092 - RNA, 19 nt, Artificial Sequence
  Description of Artificial Sequence: Synthetic oligonucleotide
augggaugggagagggcuc

SEQ ID NO: 2904093 - RNA, 19 nt, Artificial Sequence
  Description of Artificial Sequence: Synthetic oligonucleotide
ccccuuauugcuuuagaga

SEQ ID NO: 2904094 - RNA, 19 nt, Artificial Sequence
  Description of Artificial Sequence: Synthetic oligonucleotide
aggggcucagggcuuguaa

SEQ ID NO: 2904095 - RNA, 19 nt, Artificial Sequence
  Description of Artificial Sequence: Synthetic oligonucleotide
cugucaaaaccagggagaa

SEQ ID NO: 2904096 - RNA, 19 nt, Artificial Sequence
  Description of Artificial Sequence: Synthetic oligonucleotide
cugagcccugggcuagggg

SEQ ID NO: 2904097 - RNA, 19 nt, Artificial Sequence
  Description of Artificial Sequence: Synthetic oligonucleotide
gguggaggggcccuuccac

SEQ ID NO: 2904098 - RNA, 19 nt, Artificial Sequence
  Description of Artificial Sequence: Synthetic oligonucleotide
ugccaccauaauggcaaga

SEQ ID NO: 2904099 - RNA, 19 nt, Artificial Sequence
  Description of Artificial Sequence: Synthetic oligonucleotide
caagagggaaggggaguug

SEQ ID NO: 2904100 - RNA, 19 nt, Artificial Sequence
  Description of Artificial Sequence: Synthetic oligonucleotide
gggcucagggcuuguaaac

SEQ ID NO: 2904101 - RNA, 19 nt, Artificial Sequence
  Description of Artificial Sequence: Synthetic oligonucleotide
cagggcuuguaaacauuga

SEQ ID NO: 2904102 - RNA, 19 nt, Artificial Sequence
  Description of Artificial Sequence: Synthetic oligonucleotide
uuccuccaaugccaccaua

SEQ ID NO: 2904103 - RNA, 19 nt, Artificial Sequence
  Description of Artificial Sequence: Synthetic oligonucleotide
cccuacacuuccucacagg

SEQ ID NO: 2904104 - RNA, 19 nt, Artificial Sequence
  Description of Artificial Sequence: Synthetic oligonucleotide
gcuuuagagagaauauugu

SEQ ID NO: 2904105 - RNA, 19 nt, Artificial Sequence
  Description of Artificial Sequence: Synthetic oligonucleotide
ggguagguuacuacauuca

SEQ ID NO: 2904106 - RNA, 19 nt, Artificial Sequence
  Description of Artificial Sequence: Synthetic oligonucleotide
cagggagaaguagguggag

SEQ ID NO: 2904107 - RNA, 19 nt, Artificial Sequence
  Description of Artificial Sequence: Synthetic oligonucleotide
ccuuccccugcauuggcug

SEQ ID NO: 2904108 - RNA, 19 nt, Artificial Sequence
  Description of Artificial Sequence: Synthetic oligonucleotide
cuacacuuccucacagggu

SEQ ID NO: 2904109 - RNA, 19 nt, Artificial Sequence
  Description of Artificial Sequence: Synthetic oligonucleotide
ccucuccaggcucaugggc

SEQ ID NO: 2904110 - RNA, 19 nt, Artificial Sequence
  Description of Artificial Sequence: Synthetic oligonucleotide
caggggcaggguagguuac

SEQ ID NO: 2904111 - RNA, 19 nt, Artificial Sequence
  Description of Artificial Sequence: Synthetic oligonucleotide
ccuuauugcuuuagagaga

SEQ ID NO: 2904112 - RNA, 19 nt, Artificial Sequence
  Description of Artificial Sequence: Synthetic oligonucleotide
ccacucucagaggggaugg

SEQ ID NO: 2904113 - RNA, 19 nt, Artificial Sequence
  Description of Artificial Sequence: Synthetic oligonucleotide
gccucuccaggcucauggg

SEQ ID NO: 2904114 - RNA, 19 nt, Artificial Sequence
  Description of Artificial Sequence: Synthetic oligonucleotide
gggccccaaguucaaaguc

SEQ ID NO: 2904115 - RNA, 19 nt, Artificial Sequence
  Description of Artificial Sequence: Synthetic oligonucleotide
cucucagaggggaugggau

SEQ ID NO: 2904116 - RNA, 19 nt, Artificial Sequence
  Description of Artificial Sequence: Synthetic oligonucleotide
ggcuguggcaggggcaggg

SEQ ID NO: 2904117 - RNA, 19 nt, Artificial Sequence
  Description of Artificial Sequence: Synthetic oligonucleotide
ggggaugggaugggagagg

SEQ ID NO: 2904118 - RNA, 19 nt, Artificial Sequence
  Description of Artificial Sequence: Synthetic oligonucleotide
ccucacaggguuaaggccu

SEQ ID NO: 2904119 - RNA, 19 nt, Artificial Sequence
  Description of Artificial Sequence: Synthetic oligonucleotide
gggugggguaucugagccc

SEQ ID NO: 2904120 - RNA, 19 nt, Artificial Sequence
  Description of Artificial Sequence: Synthetic oligonucleotide
ccagggagaaguaggugga

SEQ ID NO: 2904121 - RNA, 19 nt, Artificial Sequence
  Description of Artificial Sequence: Synthetic oligonucleotide
gucuuuucacagacacuaa

SEQ ID NO: 2904122 - RNA, 19 nt, Artificial Sequence
  Description of Artificial Sequence: Synthetic oligonucleotide
gggguaggaagagacaagu

SEQ ID NO: 2904123 - RNA, 19 nt, Artificial Sequence
  Description of Artificial Sequence: Synthetic oligonucleotide
ggcucagggcuuguaaaca

SEQ ID NO: 2904124 - RNA, 19 nt, Artificial Sequence
  Description of Artificial Sequence: Synthetic oligonucleotide
gcaggggcaggguagguua

SEQ ID NO: 2904125 - RNA, 19 nt, Artificial Sequence
  Description of Artificial Sequence: Synthetic oligonucleotide
cacaggguuaaggccucuc

SEQ ID NO: 2904126 - RNA, 19 nt, Artificial Sequence
  Description of Artificial Sequence: Synthetic oligonucleotide
gggcaggguagguuacuac

SEQ ID NO: 2904127 - RNA, 19 nt, Artificial Sequence
  Description of Artificial Sequence: Synthetic oligonucleotide
ggggcucagggcuuguaaa

SEQ ID NO: 2904128 - RNA, 19 nt, Artificial Sequence
  Description of Artificial Sequence: Synthetic oligonucleotide
gaggggcccuuccaccaaa

SEQ ID NO: 2904129 - RNA, 19 nt, Artificial Sequence
  Description of Artificial Sequence: Synthetic oligonucleotide
ccccuacacuuccucacag

SEQ ID NO: 2904130 - RNA, 19 nt, Artificial Sequence
  Description of Artificial Sequence: Synthetic oligonucleotide
ucacaggguuaaggccucu

SEQ ID NO: 2904131 - RNA, 19 nt, Artificial Sequence
  Description of Artificial Sequence: Synthetic oligonucleotide
uggcuguggcaggggcagg

SEQ ID NO: 2904132 - RNA, 19 nt, Artificial Sequence
  Description of Artificial Sequence: Synthetic oligonucleotide
ggugggguaucugagcccu

SEQ ID NO: 2904133 - RNA, 19 nt, Artificial Sequence
  Description of Artificial Sequence: Synthetic oligonucleotide
ccauaauggcaagagggaa

SEQ ID NO: 2904134 - RNA, 19 nt, Artificial Sequence
  Description of Artificial Sequence: Synthetic oligonucleotide
aaggccucuccaggcucau

SEQ ID NO: 2904135 - RNA, 19 nt, Artificial Sequence
  Description of Artificial Sequence: Synthetic oligonucleotide
cacuuccucacaggguuaa

SEQ ID NO: 2904136 - RNA, 19 nt, Artificial Sequence
  Description of Artificial Sequence: Synthetic oligonucleotide
gccccaaguucaaagucuc

SEQ ID NO: 2904137 - RNA, 19 nt, Artificial Sequence
  Description of Artificial Sequence: Synthetic oligonucleotide
caggcucaugggccccaag

SEQ ID NO: 2904138 - RNA, 19 nt, Artificial Sequence
  Description of Artificial Sequence: Synthetic oligonucleotide
aggggcaggguagguuacu

SEQ ID NO: 2904139 - RNA, 19 nt, Artificial Sequence
  Description of Artificial Sequence: Synthetic oligonucleotide
guagguggaggggcccuuc

SEQ ID NO: 2904140 - RNA, 19 nt, Artificial Sequence
  Description of Artificial Sequence: Synthetic oligonucleotide
cuccaggcucaugggcccc

SEQ ID NO: 2904141 - RNA, 19 nt, Artificial Sequence
  Description of Artificial Sequence: Synthetic oligonucleotide
gcauuggcuguggcagggg

SEQ ID NO: 2904142 - RNA, 19 nt, Artificial Sequence
  Description of Artificial Sequence: Synthetic oligonucleotide
ggaugggagagggcucccc

SEQ ID NO: 2904143 - RNA, 19 nt, Artificial Sequence
  Description of Artificial Sequence: Synthetic oligonucleotide
aguagguggaggggcccuu

SEQ ID NO: 2904144 - RNA, 19 nt, Artificial Sequence
  Description of Artificial Sequence: Synthetic oligonucleotide
cuuccccugcauuggcugu

SEQ ID NO: 2904145 - RNA, 19 nt, Artificial Sequence
  Description of Artificial Sequence: Synthetic oligonucleotide
ggccccaaguucaaagucu

SEQ ID NO: 2904146 - RNA, 19 nt, Artificial Sequence
  Description of Artificial Sequence: Synthetic oligonucleotide
cucagggcuuguaaacauu

SEQ ID NO: 2904147 - RNA, 19 nt, Artificial Sequence
  Description of Artificial Sequence: Synthetic oligonucleotide
gcuaggggcucagggcuug

SEQ ID NO: 2904148 - RNA, 19 nt, Artificial Sequence
  Description of Artificial Sequence: Synthetic oligonucleotide
gcucagggcuuguaaacau

SEQ ID NO: 2904149 - RNA, 19 nt, Artificial Sequence
  Description of Artificial Sequence: Synthetic oligonucleotide
cagaggggaugggauggga

SEQ ID NO: 2904150 - RNA, 19 nt, Artificial Sequence
  Description of Artificial Sequence: Synthetic oligonucleotide
acacuuccucacaggguua

SEQ ID NO: 2904151 - RNA, 19 nt, Artificial Sequence
  Description of Artificial Sequence: Synthetic oligonucleotide
ccaaguucaaagucucuuu

SEQ ID NO: 2904152 - RNA, 19 nt, Artificial Sequence
  Description of Artificial Sequence: Synthetic oligonucleotide
gggaagggguaggaagaga

SEQ ID NO: 2904153 - RNA, 19 nt, Artificial Sequence
  Description of Artificial Sequence: Synthetic oligonucleotide
cuguggcaggggcagggua

SEQ ID NO: 2904154 - RNA, 19 nt, Artificial Sequence
  Description of Artificial Sequence: Synthetic oligonucleotide
caggguagguuacuacauu

SEQ ID NO: 2904155 - RNA, 19 nt, Artificial Sequence
  Description of Artificial Sequence: Synthetic oligonucleotide
uaggggcucagggcuugua

SEQ ID NO: 2904156 - RNA, 19 nt, Artificial Sequence
  Description of Artificial Sequence: Synthetic oligonucleotide
cccugcauuggcuguggca

SEQ ID NO: 2904157 - RNA, 19 nt, Artificial Sequence
  Description of Artificial Sequence: Synthetic oligonucleotide
ccccuuccuccaaugccac

SEQ ID NO: 2904158 - RNA, 19 nt, Artificial Sequence
  Description of Artificial Sequence: Synthetic oligonucleotide
ggguaggaagagacaagua

SEQ ID NO: 2904159 - RNA, 19 nt, Artificial Sequence
  Description of Artificial Sequence: Synthetic oligonucleotide
ggcaagagggaaggggagu

SEQ ID NO: 2904160 - RNA, 19 nt, Artificial Sequence
  Description of Artificial Sequence: Synthetic oligonucleotide
gugggguaucugagcccug

SEQ ID NO: 2904161 - RNA, 19 nt, Artificial Sequence
  Description of Artificial Sequence: Synthetic oligonucleotide
gcaggguagguuacuacau

SEQ ID NO: 2904162 - RNA, 19 nt, Artificial Sequence
  Description of Artificial Sequence: Synthetic oligonucleotide
ccccuuccccugcauuggc

SEQ ID NO: 2904163 - RNA, 19 nt, Artificial Sequence
  Description of Artificial Sequence: Synthetic oligonucleotide
caugggccccaaguucaaa

SEQ ID NO: 2904164 - RNA, 19 nt, Artificial Sequence
  Description of Artificial Sequence: Synthetic oligonucleotide
ggaggggcccuuccaccaa

SEQ ID NO: 2904165 - RNA, 19 nt, Artificial Sequence
  Description of Artificial Sequence: Synthetic oligonucleotide
gcaagagggaaggggaguu

SEQ ID NO: 2904166 - RNA, 19 nt, Artificial Sequence
  Description of Artificial Sequence: Synthetic oligonucleotide
gggaugggagagggcuccc

SEQ ID NO: 2904167 - RNA, 19 nt, Artificial Sequence
  Description of Artificial Sequence: Synthetic oligonucleotide
gaccacucucagaggggau

SEQ ID NO: 2904168 - RNA, 19 nt, Artificial Sequence
  Description of Artificial Sequence: Synthetic oligonucleotide
cccaaguucaaagucucuu

SEQ ID NO: 2904169 - RNA, 19 nt, Artificial Sequence
  Description of Artificial Sequence: Synthetic oligonucleotide
ggggcaggguagguuacua

SEQ ID NO: 2904170 - RNA, 19 nt, Artificial Sequence
  Description of Artificial Sequence: Synthetic oligonucleotide
ccugggcuaggggcucagg

SEQ ID NO: 2904171 - RNA, 19 nt, Artificial Sequence
  Description of Artificial Sequence: Synthetic oligonucleotide
ccccugcauuggcuguggc

SEQ ID NO: 2904172 - RNA, 19 nt, Artificial Sequence
  Description of Artificial Sequence: Synthetic oligonucleotide
ccuccaaugccaccauaau

SEQ ID NO: 2904173 - RNA, 19 nt, Artificial Sequence
  Description of Artificial Sequence: Synthetic oligonucleotide
cagcagcagcaagacauuu

SEQ ID NO: 2904174 - RNA, 19 nt, Artificial Sequence
  Description of Artificial Sequence: Synthetic oligonucleotide
ccccaaguucaaagucucu

SEQ ID NO: 2904175 - RNA, 19 nt, Artificial Sequence
  Description of Artificial Sequence: Synthetic oligonucleotide
ggcaggggcaggguagguu

SEQ ID NO: 2904176 - RNA, 19 nt, Artificial Sequence
  Description of Artificial Sequence: Synthetic oligonucleotide
cccuuccccugcauuggcu

SEQ ID NO: 2904177 - RNA, 19 nt, Artificial Sequence
  Description of Artificial Sequence: Synthetic oligonucleotide
cccugggcuaggggcucag

SEQ ID NO: 2904178 - RNA, 19 nt, Artificial Sequence
  Description of Artificial Sequence: Synthetic oligonucleotide
cuaggggcucagggcuugu

SEQ ID NO: 2904179 - RNA, 19 nt, Artificial Sequence
  Description of Artificial Sequence: Synthetic oligonucleotide
gcuguggcaggggcagggu

SEQ ID NO: 2904180 - RNA, 19 nt, Artificial Sequence
  Description of Artificial Sequence: Synthetic oligonucleotide
ggcuaggggcucagggcuu

SEQ ID NO: 2904181 - RNA, 19 nt, Artificial Sequence
  Description of Artificial Sequence: Synthetic oligonucleotide
gcccugggcuaggggcuca

SEQ ID NO: 2904182 - RNA, 19 nt, Artificial Sequence
  Description of Artificial Sequence: Synthetic oligonucleotide
ccaggcucaugggccccaa

SEQ ID NO: 2904183 - RNA, 19 nt, Artificial Sequence
  Description of Artificial Sequence: Synthetic oligonucleotide
aguuuuaccauguugacac

SEQ ID NO: 2904184 - RNA, 19 nt, Artificial Sequence
  Description of Artificial Sequence: Synthetic oligonucleotide
aaaauagaauuuuagguca

SEQ ID NO: 2904185 - RNA, 19 nt, Artificial Sequence
  Description of Artificial Sequence: Synthetic oligonucleotide
uuuccaaacauaaagcuag

SEQ ID NO: 2904186 - RNA, 19 nt, Artificial Sequence
  Description of Artificial Sequence: Synthetic oligonucleotide
uauuuaauguauaaguagc

SEQ ID NO: 2904187 - RNA, 19 nt, Artificial Sequence
  Description of Artificial Sequence: Synthetic oligonucleotide
uuuguuguuaacuucagug

SEQ ID NO: 2904188 - RNA, 19 nt, Artificial Sequence
  Description of Artificial Sequence: Synthetic oligonucleotide
agaaaauagaauuuuaggu

SEQ ID NO: 2904189 - RNA, 19 nt, Artificial Sequence
  Description of Artificial Sequence: Synthetic oligonucleotide
aauuuuaggucacauaagu

SEQ ID NO: 2904190 - RNA, 19 nt, Artificial Sequence
  Description of Artificial Sequence: Synthetic oligonucleotide
uaaguuuaaauaaauagau

SEQ ID NO: 2904191 - RNA, 19 nt, Artificial Sequence
  Description of Artificial Sequence: Synthetic oligonucleotide
aacuuaaaauauuuaaugu

SEQ ID NO: 2904192 - RNA, 19 nt, Artificial Sequence
  Description of Artificial Sequence: Synthetic oligonucleotide
auauuuaauguauaaguag

SEQ ID NO: 2904193 - RNA, 19 nt, Artificial Sequence
  Description of Artificial Sequence: Synthetic oligonucleotide
aguuuaaauaaauagauuu

SEQ ID NO: 2904194 - RNA, 19 nt, Artificial Sequence
  Description of Artificial Sequence: Synthetic oligonucleotide
gaaaauagaauuuuagguc

SEQ ID NO: 2904195 - RNA, 19 nt, Artificial Sequence
  Description of Artificial Sequence: Synthetic oligonucleotide
guagcuauuguauauacag

SEQ ID NO: 2904196 - RNA, 19 nt, Artificial Sequence
  Description of Artificial Sequence: Synthetic oligonucleotide
aauagacugacaguuuucc

SEQ ID NO: 2904197 - RNA, 19 nt, Artificial Sequence
  Description of Artificial Sequence: Synthetic oligonucleotide
augaaacugacuuuugggc

SEQ ID NO: 2904198 - RNA, 19 nt, Artificial Sequence
  Description of Artificial Sequence: Synthetic oligonucleotide
uuacucauguguaugaacc

SEQ ID NO: 2904199 - RNA, 19 nt, Artificial Sequence
  Description of Artificial Sequence: Synthetic oligonucleotide
uauacaguaaguuuaaaua

SEQ ID NO: 2904200 - RNA, 19 nt, Artificial Sequence
  Description of Artificial Sequence: Synthetic oligonucleotide
auaaauagauuucuaggag

SEQ ID NO: 2904201 - RNA, 19 nt, Artificial Sequence
  Description of Artificial Sequence: Synthetic oligonucleotide
uuuaaauaaauagauuucu

SEQ ID NO: 2904202 - RNA, 19 nt, Artificial Sequence
  Description of Artificial Sequence: Synthetic oligonucleotide
uguguaugaaccucuaucc

SEQ ID NO: 2904203 - RNA, 19 nt, Artificial Sequence
  Description of Artificial Sequence: Synthetic oligonucleotide
uaaagcuaggcaaggauag

SEQ ID NO: 2904204 - RNA, 19 nt, Artificial Sequence
  Description of Artificial Sequence: Synthetic oligonucleotide
uaaugaaacugacuuuugg

SEQ ID NO: 2904205 - RNA, 19 nt, Artificial Sequence
  Description of Artificial Sequence: Synthetic oligonucleotide
aaguagcuauuguauauac

SEQ ID NO: 2904206 - RNA, 19 nt, Artificial Sequence
  Description of Artificial Sequence: Synthetic oligonucleotide
ucugccauagaaaauagaa

SEQ ID NO: 2904207 - RNA, 19 nt, Artificial Sequence
  Description of Artificial Sequence: Synthetic oligonucleotide
uuuuguucuaaugaaacug

SEQ ID NO: 2904208 - RNA, 19 nt, Artificial Sequence
  Description of Artificial Sequence: Synthetic oligonucleotide
aaauagauuucuaggaguc

SEQ ID NO: 2904209 - RNA, 19 nt, Artificial Sequence
  Description of Artificial Sequence: Synthetic oligonucleotide
accucuauccaguauuugc

SEQ ID NO: 2904210 - RNA, 19 nt, Artificial Sequence
  Description of Artificial Sequence: Synthetic oligonucleotide
aucacuuuuguucuaauga

SEQ ID NO: 2904211 - RNA, 19 nt, Artificial Sequence
  Description of Artificial Sequence: Synthetic oligonucleotide
aguuuuccaaacauaaagc

SEQ ID NO: 2904212 - RNA, 19 nt, Artificial Sequence
  Description of Artificial Sequence: Synthetic oligonucleotide
auguguaugaaccucuauc

SEQ ID NO: 2904213 - RNA, 19 nt, Artificial Sequence
  Description of Artificial Sequence: Synthetic oligonucleotide
uguaugaaccucuauccag

SEQ ID NO: 2904214 - RNA, 19 nt, Artificial Sequence
  Description of Artificial Sequence: Synthetic oligonucleotide
uuuuaggucacauaaguuu

SEQ ID NO: 2904215 - RNA, 19 nt, Artificial Sequence
  Description of Artificial Sequence: Synthetic oligonucleotide
uuuguucuaaugaaacuga

SEQ ID NO: 2904216 - RNA, 19 nt, Artificial Sequence
  Description of Artificial Sequence: Synthetic oligonucleotide
uaaauagauuucuaggagu

SEQ ID NO: 2904217 - RNA, 19 nt, Artificial Sequence
  Description of Artificial Sequence: Synthetic oligonucleotide
uauuguauauacaguaagu

SEQ ID NO: 2904218 - RNA, 19 nt, Artificial Sequence
  Description of Artificial Sequence: Synthetic oligonucleotide
uccucaucucauaauauag

SEQ ID NO: 2904219 - RNA, 19 nt, Artificial Sequence
  Description of Artificial Sequence: Synthetic oligonucleotide
uuaauguauaaguagcuau

SEQ ID NO: 2904220 - RNA, 19 nt, Artificial Sequence
  Description of Artificial Sequence: Synthetic oligonucleotide
ugaaacugacuuuugggcc

SEQ ID NO: 2904221 - RNA, 19 nt, Artificial Sequence
  Description of Artificial Sequence: Synthetic oligonucleotide
aaaauagacugacaguuuu

SEQ ID NO: 2904222 - RNA, 19 nt, Artificial Sequence
  Description of Artificial Sequence: Synthetic oligonucleotide
aagcuaggcaaggauagcc

SEQ ID NO: 2904223 - RNA, 19 nt, Artificial Sequence
  Description of Artificial Sequence: Synthetic oligonucleotide
ucugaagguguucacguag

SEQ ID NO: 2904224 - RNA, 19 nt, Artificial Sequence
  Description of Artificial Sequence: Synthetic oligonucleotide
auaaguuuuaccauguuga

SEQ ID NO: 2904225 - RNA, 19 nt, Artificial Sequence
  Description of Artificial Sequence: Synthetic oligonucleotide
ugccauagaaaauagaauu

SEQ ID NO: 2904226 - RNA, 19 nt, Artificial Sequence
  Description of Artificial Sequence: Synthetic oligonucleotide
aauguauaaguagcuauug

SEQ ID NO: 2904227 - RNA, 19 nt, Artificial Sequence
  Description of Artificial Sequence: Synthetic oligonucleotide
cuauuguauauacaguaag

SEQ ID NO: 2904228 - RNA, 19 nt, Artificial Sequence
  Description of Artificial Sequence: Synthetic oligonucleotide
acuuuuguucuaaugaaac

SEQ ID NO: 2904229 - RNA, 19 nt, Artificial Sequence
  Description of Artificial Sequence: Synthetic oligonucleotide
acuuaaaauauuuaaugua

SEQ ID NO: 2904230 - RNA, 19 nt, Artificial Sequence
  Description of Artificial Sequence: Synthetic oligonucleotide
uguauaaguagcuauugua

SEQ ID NO: 2904231 - RNA, 19 nt, Artificial Sequence
  Description of Artificial Sequence: Synthetic oligonucleotide
auacaguaaguuuaaauaa

SEQ ID NO: 2904232 - RNA, 19 nt, Artificial Sequence
  Description of Artificial Sequence: Synthetic oligonucleotide
uuuccuguaacuuacucau

SEQ ID NO: 2904233 - RNA, 19 nt, Artificial Sequence
  Description of Artificial Sequence: Synthetic oligonucleotide
aauggugguuucucaguac

SEQ ID NO: 2904234 - RNA, 19 nt, Artificial Sequence
  Description of Artificial Sequence: Synthetic oligonucleotide
ucaaaggcuaacuuaaaau

SEQ ID NO: 2904235 - RNA, 19 nt, Artificial Sequence
  Description of Artificial Sequence: Synthetic oligonucleotide
ucacauaaguuuuaccaug

SEQ ID NO: 2904236 - RNA, 19 nt, Artificial Sequence
  Description of Artificial Sequence: Synthetic oligonucleotide
agcacuacuuuccuguaac

SEQ ID NO: 2904237 - RNA, 19 nt, Artificial Sequence
  Description of Artificial Sequence: Synthetic oligonucleotide
uucgguggugucaugaugc

SEQ ID NO: 2904238 - RNA, 19 nt, Artificial Sequence
  Description of Artificial Sequence: Synthetic oligonucleotide
aagguguucacguaguuua

SEQ ID NO: 2904239 - RNA, 19 nt, Artificial Sequence
  Description of Artificial Sequence: Synthetic oligonucleotide
auuucuaggagucaguaua

SEQ ID NO: 2904240 - RNA, 19 nt, Artificial Sequence
  Description of Artificial Sequence: Synthetic oligonucleotide
ucaucucauaauauagggc

SEQ ID NO: 2904241 - RNA, 19 nt, Artificial Sequence
  Description of Artificial Sequence: Synthetic oligonucleotide
uuaaauaaauagauuucua

SEQ ID NO: 2904242 - RNA, 19 nt, Artificial Sequence
  Description of Artificial Sequence: Synthetic oligonucleotide
aaacauaaagcuaggcaag

SEQ ID NO: 2904243 - RNA, 19 nt, Artificial Sequence
  Description of Artificial Sequence: Synthetic oligonucleotide
guaaguuuaaauaaauaga

SEQ ID NO: 2904244 - RNA, 19 nt, Artificial Sequence
  Description of Artificial Sequence: Synthetic oligonucleotide
gaaacugacuuuugggccc

SEQ ID NO: 2904245 - RNA, 19 nt, Artificial Sequence
  Description of Artificial Sequence: Synthetic oligonucleotide
uuuucugaagguguucacg

SEQ ID NO: 2904246 - RNA, 19 nt, Artificial Sequence
  Description of Artificial Sequence: Synthetic oligonucleotide
aacauaaagcuaggcaagg

SEQ ID NO: 2904247 - RNA, 19 nt, Artificial Sequence
  Description of Artificial Sequence: Synthetic oligonucleotide
ucaguauacauuuaauauu

SEQ ID NO: 2904248 - RNA, 19 nt, Artificial Sequence
  Description of Artificial Sequence: Synthetic oligonucleotide
aauuccaauuuguuguuaa

SEQ ID NO: 2904249 - RNA, 19 nt, Artificial Sequence
  Description of Artificial Sequence: Synthetic oligonucleotide
auauacaguaaguuuaaau

SEQ ID NO: 2904250 - RNA, 19 nt, Artificial Sequence
  Description of Artificial Sequence: Synthetic oligonucleotide
cauaaguuuuaccauguug

SEQ ID NO: 2904251 - RNA, 19 nt, Artificial Sequence
  Description of Artificial Sequence: Synthetic oligonucleotide
ucucaguacucuucggugg

SEQ ID NO: 2904252 - RNA, 19 nt, Artificial Sequence
  Description of Artificial Sequence: Synthetic oligonucleotide
aaauagaauuuuaggucac

SEQ ID NO: 2904253 - RNA, 19 nt, Artificial Sequence
  Description of Artificial Sequence: Synthetic oligonucleotide
uguaacuuacucaugugua

SEQ ID NO: 2904254 - RNA, 19 nt, Artificial Sequence
  Description of Artificial Sequence: Synthetic oligonucleotide
caugaugccuccauuacac

SEQ ID NO: 2904255 - RNA, 19 nt, Artificial Sequence
  Description of Artificial Sequence: Synthetic oligonucleotide
uuuuaccauguugacacgg

SEQ ID NO: 2904256 - RNA, 19 nt, Artificial Sequence
  Description of Artificial Sequence: Synthetic oligonucleotide
uuuaggucacauaaguuuu

SEQ ID NO: 2904257 - RNA, 19 nt, Artificial Sequence
  Description of Artificial Sequence: Synthetic oligonucleotide
uuuuccaaacauaaagcua

SEQ ID NO: 2904258 - RNA, 19 nt, Artificial Sequence
  Description of Artificial Sequence: Synthetic oligonucleotide
ucuaaugaaacugacuuuu

SEQ ID NO: 2904259 - RNA, 19 nt, Artificial Sequence
  Description of Artificial Sequence: Synthetic oligonucleotide
uuguuguuaacuucagugu

SEQ ID NO: 2904260 - RNA, 19 nt, Artificial Sequence
  Description of Artificial Sequence: Synthetic oligonucleotide
aacuuacucauguguauga

SEQ ID NO: 2904261 - RNA, 19 nt, Artificial Sequence
  Description of Artificial Sequence: Synthetic oligonucleotide
uguucuaaugaaacugacu

SEQ ID NO: 2904262 - RNA, 19 nt, Artificial Sequence
  Description of Artificial Sequence: Synthetic oligonucleotide
uuugcucaauuccaauuug

SEQ ID NO: 2904263 - RNA, 19 nt, Artificial Sequence
  Description of Artificial Sequence: Synthetic oligonucleotide
auaaguagcuauuguauau

SEQ ID NO: 2904264 - RNA, 19 nt, Artificial Sequence
  Description of Artificial Sequence: Synthetic oligonucleotide
cauaauauagggcuuaaaa

SEQ ID NO: 2904265 - RNA, 19 nt, Artificial Sequence
  Description of Artificial Sequence: Synthetic oligonucleotide
ugaaccucuauccaguauu

SEQ ID NO: 2904266 - RNA, 19 nt, Artificial Sequence
  Description of Artificial Sequence: Synthetic oligonucleotide
auagauuucuaggagucag

SEQ ID NO: 2904267 - RNA, 19 nt, Artificial Sequence
  Description of Artificial Sequence: Synthetic oligonucleotide
agcuauuguauauacagua

SEQ ID NO: 2904268 - RNA, 19 nt, Artificial Sequence
  Description of Artificial Sequence: Synthetic oligonucleotide
uuguauauacaguaaguuu

SEQ ID NO: 2904269 - RNA, 19 nt, Artificial Sequence
  Description of Artificial Sequence: Synthetic oligonucleotide
uucaaaggcuaacuuaaaa

SEQ ID NO: 2904270 - RNA, 19 nt, Artificial Sequence
  Description of Artificial Sequence: Synthetic oligonucleotide
uauaaguagcuauuguaua

SEQ ID NO: 2904271 - RNA, 19 nt, Artificial Sequence
  Description of Artificial Sequence: Synthetic oligonucleotide
aaaggcuaacuuaaaauau

SEQ ID NO: 2904272 - RNA, 19 nt, Artificial Sequence
  Description of Artificial Sequence: Synthetic oligonucleotide
uuucucaguacucuucggu

SEQ ID NO: 2904273 - RNA, 19 nt, Artificial Sequence
  Description of Artificial Sequence: Synthetic oligonucleotide
uaauguauaaguagcuauu

SEQ ID NO: 2904274 - RNA, 19 nt, Artificial Sequence
  Description of Artificial Sequence: Synthetic oligonucleotide
ggucacauaaguuuuacca

SEQ ID NO: 2904275 - RNA, 19 nt, Artificial Sequence
  Description of Artificial Sequence: Synthetic oligonucleotide
uaccauguugacacggucc

SEQ ID NO: 2904276 - RNA, 19 nt, Artificial Sequence
  Description of Artificial Sequence: Synthetic oligonucleotide
uuucugccauagaaaauag

SEQ ID NO: 2904277 - RNA, 19 nt, Artificial Sequence
  Description of Artificial Sequence: Synthetic oligonucleotide
uagacugacaguuuuccaa

SEQ ID NO: 2904278 - RNA, 19 nt, Artificial Sequence
  Description of Artificial Sequence: Synthetic oligonucleotide
guuuaaauaaauagauuuc

SEQ ID NO: 2904279 - RNA, 19 nt, Artificial Sequence
  Description of Artificial Sequence: Synthetic oligonucleotide
aaauagacugacaguuuuc

SEQ ID NO: 2904280 - RNA, 19 nt, Artificial Sequence
  Description of Artificial Sequence: Synthetic oligonucleotide
uuuuaauggugguuucuca

SEQ ID NO: 2904281 - RNA, 19 nt, Artificial Sequence
  Description of Artificial Sequence: Synthetic oligonucleotide
uaucacuuuuguucuaaug

SEQ ID NO: 2904282 - RNA, 19 nt, Artificial Sequence
  Description of Artificial Sequence: Synthetic oligonucleotide
uguuguuaacuucaguguu

SEQ ID NO: 2904283 - RNA, 19 nt, Artificial Sequence
  Description of Artificial Sequence: Synthetic oligonucleotide
aaagcuaggcaaggauagc

SEQ ID NO: 2904284 - RNA, 19 nt, Artificial Sequence
  Description of Artificial Sequence: Synthetic oligonucleotide
ucuauccaguauuugcuca

SEQ ID NO: 2904285 - RNA, 19 nt, Artificial Sequence
  Description of Artificial Sequence: Synthetic oligonucleotide
caauuuguuguuaacuuca

SEQ ID NO: 2904286 - RNA, 19 nt, Artificial Sequence
  Description of Artificial Sequence: Synthetic oligonucleotide
uccaguauuugcucaauuc

SEQ ID NO: 2904287 - RNA, 19 nt, Artificial Sequence
  Description of Artificial Sequence: Synthetic oligonucleotide
agucaguauacauuuaaua

SEQ ID NO: 2904288 - RNA, 19 nt, Artificial Sequence
  Description of Artificial Sequence: Synthetic oligonucleotide
acuuuccuguaacuuacuc

SEQ ID NO: 2904289 - RNA, 19 nt, Artificial Sequence
  Description of Artificial Sequence: Synthetic oligonucleotide
uucucaguacucuucggug

SEQ ID NO: 2904290 - RNA, 19 nt, Artificial Sequence
  Description of Artificial Sequence: Synthetic oligonucleotide
uccaauuuguuguuaacuu

SEQ ID NO: 2904291 - RNA, 19 nt, Artificial Sequence
  Description of Artificial Sequence: Synthetic oligonucleotide
uuucuaggagucaguauac

SEQ ID NO: 2904292 - RNA, 19 nt, Artificial Sequence
  Description of Artificial Sequence: Synthetic oligonucleotide
uaggagucaguauacauuu

SEQ ID NO: 2904293 - RNA, 19 nt, Artificial Sequence
  Description of Artificial Sequence: Synthetic oligonucleotide
uuaauggugguuucucagu

SEQ ID NO: 2904294 - RNA, 19 nt, Artificial Sequence
  Description of Artificial Sequence: Synthetic oligonucleotide
cuacuuuccuguaacuuac

SEQ ID NO: 2904295 - RNA, 19 nt, Artificial Sequence
  Description of Artificial Sequence: Synthetic oligonucleotide
gaauuuuaggucacauaag

SEQ ID NO: 2904296 - RNA, 19 nt, Artificial Sequence
  Description of Artificial Sequence: Synthetic oligonucleotide
cucaauuccaauuuguugu

SEQ ID NO: 2904297 - RNA, 19 nt, Artificial Sequence
  Description of Artificial Sequence: Synthetic oligonucleotide
cuuuugggcccaaauuucc

SEQ ID NO: 2904298 - RNA, 19 nt, Artificial Sequence
  Description of Artificial Sequence: Synthetic oligonucleotide
aggucacauaaguuuuacc

SEQ ID NO: 2904299 - RNA, 19 nt, Artificial Sequence
  Description of Artificial Sequence: Synthetic oligonucleotide
uaaguuuuaccauguugac

SEQ ID NO: 2904300 - RNA, 19 nt, Artificial Sequence
  Description of Artificial Sequence: Synthetic oligonucleotide
acacacuggugacaacugc

SEQ ID NO: 2904301 - RNA, 19 nt, Artificial Sequence
  Description of Artificial Sequence: Synthetic oligonucleotide
uuacacacuggugacaacu

SEQ ID NO: 2904302 - RNA, 19 nt, Artificial Sequence
  Description of Artificial Sequence: Synthetic oligonucleotide
uuuaauguauaaguagcua

SEQ ID NO: 2904303 - RNA, 19 nt, Artificial Sequence
  Description of Artificial Sequence: Synthetic oligonucleotide
caucucauaauauagggcu

SEQ ID NO: 2904304 - RNA, 19 nt, Artificial Sequence
  Description of Artificial Sequence: Synthetic oligonucleotide
uuccaaacauaaagcuagg

SEQ ID NO: 2904305 - RNA, 19 nt, Artificial Sequence
  Description of Artificial Sequence: Synthetic oligonucleotide
auuugcucaauuccaauuu

SEQ ID NO: 2904306 - RNA, 19 nt, Artificial Sequence
  Description of Artificial Sequence: Synthetic oligonucleotide
acuacuuuccuguaacuua

SEQ ID NO: 2904307 - RNA, 19 nt, Artificial Sequence
  Description of Artificial Sequence: Synthetic oligonucleotide
uuccaauuuguuguuaacu

SEQ ID NO: 2904308 - RNA, 19 nt, Artificial Sequence
  Description of Artificial Sequence: Synthetic oligonucleotide
ucaugaugccuccauuaca

SEQ ID NO: 2904309 - RNA, 19 nt, Artificial Sequence
  Description of Artificial Sequence: Synthetic oligonucleotide
uuuaccauguugacacggu

SEQ ID NO: 2904310 - RNA, 19 nt, Artificial Sequence
  Description of Artificial Sequence: Synthetic oligonucleotide
cuuacucauguguaugaac

SEQ ID NO: 2904311 - RNA, 19 nt, Artificial Sequence
  Description of Artificial Sequence: Synthetic oligonucleotide
aauuuguuguuaacuucag

SEQ ID NO: 2904312 - RNA, 19 nt, Artificial Sequence
  Description of Artificial Sequence: Synthetic oligonucleotide
gacaguuuuccaaacauaa

SEQ ID NO: 2904313 - RNA, 19 nt, Artificial Sequence
  Description of Artificial Sequence: Synthetic oligonucleotide
guucacguaguuuacuuca

SEQ ID NO: 2904314 - RNA, 19 nt, Artificial Sequence
  Description of Artificial Sequence: Synthetic oligonucleotide
ugaugccuccauuacacac

SEQ ID NO: 2904315 - RNA, 19 nt, Artificial Sequence
  Description of Artificial Sequence: Synthetic oligonucleotide
guucuaaugaaacugacuu

SEQ ID NO: 2904316 - RNA, 19 nt, Artificial Sequence
  Description of Artificial Sequence: Synthetic oligonucleotide
aaguuuuaccauguugaca

SEQ ID NO: 2904317 - RNA, 19 nt, Artificial Sequence
  Description of Artificial Sequence: Synthetic oligonucleotide
aguguuuuaauggugguuu

SEQ ID NO: 2904318 - RNA, 19 nt, Artificial Sequence
  Description of Artificial Sequence: Synthetic oligonucleotide
cacguaguuuacuucauuc

SEQ ID NO: 2904319 - RNA, 19 nt, Artificial Sequence
  Description of Artificial Sequence: Synthetic oligonucleotide
auuuaauguauaaguagcu

SEQ ID NO: 2904320 - RNA, 19 nt, Artificial Sequence
  Description of Artificial Sequence: Synthetic oligonucleotide
ucuaggagucaguauacau

SEQ ID NO: 2904321 - RNA, 19 nt, Artificial Sequence
  Description of Artificial Sequence: Synthetic oligonucleotide
uaacuuacucauguguaug

SEQ ID NO: 2904322 - RNA, 19 nt, Artificial Sequence
  Description of Artificial Sequence: Synthetic oligonucleotide
auguauaaguagcuauugu

SEQ ID NO: 2904323 - RNA, 19 nt, Artificial Sequence
  Description of Artificial Sequence: Synthetic oligonucleotide
caaaggcuaacuuaaaaua

SEQ ID NO: 2904324 - RNA, 19 nt, Artificial Sequence
  Description of Artificial Sequence: Synthetic oligonucleotide
uccauuacacacuggugac

SEQ ID NO: 2904325 - RNA, 19 nt, Artificial Sequence
  Description of Artificial Sequence: Synthetic oligonucleotide
aauagaauuuuaggucaca

SEQ ID NO: 2904326 - RNA, 19 nt, Artificial Sequence
  Description of Artificial Sequence: Synthetic oligonucleotide
cacacuggugacaacugcc

SEQ ID NO: 2904327 - RNA, 19 nt, Artificial Sequence
  Description of Artificial Sequence: Synthetic oligonucleotide
uuguucuaaugaaacugac

SEQ ID NO: 2904328 - RNA, 19 nt, Artificial Sequence
  Description of Artificial Sequence: Synthetic oligonucleotide
gucaguauacauuuaauau

SEQ ID NO: 2904329 - RNA, 19 nt, Artificial Sequence
  Description of Artificial Sequence: Synthetic oligonucleotide
aauagauuucuaggaguca

SEQ ID NO: 2904330 - RNA, 19 nt, Artificial Sequence
  Description of Artificial Sequence: Synthetic oligonucleotide
uaggcaaggauagccacag

SEQ ID NO: 2904331 - RNA, 19 nt, Artificial Sequence
  Description of Artificial Sequence: Synthetic oligonucleotide
acaacugcccuccuuuucu

SEQ ID NO: 2904332 - RNA, 19 nt, Artificial Sequence
  Description of Artificial Sequence: Synthetic oligonucleotide
uagcuauuguauauacagu

SEQ ID NO: 2904333 - RNA, 19 nt, Artificial Sequence
  Description of Artificial Sequence: Synthetic oligonucleotide
guuuuccaaacauaaagcu

SEQ ID NO: 2904334 - RNA, 19 nt, Artificial Sequence
  Description of Artificial Sequence: Synthetic oligonucleotide
uugcucaauuccaauuugu

SEQ ID NO: 2904335 - RNA, 19 nt, Artificial Sequence
  Description of Artificial Sequence: Synthetic oligonucleotide
guuaacuucaguguuuuaa

SEQ ID NO: 2904336 - RNA, 19 nt, Artificial Sequence
  Description of Artificial Sequence: Synthetic oligonucleotide
uaauggugguuucucagua

SEQ ID NO: 2904337 - RNA, 19 nt, Artificial Sequence
  Description of Artificial Sequence: Synthetic oligonucleotide
uuuccuuuucaaaggcuaa

SEQ ID NO: 2904338 - RNA, 19 nt, Artificial Sequence
  Description of Artificial Sequence: Synthetic oligonucleotide
uacacacuggugacaacug

SEQ ID NO: 2904339 - RNA, 19 nt, Artificial Sequence
  Description of Artificial Sequence: Synthetic oligonucleotide
cuuuccuguaacuuacuca

SEQ ID NO: 2904340 - RNA, 19 nt, Artificial Sequence
  Description of Artificial Sequence: Synthetic oligonucleotide
cuaaugaaacugacuuuug

SEQ ID NO: 2904341 - RNA, 19 nt, Artificial Sequence
  Description of Artificial Sequence: Synthetic oligonucleotide
acuuuugggcccaaauuuc

SEQ ID NO: 2904342 - RNA, 19 nt, Artificial Sequence
  Description of Artificial Sequence: Synthetic oligonucleotide
acucauguguaugaaccuc

SEQ ID NO: 2904343 - RNA, 19 nt, Artificial Sequence
  Description of Artificial Sequence: Synthetic oligonucleotide
aaguuuaaauaaauagauu

SEQ ID NO: 2904344 - RNA, 19 nt, Artificial Sequence
  Description of Artificial Sequence: Synthetic oligonucleotide
guugacacgguccucaucu

SEQ ID NO: 2904345 - RNA, 19 nt, Artificial Sequence
  Description of Artificial Sequence: Synthetic oligonucleotide
ugacuuuugggcccaaauu

SEQ ID NO: 2904346 - RNA, 19 nt, Artificial Sequence
  Description of Artificial Sequence: Synthetic oligonucleotide
uagaauuuuaggucacaua

SEQ ID NO: 2904347 - RNA, 19 nt, Artificial Sequence
  Description of Artificial Sequence: Synthetic oligonucleotide
acugacaguuuuccaaaca

SEQ ID NO: 2904348 - RNA, 19 nt, Artificial Sequence
  Description of Artificial Sequence: Synthetic oligonucleotide
ccaguauuugcucaauucc

SEQ ID NO: 2904349 - RNA, 19 nt, Artificial Sequence
  Description of Artificial Sequence: Synthetic oligonucleotide
agccacagcacuacuuucc

SEQ ID NO: 2904350 - RNA, 19 nt, Artificial Sequence
  Description of Artificial Sequence: Synthetic oligonucleotide
auggugguuucucaguacu

SEQ ID NO: 2904351 - RNA, 19 nt, Artificial Sequence
  Description of Artificial Sequence: Synthetic oligonucleotide
acacuggugacaacugccc

SEQ ID NO: 2904352 - RNA, 19 nt, Artificial Sequence
  Description of Artificial Sequence: Synthetic oligonucleotide
auuuguuguuaacuucagu

SEQ ID NO: 2904353 - RNA, 19 nt, Artificial Sequence
  Description of Artificial Sequence: Synthetic oligonucleotide
auagccacagcacuacuuu

SEQ ID NO: 2904354 - RNA, 19 nt, Artificial Sequence
  Description of Artificial Sequence: Synthetic oligonucleotide
aggauagccacagcacuac

SEQ ID NO: 2904355 - RNA, 19 nt, Artificial Sequence
  Description of Artificial Sequence: Synthetic oligonucleotide
uccaaacauaaagcuaggc

SEQ ID NO: 2904356 - RNA, 19 nt, Artificial Sequence
  Description of Artificial Sequence: Synthetic oligonucleotide
uguuuuaauggugguuucu

SEQ ID NO: 2904357 - RNA, 19 nt, Artificial Sequence
  Description of Artificial Sequence: Synthetic oligonucleotide
uacucauguguaugaaccu

SEQ ID NO: 2904358 - RNA, 19 nt, Artificial Sequence
  Description of Artificial Sequence: Synthetic oligonucleotide
caguauuugcucaauucca

SEQ ID NO: 2904359 - RNA, 19 nt, Artificial Sequence
  Description of Artificial Sequence: Synthetic oligonucleotide
uccuuuucaaaggcuaacu

SEQ ID NO: 2904360 - RNA, 19 nt, Artificial Sequence
  Description of Artificial Sequence: Synthetic oligonucleotide
uucuaaugaaacugacuuu

SEQ ID NO: 2904361 - RNA, 19 nt, Artificial Sequence
  Description of Artificial Sequence: Synthetic oligonucleotide
aaggcuaacuuaaaauauu

SEQ ID NO: 2904362 - RNA, 19 nt, Artificial Sequence
  Description of Artificial Sequence: Synthetic oligonucleotide
uucugccauagaaaauaga

SEQ ID NO: 2904363 - RNA, 19 nt, Artificial Sequence
  Description of Artificial Sequence: Synthetic oligonucleotide
uuucaaaggcuaacuuaaa

SEQ ID NO: 2904364 - RNA, 19 nt, Artificial Sequence
  Description of Artificial Sequence: Synthetic oligonucleotide
agacugacaguuuuccaaa

SEQ ID NO: 2904365 - RNA, 19 nt, Artificial Sequence
  Description of Artificial Sequence: Synthetic oligonucleotide
ugcucaauuccaauuuguu

SEQ ID NO: 2904366 - RNA, 19 nt, Artificial Sequence
  Description of Artificial Sequence: Synthetic oligonucleotide
guuucucaguacucuucgg

SEQ ID NO: 2904367 - RNA, 19 nt, Artificial Sequence
  Description of Artificial Sequence: Synthetic oligonucleotide
acaguaaguuuaaauaaau

SEQ ID NO: 2904368 - RNA, 19 nt, Artificial Sequence
  Description of Artificial Sequence: Synthetic oligonucleotide
auuacacacuggugacaac

SEQ ID NO: 2904369 - RNA, 19 nt, Artificial Sequence
  Description of Artificial Sequence: Synthetic oligonucleotide
gcucaauuccaauuuguug

SEQ ID NO: 2904370 - RNA, 19 nt, Artificial Sequence
  Description of Artificial Sequence: Synthetic oligonucleotide
uuaccauguugacacgguc

SEQ ID NO: 2904371 - RNA, 19 nt, Artificial Sequence
  Description of Artificial Sequence: Synthetic oligonucleotide
auagacugacaguuuucca

SEQ ID NO: 2904372 - RNA, 19 nt, Artificial Sequence
  Description of Artificial Sequence: Synthetic oligonucleotide
uaaguagcuauuguauaua

SEQ ID NO: 2904373 - RNA, 19 nt, Artificial Sequence
  Description of Artificial Sequence: Synthetic oligonucleotide
ugguuucucaguacucuuc

SEQ ID NO: 2904374 - RNA, 19 nt, Artificial Sequence
  Description of Artificial Sequence: Synthetic oligonucleotide
auagaauuuuaggucacau

SEQ ID NO: 2904375 - RNA, 19 nt, Artificial Sequence
  Description of Artificial Sequence: Synthetic oligonucleotide
ucaauuccaauuuguuguu

SEQ ID NO: 2904376 - RNA, 19 nt, Artificial Sequence
  Description of Artificial Sequence: Synthetic oligonucleotide
ugacacgguccucaucuca

SEQ ID NO: 2904377 - RNA, 19 nt, Artificial Sequence
  Description of Artificial Sequence: Synthetic oligonucleotide
ucucauaauauagggcuua

SEQ ID NO: 2904378 - RNA, 19 nt, Artificial Sequence
  Description of Artificial Sequence: Synthetic oligonucleotide
uuaggucacauaaguuuua

SEQ ID NO: 2904379 - RNA, 19 nt, Artificial Sequence
  Description of Artificial Sequence: Synthetic oligonucleotide
guuuuaccauguugacacg

SEQ ID NO: 2904380 - RNA, 19 nt, Artificial Sequence
  Description of Artificial Sequence: Synthetic oligonucleotide
ccucaucucauaauauagg

SEQ ID NO: 2904381 - RNA, 19 nt, Artificial Sequence
  Description of Artificial Sequence: Synthetic oligonucleotide
aguacucuucggugguguc

SEQ ID NO: 2904382 - RNA, 19 nt, Artificial Sequence
  Description of Artificial Sequence: Synthetic oligonucleotide
gacuuuugggcccaaauuu

SEQ ID NO: 2904383 - RNA, 19 nt, Artificial Sequence
  Description of Artificial Sequence: Synthetic oligonucleotide
guuuuaauggugguuucuc

SEQ ID NO: 2904384 - RNA, 19 nt, Artificial Sequence
  Description of Artificial Sequence: Synthetic oligonucleotide
ggcaaggauagccacagca

SEQ ID NO: 2904385 - RNA, 19 nt, Artificial Sequence
  Description of Artificial Sequence: Synthetic oligonucleotide
cucuauccaguauuugcuc

SEQ ID NO: 2904386 - RNA, 19 nt, Artificial Sequence
  Description of Artificial Sequence: Synthetic oligonucleotide
auaaagcuaggcaaggaua

SEQ ID NO: 2904387 - RNA, 19 nt, Artificial Sequence
  Description of Artificial Sequence: Synthetic oligonucleotide
cuuuucugaagguguucac

SEQ ID NO: 2904388 - RNA, 19 nt, Artificial Sequence
  Description of Artificial Sequence: Synthetic oligonucleotide
cuggugacaacugcccucc

SEQ ID NO: 2904389 - RNA, 19 nt, Artificial Sequence
  Description of Artificial Sequence: Synthetic oligonucleotide
uaggucacauaaguuuuac

SEQ ID NO: 2904390 - RNA, 19 nt, Artificial Sequence
  Description of Artificial Sequence: Synthetic oligonucleotide
aguauuugcucaauuccaa

SEQ ID NO: 2904391 - RNA, 19 nt, Artificial Sequence
  Description of Artificial Sequence: Synthetic oligonucleotide
uuccuuuucaaaggcuaac

SEQ ID NO: 2904392 - RNA, 19 nt, Artificial Sequence
  Description of Artificial Sequence: Synthetic oligonucleotide
uuguuaacuucaguguuuu

SEQ ID NO: 2904393 - RNA, 19 nt, Artificial Sequence
  Description of Artificial Sequence: Synthetic oligonucleotide
gacugacaguuuuccaaac

SEQ ID NO: 2904394 - RNA, 19 nt, Artificial Sequence
  Description of Artificial Sequence: Synthetic oligonucleotide
uucacguaguuuacuucau

SEQ ID NO: 2904395 - RNA, 19 nt, Artificial Sequence
  Description of Artificial Sequence: Synthetic oligonucleotide
guauaaguagcuauuguau

SEQ ID NO: 2904396 - RNA, 19 nt, Artificial Sequence
  Description of Artificial Sequence: Synthetic oligonucleotide
guguaugaaccucuaucca

SEQ ID NO: 2904397 - RNA, 19 nt, Artificial Sequence
  Description of Artificial Sequence: Synthetic oligonucleotide
ccaaacauaaagcuaggca

SEQ ID NO: 2904398 - RNA, 19 nt, Artificial Sequence
  Description of Artificial Sequence: Synthetic oligonucleotide
uuccuguaacuuacucaug

SEQ ID NO: 2904399 - RNA, 19 nt, Artificial Sequence
  Description of Artificial Sequence: Synthetic oligonucleotide
aacugcccuccuuuucuga

SEQ ID NO: 2904400 - RNA, 19 nt, Artificial Sequence
  Description of Artificial Sequence: Synthetic oligonucleotide
uuugggcccaaauuuccuu

SEQ ID NO: 2904401 - RNA, 19 nt, Artificial Sequence
  Description of Artificial Sequence: Synthetic oligonucleotide
uaugaaccucuauccagua

SEQ ID NO: 2904402 - RNA, 19 nt, Artificial Sequence
  Description of Artificial Sequence: Synthetic oligonucleotide
ucauguguaugaaccucua

SEQ ID NO: 2904403 - RNA, 19 nt, Artificial Sequence
  Description of Artificial Sequence: Synthetic oligonucleotide
aguagcuauuguauauaca

SEQ ID NO: 2904404 - RNA, 19 nt, Artificial Sequence
  Description of Artificial Sequence: Synthetic oligonucleotide
aaccucuauccaguauuug

SEQ ID NO: 2904405 - RNA, 19 nt, Artificial Sequence
  Description of Artificial Sequence: Synthetic oligonucleotide
cuuuuguucuaaugaaacu

SEQ ID NO: 2904406 - RNA, 19 nt, Artificial Sequence
  Description of Artificial Sequence: Synthetic oligonucleotide
ccaauuuguuguuaacuuc

SEQ ID NO: 2904407 - RNA, 19 nt, Artificial Sequence
  Description of Artificial Sequence: Synthetic oligonucleotide
ggagucaguauacauuuaa

SEQ ID NO: 2904408 - RNA, 19 nt, Artificial Sequence
  Description of Artificial Sequence: Synthetic oligonucleotide
acauaaagcuaggcaagga

SEQ ID NO: 2904409 - RNA, 19 nt, Artificial Sequence
  Description of Artificial Sequence: Synthetic oligonucleotide
cauguugacacgguccuca

SEQ ID NO: 2904410 - RNA, 19 nt, Artificial Sequence
  Description of Artificial Sequence: Synthetic oligonucleotide
uucuaggagucaguauaca

SEQ ID NO: 2904411 - RNA, 19 nt, Artificial Sequence
  Description of Artificial Sequence: Synthetic oligonucleotide
agauuucuaggagucagua

SEQ ID NO: 2904412 - RNA, 19 nt, Artificial Sequence
  Description of Artificial Sequence: Synthetic oligonucleotide
ucauaauauagggcuuaaa

SEQ ID NO: 2904413 - RNA, 19 nt, Artificial Sequence
  Description of Artificial Sequence: Synthetic oligonucleotide
cacuuuuguucuaaugaaa

SEQ ID NO: 2904414 - RNA, 19 nt, Artificial Sequence
  Description of Artificial Sequence: Synthetic oligonucleotide
auuuuaggucacauaaguu

SEQ ID NO: 2904415 - RNA, 19 nt, Artificial Sequence
  Description of Artificial Sequence: Synthetic oligonucleotide
aaacugacuuuugggccca

SEQ ID NO: 2904416 - RNA, 19 nt, Artificial Sequence
  Description of Artificial Sequence: Synthetic oligonucleotide
gacaacugcccuccuuuuc

SEQ ID NO: 2904417 - RNA, 19 nt, Artificial Sequence
  Description of Artificial Sequence: Synthetic oligonucleotide
cuucgguggugucaugaug

SEQ ID NO: 2904418 - RNA, 19 nt, Artificial Sequence
  Description of Artificial Sequence: Synthetic oligonucleotide
aaggauagccacagcacua

SEQ ID NO: 2904419 - RNA, 19 nt, Artificial Sequence
  Description of Artificial Sequence: Synthetic oligonucleotide
ugaagguguucacguaguu

SEQ ID NO: 2904420 - RNA, 19 nt, Artificial Sequence
  Description of Artificial Sequence: Synthetic oligonucleotide
uacuuuccuguaacuuacu

SEQ ID NO: 2904421 - RNA, 19 nt, Artificial Sequence
  Description of Artificial Sequence: Synthetic oligonucleotide
ucacguaguuuacuucauu

SEQ ID NO: 2904422 - RNA, 19 nt, Artificial Sequence
  Description of Artificial Sequence: Synthetic oligonucleotide
cacagcacuacuuuccugu

SEQ ID NO: 2904423 - RNA, 19 nt, Artificial Sequence
  Description of Artificial Sequence: Synthetic oligonucleotide
ucgguggugucaugaugcc

SEQ ID NO: 2904424 - RNA, 19 nt, Artificial Sequence
  Description of Artificial Sequence: Synthetic oligonucleotide
uggugguuucucaguacuc

SEQ ID NO: 2904425 - RNA, 19 nt, Artificial Sequence
  Description of Artificial Sequence: Synthetic oligonucleotide
cauuacacacuggugacaa

SEQ ID NO: 2904426 - RNA, 19 nt, Artificial Sequence
  Description of Artificial Sequence: Synthetic oligonucleotide
cuguaacuuacucaugugu

SEQ ID NO: 2904427 - RNA, 19 nt, Artificial Sequence
  Description of Artificial Sequence: Synthetic oligonucleotide
gucacauaaguuuuaccau

SEQ ID NO: 2904428 - RNA, 19 nt, Artificial Sequence
  Description of Artificial Sequence: Synthetic oligonucleotide
guaacuuacucauguguau

SEQ ID NO: 2904429 - RNA, 19 nt, Artificial Sequence
  Description of Artificial Sequence: Synthetic oligonucleotide
cugguaucacuuuuguucu

SEQ ID NO: 2904430 - RNA, 19 nt, Artificial Sequence
  Description of Artificial Sequence: Synthetic oligonucleotide
ucuucgguggugucaugau

SEQ ID NO: 2904431 - RNA, 19 nt, Artificial Sequence
  Description of Artificial Sequence: Synthetic oligonucleotide
aggcuaacuuaaaauauuu

SEQ ID NO: 2904432 - RNA, 19 nt, Artificial Sequence
  Description of Artificial Sequence: Synthetic oligonucleotide
guguuuuaauggugguuuc

SEQ ID NO: 2904433 - RNA, 19 nt, Artificial Sequence
  Description of Artificial Sequence: Synthetic oligonucleotide
uacucuucgguggugucau

SEQ ID NO: 2904434 - RNA, 19 nt, Artificial Sequence
  Description of Artificial Sequence: Synthetic oligonucleotide
gguggugucaugaugccuc

SEQ ID NO: 2904435 - RNA, 19 nt, Artificial Sequence
  Description of Artificial Sequence: Synthetic oligonucleotide
uugggcccaaauuuccuuu

SEQ ID NO: 2904436 - RNA, 19 nt, Artificial Sequence
  Description of Artificial Sequence: Synthetic oligonucleotide
cuaggcaaggauagccaca

SEQ ID NO: 2904437 - RNA, 19 nt, Artificial Sequence
  Description of Artificial Sequence: Synthetic oligonucleotide
guccucaucucauaauaua

SEQ ID NO: 2904438 - RNA, 19 nt, Artificial Sequence
  Description of Artificial Sequence: Synthetic oligonucleotide
cacauaaguuuuaccaugu

SEQ ID NO: 2904439 - RNA, 19 nt, Artificial Sequence
  Description of Artificial Sequence: Synthetic oligonucleotide
agguguucacguaguuuac

SEQ ID NO: 2904440 - RNA, 19 nt, Artificial Sequence
  Description of Artificial Sequence: Synthetic oligonucleotide
uguugacacgguccucauc

SEQ ID NO: 2904441 - RNA, 19 nt, Artificial Sequence
  Description of Artificial Sequence: Synthetic oligonucleotide
augaaccucuauccaguau

SEQ ID NO: 2904442 - RNA, 19 nt, Artificial Sequence
  Description of Artificial Sequence: Synthetic oligonucleotide
cauaaagcuaggcaaggau

SEQ ID NO: 2904443 - RNA, 19 nt, Artificial Sequence
  Description of Artificial Sequence: Synthetic oligonucleotide
cuauccaguauuugcucaa

SEQ ID NO: 2904444 - RNA, 19 nt, Artificial Sequence
  Description of Artificial Sequence: Synthetic oligonucleotide
uucugaagguguucacgua

SEQ ID NO: 2904445 - RNA, 19 nt, Artificial Sequence
  Description of Artificial Sequence: Synthetic oligonucleotide
gauuucuaggagucaguau

SEQ ID NO: 2904446 - RNA, 19 nt, Artificial Sequence
  Description of Artificial Sequence: Synthetic oligonucleotide
acugcccuccuuuucugaa

SEQ ID NO: 2904447 - RNA, 19 nt, Artificial Sequence
  Description of Artificial Sequence: Synthetic oligonucleotide
augaugccuccauuacaca

SEQ ID NO: 2904448 - RNA, 19 nt, Artificial Sequence
  Description of Artificial Sequence: Synthetic oligonucleotide
cuaggagucaguauacauu

SEQ ID NO: 2904449 - RNA, 19 nt, Artificial Sequence
  Description of Artificial Sequence: Synthetic oligonucleotide
acuuacucauguguaugaa

SEQ ID NO: 2904450 - RNA, 19 nt, Artificial Sequence
  Description of Artificial Sequence: Synthetic oligonucleotide
cucauguguaugaaccucu

SEQ ID NO: 2904451 - RNA, 19 nt, Artificial Sequence
  Description of Artificial Sequence: Synthetic oligonucleotide
acaguuuuccaaacauaaa

SEQ ID NO: 2904452 - RNA, 19 nt, Artificial Sequence
  Description of Artificial Sequence: Synthetic oligonucleotide
caaggauagccacagcacu

SEQ ID NO: 2904453 - RNA, 19 nt, Artificial Sequence
  Description of Artificial Sequence: Synthetic oligonucleotide
guggugucaugaugccucc

SEQ ID NO: 2904454 - RNA, 19 nt, Artificial Sequence
  Description of Artificial Sequence: Synthetic oligonucleotide
gcuaggcaaggauagccac

SEQ ID NO: 2904455 - RNA, 19 nt, Artificial Sequence
  Description of Artificial Sequence: Synthetic oligonucleotide
agcuaggcaaggauagcca

SEQ ID NO: 2904456 - RNA, 19 nt, Artificial Sequence
  Description of Artificial Sequence: Synthetic oligonucleotide
auccaguauuugcucaauu

SEQ ID NO: 2904457 - RNA, 19 nt, Artificial Sequence
  Description of Artificial Sequence: Synthetic oligonucleotide
guaugaaccucuauccagu

SEQ ID NO: 2904458 - RNA, 19 nt, Artificial Sequence
  Description of Artificial Sequence: Synthetic oligonucleotide
ucaguacucuucgguggug

SEQ ID NO: 2904459 - RNA, 19 nt, Artificial Sequence
  Description of Artificial Sequence: Synthetic oligonucleotide
uccuuuucugaagguguuc

SEQ ID NO: 2904460 - RNA, 19 nt, Artificial Sequence
  Description of Artificial Sequence: Synthetic oligonucleotide
uguuaacuucaguguuuua

SEQ ID NO: 2904461 - RNA, 19 nt, Artificial Sequence
  Description of Artificial Sequence: Synthetic oligonucleotide
uauccaguauuugcucaau

SEQ ID NO: 2904462 - RNA, 19 nt, Artificial Sequence
  Description of Artificial Sequence: Synthetic oligonucleotide
caacugcccuccuuuucug

SEQ ID NO: 2904463 - RNA, 19 nt, Artificial Sequence
  Description of Artificial Sequence: Synthetic oligonucleotide
gcaaggauagccacagcac

SEQ ID NO: 2904464 - RNA, 19 nt, Artificial Sequence
  Description of Artificial Sequence: Synthetic oligonucleotide
ccuguaacuuacucaugug

SEQ ID NO: 2904465 - RNA, 19 nt, Artificial Sequence
  Description of Artificial Sequence: Synthetic oligonucleotide
gcuauuguauauacaguaa

SEQ ID NO: 2904466 - RNA, 19 nt, Artificial Sequence
  Description of Artificial Sequence: Synthetic oligonucleotide
acgguccucaucucauaau

SEQ ID NO: 2904467 - RNA, 19 nt, Artificial Sequence
  Description of Artificial Sequence: Synthetic oligonucleotide
ugacaacugcccuccuuuu

SEQ ID NO: 2904468 - RNA, 19 nt, Artificial Sequence
  Description of Artificial Sequence: Synthetic oligonucleotide
cugccauagaaaauagaau

SEQ ID NO: 2904469 - RNA, 19 nt, Artificial Sequence
  Description of Artificial Sequence: Synthetic oligonucleotide
guauuugcucaauuccaau

SEQ ID NO: 2904470 - RNA, 19 nt, Artificial Sequence
  Description of Artificial Sequence: Synthetic oligonucleotide
uugacacgguccucaucuc

SEQ ID NO: 2904471 - RNA, 19 nt, Artificial Sequence
  Description of Artificial Sequence: Synthetic oligonucleotide
ugggcccaaauuuccuuuu

SEQ ID NO: 2904472 - RNA, 19 nt, Artificial Sequence
  Description of Artificial Sequence: Synthetic oligonucleotide
acagcacuacuuuccugua

SEQ ID NO: 2904473 - RNA, 19 nt, Artificial Sequence
  Description of Artificial Sequence: Synthetic oligonucleotide
aucucauaauauagggcuu

SEQ ID NO: 2904474 - RNA, 19 nt, Artificial Sequence
  Description of Artificial Sequence: Synthetic oligonucleotide
gugacaacugcccuccuuu

SEQ ID NO: 2904475 - RNA, 19 nt, Artificial Sequence
  Description of Artificial Sequence: Synthetic oligonucleotide
guacucuucggugguguca

SEQ ID NO: 2904476 - RNA, 19 nt, Artificial Sequence
  Description of Artificial Sequence: Synthetic oligonucleotide
ugguaucacuuuuguucua

SEQ ID NO: 2904477 - RNA, 19 nt, Artificial Sequence
  Description of Artificial Sequence: Synthetic oligonucleotide
gguaucacuuuuguucuaa

SEQ ID NO: 2904478 - RNA, 19 nt, Artificial Sequence
  Description of Artificial Sequence: Synthetic oligonucleotide
ggcccaaauuuccuuuuca

SEQ ID NO: 2904479 - RNA, 19 nt, Artificial Sequence
  Description of Artificial Sequence: Synthetic oligonucleotide
cucuucgguggugucauga

SEQ ID NO: 2904480 - RNA, 19 nt, Artificial Sequence
  Description of Artificial Sequence: Synthetic oligonucleotide
ccuccauuacacacuggug

SEQ ID NO: 2904481 - RNA, 19 nt, Artificial Sequence
  Description of Artificial Sequence: Synthetic oligonucleotide
gagucaguauacauuuaau

SEQ ID NO: 2904482 - RNA, 19 nt, Artificial Sequence
  Description of Artificial Sequence: Synthetic oligonucleotide
auguugacacgguccucau

SEQ ID NO: 2904483 - RNA, 19 nt, Artificial Sequence
  Description of Artificial Sequence: Synthetic oligonucleotide
guguucacguaguuuacuu

SEQ ID NO: 2904484 - RNA, 19 nt, Artificial Sequence
  Description of Artificial Sequence: Synthetic oligonucleotide
cugaagguguucacguagu

SEQ ID NO: 2904485 - RNA, 19 nt, Artificial Sequence
  Description of Artificial Sequence: Synthetic oligonucleotide
guuguuaacuucaguguuu

SEQ ID NO: 2904486 - RNA, 19 nt, Artificial Sequence
  Description of Artificial Sequence: Synthetic oligonucleotide
gccuccauuacacacuggu

SEQ ID NO: 2904487 - RNA, 19 nt, Artificial Sequence
  Description of Artificial Sequence: Synthetic oligonucleotide
gauagccacagcacuacuu

SEQ ID NO: 2904488 - RNA, 19 nt, Artificial Sequence
  Description of Artificial Sequence: Synthetic oligonucleotide
gaagguguucacguaguuu

SEQ ID NO: 2904489 - RNA, 19 nt, Artificial Sequence
  Description of Artificial Sequence: Synthetic oligonucleotide
cccaaauuuccuuuucaaa

SEQ ID NO: 2904490 - RNA, 19 nt, Artificial Sequence
  Description of Artificial Sequence: Synthetic oligonucleotide
gcccaaauuuccuuuucaa

SEQ ID NO: 2904491 - RNA, 19 nt, Artificial Sequence
  Description of Artificial Sequence: Synthetic oligonucleotide
cucauaauauagggcuuaa

SEQ ID NO: 2904492 - RNA, 19 nt, Artificial Sequence
  Description of Artificial Sequence: Synthetic oligonucleotide
cacgguccucaucucauaa

SEQ ID NO: 2904493 - RNA, 19 nt, Artificial Sequence
  Description of Artificial Sequence: Synthetic oligonucleotide
ccuuuucugaagguguuca

SEQ ID NO: 2904494 - RNA, 19 nt, Artificial Sequence
  Description of Artificial Sequence: Synthetic oligonucleotide
cugacuuuugggcccaaau

SEQ ID NO: 2904495 - RNA, 19 nt, Artificial Sequence
  Description of Artificial Sequence: Synthetic oligonucleotide
ggugguuucucaguacucu

SEQ ID NO: 2904496 - RNA, 19 nt, Artificial Sequence
  Description of Artificial Sequence: Synthetic oligonucleotide
cucaguacucuucgguggu

SEQ ID NO: 2904497 - RNA, 19 nt, Artificial Sequence
  Description of Artificial Sequence: Synthetic oligonucleotide
acacgguccucaucucaua

SEQ ID NO: 2904498 - RNA, 19 nt, Artificial Sequence
  Description of Artificial Sequence: Synthetic oligonucleotide
ccucuauccaguauuugcu

SEQ ID NO: 2904499 - RNA, 19 nt, Artificial Sequence
  Description of Artificial Sequence: Synthetic oligonucleotide
uggugucaugaugccucca

SEQ ID NO: 2904500 - RNA, 19 nt, Artificial Sequence
  Description of Artificial Sequence: Synthetic oligonucleotide
gacacgguccucaucucau

SEQ ID NO: 2904501 - RNA, 19 nt, Artificial Sequence
  Description of Artificial Sequence: Synthetic oligonucleotide
guaucacuuuuguucuaau

SEQ ID NO: 2904502 - RNA, 19 nt, Artificial Sequence
  Description of Artificial Sequence: Synthetic oligonucleotide
gaaccucuauccaguauuu

SEQ ID NO: 2904503 - RNA, 19 nt, Artificial Sequence
  Description of Artificial Sequence: Synthetic oligonucleotide
acucuucgguggugucaug

SEQ ID NO: 2904504 - RNA, 19 nt, Artificial Sequence
  Description of Artificial Sequence: Synthetic oligonucleotide
uggugacaacugcccuccu

SEQ ID NO: 2904505 - RNA, 19 nt, Artificial Sequence
  Description of Artificial Sequence: Synthetic oligonucleotide
ggugucaugaugccuccau

SEQ ID NO: 2904506 - RNA, 19 nt, Artificial Sequence
  Description of Artificial Sequence: Synthetic oligonucleotide
cagcacuacuuuccuguaa

SEQ ID NO: 2904507 - RNA, 19 nt, Artificial Sequence
  Description of Artificial Sequence: Synthetic oligonucleotide
ccuccuuuucugaaggugu

SEQ ID NO: 2904508 - RNA, 19 nt, Artificial Sequence
  Description of Artificial Sequence: Synthetic oligonucleotide
caauuccaauuuguuguua

SEQ ID NO: 2904509 - RNA, 19 nt, Artificial Sequence
  Description of Artificial Sequence: Synthetic oligonucleotide
cauguguaugaaccucuau

SEQ ID NO: 2904510 - RNA, 19 nt, Artificial Sequence
  Description of Artificial Sequence: Synthetic oligonucleotide
gccauagaaaauagaauuu

SEQ ID NO: 2904511 - RNA, 19 nt, Artificial Sequence
  Description of Artificial Sequence: Synthetic oligonucleotide
gugguuucucaguacucuu

SEQ ID NO: 2904512 - RNA, 19 nt, Artificial Sequence
  Description of Artificial Sequence: Synthetic oligonucleotide
acugacuuuugggcccaaa

SEQ ID NO: 2904513 - RNA, 19 nt, Artificial Sequence
  Description of Artificial Sequence: Synthetic oligonucleotide
gggcccaaauuuccuuuuc

SEQ ID NO: 2904514 - RNA, 19 nt, Artificial Sequence
  Description of Artificial Sequence: Synthetic oligonucleotide
cacuacuuuccuguaacuu

SEQ ID NO: 2904515 - RNA, 19 nt, Artificial Sequence
  Description of Artificial Sequence: Synthetic oligonucleotide
aggagucaguauacauuua

SEQ ID NO: 2904516 - RNA, 19 nt, Artificial Sequence
  Description of Artificial Sequence: Synthetic oligonucleotide
ccacagcacuacuuuccug

SEQ ID NO: 2904517 - RNA, 19 nt, Artificial Sequence
  Description of Artificial Sequence: Synthetic oligonucleotide
cacuggugacaacugcccu

SEQ ID NO: 2904518 - RNA, 19 nt, Artificial Sequence
  Description of Artificial Sequence: Synthetic oligonucleotide
gguguucacguaguuuacu

SEQ ID NO: 2904519 - RNA, 19 nt, Artificial Sequence
  Description of Artificial Sequence: Synthetic oligonucleotide
aacugacuuuugggcccaa

SEQ ID NO: 2904520 - RNA, 19 nt, Artificial Sequence
  Description of Artificial Sequence: Synthetic oligonucleotide
caguacucuucgguggugu

SEQ ID NO: 2904521 - RNA, 19 nt, Artificial Sequence
  Description of Artificial Sequence: Synthetic oligonucleotide
gccacagcacuacuuuccu

SEQ ID NO: 2904522 - RNA, 19 nt, Artificial Sequence
  Description of Artificial Sequence: Synthetic oligonucleotide
caguguuuuaauggugguu

SEQ ID NO: 2904523 - RNA, 19 nt, Artificial Sequence
  Description of Artificial Sequence: Synthetic oligonucleotide
gcacuacuuuccuguaacu

SEQ ID NO: 2904524 - RNA, 19 nt, Artificial Sequence
  Description of Artificial Sequence: Synthetic oligonucleotide
gguccucaucucauaauau

SEQ ID NO: 2904525 - RNA, 19 nt, Artificial Sequence
  Description of Artificial Sequence: Synthetic oligonucleotide
ccauuacacacuggugaca

SEQ ID NO: 2904526 - RNA, 19 nt, Artificial Sequence
  Description of Artificial Sequence: Synthetic oligonucleotide
ggauagccacagcacuacu

SEQ ID NO: 2904527 - RNA, 19 nt, Artificial Sequence
  Description of Artificial Sequence: Synthetic oligonucleotide
cgguccucaucucauaaua

SEQ ID NO: 2904528 - RNA, 19 nt, Artificial Sequence
  Description of Artificial Sequence: Synthetic oligonucleotide
ggugacaacugcccuccuu

SEQ ID NO: 2904529 - RNA, 19 nt, Artificial Sequence
  Description of Artificial Sequence: Synthetic oligonucleotide
ccauguugacacgguccuc

SEQ ID NO: 2904530 - RNA, 19 nt, Artificial Sequence
  Description of Artificial Sequence: Synthetic oligonucleotide
cgguggugucaugaugccu

SEQ ID NO: 2904531 - RNA, 19 nt, Artificial Sequence
  Description of Artificial Sequence: Synthetic oligonucleotide
aauccagucauucacaucu

SEQ ID NO: 2904532 - RNA, 19 nt, Artificial Sequence
  Description of Artificial Sequence: Synthetic oligonucleotide
aaagcuacuugguugcugc

SEQ ID NO: 2904533 - RNA, 19 nt, Artificial Sequence
  Description of Artificial Sequence: Synthetic oligonucleotide
ucugccaaaagcuacuugg

SEQ ID NO: 2904534 - RNA, 19 nt, Artificial Sequence
  Description of Artificial Sequence: Synthetic oligonucleotide
ugugaauccauaaggaugc

SEQ ID NO: 2904535 - RNA, 19 nt, Artificial Sequence
  Description of Artificial Sequence: Synthetic oligonucleotide
uuguuaaagacaaugaauc

SEQ ID NO: 2904536 - RNA, 19 nt, Artificial Sequence
  Description of Artificial Sequence: Synthetic oligonucleotide
agaaugucaggauggaugc

SEQ ID NO: 2904537 - RNA, 19 nt, Artificial Sequence
  Description of Artificial Sequence: Synthetic oligonucleotide
acagccauuuuauacauuc

SEQ ID NO: 2904538 - RNA, 19 nt, Artificial Sequence
  Description of Artificial Sequence: Synthetic oligonucleotide
uuuuauacauucuagcauc

SEQ ID NO: 2904539 - RNA, 19 nt, Artificial Sequence
  Description of Artificial Sequence: Synthetic oligonucleotide
ucaucauuguuaaagacaa

SEQ ID NO: 2904540 - RNA, 19 nt, Artificial Sequence
  Description of Artificial Sequence: Synthetic oligonucleotide
aagguuguugacaaagacc

SEQ ID NO: 2904541 - RNA, 19 nt, Artificial Sequence
  Description of Artificial Sequence: Synthetic oligonucleotide
gguaacuugacauuacucg

SEQ ID NO: 2904542 - RNA, 19 nt, Artificial Sequence
  Description of Artificial Sequence: Synthetic oligonucleotide
aaugacaucacaguaugug

SEQ ID NO: 2904543 - RNA, 19 nt, Artificial Sequence
  Description of Artificial Sequence: Synthetic oligonucleotide
aagacaaugaauccucugu

SEQ ID NO: 2904544 - RNA, 19 nt, Artificial Sequence
  Description of Artificial Sequence: Synthetic oligonucleotide
gaugcgccaacauaaaucc

SEQ ID NO: 2904545 - RNA, 19 nt, Artificial Sequence
  Description of Artificial Sequence: Synthetic oligonucleotide
ugugccagcaggaagacca

SEQ ID NO: 2904546 - RNA, 19 nt, Artificial Sequence
  Description of Artificial Sequence: Synthetic oligonucleotide
agucauucacaucuuuucc

SEQ ID NO: 2904547 - RNA, 19 nt, Artificial Sequence
  Description of Artificial Sequence: Synthetic oligonucleotide
uuaauggucacuucuuuug

SEQ ID NO: 2904548 - RNA, 19 nt, Artificial Sequence
  Description of Artificial Sequence: Synthetic oligonucleotide
uuaaagacaaugaauccuc

SEQ ID NO: 2904549 - RNA, 19 nt, Artificial Sequence
  Description of Artificial Sequence: Synthetic oligonucleotide
augacaucacaguaugugc

SEQ ID NO: 2904550 - RNA, 19 nt, Artificial Sequence
  Description of Artificial Sequence: Synthetic oligonucleotide
gaaaugacaucacaguaug

SEQ ID NO: 2904551 - RNA, 19 nt, Artificial Sequence
  Description of Artificial Sequence: Synthetic oligonucleotide
uaucccaccaguuugagaa

SEQ ID NO: 2904552 - RNA, 19 nt, Artificial Sequence
  Description of Artificial Sequence: Synthetic oligonucleotide
uuauuugacgccaucgaug

SEQ ID NO: 2904553 - RNA, 19 nt, Artificial Sequence
  Description of Artificial Sequence: Synthetic oligonucleotide
uguaagguuguugacaaag

SEQ ID NO: 2904554 - RNA, 19 nt, Artificial Sequence
  Description of Artificial Sequence: Synthetic oligonucleotide
ucauuguuaaagacaauga

SEQ ID NO: 2904555 - RNA, 19 nt, Artificial Sequence
  Description of Artificial Sequence: Synthetic oligonucleotide
uguuaaagacaaugaaucc

SEQ ID NO: 2904556 - RNA, 19 nt, Artificial Sequence
  Description of Artificial Sequence: Synthetic oligonucleotide
acaaugaauccucuguuuc

SEQ ID NO: 2904557 - RNA, 19 nt, Artificial Sequence
  Description of Artificial Sequence: Synthetic oligonucleotide
uaaggaugcgccaacauaa

SEQ ID NO: 2904558 - RNA, 19 nt, Artificial Sequence
  Description of Artificial Sequence: Synthetic oligonucleotide
uauacauucuagcauccca

SEQ ID NO: 2904559 - RNA, 19 nt, Artificial Sequence
  Description of Artificial Sequence: Synthetic oligonucleotide
cugaaggcaaccauguucc

SEQ ID NO: 2904560 - RNA, 19 nt, Artificial Sequence
  Description of Artificial Sequence: Synthetic oligonucleotide
aaugucaggauggaugcuc

SEQ ID NO: 2904561 - RNA, 19 nt, Artificial Sequence
  Description of Artificial Sequence: Synthetic oligonucleotide
auucuagcaucccagaaug

SEQ ID NO: 2904562 - RNA, 19 nt, Artificial Sequence
  Description of Artificial Sequence: Synthetic oligonucleotide
cauucuggaaguuucuugc

SEQ ID NO: 2904563 - RNA, 19 nt, Artificial Sequence
  Description of Artificial Sequence: Synthetic oligonucleotide
auuuuauacauucuagcau

SEQ ID NO: 2904564 - RNA, 19 nt, Artificial Sequence
  Description of Artificial Sequence: Synthetic oligonucleotide
agucaucauuguuaaagac

SEQ ID NO: 2904565 - RNA, 19 nt, Artificial Sequence
  Description of Artificial Sequence: Synthetic oligonucleotide
uauuaggugguccaaucca

SEQ ID NO: 2904566 - RNA, 19 nt, Artificial Sequence
  Description of Artificial Sequence: Synthetic oligonucleotide
ucuuuugugacuccauugu

SEQ ID NO: 2904567 - RNA, 19 nt, Artificial Sequence
  Description of Artificial Sequence: Synthetic oligonucleotide
cucgugugaauccauaagg

SEQ ID NO: 2904568 - RNA, 19 nt, Artificial Sequence
  Description of Artificial Sequence: Synthetic oligonucleotide
gaauccauaaggaugcgcc

SEQ ID NO: 2904569 - RNA, 19 nt, Artificial Sequence
  Description of Artificial Sequence: Synthetic oligonucleotide
uauuugacgccaucgaugu

SEQ ID NO: 2904570 - RNA, 19 nt, Artificial Sequence
  Description of Artificial Sequence: Synthetic oligonucleotide
uuuauacauucuagcaucc

SEQ ID NO: 2904571 - RNA, 19 nt, Artificial Sequence
  Description of Artificial Sequence: Synthetic oligonucleotide
ugacaucacaguaugugcc

SEQ ID NO: 2904572 - RNA, 19 nt, Artificial Sequence
  Description of Artificial Sequence: Synthetic oligonucleotide
acauuacucgugugaaucc

SEQ ID NO: 2904573 - RNA, 19 nt, Artificial Sequence
  Description of Artificial Sequence: Synthetic oligonucleotide
uccaacagccauuuuauac

SEQ ID NO: 2904574 - RNA, 19 nt, Artificial Sequence
  Description of Artificial Sequence: Synthetic oligonucleotide
cacaguaugugccagcagg

SEQ ID NO: 2904575 - RNA, 19 nt, Artificial Sequence
  Description of Artificial Sequence: Synthetic oligonucleotide
uuauuaggugguccaaucc

SEQ ID NO: 2904576 - RNA, 19 nt, Artificial Sequence
  Description of Artificial Sequence: Synthetic oligonucleotide
aaagacaaugaauccucug

SEQ ID NO: 2904577 - RNA, 19 nt, Artificial Sequence
  Description of Artificial Sequence: Synthetic oligonucleotide
aauccucuguuuccucugc

SEQ ID NO: 2904578 - RNA, 19 nt, Artificial Sequence
  Description of Artificial Sequence: Synthetic oligonucleotide
acugacuacauuucugaag

SEQ ID NO: 2904579 - RNA, 19 nt, Artificial Sequence
  Description of Artificial Sequence: Synthetic oligonucleotide
aaccauguuccuuauuuga

SEQ ID NO: 2904580 - RNA, 19 nt, Artificial Sequence
  Description of Artificial Sequence: Synthetic oligonucleotide
cagaaugucaggauggaug

SEQ ID NO: 2904581 - RNA, 19 nt, Artificial Sequence
  Description of Artificial Sequence: Synthetic oligonucleotide
cuccauuguuauuaggugg

SEQ ID NO: 2904582 - RNA, 19 nt, Artificial Sequence
  Description of Artificial Sequence: Synthetic oligonucleotide
ucccagaaugucaggaugg

SEQ ID NO: 2904583 - RNA, 19 nt, Artificial Sequence
  Description of Artificial Sequence: Synthetic oligonucleotide
auuguuauuagguggucca

SEQ ID NO: 2904584 - RNA, 19 nt, Artificial Sequence
  Description of Artificial Sequence: Synthetic oligonucleotide
gaaguuucuugcccaacgg

SEQ ID NO: 2904585 - RNA, 19 nt, Artificial Sequence
  Description of Artificial Sequence: Synthetic oligonucleotide
cauuuuauacauucuagca

SEQ ID NO: 2904586 - RNA, 19 nt, Artificial Sequence
  Description of Artificial Sequence: Synthetic oligonucleotide
uaagguuguugacaaagac

SEQ ID NO: 2904587 - RNA, 19 nt, Artificial Sequence
  Description of Artificial Sequence: Synthetic oligonucleotide
cauguuccuuauuugacgc

SEQ ID NO: 2904588 - RNA, 19 nt, Artificial Sequence
  Description of Artificial Sequence: Synthetic oligonucleotide
ucuguaagguuguugacaa

SEQ ID NO: 2904589 - RNA, 19 nt, Artificial Sequence
  Description of Artificial Sequence: Synthetic oligonucleotide
uguuuccucugccaaaagc

SEQ ID NO: 2904590 - RNA, 19 nt, Artificial Sequence
  Description of Artificial Sequence: Synthetic oligonucleotide
agaaaggcuggccacugac

SEQ ID NO: 2904591 - RNA, 19 nt, Artificial Sequence
  Description of Artificial Sequence: Synthetic oligonucleotide
uaacuugacauuacucgug

SEQ ID NO: 2904592 - RNA, 19 nt, Artificial Sequence
  Description of Artificial Sequence: Synthetic oligonucleotide
guggugucgggauuaaugg

SEQ ID NO: 2904593 - RNA, 19 nt, Artificial Sequence
  Description of Artificial Sequence: Synthetic oligonucleotide
aauggucacuucuuuugug

SEQ ID NO: 2904594 - RNA, 19 nt, Artificial Sequence
  Description of Artificial Sequence: Synthetic oligonucleotide
uucuuuugugacuccauug

SEQ ID NO: 2904595 - RNA, 19 nt, Artificial Sequence
  Description of Artificial Sequence: Synthetic oligonucleotide
uccauuguuauuagguggu

SEQ ID NO: 2904596 - RNA, 19 nt, Artificial Sequence
  Description of Artificial Sequence: Synthetic oligonucleotide
agguuguugacaaagacca

SEQ ID NO: 2904597 - RNA, 19 nt, Artificial Sequence
  Description of Artificial Sequence: Synthetic oligonucleotide
uccuuauuugacgccaucg

SEQ ID NO: 2904598 - RNA, 19 nt, Artificial Sequence
  Description of Artificial Sequence: Synthetic oligonucleotide
accaguuugagaaaggcug

SEQ ID NO: 2904599 - RNA, 19 nt, Artificial Sequence
  Description of Artificial Sequence: Synthetic oligonucleotide
cacaucuuuuccauucugg

SEQ ID NO: 2904600 - RNA, 19 nt, Artificial Sequence
  Description of Artificial Sequence: Synthetic oligonucleotide
aguaugugccagcaggaag

SEQ ID NO: 2904601 - RNA, 19 nt, Artificial Sequence
  Description of Artificial Sequence: Synthetic oligonucleotide
acaaagaccagucaucauu

SEQ ID NO: 2904602 - RNA, 19 nt, Artificial Sequence
  Description of Artificial Sequence: Synthetic oligonucleotide
caaagaccagucaucauug

SEQ ID NO: 2904603 - RNA, 19 nt, Artificial Sequence
  Description of Artificial Sequence: Synthetic oligonucleotide
gauggaugcuccuccagcc

SEQ ID NO: 2904604 - RNA, 19 nt, Artificial Sequence
  Description of Artificial Sequence: Synthetic oligonucleotide
uuuugugacuccauuguua

SEQ ID NO: 2904605 - RNA, 19 nt, Artificial Sequence
  Description of Artificial Sequence: Synthetic oligonucleotide
ugugacuccauuguuauua

SEQ ID NO: 2904606 - RNA, 19 nt, Artificial Sequence
  Description of Artificial Sequence: Synthetic oligonucleotide
ucaggauggaugcuccucc

SEQ ID NO: 2904607 - RNA, 19 nt, Artificial Sequence
  Description of Artificial Sequence: Synthetic oligonucleotide
cagucauugccacaagugg

SEQ ID NO: 2904608 - RNA, 19 nt, Artificial Sequence
  Description of Artificial Sequence: Synthetic oligonucleotide
auuguuaaagacaaugaau

SEQ ID NO: 2904609 - RNA, 19 nt, Artificial Sequence
  Description of Artificial Sequence: Synthetic oligonucleotide
aaugaauccucuguuuccu

SEQ ID NO: 2904610 - RNA, 19 nt, Artificial Sequence
  Description of Artificial Sequence: Synthetic oligonucleotide
aaggcaaccauguuccuua

SEQ ID NO: 2904611 - RNA, 19 nt, Artificial Sequence
  Description of Artificial Sequence: Synthetic oligonucleotide
ucgugugaauccauaagga

SEQ ID NO: 2904612 - RNA, 19 nt, Artificial Sequence
  Description of Artificial Sequence: Synthetic oligonucleotide
uuugugacuccauuguuau

SEQ ID NO: 2904613 - RNA, 19 nt, Artificial Sequence
  Description of Artificial Sequence: Synthetic oligonucleotide
caaugaauccucuguuucc

SEQ ID NO: 2904614 - RNA, 19 nt, Artificial Sequence
  Description of Artificial Sequence: Synthetic oligonucleotide
uuugagaaaggcuggccac

SEQ ID NO: 2904615 - RNA, 19 nt, Artificial Sequence
  Description of Artificial Sequence: Synthetic oligonucleotide
ugcgccaacauaaauccaa

SEQ ID NO: 2904616 - RNA, 19 nt, Artificial Sequence
  Description of Artificial Sequence: Synthetic oligonucleotide
auugccacaaguggugucg

SEQ ID NO: 2904617 - RNA, 19 nt, Artificial Sequence
  Description of Artificial Sequence: Synthetic oligonucleotide
gccaacauaaauccaacag

SEQ ID NO: 2904618 - RNA, 19 nt, Artificial Sequence
  Description of Artificial Sequence: Synthetic oligonucleotide
acuccauuguuauuaggug

SEQ ID NO: 2904619 - RNA, 19 nt, Artificial Sequence
  Description of Artificial Sequence: Synthetic oligonucleotide
aaguuucuugcccaacggu

SEQ ID NO: 2904620 - RNA, 19 nt, Artificial Sequence
  Description of Artificial Sequence: Synthetic oligonucleotide
cuugucuccagaaaugaca

SEQ ID NO: 2904621 - RNA, 19 nt, Artificial Sequence
  Description of Artificial Sequence: Synthetic oligonucleotide
uuugacgccaucgauguuc

SEQ ID NO: 2904622 - RNA, 19 nt, Artificial Sequence
  Description of Artificial Sequence: Synthetic oligonucleotide
aauccauaaggaugcgcca

SEQ ID NO: 2904623 - RNA, 19 nt, Artificial Sequence
  Description of Artificial Sequence: Synthetic oligonucleotide
uuguugacaaagaccaguc

SEQ ID NO: 2904624 - RNA, 19 nt, Artificial Sequence
  Description of Artificial Sequence: Synthetic oligonucleotide
gacauuacucgugugaauc

SEQ ID NO: 2904625 - RNA, 19 nt, Artificial Sequence
  Description of Artificial Sequence: Synthetic oligonucleotide
ugacaaagaccagucauca

SEQ ID NO: 2904626 - RNA, 19 nt, Artificial Sequence
  Description of Artificial Sequence: Synthetic oligonucleotide
aauccaacagccauuuuau

SEQ ID NO: 2904627 - RNA, 19 nt, Artificial Sequence
  Description of Artificial Sequence: Synthetic oligonucleotide
aguuugagaaaggcuggcc

SEQ ID NO: 2904628 - RNA, 19 nt, Artificial Sequence
  Description of Artificial Sequence: Synthetic oligonucleotide
gugugaauccauaaggaug

SEQ ID NO: 2904629 - RNA, 19 nt, Artificial Sequence
  Description of Artificial Sequence: Synthetic oligonucleotide
uugcccaacgguaacuuga

SEQ ID NO: 2904630 - RNA, 19 nt, Artificial Sequence
  Description of Artificial Sequence: Synthetic oligonucleotide
uugucuccagaaaugacau

SEQ ID NO: 2904631 - RNA, 19 nt, Artificial Sequence
  Description of Artificial Sequence: Synthetic oligonucleotide
auguuccuuauuugacgcc

SEQ ID NO: 2904632 - RNA, 19 nt, Artificial Sequence
  Description of Artificial Sequence: Synthetic oligonucleotide
acgccaucgauguucacag

SEQ ID NO: 2904633 - RNA, 19 nt, Artificial Sequence
  Description of Artificial Sequence: Synthetic oligonucleotide
uaauggucacuucuuuugu

SEQ ID NO: 2904634 - RNA, 19 nt, Artificial Sequence
  Description of Artificial Sequence: Synthetic oligonucleotide
acucgugugaauccauaag

SEQ ID NO: 2904635 - RNA, 19 nt, Artificial Sequence
  Description of Artificial Sequence: Synthetic oligonucleotide
aagcuacuugguugcugcc

SEQ ID NO: 2904636 - RNA, 19 nt, Artificial Sequence
  Description of Artificial Sequence: Synthetic oligonucleotide
uguuccuuauuugacgcca

SEQ ID NO: 2904637 - RNA, 19 nt, Artificial Sequence
  Description of Artificial Sequence: Synthetic oligonucleotide
aaggcuggccacugacuac

SEQ ID NO: 2904638 - RNA, 19 nt, Artificial Sequence
  Description of Artificial Sequence: Synthetic oligonucleotide
uaaagacaaugaauccucu

SEQ ID NO: 2904639 - RNA, 19 nt, Artificial Sequence
  Description of Artificial Sequence: Synthetic oligonucleotide
ggaaguuucuugcccaacg

SEQ ID NO: 2904640 - RNA, 19 nt, Artificial Sequence
  Description of Artificial Sequence: Synthetic oligonucleotide
uccaauccagucauucaca

SEQ ID NO: 2904641 - RNA, 19 nt, Artificial Sequence
  Description of Artificial Sequence: Synthetic oligonucleotide
aacgguaacuugacauuac

SEQ ID NO: 2904642 - RNA, 19 nt, Artificial Sequence
  Description of Artificial Sequence: Synthetic oligonucleotide
uguugacaaagaccaguca

SEQ ID NO: 2904643 - RNA, 19 nt, Artificial Sequence
  Description of Artificial Sequence: Synthetic oligonucleotide
uacauuucugaaggcaacc

SEQ ID NO: 2904644 - RNA, 19 nt, Artificial Sequence
  Description of Artificial Sequence: Synthetic oligonucleotide
agucuguaagguuguugac

SEQ ID NO: 2904645 - RNA, 19 nt, Artificial Sequence
  Description of Artificial Sequence: Synthetic oligonucleotide
ccauuuuauacauucuagc

SEQ ID NO: 2904646 - RNA, 19 nt, Artificial Sequence
  Description of Artificial Sequence: Synthetic oligonucleotide
auggaugcuccuccagccc

SEQ ID NO: 2904647 - RNA, 19 nt, Artificial Sequence
  Description of Artificial Sequence: Synthetic oligonucleotide
cuugacauuacucguguga

SEQ ID NO: 2904648 - RNA, 19 nt, Artificial Sequence
  Description of Artificial Sequence: Synthetic oligonucleotide
cagucauucacaucuuuuc

SEQ ID NO: 2904649 - RNA, 19 nt, Artificial Sequence
  Description of Artificial Sequence: Synthetic oligonucleotide
auacauucuagcaucccag

SEQ ID NO: 2904650 - RNA, 19 nt, Artificial Sequence
  Description of Artificial Sequence: Synthetic oligonucleotide
gucuccagaaaugacauca

SEQ ID NO: 2904651 - RNA, 19 nt, Artificial Sequence
  Description of Artificial Sequence: Synthetic oligonucleotide
auggucacuucuuuuguga

SEQ ID NO: 2904652 - RNA, 19 nt, Artificial Sequence
  Description of Artificial Sequence: Synthetic oligonucleotide
aaaagcuacuugguugcug

SEQ ID NO: 2904653 - RNA, 19 nt, Artificial Sequence
  Description of Artificial Sequence: Synthetic oligonucleotide
auuaauggucacuucuuuu

SEQ ID NO: 2904654 - RNA, 19 nt, Artificial Sequence
  Description of Artificial Sequence: Synthetic oligonucleotide
ucaaccuugucuccagaaa

SEQ ID NO: 2904655 - RNA, 19 nt, Artificial Sequence
  Description of Artificial Sequence: Synthetic oligonucleotide
cauuguuauuagguggucc

SEQ ID NO: 2904656 - RNA, 19 nt, Artificial Sequence
  Description of Artificial Sequence: Synthetic oligonucleotide
uguucacaggcccagucau

SEQ ID NO: 2904657 - RNA, 19 nt, Artificial Sequence
  Description of Artificial Sequence: Synthetic oligonucleotide
uucacaggcccagucauug

SEQ ID NO: 2904658 - RNA, 19 nt, Artificial Sequence
  Description of Artificial Sequence: Synthetic oligonucleotide
cauuguuaaagacaaugaa

SEQ ID NO: 2904659 - RNA, 19 nt, Artificial Sequence
  Description of Artificial Sequence: Synthetic oligonucleotide
accauguuccuuauuugac

SEQ ID NO: 2904660 - RNA, 19 nt, Artificial Sequence
  Description of Artificial Sequence: Synthetic oligonucleotide
agaaaugacaucacaguau

SEQ ID NO: 2904661 - RNA, 19 nt, Artificial Sequence
  Description of Artificial Sequence: Synthetic oligonucleotide
aucccagaaugucaggaug

SEQ ID NO: 2904662 - RNA, 19 nt, Artificial Sequence
  Description of Artificial Sequence: Synthetic oligonucleotide
gccaaaagcuacuugguug

SEQ ID NO: 2904663 - RNA, 19 nt, Artificial Sequence
  Description of Artificial Sequence: Synthetic oligonucleotide
ucuagcaucccagaauguc

SEQ ID NO: 2904664 - RNA, 19 nt, Artificial Sequence
  Description of Artificial Sequence: Synthetic oligonucleotide
caucgauguucacaggccc

SEQ ID NO: 2904665 - RNA, 19 nt, Artificial Sequence
  Description of Artificial Sequence: Synthetic oligonucleotide
aguggugucgggauuaaug

SEQ ID NO: 2904666 - RNA, 19 nt, Artificial Sequence
  Description of Artificial Sequence: Synthetic oligonucleotide
agaccagucuguaagguug

SEQ ID NO: 2904667 - RNA, 19 nt, Artificial Sequence
  Description of Artificial Sequence: Synthetic oligonucleotide
auaaggaugcgccaacaua

SEQ ID NO: 2904668 - RNA, 19 nt, Artificial Sequence
  Description of Artificial Sequence: Synthetic oligonucleotide
cuacauuucugaaggcaac

SEQ ID NO: 2904669 - RNA, 19 nt, Artificial Sequence
  Description of Artificial Sequence: Synthetic oligonucleotide
guccaauccagucauucac

SEQ ID NO: 2904670 - RNA, 19 nt, Artificial Sequence
  Description of Artificial Sequence: Synthetic oligonucleotide
cagucuguaagguuguuga

SEQ ID NO: 2904671 - RNA, 19 nt, Artificial Sequence
  Description of Artificial Sequence: Synthetic oligonucleotide
uugacauuacucgugugaa

SEQ ID NO: 2904672 - RNA, 19 nt, Artificial Sequence
  Description of Artificial Sequence: Synthetic oligonucleotide
gucauucacaucuuuucca

SEQ ID NO: 2904673 - RNA, 19 nt, Artificial Sequence
  Description of Artificial Sequence: Synthetic oligonucleotide
aagaccagucaucauuguu

SEQ ID NO: 2904674 - RNA, 19 nt, Artificial Sequence
  Description of Artificial Sequence: Synthetic oligonucleotide
guugcugccauuaucccac

SEQ ID NO: 2904675 - RNA, 19 nt, Artificial Sequence
  Description of Artificial Sequence: Synthetic oligonucleotide
uggaugcuccuccagcccc

SEQ ID NO: 2904676 - RNA, 19 nt, Artificial Sequence
  Description of Artificial Sequence: Synthetic oligonucleotide
uuccucugccaaaagcuac

SEQ ID NO: 2904677 - RNA, 19 nt, Artificial Sequence
  Description of Artificial Sequence: Synthetic oligonucleotide
uacauucuagcaucccaga

SEQ ID NO: 2904678 - RNA, 19 nt, Artificial Sequence
  Description of Artificial Sequence: Synthetic oligonucleotide
ccaaaagcuacuugguugc

SEQ ID NO: 2904679 - RNA, 19 nt, Artificial Sequence
  Description of Artificial Sequence: Synthetic oligonucleotide
aaagaccagucaucauugu

SEQ ID NO: 2904680 - RNA, 19 nt, Artificial Sequence
  Description of Artificial Sequence: Synthetic oligonucleotide
ugacuccauuguuauuagg

SEQ ID NO: 2904681 - RNA, 19 nt, Artificial Sequence
  Description of Artificial Sequence: Synthetic oligonucleotide
uuauacauucuagcauccc

SEQ ID NO: 2904682 - RNA, 19 nt, Artificial Sequence
  Description of Artificial Sequence: Synthetic oligonucleotide
agccauuuuauacauucua

SEQ ID NO: 2904683 - RNA, 19 nt, Artificial Sequence
  Description of Artificial Sequence: Synthetic oligonucleotide
gacuacauuucugaaggca

SEQ ID NO: 2904684 - RNA, 19 nt, Artificial Sequence
  Description of Artificial Sequence: Synthetic oligonucleotide
gacaucacaguaugugcca

SEQ ID NO: 2904685 - RNA, 19 nt, Artificial Sequence
  Description of Artificial Sequence: Synthetic oligonucleotide
aaccuugucuccagaaaug

SEQ ID NO: 2904686 - RNA, 19 nt, Artificial Sequence
  Description of Artificial Sequence: Synthetic oligonucleotide
aagaccagucuguaagguu

SEQ ID NO: 2904687 - RNA, 19 nt, Artificial Sequence
  Description of Artificial Sequence: Synthetic oligonucleotide
cauucaaccuugucuccag

SEQ ID NO: 2904688 - RNA, 19 nt, Artificial Sequence
  Description of Artificial Sequence: Synthetic oligonucleotide
ugaauccauaaggaugcgc

SEQ ID NO: 2904689 - RNA, 19 nt, Artificial Sequence
  Description of Artificial Sequence: Synthetic oligonucleotide
gauguucacaggcccaguc

SEQ ID NO: 2904690 - RNA, 19 nt, Artificial Sequence
  Description of Artificial Sequence: Synthetic oligonucleotide
uuaggugguccaauccagu

SEQ ID NO: 2904691 - RNA, 19 nt, Artificial Sequence
  Description of Artificial Sequence: Synthetic oligonucleotide
cuagcaucccagaauguca

SEQ ID NO: 2904692 - RNA, 19 nt, Artificial Sequence
  Description of Artificial Sequence: Synthetic oligonucleotide
uucaaccuugucuccagaa

SEQ ID NO: 2904693 - RNA, 19 nt, Artificial Sequence
  Description of Artificial Sequence: Synthetic oligonucleotide
uccauaaggaugcgccaac

SEQ ID NO: 2904694 - RNA, 19 nt, Artificial Sequence
  Description of Artificial Sequence: Synthetic oligonucleotide
agacaaugaauccucuguu

SEQ ID NO: 2904695 - RNA, 19 nt, Artificial Sequence
  Description of Artificial Sequence: Synthetic oligonucleotide
ucuccagaaaugacaucac

SEQ ID NO: 2904696 - RNA, 19 nt, Artificial Sequence
  Description of Artificial Sequence: Synthetic oligonucleotide
ucuguuuccucugccaaaa

SEQ ID NO: 2904697 - RNA, 19 nt, Artificial Sequence
  Description of Artificial Sequence: Synthetic oligonucleotide
uccucugccaaaagcuacu

SEQ ID NO: 2904698 - RNA, 19 nt, Artificial Sequence
  Description of Artificial Sequence: Synthetic oligonucleotide
uuucuugcccaacgguaac

SEQ ID NO: 2904699 - RNA, 19 nt, Artificial Sequence
  Description of Artificial Sequence: Synthetic oligonucleotide
gucacuucuuuugugacuc

SEQ ID NO: 2904700 - RNA, 19 nt, Artificial Sequence
  Description of Artificial Sequence: Synthetic oligonucleotide
ccauguuccuuauuugacg

SEQ ID NO: 2904701 - RNA, 19 nt, Artificial Sequence
  Description of Artificial Sequence: Synthetic oligonucleotide
augucaggauggaugcucc

SEQ ID NO: 2904702 - RNA, 19 nt, Artificial Sequence
  Description of Artificial Sequence: Synthetic oligonucleotide
ggaagaccagucuguaagg

SEQ ID NO: 2904703 - RNA, 19 nt, Artificial Sequence
  Description of Artificial Sequence: Synthetic oligonucleotide
guaugugccagcaggaaga

SEQ ID NO: 2904704 - RNA, 19 nt, Artificial Sequence
  Description of Artificial Sequence: Synthetic oligonucleotide
acuacauuucugaaggcaa

SEQ ID NO: 2904705 - RNA, 19 nt, Artificial Sequence
  Description of Artificial Sequence: Synthetic oligonucleotide
guugacaaagaccagucau

SEQ ID NO: 2904706 - RNA, 19 nt, Artificial Sequence
  Description of Artificial Sequence: Synthetic oligonucleotide
guaacuugacauuacucgu

SEQ ID NO: 2904707 - RNA, 19 nt, Artificial Sequence
  Description of Artificial Sequence: Synthetic oligonucleotide
cuugguugcugccauuauc

SEQ ID NO: 2904708 - RNA, 19 nt, Artificial Sequence
  Description of Artificial Sequence: Synthetic oligonucleotide
uugacgccaucgauguuca

SEQ ID NO: 2904709 - RNA, 19 nt, Artificial Sequence
  Description of Artificial Sequence: Synthetic oligonucleotide
acgguaacuugacauuacu

SEQ ID NO: 2904710 - RNA, 19 nt, Artificial Sequence
  Description of Artificial Sequence: Synthetic oligonucleotide
gacuccauuguuauuaggu

SEQ ID NO: 2904711 - RNA, 19 nt, Artificial Sequence
  Description of Artificial Sequence: Synthetic oligonucleotide
uacucgugugaauccauaa

SEQ ID NO: 2904712 - RNA, 19 nt, Artificial Sequence
  Description of Artificial Sequence: Synthetic oligonucleotide
auguucacaggcccaguca

SEQ ID NO: 2904713 - RNA, 19 nt, Artificial Sequence
  Description of Artificial Sequence: Synthetic oligonucleotide
ucgauguucacaggcccag

SEQ ID NO: 2904714 - RNA, 19 nt, Artificial Sequence
  Description of Artificial Sequence: Synthetic oligonucleotide
gucauugccacaaguggug

SEQ ID NO: 2904715 - RNA, 19 nt, Artificial Sequence
  Description of Artificial Sequence: Synthetic oligonucleotide
agucauugccacaaguggu

SEQ ID NO: 2904716 - RNA, 19 nt, Artificial Sequence
  Description of Artificial Sequence: Synthetic oligonucleotide
uggucacuucuuuugugac

SEQ ID NO: 2904717 - RNA, 19 nt, Artificial Sequence
  Description of Artificial Sequence: Synthetic oligonucleotide
uguuauuaggugguccaau

SEQ ID NO: 2904718 - RNA, 19 nt, Artificial Sequence
  Description of Artificial Sequence: Synthetic oligonucleotide
uuccauucuggaaguuucu

SEQ ID NO: 2904719 - RNA, 19 nt, Artificial Sequence
  Description of Artificial Sequence: Synthetic oligonucleotide
cacaggcccagucauugcc

SEQ ID NO: 2904720 - RNA, 19 nt, Artificial Sequence
  Description of Artificial Sequence: Synthetic oligonucleotide
ucacaguaugugccagcag

SEQ ID NO: 2904721 - RNA, 19 nt, Artificial Sequence
  Description of Artificial Sequence: Synthetic oligonucleotide
gccauuuuauacauucuag

SEQ ID NO: 2904722 - RNA, 19 nt, Artificial Sequence
  Description of Artificial Sequence: Synthetic oligonucleotide
ugacuacauuucugaaggc

SEQ ID NO: 2904723 - RNA, 19 nt, Artificial Sequence
  Description of Artificial Sequence: Synthetic oligonucleotide
gugacuccauuguuauuag

SEQ ID NO: 2904724 - RNA, 19 nt, Artificial Sequence
  Description of Artificial Sequence: Synthetic oligonucleotide
acauucuagcaucccagaa

SEQ ID NO: 2904725 - RNA, 19 nt, Artificial Sequence
  Description of Artificial Sequence: Synthetic oligonucleotide
ucccaccaguuugagaaag

SEQ ID NO: 2904726 - RNA, 19 nt, Artificial Sequence
  Description of Artificial Sequence: Synthetic oligonucleotide
gccaucgauguucacaggc

SEQ ID NO: 2904727 - RNA, 19 nt, Artificial Sequence
  Description of Artificial Sequence: Synthetic oligonucleotide
gaccagucaucauuguuaa

SEQ ID NO: 2904728 - RNA, 19 nt, Artificial Sequence
  Description of Artificial Sequence: Synthetic oligonucleotide
uuaucccaccaguuugaga

SEQ ID NO: 2904729 - RNA, 19 nt, Artificial Sequence
  Description of Artificial Sequence: Synthetic oligonucleotide
caucacaguaugugccagc

SEQ ID NO: 2904730 - RNA, 19 nt, Artificial Sequence
  Description of Artificial Sequence: Synthetic oligonucleotide
uaggugguccaauccaguc

SEQ ID NO: 2904731 - RNA, 19 nt, Artificial Sequence
  Description of Artificial Sequence: Synthetic oligonucleotide
cagaaaugacaucacagua

SEQ ID NO: 2904732 - RNA, 19 nt, Artificial Sequence
  Description of Artificial Sequence: Synthetic oligonucleotide
aucacaguaugugccagca

SEQ ID NO: 2904733 - RNA, 19 nt, Artificial Sequence
  Description of Artificial Sequence: Synthetic oligonucleotide
cagucaucauuguuaaaga

SEQ ID NO: 2904734 - RNA, 19 nt, Artificial Sequence
  Description of Artificial Sequence: Synthetic oligonucleotide
agaccagucaucauuguua

SEQ ID NO: 2904735 - RNA, 19 nt, Artificial Sequence
  Description of Artificial Sequence: Synthetic oligonucleotide
ucgggauuaauggucacuu

SEQ ID NO: 2904736 - RNA, 19 nt, Artificial Sequence
  Description of Artificial Sequence: Synthetic oligonucleotide
cauuaucccaccaguuuga

SEQ ID NO: 2904737 - RNA, 19 nt, Artificial Sequence
  Description of Artificial Sequence: Synthetic oligonucleotide
aaaugacaucacaguaugu

SEQ ID NO: 2904738 - RNA, 19 nt, Artificial Sequence
  Description of Artificial Sequence: Synthetic oligonucleotide
gacgccaucgauguucaca

SEQ ID NO: 2904739 - RNA, 19 nt, Artificial Sequence
  Description of Artificial Sequence: Synthetic oligonucleotide
uuacucgugugaauccaua

SEQ ID NO: 2904740 - RNA, 19 nt, Artificial Sequence
  Description of Artificial Sequence: Synthetic oligonucleotide
ugcccaacgguaacuugac

SEQ ID NO: 2904741 - RNA, 19 nt, Artificial Sequence
  Description of Artificial Sequence: Synthetic oligonucleotide
gucuguaagguuguugaca

SEQ ID NO: 2904742 - RNA, 19 nt, Artificial Sequence
  Description of Artificial Sequence: Synthetic oligonucleotide
ccaguuugagaaaggcugg

SEQ ID NO: 2904743 - RNA, 19 nt, Artificial Sequence
  Description of Artificial Sequence: Synthetic oligonucleotide
uggugucgggauuaauggu

SEQ ID NO: 2904744 - RNA, 19 nt, Artificial Sequence
  Description of Artificial Sequence: Synthetic oligonucleotide
ugguugcugccauuauccc

SEQ ID NO: 2904745 - RNA, 19 nt, Artificial Sequence
  Description of Artificial Sequence: Synthetic oligonucleotide
uugagaaaggcuggccacu

SEQ ID NO: 2904746 - RNA, 19 nt, Artificial Sequence
  Description of Artificial Sequence: Synthetic oligonucleotide
ccauuaucccaccaguuug

SEQ ID NO: 2904747 - RNA, 19 nt, Artificial Sequence
  Description of Artificial Sequence: Synthetic oligonucleotide
ccagucauugccacaagug

SEQ ID NO: 2904748 - RNA, 19 nt, Artificial Sequence
  Description of Artificial Sequence: Synthetic oligonucleotide
uucuagcaucccagaaugu

SEQ ID NO: 2904749 - RNA, 19 nt, Artificial Sequence
  Description of Artificial Sequence: Synthetic oligonucleotide
auuaucccaccaguuugag

SEQ ID NO: 2904750 - RNA, 19 nt, Artificial Sequence
  Description of Artificial Sequence: Synthetic oligonucleotide
aggauggaugcuccuccag

SEQ ID NO: 2904751 - RNA, 19 nt, Artificial Sequence
  Description of Artificial Sequence: Synthetic oligonucleotide
cagcaggaagaccagucug

SEQ ID NO: 2904752 - RNA, 19 nt, Artificial Sequence
  Description of Artificial Sequence: Synthetic oligonucleotide
acuugacauuacucgugug

SEQ ID NO: 2904753 - RNA, 19 nt, Artificial Sequence
  Description of Artificial Sequence: Synthetic oligonucleotide
agcaucccagaaugucagg

SEQ ID NO: 2904754 - RNA, 19 nt, Artificial Sequence
  Description of Artificial Sequence: Synthetic oligonucleotide
gcugccauuaucccaccag

SEQ ID NO: 2904755 - RNA, 19 nt, Artificial Sequence
  Description of Artificial Sequence: Synthetic oligonucleotide
ccaacagccauuuuauaca

SEQ ID NO: 2904756 - RNA, 19 nt, Artificial Sequence
  Description of Artificial Sequence: Synthetic oligonucleotide
ugacauuacucgugugaau

SEQ ID NO: 2904757 - RNA, 19 nt, Artificial Sequence
  Description of Artificial Sequence: Synthetic oligonucleotide
ggauggaugcuccuccagc

SEQ ID NO: 2904758 - RNA, 19 nt, Artificial Sequence
  Description of Artificial Sequence: Synthetic oligonucleotide
acaucacaguaugugccag

SEQ ID NO: 2904759 - RNA, 19 nt, Artificial Sequence
  Description of Artificial Sequence: Synthetic oligonucleotide
guuguugacaaagaccagu

SEQ ID NO: 2904760 - RNA, 19 nt, Artificial Sequence
  Description of Artificial Sequence: Synthetic oligonucleotide
accuugucuccagaaauga

SEQ ID NO: 2904761 - RNA, 19 nt, Artificial Sequence
  Description of Artificial Sequence: Synthetic oligonucleotide
caucuuuuccauucuggaa

SEQ ID NO: 2904762 - RNA, 19 nt, Artificial Sequence
  Description of Artificial Sequence: Synthetic oligonucleotide
aguuucuugcccaacggua

SEQ ID NO: 2904763 - RNA, 19 nt, Artificial Sequence
  Description of Artificial Sequence: Synthetic oligonucleotide
ugccauuaucccaccaguu

SEQ ID NO: 2904764 - RNA, 19 nt, Artificial Sequence
  Description of Artificial Sequence: Synthetic oligonucleotide
uuccuuauuugacgccauc

SEQ ID NO: 2904765 - RNA, 19 nt, Artificial Sequence
  Description of Artificial Sequence: Synthetic oligonucleotide
ggaugcgccaacauaaauc

SEQ ID NO: 2904766 - RNA, 19 nt, Artificial Sequence
  Description of Artificial Sequence: Synthetic oligonucleotide
uggccacugacuacauuuc

SEQ ID NO: 2904767 - RNA, 19 nt, Artificial Sequence
  Description of Artificial Sequence: Synthetic oligonucleotide
gauuaauggucacuucuuu

SEQ ID NO: 2904768 - RNA, 19 nt, Artificial Sequence
  Description of Artificial Sequence: Synthetic oligonucleotide
guaagguuguugacaaaga

SEQ ID NO: 2904769 - RNA, 19 nt, Artificial Sequence
  Description of Artificial Sequence: Synthetic oligonucleotide
cuugcccaacgguaacuug

SEQ ID NO: 2904770 - RNA, 19 nt, Artificial Sequence
  Description of Artificial Sequence: Synthetic oligonucleotide
uccagucauucacaucuuu

SEQ ID NO: 2904771 - RNA, 19 nt, Artificial Sequence
  Description of Artificial Sequence: Synthetic oligonucleotide
ugccacaaguggugucggg

SEQ ID NO: 2904772 - RNA, 19 nt, Artificial Sequence
  Description of Artificial Sequence: Synthetic oligonucleotide
ucauugccacaaguggugu

SEQ ID NO: 2904773 - RNA, 19 nt, Artificial Sequence
  Description of Artificial Sequence: Synthetic oligonucleotide
uacuugguugcugccauua

SEQ ID NO: 2904774 - RNA, 19 nt, Artificial Sequence
  Description of Artificial Sequence: Synthetic oligonucleotide
ucacuucuuuugugacucc

SEQ ID NO: 2904775 - RNA, 19 nt, Artificial Sequence
  Description of Artificial Sequence: Synthetic oligonucleotide
agcaggaagaccagucugu

SEQ ID NO: 2904776 - RNA, 19 nt, Artificial Sequence
  Description of Artificial Sequence: Synthetic oligonucleotide
caauccagucauucacauc

SEQ ID NO: 2904777 - RNA, 19 nt, Artificial Sequence
  Description of Artificial Sequence: Synthetic oligonucleotide
caguuugagaaaggcuggc

SEQ ID NO: 2904778 - RNA, 19 nt, Artificial Sequence
  Description of Artificial Sequence: Synthetic oligonucleotide
gggauuaauggucacuucu

SEQ ID NO: 2904779 - RNA, 19 nt, Artificial Sequence
  Description of Artificial Sequence: Synthetic oligonucleotide
uugccacaaguggugucgg

SEQ ID NO: 2904780 - RNA, 19 nt, Artificial Sequence
  Description of Artificial Sequence: Synthetic oligonucleotide
acaguaugugccagcagga

SEQ ID NO: 2904781 - RNA, 19 nt, Artificial Sequence
  Description of Artificial Sequence: Synthetic oligonucleotide
aggaugcgccaacauaaau

SEQ ID NO: 2904782 - RNA, 19 nt, Artificial Sequence
  Description of Artificial Sequence: Synthetic oligonucleotide
ccaucgauguucacaggcc

SEQ ID NO: 2904783 - RNA, 19 nt, Artificial Sequence
  Description of Artificial Sequence: Synthetic oligonucleotide
auucaaccuugucuccaga

SEQ ID NO: 2904784 - RNA, 19 nt, Artificial Sequence
  Description of Artificial Sequence: Synthetic oligonucleotide
uuguuauuaggugguccaa

SEQ ID NO: 2904785 - RNA, 19 nt, Artificial Sequence
  Description of Artificial Sequence: Synthetic oligonucleotide
gacaaugaauccucuguuu

SEQ ID NO: 2904786 - RNA, 19 nt, Artificial Sequence
  Description of Artificial Sequence: Synthetic oligonucleotide
ucacaggcccagucauugc

SEQ ID NO: 2904787 - RNA, 19 nt, Artificial Sequence
  Description of Artificial Sequence: Synthetic oligonucleotide
uaugugccagcaggaagac

SEQ ID NO: 2904788 - RNA, 19 nt, Artificial Sequence
  Description of Artificial Sequence: Synthetic oligonucleotide
uucuugcccaacgguaacu

SEQ ID NO: 2904789 - RNA, 19 nt, Artificial Sequence
  Description of Artificial Sequence: Synthetic oligonucleotide
ggugucgggauuaaugguc

SEQ ID NO: 2904790 - RNA, 19 nt, Artificial Sequence
  Description of Artificial Sequence: Synthetic oligonucleotide
guuucuugcccaacgguaa

SEQ ID NO: 2904791 - RNA, 19 nt, Artificial Sequence
  Description of Artificial Sequence: Synthetic oligonucleotide
cucugccaaaagcuacuug

SEQ ID NO: 2904792 - RNA, 19 nt, Artificial Sequence
  Description of Artificial Sequence: Synthetic oligonucleotide
cauugccacaagugguguc

SEQ ID NO: 2904793 - RNA, 19 nt, Artificial Sequence
  Description of Artificial Sequence: Synthetic oligonucleotide
cauuacucgugugaaucca

SEQ ID NO: 2904794 - RNA, 19 nt, Artificial Sequence
  Description of Artificial Sequence: Synthetic oligonucleotide
acaaguggugucgggauua

SEQ ID NO: 2904795 - RNA, 19 nt, Artificial Sequence
  Description of Artificial Sequence: Synthetic oligonucleotide
ugucaggauggaugcuccu

SEQ ID NO: 2904796 - RNA, 19 nt, Artificial Sequence
  Description of Artificial Sequence: Synthetic oligonucleotide
auccauaaggaugcgccaa

SEQ ID NO: 2904797 - RNA, 19 nt, Artificial Sequence
  Description of Artificial Sequence: Synthetic oligonucleotide
cuccuccagccccaugucc

SEQ ID NO: 2904798 - RNA, 19 nt, Artificial Sequence
  Description of Artificial Sequence: Synthetic oligonucleotide
agcuacuugguugcugcca

SEQ ID NO: 2904799 - RNA, 19 nt, Artificial Sequence
  Description of Artificial Sequence: Synthetic oligonucleotide
cuuauuugacgccaucgau

SEQ ID NO: 2904800 - RNA, 19 nt, Artificial Sequence
  Description of Artificial Sequence: Synthetic oligonucleotide
cauaaauccaacagccauu

SEQ ID NO: 2904801 - RNA, 19 nt, Artificial Sequence
  Description of Artificial Sequence: Synthetic oligonucleotide
uucugaaggcaaccauguu

SEQ ID NO: 2904802 - RNA, 19 nt, Artificial Sequence
  Description of Artificial Sequence: Synthetic oligonucleotide
ugucuccagaaaugacauc

SEQ ID NO: 2904803 - RNA, 19 nt, Artificial Sequence
  Description of Artificial Sequence: Synthetic oligonucleotide
ugaaggcaaccauguuccu

SEQ ID NO: 2904804 - RNA, 19 nt, Artificial Sequence
  Description of Artificial Sequence: Synthetic oligonucleotide
ugucgggauuaauggucac

SEQ ID NO: 2904805 - RNA, 19 nt, Artificial Sequence
  Description of Artificial Sequence: Synthetic oligonucleotide
cauucuagcaucccagaau

SEQ ID NO: 2904806 - RNA, 19 nt, Artificial Sequence
  Description of Artificial Sequence: Synthetic oligonucleotide
ugcugccauuaucccacca

SEQ ID NO: 2904807 - RNA, 19 nt, Artificial Sequence
  Description of Artificial Sequence: Synthetic oligonucleotide
gguugcugccauuauccca

SEQ ID NO: 2904808 - RNA, 19 nt, Artificial Sequence
  Description of Artificial Sequence: Synthetic oligonucleotide
ucuugcccaacgguaacuu

SEQ ID NO: 2904809 - RNA, 19 nt, Artificial Sequence
  Description of Artificial Sequence: Synthetic oligonucleotide
cuggccacugacuacauuu

SEQ ID NO: 2904810 - RNA, 19 nt, Artificial Sequence
  Description of Artificial Sequence: Synthetic oligonucleotide
uggaaguuucuugcccaac

SEQ ID NO: 2904811 - RNA, 19 nt, Artificial Sequence
  Description of Artificial Sequence: Synthetic oligonucleotide
gugaauccauaaggaugcg

SEQ ID NO: 2904812 - RNA, 19 nt, Artificial Sequence
  Description of Artificial Sequence: Synthetic oligonucleotide
aaggaugcgccaacauaaa

SEQ ID NO: 2904813 - RNA, 19 nt, Artificial Sequence
  Description of Artificial Sequence: Synthetic oligonucleotide
aggcuggccacugacuaca

SEQ ID NO: 2904814 - RNA, 19 nt, Artificial Sequence
  Description of Artificial Sequence: Synthetic oligonucleotide
gcaaccauguuccuuauuu

SEQ ID NO: 2904815 - RNA, 19 nt, Artificial Sequence
  Description of Artificial Sequence: Synthetic oligonucleotide
acuugguugcugccauuau

SEQ ID NO: 2904816 - RNA, 19 nt, Artificial Sequence
  Description of Artificial Sequence: Synthetic oligonucleotide
uaaauccaacagccauuuu

SEQ ID NO: 2904817 - RNA, 19 nt, Artificial Sequence
  Description of Artificial Sequence: Synthetic oligonucleotide
aucgauguucacaggccca

SEQ ID NO: 2904818 - RNA, 19 nt, Artificial Sequence
  Description of Artificial Sequence: Synthetic oligonucleotide
auuacucgugugaauccau

SEQ ID NO: 2904819 - RNA, 19 nt, Artificial Sequence
  Description of Artificial Sequence: Synthetic oligonucleotide
gguccaauccagucauuca

SEQ ID NO: 2904820 - RNA, 19 nt, Artificial Sequence
  Description of Artificial Sequence: Synthetic oligonucleotide
gaagaccagucuguaaggu

SEQ ID NO: 2904821 - RNA, 19 nt, Artificial Sequence
  Description of Artificial Sequence: Synthetic oligonucleotide
gugucgggauuaaugguca

SEQ ID NO: 2904822 - RNA, 19 nt, Artificial Sequence
  Description of Artificial Sequence: Synthetic oligonucleotide
cuguuuccucugccaaaag

SEQ ID NO: 2904823 - RNA, 19 nt, Artificial Sequence
  Description of Artificial Sequence: Synthetic oligonucleotide
acuucuuuugugacuccau

SEQ ID NO: 2904824 - RNA, 19 nt, Artificial Sequence
  Description of Artificial Sequence: Synthetic oligonucleotide
ccacugacuacauuucuga

SEQ ID NO: 2904825 - RNA, 19 nt, Artificial Sequence
  Description of Artificial Sequence: Synthetic oligonucleotide
ccaccaguuugagaaaggc

SEQ ID NO: 2904826 - RNA, 19 nt, Artificial Sequence
  Description of Artificial Sequence: Synthetic oligonucleotide
gucaggauggaugcuccuc

SEQ ID NO: 2904827 - RNA, 19 nt, Artificial Sequence
  Description of Artificial Sequence: Synthetic oligonucleotide
ccuuauuugacgccaucga

SEQ ID NO: 2904828 - RNA, 19 nt, Artificial Sequence
  Description of Artificial Sequence: Synthetic oligonucleotide
auccaacagccauuuuaua

SEQ ID NO: 2904829 - RNA, 19 nt, Artificial Sequence
  Description of Artificial Sequence: Synthetic oligonucleotide
ccagaaaugacaucacagu

SEQ ID NO: 2904830 - RNA, 19 nt, Artificial Sequence
  Description of Artificial Sequence: Synthetic oligonucleotide
gccacugacuacauuucug

SEQ ID NO: 2904831 - RNA, 19 nt, Artificial Sequence
  Description of Artificial Sequence: Synthetic oligonucleotide
uugcugccauuaucccacc

SEQ ID NO: 2904832 - RNA, 19 nt, Artificial Sequence
  Description of Artificial Sequence: Synthetic oligonucleotide
cacugacuacauuucugaa

SEQ ID NO: 2904833 - RNA, 19 nt, Artificial Sequence
  Description of Artificial Sequence: Synthetic oligonucleotide
cacuucuuuugugacucca

SEQ ID NO: 2904834 - RNA, 19 nt, Artificial Sequence
  Description of Artificial Sequence: Synthetic oligonucleotide
cccaccaguuugagaaagg

SEQ ID NO: 2904835 - RNA, 19 nt, Artificial Sequence
  Description of Artificial Sequence: Synthetic oligonucleotide
aacagccauuuuauacauu

SEQ ID NO: 2904836 - RNA, 19 nt, Artificial Sequence
  Description of Artificial Sequence: Synthetic oligonucleotide
uugugacuccauuguuauu

SEQ ID NO: 2904837 - RNA, 19 nt, Artificial Sequence
  Description of Artificial Sequence: Synthetic oligonucleotide
gguuguugacaaagaccag

SEQ ID NO: 2904838 - RNA, 19 nt, Artificial Sequence
  Description of Artificial Sequence: Synthetic oligonucleotide
caccaguuugagaaaggcu

SEQ ID NO: 2904839 - RNA, 19 nt, Artificial Sequence
  Description of Artificial Sequence: Synthetic oligonucleotide
caacagccauuuuauacau

SEQ ID NO: 2904840 - RNA, 19 nt, Artificial Sequence
  Description of Artificial Sequence: Synthetic oligonucleotide
gacaaagaccagucaucau

SEQ ID NO: 2904841 - RNA, 19 nt, Artificial Sequence
  Description of Artificial Sequence: Synthetic oligonucleotide
aucccaccaguuugagaaa

SEQ ID NO: 2904842 - RNA, 19 nt, Artificial Sequence
  Description of Artificial Sequence: Synthetic oligonucleotide
cugccaaaagcuacuuggu

SEQ ID NO: 2904843 - RNA, 19 nt, Artificial Sequence
  Description of Artificial Sequence: Synthetic oligonucleotide
cugccauuaucccaccagu

SEQ ID NO: 2904844 - RNA, 19 nt, Artificial Sequence
  Description of Artificial Sequence: Synthetic oligonucleotide
caggauggaugcuccucca

SEQ ID NO: 2904845 - RNA, 19 nt, Artificial Sequence
  Description of Artificial Sequence: Synthetic oligonucleotide
aaguggugucgggauuaau

SEQ ID NO: 2904846 - RNA, 19 nt, Artificial Sequence
  Description of Artificial Sequence: Synthetic oligonucleotide
cgguaacuugacauuacuc

SEQ ID NO: 2904847 - RNA, 19 nt, Artificial Sequence
  Description of Artificial Sequence: Synthetic oligonucleotide
cuucuuuugugacuccauu

SEQ ID NO: 2904848 - RNA, 19 nt, Artificial Sequence
  Description of Artificial Sequence: Synthetic oligonucleotide
auuugacgccaucgauguu

SEQ ID NO: 2904849 - RNA, 19 nt, Artificial Sequence
  Description of Artificial Sequence: Synthetic oligonucleotide
cuuuugugacuccauuguu

SEQ ID NO: 2904850 - RNA, 19 nt, Artificial Sequence
  Description of Artificial Sequence: Synthetic oligonucleotide
ccagucuguaagguuguug

SEQ ID NO: 2904851 - RNA, 19 nt, Artificial Sequence
  Description of Artificial Sequence: Synthetic oligonucleotide
ggucacuucuuuugugacu

SEQ ID NO: 2904852 - RNA, 19 nt, Artificial Sequence
  Description of Artificial Sequence: Synthetic oligonucleotide
aggcaaccauguuccuuau

SEQ ID NO: 2904853 - RNA, 19 nt, Artificial Sequence
  Description of Artificial Sequence: Synthetic oligonucleotide
gaaggcaaccauguuccuu

SEQ ID NO: 2904854 - RNA, 19 nt, Artificial Sequence
  Description of Artificial Sequence: Synthetic oligonucleotide
gccacaaguggugucggga

SEQ ID NO: 2904855 - RNA, 19 nt, Artificial Sequence
  Description of Artificial Sequence: Synthetic oligonucleotide
gaaugucaggauggaugcu

SEQ ID NO: 2904856 - RNA, 19 nt, Artificial Sequence
  Description of Artificial Sequence: Synthetic oligonucleotide
cuguaagguuguugacaaa

SEQ ID NO: 2904857 - RNA, 19 nt, Artificial Sequence
  Description of Artificial Sequence: Synthetic oligonucleotide
gucgggauuaauggucacu

SEQ ID NO: 2904858 - RNA, 19 nt, Artificial Sequence
  Description of Artificial Sequence: Synthetic oligonucleotide
augcgccaacauaaaucca

SEQ ID NO: 2904859 - RNA, 19 nt, Artificial Sequence
  Description of Artificial Sequence: Synthetic oligonucleotide
caguaugugccagcaggaa

SEQ ID NO: 2904860 - RNA, 19 nt, Artificial Sequence
  Description of Artificial Sequence: Synthetic oligonucleotide
ggcccagucauugccacaa

SEQ ID NO: 2904861 - RNA, 19 nt, Artificial Sequence
  Description of Artificial Sequence: Synthetic oligonucleotide
gcgccaacauaaauccaac

SEQ ID NO: 2904862 - RNA, 19 nt, Artificial Sequence
  Description of Artificial Sequence: Synthetic oligonucleotide
gccauuaucccaccaguuu

SEQ ID NO: 2904863 - RNA, 19 nt, Artificial Sequence
  Description of Artificial Sequence: Synthetic oligonucleotide
ggauuaauggucacuucuu

SEQ ID NO: 2904864 - RNA, 19 nt, Artificial Sequence
  Description of Artificial Sequence: Synthetic oligonucleotide
gcuacuugguugcugccau

SEQ ID NO: 2904865 - RNA, 19 nt, Artificial Sequence
  Description of Artificial Sequence: Synthetic oligonucleotide
ugacgccaucgauguucac

SEQ ID NO: 2904866 - RNA, 19 nt, Artificial Sequence
  Description of Artificial Sequence: Synthetic oligonucleotide
augcuccuccagccccaug

SEQ ID NO: 2904867 - RNA, 19 nt, Artificial Sequence
  Description of Artificial Sequence: Synthetic oligonucleotide
ccauucaaccuugucucca

SEQ ID NO: 2904868 - RNA, 19 nt, Artificial Sequence
  Description of Artificial Sequence: Synthetic oligonucleotide
caucauuguuaaagacaau

SEQ ID NO: 2904869 - RNA, 19 nt, Artificial Sequence
  Description of Artificial Sequence: Synthetic oligonucleotide
ccauuguuauuaggugguc

SEQ ID NO: 2904870 - RNA, 19 nt, Artificial Sequence
  Description of Artificial Sequence: Synthetic oligonucleotide
ccucuguuuccucugccaa

SEQ ID NO: 2904871 - RNA, 19 nt, Artificial Sequence
  Description of Artificial Sequence: Synthetic oligonucleotide
caaguggugucgggauuaa

SEQ ID NO: 2904872 - RNA, 19 nt, Artificial Sequence
  Description of Artificial Sequence: Synthetic oligonucleotide
ccaauccagucauucacau

SEQ ID NO: 2904873 - RNA, 19 nt, Artificial Sequence
  Description of Artificial Sequence: Synthetic oligonucleotide
accagucuguaagguuguu

SEQ ID NO: 2904874 - RNA, 19 nt, Artificial Sequence
  Description of Artificial Sequence: Synthetic oligonucleotide
cgggauuaauggucacuuc

SEQ ID NO: 2904875 - RNA, 19 nt, Artificial Sequence
  Description of Artificial Sequence: Synthetic oligonucleotide
ccauaaggaugcgccaaca

SEQ ID NO: 2904876 - RNA, 19 nt, Artificial Sequence
  Description of Artificial Sequence: Synthetic oligonucleotide
caaaagcuacuugguugcu

SEQ ID NO: 2904877 - RNA, 19 nt, Artificial Sequence
  Description of Artificial Sequence: Synthetic oligonucleotide
ccagucauucacaucuuuu

SEQ ID NO: 2904878 - RNA, 19 nt, Artificial Sequence
  Description of Artificial Sequence: Synthetic oligonucleotide
cgugugaauccauaaggau

SEQ ID NO: 2904879 - RNA, 19 nt, Artificial Sequence
  Description of Artificial Sequence: Synthetic oligonucleotide
ggaugcuccuccagcccca

SEQ ID NO: 2904880 - RNA, 19 nt, Artificial Sequence
  Description of Artificial Sequence: Synthetic oligonucleotide
cgccaacauaaauccaaca

SEQ ID NO: 2904881 - RNA, 19 nt, Artificial Sequence
  Description of Artificial Sequence: Synthetic oligonucleotide
cacaaguggugucgggauu

SEQ ID NO: 2904882 - RNA, 19 nt, Artificial Sequence
  Description of Artificial Sequence: Synthetic oligonucleotide
gcccaacgguaacuugaca

SEQ ID NO: 2904883 - RNA, 19 nt, Artificial Sequence
  Description of Artificial Sequence: Synthetic oligonucleotide
ccagcaggaagaccagucu

SEQ ID NO: 2904884 - RNA, 19 nt, Artificial Sequence
  Description of Artificial Sequence: Synthetic oligonucleotide
cccagaaugucaggaugga

SEQ ID NO: 2904885 - RNA, 19 nt, Artificial Sequence
  Description of Artificial Sequence: Synthetic oligonucleotide
cccagucauugccacaagu

SEQ ID NO: 2904886 - RNA, 19 nt, Artificial Sequence
  Description of Artificial Sequence: Synthetic oligonucleotide
cgccaucgauguucacagg

SEQ ID NO: 2904887 - RNA, 19 nt, Artificial Sequence
  Description of Artificial Sequence: Synthetic oligonucleotide
ccacaaguggugucgggau

SEQ ID NO: 2904888 - RNA, 19 nt, Artificial Sequence
  Description of Artificial Sequence: Synthetic oligonucleotide
guucacaggcccagucauu

SEQ ID NO: 2904889 - RNA, 19 nt, Artificial Sequence
  Description of Artificial Sequence: Synthetic oligonucleotide
cuacuugguugcugccauu

SEQ ID NO: 2904890 - RNA, 19 nt, Artificial Sequence
  Description of Artificial Sequence: Synthetic oligonucleotide
ccagaaugucaggauggau

SEQ ID NO: 2904891 - RNA, 19 nt, Artificial Sequence
  Description of Artificial Sequence: Synthetic oligonucleotide
gcuggccacugacuacauu

SEQ ID NO: 2904892 - RNA, 19 nt, Artificial Sequence
  Description of Artificial Sequence: Synthetic oligonucleotide
gugguccaauccagucauu

SEQ ID NO: 2904893 - RNA, 19 nt, Artificial Sequence
  Description of Artificial Sequence: Synthetic oligonucleotide
ccucugccaaaagcuacuu

SEQ ID NO: 2904894 - RNA, 19 nt, Artificial Sequence
  Description of Artificial Sequence: Synthetic oligonucleotide
ggcuggccacugacuacau

SEQ ID NO: 2904895 - RNA, 19 nt, Artificial Sequence
  Description of Artificial Sequence: Synthetic oligonucleotide
cgauguucacaggcccagu

SEQ ID NO: 2904896 - RNA, 19 nt, Artificial Sequence
  Description of Artificial Sequence: Synthetic oligonucleotide
aguuuugacaccuauaacc

SEQ ID NO: 2904897 - RNA, 19 nt, Artificial Sequence
  Description of Artificial Sequence: Synthetic oligonucleotide
aaaagcuggauauagcugc

SEQ ID NO: 2904898 - RNA, 19 nt, Artificial Sequence
  Description of Artificial Sequence: Synthetic oligonucleotide
aauaaauacaauagugagc

SEQ ID NO: 2904899 - RNA, 19 nt, Artificial Sequence
  Description of Artificial Sequence: Synthetic oligonucleotide
gaauaaauacaauagugag

SEQ ID NO: 2904900 - RNA, 19 nt, Artificial Sequence
  Description of Artificial Sequence: Synthetic oligonucleotide
auaaauaauaaauaggaau

SEQ ID NO: 2904901 - RNA, 19 nt, Artificial Sequence
  Description of Artificial Sequence: Synthetic oligonucleotide
acagauuaaguuuuacucc

SEQ ID NO: 2904902 - RNA, 19 nt, Artificial Sequence
  Description of Artificial Sequence: Synthetic oligonucleotide
aaauacaauagugagcaac

SEQ ID NO: 2904903 - RNA, 19 nt, Artificial Sequence
  Description of Artificial Sequence: Synthetic oligonucleotide
aaugccugugaacagcucc

SEQ ID NO: 2904904 - RNA, 19 nt, Artificial Sequence
  Description of Artificial Sequence: Synthetic oligonucleotide
uuaggaaauaaauaaauaa

SEQ ID NO: 2904905 - RNA, 19 nt, Artificial Sequence
  Description of Artificial Sequence: Synthetic oligonucleotide
uagugagcaacacugaagg

SEQ ID NO: 2904906 - RNA, 19 nt, Artificial Sequence
  Description of Artificial Sequence: Synthetic oligonucleotide
uuugguuccauucugccag

SEQ ID NO: 2904907 - RNA, 19 nt, Artificial Sequence
  Description of Artificial Sequence: Synthetic oligonucleotide
uagaauguagcuaugcgag

SEQ ID NO: 2904908 - RNA, 19 nt, Artificial Sequence
  Description of Artificial Sequence: Synthetic oligonucleotide
aucuuauagcgauucagcc

SEQ ID NO: 2904909 - RNA, 19 nt, Artificial Sequence
  Description of Artificial Sequence: Synthetic oligonucleotide
uacagauuaaguuuuacuc

SEQ ID NO: 2904910 - RNA, 19 nt, Artificial Sequence
  Description of Artificial Sequence: Synthetic oligonucleotide
ucgaauauugcuuugguuc

SEQ ID NO: 2904911 - RNA, 19 nt, Artificial Sequence
  Description of Artificial Sequence: Synthetic oligonucleotide
uaggaaauaaauaaauaau

SEQ ID NO: 2904912 - RNA, 19 nt, Artificial Sequence
  Description of Artificial Sequence: Synthetic oligonucleotide
uguuaggaaauaaauaaau

SEQ ID NO: 2904913 - RNA, 19 nt, Artificial Sequence
  Description of Artificial Sequence: Synthetic oligonucleotide
ugaaggagaguuuugacac

SEQ ID NO: 2904914 - RNA, 19 nt, Artificial Sequence
  Description of Artificial Sequence: Synthetic oligonucleotide
auaggaauaaauacaauag

SEQ ID NO: 2904915 - RNA, 19 nt, Artificial Sequence
  Description of Artificial Sequence: Synthetic oligonucleotide
agccgaaucaucuuauagc

SEQ ID NO: 2904916 - RNA, 19 nt, Artificial Sequence
  Description of Artificial Sequence: Synthetic oligonucleotide
uuugacaccuauaacccag

SEQ ID NO: 2904917 - RNA, 19 nt, Artificial Sequence
  Description of Artificial Sequence: Synthetic oligonucleotide
ucaauguuaggaaauaaau

SEQ ID NO: 2904918 - RNA, 19 nt, Artificial Sequence
  Description of Artificial Sequence: Synthetic oligonucleotide
aaagccugaauaucaaugu

SEQ ID NO: 2904919 - RNA, 19 nt, Artificial Sequence
  Description of Artificial Sequence: Synthetic oligonucleotide
ugcaguaccagguccaugg

SEQ ID NO: 2904920 - RNA, 19 nt, Artificial Sequence
  Description of Artificial Sequence: Synthetic oligonucleotide
acaccuauaacccagcgcu

SEQ ID NO: 2904921 - RNA, 19 nt, Artificial Sequence
  Description of Artificial Sequence: Synthetic oligonucleotide
uuagaauguagcuaugcga

SEQ ID NO: 2904922 - RNA, 19 nt, Artificial Sequence
  Description of Artificial Sequence: Synthetic oligonucleotide
ucuggcagacaaaagcugg

SEQ ID NO: 2904923 - RNA, 19 nt, Artificial Sequence
  Description of Artificial Sequence: Synthetic oligonucleotide
auaaauaggaauaaauaca

SEQ ID NO: 2904924 - RNA, 19 nt, Artificial Sequence
  Description of Artificial Sequence: Synthetic oligonucleotide
aaucaucuuauagcgauuc

SEQ ID NO: 2904925 - RNA, 19 nt, Artificial Sequence
  Description of Artificial Sequence: Synthetic oligonucleotide
ucuucuguuaagcagugcu

SEQ ID NO: 2904926 - RNA, 19 nt, Artificial Sequence
  Description of Artificial Sequence: Synthetic oligonucleotide
uaugcgagagguuuuguag

SEQ ID NO: 2904927 - RNA, 19 nt, Artificial Sequence
  Description of Artificial Sequence: Synthetic oligonucleotide
acaaaagcuggauauagcu

SEQ ID NO: 2904928 - RNA, 19 nt, Artificial Sequence
  Description of Artificial Sequence: Synthetic oligonucleotide
cagauuaaguuuuacuccc

SEQ ID NO: 2904929 - RNA, 19 nt, Artificial Sequence
  Description of Artificial Sequence: Synthetic oligonucleotide
uagcgauucagccucacag

SEQ ID NO: 2904930 - RNA, 19 nt, Artificial Sequence
  Description of Artificial Sequence: Synthetic oligonucleotide
uaggaauaaauacaauagu

SEQ ID NO: 2904931 - RNA, 19 nt, Artificial Sequence
  Description of Artificial Sequence: Synthetic oligonucleotide
aauacaauagugagcaaca

SEQ ID NO: 2904932 - RNA, 19 nt, Artificial Sequence
  Description of Artificial Sequence: Synthetic oligonucleotide
ugaauaucaauguuaggaa

SEQ ID NO: 2904933 - RNA, 19 nt, Artificial Sequence
  Description of Artificial Sequence: Synthetic oligonucleotide
uuuguagccauucucuuuc

SEQ ID NO: 2904934 - RNA, 19 nt, Artificial Sequence
  Description of Artificial Sequence: Synthetic oligonucleotide
cuuagaauguagcuaugcg

SEQ ID NO: 2904935 - RNA, 19 nt, Artificial Sequence
  Description of Artificial Sequence: Synthetic oligonucleotide
cuuauagcgauucagccuc

SEQ ID NO: 2904936 - RNA, 19 nt, Artificial Sequence
  Description of Artificial Sequence: Synthetic oligonucleotide
aauguagcuaugcgagagg

SEQ ID NO: 2904937 - RNA, 19 nt, Artificial Sequence
  Description of Artificial Sequence: Synthetic oligonucleotide
agaguuuugacaccuauaa

SEQ ID NO: 2904938 - RNA, 19 nt, Artificial Sequence
  Description of Artificial Sequence: Synthetic oligonucleotide
uuggaaaugccugugaaca

SEQ ID NO: 2904939 - RNA, 19 nt, Artificial Sequence
  Description of Artificial Sequence: Synthetic oligonucleotide
aggaauaaauacaauagug

SEQ ID NO: 2904940 - RNA, 19 nt, Artificial Sequence
  Description of Artificial Sequence: Synthetic oligonucleotide
uucucuuucaggcugucga

SEQ ID NO: 2904941 - RNA, 19 nt, Artificial Sequence
  Description of Artificial Sequence: Synthetic oligonucleotide
cugaauaucaauguuagga

SEQ ID NO: 2904942 - RNA, 19 nt, Artificial Sequence
  Description of Artificial Sequence: Synthetic oligonucleotide
aauaauaaauaggaauaaa

SEQ ID NO: 2904943 - RNA, 19 nt, Artificial Sequence
  Description of Artificial Sequence: Synthetic oligonucleotide
ugagcaacacugaaggaga

SEQ ID NO: 2904944 - RNA, 19 nt, Artificial Sequence
  Description of Artificial Sequence: Synthetic oligonucleotide
uugaggucugccccgaagg

SEQ ID NO: 2904945 - RNA, 19 nt, Artificial Sequence
  Description of Artificial Sequence: Synthetic oligonucleotide
uagccauucucuuucaggc

SEQ ID NO: 2904946 - RNA, 19 nt, Artificial Sequence
  Description of Artificial Sequence: Synthetic oligonucleotide
aauagugagcaacacugaa

SEQ ID NO: 2904947 - RNA, 19 nt, Artificial Sequence
  Description of Artificial Sequence: Synthetic oligonucleotide
caucuuauagcgauucagc

SEQ ID NO: 2904948 - RNA, 19 nt, Artificial Sequence
  Description of Artificial Sequence: Synthetic oligonucleotide
aauaucaauguuaggaaau

SEQ ID NO: 2904949 - RNA, 19 nt, Artificial Sequence
  Description of Artificial Sequence: Synthetic oligonucleotide
gaaagccugaauaucaaug

SEQ ID NO: 2904950 - RNA, 19 nt, Artificial Sequence
  Description of Artificial Sequence: Synthetic oligonucleotide
ccgaaggucauuaagagcc

SEQ ID NO: 2904951 - RNA, 19 nt, Artificial Sequence
  Description of Artificial Sequence: Synthetic oligonucleotide
augcgagagguuuuguagc

SEQ ID NO: 2904952 - RNA, 19 nt, Artificial Sequence
  Description of Artificial Sequence: Synthetic oligonucleotide
ucaucuuauagcgauucag

SEQ ID NO: 2904953 - RNA, 19 nt, Artificial Sequence
  Description of Artificial Sequence: Synthetic oligonucleotide
ucuuauagcgauucagccu

SEQ ID NO: 2904954 - RNA, 19 nt, Artificial Sequence
  Description of Artificial Sequence: Synthetic oligonucleotide
aagucuuucucccuacccu

SEQ ID NO: 2904955 - RNA, 19 nt, Artificial Sequence
  Description of Artificial Sequence: Synthetic oligonucleotide
auacagauuaaguuuuacu

SEQ ID NO: 2904956 - RNA, 19 nt, Artificial Sequence
  Description of Artificial Sequence: Synthetic oligonucleotide
uacaauagugagcaacacu

SEQ ID NO: 2904957 - RNA, 19 nt, Artificial Sequence
  Description of Artificial Sequence: Synthetic oligonucleotide
agcgauucagccucacagc

SEQ ID NO: 2904958 - RNA, 19 nt, Artificial Sequence
  Description of Artificial Sequence: Synthetic oligonucleotide
guuuugacaccuauaaccc

SEQ ID NO: 2904959 - RNA, 19 nt, Artificial Sequence
  Description of Artificial Sequence: Synthetic oligonucleotide
uuccuuagaauguagcuau

SEQ ID NO: 2904960 - RNA, 19 nt, Artificial Sequence
  Description of Artificial Sequence: Synthetic oligonucleotide
uaagucuuucucccuaccc

SEQ ID NO: 2904961 - RNA, 19 nt, Artificial Sequence
  Description of Artificial Sequence: Synthetic oligonucleotide
gaauguagcuaugcgagag

SEQ ID NO: 2904962 - RNA, 19 nt, Artificial Sequence
  Description of Artificial Sequence: Synthetic oligonucleotide
guagccauucucuuucagg

SEQ ID NO: 2904963 - RNA, 19 nt, Artificial Sequence
  Description of Artificial Sequence: Synthetic oligonucleotide
gucauuaagagccgaauca

SEQ ID NO: 2904964 - RNA, 19 nt, Artificial Sequence
  Description of Artificial Sequence: Synthetic oligonucleotide
ugcucuucuguuaagcagu

SEQ ID NO: 2904965 - RNA, 19 nt, Artificial Sequence
  Description of Artificial Sequence: Synthetic oligonucleotide
auugcuuugguuccauucu

SEQ ID NO: 2904966 - RNA, 19 nt, Artificial Sequence
  Description of Artificial Sequence: Synthetic oligonucleotide
agguuuuguagccauucuc

SEQ ID NO: 2904967 - RNA, 19 nt, Artificial Sequence
  Description of Artificial Sequence: Synthetic oligonucleotide
uaacccagcgcuuucuugc

SEQ ID NO: 2904968 - RNA, 19 nt, Artificial Sequence
  Description of Artificial Sequence: Synthetic oligonucleotide
gccgaaucaucuuauagcg

SEQ ID NO: 2904969 - RNA, 19 nt, Artificial Sequence
  Description of Artificial Sequence: Synthetic oligonucleotide
gaacagcuccugcagauag

SEQ ID NO: 2904970 - RNA, 19 nt, Artificial Sequence
  Description of Artificial Sequence: Synthetic oligonucleotide
uauugcuuugguuccauuc

SEQ ID NO: 2904971 - RNA, 19 nt, Artificial Sequence
  Description of Artificial Sequence: Synthetic oligonucleotide
uucaggcugucgaauauug

SEQ ID NO: 2904972 - RNA, 19 nt, Artificial Sequence
  Description of Artificial Sequence: Synthetic oligonucleotide
uugcucuucuguuaagcag

SEQ ID NO: 2904973 - RNA, 19 nt, Artificial Sequence
  Description of Artificial Sequence: Synthetic oligonucleotide
auuaagagccgaaucaucu

SEQ ID NO: 2904974 - RNA, 19 nt, Artificial Sequence
  Description of Artificial Sequence: Synthetic oligonucleotide
agcgcuuucuugcagcguc

SEQ ID NO: 2904975 - RNA, 19 nt, Artificial Sequence
  Description of Artificial Sequence: Synthetic oligonucleotide
agucuuucucccuacccuc

SEQ ID NO: 2904976 - RNA, 19 nt, Artificial Sequence
  Description of Artificial Sequence: Synthetic oligonucleotide
agacaaaagcuggauauag

SEQ ID NO: 2904977 - RNA, 19 nt, Artificial Sequence
  Description of Artificial Sequence: Synthetic oligonucleotide
uuuggaaaugccugugaac

SEQ ID NO: 2904978 - RNA, 19 nt, Artificial Sequence
  Description of Artificial Sequence: Synthetic oligonucleotide
uguuaagcagugcuuugga

SEQ ID NO: 2904979 - RNA, 19 nt, Artificial Sequence
  Description of Artificial Sequence: Synthetic oligonucleotide
gugagcaacacugaaggag

SEQ ID NO: 2904980 - RNA, 19 nt, Artificial Sequence
  Description of Artificial Sequence: Synthetic oligonucleotide
gaauaucaauguuaggaaa

SEQ ID NO: 2904981 - RNA, 19 nt, Artificial Sequence
  Description of Artificial Sequence: Synthetic oligonucleotide
gagccgaaucaucuuauag

SEQ ID NO: 2904982 - RNA, 19 nt, Artificial Sequence
  Description of Artificial Sequence: Synthetic oligonucleotide
auucugccagugcaguacc

SEQ ID NO: 2904983 - RNA, 19 nt, Artificial Sequence
  Description of Artificial Sequence: Synthetic oligonucleotide
uaagcagugcuuuggaaau

SEQ ID NO: 2904984 - RNA, 19 nt, Artificial Sequence
  Description of Artificial Sequence: Synthetic oligonucleotide
gucuguaagucuuucuccc

SEQ ID NO: 2904985 - RNA, 19 nt, Artificial Sequence
  Description of Artificial Sequence: Synthetic oligonucleotide
agugcuuuggaaaugccug

SEQ ID NO: 2904986 - RNA, 19 nt, Artificial Sequence
  Description of Artificial Sequence: Synthetic oligonucleotide
gauucagccucacagcguc

SEQ ID NO: 2904987 - RNA, 19 nt, Artificial Sequence
  Description of Artificial Sequence: Synthetic oligonucleotide
caaaagcuggauauagcug

SEQ ID NO: 2904988 - RNA, 19 nt, Artificial Sequence
  Description of Artificial Sequence: Synthetic oligonucleotide
agagguuuuguagccauuc

SEQ ID NO: 2904989 - RNA, 19 nt, Artificial Sequence
  Description of Artificial Sequence: Synthetic oligonucleotide
ugguguugaggucugcccc

SEQ ID NO: 2904990 - RNA, 19 nt, Artificial Sequence
  Description of Artificial Sequence: Synthetic oligonucleotide
ugacaccuauaacccagcg

SEQ ID NO: 2904991 - RNA, 19 nt, Artificial Sequence
  Description of Artificial Sequence: Synthetic oligonucleotide
uccuuccuuagaauguagc

SEQ ID NO: 2904992 - RNA, 19 nt, Artificial Sequence
  Description of Artificial Sequence: Synthetic oligonucleotide
aaggagaguuuugacaccu

SEQ ID NO: 2904993 - RNA, 19 nt, Artificial Sequence
  Description of Artificial Sequence: Synthetic oligonucleotide
ggaauaaauacaauaguga

SEQ ID NO: 2904994 - RNA, 19 nt, Artificial Sequence
  Description of Artificial Sequence: Synthetic oligonucleotide
aaaugcucgugaaagccug

SEQ ID NO: 2904995 - RNA, 19 nt, Artificial Sequence
  Description of Artificial Sequence: Synthetic oligonucleotide
aacacugaaggagaguuuu

SEQ ID NO: 2904996 - RNA, 19 nt, Artificial Sequence
  Description of Artificial Sequence: Synthetic oligonucleotide
uaagagccgaaucaucuua

SEQ ID NO: 2904997 - RNA, 19 nt, Artificial Sequence
  Description of Artificial Sequence: Synthetic oligonucleotide
uuuugacaccuauaaccca

SEQ ID NO: 2904998 - RNA, 19 nt, Artificial Sequence
  Description of Artificial Sequence: Synthetic oligonucleotide
aaaaugcucgugaaagccu

SEQ ID NO: 2904999 - RNA, 19 nt, Artificial Sequence
  Description of Artificial Sequence: Synthetic oligonucleotide
gacaccuauaacccagcgc

SEQ ID NO: 2905000 - RNA, 19 nt, Artificial Sequence
  Description of Artificial Sequence: Synthetic oligonucleotide
ugucgaauauugcuuuggu

SEQ ID NO: 2905001 - RNA, 19 nt, Artificial Sequence
  Description of Artificial Sequence: Synthetic oligonucleotide
ucuguuaagcagugcuuug

SEQ ID NO: 2905002 - RNA, 19 nt, Artificial Sequence
  Description of Artificial Sequence: Synthetic oligonucleotide
ucuugcagcgucuguaagu

SEQ ID NO: 2905003 - RNA, 19 nt, Artificial Sequence
  Description of Artificial Sequence: Synthetic oligonucleotide
ugcgagagguuuuguagcc

SEQ ID NO: 2905004 - RNA, 19 nt, Artificial Sequence
  Description of Artificial Sequence: Synthetic oligonucleotide
agauuaaguuuuacucccc

SEQ ID NO: 2905005 - RNA, 19 nt, Artificial Sequence
  Description of Artificial Sequence: Synthetic oligonucleotide
ugcuuugguuccauucugc

SEQ ID NO: 2905006 - RNA, 19 nt, Artificial Sequence
  Description of Artificial Sequence: Synthetic oligonucleotide
uauagcugcuugcucuucu

SEQ ID NO: 2905007 - RNA, 19 nt, Artificial Sequence
  Description of Artificial Sequence: Synthetic oligonucleotide
uugguguugaggucugccc

SEQ ID NO: 2905008 - RNA, 19 nt, Artificial Sequence
  Description of Artificial Sequence: Synthetic oligonucleotide
auacaauagugagcaacac

SEQ ID NO: 2905009 - RNA, 19 nt, Artificial Sequence
  Description of Artificial Sequence: Synthetic oligonucleotide
auagugagcaacacugaag

SEQ ID NO: 2905010 - RNA, 19 nt, Artificial Sequence
  Description of Artificial Sequence: Synthetic oligonucleotide
uggaaaugccugugaacag

SEQ ID NO: 2905011 - RNA, 19 nt, Artificial Sequence
  Description of Artificial Sequence: Synthetic oligonucleotide
cacagcgucgugcaguggg

SEQ ID NO: 2905012 - RNA, 19 nt, Artificial Sequence
  Description of Artificial Sequence: Synthetic oligonucleotide
agauagucuccuuccuuag

SEQ ID NO: 2905013 - RNA, 19 nt, Artificial Sequence
  Description of Artificial Sequence: Synthetic oligonucleotide
cugaaggagaguuuugaca

SEQ ID NO: 2905014 - RNA, 19 nt, Artificial Sequence
  Description of Artificial Sequence: Synthetic oligonucleotide
uguaagucuuucucccuac

SEQ ID NO: 2905015 - RNA, 19 nt, Artificial Sequence
  Description of Artificial Sequence: Synthetic oligonucleotide
cugcagauagucuccuucc

SEQ ID NO: 2905016 - RNA, 19 nt, Artificial Sequence
  Description of Artificial Sequence: Synthetic oligonucleotide
caauguuaggaaauaaaua

SEQ ID NO: 2905017 - RNA, 19 nt, Artificial Sequence
  Description of Artificial Sequence: Synthetic oligonucleotide
uuccauucugccagugcag

SEQ ID NO: 2905018 - RNA, 19 nt, Artificial Sequence
  Description of Artificial Sequence: Synthetic oligonucleotide
uugcuuugguuccauucug

SEQ ID NO: 2905019 - RNA, 19 nt, Artificial Sequence
  Description of Artificial Sequence: Synthetic oligonucleotide
guuccauucugccagugca

SEQ ID NO: 2905020 - RNA, 19 nt, Artificial Sequence
  Description of Artificial Sequence: Synthetic oligonucleotide
agcuggauauagcugcuug

SEQ ID NO: 2905021 - RNA, 19 nt, Artificial Sequence
  Description of Artificial Sequence: Synthetic oligonucleotide
uuucucccuacccucuggc

SEQ ID NO: 2905022 - RNA, 19 nt, Artificial Sequence
  Description of Artificial Sequence: Synthetic oligonucleotide
gacaaaagcuggauauagc

SEQ ID NO: 2905023 - RNA, 19 nt, Artificial Sequence
  Description of Artificial Sequence: Synthetic oligonucleotide
ucauuaagagccgaaucau

SEQ ID NO: 2905024 - RNA, 19 nt, Artificial Sequence
  Description of Artificial Sequence: Synthetic oligonucleotide
gaaggagaguuuugacacc

SEQ ID NO: 2905025 - RNA, 19 nt, Artificial Sequence
  Description of Artificial Sequence: Synthetic oligonucleotide
cauuaagagccgaaucauc

SEQ ID NO: 2905026 - RNA, 19 nt, Artificial Sequence
  Description of Artificial Sequence: Synthetic oligonucleotide
cuguuaagcagugcuuugg

SEQ ID NO: 2905027 - RNA, 19 nt, Artificial Sequence
  Description of Artificial Sequence: Synthetic oligonucleotide
uuuuguagccauucucuuu

SEQ ID NO: 2905028 - RNA, 19 nt, Artificial Sequence
  Description of Artificial Sequence: Synthetic oligonucleotide
gaguuuugacaccuauaac

SEQ ID NO: 2905029 - RNA, 19 nt, Artificial Sequence
  Description of Artificial Sequence: Synthetic oligonucleotide
uaucaauguuaggaaauaa

SEQ ID NO: 2905030 - RNA, 19 nt, Artificial Sequence
  Description of Artificial Sequence: Synthetic oligonucleotide
uugacaccuauaacccagc

SEQ ID NO: 2905031 - RNA, 19 nt, Artificial Sequence
  Description of Artificial Sequence: Synthetic oligonucleotide
ugccccgaaggucauuaag

SEQ ID NO: 2905032 - RNA, 19 nt, Artificial Sequence
  Description of Artificial Sequence: Synthetic oligonucleotide
acaguucuugguguugagg

SEQ ID NO: 2905033 - RNA, 19 nt, Artificial Sequence
  Description of Artificial Sequence: Synthetic oligonucleotide
aagccugaauaucaauguu

SEQ ID NO: 2905034 - RNA, 19 nt, Artificial Sequence
  Description of Artificial Sequence: Synthetic oligonucleotide
uucuugcagcgucuguaag

SEQ ID NO: 2905035 - RNA, 19 nt, Artificial Sequence
  Description of Artificial Sequence: Synthetic oligonucleotide
auaacccagcgcuuucuug

SEQ ID NO: 2905036 - RNA, 19 nt, Artificial Sequence
  Description of Artificial Sequence: Synthetic oligonucleotide
uuucuugcagcgucuguaa

SEQ ID NO: 2905037 - RNA, 19 nt, Artificial Sequence
  Description of Artificial Sequence: Synthetic oligonucleotide
ucaggcugucgaauauugc

SEQ ID NO: 2905038 - RNA, 19 nt, Artificial Sequence
  Description of Artificial Sequence: Synthetic oligonucleotide
aucaauguuaggaaauaaa

SEQ ID NO: 2905039 - RNA, 19 nt, Artificial Sequence
  Description of Artificial Sequence: Synthetic oligonucleotide
ugccagugcaguaccaggu

SEQ ID NO: 2905040 - RNA, 19 nt, Artificial Sequence
  Description of Artificial Sequence: Synthetic oligonucleotide
guuaggaaauaaauaaaua

SEQ ID NO: 2905041 - RNA, 19 nt, Artificial Sequence
  Description of Artificial Sequence: Synthetic oligonucleotide
ucuuucaggcugucgaaua

SEQ ID NO: 2905042 - RNA, 19 nt, Artificial Sequence
  Description of Artificial Sequence: Synthetic oligonucleotide
cugucgaauauugcuuugg

SEQ ID NO: 2905043 - RNA, 19 nt, Artificial Sequence
  Description of Artificial Sequence: Synthetic oligonucleotide
ugcagcgucuguaagucuu

SEQ ID NO: 2905044 - RNA, 19 nt, Artificial Sequence
  Description of Artificial Sequence: Synthetic oligonucleotide
uggauauagcugcuugcuc

SEQ ID NO: 2905045 - RNA, 19 nt, Artificial Sequence
  Description of Artificial Sequence: Synthetic oligonucleotide
cauacagauuaaguuuuac

SEQ ID NO: 2905046 - RNA, 19 nt, Artificial Sequence
  Description of Artificial Sequence: Synthetic oligonucleotide
gcgauucagccucacagcg

SEQ ID NO: 2905047 - RNA, 19 nt, Artificial Sequence
  Description of Artificial Sequence: Synthetic oligonucleotide
ugcagauagucuccuuccu

SEQ ID NO: 2905048 - RNA, 19 nt, Artificial Sequence
  Description of Artificial Sequence: Synthetic oligonucleotide
agaauguagcuaugcgaga

SEQ ID NO: 2905049 - RNA, 19 nt, Artificial Sequence
  Description of Artificial Sequence: Synthetic oligonucleotide
ucugccagugcaguaccag

SEQ ID NO: 2905050 - RNA, 19 nt, Artificial Sequence
  Description of Artificial Sequence: Synthetic oligonucleotide
cauucugccagugcaguac

SEQ ID NO: 2905051 - RNA, 19 nt, Artificial Sequence
  Description of Artificial Sequence: Synthetic oligonucleotide
uuaagagccgaaucaucuu

SEQ ID NO: 2905052 - RNA, 19 nt, Artificial Sequence
  Description of Artificial Sequence: Synthetic oligonucleotide
cuugcagcgucuguaaguc

SEQ ID NO: 2905053 - RNA, 19 nt, Artificial Sequence
  Description of Artificial Sequence: Synthetic oligonucleotide
uucuguuaagcagugcuuu

SEQ ID NO: 2905054 - RNA, 19 nt, Artificial Sequence
  Description of Artificial Sequence: Synthetic oligonucleotide
ucuuucucccuacccucug

SEQ ID NO: 2905055 - RNA, 19 nt, Artificial Sequence
  Description of Artificial Sequence: Synthetic oligonucleotide
cucuggcagacaaaagcug

SEQ ID NO: 2905056 - RNA, 19 nt, Artificial Sequence
  Description of Artificial Sequence: Synthetic oligonucleotide
caguaccagguccaugggg

SEQ ID NO: 2905057 - RNA, 19 nt, Artificial Sequence
  Description of Artificial Sequence: Synthetic oligonucleotide
cuugcucuucuguuaagca

SEQ ID NO: 2905058 - RNA, 19 nt, Artificial Sequence
  Description of Artificial Sequence: Synthetic oligonucleotide
cuugguguugaggucugcc

SEQ ID NO: 2905059 - RNA, 19 nt, Artificial Sequence
  Description of Artificial Sequence: Synthetic oligonucleotide
cugccagugcaguaccagg

SEQ ID NO: 2905060 - RNA, 19 nt, Artificial Sequence
  Description of Artificial Sequence: Synthetic oligonucleotide
guaagucuuucucccuacc

SEQ ID NO: 2905061 - RNA, 19 nt, Artificial Sequence
  Description of Artificial Sequence: Synthetic oligonucleotide
auguuaggaaauaaauaaa

SEQ ID NO: 2905062 - RNA, 19 nt, Artificial Sequence
  Description of Artificial Sequence: Synthetic oligonucleotide
cuuucucccuacccucugg

SEQ ID NO: 2905063 - RNA, 19 nt, Artificial Sequence
  Description of Artificial Sequence: Synthetic oligonucleotide
gccugaauaucaauguuag

SEQ ID NO: 2905064 - RNA, 19 nt, Artificial Sequence
  Description of Artificial Sequence: Synthetic oligonucleotide
ugaggucugccccgaaggu

SEQ ID NO: 2905065 - RNA, 19 nt, Artificial Sequence
  Description of Artificial Sequence: Synthetic oligonucleotide
gauagucuccuuccuuaga

SEQ ID NO: 2905066 - RNA, 19 nt, Artificial Sequence
  Description of Artificial Sequence: Synthetic oligonucleotide
uccuuagaauguagcuaug

SEQ ID NO: 2905067 - RNA, 19 nt, Artificial Sequence
  Description of Artificial Sequence: Synthetic oligonucleotide
gguguugaggucugccccg

SEQ ID NO: 2905068 - RNA, 19 nt, Artificial Sequence
  Description of Artificial Sequence: Synthetic oligonucleotide
aucaucuuauagcgauuca

SEQ ID NO: 2905069 - RNA, 19 nt, Artificial Sequence
  Description of Artificial Sequence: Synthetic oligonucleotide
auaucaauguuaggaaaua

SEQ ID NO: 2905070 - RNA, 19 nt, Artificial Sequence
  Description of Artificial Sequence: Synthetic oligonucleotide
uucuugguguugaggucug

SEQ ID NO: 2905071 - RNA, 19 nt, Artificial Sequence
  Description of Artificial Sequence: Synthetic oligonucleotide
ucucuuucaggcugucgaa

SEQ ID NO: 2905072 - RNA, 19 nt, Artificial Sequence
  Description of Artificial Sequence: Synthetic oligonucleotide
auguagcuaugcgagaggu

SEQ ID NO: 2905073 - RNA, 19 nt, Artificial Sequence
  Description of Artificial Sequence: Synthetic oligonucleotide
cgaauauugcuuugguucc

SEQ ID NO: 2905074 - RNA, 19 nt, Artificial Sequence
  Description of Artificial Sequence: Synthetic oligonucleotide
cccucuggcagacaaaagc

SEQ ID NO: 2905075 - RNA, 19 nt, Artificial Sequence
  Description of Artificial Sequence: Synthetic oligonucleotide
aacccagcgcuuucuugca

SEQ ID NO: 2905076 - RNA, 19 nt, Artificial Sequence
  Description of Artificial Sequence: Synthetic oligonucleotide
uauaacccagcgcuuucuu

SEQ ID NO: 2905077 - RNA, 19 nt, Artificial Sequence
  Description of Artificial Sequence: Synthetic oligonucleotide
ggucauuaagagccgaauc

SEQ ID NO: 2905078 - RNA, 19 nt, Artificial Sequence
  Description of Artificial Sequence: Synthetic oligonucleotide
agugagcaacacugaagga

SEQ ID NO: 2905079 - RNA, 19 nt, Artificial Sequence
  Description of Artificial Sequence: Synthetic oligonucleotide
ggaaaugccugugaacagc

SEQ ID NO: 2905080 - RNA, 19 nt, Artificial Sequence
  Description of Artificial Sequence: Synthetic oligonucleotide
cuuugguuccauucugcca

SEQ ID NO: 2905081 - RNA, 19 nt, Artificial Sequence
  Description of Artificial Sequence: Synthetic oligonucleotide
cuuuggaaaugccugugaa

SEQ ID NO: 2905082 - RNA, 19 nt, Artificial Sequence
  Description of Artificial Sequence: Synthetic oligonucleotide
uaaauacaauagugagcaa

SEQ ID NO: 2905083 - RNA, 19 nt, Artificial Sequence
  Description of Artificial Sequence: Synthetic oligonucleotide
aaaugccugugaacagcuc

SEQ ID NO: 2905084 - RNA, 19 nt, Artificial Sequence
  Description of Artificial Sequence: Synthetic oligonucleotide
gccauucucuuucaggcug

SEQ ID NO: 2905085 - RNA, 19 nt, Artificial Sequence
  Description of Artificial Sequence: Synthetic oligonucleotide
cucacagcgucgugcagug

SEQ ID NO: 2905086 - RNA, 19 nt, Artificial Sequence
  Description of Artificial Sequence: Synthetic oligonucleotide
uuauagcgauucagccuca

SEQ ID NO: 2905087 - RNA, 19 nt, Artificial Sequence
  Description of Artificial Sequence: Synthetic oligonucleotide
uacccucuggcagacaaaa

SEQ ID NO: 2905088 - RNA, 19 nt, Artificial Sequence
  Description of Artificial Sequence: Synthetic oligonucleotide
ggauauagcugcuugcucu

SEQ ID NO: 2905089 - RNA, 19 nt, Artificial Sequence
  Description of Artificial Sequence: Synthetic oligonucleotide
auagcgauucagccucaca

SEQ ID NO: 2905090 - RNA, 19 nt, Artificial Sequence
  Description of Artificial Sequence: Synthetic oligonucleotide
auucucuuucaggcugucg

SEQ ID NO: 2905091 - RNA, 19 nt, Artificial Sequence
  Description of Artificial Sequence: Synthetic oligonucleotide
caguucuugguguugaggu

SEQ ID NO: 2905092 - RNA, 19 nt, Artificial Sequence
  Description of Artificial Sequence: Synthetic oligonucleotide
uccauucugccagugcagu

SEQ ID NO: 2905093 - RNA, 19 nt, Artificial Sequence
  Description of Artificial Sequence: Synthetic oligonucleotide
caauagugagcaacacuga

SEQ ID NO: 2905094 - RNA, 19 nt, Artificial Sequence
  Description of Artificial Sequence: Synthetic oligonucleotide
guuaagcagugcuuuggaa

SEQ ID NO: 2905095 - RNA, 19 nt, Artificial Sequence
  Description of Artificial Sequence: Synthetic oligonucleotide
cagauagucuccuuccuua

SEQ ID NO: 2905096 - RNA, 19 nt, Artificial Sequence
  Description of Artificial Sequence: Synthetic oligonucleotide
cuccuuccuuagaauguag

SEQ ID NO: 2905097 - RNA, 19 nt, Artificial Sequence
  Description of Artificial Sequence: Synthetic oligonucleotide
aagcagugcuuuggaaaug

SEQ ID NO: 2905098 - RNA, 19 nt, Artificial Sequence
  Description of Artificial Sequence: Synthetic oligonucleotide
agccauucucuuucaggcu

SEQ ID NO: 2905099 - RNA, 19 nt, Artificial Sequence
  Description of Artificial Sequence: Synthetic oligonucleotide
aagagccgaaucaucuuau

SEQ ID NO: 2905100 - RNA, 19 nt, Artificial Sequence
  Description of Artificial Sequence: Synthetic oligonucleotide
gcuuugguuccauucugcc

SEQ ID NO: 2905101 - RNA, 19 nt, Artificial Sequence
  Description of Artificial Sequence: Synthetic oligonucleotide
ucuccuuccuuagaaugua

SEQ ID NO: 2905102 - RNA, 19 nt, Artificial Sequence
  Description of Artificial Sequence: Synthetic oligonucleotide
uguagcuaugcgagagguu

SEQ ID NO: 2905103 - RNA, 19 nt, Artificial Sequence
  Description of Artificial Sequence: Synthetic oligonucleotide
agccugaauaucaauguua

SEQ ID NO: 2905104 - RNA, 19 nt, Artificial Sequence
  Description of Artificial Sequence: Synthetic oligonucleotide
aaggucauuaagagccgaa

SEQ ID NO: 2905105 - RNA, 19 nt, Artificial Sequence
  Description of Artificial Sequence: Synthetic oligonucleotide
uuguagccauucucuuuca

SEQ ID NO: 2905106 - RNA, 19 nt, Artificial Sequence
  Description of Artificial Sequence: Synthetic oligonucleotide
auauagcugcuugcucuuc

SEQ ID NO: 2905107 - RNA, 19 nt, Artificial Sequence
  Description of Artificial Sequence: Synthetic oligonucleotide
uucucccuacccucuggca

SEQ ID NO: 2905108 - RNA, 19 nt, Artificial Sequence
  Description of Artificial Sequence: Synthetic oligonucleotide
ccuuagaauguagcuaugc

SEQ ID NO: 2905109 - RNA, 19 nt, Artificial Sequence
  Description of Artificial Sequence: Synthetic oligonucleotide
gagcaacacugaaggagag

SEQ ID NO: 2905110 - RNA, 19 nt, Artificial Sequence
  Description of Artificial Sequence: Synthetic oligonucleotide
gcagacaaaagcuggauau

SEQ ID NO: 2905111 - RNA, 19 nt, Artificial Sequence
  Description of Artificial Sequence: Synthetic oligonucleotide
cuuccuuagaauguagcua

SEQ ID NO: 2905112 - RNA, 19 nt, Artificial Sequence
  Description of Artificial Sequence: Synthetic oligonucleotide
aggucugccccgaagguca

SEQ ID NO: 2905113 - RNA, 19 nt, Artificial Sequence
  Description of Artificial Sequence: Synthetic oligonucleotide
gcucgugaaagccugaaua

SEQ ID NO: 2905114 - RNA, 19 nt, Artificial Sequence
  Description of Artificial Sequence: Synthetic oligonucleotide
agcuaugcgagagguuuug

SEQ ID NO: 2905115 - RNA, 19 nt, Artificial Sequence
  Description of Artificial Sequence: Synthetic oligonucleotide
caggcugucgaauauugcu

SEQ ID NO: 2905116 - RNA, 19 nt, Artificial Sequence
  Description of Artificial Sequence: Synthetic oligonucleotide
uucagccucacagcgucgu

SEQ ID NO: 2905117 - RNA, 19 nt, Artificial Sequence
  Description of Artificial Sequence: Synthetic oligonucleotide
ucugccccgaaggucauua

SEQ ID NO: 2905118 - RNA, 19 nt, Artificial Sequence
  Description of Artificial Sequence: Synthetic oligonucleotide
ugcucgugaaagccugaau

SEQ ID NO: 2905119 - RNA, 19 nt, Artificial Sequence
  Description of Artificial Sequence: Synthetic oligonucleotide
ccugaauaucaauguuagg

SEQ ID NO: 2905120 - RNA, 19 nt, Artificial Sequence
  Description of Artificial Sequence: Synthetic oligonucleotide
gaaggucauuaagagccga

SEQ ID NO: 2905121 - RNA, 19 nt, Artificial Sequence
  Description of Artificial Sequence: Synthetic oligonucleotide
gaaaugccugugaacagcu

SEQ ID NO: 2905122 - RNA, 19 nt, Artificial Sequence
  Description of Artificial Sequence: Synthetic oligonucleotide
cacaguucuugguguugag

SEQ ID NO: 2905123 - RNA, 19 nt, Artificial Sequence
  Description of Artificial Sequence: Synthetic oligonucleotide
guagcuaugcgagagguuu

SEQ ID NO: 2905124 - RNA, 19 nt, Artificial Sequence
  Description of Artificial Sequence: Synthetic oligonucleotide
ucagccucacagcgucgug

SEQ ID NO: 2905125 - RNA, 19 nt, Artificial Sequence
  Description of Artificial Sequence: Synthetic oligonucleotide
gcgucuguaagucuuucuc

SEQ ID NO: 2905126 - RNA, 19 nt, Artificial Sequence
  Description of Artificial Sequence: Synthetic oligonucleotide
aaugcucgugaaagccuga

SEQ ID NO: 2905127 - RNA, 19 nt, Artificial Sequence
  Description of Artificial Sequence: Synthetic oligonucleotide
cacugaaggagaguuuuga

SEQ ID NO: 2905128 - RNA, 19 nt, Artificial Sequence
  Description of Artificial Sequence: Synthetic oligonucleotide
aggucauuaagagccgaau

SEQ ID NO: 2905129 - RNA, 19 nt, Artificial Sequence
  Description of Artificial Sequence: Synthetic oligonucleotide
cgugaaagccugaauauca

SEQ ID NO: 2905130 - RNA, 19 nt, Artificial Sequence
  Description of Artificial Sequence: Synthetic oligonucleotide
gguuuuguagccauucucu

SEQ ID NO: 2905131 - RNA, 19 nt, Artificial Sequence
  Description of Artificial Sequence: Synthetic oligonucleotide
uuucaggcugucgaauauu

SEQ ID NO: 2905132 - RNA, 19 nt, Artificial Sequence
  Description of Artificial Sequence: Synthetic oligonucleotide
cgucuguaagucuuucucc

SEQ ID NO: 2905133 - RNA, 19 nt, Artificial Sequence
  Description of Artificial Sequence: Synthetic oligonucleotide
agcacaguucuugguguug

SEQ ID NO: 2905134 - RNA, 19 nt, Artificial Sequence
  Description of Artificial Sequence: Synthetic oligonucleotide
cuggcagacaaaagcugga

SEQ ID NO: 2905135 - RNA, 19 nt, Artificial Sequence
  Description of Artificial Sequence: Synthetic oligonucleotide
cuuucuugcagcgucugua

SEQ ID NO: 2905136 - RNA, 19 nt, Artificial Sequence
  Description of Artificial Sequence: Synthetic oligonucleotide
ccccgaaggucauuaagag

SEQ ID NO: 2905137 - RNA, 19 nt, Artificial Sequence
  Description of Artificial Sequence: Synthetic oligonucleotide
cuaugcgagagguuuugua

SEQ ID NO: 2905138 - RNA, 19 nt, Artificial Sequence
  Description of Artificial Sequence: Synthetic oligonucleotide
uauagcgauucagccucac

SEQ ID NO: 2905139 - RNA, 19 nt, Artificial Sequence
  Description of Artificial Sequence: Synthetic oligonucleotide
gauauagcugcuugcucuu

SEQ ID NO: 2905140 - RNA, 19 nt, Artificial Sequence
  Description of Artificial Sequence: Synthetic oligonucleotide
gcuugcucuucuguuaagc

SEQ ID NO: 2905141 - RNA, 19 nt, Artificial Sequence
  Description of Artificial Sequence: Synthetic oligonucleotide
gagaguuuugacaccuaua

SEQ ID NO: 2905142 - RNA, 19 nt, Artificial Sequence
  Description of Artificial Sequence: Synthetic oligonucleotide
aacagcuccugcagauagu

SEQ ID NO: 2905143 - RNA, 19 nt, Artificial Sequence
  Description of Artificial Sequence: Synthetic oligonucleotide
ccugcagauagucuccuuc

SEQ ID NO: 2905144 - RNA, 19 nt, Artificial Sequence
  Description of Artificial Sequence: Synthetic oligonucleotide
cucgugaaagccugaauau

SEQ ID NO: 2905145 - RNA, 19 nt, Artificial Sequence
  Description of Artificial Sequence: Synthetic oligonucleotide
cagccucacagcgucgugc

SEQ ID NO: 2905146 - RNA, 19 nt, Artificial Sequence
  Description of Artificial Sequence: Synthetic oligonucleotide
ccagugcaguaccaggucc

SEQ ID NO: 2905147 - RNA, 19 nt, Artificial Sequence
  Description of Artificial Sequence: Synthetic oligonucleotide
uggcagacaaaagcuggau

SEQ ID NO: 2905148 - RNA, 19 nt, Artificial Sequence
  Description of Artificial Sequence: Synthetic oligonucleotide
cagugcaguaccaggucca

SEQ ID NO: 2905149 - RNA, 19 nt, Artificial Sequence
  Description of Artificial Sequence: Synthetic oligonucleotide
cccgaaggucauuaagagc

SEQ ID NO: 2905150 - RNA, 19 nt, Artificial Sequence
  Description of Artificial Sequence: Synthetic oligonucleotide
agcaacacugaaggagagu

SEQ ID NO: 2905151 - RNA, 19 nt, Artificial Sequence
  Description of Artificial Sequence: Synthetic oligonucleotide
uagcuaugcgagagguuuu

SEQ ID NO: 2905152 - RNA, 19 nt, Artificial Sequence
  Description of Artificial Sequence: Synthetic oligonucleotide
gagguuuuguagccauucu

SEQ ID NO: 2905153 - RNA, 19 nt, Artificial Sequence
  Description of Artificial Sequence: Synthetic oligonucleotide
agagccgaaucaucuuaua

SEQ ID NO: 2905154 - RNA, 19 nt, Artificial Sequence
  Description of Artificial Sequence: Synthetic oligonucleotide
acagcgucgugcagugggg

SEQ ID NO: 2905155 - RNA, 19 nt, Artificial Sequence
  Description of Artificial Sequence: Synthetic oligonucleotide
uugguuccauucugccagu

SEQ ID NO: 2905156 - RNA, 19 nt, Artificial Sequence
  Description of Artificial Sequence: Synthetic oligonucleotide
accuauaacccagcgcuuu

SEQ ID NO: 2905157 - RNA, 19 nt, Artificial Sequence
  Description of Artificial Sequence: Synthetic oligonucleotide
ugaacagcuccugcagaua

SEQ ID NO: 2905158 - RNA, 19 nt, Artificial Sequence
  Description of Artificial Sequence: Synthetic oligonucleotide
augccugugaacagcuccu

SEQ ID NO: 2905159 - RNA, 19 nt, Artificial Sequence
  Description of Artificial Sequence: Synthetic oligonucleotide
cuguaagucuuucucccua

SEQ ID NO: 2905160 - RNA, 19 nt, Artificial Sequence
  Description of Artificial Sequence: Synthetic oligonucleotide
gcugucgaauauugcuuug

SEQ ID NO: 2905161 - RNA, 19 nt, Artificial Sequence
  Description of Artificial Sequence: Synthetic oligonucleotide
gaggucugccccgaagguc

SEQ ID NO: 2905162 - RNA, 19 nt, Artificial Sequence
  Description of Artificial Sequence: Synthetic oligonucleotide
acacugaaggagaguuuug

SEQ ID NO: 2905163 - RNA, 19 nt, Artificial Sequence
  Description of Artificial Sequence: Synthetic oligonucleotide
auauugcuuugguuccauu

SEQ ID NO: 2905164 - RNA, 19 nt, Artificial Sequence
  Description of Artificial Sequence: Synthetic oligonucleotide
uugcagcgucuguaagucu

SEQ ID NO: 2905165 - RNA, 19 nt, Artificial Sequence
  Description of Artificial Sequence: Synthetic oligonucleotide
gugaaagccugaauaucaa

SEQ ID NO: 2905166 - RNA, 19 nt, Artificial Sequence
  Description of Artificial Sequence: Synthetic oligonucleotide
cucuucuguuaagcagugc

SEQ ID NO: 2905167 - RNA, 19 nt, Artificial Sequence
  Description of Artificial Sequence: Synthetic oligonucleotide
cucccuacccucuggcaga

SEQ ID NO: 2905168 - RNA, 19 nt, Artificial Sequence
  Description of Artificial Sequence: Synthetic oligonucleotide
acccagcgcuuucuugcag

SEQ ID NO: 2905169 - RNA, 19 nt, Artificial Sequence
  Description of Artificial Sequence: Synthetic oligonucleotide
ugccugugaacagcuccug

SEQ ID NO: 2905170 - RNA, 19 nt, Artificial Sequence
  Description of Artificial Sequence: Synthetic oligonucleotide
cagugcuuuggaaaugccu

SEQ ID NO: 2905171 - RNA, 19 nt, Artificial Sequence
  Description of Artificial Sequence: Synthetic oligonucleotide
guuuuguagccauucucuu

SEQ ID NO: 2905172 - RNA, 19 nt, Artificial Sequence
  Description of Artificial Sequence: Synthetic oligonucleotide
gcuuuggaaaugccuguga

SEQ ID NO: 2905173 - RNA, 19 nt, Artificial Sequence
  Description of Artificial Sequence: Synthetic oligonucleotide
gcaguaccagguccauggg

SEQ ID NO: 2905174 - RNA, 19 nt, Artificial Sequence
  Description of Artificial Sequence: Synthetic oligonucleotide
ccagcgcuuucuugcagcg

SEQ ID NO: 2905175 - RNA, 19 nt, Artificial Sequence
  Description of Artificial Sequence: Synthetic oligonucleotide
ccugugaacagcuccugca

SEQ ID NO: 2905176 - RNA, 19 nt, Artificial Sequence
  Description of Artificial Sequence: Synthetic oligonucleotide
ucuugguguugaggucugc

SEQ ID NO: 2905177 - RNA, 19 nt, Artificial Sequence
  Description of Artificial Sequence: Synthetic oligonucleotide
auucagccucacagcgucg

SEQ ID NO: 2905178 - RNA, 19 nt, Artificial Sequence
  Description of Artificial Sequence: Synthetic oligonucleotide
aggcugucgaauauugcuu

SEQ ID NO: 2905179 - RNA, 19 nt, Artificial Sequence
  Description of Artificial Sequence: Synthetic oligonucleotide
cugcuugcucuucuguuaa

SEQ ID NO: 2905180 - RNA, 19 nt, Artificial Sequence
  Description of Artificial Sequence: Synthetic oligonucleotide
cuggauauagcugcuugcu

SEQ ID NO: 2905181 - RNA, 19 nt, Artificial Sequence
  Description of Artificial Sequence: Synthetic oligonucleotide
ugguuccauucugccagug

SEQ ID NO: 2905182 - RNA, 19 nt, Artificial Sequence
  Description of Artificial Sequence: Synthetic oligonucleotide
gucgaauauugcuuugguu

SEQ ID NO: 2905183 - RNA, 19 nt, Artificial Sequence
  Description of Artificial Sequence: Synthetic oligonucleotide
cgaaggucauuaagagccg

SEQ ID NO: 2905184 - RNA, 19 nt, Artificial Sequence
  Description of Artificial Sequence: Synthetic oligonucleotide
aagcuggauauagcugcuu

SEQ ID NO: 2905185 - RNA, 19 nt, Artificial Sequence
  Description of Artificial Sequence: Synthetic oligonucleotide
gucuccuuccuuagaaugu

SEQ ID NO: 2905186 - RNA, 19 nt, Artificial Sequence
  Description of Artificial Sequence: Synthetic oligonucleotide
ucacagcgucgugcagugg

SEQ ID NO: 2905187 - RNA, 19 nt, Artificial Sequence
  Description of Artificial Sequence: Synthetic oligonucleotide
agugcaguaccagguccau

SEQ ID NO: 2905188 - RNA, 19 nt, Artificial Sequence
  Description of Artificial Sequence: Synthetic oligonucleotide
cuucuguuaagcagugcuu

SEQ ID NO: 2905189 - RNA, 19 nt, Artificial Sequence
  Description of Artificial Sequence: Synthetic oligonucleotide
gcuccugcagauagucucc

SEQ ID NO: 2905190 - RNA, 19 nt, Artificial Sequence
  Description of Artificial Sequence: Synthetic oligonucleotide
gccugugaacagcuccugc

SEQ ID NO: 2905191 - RNA, 19 nt, Artificial Sequence
  Description of Artificial Sequence: Synthetic oligonucleotide
cuuucaggcugucgaauau

SEQ ID NO: 2905192 - RNA, 19 nt, Artificial Sequence
  Description of Artificial Sequence: Synthetic oligonucleotide
ccuauaacccagcgcuuuc

SEQ ID NO: 2905193 - RNA, 19 nt, Artificial Sequence
  Description of Artificial Sequence: Synthetic oligonucleotide
gccccgaaggucauuaaga

SEQ ID NO: 2905194 - RNA, 19 nt, Artificial Sequence
  Description of Artificial Sequence: Synthetic oligonucleotide
ggagaguuuugacaccuau

SEQ ID NO: 2905195 - RNA, 19 nt, Artificial Sequence
  Description of Artificial Sequence: Synthetic oligonucleotide
cgaaucaucuuauagcgau

SEQ ID NO: 2905196 - RNA, 19 nt, Artificial Sequence
  Description of Artificial Sequence: Synthetic oligonucleotide
gcaacacugaaggagaguu

SEQ ID NO: 2905197 - RNA, 19 nt, Artificial Sequence
  Description of Artificial Sequence: Synthetic oligonucleotide
ccuuccuuagaauguagcu

SEQ ID NO: 2905198 - RNA, 19 nt, Artificial Sequence
  Description of Artificial Sequence: Synthetic oligonucleotide
augcucgugaaagccugaa

SEQ ID NO: 2905199 - RNA, 19 nt, Artificial Sequence
  Description of Artificial Sequence: Synthetic oligonucleotide
cauucucuuucaggcuguc

SEQ ID NO: 2905200 - RNA, 19 nt, Artificial Sequence
  Description of Artificial Sequence: Synthetic oligonucleotide
gcucuucuguuaagcagug

SEQ ID NO: 2905201 - RNA, 19 nt, Artificial Sequence
  Description of Artificial Sequence: Synthetic oligonucleotide
acccucuggcagacaaaag

SEQ ID NO: 2905202 - RNA, 19 nt, Artificial Sequence
  Description of Artificial Sequence: Synthetic oligonucleotide
gaaucaucuuauagcgauu

SEQ ID NO: 2905203 - RNA, 19 nt, Artificial Sequence
  Description of Artificial Sequence: Synthetic oligonucleotide
ccucuggcagacaaaagcu

SEQ ID NO: 2905204 - RNA, 19 nt, Artificial Sequence
  Description of Artificial Sequence: Synthetic oligonucleotide
ggucuucccagcacaguuc

SEQ ID NO: 2905205 - RNA, 19 nt, Artificial Sequence
  Description of Artificial Sequence: Synthetic oligonucleotide
ucccuacccucuggcagac

SEQ ID NO: 2905206 - RNA, 19 nt, Artificial Sequence
  Description of Artificial Sequence: Synthetic oligonucleotide
gccagugcaguaccagguc

SEQ ID NO: 2905207 - RNA, 19 nt, Artificial Sequence
  Description of Artificial Sequence: Synthetic oligonucleotide
gugcaguaccagguccaug

SEQ ID NO: 2905208 - RNA, 19 nt, Artificial Sequence
  Description of Artificial Sequence: Synthetic oligonucleotide
gcacaguucuugguguuga

SEQ ID NO: 2905209 - RNA, 19 nt, Artificial Sequence
  Description of Artificial Sequence: Synthetic oligonucleotide
cuauaacccagcgcuuucu

SEQ ID NO: 2905210 - RNA, 19 nt, Artificial Sequence
  Description of Artificial Sequence: Synthetic oligonucleotide
ccuacccucuggcagacaa

SEQ ID NO: 2905211 - RNA, 19 nt, Artificial Sequence
  Description of Artificial Sequence: Synthetic oligonucleotide
cuacccucuggcagacaaa

SEQ ID NO: 2905212 - RNA, 19 nt, Artificial Sequence
  Description of Artificial Sequence: Synthetic oligonucleotide
gcagugcuuuggaaaugcc

SEQ ID NO: 2905213 - RNA, 19 nt, Artificial Sequence
  Description of Artificial Sequence: Synthetic oligonucleotide
ccgaaucaucuuauagcga

SEQ ID NO: 2905214 - RNA, 19 nt, Artificial Sequence
  Description of Artificial Sequence: Synthetic oligonucleotide
ggcugucgaauauugcuuu

SEQ ID NO: 2905215 - RNA, 19 nt, Artificial Sequence
  Description of Artificial Sequence: Synthetic oligonucleotide
gggucuucccagcacaguu

SEQ ID NO: 2905216 - RNA, 19 nt, Artificial Sequence
  Description of Artificial Sequence: Synthetic oligonucleotide
gucuuucucccuacccucu

SEQ ID NO: 2905217 - RNA, 19 nt, Artificial Sequence
  Description of Artificial Sequence: Synthetic oligonucleotide
caacacugaaggagaguuu

SEQ ID NO: 2905218 - RNA, 19 nt, Artificial Sequence
  Description of Artificial Sequence: Synthetic oligonucleotide
ccagcacaguucuuggugu

SEQ ID NO: 2905219 - RNA, 19 nt, Artificial Sequence
  Description of Artificial Sequence: Synthetic oligonucleotide
aggagaguuuugacaccua

SEQ ID NO: 2905220 - RNA, 19 nt, Artificial Sequence
  Description of Artificial Sequence: Synthetic oligonucleotide
gcagauagucuccuuccuu

SEQ ID NO: 2905221 - RNA, 19 nt, Artificial Sequence
  Description of Artificial Sequence: Synthetic oligonucleotide
cucuuucaggcugucgaau

SEQ ID NO: 2905222 - RNA, 19 nt, Artificial Sequence
  Description of Artificial Sequence: Synthetic oligonucleotide
gcgagagguuuuguagcca

SEQ ID NO: 2905223 - RNA, 19 nt, Artificial Sequence
  Description of Artificial Sequence: Synthetic oligonucleotide
gccucacagcgucgugcag

SEQ ID NO: 2905224 - RNA, 19 nt, Artificial Sequence
  Description of Artificial Sequence: Synthetic oligonucleotide
gagagguuuuguagccauu

SEQ ID NO: 2905225 - RNA, 19 nt, Artificial Sequence
  Description of Artificial Sequence: Synthetic oligonucleotide
cagcuccugcagauagucu

SEQ ID NO: 2905226 - RNA, 19 nt, Artificial Sequence
  Description of Artificial Sequence: Synthetic oligonucleotide
gcuuucuugcagcgucugu

SEQ ID NO: 2905227 - RNA, 19 nt, Artificial Sequence
  Description of Artificial Sequence: Synthetic oligonucleotide
cugccccgaaggucauuaa

SEQ ID NO: 2905228 - RNA, 19 nt, Artificial Sequence
  Description of Artificial Sequence: Synthetic oligonucleotide
caccuauaacccagcgcuu

SEQ ID NO: 2905229 - RNA, 19 nt, Artificial Sequence
  Description of Artificial Sequence: Synthetic oligonucleotide
cagcacaguucuugguguu

SEQ ID NO: 2905230 - RNA, 19 nt, Artificial Sequence
  Description of Artificial Sequence: Synthetic oligonucleotide
ccauucugccagugcagua

SEQ ID NO: 2905231 - RNA, 19 nt, Artificial Sequence
  Description of Artificial Sequence: Synthetic oligonucleotide
cuccugcagauagucuccu

SEQ ID NO: 2905232 - RNA, 19 nt, Artificial Sequence
  Description of Artificial Sequence: Synthetic oligonucleotide
ccucacagcgucgugcagu

SEQ ID NO: 2905233 - RNA, 19 nt, Artificial Sequence
  Description of Artificial Sequence: Synthetic oligonucleotide
cgagagguuuuguagccau

SEQ ID NO: 2905234 - RNA, 19 nt, Artificial Sequence
  Description of Artificial Sequence: Synthetic oligonucleotide
gcuaugcgagagguuuugu

SEQ ID NO: 2905235 - RNA, 19 nt, Artificial Sequence
  Description of Artificial Sequence: Synthetic oligonucleotide
cgcuuucuugcagcgucug

SEQ ID NO: 2905236 - RNA, 19 nt, Artificial Sequence
  Description of Artificial Sequence: Synthetic oligonucleotide
cagcgucgugcaguggggu

SEQ ID NO: 2905237 - RNA, 19 nt, Artificial Sequence
  Description of Artificial Sequence: Synthetic oligonucleotide
cgauucagccucacagcgu

SEQ ID NO: 2905238 - RNA, 19 nt, Artificial Sequence
  Description of Artificial Sequence: Synthetic oligonucleotide
ggggucuucccagcacagu

SEQ ID NO: 2905239 - RNA, 19 nt, Artificial Sequence
  Description of Artificial Sequence: Synthetic oligonucleotide
cagcgcuuucuugcagcgu

SEQ ID NO: 2905240 - RNA, 19 nt, Artificial Sequence
  Description of Artificial Sequence: Synthetic oligonucleotide
gcgcuuucuugcagcgucu

SEQ ID NO: 2905241 - RNA, 19 nt, Artificial Sequence
  Description of Artificial Sequence: Synthetic oligonucleotide
gcagcgucuguaagucuuu

SEQ ID NO: 2905242 - RNA, 19 nt, Artificial Sequence
  Description of Artificial Sequence: Synthetic oligonucleotide
gucugccccgaaggucauu

SEQ ID NO: 2905243 - RNA, 19 nt, Artificial Sequence
  Description of Artificial Sequence: Synthetic oligonucleotide
ggucugccccgaaggucau

SEQ ID NO: 2905244 - RNA, 19 nt, Artificial Sequence
  Description of Artificial Sequence: Synthetic oligonucleotide
cccuacccucuggcagaca

SEQ ID NO: 2905245 - RNA, 19 nt, Artificial Sequence
  Description of Artificial Sequence: Synthetic oligonucleotide
aauucuuuaaaucagcuuc

SEQ ID NO: 2905246 - RNA, 19 nt, Artificial Sequence
  Description of Artificial Sequence: Synthetic oligonucleotide
aacaagaaaguccaaaucu

SEQ ID NO: 2905247 - RNA, 19 nt, Artificial Sequence
  Description of Artificial Sequence: Synthetic oligonucleotide
uaaaacaacuuuugaaucg

SEQ ID NO: 2905248 - RNA, 19 nt, Artificial Sequence
  Description of Artificial Sequence: Synthetic oligonucleotide
uguauuuugcuuaugacgu

SEQ ID NO: 2905249 - RNA, 19 nt, Artificial Sequence
  Description of Artificial Sequence: Synthetic oligonucleotide
uuuucaucugaauagaaca

SEQ ID NO: 2905250 - RNA, 19 nt, Artificial Sequence
  Description of Artificial Sequence: Synthetic oligonucleotide
acaguaacaaaauuaagcu

SEQ ID NO: 2905251 - RNA, 19 nt, Artificial Sequence
  Description of Artificial Sequence: Synthetic oligonucleotide
ucaucugaauagaacaggg

SEQ ID NO: 2905252 - RNA, 19 nt, Artificial Sequence
  Description of Artificial Sequence: Synthetic oligonucleotide
cuguauuuugcuuaugacg

SEQ ID NO: 2905253 - RNA, 19 nt, Artificial Sequence
  Description of Artificial Sequence: Synthetic oligonucleotide
uuuuguaacagucucacuu

SEQ ID NO: 2905254 - RNA, 19 nt, Artificial Sequence
  Description of Artificial Sequence: Synthetic oligonucleotide
aucugaauagaacagggag

SEQ ID NO: 2905255 - RNA, 19 nt, Artificial Sequence
  Description of Artificial Sequence: Synthetic oligonucleotide
uuccaaauucuuuaaauca

SEQ ID NO: 2905256 - RNA, 19 nt, Artificial Sequence
  Description of Artificial Sequence: Synthetic oligonucleotide
uccaaauucuuuaaaucag

SEQ ID NO: 2905257 - RNA, 19 nt, Artificial Sequence
  Description of Artificial Sequence: Synthetic oligonucleotide
uagaacagggagcagauug

SEQ ID NO: 2905258 - RNA, 19 nt, Artificial Sequence
  Description of Artificial Sequence: Synthetic oligonucleotide
ugugcuaaaacaacuuuug

SEQ ID NO: 2905259 - RNA, 19 nt, Artificial Sequence
  Description of Artificial Sequence: Synthetic oligonucleotide
aguaacaaaauuaagcucu

SEQ ID NO: 2905260 - RNA, 19 nt, Artificial Sequence
  Description of Artificial Sequence: Synthetic oligonucleotide
aaaauuaagcucuucuuua

SEQ ID NO: 2905261 - RNA, 19 nt, Artificial Sequence
  Description of Artificial Sequence: Synthetic oligonucleotide
gaaaguccaaaucuccugg

SEQ ID NO: 2905262 - RNA, 19 nt, Artificial Sequence
  Description of Artificial Sequence: Synthetic oligonucleotide
uuugccuugugcuaaaaca

SEQ ID NO: 2905263 - RNA, 19 nt, Artificial Sequence
  Description of Artificial Sequence: Synthetic oligonucleotide
ucugaauagaacagggagc

SEQ ID NO: 2905264 - RNA, 19 nt, Artificial Sequence
  Description of Artificial Sequence: Synthetic oligonucleotide
uucggaacaagaaagucca

SEQ ID NO: 2905265 - RNA, 19 nt, Artificial Sequence
  Description of Artificial Sequence: Synthetic oligonucleotide
cuuuaaaucagcuucuuca

SEQ ID NO: 2905266 - RNA, 19 nt, Artificial Sequence
  Description of Artificial Sequence: Synthetic oligonucleotide
ucaaguuuugucuucuuug

SEQ ID NO: 2905267 - RNA, 19 nt, Artificial Sequence
  Description of Artificial Sequence: Synthetic oligonucleotide
aaaguccaaaucuccuggc

SEQ ID NO: 2905268 - RNA, 19 nt, Artificial Sequence
  Description of Artificial Sequence: Synthetic oligonucleotide
uuucaucugaauagaacag

SEQ ID NO: 2905269 - RNA, 19 nt, Artificial Sequence
  Description of Artificial Sequence: Synthetic oligonucleotide
acuuccuggaccuacuugg

SEQ ID NO: 2905270 - RNA, 19 nt, Artificial Sequence
  Description of Artificial Sequence: Synthetic oligonucleotide
uaaaucagcuucuucaacu

SEQ ID NO: 2905271 - RNA, 19 nt, Artificial Sequence
  Description of Artificial Sequence: Synthetic oligonucleotide
uccaacuucauccacagua

SEQ ID NO: 2905272 - RNA, 19 nt, Artificial Sequence
  Description of Artificial Sequence: Synthetic oligonucleotide
aaucagcuucuucaacugc

SEQ ID NO: 2905273 - RNA, 19 nt, Artificial Sequence
  Description of Artificial Sequence: Synthetic oligonucleotide
aauuaagcucuucuuuaag

SEQ ID NO: 2905274 - RNA, 19 nt, Artificial Sequence
  Description of Artificial Sequence: Synthetic oligonucleotide
uguauggaggucaauuuug

SEQ ID NO: 2905275 - RNA, 19 nt, Artificial Sequence
  Description of Artificial Sequence: Synthetic oligonucleotide
gaaagauucaaguuuuguc

SEQ ID NO: 2905276 - RNA, 19 nt, Artificial Sequence
  Description of Artificial Sequence: Synthetic oligonucleotide
aaaauccagccuucggaac

SEQ ID NO: 2905277 - RNA, 19 nt, Artificial Sequence
  Description of Artificial Sequence: Synthetic oligonucleotide
cuacuugggagaaagauuc

SEQ ID NO: 2905278 - RNA, 19 nt, Artificial Sequence
  Description of Artificial Sequence: Synthetic oligonucleotide
ugaaucguugucuccaucc

SEQ ID NO: 2905279 - RNA, 19 nt, Artificial Sequence
  Description of Artificial Sequence: Synthetic oligonucleotide
uuugccuacagaagaaucu

SEQ ID NO: 2905280 - RNA, 19 nt, Artificial Sequence
  Description of Artificial Sequence: Synthetic oligonucleotide
aaaucagcuucuucaacug

SEQ ID NO: 2905281 - RNA, 19 nt, Artificial Sequence
  Description of Artificial Sequence: Synthetic oligonucleotide
cuucggaacaagaaagucc

SEQ ID NO: 2905282 - RNA, 19 nt, Artificial Sequence
  Description of Artificial Sequence: Synthetic oligonucleotide
ucaggugucacugauuugc

SEQ ID NO: 2905283 - RNA, 19 nt, Artificial Sequence
  Description of Artificial Sequence: Synthetic oligonucleotide
cuaaaacaacuuuugaauc

SEQ ID NO: 2905284 - RNA, 19 nt, Artificial Sequence
  Description of Artificial Sequence: Synthetic oligonucleotide
ugcuaaaacaacuuuugaa

SEQ ID NO: 2905285 - RNA, 19 nt, Artificial Sequence
  Description of Artificial Sequence: Synthetic oligonucleotide
uucaucagguuccaaauuc

SEQ ID NO: 2905286 - RNA, 19 nt, Artificial Sequence
  Description of Artificial Sequence: Synthetic oligonucleotide
aaucuccuggcacaucagg

SEQ ID NO: 2905287 - RNA, 19 nt, Artificial Sequence
  Description of Artificial Sequence: Synthetic oligonucleotide
aguuuugucuucuuugugu

SEQ ID NO: 2905288 - RNA, 19 nt, Artificial Sequence
  Description of Artificial Sequence: Synthetic oligonucleotide
uuuaucuguauggagguca

SEQ ID NO: 2905289 - RNA, 19 nt, Artificial Sequence
  Description of Artificial Sequence: Synthetic oligonucleotide
ucaaucaugguuuucugau

SEQ ID NO: 2905290 - RNA, 19 nt, Artificial Sequence
  Description of Artificial Sequence: Synthetic oligonucleotide
caagaaaguccaaaucucc

SEQ ID NO: 2905291 - RNA, 19 nt, Artificial Sequence
  Description of Artificial Sequence: Synthetic oligonucleotide
aaauccagccuucggaaca

SEQ ID NO: 2905292 - RNA, 19 nt, Artificial Sequence
  Description of Artificial Sequence: Synthetic oligonucleotide
uacagaagaaucuucgguc

SEQ ID NO: 2905293 - RNA, 19 nt, Artificial Sequence
  Description of Artificial Sequence: Synthetic oligonucleotide
acuuuugaaucguugucuc

SEQ ID NO: 2905294 - RNA, 19 nt, Artificial Sequence
  Description of Artificial Sequence: Synthetic oligonucleotide
aguccaaaucuccuggcac

SEQ ID NO: 2905295 - RNA, 19 nt, Artificial Sequence
  Description of Artificial Sequence: Synthetic oligonucleotide
uuuucugaucuuuuguaac

SEQ ID NO: 2905296 - RNA, 19 nt, Artificial Sequence
  Description of Artificial Sequence: Synthetic oligonucleotide
uuuaaaucagcuucuucaa

SEQ ID NO: 2905297 - RNA, 19 nt, Artificial Sequence
  Description of Artificial Sequence: Synthetic oligonucleotide
uuucugaucuuuuguaaca

SEQ ID NO: 2905298 - RNA, 19 nt, Artificial Sequence
  Description of Artificial Sequence: Synthetic oligonucleotide
uucauccacaguaacaaaa

SEQ ID NO: 2905299 - RNA, 19 nt, Artificial Sequence
  Description of Artificial Sequence: Synthetic oligonucleotide
acaacuuuugaaucguugu

SEQ ID NO: 2905300 - RNA, 19 nt, Artificial Sequence
  Description of Artificial Sequence: Synthetic oligonucleotide
aaauuaagcucuucuuuaa

SEQ ID NO: 2905301 - RNA, 19 nt, Artificial Sequence
  Description of Artificial Sequence: Synthetic oligonucleotide
aaaacaacuuuugaaucgu

SEQ ID NO: 2905302 - RNA, 19 nt, Artificial Sequence
  Description of Artificial Sequence: Synthetic oligonucleotide
aacuuuugaaucguugucu

SEQ ID NO: 2905303 - RNA, 19 nt, Artificial Sequence
  Description of Artificial Sequence: Synthetic oligonucleotide
uugggagaaagauucaagu

SEQ ID NO: 2905304 - RNA, 19 nt, Artificial Sequence
  Description of Artificial Sequence: Synthetic oligonucleotide
ugaacuucucuguauuuug

SEQ ID NO: 2905305 - RNA, 19 nt, Artificial Sequence
  Description of Artificial Sequence: Synthetic oligonucleotide
uuuugaaucguugucucca

SEQ ID NO: 2905306 - RNA, 19 nt, Artificial Sequence
  Description of Artificial Sequence: Synthetic oligonucleotide
ugaucuuuuguaacagucu

SEQ ID NO: 2905307 - RNA, 19 nt, Artificial Sequence
  Description of Artificial Sequence: Synthetic oligonucleotide
aaauucuuuaaaucagcuu

SEQ ID NO: 2905308 - RNA, 19 nt, Artificial Sequence
  Description of Artificial Sequence: Synthetic oligonucleotide
gaucuuuuguaacagucuc

SEQ ID NO: 2905309 - RNA, 19 nt, Artificial Sequence
  Description of Artificial Sequence: Synthetic oligonucleotide
auggaggucaauuuugccu

SEQ ID NO: 2905310 - RNA, 19 nt, Artificial Sequence
  Description of Artificial Sequence: Synthetic oligonucleotide
uuuguaacagucucacuuc

SEQ ID NO: 2905311 - RNA, 19 nt, Artificial Sequence
  Description of Artificial Sequence: Synthetic oligonucleotide
agugauuugccauugcuuu

SEQ ID NO: 2905312 - RNA, 19 nt, Artificial Sequence
  Description of Artificial Sequence: Synthetic oligonucleotide
ucuuuuguaacagucucac

SEQ ID NO: 2905313 - RNA, 19 nt, Artificial Sequence
  Description of Artificial Sequence: Synthetic oligonucleotide
agaaaguccaaaucuccug

SEQ ID NO: 2905314 - RNA, 19 nt, Artificial Sequence
  Description of Artificial Sequence: Synthetic oligonucleotide
uugcuuaugacguuugcuc

SEQ ID NO: 2905315 - RNA, 19 nt, Artificial Sequence
  Description of Artificial Sequence: Synthetic oligonucleotide
augacguuugcucuugcag

SEQ ID NO: 2905316 - RNA, 19 nt, Artificial Sequence
  Description of Artificial Sequence: Synthetic oligonucleotide
uguaggucuuucaaucaug

SEQ ID NO: 2905317 - RNA, 19 nt, Artificial Sequence
  Description of Artificial Sequence: Synthetic oligonucleotide
acaagaaaguccaaaucuc

SEQ ID NO: 2905318 - RNA, 19 nt, Artificial Sequence
  Description of Artificial Sequence: Synthetic oligonucleotide
uaacagucucacuuccugg

SEQ ID NO: 2905319 - RNA, 19 nt, Artificial Sequence
  Description of Artificial Sequence: Synthetic oligonucleotide
uuaaaucagcuucuucaac

SEQ ID NO: 2905320 - RNA, 19 nt, Artificial Sequence
  Description of Artificial Sequence: Synthetic oligonucleotide
ucuguauuuugcuuaugac

SEQ ID NO: 2905321 - RNA, 19 nt, Artificial Sequence
  Description of Artificial Sequence: Synthetic oligonucleotide
guuccaaauucuuuaaauc

SEQ ID NO: 2905322 - RNA, 19 nt, Artificial Sequence
  Description of Artificial Sequence: Synthetic oligonucleotide
cugaucuuuuguaacaguc

SEQ ID NO: 2905323 - RNA, 19 nt, Artificial Sequence
  Description of Artificial Sequence: Synthetic oligonucleotide
gaacaagaaaguccaaauc

SEQ ID NO: 2905324 - RNA, 19 nt, Artificial Sequence
  Description of Artificial Sequence: Synthetic oligonucleotide
aaguuuugucuucuuugug

SEQ ID NO: 2905325 - RNA, 19 nt, Artificial Sequence
  Description of Artificial Sequence: Synthetic oligonucleotide
aggucuuucaaucaugguu

SEQ ID NO: 2905326 - RNA, 19 nt, Artificial Sequence
  Description of Artificial Sequence: Synthetic oligonucleotide
agauucaaguuuugucuuc

SEQ ID NO: 2905327 - RNA, 19 nt, Artificial Sequence
  Description of Artificial Sequence: Synthetic oligonucleotide
cuugggagaaagauucaag

SEQ ID NO: 2905328 - RNA, 19 nt, Artificial Sequence
  Description of Artificial Sequence: Synthetic oligonucleotide
aacaacuuuugaaucguug

SEQ ID NO: 2905329 - RNA, 19 nt, Artificial Sequence
  Description of Artificial Sequence: Synthetic oligonucleotide
uuguaacagucucacuucc

SEQ ID NO: 2905330 - RNA, 19 nt, Artificial Sequence
  Description of Artificial Sequence: Synthetic oligonucleotide
uccuggaccuacuugggag

SEQ ID NO: 2905331 - RNA, 19 nt, Artificial Sequence
  Description of Artificial Sequence: Synthetic oligonucleotide
uuugucuucuuugugucca

SEQ ID NO: 2905332 - RNA, 19 nt, Artificial Sequence
  Description of Artificial Sequence: Synthetic oligonucleotide
acagaagaaucuucggucu

SEQ ID NO: 2905333 - RNA, 19 nt, Artificial Sequence
  Description of Artificial Sequence: Synthetic oligonucleotide
acaaaauuaagcucuucuu

SEQ ID NO: 2905334 - RNA, 19 nt, Artificial Sequence
  Description of Artificial Sequence: Synthetic oligonucleotide
uugccuugugcuaaaacaa

SEQ ID NO: 2905335 - RNA, 19 nt, Artificial Sequence
  Description of Artificial Sequence: Synthetic oligonucleotide
ugcuguaggucuuucaauc

SEQ ID NO: 2905336 - RNA, 19 nt, Artificial Sequence
  Description of Artificial Sequence: Synthetic oligonucleotide
uucaaucaugguuuucuga

SEQ ID NO: 2905337 - RNA, 19 nt, Artificial Sequence
  Description of Artificial Sequence: Synthetic oligonucleotide
ucauccacaguaacaaaau

SEQ ID NO: 2905338 - RNA, 19 nt, Artificial Sequence
  Description of Artificial Sequence: Synthetic oligonucleotide
ugguuuucugaucuuuugu

SEQ ID NO: 2905339 - RNA, 19 nt, Artificial Sequence
  Description of Artificial Sequence: Synthetic oligonucleotide
ugcucuugcagugauuugc

SEQ ID NO: 2905340 - RNA, 19 nt, Artificial Sequence
  Description of Artificial Sequence: Synthetic oligonucleotide
guaggucuuucaaucaugg

SEQ ID NO: 2905341 - RNA, 19 nt, Artificial Sequence
  Description of Artificial Sequence: Synthetic oligonucleotide
guaacagucucacuuccug

SEQ ID NO: 2905342 - RNA, 19 nt, Artificial Sequence
  Description of Artificial Sequence: Synthetic oligonucleotide
uugugcuaaaacaacuuuu

SEQ ID NO: 2905343 - RNA, 19 nt, Artificial Sequence
  Description of Artificial Sequence: Synthetic oligonucleotide
ucaucagguuccaaauucu

SEQ ID NO: 2905344 - RNA, 19 nt, Artificial Sequence
  Description of Artificial Sequence: Synthetic oligonucleotide
ucuucggucuucuugucgu

SEQ ID NO: 2905345 - RNA, 19 nt, Artificial Sequence
  Description of Artificial Sequence: Synthetic oligonucleotide
gaauagaacagggagcaga

SEQ ID NO: 2905346 - RNA, 19 nt, Artificial Sequence
  Description of Artificial Sequence: Synthetic oligonucleotide
ugacguuugcucuugcagu

SEQ ID NO: 2905347 - RNA, 19 nt, Artificial Sequence
  Description of Artificial Sequence: Synthetic oligonucleotide
uuuugcuuaugacguuugc

SEQ ID NO: 2905348 - RNA, 19 nt, Artificial Sequence
  Description of Artificial Sequence: Synthetic oligonucleotide
uuucaaucaugguuuucug

SEQ ID NO: 2905349 - RNA, 19 nt, Artificial Sequence
  Description of Artificial Sequence: Synthetic oligonucleotide
gagcagauuggacagaaaa

SEQ ID NO: 2905350 - RNA, 19 nt, Artificial Sequence
  Description of Artificial Sequence: Synthetic oligonucleotide
caguaacaaaauuaagcuc

SEQ ID NO: 2905351 - RNA, 19 nt, Artificial Sequence
  Description of Artificial Sequence: Synthetic oligonucleotide
aaguccaaaucuccuggca

SEQ ID NO: 2905352 - RNA, 19 nt, Artificial Sequence
  Description of Artificial Sequence: Synthetic oligonucleotide
uucugaucuuuuguaacag

SEQ ID NO: 2905353 - RNA, 19 nt, Artificial Sequence
  Description of Artificial Sequence: Synthetic oligonucleotide
ugauuugccuacagaagaa

SEQ ID NO: 2905354 - RNA, 19 nt, Artificial Sequence
  Description of Artificial Sequence: Synthetic oligonucleotide
aagaaaguccaaaucuccu

SEQ ID NO: 2905355 - RNA, 19 nt, Artificial Sequence
  Description of Artificial Sequence: Synthetic oligonucleotide
aaucuucggucuucuuguc

SEQ ID NO: 2905356 - RNA, 19 nt, Artificial Sequence
  Description of Artificial Sequence: Synthetic oligonucleotide
ugcuuaugacguuugcucu

SEQ ID NO: 2905357 - RNA, 19 nt, Artificial Sequence
  Description of Artificial Sequence: Synthetic oligonucleotide
uuugcuuaugacguuugcu

SEQ ID NO: 2905358 - RNA, 19 nt, Artificial Sequence
  Description of Artificial Sequence: Synthetic oligonucleotide
gacguuugcucuugcagug

SEQ ID NO: 2905359 - RNA, 19 nt, Artificial Sequence
  Description of Artificial Sequence: Synthetic oligonucleotide
ucaauuuugccuugugcua

SEQ ID NO: 2905360 - RNA, 19 nt, Artificial Sequence
  Description of Artificial Sequence: Synthetic oligonucleotide
uauggaggucaauuuugcc

SEQ ID NO: 2905361 - RNA, 19 nt, Artificial Sequence
  Description of Artificial Sequence: Synthetic oligonucleotide
uuuugccuugugcuaaaac

SEQ ID NO: 2905362 - RNA, 19 nt, Artificial Sequence
  Description of Artificial Sequence: Synthetic oligonucleotide
aauagaacagggagcagau

SEQ ID NO: 2905363 - RNA, 19 nt, Artificial Sequence
  Description of Artificial Sequence: Synthetic oligonucleotide
cuuuugaaucguugucucc

SEQ ID NO: 2905364 - RNA, 19 nt, Artificial Sequence
  Description of Artificial Sequence: Synthetic oligonucleotide
gucaauuuugccuugugcu

SEQ ID NO: 2905365 - RNA, 19 nt, Artificial Sequence
  Description of Artificial Sequence: Synthetic oligonucleotide
auuugccuacagaagaauc

SEQ ID NO: 2905366 - RNA, 19 nt, Artificial Sequence
  Description of Artificial Sequence: Synthetic oligonucleotide
uuugcucuugcagugauuu

SEQ ID NO: 2905367 - RNA, 19 nt, Artificial Sequence
  Description of Artificial Sequence: Synthetic oligonucleotide
ucuccuggcacaucaggug

SEQ ID NO: 2905368 - RNA, 19 nt, Artificial Sequence
  Description of Artificial Sequence: Synthetic oligonucleotide
ucuugcagugauuugccau

SEQ ID NO: 2905369 - RNA, 19 nt, Artificial Sequence
  Description of Artificial Sequence: Synthetic oligonucleotide
uucuucaacugcuguaggu

SEQ ID NO: 2905370 - RNA, 19 nt, Artificial Sequence
  Description of Artificial Sequence: Synthetic oligonucleotide
gaaucuucggucuucuugu

SEQ ID NO: 2905371 - RNA, 19 nt, Artificial Sequence
  Description of Artificial Sequence: Synthetic oligonucleotide
agaagaaucuucggucuuc

SEQ ID NO: 2905372 - RNA, 19 nt, Artificial Sequence
  Description of Artificial Sequence: Synthetic oligonucleotide
uggaggucaauuuugccuu

SEQ ID NO: 2905373 - RNA, 19 nt, Artificial Sequence
  Description of Artificial Sequence: Synthetic oligonucleotide
aucuucggucuucuugucg

SEQ ID NO: 2905374 - RNA, 19 nt, Artificial Sequence
  Description of Artificial Sequence: Synthetic oligonucleotide
acagucucacuuccuggac

SEQ ID NO: 2905375 - RNA, 19 nt, Artificial Sequence
  Description of Artificial Sequence: Synthetic oligonucleotide
cugaauagaacagggagca

SEQ ID NO: 2905376 - RNA, 19 nt, Artificial Sequence
  Description of Artificial Sequence: Synthetic oligonucleotide
acugauuugccuacagaag

SEQ ID NO: 2905377 - RNA, 19 nt, Artificial Sequence
  Description of Artificial Sequence: Synthetic oligonucleotide
uguaacagucucacuuccu

SEQ ID NO: 2905378 - RNA, 19 nt, Artificial Sequence
  Description of Artificial Sequence: Synthetic oligonucleotide
agaaagauucaaguuuugu

SEQ ID NO: 2905379 - RNA, 19 nt, Artificial Sequence
  Description of Artificial Sequence: Synthetic oligonucleotide
ucacugauuugccuacaga

SEQ ID NO: 2905380 - RNA, 19 nt, Artificial Sequence
  Description of Artificial Sequence: Synthetic oligonucleotide
acugcuguaggucuuucaa

SEQ ID NO: 2905381 - RNA, 19 nt, Artificial Sequence
  Description of Artificial Sequence: Synthetic oligonucleotide
cacugauuugccuacagaa

SEQ ID NO: 2905382 - RNA, 19 nt, Artificial Sequence
  Description of Artificial Sequence: Synthetic oligonucleotide
ucugaucuuuuguaacagu

SEQ ID NO: 2905383 - RNA, 19 nt, Artificial Sequence
  Description of Artificial Sequence: Synthetic oligonucleotide
agucucacuuccuggaccu

SEQ ID NO: 2905384 - RNA, 19 nt, Artificial Sequence
  Description of Artificial Sequence: Synthetic oligonucleotide
ugggagaaagauucaaguu

SEQ ID NO: 2905385 - RNA, 19 nt, Artificial Sequence
  Description of Artificial Sequence: Synthetic oligonucleotide
aacagggagcagauuggac

SEQ ID NO: 2905386 - RNA, 19 nt, Artificial Sequence
  Description of Artificial Sequence: Synthetic oligonucleotide
cagggagcagauuggacag

SEQ ID NO: 2905387 - RNA, 19 nt, Artificial Sequence
  Description of Artificial Sequence: Synthetic oligonucleotide
agccuucggaacaagaaag

SEQ ID NO: 2905388 - RNA, 19 nt, Artificial Sequence
  Description of Artificial Sequence: Synthetic oligonucleotide
caaaucuccuggcacauca

SEQ ID NO: 2905389 - RNA, 19 nt, Artificial Sequence
  Description of Artificial Sequence: Synthetic oligonucleotide
ugccuugugcuaaaacaac

SEQ ID NO: 2905390 - RNA, 19 nt, Artificial Sequence
  Description of Artificial Sequence: Synthetic oligonucleotide
agaacagggagcagauugg

SEQ ID NO: 2905391 - RNA, 19 nt, Artificial Sequence
  Description of Artificial Sequence: Synthetic oligonucleotide
caacuuuugaaucguuguc

SEQ ID NO: 2905392 - RNA, 19 nt, Artificial Sequence
  Description of Artificial Sequence: Synthetic oligonucleotide
uaugacguuugcucuugca

SEQ ID NO: 2905393 - RNA, 19 nt, Artificial Sequence
  Description of Artificial Sequence: Synthetic oligonucleotide
gucuucuuuguguccacag

SEQ ID NO: 2905394 - RNA, 19 nt, Artificial Sequence
  Description of Artificial Sequence: Synthetic oligonucleotide
uuaucuguauggaggucaa

SEQ ID NO: 2905395 - RNA, 19 nt, Artificial Sequence
  Description of Artificial Sequence: Synthetic oligonucleotide
cucuguauuuugcuuauga

SEQ ID NO: 2905396 - RNA, 19 nt, Artificial Sequence
  Description of Artificial Sequence: Synthetic oligonucleotide
gcuaaaacaacuuuugaau

SEQ ID NO: 2905397 - RNA, 19 nt, Artificial Sequence
  Description of Artificial Sequence: Synthetic oligonucleotide
uuucaucagguuccaaauu

SEQ ID NO: 2905398 - RNA, 19 nt, Artificial Sequence
  Description of Artificial Sequence: Synthetic oligonucleotide
uauuuugcuuaugacguuu

SEQ ID NO: 2905399 - RNA, 19 nt, Artificial Sequence
  Description of Artificial Sequence: Synthetic oligonucleotide
aacugcuguaggucuuuca

SEQ ID NO: 2905400 - RNA, 19 nt, Artificial Sequence
  Description of Artificial Sequence: Synthetic oligonucleotide
cuucuucaacugcuguagg

SEQ ID NO: 2905401 - RNA, 19 nt, Artificial Sequence
  Description of Artificial Sequence: Synthetic oligonucleotide
cuuccuggaccuacuuggg

SEQ ID NO: 2905402 - RNA, 19 nt, Artificial Sequence
  Description of Artificial Sequence: Synthetic oligonucleotide
guauggaggucaauuuugc

SEQ ID NO: 2905403 - RNA, 19 nt, Artificial Sequence
  Description of Artificial Sequence: Synthetic oligonucleotide
uucucuguauuuugcuuau

SEQ ID NO: 2905404 - RNA, 19 nt, Artificial Sequence
  Description of Artificial Sequence: Synthetic oligonucleotide
gucacugauuugccuacag

SEQ ID NO: 2905405 - RNA, 19 nt, Artificial Sequence
  Description of Artificial Sequence: Synthetic oligonucleotide
cagucucacuuccuggacc

SEQ ID NO: 2905406 - RNA, 19 nt, Artificial Sequence
  Description of Artificial Sequence: Synthetic oligonucleotide
caaucaugguuuucugauc

SEQ ID NO: 2905407 - RNA, 19 nt, Artificial Sequence
  Description of Artificial Sequence: Synthetic oligonucleotide
uuugaaucguugucuccau

SEQ ID NO: 2905408 - RNA, 19 nt, Artificial Sequence
  Description of Artificial Sequence: Synthetic oligonucleotide
uuaugacguuugcucuugc

SEQ ID NO: 2905409 - RNA, 19 nt, Artificial Sequence
  Description of Artificial Sequence: Synthetic oligonucleotide
cuuaugacguuugcucuug

SEQ ID NO: 2905410 - RNA, 19 nt, Artificial Sequence
  Description of Artificial Sequence: Synthetic oligonucleotide
cuucucuguauuuugcuua

SEQ ID NO: 2905411 - RNA, 19 nt, Artificial Sequence
  Description of Artificial Sequence: Synthetic oligonucleotide
accuacuugggagaaagau

SEQ ID NO: 2905412 - RNA, 19 nt, Artificial Sequence
  Description of Artificial Sequence: Synthetic oligonucleotide
gccuacagaagaaucuucg

SEQ ID NO: 2905413 - RNA, 19 nt, Artificial Sequence
  Description of Artificial Sequence: Synthetic oligonucleotide
aucuguauggaggucaauu

SEQ ID NO: 2905414 - RNA, 19 nt, Artificial Sequence
  Description of Artificial Sequence: Synthetic oligonucleotide
acagcucuccucuuucuau

SEQ ID NO: 2905415 - RNA, 19 nt, Artificial Sequence
  Description of Artificial Sequence: Synthetic oligonucleotide
ugccuacagaagaaucuuc

SEQ ID NO: 2905416 - RNA, 19 nt, Artificial Sequence
  Description of Artificial Sequence: Synthetic oligonucleotide
uccagccuucggaacaaga

SEQ ID NO: 2905417 - RNA, 19 nt, Artificial Sequence
  Description of Artificial Sequence: Synthetic oligonucleotide
cuuucaaucaugguuuucu

SEQ ID NO: 2905418 - RNA, 19 nt, Artificial Sequence
  Description of Artificial Sequence: Synthetic oligonucleotide
ccuacagaagaaucuucgg

SEQ ID NO: 2905419 - RNA, 19 nt, Artificial Sequence
  Description of Artificial Sequence: Synthetic oligonucleotide
gagaaagauucaaguuuug

SEQ ID NO: 2905420 - RNA, 19 nt, Artificial Sequence
  Description of Artificial Sequence: Synthetic oligonucleotide
aaaucuccuggcacaucag

SEQ ID NO: 2905421 - RNA, 19 nt, Artificial Sequence
  Description of Artificial Sequence: Synthetic oligonucleotide
uuccuggaccuacuuggga

SEQ ID NO: 2905422 - RNA, 19 nt, Artificial Sequence
  Description of Artificial Sequence: Synthetic oligonucleotide
caaaauuaagcucuucuuu

SEQ ID NO: 2905423 - RNA, 19 nt, Artificial Sequence
  Description of Artificial Sequence: Synthetic oligonucleotide
ugaauagaacagggagcag

SEQ ID NO: 2905424 - RNA, 19 nt, Artificial Sequence
  Description of Artificial Sequence: Synthetic oligonucleotide
guccaaaucuccuggcaca

SEQ ID NO: 2905425 - RNA, 19 nt, Artificial Sequence
  Description of Artificial Sequence: Synthetic oligonucleotide
caucugaauagaacaggga

SEQ ID NO: 2905426 - RNA, 19 nt, Artificial Sequence
  Description of Artificial Sequence: Synthetic oligonucleotide
ggaccuacuugggagaaag

SEQ ID NO: 2905427 - RNA, 19 nt, Artificial Sequence
  Description of Artificial Sequence: Synthetic oligonucleotide
cuuuguguccacagcucuc

SEQ ID NO: 2905428 - RNA, 19 nt, Artificial Sequence
  Description of Artificial Sequence: Synthetic oligonucleotide
auuuugcuuaugacguuug

SEQ ID NO: 2905429 - RNA, 19 nt, Artificial Sequence
  Description of Artificial Sequence: Synthetic oligonucleotide
gugcuaaaacaacuuuuga

SEQ ID NO: 2905430 - RNA, 19 nt, Artificial Sequence
  Description of Artificial Sequence: Synthetic oligonucleotide
cuucuuuguguccacagcu

SEQ ID NO: 2905431 - RNA, 19 nt, Artificial Sequence
  Description of Artificial Sequence: Synthetic oligonucleotide
uggcacaucaggugucacu

SEQ ID NO: 2905432 - RNA, 19 nt, Artificial Sequence
  Description of Artificial Sequence: Synthetic oligonucleotide
caggugucacugauuugcc

SEQ ID NO: 2905433 - RNA, 19 nt, Artificial Sequence
  Description of Artificial Sequence: Synthetic oligonucleotide
ucucacuuccuggaccuac

SEQ ID NO: 2905434 - RNA, 19 nt, Artificial Sequence
  Description of Artificial Sequence: Synthetic oligonucleotide
agcuucuucaacugcugua

SEQ ID NO: 2905435 - RNA, 19 nt, Artificial Sequence
  Description of Artificial Sequence: Synthetic oligonucleotide
gugucacugauuugccuac

SEQ ID NO: 2905436 - RNA, 19 nt, Artificial Sequence
  Description of Artificial Sequence: Synthetic oligonucleotide
aggucaauuuugccuugug

SEQ ID NO: 2905437 - RNA, 19 nt, Artificial Sequence
  Description of Artificial Sequence: Synthetic oligonucleotide
uaggucuuucaaucauggu

SEQ ID NO: 2905438 - RNA, 19 nt, Artificial Sequence
  Description of Artificial Sequence: Synthetic oligonucleotide
uugaaucguugucuccauc

SEQ ID NO: 2905439 - RNA, 19 nt, Artificial Sequence
  Description of Artificial Sequence: Synthetic oligonucleotide
cuacagaagaaucuucggu

SEQ ID NO: 2905440 - RNA, 19 nt, Artificial Sequence
  Description of Artificial Sequence: Synthetic oligonucleotide
aucuuuuguaacagucuca

SEQ ID NO: 2905441 - RNA, 19 nt, Artificial Sequence
  Description of Artificial Sequence: Synthetic oligonucleotide
ggcacaucaggugucacug

SEQ ID NO: 2905442 - RNA, 19 nt, Artificial Sequence
  Description of Artificial Sequence: Synthetic oligonucleotide
gguuuucugaucuuuugua

SEQ ID NO: 2905443 - RNA, 19 nt, Artificial Sequence
  Description of Artificial Sequence: Synthetic oligonucleotide
gauucaaguuuugucuucu

SEQ ID NO: 2905444 - RNA, 19 nt, Artificial Sequence
  Description of Artificial Sequence: Synthetic oligonucleotide
uugccuacagaagaaucuu

SEQ ID NO: 2905445 - RNA, 19 nt, Artificial Sequence
  Description of Artificial Sequence: Synthetic oligonucleotide
aauccagccuucggaacaa

SEQ ID NO: 2905446 - RNA, 19 nt, Artificial Sequence
  Description of Artificial Sequence: Synthetic oligonucleotide
aucaggugucacugauuug

SEQ ID NO: 2905447 - RNA, 19 nt, Artificial Sequence
  Description of Artificial Sequence: Synthetic oligonucleotide
gguuccaaauucuuuaaau

SEQ ID NO: 2905448 - RNA, 19 nt, Artificial Sequence
  Description of Artificial Sequence: Synthetic oligonucleotide
aggugucacugauuugccu

SEQ ID NO: 2905449 - RNA, 19 nt, Artificial Sequence
  Description of Artificial Sequence: Synthetic oligonucleotide
cacuuccuggaccuacuug

SEQ ID NO: 2905450 - RNA, 19 nt, Artificial Sequence
  Description of Artificial Sequence: Synthetic oligonucleotide
ggaacaagaaaguccaaau

SEQ ID NO: 2905451 - RNA, 19 nt, Artificial Sequence
  Description of Artificial Sequence: Synthetic oligonucleotide
uugcucuugcagugauuug

SEQ ID NO: 2905452 - RNA, 19 nt, Artificial Sequence
  Description of Artificial Sequence: Synthetic oligonucleotide
ucuuucaaucaugguuuuc

SEQ ID NO: 2905453 - RNA, 19 nt, Artificial Sequence
  Description of Artificial Sequence: Synthetic oligonucleotide
ggugucacugauuugccua

SEQ ID NO: 2905454 - RNA, 19 nt, Artificial Sequence
  Description of Artificial Sequence: Synthetic oligonucleotide
gggagaaagauucaaguuu

SEQ ID NO: 2905455 - RNA, 19 nt, Artificial Sequence
  Description of Artificial Sequence: Synthetic oligonucleotide
ccacaguaacaaaauuaag

SEQ ID NO: 2905456 - RNA, 19 nt, Artificial Sequence
  Description of Artificial Sequence: Synthetic oligonucleotide
gaaucguugucuccauccu

SEQ ID NO: 2905457 - RNA, 19 nt, Artificial Sequence
  Description of Artificial Sequence: Synthetic oligonucleotide
caauuuugccuugugcuaa

SEQ ID NO: 2905458 - RNA, 19 nt, Artificial Sequence
  Description of Artificial Sequence: Synthetic oligonucleotide
aucuccuggcacaucaggu

SEQ ID NO: 2905459 - RNA, 19 nt, Artificial Sequence
  Description of Artificial Sequence: Synthetic oligonucleotide
gaacagggagcagauugga

SEQ ID NO: 2905460 - RNA, 19 nt, Artificial Sequence
  Description of Artificial Sequence: Synthetic oligonucleotide
uccaaaucuccuggcacau

SEQ ID NO: 2905461 - RNA, 19 nt, Artificial Sequence
  Description of Artificial Sequence: Synthetic oligonucleotide
uucuuuaaaucagcuucuu

SEQ ID NO: 2905462 - RNA, 19 nt, Artificial Sequence
  Description of Artificial Sequence: Synthetic oligonucleotide
uugucuucuuuguguccac

SEQ ID NO: 2905463 - RNA, 19 nt, Artificial Sequence
  Description of Artificial Sequence: Synthetic oligonucleotide
ugucuucuuuguguccaca

SEQ ID NO: 2905464 - RNA, 19 nt, Artificial Sequence
  Description of Artificial Sequence: Synthetic oligonucleotide
cuucaacugcuguaggucu

SEQ ID NO: 2905465 - RNA, 19 nt, Artificial Sequence
  Description of Artificial Sequence: Synthetic oligonucleotide
caucuccaacuucauccac

SEQ ID NO: 2905466 - RNA, 19 nt, Artificial Sequence
  Description of Artificial Sequence: Synthetic oligonucleotide
ucggucuucuugucguuuu

SEQ ID NO: 2905467 - RNA, 19 nt, Artificial Sequence
  Description of Artificial Sequence: Synthetic oligonucleotide
uuguguccacagcucuccu

SEQ ID NO: 2905468 - RNA, 19 nt, Artificial Sequence
  Description of Artificial Sequence: Synthetic oligonucleotide
guguccacagcucuccucu

SEQ ID NO: 2905469 - RNA, 19 nt, Artificial Sequence
  Description of Artificial Sequence: Synthetic oligonucleotide
uccuggcacaucagguguc

SEQ ID NO: 2905470 - RNA, 19 nt, Artificial Sequence
  Description of Artificial Sequence: Synthetic oligonucleotide
ucucuguauuuugcuuaug

SEQ ID NO: 2905471 - RNA, 19 nt, Artificial Sequence
  Description of Artificial Sequence: Synthetic oligonucleotide
gcuguaggucuuucaauca

SEQ ID NO: 2905472 - RNA, 19 nt, Artificial Sequence
  Description of Artificial Sequence: Synthetic oligonucleotide
caucaggugucacugauuu

SEQ ID NO: 2905473 - RNA, 19 nt, Artificial Sequence
  Description of Artificial Sequence: Synthetic oligonucleotide
ugucacugauuugccuaca

SEQ ID NO: 2905474 - RNA, 19 nt, Artificial Sequence
  Description of Artificial Sequence: Synthetic oligonucleotide
ucggaacaagaaaguccaa

SEQ ID NO: 2905475 - RNA, 19 nt, Artificial Sequence
  Description of Artificial Sequence: Synthetic oligonucleotide
cagguuccaaauucuuuaa

SEQ ID NO: 2905476 - RNA, 19 nt, Artificial Sequence
  Description of Artificial Sequence: Synthetic oligonucleotide
aucaugguuuucugaucuu

SEQ ID NO: 2905477 - RNA, 19 nt, Artificial Sequence
  Description of Artificial Sequence: Synthetic oligonucleotide
gaagaaucuucggucuucu

SEQ ID NO: 2905478 - RNA, 19 nt, Artificial Sequence
  Description of Artificial Sequence: Synthetic oligonucleotide
agcucuccucuuucuauuu

SEQ ID NO: 2905479 - RNA, 19 nt, Artificial Sequence
  Description of Artificial Sequence: Synthetic oligonucleotide
cagccuucggaacaagaaa

SEQ ID NO: 2905480 - RNA, 19 nt, Artificial Sequence
  Description of Artificial Sequence: Synthetic oligonucleotide
ucaacugcuguaggucuuu

SEQ ID NO: 2905481 - RNA, 19 nt, Artificial Sequence
  Description of Artificial Sequence: Synthetic oligonucleotide
cuugugcuaaaacaacuuu

SEQ ID NO: 2905482 - RNA, 19 nt, Artificial Sequence
  Description of Artificial Sequence: Synthetic oligonucleotide
uugucuccauccucuucau

SEQ ID NO: 2905483 - RNA, 19 nt, Artificial Sequence
  Description of Artificial Sequence: Synthetic oligonucleotide
cuugcagugauuugccauu

SEQ ID NO: 2905484 - RNA, 19 nt, Artificial Sequence
  Description of Artificial Sequence: Synthetic oligonucleotide
gauuugccuacagaagaau

SEQ ID NO: 2905485 - RNA, 19 nt, Artificial Sequence
  Description of Artificial Sequence: Synthetic oligonucleotide
ggaggucaauuuugccuug

SEQ ID NO: 2905486 - RNA, 19 nt, Artificial Sequence
  Description of Artificial Sequence: Synthetic oligonucleotide
cucuugcagugauuugcca

SEQ ID NO: 2905487 - RNA, 19 nt, Artificial Sequence
  Description of Artificial Sequence: Synthetic oligonucleotide
uucggucuucuugucguuu

SEQ ID NO: 2905488 - RNA, 19 nt, Artificial Sequence
  Description of Artificial Sequence: Synthetic oligonucleotide
ccuucggaacaagaaaguc

SEQ ID NO: 2905489 - RNA, 19 nt, Artificial Sequence
  Description of Artificial Sequence: Synthetic oligonucleotide
cuguauggaggucaauuuu

SEQ ID NO: 2905490 - RNA, 19 nt, Artificial Sequence
  Description of Artificial Sequence: Synthetic oligonucleotide
acguuugcucuugcaguga

SEQ ID NO: 2905491 - RNA, 19 nt, Artificial Sequence
  Description of Artificial Sequence: Synthetic oligonucleotide
cagugauuugccauugcuu

SEQ ID NO: 2905492 - RNA, 19 nt, Artificial Sequence
  Description of Artificial Sequence: Synthetic oligonucleotide
uaucuguauggaggucaau

SEQ ID NO: 2905493 - RNA, 19 nt, Artificial Sequence
  Description of Artificial Sequence: Synthetic oligonucleotide
cuguaggucuuucaaucau

SEQ ID NO: 2905494 - RNA, 19 nt, Artificial Sequence
  Description of Artificial Sequence: Synthetic oligonucleotide
cuccuggcacaucaggugu

SEQ ID NO: 2905495 - RNA, 19 nt, Artificial Sequence
  Description of Artificial Sequence: Synthetic oligonucleotide
caugaacuucucuguauuu

SEQ ID NO: 2905496 - RNA, 19 nt, Artificial Sequence
  Description of Artificial Sequence: Synthetic oligonucleotide
guauuuugcuuaugacguu

SEQ ID NO: 2905497 - RNA, 19 nt, Artificial Sequence
  Description of Artificial Sequence: Synthetic oligonucleotide
guaacaaaauuaagcucuu

SEQ ID NO: 2905498 - RNA, 19 nt, Artificial Sequence
  Description of Artificial Sequence: Synthetic oligonucleotide
ccagccuucggaacaagaa

SEQ ID NO: 2905499 - RNA, 19 nt, Artificial Sequence
  Description of Artificial Sequence: Synthetic oligonucleotide
cacaucaggugucacugau

SEQ ID NO: 2905500 - RNA, 19 nt, Artificial Sequence
  Description of Artificial Sequence: Synthetic oligonucleotide
uggaccuacuugggagaaa

SEQ ID NO: 2905501 - RNA, 19 nt, Artificial Sequence
  Description of Artificial Sequence: Synthetic oligonucleotide
gaccuacuugggagaaaga

SEQ ID NO: 2905502 - RNA, 19 nt, Artificial Sequence
  Description of Artificial Sequence: Synthetic oligonucleotide
acaucaggugucacugauu

SEQ ID NO: 2905503 - RNA, 19 nt, Artificial Sequence
  Description of Artificial Sequence: Synthetic oligonucleotide
gugauuugccauugcuuuu

SEQ ID NO: 2905504 - RNA, 19 nt, Artificial Sequence
  Description of Artificial Sequence: Synthetic oligonucleotide
caucagguuccaaauucuu

SEQ ID NO: 2905505 - RNA, 19 nt, Artificial Sequence
  Description of Artificial Sequence: Synthetic oligonucleotide
cauccacaguaacaaaauu

SEQ ID NO: 2905506 - RNA, 19 nt, Artificial Sequence
  Description of Artificial Sequence: Synthetic oligonucleotide
cacagcucuccucuuucua

SEQ ID NO: 2905507 - RNA, 19 nt, Artificial Sequence
  Description of Artificial Sequence: Synthetic oligonucleotide
gaggucaauuuugccuugu

SEQ ID NO: 2905508 - RNA, 19 nt, Artificial Sequence
  Description of Artificial Sequence: Synthetic oligonucleotide
agggagcagauuggacaga

SEQ ID NO: 2905509 - RNA, 19 nt, Artificial Sequence
  Description of Artificial Sequence: Synthetic oligonucleotide
auccagccuucggaacaag

SEQ ID NO: 2905510 - RNA, 19 nt, Artificial Sequence
  Description of Artificial Sequence: Synthetic oligonucleotide
caacugcuguaggucuuuc

SEQ ID NO: 2905511 - RNA, 19 nt, Artificial Sequence
  Description of Artificial Sequence: Synthetic oligonucleotide
cuggcacaucaggugucac

SEQ ID NO: 2905512 - RNA, 19 nt, Artificial Sequence
  Description of Artificial Sequence: Synthetic oligonucleotide
ccuggaccuacuugggaga

SEQ ID NO: 2905513 - RNA, 19 nt, Artificial Sequence
  Description of Artificial Sequence: Synthetic oligonucleotide
gucuuucaaucaugguuuu

SEQ ID NO: 2905514 - RNA, 19 nt, Artificial Sequence
  Description of Artificial Sequence: Synthetic oligonucleotide
ggccaugaacuucucugua

SEQ ID NO: 2905515 - RNA, 19 nt, Artificial Sequence
  Description of Artificial Sequence: Synthetic oligonucleotide
gccaugaacuucucuguau

SEQ ID NO: 2905516 - RNA, 19 nt, Artificial Sequence
  Description of Artificial Sequence: Synthetic oligonucleotide
cuggaccuacuugggagaa

SEQ ID NO: 2905517 - RNA, 19 nt, Artificial Sequence
  Description of Artificial Sequence: Synthetic oligonucleotide
gccuugugcuaaaacaacu

SEQ ID NO: 2905518 - RNA, 19 nt, Artificial Sequence
  Description of Artificial Sequence: Synthetic oligonucleotide
ccuacuugggagaaagauu

SEQ ID NO: 2905519 - RNA, 19 nt, Artificial Sequence
  Description of Artificial Sequence: Synthetic oligonucleotide
cagcuucuucaacugcugu

SEQ ID NO: 2905520 - RNA, 19 nt, Artificial Sequence
  Description of Artificial Sequence: Synthetic oligonucleotide
gcuuaugacguuugcucuu

SEQ ID NO: 2905521 - RNA, 19 nt, Artificial Sequence
  Description of Artificial Sequence: Synthetic oligonucleotide
ccuugugcuaaaacaacuu

SEQ ID NO: 2905522 - RNA, 19 nt, Artificial Sequence
  Description of Artificial Sequence: Synthetic oligonucleotide
cagaagaaucuucggucuu

SEQ ID NO: 2905523 - RNA, 19 nt, Artificial Sequence
  Description of Artificial Sequence: Synthetic oligonucleotide
cggaacaagaaaguccaaa

SEQ ID NO: 2905524 - RNA, 19 nt, Artificial Sequence
  Description of Artificial Sequence: Synthetic oligonucleotide
ccaugaacuucucuguauu

SEQ ID NO: 2905525 - RNA, 19 nt, Artificial Sequence
  Description of Artificial Sequence: Synthetic oligonucleotide
gccuucggaacaagaaagu

SEQ ID NO: 2905526 - RNA, 19 nt, Artificial Sequence
  Description of Artificial Sequence: Synthetic oligonucleotide
ggagcagauuggacagaaa

SEQ ID NO: 2905527 - RNA, 19 nt, Artificial Sequence
  Description of Artificial Sequence: Synthetic oligonucleotide
ccuggcacaucagguguca

SEQ ID NO: 2905528 - RNA, 19 nt, Artificial Sequence
  Description of Artificial Sequence: Synthetic oligonucleotide
cuucggucuucuugucguu

SEQ ID NO: 2905529 - RNA, 19 nt, Artificial Sequence
  Description of Artificial Sequence: Synthetic oligonucleotide
guuugcucuugcagugauu

SEQ ID NO: 2905530 - RNA, 19 nt, Artificial Sequence
  Description of Artificial Sequence: Synthetic oligonucleotide
gucucacuuccuggaccua

SEQ ID NO: 2905531 - RNA, 19 nt, Artificial Sequence
  Description of Artificial Sequence: Synthetic oligonucleotide
cguuugcucuugcagugau

SEQ ID NO: 2905532 - RNA, 19 nt, Artificial Sequence
  Description of Artificial Sequence: Synthetic oligonucleotide
aguauuacucuucaaggcg

SEQ ID NO: 2905533 - RNA, 19 nt, Artificial Sequence
  Description of Artificial Sequence: Synthetic oligonucleotide
uaugauuucuugcuucucg

SEQ ID NO: 2905534 - RNA, 19 nt, Artificial Sequence
  Description of Artificial Sequence: Synthetic oligonucleotide
gaugcagguguucugaugg

SEQ ID NO: 2905535 - RNA, 19 nt, Artificial Sequence
  Description of Artificial Sequence: Synthetic oligonucleotide
uguuucauuguucuguugc

SEQ ID NO: 2905536 - RNA, 19 nt, Artificial Sequence
  Description of Artificial Sequence: Synthetic oligonucleotide
uuuggaacuagacacauua

SEQ ID NO: 2905537 - RNA, 19 nt, Artificial Sequence
  Description of Artificial Sequence: Synthetic oligonucleotide
aaaggaagugccugaaguc

SEQ ID NO: 2905538 - RNA, 19 nt, Artificial Sequence
  Description of Artificial Sequence: Synthetic oligonucleotide
uguucuacagguaaccagc

SEQ ID NO: 2905539 - RNA, 19 nt, Artificial Sequence
  Description of Artificial Sequence: Synthetic oligonucleotide
aaggaagugccugaagucc

SEQ ID NO: 2905540 - RNA, 19 nt, Artificial Sequence
  Description of Artificial Sequence: Synthetic oligonucleotide
ucuacagguaaccagcagc

SEQ ID NO: 2905541 - RNA, 19 nt, Artificial Sequence
  Description of Artificial Sequence: Synthetic oligonucleotide
ucuugcuucucgauuaagg

SEQ ID NO: 2905542 - RNA, 19 nt, Artificial Sequence
  Description of Artificial Sequence: Synthetic oligonucleotide
uuccuugaggagcaaaugg

SEQ ID NO: 2905543 - RNA, 19 nt, Artificial Sequence
  Description of Artificial Sequence: Synthetic oligonucleotide
aacuagacacauuaugacu

SEQ ID NO: 2905544 - RNA, 19 nt, Artificial Sequence
  Description of Artificial Sequence: Synthetic oligonucleotide
uguugcauguucuacaggu

SEQ ID NO: 2905545 - RNA, 19 nt, Artificial Sequence
  Description of Artificial Sequence: Synthetic oligonucleotide
uaugacuuggguuugugga

SEQ ID NO: 2905546 - RNA, 19 nt, Artificial Sequence
  Description of Artificial Sequence: Synthetic oligonucleotide
uucagguuggcuuuguuug

SEQ ID NO: 2905547 - RNA, 19 nt, Artificial Sequence
  Description of Artificial Sequence: Synthetic oligonucleotide
uccuugaggagcaaauggg

SEQ ID NO: 2905548 - RNA, 19 nt, Artificial Sequence
  Description of Artificial Sequence: Synthetic oligonucleotide
ugccuuuggaacuagacac

SEQ ID NO: 2905549 - RNA, 19 nt, Artificial Sequence
  Description of Artificial Sequence: Synthetic oligonucleotide
uggaacuagacacauuaug

SEQ ID NO: 2905550 - RNA, 19 nt, Artificial Sequence
  Description of Artificial Sequence: Synthetic oligonucleotide
uuugcuucuuuaaaacuca
